United States Patent Application Publication US 2015/0052636 A1 - sequence listing, part 13

SEQ ID NO: 43378 - DNA, 715 bp, Manihot esculenta
  Intron number 1 from transcript cassava4.1_002468m (locus cassava4.1_002468m.g) derived from phytozome v7.0 (chr-ID scaffold12413; pos 6238 to 6952)
tttactttcttgcttctcctttaacctgcaaaaaggttttgttttgtttttgttttgtctttctttcttctatgcccttttctttaatgatattttgctgttttgggatctttgtgtttgttgctatttagggtttcagatttacgatttggctttgttgcattaagtttagatgatgttggatccttttagggtttgtattcgtttcataggatgattctcttttgaatttaacgagtatatgtggttaatctgattctttcgtttctcattaggcatcgggtctatgtttctctaatgctgtgtgaatcgagaatgatagagattaattttgtatttatcttacatatatgagcgtttcagtttagctgaaagttactttgtgaatctgattgtttagagatttacagagctttgcttttgtttctgtttgtttagttttgataattatttagttgctttactttgtgttaggtgccacagttttaaggatttaaaatcggaatctgagcaaataactcaacccttttctgggataggagccttagcgtaatttaatgtagtagtagttttagtagtctttttgtcagttcctcaggaaggaagttgaacttgtcctgaatttgctacacatagtataatttaatgtatatggaattagtttcttccatcagttgataatactcatttttagtttctgtcaacagggaagtga

SEQ ID NO: 43379 - DNA, 252 bp, Manihot esculenta
  Intron number 2 from transcript cassava4.1_002468m (locus cassava4.1_002468m.g) derived from phytozome v7.0 (chr-ID scaffold12413; pos 7021 to 7272)
attgcttgaatccaaagtgtgggtttcgtcatccagtaagtatcttcttccttttttttggacctacaattttcttgctatattccttttatacctttttgtggtgcccttaatttgttgtttatttttattttttttaacgtggatcagaaaatcagtaatttctttttttgtcagtatacatttgcttgtttatattatattttcaatcttatagattttgaatattaatattctcatttcagccacttg

SEQ ID NO: 43380 - DNA, 356 bp, Manihot esculenta
  Intron number 2 from transcript cassava4.1_031182m (locus cassava4.1_031182m.g) derived from phytozome v7.0 (chr-ID scaffold04151; pos 314563 to 314918)
gtattaatcccaaagacaatcatatctctttccaggttaatttccaattaattttatttaaacttatgttgactgcatattaacattgatgaattgaaaatttgattaaatttggtgtttgttttagtcatcagacatacaaattttgggtatgaacagaagaaccaagacgacatctctggttcaggctttcagccactaaccggtggctgttttgttttgttagagaaattctactaattaacaaaaatggaaactaaaaaagaagaagtcattctagcgcaaacttaggtgaagcctgataatttaatgcctaagaaacttgggtggttgttgaatgttaacagtgtgagagc

SEQ ID NO: 43381 - DNA, 729 bp, Manihot esculenta
  Intron number 1 from transcript cassava4.1_015834m (locus cassava4.1_015834m.g) derived from phytozome v7.0 (chr-ID scaffold03332; pos 1177209 to 1177937)
ccacaccttcaattacctcgttgaaaacggcttcagtaagattctcctttctaccaatgcccacacgcctttaacctcatttctacaagttttgcgcgcgcgactggtgtgggtttatttgaattctgatatagatcaactattaatgtttcattggaaacgtcttccctgatttgtttacatgtgccgtgatacctttgtttcctttttttttttgtttatttagatatcgagtttgaacagttttattattcttttgggctttttttgtgtcatttcggggatctgcgcgtatgacaatgtgattttattggaattggacgtttatgcttttattgattatgatattagaggctgcatgtgttttgaattttgacatagacaaggattaccgttttccctaaattgttccgttggttattatttcagctgagtcgatcttacatcgactactgactaatggaaagttttttattgatatttttcattgtttactagttttttaaggaaatagttttgcaatttcgctctgtttggttgtttaatggaaaaggattattggttttggtttcatggtgcttgatttaattgaagtaattacaacccagggcttcgaaactataatgcttcattgccttaacatagtaacgaaaattttgtattgagtctgctcgtttatatttggacggtgcagcttactgtgtggttgcagttgaatctgctggcaga

SEQ ID NO: 43382 - DNA, 741 bp, Manihot esculenta
  Intron number 1 from transcript cassava4.1_020999m (locus cassava4.1_020999m.g) derived from phytozome v7.0 (chr-ID scaffold00341; pos 113798 to 114538 reverse strand)
aattatcaacaggagaagattgtgacgttagtttcttttaaaactgactaattattttgaaatgtttttcttccctataattacttcttgctggcgttataagcttcagtctgagatattattatgagatttgagtaacaattaactgagtaacaattaactatcatgtgagcacaaagaaaatgaatattagcaggtgcaggagtaaaagagtcaccatcagaaatgttaaatttagaaagcaaatcagcagtatagcaactctaagatagcactttcaatataattttattttcgtttagtgacagaaaatcaccctttcattttgaaaataaaattctagtcaaacctttctattgtggcatcactgctgctaccttgttcagacatgcaagtggtggaatagaccaccactagagcgtccaagtatgaggcatcgcatgtaattacaatacattatgtttttgcaattttcgttatagttttggctgcttgtatcacagtcagtttgcctttctcccttgcttccaacataattaacatttcattggattgaaacttatagcatctaaatttgagtttgattttgagattttctataattcttgggcacctttaacatatcttgtgattgttttgacttatgatttttcaacttaagtggatcgtattgagtcactattcttgttgataatgtgttcttcaggtttcaggatcagaagtcagagaagagtactggac

SEQ ID NO: 43383 - DNA, 755 bp, Manihot esculenta
  Intron number 1 from transcript cassava4.1_016838m (locus cassava4.1_016838m.g) derived from phytozome v7.0 (chr-ID scaffold03614; pos 63361 to 64115)
ttgtgcttgaaatactcaaacaccaaactattaaggtgtggatcatttttctgatcctttgtcatatttctttaatcagtatggaattgtcatggaacatatgatagtgtggcatggatcatttttcttttcttttgtcatttttctttaatcagtgtggaactgtccgttgtgaaatatataatattgtgccatgaggtttccgatgatgtggctagtgcaataaaggaaagccaaaggaaattcctggcccatattaacaggatgtttcaaaagtcagcaaggacttgcaatgtcttgcagcttcttgatctccattaaccaaatcaatgtgaaactgagtaataatacccagaaagctgactggttatttgatttgggggtcttagcagaaacctctggtaagatgggctagatggataatggaaaattttggactttttctttttctttttccctatcctaaatgttgattaacattttagatcatggagttcctgtccttggcttggtgtattgcaacttaatgaacaggctattgacaataaataacaagaattaaatctttttagagatgggccctgttcttgttaggttttcctgttcttttgtggggcagggctgcagacagggatgatgcatggggactggggagtagaaaatttcaccattttgcatttgatacctgtatttgcatcttttatgagcagagtctcctatttgttttcagatcaatttaactgttggaaacggca

SEQ ID NO: 43384 - DNA, 988 bp, Manihot esculenta
  Intron number 1 from transcript cassava4.1_003288m (locus cassava4.1_003288m.g) derived from phytozome v7.0 (chr-ID scaffold01895; pos 113744 to 114731 reverse strand)
gcaattccctgtccacacttttcaggtatattttgtttattctaaatctgttaatttgttcagtttataagagaaacgtgagtttgtagttttatggggttttctttttctagactaggtagcttgtgtactgatagcggaagccattgcacagttattgtgctttctccgtcgccatcatgtataattttctcctaattttgtatatggttggatcatggatgtgctttacttttttgcatttaattaggtgatgttgcttttttaaaaaaatttattgtatagcgctgataaaattaagcgcgaatttttaatttatttatgtagttttttgtaatttgtgtttgatgttgatggcatctgtatgcgtgatatgattcgttgaactttttaacttgagagatttgagcaacccaagattgaaaatgacttgtagaaagcttttgaaatgaaccagtgtttcattctaacagtaattattgactttgttaacaattgcttctttcccgagacaaacgtgttcatgaactgaaaatgaaattttgattgtggttgtgcttttgctccaattaaaacatggagctcaaaagccatatctacacagtttcttgttttgttaacaggttggaaaaggaaattaatttgcataaggatggccctacttgatttcttgtgaaagatgtgaagtcacaatatagttggtagtcactcttctggggtttagatcactctccttaactgtctaaggaaaaagaaaaaaaaagaacacaaacatgggagatgacaaaacaagatgtttaattattagtcaacacatatgttttcccaaaaaattactatacttgaaggtttaatgtttttgggagttctgggaacaaatgtgatgatttcctgcctttttatcattgtgaaaatcaatatactgattttttttttcttttcatggtgcacagattgtggcaataacagttttcttcttgctatctgt

SEQ ID NO: 43385 - DNA, 914 bp, Manihot esculenta
  Intron number 4 from transcript cassava4.1_002037m (locus cassava4.1_002037m.g) derived from phytozome v7.0 (chr-ID scaffold09120; pos 476915 to 477828 reverse strand)
actggggtagcttttaactcatcccattgtaacaagtgagttctactcctttgttaaccctctttctctatttaacacaaactattgcttttgtttaaattaaagggagaaaagatgagtgattttttatgattggcttgtgaaaaagcaaatctaccagccctactgggttgaaaatcagcataaaatattacatattcttgtgtctcaatggtggctatggtccaaagtagatgtcattttcaagtgaccataaattcacaacttgcccatatggaatcttggaatttttcatcatttaacagagagaaaagagtgaagctaaaactatagagcataatcatttcagttccacgttagttaaaccggggagaagataccatagagggttgaaaataaaagataccttatcactttaggttactgttcttgaacagatttgcctgggatttttctaagaattcaacgatgtcatttcttttgattgatgacttcaaatgggccggcaccctgccctagattatttgcttctctgaaatcgattgttttggaaggttggtcccagttttgtcttcttttcattgtcttgtgaactctttttatccttccctttaccctattcgttttagcatttgactctatcagagttcatctgtctactctagaatttagccccacaaaggattttgattgatgggtttcttctaaagttattgatccttccttctattttgctagaagcgtaaagataccagttaatgacttttctttttggaggttttcaaggcttttatgtaggaatcacgagctttattattcattaatagtgagatttgaatataggatgtaacatatgcaatacgacgaacattttcgcaggaaaattgtcggagctagatactacattaagggtt

SEQ ID NO: 43386 - DNA, 1028 bp, Manihot esculenta
  Intron number 3 from transcript cassava4.1_005454m (locus cassava4.1_005454m.g) derived from phytozome v7.0 (chr-ID scaffold07519; pos 233168 to 234195)
atatctgtgcggcttccaatcattgaatctcaaaggttattcctcaactttattgtcatagcatgtactttcttgcaattggtgttattccatcatatatatacatttgtcttagttgtgatgctttcttagattagtggacgtcaaggcttaattgggattggttagggtgcacagtaaatttaggttgcattaatgtggctagatttatcttgaaagaatgggaccccatattggtggatatttgtaagataaaagggcaattggagaactgatcccttaaaaagggcaattgatactcaacaatcacttcactttagaaacaagtttaactcattaaataaacagaaggttttgattactatgatattcaatttagaaaactcccaattttgtagtatatttttttttgttctctaaatggaagaaaattgatgcttgcggatgaggaaacttaaaattgcatctgaattcttagagtggtgtataaattgcacattatgaccatgaaatcaatgttatagagaggattatggattgtgcattatttcatcaaggaataggcttgcttgaaaactcatttcccctagacgagttaatgaatctctattccaatctagtttgttcccattatatggatcatttttctctatttagctcaatttagtgttccatctccctatgcaagagaaataaaaattatggataatgaaagcggaaaactaactgttgtaaatactacatcatgcatatccacttgaggaaatgggattgaaggagtgcatatatattagtagtatctgcttgtgttgtttgatagaagtaccatggtcactcaacattgtatcatgtgaaagcttgcacttaatatgtcccaggctcctgtattgttacttaatttgtttaactcatcagcatttaatatttataaaccgatatacattagaacctccataacaactcaaagttaagaacttcactctcttttagagatttgactgtttgaaatgtcaaattcacttcaggga

SEQ ID NO: 43387 - DNA, 942 bp, Manihot esculenta
  Intron number 1 from transcript cassava4.1_014787m (locus cassava4.1_014787m.g) derived from phytozome v7.0 (chr-ID scaffold11110; pos 200237 to 201178 reverse strand)
aactcctgctgctcctcccgtttcgaagaggcgaggtgaatccgtcgaccgtgtacttagcctttgctcttttatctgtgttgcttgtttgatctgttcactgtggcttctgtagggttttgatttaatctcccattctttcattctcagtaattctgtgaaattatgcatccgttgttagggaaatagtttaatagttaattttagtaatgcgtatgtcaatgtggctatgcgtatgtcaatgtggctatgagttaagattatctctagctactagatccatggatgggttacttgttggttttatggcgtcgctacttttgatgattaaaatcaatacatgaatccctttgagatcgaatttctattgttaactatgttcaaacttcagattactaaaatgactattttgatattcttttagtcttgcattttctggaatgcttaggatgtgccattgtcgacgatcatgttttcattctgaagtttgaaatttgttgttttgtttaacaacataattggattttctttctcggttgcggtgacccatatattattctccctccttgttgtttttgaatactattaatttacttgactggtctgtttgtagcttctacatctcccgactcatttagcaaacaggaaatgtccttctccctgctgtttttgtcagcatactccctcttcactgcttacttagtgcatcatattgcatgaatgagtcatggaattttcgttatttaaaactttttctgttactgataagggaaggttataatgtctatgttctctcgttcagttttatgattgatgatcacctctctctcgtggaagaggaataagttgtcatctgagcctttaatgtgttgagttttagattatgtttttcttggttttaattctgctaccttggtttgttttgtttgttcatgaccagaa

SEQ ID NO: 43388 - DNA, 783 bp, Manihot esculenta
  Intron number 2 from transcript cassava4.1_017095m (locus cassava4.1_017095m.g) derived from phytozome v7.0 (chr-ID scaffold07519; pos 383278 to 384060)
gaaaatactacctaggttttgaggtatgctctctttctctccacatgtatgtgcacagcattgagaggatatcatgttctaatctaccattatagaaatacttgattggcagaaaccccttttgtgcgagtcttgacttaattttgcgtagcatttttctttataatttcacaacactagaacaatggacatccatattcaatccgctagcaactatttccttgaaatatgataggaactcctcagcctagtcatgaacatttctctcatgccaattgggtgtaatgcttattgctagcattccatatgaacagtccattcccgttttctaatgtggcaatgatatcatatttatgtctgctttgcactgatcacgaatgactcttaacacatgcaaaatcaaagctttctgcccagcaaggcagaaactatcattcttttctcgaaattatcttaattgtaagatagaaatggatgatttgtgtttggtagcgtttgcaaacctttacctggactttaatcctggggtagatagttggaatcgtatacagattagatagatttccaggctttgacaactttcataaaaccatctactgcaacactctaaaaacttggtgaccgtaggtacattccacttagtttttttttttttgttacttttacttgctactatcataagtatgaatactttttttcactggcatgtatcaaaatttttcttattgacttatttccctttacaattcctcttgcagtgcccagatcactttgttgtgggtt

SEQ ID NO: 43389 - DNA, 308 bp, Manihot esculenta
  Intron number 2 from transcript cassava4.1_026184m (locus cassava4.1_026184m.g) derived from phytozome v7.0 (chr-ID scaffold09876; pos 862449 to 862756)
ataggatcaaagaattaccaaatcccaatttcaatgtgcgcctcttctaactttcgatgattgttatatccttttggtgattgaattttgctgtataatcaacctcatatatgagtttcttgtcaattagggttcaatggttttgattctgtcggacattttagaattgttattttgcgttcttgtgttcttttcataattattacggttcttagcctttagcttaatgggaatttatgtttttgatgtattgatttcaggatgatgattcagtatgatctttatttttttcccccttgaggcaggaa

SEQ ID NO: 43390 - DNA, 750 bp, Manihot esculenta
  Intron number 2 from transcript cassava4.1_015588m (locus cassava4.1_015588m.g) derived from phytozome v7.0 (chr-ID scaffold08057; pos 40409 to 41158 reverse strand)
gctccttgggactgtggattttgaagatattggaggtataaaacagctttttctttgtcttttttgttttgcaaatcaatttttgtgattgtattggaaatttttatggttttactggaattgggtttttgaagctctgcaaatttaccctatagttgctgtttattttgattcctaattgttgataatttctatttattatggttaaattctgtcaattcttgtgcagttatcaacttctatatattgcctatgcttaatcatttcaccttgagaagggccctattatatatttttgtgcctacaactcactgaaatggattggcaaggcatgtttgggaattctctggtgatcaagaccccgcaaatacctactgacaaaagaaaatctgtttgtacagttttctttttaattgctcagatgccaaatagtattggcatgtttactgaaaaggggatttaaaaagtaacaattgtaattttcttttggcgcatttataagcactcaattttagaaataagattttcatattgcagcaaatctttcaaggaaaatgcaaagaatactctgctttactttatttttgccatgtaaaaaaagaagaatcaaggttttgagacatttgagctggagaaattgtcaataaagggaagataatgtttcttctccatgttcattttctaaatttggttttctcaatgattgtattggcagaaactcttgaaccagaagtgaaaattcttagtctg

SEQ ID NO: 43391 - DNA, 626 bp, Manihot esculenta
  Intron number 1 from transcript cassava4.1_008102m (locus cassava4.1_008102m.g) derived from phytozome v7.0 (chr-ID scaffold06859; pos 4787 to 5412)
tagttgtcaaggagccttcgactggtgatcctctaaaccattaatagttttcttttactgttattcctcttcttttttcacttactatgatttgctacttaatttataggtatatcaataaaatcaaagctttatcagagagaaacttggatgcacaaaataaaatgagacttaaaacttaacaaaaaatgagcattatgtttataactatggaggatttcattctgtggttggaaagcttccagttatcgatcgttttagtttctgtttgtttgcttagaaatgaaatataagagctaggacatattctgcttattcttggtttgtttttgggcagcttcaaaattcaacttgctaatactgaattatgcttaatccaggcaccagcaatttctcttccttcatcttaactaaatcagaatattgataaagaattatgaaacttttggaaaaaatttatgaacttttgatgggtgatcaatgattcattggcaatttccccccctctcctccacttgttcttctggttctcaggtagcaaacagctgttgttgccttcaaatataaagaagtcgctaatgttgttataatttattgttttacagctgctggagatttgacagaga

SEQ ID NO: 43392 - DNA, 662 bp, Manihot esculenta
  Intron number 1 from transcript cassava4.1_018563m (locus cassava4.1_018563m.g) derived from phytozome v7.0 (chr-ID scaffold06968; pos 120086 to 120747)
catcttttgttctatctacgctacctctcacaaaggtgtgcttttcttttctttttctattttttatgcttatatccgctttatttttgcttgaagtaattttaatcaaactaattttcaattttcaattttttttttacataaaagtctatttattccatcatcgattagtttgttgctgatcagaatactatgtggaatttttgtttttatttgttactgatttgaattttgtttcggtttcgtttttctaattccttctttttttgatctgggaattgttctaaattttgcgtgttggttggtgatttttatttgctttttttttttaaataataagtttcggaaattgggaaaacttgatgctgttaggtccttaatttgttgtattttgtttgaaatttgttgcttactaaaattaaattaatttggttttctgaattgactcaaaggtctctcttctttgcgtttgaggaagtgtatgtgttgagcaaattgtttatctttcttcagtttgtcctattcttcctgggttttatgtggaaatgcatgtgcaacaatttcttagtttgaatgaaattagggtttcagttcacgtctctgtatatattgcaatcttaaaataactgatctgtgctgttttggtgacagaatcagaaagc

SEQ ID NO: 43393 - DNA, 842 bp, Manihot esculenta
  Intron number 1 from transcript cassava4.1_003482m (locus cassava4.1_003482m.g) derived from phytozome v7.0 (chr-ID scaffold01127; pos 399172 to 400013)
agtaggtaaccatcaattaattacaaaaaaatccttttagttcttattaattgcagttttcgctatatataaatattgtttttcctgttcatattttgttggtttgttctgattgaatattcttcgattgtgtttgttatgtggtgattggtgtttggtgggtgggaatctgcttcagatcctgatggtaagatctccataatactttcaaattcaattttcttcatttagttgattatgtcatcccatgcatgctcatgacgatcttgatctctgctcttgcactttttgttcttattataaattggtaaattgtaatccattcgggtgaggattgaacgatcaagagacaagagtttgagatgatttgactgttctttcctgcaatctgttctgaagataactaggcataccaacttgctactagggccacatatttgtctacaagtttgaagtatactgctcgcacaagcagcaagaaatctatattaaaataatactaaaaaacatatcatatgcccgttgaatattaattaaaaaatcattaataatactaaaaaaaaaattcagacttcaaatatggatagaaaacttgataaaaacctgcaagaaatgtatcgttgagctcctttttttggttgttttattaatgaaactgaaagaatcttccattgcatagacataaaacttctagctacccgcttatttttttgaccgttggttggctaagccaaacttgattagggtagttgcaatctgagaaaggtggttagttattctaagcacgtttgttttgatattgcgaggccaaaaattgtctgcttgcaggtccattattccac

SEQ ID NO: 43394 - DNA, 821 bp, Manihot esculenta
  Intron number 2 from transcript cassava4.1_024010m (locus cassava4.1_024010m.g) derived from phytozome v7.0 (chr-ID scaffold07991; pos 293119 to 293939)
gagactctcatcgcaggagttgcacctcctaagatgtaagaatcacaatcattttgagtttgaatttgagaccctaatcaagttcggagaaattctatttacgcagccaaatcgaagttagattcttgattgtacaaaaaattgagagctggtgtggtttttgcaggtcctatgagggtactgagttgaactttggtgctgagagtggaaatgggtgcaagtgtggatcaagctgcagctgtgatccatgcaactgcaaatgagaaagcagcatggacatggacctagcaaagcctgtacttgatgtttttaataaatccccaaaaaaaaaaaaggatgcaaaagggtttgttaatgaatatgtaaaatagttgtcggcttgctgctgtaaataaaacagccataggtaatcaaaatccttgtatgaggatttaatttcctggagtttgatggcttgttttatgtgttaagtgtgtctgctttgctggtcttaacttggccttctgtgtacttttggaaggggaactcgattagcgttggtgtctatggttataacttctttcacttaaatatgatctacttttcccacctcctctttcgttcttttctataattatctgttataatcgacttcaatttgttgagtttcataactacttatgctattgatttgatgataaagattttattatgatttcatctaaactaactcgcctaccactcactgcaagagtgcgtggaatccccgataatcaggtttctattttcctcccttccccatgttaggttgagtcccaaaaaaagcgcaaacctctgtttag

SEQ ID NO: 43395 - DNA, 1035 bp, Manihot esculenta
  Intron number 1 from transcript cassava4.1_008081m (locus cassava4.1_008081m.g) derived from phytozome v7.0 (chr-ID scaffold04314; pos 70113 to 71147 reverse strand)
tttatcctcttgggtatctctttgattactggaatgcatttttagtcttttgtttttcttctcttttaatcgtagttcgatgtggattcttgtgtgattcttttgtttctctgtaatttcttgttatttgtttggttagttttgatctgttccaattagttttaactgaattccatcgtttccatgatttttcttttgcaacattttaacggtttcttttttctaaaaagaattaaattaatacttgtggcatgttgtattaaaatgatttttacatcattttctcggtctcatattcaatttcatggattattctgataaaaaaatacccgtttttctattttgtttagtttcttgacaaattatttcatcccatttgtccaaaaataattttctctgtttgtctttcagtggataacggagaatttattagaggggggaaactggtttttaataggagtaaaagataatagtcctctaagcaaaacaagaaaatattgtattaggtcttctgcattacctttttgcagatttgctgattagacatacaaaagattctagtaggaagagacctaagatgaatgcatatattgcaggaaaataaaattacccaagaacctatttttgccaagttgggatctaaaataacagtgagaaaatactgtttgtgaagcagtaagcagtctcctcatctaaaattcttttactttttttacccataagcgtatgatcctcacatagaatagtaaataatttgctgagttgtttcatattgagtgaagcatgagtgtcatttcttaatttcacttactgtgtcctttagatgaatggaaggatcaagttcttgatattctgatttggatgttgatcttttattcctgtccaaatctctcagttttgtccaatttgtggattatatgtgattcttttttttttttcagggattgaaatatgccactgaagtggaatgttttttccaattttttttcccaatttgcaggtactattctgtgtcactcagtattggcaatcccc

SEQ ID NO: 43396 - DNA, 660 bp, Manihot esculenta
  Intron number 2 from transcript cassava4.1_014915m (locus cassava4.1_014915m.g) derived from phytozome v7.0 (chr-ID scaffold06859; pos 44571 to 45230 reverse strand)
acctctaccgaattgtccaatttacacaaggtcaggtaatctgttctaagtgatttctgcatatatattttatagttatatacgctctgagtatgtatatatatgtggattgtagctgatattaagtaaatgctatggttatggatgaacgtagagttgcttttgtcttgtcttttgactgtatggtagcctaaattatcaattaggattggtttaatcagattccttgttttctggagagttatatcttaagatcctttattgaattgaatatggtgtaataattcattgaacgctttattgtaagaattcaattcaaatgattcattttgaattgatatgatataagagtcccacttgaattcttttcttgcaaatgatttattctaaaagaagccttagagaagataaagggttcactgaattcaaaagttctttttttgcatttataaataaataaaagtttgtagtacaggaaaaatctaaattatacattatagaagtagttataatgaggtgatatgtttgtgttgtttcttgccatattaaattctgtttcttgtggaaagaaatttccttgttttagatgcccttttggattttgcattctcatgaatgggatcttgtgattgtttttcaggcaagcttctgtggctttga

SEQ ID NO: 43397 - DNA, 518 bp, Manihot esculenta
  Intron number 1 from transcript cassava4.1_006690m (locus cassava4.1_006690m.g) derived from phytozome v7.0 (chr-ID scaffold04314; pos 170294 to 170811 reverse strand)
ctctccccattcaggttcctatttcctcttcttatagttctatgtatgtatgtgtctacatatgtattcatctcatgccatatcatgtgcatgataatataacttatagacatgcatgtaaggatgattttgatttttttaatgatatttctgtgacttaacttagataatctgtgaatcagtgtgtttatacattgcttaaaattgttatttcagtgttagaagtgattcgcttctaatatttttttcttttatgaagttattattataatatgtgattttattaaaaaaaactataaaataatttttataaatacatccaatttactaaaaaaataatatattaattacaaatttaaaataatagaaacatattaaatgggtacgtgtaggtaaaagaattttttaaattatctacttagattctctgacatggtaagaattaggttaaacagggcaaacgagtaactaaaaaatggtgattaatttaattaattcgtttttcaggaagccgtaga

SEQ ID NO: 43398 - DNA, 940 bp, Manihot esculenta
  Intron number 2 from transcript cassava4.1_025529m (locus cassava4.1_025529m.g) derived from phytozome v7.0 (chr-ID scaffold03203; pos 49536 to 50475 reverse strand)
gaggctctgcggcaactcaatgcaagtccctctctgatctttatctttatctacccatctagtcatctatccattactattaaatctacagaccttaaactagtcaggctttgtaatctcattggataagtgattctgtgtgaatagcttgaaatggccagctggatctgtgaacttgtgatccatttgacccgaccagtttgatcatcaataggagcaaaaattttttcttgtcttggcaagaacaattgaacccaagacctcacgacatatctttaaagtcaaaactaattgagctaaattagtaattgtgtattttttttgtctcataaatgtcgtattctgtaataattatttattacataattcacatataaaattattttacatcaattaaactatcatattagcatgtgttggaattctactgaaaaaatatttttgttttatttaaaataaataaagttagctaactatttcttatattatacaacatcagtaatttcataaatatagttgacatagaattcttttctatggattactcattagtattacaaaaaatttaatagtaatatttaaaaattaacacttttgtatgaacttcaagaaccccattaatacttgaatattacctaattgttgataattaaaattattgaattttatctatttatattaattggtgttgtgtgtaattaactttttgataacccactgatcgagtctgtgactgatggtcctggacctcctggtccctccaatgggtcaaaccctgtgcagggttcaataacacctatctatttgtttattctgtaaacatcattatacttgctttttctttacttacgaattagtacagctgaaatattatacatctataatacatactaatggaggttggtttcatttatctgcagtggctgctcatcttactggt

SEQ ID NO: 43399 - DNA, 627 bp, Manihot esculenta
  Intron number 1 from transcript cassava4.1_029461m (locus cassava4.1_029461m.g) derived from phytozome v7.0 (chr-ID scaffold09360; pos 328192 to 328818 reverse strand)
gaggtatgctttttactgaggcgctattcttcattggtggctaaggctctagcagtgcgagaaactttaacttggcttaaaaatcatgctttccaataaattcttgtagaatttgattctgttatgctggttaatttggtgcaaggaactattcaaaattgttcttctctaggattgataatcgaagacattaaggctattttacctagtcttgttgatgtcaagttataatttattaagaaaactaacagatcaatgtgttcgtagtcctgtaactgtttctatgttagtttcggaggaatggagtttttcttttctttctatcctcgtaaatgttctatttcaagatttggtaataagagttgtactttttcattaaaaaaaaaaaatcaaattgagtttgatggctttgaagtcaaaaaagacacataaaaaccaattaaataaaaaattacctgatagcacttctaaaaagaaaagaataaaaaaaagatagaatagtttattgccacttccttctctctctcaacagaaccctattgactaaaaacttctatcacccgcagcttcaacggctagtgggtacccccattttctgcttaaaatgcaagcagcaagccaacaatc

SEQ ID NO: 43400 - DNA, 399 bp, Manihot esculenta
  Intron number 1 from transcript cassava4.1_018943m (locus cassava4.1_018943m.g) derived from phytozome v7.0 (chr-ID scaffold10415; pos 23300 to 23698)
accctcaattcaggccacttctgtcaagtattgtggtcagtgtcaatctattacattatctttcgttttaatttcttgttcttcttcttcttctgaatttggtcgcatagaaattttgactttaatttttcattctgcttcagggttttcatctagttcgctttttctgatctttgtttttctggcttttgtcaatatttagcagattattagcttagaagccagaatttttatgggaaattgatataacatttgccatgttgaagtgctgaattgggttgattcatttatcagaagttgataacttgtcatttatattttcaatttctattttcttcctttaaatatatcaagtagctgttcatgtgttggattcaagtgcagataataaaggtaact

SEQ ID NO: 43401 - DNA, 517 bp, Manihot esculenta
  Intron number 1 from transcript cassava4.1_007717m (locus cassava4.1_007717m.g) derived from phytozome v7.0 (chr-ID scaffold07088; pos 346745 to 347261)
aacactcccaggtttgcttttttttttttcttttcatcttgtcaagcttttagttttcacattcttgtgattcctggttctgtttctgctctttaatggtgatcaccaagcatttatttctgattctggccctttccctcttttcatttttttgggagttaatgggttttaagaatttttgtctggaaaacttaaaatttctgacaccaaaatctctgctttccgttatccagaaatagcttacttaacccaagtgattcttagatctctttttaatcaaaatatgttttttctgtgcctaattatgcatttaactctgtaaatttcacaataattttgtttttaataaaaaatttttactggtgtttgattttccagaagcttaacaaatcttaaacactttttcaatgatctgtgttaagtaatttgctttgctcttaacttcaaatttaattataatataaaactaattcctctgacttgacctttctctgatttttcagggtcgtcatcgaca

SEQ ID NO: 43402 - DNA, 992 bp, Manihot esculenta
  Intron number 1 from transcript cassava4.1_007919m (locus cassava4.1_007919m.g) derived from phytozome v7.0 (chr-ID scaffold09876; pos 454405 to 455396)
ggctcaggacttatcaagtctggaaaggcagcaatgtaagcttctactctccttgcggtttggttgttctatcgttcattttcctctttttctttttgtggactaaaatgggttgttagtatagaattatgtttatttgggtataggattcttcaatctggggactactatgtagtagagctgccaaagatgaggtttttggcggcgcagtgcgaaaaactttacctcttattttactcacttaggcttcaactcgtagttatgtagttgattgggctatcatcttatagtaagaacattgaatgtgaattgggtggggatcggtgtgtcaaatgaggggacccaaatgctcagcacgaggctctttgctttgcgagacttgagggaggatcaatctcagttcaaattgattgcctcttggaaatttctcttgggaccaagtttatgttttagcttcatatcaatgtatttcaatttgctctgtctctcagtttactagtcctgtcagagtgtattcatctatgatcttgttttctttcttttggtttgtgtttcactgttttgttcatcagctattaagctacatgattagctattctattatctttagcatctgcattagttgtagaaaattgagcgcttgtcctacagggcttgatggtgaaattataggacatcaaaattaatggtgttctggaattacaactttcaattggggttatttaacagcattaaagatttacttaattcaccaattactataacatagcacaaaatatttcaattgccacatatgccagaacaatgggagatcaccttatgatggtataatatgataccaaactttcttggttaatgattcaagggaatcctaagcatacaattcacatgttccttttcttatgtggttatgcttataattcctttgcttttctgctttggcgattttgtttgcagatatttttccttaaaggaaggcttatatttggacc

SEQ ID NO: 43403 - DNA, 947 bp, Manihot esculenta
  Intron number 2 from transcript cassava4.1_012087m (locus cassava4.1_012087m.g) derived from phytozome v7.0 (chr-ID scaffold10400; pos 96633 to 97579 reverse strand)
actctgttccacagattgctctgtacaagggtgttgtaagtcttgtttctaaactaatatatattttttttgttgtaatgtattacttatattactattttgagtaataactgggaagatgcggtagatatgaatatttctttatggagcaactcttttaacaactgtgtaatgggtgctctgcaactatgggaatgtaggacacacatagagccgtaacggtcaaaaatatgttgagcagacaatttgaattatctttgctcagttacgtgccgacgatgacctttttataagagatcaactccctcaagtacacattcaacaatttaggtagcatcattgcatattatcctgttgctatgcatttaattgaatgtttgaagaagcttggcgttaactttccttttctagcactgaagagattataaatatacctctgtctgtactttgacatcttgaccacacatcagcagagatatctggaatgaagtttgtttgtaattgtaaaagacttctgtttgtgttcatcttttactactctcgtctttgatttattgtgaacaacatgttgctgtcagtttttccaattttggtgcgtgttgttgtaatctaatattagtttagtaaagatgcatatcattatatgaactgatgttttgttttaacgatttcagagaaaatgagactgaaatgatttgggagaaaagaaacgtgtatcttattgaaagagttgctccccttatatagacaaaactagagtgagccttcatcgtgaactgactaacacgtgaagttcactttactgctgagctaagctaatatttataaaattataattgtacccctataaatatttacactatttacacatatggtttgttttgtttccgctgtcctttttgcttgtgtctcattgcactaatgttatatgtcagatagaagcaata

SEQ ID NO: 43404 - DNA, 747 bp, Manihot esculenta
  Intron number 1 from transcript cassava4.1_009186m (locus cassava4.1_009186m.g) derived from phytozome v7.0 (chr-ID scaffold03332; pos 1162520 to 1163266 reverse strand)
tggtaggccttggtgtgacattttgcttttaatttaattgtttaacttgacgaaccttgcctgataagaccaaatgcataaagaactgttacggtcaagattttggtattggcactaaagcagataaaagacgttcttctattggctgataatgagaatactgtgttttcctttatttgttttggttaatagatgttgagtgtgacataatacccattaagtattagaaaagagttcaatgaaagttgttgaccaatgaaactcccaagcatcagacacttcattattcaagaacacatttcacttgacttaaaaggacatggatcattaaacattggttttattttaaatactaatgagctgagcttttgtagggcaggtggttgcctgttttgacagttaatatttctaccaatattattgtcctctttttgaaaggatttcctagaagattagtgagattaatgagtacagtggtagagaaaatgagtaaccgaaatcctaattttgttttttaatgcatgccttttggtcttctctaattccctttggggtgttcttgggaaagttaaattatgaagaggctcatggcagtccctccctcttccttctgtccctcctccctggtttctctgtgtgtatatgtgcctgacgccctgagatcttgtacaactttgatcatctgacaataactcattttattggctctcagctggagattggttctcaggtggtgggtcgaaagga

SEQ ID NO: 43405 - DNA, 1029 bp, Manihot esculenta
  Intron number 1 from transcript cassava4.1_010334m (locus cassava4.1_010334m.g) derived from phytozome v7.0 (chr-ID scaffold06656; pos 876274 to 877302 reverse strand)
actgctttgtaagtcccttctcgatccttcttactcgatattttttatttgagttgtgttttgaggaaaattctgtttttagcatacgcaaattgatttatttgattgtgggttttgaagatctagatgcaatttgagttgttattgtgtggttatgatcagcgaggttttttggggggttttatttttggtgggaatttttgatttctttagatgttcgttatgtggagcttggtcaattggatttgatttgatgtaatttgttgttacttagctctcttctctctgtttttctggatctggttttgttgtaatttttatttttatttttaataacctctgctttgctctccaagaatcaaactttctcctccattgcatgcattgatgatctgttgttgcttgaccagcttttattgggtttttattcttctaaagttttatctgtttggtatccaaataatttaatggaattatgtgacctcatagcatgaaatgatggctcttttggttcttgacattaaactacacaagggataatcaacggtggtatttttttttttattatatatttgatctcattattctggtgacggaatttgttattcatcagaatttacctctatcgttttgttaaacttgcgacagtgaaagatagaagcaagtttgtttctttattggtaattggcatatagatctgctagctaactatgtcaagaagctgaaaatcttttgttttgtatttgcattatattgtatactgtattatcttccctagtaacgtggatctaggccttttgaatgagtttgtttgctatttgacttgagccatgcaatagaggttgcaatatttgcattttgtttacgccccatgtctaccattgtctgcattcatataatttcatattgaaatgtttgagtaattactcagaagggatttttgcactgagttaatttggagtctaatctaaagtggagcatcccttatgtaattgcaggttgccaaggatccttctggcaaagatatta

SEQ ID NO: 43406 - DNA, 716 bp, Manihot esculenta
  Intron number 2 from transcript cassava4.1_031645m (locus cassava4.1_031645m.g) derived from phytozome v7.0 (chr-ID scaffold10173; pos 223589 to 224304)
aggaagcagcgcgcgcccttgagcaaattgaagctgtaagtgttagcaaaaacatctatactatatcaagcccattagtacttgaatcatctcttgggctctgaggtctcaaattcgactgttagagaattataccggaaaaaccctattctattgttttagttataggtacatttgaaatttccattcttctatttataggtacatgtagcaaagtttatcaagcatatctaactaacaaaagaagaacaaagtttatagtctgaagtgcttggctctcttttttcacttttattttgaatattgtcaaacattttttgttcttatcttcttgcttacatccaataaacagggttgtaagtgtttaacatgctttttttcctcccctaataaatatgaaaatccttgatttttaaatttttttttttttttattaatatgtgtggctaagtcagaaagattggacagagagcacattatagttggaaatttggttatcaagtcagactgatgttgactgttaactgggtagtaataaaattttacactttacctcttcatggaggcttagctgagttgtgactgaacaccgccacctcctctctctgtttcttgtttctcgtatttgttttcatattaataaagtacgattcagcttattggagtgatcttttatttaaatgtcttccagaaagctaagcgtagctatcagaagg

SEQ ID NO: 43407 - DNA, 550 bp, Manihot esculenta
  Intron number 2 from transcript cassava4.1_016674m (locus cassava4.1_014685m.g) derived from phytozome v7.0 (chr-ID scaffold00080; pos 89528 to 90077)
cactgttgtcttcttccttatcctcgtctttcaaggtacatttaattctggaatttgatttgactattatttaccttgtactgtcccaagtagacatgatttatatcatatggcattgttgtggttcagaattttcatcaagtaggaaaggcaaattttacctcttatcataactcacagctgatttcctgctttacaaatatgcttatggcacaaggcatttggatattttcccttagtaagaacctgtaataagtttctaactttatggtatttgtttttgaaagccctgcaaatatgtttttcataactcataacaattataaactcttatggcgtttgaccagtttacaagcccaacaaaaattttgtatacttctgttacagaataattttgtttattcttgctaggatattgcgtatgcaaaatttctggtcccgaccattagcctgaaatttgaatcatacttcatttgcaatgttaatcaagggtttaggaagatgttaaatgaccaactcccaaactgtatacttccccaggtatctttgg

SEQ ID NO: 43408 - DNA, 743 bp, Manihot esculenta
  Intron number 2 from transcript cassava4.1_016686m (locus cassava4.1_016686m.g) derived from phytozome v7.0 (chr-ID scaffold08847; pos 387497 to 388239)
aactggacacaaaaaagatatatttgcagagtttaacgaaagagggacatgcactgatgattgcctaagcaagcaagcattttccttcgaaggatcatctacaattcaagagtaattagctcaactccataactgtattctttttgtgacagttgattagtttgtaatgcatccaagctattcgattttttgttgtagttaatcaaattggccgtgattgttaaactagatgtcacatatattggccatatcatgaacaaataaagttttgacataaaagtgggtggatgattgggactctgcttggaccggatcgcttgtttggccatgggggtcacagttctttcttgttctgatgcaatatttcttccattattaactcttctgtcggtagtgtgtagttgttatgtgctttatgatcacactgcccgatggaaataatattagtgtggtcacgatttttctggaagattatcctctcattataaccgttttatttgaaatctgtgaaagatagagcccatcaatataaaaaataaaagaagagattaggctagtgaatgaatcaatgaaagcgtcgaaccaacggttagtaaataatatatgggacatttgtataggggataagagctcagctcctccctttcattatcatgttaatacttaggaagtgaacatctaactaatttttcttcactcttggtacagagttcgtggttcattttctagacaaaacaattgca

SEQ ID NO: 43409 - DNA, 567 bp, Manihot esculenta
  Intron number 3 from transcript cassava4.1_016686m (locus cassava4.1_016686m.g) derived from phytozome v7.0 (chr-ID scaffold08847; pos 388207 to 388773)
ttcgtggttcattttctagacaaaacaattgcaaggtactactctaaataatgcttaatgtgattagaaatttgcatacaggctcatcttttttatctggagtcatttgcgtgaacatctaaatgatgtcatattatgaatgtttagtaggcattctagggtttagctgaagaagctttatctttttgaagcagttcatagcagacgatttataaattttttgactattggcttcttggtaaaaagaaaactgtgtttgatattactgaagtagttcattgcaatttacttaaaatgttgtgcaagttactttaaagaagaaattgagctgatgatggatttatttttgaaatttcagaaactcaatattataaaattcaagtgcatgcatgtgagaacagctacaagctgagactgcataagcatgtagatctagcaatccaagataactaagttgagactgcgatccatttactcttttataaggatgaatcctagaatacagaaactggtttcttaagggatgtaattgacatttcagctcattcaaaggaagagaaataggga

SEQ ID NO: 43410 - DNA, 905 bp, Manihot esculenta
  Intron number 4 from transcript cassava4.1_010293m (locus cassava4.1_010293m.g) derived from phytozome v7.0 (chr-ID scaffold00926; pos 69284 to 70188 reverse strand)
ttgtggtaatctcccaaaactctgccattgtgtttcaaatttcaaaagagttcacaaattgctaaaagaaaaaagaaaaaaagaaaaaccgtacacttctggttagattttgctttgcctcttgattctgtgggaccaaatacactcgagtcattagtgttgcaaaatcttaatggaatgcagagtaaatgtctaaattaaatttcattaattgttccctttcaagtccataacatggttttattgtaaagtgcttcggctgtgtgtgtttttgagtcttgtctttgggtgacaagggtagtgccttaagatgtccctttgatgatcaaccattaaagtacaagaattttataaggattccgtgcactttgcataaaggtggggtttaaaagtgaaagattctgatgctttttgttaaccctcctttaaacaattgttatggtagtggtagtaggatatttcttcttgctgcttttgttgtcattgttttatttgcttatttgttttaatcaattgagttgaagttctaatgtactaaaataataagaaacagcaagatcataagtgcatgaatttctaatgtagtaaatttaattaaggacagctctaattattaagggaatttggaggctattttgtgaagaaaaaaagaaacttgtctctctctttttctctaattgtaaaagaagtaagtttaatgttattttcctccctttttttgcccttttttcccaaacaggaaagttttctgcttaccttctgaaatcttttaaaacaggagtgacactgtcattatggcattaaaacggaagaaaatgcccaattatctgcacgctaaggggcttattccaatgctattcctctttaattttatgtatggtgtgtttcaggcagatactcgggct

SEQ ID NO: 43411 - DNA, 661 bp, Manihot esculenta
  Intron number 1 from transcript cassava4.1_018172m (locus cassava4.1_018172m.g) derived from phytozome v7.0 (chr-ID scaffold06550; pos 670906 to 671566 reverse strand)
aagctatttacttgactgacaattgcgtccgggtaattatatttaatccttgaatttatgattccttcgattgttttgccatctgggttttgttgggtgctgttttgacctctcgtgttgatgtttcgatttggtgggtattcttccaactttttcgccattttcggcctgaagaggaaccgggaaaaagaaataggaatttaaaatttttcccttttttaaagctggaagattgtaaatttctttatccttcctgggtttagtaagaacgatttggcttaattagtaacatacaaacgaaaatgaaatctaggactatggctgcatcaatttctttctttctcaatcagttctctggctctcttcgttcttattaaatagtatcggagtcattcgactgcatcattcaaaatttatatgtagaacatttttttagtatccgacaatgaaccgccattaaatgttcatgttagtttcatcatggcagttgtgagggaagatttcacgaattgatgctttgtagcataagctttggctgttattcctttaataaaattacatagagggtttcgtgggatttaaattttattttttgaagtttgtgtttgtatatcattatgtatctagattttccattaagttgagggatgccttgcagagg

SEQ ID NO: 43412 - DNA, 768 bp, Manihot esculenta
  Intron number 1 from transcript cassava4.1_009573m (locus cassava4.1_009573m.g) derived from phytozome v7.0 (chr-ID scaffold01127; pos 187991 to 188758 reverse strand)
cgttttccttcacctcccttgatcgttcgcaataggtaactatacgttttgctgagaatttctcaggttttgtgtggccttttctttttgtttaaatatatgttttttaattgggttagtcaatcattccttttcctttttcgctttatagcttaatatggtttggaggtttaaatgtttgtaagattaggtttctgaatcgttatcctttaattggtctctgatttttgtttgttttgtttcgattactgcccggttattgggaattaaaatttgtaattttgagctcagtctcagagttacgtaatctgattttgattttattcaactgtcaaagcaagtgaagtttgaaactgaacgagttccgcgattgattcattggttgattgatttttagctttagaaaattatggttatcacagcgtagcaagtacccatgtaagagatatgatcaagggttcttctgcaaattttgaatggttacgaggcatctctactatatagatatttttttccctcgttatggttggttagaagtttgtcttttcggattttactgtcgcgacaataatgacttttggatgcatcgaatttgtttggctgcttaaaagactaaagaaaaatgatagtgagcataacctaactgttttttttgttcgtatatactttttaatttgtcgagaatttagctaatggtattgaccgtctgttcttcatcttttcttggaaacagaaattttatataaattttgaattcaacgtttgctg

SEQ ID NO: 43413 - DNA, 198 bp, Manihot esculenta
  Intron number 4 from transcript cassava4.1_011715m (locus cassava4.1_011715m.g) derived from phytozome v7.0 (chr-ID scaffold09088; pos 23704 to 23901)
cctcaaattgggcgcttgaagcgtcttaagatactgtataccccttttgcttccttttgtactaggatttttttgtgcataatttttcagctttttaataatttgatttaggtgttgccaagttttatagtcgactccattcttttctctttctgtttttcccgtttgttagtaatttgaggtggaataaactacaag

SEQ ID NO: 43414 - DNA, 609 bp, Manihot esculenta
  Intron number 2 from transcript cassava4.1_011385m (locus cassava4.1_011385m.g) derived from phytozome v7.0 (chr-ID scaffold03614; pos 1158392 to 1159000)
tcaggtgtgttgattatttctattttttttttgtaaagcatgtaagaataagtaaataaaattatatctcgtttctattaccttgctaccagacataatatgataatgttgctcagtctcatagttgcctatccatttatgctttcttcatttcaaatgggaaacggccaccctgtggatgagggattatgatgagaggaacattagaaattagagttttacatccttgtagaccaatcctgttttattggggatcaccactgcatttacattgtgcataattatgtttattcccaacacaaaccactccgcccccaaccccttcccccaattttcctccccttttttatttcatttagtggcatggttttgggtttctgtgactggatgaatgcttcttcttatagtttgcattcagtcctcctaattttgaaatgttaacagcaggatgtctacagtgaaggaagtctgagtgtagatggaaaaatcacaatttgtagaatctaaatattcccatttttttgcccttcttgtgttttatatgtgagttttgagtttgataaagggaatgacaacattgcagatttgaagcaccagcccagtgaccaa

SEQ ID NO: 43415 - DNA, 438 bp, Manihot esculenta
  Intron number 2 from transcript cassava4.1_006792m (locus cassava4.1_006792m.g) derived from phytozome v7.0 (chr-ID scaffold05009; pos 21781 to 22218 reverse strand)
cactcctatccacttaaaccttgtggtaatttacatccttttccttatcctcatttattaattactaatcctttagtgtcatttttggggagagtggaattgtttgttgtgtagcttgactggttagcgttaacgttgatgcattacatgatgaacaagtttagagtttggacttagcctgattagcttcttattcttgggaaacaataacaggagctgttttcttctttattactatttatattgtggcagtcactttctgtttgtttgggtatttcatttttccttcattaccttggggtccacttttctgattctgttttctagttacttgtgctggcttttgttgaagtgaacgcttgcttgagaaaatctactgccatgctattaaaacctagttttgaatcttaatctgcattttggcttctcaggcaagac

SEQ ID NO: 43416 - DNA, 786 bp, Manihot esculenta
  Intron number 2 from transcript cassava4.1_005924m (locus cassava4.1_005924m.g) derived from phytozome v7.0 (chr-ID scaffold01701; pos 635876 to 636661)
ttaaggtatatttttattgttctgtttgttgttcttgcattgttatcattgaagaggcaaatgttctgcatgcagttctgtcacaagagaaagttgcctataagtttaagcttttagtttcagtagtctcctaatatagtattgcagtctctccaaccaaaatatctaaagttcaaatccttgggcgccttaatcaacctaaaatcacaacggttttttgaacacactcaaagcataacaagcttagcatgaaggggcatgttttatcagtaaggttgaactttgtttttatggtttgttattaataagctcttttgaattaaaaccttattatttttttctctttttttttggcaaacaactaaatattttctgggtaattgacaaaattctgaatctttttcttccttattcagcattttagtgctataaaaattttataaaaatatcatggtaaagatatctgtaatgaggaggggttgcgagaaactatatttataaatgatttcacacttggccttccatgccaagtggaagaaaacttggttattttagatgtgcattaacacatcttgggaaaaaaaaatttttgacttcttggtggtttaggatttctgcttgtgttcgctttttactttatgatttgtattatgtgcgtatgctgtttggacatcatcaatataatttcacctagattttttccccaagtaattgtactaaatgattttctgttactttcattggagtgaatggaatggtaaagaacaaatggtttaacaattgcag

SEQ ID NO: 43417 - DNA, 1029 bp, Manihot esculenta
  Intron number 2 from transcript cassava4.1_019254m (locus cassava4.1_019099m.g) derived from phytozome v7.0 (chr-ID scaffold03614; pos 4085757 to 4086785)
tgccggctctactcctccggtatctcccttctctggtaaggtttgctttcgatccaatcgaatgataatcatggccctggtctttttacaaaatgcctaaaatgacctctcctaagaaaccggagatgggcgttgctactagaaatatccaaagggcagtaggtttgcaaatttaatagagtgaggctaattttgtcatttagcggtgtgggtctgcccagcaattggataatgataatacacctctctatttaagtgaattattgatcttgccgccttggataatgacattttaggtcgttgtttgacgtactttttatgcatgggtgttggccagctcaggctaaccatacttaaccatgcgtggttacttgacctgttagtttaacccaattgcgatattacctttccttttttgacatgcaattgcgatattatcattattaacaatattgcaatagagtatctttaaaaaaaataaataagggataaagcaccagttgattttgtatgaaattatcttgaacaaattcttatgaagagtgatctagtgtacccaaatttagttatgacaagcaggtgtctgtagtagttgattttgaggcaaaatataaagccaaatgaatgaaaaaatttatagaatacaaattgaaaatttctattgtgtattgggatggcaagtgatgatgctagctcctctattaatcttgactaggtggaactgaactttgctttgtgtttgtctattgtatcgcaaatgggttgtgtacttgctatgcatagacgtacgttttactcatctcatagtaattataaaagaaagaatgaggccagtagaataatagtattgatggtacgctgagccatgtgtgggacaagtagtatatgatcatgagctcattttatgctcataagctgcatgtatttgtatttacttaagatgagacgattgtatataaatgctgatgagctgttttgttatgatatgaaggaggcagagagtcctttcggtttcgaagaagatcaaca

SEQ ID NO: 43418 - DNA, 572 bp, Manihot esculenta
  Intron number 1 from transcript cassava4.1_030926m (locus cassava4.1_030926m.g) derived from phytozome v7.0 (chr-ID scaffold01914; pos 32387 to 32958 reverse strand)
ccaaggtaccttaaaaatctttctttctttctatattcttggcagaaaatatttgtggtgatacaaaattgtcctctggcaaacgcctatagcatagaatagaactttaagaaaagatccattaaatatctaggctaaaaatttcattgctattaggctttcttttgggaaaaataacttcctacttgaaaattgtttttttaagtaattgtaaatcctatacttcaaattaaggaaaaacttaatgaaaaaatgatatggactcacattcatgttgttggatccagatgttgatgaatgcatggattttgaagtaagaagtcggtgcagtggaaagtgcataaacactcgtggttcatacagatgcgaggcccaaaaatcatggattttcattttaggcaagtcttttctcttcaaaattattttccttttctatataaaatttgattatttgttagattataaaaaagaaaatgtttatactaataataaaatcctcttgaaatctgtgatatctagattctaggccgactaacaagcatattggtcgccatttttgaacaggtagcagc

SEQ ID NO: 43419 - DNA, 650 bp, Manihot esculenta
  Intron number 1 from transcript cassava4.1_010737m (locus cassava4.1_010737m.g) derived from phytozome v7.0 (chr-ID scaffold05335; pos 832673 to 833322 reverse strand)
ctcttcgattttcctcccctcgctgctcgcaccaggtttccattagtttactgtgctttctcgtttctcctactggtttgctgctttaataatgcattgagctttgtcgtttatgaaacatctttttgttttctgctcttggtgtggctgttattttttgctttactgatacttgtgagtctgaggtgatgtaggatgttggaatcatcatataacttgttatttgggaagcttgctttgaaatgcctctttgaggattattttgaagaagctaggcattttactaccagaattatgttgaagccaattgatgatcctcatgtcgatttgattgctacagtatccatcaaaattattgttatctttctctctctgtctctctcgtctttagtttcattgtggtttgatttctatgaagcagtgtctctttttccttaacttgattaggtttcaggtccattagatcataagcccgaggagaaaattactggaaatgcattatttcggtggcaaaggttttgcagaattaacttaatactaatcatcagttgcctctgttgtgcggtatgccagttaattggcggcaatggaattaataaacgattttctgatctttttgttgttctttttttttttttatgtaatcagtg

SEQ ID NO: 43420 - DNA, 916 bp, Manihot esculenta
  Intron number 4 from transcript cassava4.1_022708m (locus cassava4.1_022708m.g) derived from phytozome v7.0 (chr-ID scaffold03049; pos 788158 to 789073)
ttgatagacgggaacaggtatgccattagtatgtattgttattttatagtccaagcgatgcactattactagcctcttgaccgattcctgaagattttttaatttgtgtatatttttcctaatgaatttaactttcttcaccaccttttccttttgaagtgactatcatcaactttgcactattctgatatgaattttcaattttttggagttaatagtgcctgctagttttaagtaatagggcccccttcttgcttctcctagaggtgtacattttatggttctttctgtcttgtgctggattgatcctgatgaaccccaatttattgcttcctcacctacccctttaactcagtttagaaaacaggatttcaaagtttttggattttttaaaaataattgcaaaattcaaaacatatatctatccagtcacgaggtagatcagctgccactccctcaatatggaaataaatatgaatcattctcatacctgtgacagcttctaatcatataataactctttctctaaaaatatagaaggattatgtgcactctccttataatggactctcctttggatcgagcaaaaggctgagtgaaagacaaacagtagatttgtacattagaatgctctcttcttttgatcgagcaaatctcattttctgtaatcctttttcattctctttattcaattgccaaaaacaaaaaatcatgcttgttcaagttgggatgtggattagttagttttcattgtgagagggaaacataacacaaacgcggacatcttatcttgtgctacatcttacaattagcttgcagtatacagaacttatgatttagtaaattgcttcaattcctatttcttacattttttttttacctattgatctgcaggtacggcttattaaggagttgt

SEQ ID NO: 43421 - DNA, 606 bp, Manihot esculenta
  Intron number 1 from transcript cassava4.1_002387m (locus cassava4.1_002387m.g) derived from phytozome v7.0 (chr-ID scaffold03614; pos 3826980 to 3827585 reverse strand)
ttgcgactcaaatcctattttatcttctttctcaggttccgtttagcgttttttactcttttatttgtcttttaaattttaagaatacattcagtttctgcgatgacttatttttgctccatttctttaatttctttttaagatttttctttgaaattttgatgaagttgcgttgatttgacttttgttttttcataatctcagttcaaactgtcgaagatgcaaactgcgactcaagtacgtgctttatttaacgctgtttcatttatttttcagttttttttttttaaattagagttcatatgtggtgattttatgcttgaattctttcagatcgaagccaagaaggtatctgattgttgtgatttttttgaaaaatttcatttctattttataatccaaaaggaatgttaaactaggaatttatggtgcctttcgccttcagttcaaatcctataaattagtgaagatagaatatgtagtaccactctaggttcttttcagtttgatataatccttatttgaagcaatcaagtaaacaattagtgccttataagtgagatttttgttgatggcttagaaatagaagaagagaccgcaaattct

SEQ ID NO: 43422 - DNA, 615 bp, Manihot esculenta
  Intron number 1 from transcript cassava4.1_025371m (locus cassava4.1_025371m.g) derived from phytozome v7.0 (chr-ID scaffold05335; pos 217639 to 218253 reverse strand)
gcaaggtaagctaatgacgaattggaaacaaatttgtgatttttttaatctgaaaattatttccctcttgaagaacgtccatctttgctttgattttgtttgatcattcaaacactagttgaagagaaattaaaatttacacgacctaacgaacatttcttttgatcttggttgatgggttcatttgatttttgctttttgttgtcatggttttgatgggtctgattgaattttttaatgccgtctcttgcttttttttctcccaaattgattgattgtaaatggtaatggtgtctacgatcatttgtggtctggtctggttcctccgaatcagtcgtttcaagttcagcttctgtgtgttctaatatttacggtaaagcattgcttaaagattcttttgttattgcttcttgtgcccacttttgataaactttcaaaattttcccccaaatctgttaatggaaatggcaaatggttatcagattgatcatggttgtctggttcagttttattgtctgaatactgtctttcgtagcagcttctgagtctaaatctttagtgtgtttatgatgtttggcagggcttggcttattgatagcagaacaattgcgagga

SEQ ID NO: 43423 - DNA, 913 bp, Manihot esculenta
  Intron number 1 from transcript cassava4.1_006352m (locus cassava4.1_006352m.g) derived from phytozome v7.0 (chr-ID scaffold03614; pos 3528596 to 3529508)
gctgtgctgtaagttctcatacactgattttttttaaataaagattctaaaacccattaaagtttacttctctacaagcctgtaaaatcatgtttttaatatatttgctgagttcgattcttgattctgaaagatttgtgtttaacaagaagacatgagtgacaggaagctattcatgatgtgaaaaagttattggtcttttttggaggtatctgcaattccattatcagtagaggggccaatatagaattattaatgtttttctatttaattatccaaacaaatcagaattatttctgccatgggaggagctctatattacatcaaaactttttcttggaattattattgataaagtgtaattgcaaattctcagaaaaaaaaataaaataaaataaagtgtagttgcaagaatagattgtcaacaacggccactggatattatcaaagcttggtctcattgtgctttgagacttatcacaagatacataataataattaaaaaattatgagaagtaaccttgatacatgaattaaggaatcctagatgattcaaatactattaaattagtttttttaattcttaattaattagtttatccatcaaaaccaaatattaaaaaaaaattaacccattaattctttataaataattaaatataattgcagtagttggaatattatacaaggactatgatgcattaccataatctttatttccgtaattttttttacgcaaaaataattttttaaaaaattaataaaaaaataatttaaatcaaaataaaatttccaattagttatttgactagtgaaattatcctaggaataagtcacaggtgacttgtttgacccgtgattggaattacattttccaggttggttattcgtcgcctgctgaatctggaatcat

SEQ ID NO: 43424 - DNA, 521 bp, Manihot esculenta
  Intron number 1 from transcript cassava4.1_001787m (locus cassava4.1_001787m.g) derived from phytozome v7.0 (chr-ID scaffold10070; pos 59598 to 60118 reverse strand)
atctcggcgacctcggtctccttcagttcaaagatgtctgtacagtttccgtgtaaactaaaaaattagtttaatcttgatattgcagtttccttgctcgtttcttcttctttactctccaatgctcatttgaatacgaagtttctaatgtgtagctctatcttgtagcaaacattctttgctttctaattttgttgacttcaagttccaaatcttctcctgattttgagttattgagatatggaggggaaaacctaacaggttctcaaatcttcgctagggtattatctgtcaattttttgtcagagacgttgaaagttattcgtagtgtcttgcttgtgacaacaggatcaatgttttttccccaagaaaaagtacctttcagatggctagctacagaaacaatgtgttattagctagtgatgtctgatttatcaggtattcaacttctgaaggcgtttattcatgtgttgtattgttttccagctcaattcagagaagagcccatttcagagaactta

SEQ ID NO: 43425 - DNA, 791 bp, Manihot esculenta
  Intron number 4 from transcript cassava4.1_010413m (locus cassava4.1_010413m.g) derived from phytozome v7.0 (chr-ID scaffold04681; pos 104897 to 105687)
acctggacaatcttcagagaaaccagcagcagcttgtaagtcggagttttgttttatactcttctctttcactctcttctgttggaatgatttgctgtttttatcttcgttctccatgaaatttagaatggaaagcattgcatgagtgcaaatgttcatgaatgtaccttttcaggttagagaatatgttattcataggttcttttatgtgggagcgttgaaattgctttgcagtaatggtattatcttttgaattagtatgaaaacaagtaaaattaaaaccttcgtccagaccctttagttataagcctgacactttggcttgtaacctcttcttgttgcttagttgattctatgtaacataagtttggagaagacatagataaacgtgcagagtaaacctgaacgaggactccaaataactccctctgatgagaaacacctgtgaagtcagtgacattaaaataggataaggctcttatatatgaaagagattattgtcctagtcttgtgactctgttacatgaatttagaaaatgttgaatcttctttcaaatgccccaaaacaaagtgatagaaataataataattaaaaagaaaaatcttacaaatgccagcgtatctttttacttatgtgcaggctaaggcattaaaaaaatcttgaaaagaagtcaaactgtattatcactttcaatataagatagctgattgataattatggatagcttttctggatcaggtgtaaacctcaaatgaactgatagactctggcttttacaatgcagctataa

SEQ ID NO: 43426 - DNA, 610 bp, Manihot esculenta
  Intron number 1 from transcript cassava4.1_007650m (locus cassava4.1_007650m.g) derived from phytozome v7.0 (chr-ID scaffold02960; pos 332092 to 332701)
cctcgtttccacccgtggtcgccggttactcaacggtgagtctcgcattctcagatctgatatctctttcgagttagaattctttttttgatgtctgaaaaaacagagtaacgaagtgaaataagtgaaaattgaatgttttggtcttctatttacacttttatgcttgcttactcgaatttaatactttcctgcatttttctggcatcgaaccagtcaaggtctaagattagcatatttgtttatcttcttatccaagcttagttgaatgaatttgttcttccctaaagaactttgtcattcactttctctaagaaattgaatttgacttggtttaaatttatttctaaatccagattttcgagatatcatatagtctacaatctaaattatatagtcttagtgcggttggattttttttttttttgtcattgatttcgtagaagttatcttctaactctgtgaaattttactttctgtttccgttcacgtaattggatttatttcctttttcacatttaattgttgttttttaatgccttttgttggaatccaatagaggattggtgttctgaaattattttctacttctgtattcagagaaacaaaa

SEQ ID NO: 43427 - DNA, 961 bp, Manihot esculenta
  Intron number 4 from transcript cassava4.1_017166m (locus cassava4.1_017166m.g) derived from phytozome v7.0 (chr-ID scaffold01551; pos 472234 to 473194 reverse strand)
gcttggtacttgaaggtaggtacatatgttaagcaatctcttgacgttgtgtgtttgatacattgtagccatttagtgtacagtgtgatagttcttattttgttgcctatcttattctggttgttgatgtggattacacaattatttccagcttttagttatcaaataatcgtccatttaaagactggcatggtttgcagaatcaatagcatcatttaattttcggcagttttatgtaataaagaaactaaacttgccaaattaaaatctctcttgtttgtactgctaaataagattagcaatgtcaacaagatgtagtaatgccaatcatgcgaatcacaagtttcataaccggaagatttgatatgcttctaacttaagctcactcatctctagttcttttcttttctttttttttttccttttcctgattgccattgcctcctgattgccacctttatctgattctaaacctgagataaacattatgcagttgtgttaattatgtattcacattggtcaaaatagtgaaatgcatgagtggaggctcattctaatacacgttcagatgtttgagtgagtagtactttcgtgtgagataaggacccaaatagttactacaccatcttaaggcatgtttgtatcactcaattgctttgtgtcagcctgatctggacaattggcaaattattgattttgtttctttcaggaagatatactccctttttgtcacaacattgaacagaatggaggatctttaagttatgtgctatgttttcattacatctttttgttagctagaattatcaaaatgctttgttgattttaatatttgctgaaaaatgactatgcaatcaaatgttgaggaaaagacagataatgttaaatgcaggaaaaagggaatattttctatatagaatctgctatatcaaaaacttttgcttgttactgcaggaagacc

SEQ ID NO: 43428 - DNA, 517 bp, Manihot esculenta
  Intron number 1 from transcript cassava4.1_017428m (locus cassava4.1_017428m.g) derived from phytozome v7.0 (chr-ID scaffold04285; pos 91692 to 92208 reverse strand)
ttgctctgaagagattgccttgtccttaccattaggtcagctttttacctctctgaaatggatatgctggttaatttgcatacttgagtctgttcgttatcattgaattagattattagacttaatagactttcagcataagcattcactctgttttagcagagaatgcagtttgcaattttggtctttcttcttgttagctactacagtagtacaccatttgatttaaaccatctttccaatgaagtctggttagctgctgttatctagcaaaaccatgaaactgatagagtctgattaatttagggaaccatttccactagatagcaaaaaaagaattgatttgaattcttttttttttttcaaaatgaataaaggaaaatggggggttaaaagttgcaaagttattgtcactgttgtccttctttaaagatttttgttttcttttctctaattttatttcaatatctattcttctgcaggatttatcaacagctcatattcaggtcagttctat

SEQ ID NO: 43429 - DNA, 840 bp, Manihot esculenta
  Intron number 1 from transcript cassava4.1_007967m (locus cassava4.1_007967m.g) derived from phytozome v7.0 (chr-ID scaffold11110; pos 239914 to 240753)
tggacatcaatttcatttgggtaagtcgggattgaaattaaagtttgattttttttttctgggacaattttaaacctgttgttttggatgggtgatgtcgggatctgggtataattttgttaatattgttcaattgtcttctttttggcttgatgataaagatgagatgtgtatgatttggtttatgaattattagatgcaatttgacttgtttcgctcaataaaacaactgattctactttctaagttgaatggagataaatgttgctagcctaacaatttattaaaatcaaacagatggtttgttgagatatttcggtgatatctttcttttgaaatcacggggttaatcttttttatcatctaggctttccgatggccgattttacattcagagtcaaatttgcagttttattgattttagatgtcgccgtctgggtttagagatcttaagaagtcagccggtatgataggagttgggtggagggcggtgagaattagaaatacaaatgctgaaaagcgtacataattcaactgcatcaaaagtatgaattcttttttgatctgttcagcagtatctgttaatactctcttctggagtaagcaattgttatggtgttctttttattttttccaattattttttaaaaagaaaattagtagctcaaacctcatcttttcatctctctctctcttctttttttttaaaagatattggtatagttaggttatcattgcattttagaacttgcactttcttatgggcttatggttatgatccttgtttggttatgataattttcagattgcattggttcagcatttaacataaaaggtgct

SEQ ID NO: 43430 - DNA, 742 bp, Manihot esculenta
  Intron number 2 from transcript cassava4.1_014183m (locus cassava4.1_014183m.g) derived from phytozome v7.0 (chr-ID scaffold05335; pos 821520 to 822261 reverse strand)
ttattcgcggtgcttctgatctcaagttagtaaaatttttttatctacttattgcataagaaagcagtattagttactagctctgcggttctattatagatgttgcttcgaattctgctttctttctttgctaatacttaaaatatgtagagtatggaaagttatttgatcttgagcttatattggaacttctgctactacattccttgaatgtggatgccactataggatttgaagctgcatcgagccagtttgaactttttgcattaattgattttttaataattttaaggattactttcattaactcagctaggctaaacaaatgagtcagcctttgggaggtcactgactattccatcttctgttagactgttaatgatgatattattttgaagtttcataactgaatcctattacagttgtataatacacgcacaaaaaaaaatttacaaacaaaaaatttgataaagggaagagtatatattacaaggaaagcttcctgtagataataaatgataataagttatatagttaatataaataaaagcgagtacaatactgaaccagttaggtttgactcagtggtattatagtcatctctaaggatgtgatcgttttcgaaaccccagtcaagggccggtgaatcaaagtgaagacaatattgacaagactaggttctctaatctaatggatatctggctcagggcactcccatggctttgagatcccaaaagtttcc

SEQ ID NO: 43431 - DNA, 748 bp, Manihot esculenta
  Intron number 1 from transcript cassava4.1_005914m (locus cassava4.1_005914m.g) derived from phytozome v7.0 (chr-ID scaffold07488; pos 195656 to 196403 reverse strand)
gtctggtgttgttatcaccgcttgtgattggtaattttctaaactccccttacaattatgcggttttggatagtttttattgaattctgtgtattggggtttaaaagtccttattttcttgggattttgtttttcacttgaagcttttactaatttgaagtgttcctggcttctgagatttatggtctctgaatccgttttatttaagttctcagcctttactttattattattattattatttttttttttttggtaaaaaagtatacattttggctttttatatacaaaaaaaggttttgacttctgaattgaagactctgggcatttctatgatttttttttttcactcattagagtgctgtacaacaaattcaaaacataattaaaggatcatttcttgttctttcttgaatttggtattattatcctcagaatcatatatgaaactttttgttgattgcaaggaaactggaggcaagattggtggacattgaagggatgaaaaactcctttgatggctaataaaaaacaaaacagtttttccccttcaaattagtggaacttattttctcaattcaagtgctgtctttttctctctcctcattttctcagtaactaaatggaaaattttatatgtattctcttggtttgccaacactttgtttatggataaattgagttcattatgttgatgtaattgtggcattgtcttattgcagttttatcttcctatttcttgagaatt

SEQ ID NO: 43432 - DNA, 965 bp, Manihot esculenta
  Intron number 1 from transcript cassava4.1_002203m (locus cassava4.1_002203m.g) derived from phytozome v7.0 (chr-ID scaffold08003; pos 13318 to 14282 reverse strand)
ccatttcttatccttgtaagaacagatcaaacccccgtaaaagtatgcttaactttgattttgaataagaaacggtcagtggaatttgattaattcttcatgaattatttgtatgaatttggcatttggaggatgtcttttcgtttcttgttagatttgtgagattgtttctgcgagttctccattttgttgcatgatttcagagaaattttattttattttatttttattttttattttttatttttttattttttttggggggggggggggtttgagcatggtctaaaatttaatttaaatcatggtctgaaatttaagttaggttttaaaggaatttgctgtgattgtatcaactggaggtgaaaataattgcaggtaagattgattagttcttggtaataaaagcagcttgtgactattctctcttgaatttcttgtggccctcagccttatatcatgaatcaagctatggaattgctttaggattggaatttgatgtgtttttttttttttcattgagtgcgttggcctgtcaggacgggctaatggggttaaggtgtttggtctaaactaccgagtgatactcaggataccaaagtgtctctgaataaaatcttagttgctaaagtgtagaagctctctggtattttgatatacgtttccctaaaacaaactccatttttatatatttttttttcgtccattatactgctacttgcttgcctacataagatttttcactattcatttctttattcagctattgtgtattgcattggttagtaactccattttttgcattattttccgtccattatactgctacttgcttgcctacataagattcttcactattcattttttattcagctattttatattggatagattttgcatgattgttcactatttattttctctattcatttcttgatttcgctgttatatattgtatagatatt

SEQ ID NO: 43433 - DNA, 822 bp, Manihot esculenta
  Intron number 1 from transcript cassava4.1_000529m (locus cassava4.1_000529m.g) derived from phytozome v7.0 (chr-ID scaffold03614; pos 938841 to 939662)
gtccttaaagaacctttcttatttataaacagaaggtaagcttttttttcatatcttagcactatgttctcgatctgctgtttcttggtttgaaaatatggatccatcttttcttgcttaaaggtatacatgttctgccgttaaaggcgttttctattttagattacagcaaataacttgtgatttgggatcttgggtgtctcagagcaactactacgatgttgttgtgctcttatgtttgtttcggtcatggtgatctttcgattgtgagtttggttgctttcatgttttgttaaatgtgttgtttttctgctgattttcggctaaattgtggggtttttgcaatgatgattttgtttgattgccgataaatgtaagaaaagattttggatcttgaatgcttctgctgttctctgccgctagtttgatttaagttttttcgactaaaatttgtgtggccctaccttataatttttttttattagcagccaaacagagtttgtagatcatctgttgctactctgtgagctggtctattaccgcgtagagattttgaaacctttgggaagatgttttggcaacatttttttgatatgttgtaagatttagacatggaaattatggtttctgaattgcagtggtctgttattaacatgtgagacagttctatatcgaatcttaatggaatttaggcaatctggtttttattttttatgttttatgatttgatcctacatatatgcaatacatgctgatgttaaaattttgtgcaatcctaaaatttcaggttctgaagatacttctctgtccatcataaaatat

SEQ ID NO: 43434 - DNA, 476 bp, Manihot esculenta
  Intron number 2 from transcript cassava4.1_000529m (locus cassava4.1_000529m.g) derived from phytozome v7.0 (chr-ID scaffold03614; pos 940492 to 940967)
gtaaagataccagctgctgttatcagtccatataggtagagtctccttcctacatcatatttatatttataacattatgaaaacattcactcttaattagaaatttcggccttttggtttattaacattgtgtggtgtgagaagtaacagtcactcactgtcacattgacatggttttgcactggtgattcttatatttctcaattattctttcatgagtgaacagtttatcaaatgatgatcataaatactagtatgtttttgtttaatcctatgaaatcaatttgtgtgaggtctgtcttcaaagataaacaacaccccttgttcatgttatatactttgtcttatacaataatagtatggtttagagcagcaccattttttttaactccattttatgctgatgatatgttgtgccttgtgttgtatctatgttttcaggctgctcatttgtattaggattgtggtcctggcgt

SEQ ID NO: 43435 - DNA, 978 bp, Manihot esculenta
  Intron number 1 from transcript cassava4.1_009480m (locus cassava4.1_009480m.g) derived from phytozome v7.0 (chr-ID scaffold11746; pos 476591 to 477568)
cttgcttctcttgatctcgtcagatccatcaagaggtagtcgcatgcttttagttgctaatctattttgtggatgcgatcactttgagcttttgattacttctcttttcgctcactgttgtcacagtaaaattaggccatgtttggttcaattttaacttctgtttgctttttgcttctaagagggtttacgtctaatagattgtgattttgctatcaaaaataaatacgcgcaatctcatgtttattacagaaatatgaataattgagatttgtttttaaacaaaagagtaatgaagatttttttttcttttctttctatattagcctttgtttatctaacctgcaaaaatgctttttaaacttttcaaattcccaagacagttctttcactataaaaataggttactttcgttgttcatctatcccaaattacaggtcacttccttttcttaaaatggtaagtagtttacctaattaatttacattaaaaaaatatattgtctgaacaatatcaactatattttcttaattcatgtaaaaataattataatactattactactatgttcgtatgatggatgagtattattagataggcacaactattccaatttgaattaatattgaattaattaattatgtatgtggtttgactttgaaaaatgtattaattaagttaataaaaacatttaggcatttgtttggttcaataatccagttttgctttctaaagagtggagtgtcacacgtccatcattcttaaccaatgtatttttgtttgattctaataatgtttgattctagtaatatttagctgcagatggagcttttattatttaaaaaaatagtaataatatttttttagttttcaactgataatttctttttgcttccaaaaaagtaaaaagagcctaaccaaatgtgacttcaatctattttagcttcattgtatcattctcattttacacggccaacc

SEQ ID NO: 43436 - DNA, 683 bp, Manihot esculenta
  Intron number 1 from transcript cassava4.1_032763m (locus cassava4.1_032763m.g) derived from phytozome v7.0 (chr-ID scaffold03614; pos 3509691 to 3510373 reverse strand)
cttaatcaagcttctattttctctgctattccagggtatgcatttcttctccttcatcttatctcatttgggcatgtcttattttcttcttttgtaacgtttcatccgtattcagaaacatcttccaggcttattggatttttgaatatggcttattggattttttaatgggtttcttggattttgtttacatatatggggattttgtgtttgtttccttttcctatttctggaatttgatgttgctttttcccttttcaagttatctgtttttatgttggtttaggagtttaagcttattgattcagagttcacacagacaaaagatagcacagactttaaaaataataataattggtactgtgggttcttctcatcttgtcatgccttgtttaaattgtgctacagccctcttcttgtatgcttatcaagtccaatggtgtttcattacatttgtttgttcatttgttgactaaatgttgatactaacatatccatgttgtgaatcctgattaatttcccatttgtgcctgattaattaagaatatgatatgaaatccggatggtaggtttctggaatttttcttaatatccactcttgagtcttgattctgatagcaacattggatatgaaaaagatgtaactatgcttcttctttttcttattctttaattcagggaga

SEQ ID NO: 43437 - DNA, 675 bp, Manihot esculenta
  Intron number 5 from transcript cassava4.1_014147m (locus cassava4.1_014147m.g) derived from phytozome v7.0 (chr-ID scaffold09876; pos 777168 to 777842 reverse strand)
ttgaggtgagcttattttgaaactgatggttctatatgagcataataattattgcactgtattttggtacgtgaaagcctctttttccttctcatgttaaggggaaatcctaaggaattatatgttgctgtaatatcttttaaattttaatgcttgtagtatactgcttttcccaaatcatttgcagttattttcatcaaggttctctttactttgattatgctgtcttcttcatgatatttgcttgaagccctttgaactccttttacggtatttggttttcatcaagtagctctggtgaataatatcagtgcatggtagccaagagtataactccatatattatgctcagaaacatgattttcagacctttcataaaacgtgcaatagttttgttgcattgctgctgccaattagtgaaaactcagtcatgtgtgctacattgtaaaactttttccctccttgtttgttacttcaactgttaactttttttttctcggatagttatttcttatcatctttatatgggtggcttctttcccccatgaaattagtgggattaaattagtcttttgatcctattttcattttgaggttctgcaagaaattttctataaactccttaaacaactaacatattgtttcgttctttccttaatggacaggtaagctcat

SEQ ID NO: 43438 - DNA, 699 bp, Manihot esculenta
  Intron number 1 from transcript cassava4.1_002961m (locus cassava4.1_002961m.g) derived from phytozome v7.0 (chr-ID scaffold04681; pos 312462 to 313160)
tgctgagcccagcaccacactacgtcacaagaaaggtaagctctctcttcaatgtcctacagcttcaatttcattatttgttgatttcgacttcgagtttgtttcttgacgttcccttactaatctagttttgaactttgcactttatgtatcgtttttaatttctgttaaaaattatatttgctcagctcgctgttttccgctaaattttgtttttagacgttgttggattaatccattttcgctttaactaggtctatctggatttgcctacttgttataataattttgaatgattttcatttagggatatcgaataattttatatgatctcttgtttctccctaaatacaagcttttgttaatcaaggaaaagaatactattgagaaatcggcggatttatactataggccatggctttcattgtttgtcgcaatttaagtaatggatatctttgaatcagtttgccgtctgttagtatatatattttatacactgtctggctgaaatgatacgctacttggagacatacgtgttgtgcaattgcgaacagttcctctgaaattgtagtcgagaattgaggtttaacattttgtccaagtatgaacctggcttcgctgtataaatttttttctgaattaactgcaagtacctggttaaccaaatctctgtttgcattgtagaataaactaaataag

SEQ ID NO: 43439 - DNA, 741 bp, Manihot esculenta
  Intron number 1 from transcript cassava4.1_004497m (locus cassava4.1_004497m.g) derived from phytozome v7.0 (chr-ID scaffold09360; pos 190606 to 191346)
cctctctgtcgcctcttccgacgaagcttccggtatttcctccattcaatcaatcggtgtttccattttttgctttccatagcttttttttagatcgtgctttactgcttccgttccccgtatttttgtttttggcggcagaagctggatactgctgttaggcgatttctagagttctatatttgggtgaaagatatccgatttttcggtatacctgttttttcatttccagttcatttatgtttgatttgtcggctttgagtgggcagttttctctaatcgctccaaaaggggaggattttgaagctgaaaatgttgttctttgagcaacatttaattaactgaatcctatctttagaaaaaaaacgacgccgttggtagttgaaaaaaaaaacagagtggctcaacggcgtcgttttctcagccgcgattcacggtcgcctttctttttctcttgcgttcagcaatggagtcttttttatcgatgaaattttacctgacagcggttgcatttatgattttggctattgtaattttagtgtccaatattattttgatctcgaattgtcggtaaagaaactgcttggggatttctgaattgtgcaaagtatatgtcttacaaacttcttctatttttctttttcatttttggttctttttcttttttggaaaattgatattcttatgatgtgagtcttcattgcagtctcagtgaaactaggaagactttctgttggatca

SEQ ID NO: 43440 - DNA, 600 bp, Manihot esculenta
  Intron number 2 from transcript cassava4.1_015379m (locus cassava4.1_015379m.g) derived from phytozome v7.0 (chr-ID scaffold06512; pos 1054971 to 1055570 reverse strand)
cgtaaagagaagcaagtcgacgttcgaaagaagatgtaatatacatctactttctgtttgctctttttatttggtatagattgattaagctggaaaaggagttctaagtgatcaatttttgatcagtcggtcgttattttggtatctattttttgttgcttgtgttcaataatgcgaatagatgagtttcttagtttattttcgcctttctactcaatttctgatgtctttagctcgtaattcttgagatcagccagcctattgaatcatgatttatagagaggatcccaacttcaaccagtgcataacacgtacgtaatattgcatatcaaagttggtatagtattcagattgctttacatatttataaatttacgaaaataagataatcctgtttgcagagcgtatagtcaactaactagaaagcaagtagttgagtatgattgtgaatttcatcgtcactattatttgttgaattagagttatcttctgctcttctctccagtcaattagttttgacaaataattgaggctacctttgtcttcaccagaaatggcattgatgaatttttggtatttgtttttggcagtgaatactcc

SEQ ID NO: 43441 - DNA, 796 bp, Manihot esculenta
  Intron number 3 from transcript cassava4.1_015496m (locus cassava4.1_015496m.g) derived from phytozome v7.0 (chr-ID scaffold05162; pos 268893 to 269688)
gggtgtctgagaacgatagctttgatccatatcaggtaacttctcacttgcattttgcaattttttttgttttttttgaaatggtgcatatagattttagttttacgcatgggtttgaggttgttatgcatttatttatgtataatattgatcatgtgtttgaattgtttgctgaatttttggcatacaataagaacagatggtgcttgtaaatgcaaacccaactttgcatattgttatggttcaaaaactatcttccttggtactcaaattcacttatctgtagaaagatggacttcagttctgtttaattggtgttgtgatggtatacatgcatacatgctgtatgtgtgtatttgttatgtttgtcatggacttatgtcagcatttgcataaactcatctcgttctgcttcactgaacttgattgagacttcaattgacttttaaaaaacaaatcaattatcaaaaactaaatctttttagtgtattatgttatattgttacggttatgaaaaatatggtgtttgtgacttgtttcatgagtttgacatctgaacaacagaagagagcatttcatggctttgtggcccttattttctgtttcttgtttaaatttttagatttagttactttatactctgagatggagagagatcttcacttcattctttctatgtatgctcttagatattgtcttcctttttaactgaccagcaatttgatttcttttaatcatataccttgaatgggctttacttctcaggaattgttgaaagctttaattagtttcgtag

SEQ ID NO: 43442 - DNA, 692 bp, Manihot esculenta
  Intron number 1 from transcript cassava4.1_004654m (locus cassava4.1_004654m.g) derived from phytozome v7.0 (chr-ID scaffold09570; pos 23764 to 24455)
caagaaccgaagacttaatcgccctcctcattctggtaattttatttttactttttatttttgtttaattttaggttctggctggttctagtttgtatttttcaagtccgattagtttttttttttaaatattccttttgttgcattctgcaaattgaatcttgattcgtctttctttagctgttttctgaatgttttttcatgaagaaaactaatctccacgttttaagcatgctgtagtagagcggtttagctcatttgtgatttgatttattcattgtattggttaaaattttcatgacaaattattattattattgttagcaatttaaccgattgttagttaccagtaaactggcacgtattggagctaactcaattgctacttgcttggtttatgattccattaagatatggctggattttataccatcaacgttagcaaaaattaggtgtttttagttgcatgatttcccccatgttatgcattcatacacatagaatgaaagttgtagttttgcaaagtatagaagcaagaaataatgggctttcatagttgaattctgagaatcaagcctctctctctcatgtaataattgaagttttccagcatgtttaactgatcattgactacatactcatgacatatcacacaatttgtgatgtatctataaaaatttttaggcgaagtc

SEQ ID NO: 43443 - DNA, 531 bp, Manihot esculenta
  Intron number 2 from transcript cassava4.1_003746m (locus cassava4.1_003746m.g) derived from phytozome v7.0 (chr-ID scaffold10173; pos 889008 to 889538 reverse strand)
cgtagtggggagagatttcctgcctcgtggatctggtaagtttcggtcttagtgtgaatcgttcgattgtgtgttacaatgttggttttgatttttatttgatgtttgtctagatggaagaaaatagaagataatcaaatgtcggtcattgtgcatggttaacagggaaatgcaaagctatatgatttatgctacatttatatgaacgctcaataaagtgatgttttttcgttttgctgattctatgtaatatttgagggacaaagttttatttttctacttgtggaataatatttaagctgtcaaatggagctcaggcaactcatgagttctgatctcttcctttcaaaatgaagtgaagtgatcaccattatccagtcaatgtcaaaatgctattatctagtccatgtcatattttcagttgacaaacaaataattttctttttctttttttttttcactcctttgttatcattattgtcttttgcactggtaggaattgtcacacggaggccattggtgttgcaactt

SEQ ID NO: 43444 - DNA, 712 bp, Manihot esculenta
  Intron number 1 from transcript cassava4.1_025867m (locus cassava4.1_025867m.g) derived from phytozome v7.0 (chr-ID scaffold07762; pos 170939 to 171650 reverse strand)
ctgctttcttcaacactactgcaactagtcagaatgtaagattctataaccagttcaccactctttcctgattttttcaagtgggtattccttaaagttggtttattttgacaattattggaaactatggtaaattcatggtgtttgttttaagaagtaaaaaacatacatatatcttgattaaggattatatttagcaattctttattggctcctgcggacaagattttaacaattggatagttatgcaggatattcttttagatcaatattctcctactactaattgtaattgtaaatgataatgtgacatagagatgcatgtttcatgaatagataaagttgaaagagagcaaagctacttgagattctctactaatgcttgtctctcactttcccctttattctattctaaatttgatttagctattactaaaataaaatcttcattgtcatgtaagagctttcctgatagaagtttgctaagaacaggttaaattcctaaggaatctctgcaattattgctgaagtgttccagaaaatttcagtagctctccttgattgagatcatcagatccaactgcgtatatgaacttacatatcattttcaaagcttcccagaaatttctttttgtaatttttctggtttaagattacaattgattcttattttctgctgtgattgaaaaccaggtcactgtgccttttacga

SEQ ID NO: 43445 - DNA, 944 bp, Manihot esculenta
  Intron number 1 from transcript cassava4.1_028048m (locus cassava4.1_028048m.g) derived from phytozome v7.0 (chr-ID scaffold05474; pos 36000 to 36943)
gtggccggtgggtggctgtgggactggcgactggggtgggtggctgtggctacgggacctgaagaaagatgaagacgcgaaggatggagattagggatttggtctgagagagatgaaggtatcgtgtgcgccgcgtgaagaaggacgtgggatgggaagtgaactgaattgatataaccctataataaaacgctgcgttttaagattaaattcggtcggttcggttcgaccgaactattttgactccaaaaccgaaccgaaccgaccaacccaaaatttttaaaaattaaaaccgaaccgaaccgattttattttaaaaccgaaccaaattattaaattaaatcggttcggtcggttatttcggttcaaaccgaaatgtgctcacccctagtgcaataatagttatttgactattttgtggtattgtgttgtttatgggttgagttttgcggtaatttgttgcttatgggtagcttttctgtttttgtcattgtctcttttttcatatgcctctttagctgttgtctgtttaagaatgggaagaaaacaatcagcccgtagacacccatactttagaggtcagtctagtaggtaagtcgaggcttctaggtccccctctccagaccctcctgcctctccaccctttgagttccccatagtcagagaggaggaccctgcctttcagccattttctctcagatttgttcatcctgggagaaccgttcatcctagcagtattcaattatttagttcttatggattccttcagccctttattgtccaaagttgggagcatcttctgatcactccctcagacactcaccctaggttagttagggagttttatggtaacctacacactttcacacgtcactctcctcccacctggtcagttttgttaatggtcagctagtttacctcactcctgacatcattgctcagca

SEQ ID NO: 43446 - DNA, 568 bp, Manihot esculenta
  Intron number 4 from transcript cassava4.1_013812m (locus cassava4.1_013812m.g) derived from phytozome v7.0 (chr-ID scaffold06697; pos 340039 to 340606 reverse strand)
cgtcattcttggctgtggcttatctctgtcttcaagtaagttgctgtttgcttttgatttagtgtaatttcttagcagcactgtcttatcctgctccacacaacacacactgactggctgcaacttgttactaaggaacagtcactatatggaacaggcagctttatctatatatatctatctaaacaatacaaagaaaaaattactatttgatccctgtggtataggaaaactcattaatcagtccttcagttttgaaaaatatattaatcatcccttacattttagaaaaattgatgtgaaggtctaattattgagttttttcaaattatagtaactaaatagtaaaacactaactggtaaaactaactaaaaaattaattagtggatttttaaaacctcaagaaagttttaatatatttttcaaaatcgagagatcaactaatgatttttttcttaatatagagattaaataataaattttcctagtataattataaaatattgatagaaacagacctttctaaagttgctattgaaatttgtttgcagcacaatccaagtttgt

SEQ ID NO: 43447 - DNA, 623 bp, Manihot esculenta
  Intron number 1 from transcript cassava4.1_015134m (locus cassava4.1_015134m.g) derived from phytozome v7.0 (chr-ID scaffold07012; pos 1307101 to 1307723)
aagtcgaacaatttcgtggtaatttcttttctttcctttccttttgcctctgtgtcactgtagaacaaatagagagctttggtttgttgtttgacgtgagacttattttcctactggctaatggccggcagttccgggtcttcttttaagttagttaataatttaaattcaatatcttgcgttataggaatcgttgagaaaaaaaaaaaatcgagtttgcttttggattatcgttgcttatgttaggttcctcagcttctgtttccaagcgatcaaaatcctccgagaaatcaattcgatttcaatatggttgagttactccgagttagattagaaaaaactaatctttatctttctgttttattccttttttttagtgttataattctctgaattctgaatttctctttttgtgatttttctttgtttacttttctatgatctctcagttcgtcagttagaaacgatgcggtaattctcttatgatttttcttctatattttccttacttcaagggtttctgtttcctaaattaggtctcccttttctattttcatggacatgattctgaccattctgctttctggattttctttctttttttttttttcttttttttgtag

SEQ ID NO: 43448 - DNA, 833 bp, Manihot esculenta
  Intron number 1 from transcript cassava4.1_020179m (locus cassava4.1_020179m.g) derived from phytozome v7.0 (chr-ID scaffold07069; pos 23542 to 24374 reverse strand)
tccacaaccagaagtccttcaaattaacaatagtacttcttcttcctcctcttctagcctcctaattgttttgtgatgttcatgtttgatcttgatacgtctatatttgcggtgctggttttctgtttgtctcgttcgaaaatattcttgttgaggaatcgtcttttgtaatttccaaatataatttgttcatcaattactaaccatatttgatgcagggtggtgaatggttgtggaagtgaaatcttgtgttgtagcatgggttatgatttgcagctttgggaaaacattcagccatgatctcatgttacatatttgctttatggtttgcattctttggaagttgtttaaacattcagctgagctctgaggtcatattggatgcatggtctgttcttgttatattctgcaaatgatttatgcctgattgaaaaatgaagttttgattttgaaggcgagttgaaagagttgatttcttttgtgaccatttggttatctggagcaaatattgatatcaaatattcattatgccattggacattttgtctgatggaattggtgaagatttttgtcacacaagtgggttagttttttccaggcaatgattcctttgtcgtagcatgtagtcaattgctctagcaattgtaacagttgcaatttttttgtaaatccacagaaattttggattttaagatagcaagtttgtgctgtttatgcattatacacttcatgctttgctctgggaaactgttggttttcaatgtgataatactttttttcttgtttgaattgatgcagaccaagaggacaaagaaggctggtattgttgggaa

SEQ ID NO: 43449 - DNA, 1008 bp, Manihot esculenta
  Intron number 1 from transcript cassava4.1_002950m (locus cassava4.1_002950m.g) derived from phytozome v7.0 (chr-ID scaffold09151; pos 698208 to 699215 reverse strand)
ctttagccggtaagaattctctgtttatttttttaatttccagtttatttccaaattatattgtgaataaatgaataaaataatttttttaatatctataaataactaaaatattattaaaattttatagatatttagtttaagtttataaaaataaaaaatcatttcctttcaattaaatatgtaaagaatttgaatttcttttttctcaccaacaaaatacaaaaatttaaccccaaaatattctttaaatttttgaagatattattctatatgtaaataataacaaaagccatcaaaatatatgcgaaatttaaatttaattttttatataatatatataagattcgaattataactcttataatttttatattgagtacccacgtgaatctgtggttctattaatttggacaatttgacaaaatatattatttttttattttcaaaaatttaaattaatacgccaaaaaataatagccattcaatatacttaaagcgaataaaatctgcaagatttttctatttttggtttattttcaaaaatttaaattaatacgtcaaaaaaataatagccattcaatataattaaagtgtatagaaatttattaataattataatatttagcgatgattttataaaaataaaaaattaatttaaattaaaaaattattttattaattaaataaatttaataaattaaatttaaaaatataaaaattaaaatataattttcattaaatatcaaaatgtaaattgtaatttatcagtgatatccaatgatattaaaggaaaaattttgaaaatatattattttttttataaattaaaatataaaatttaatttaaaaatgtgttaaattataagattatttttataattattttttaattttaataacattaaaataaaaaaattgaattatttataaattatttcgtttaacataatatttatcttcttttttgcaggaaggctcagttcaaaagcgaagcaaacaggagat

SEQ ID NO: 43450 - DNA, 746 bp, Manihot esculenta
  Intron number 2 from transcript cassava4.1_025587m (locus cassava4.1_025587m.g) derived from phytozome v7.0 (chr-ID scaffold01551; pos 1309840 to 1310585 reverse strand)
taatctcaagtttcttccttgcatagtacccaattgtgagctctctctctctgtttactccttatatttagaattaaatcacatggatcctctagatgtacgcactttaccaagtctgttttcacttgctcatgctagtgattctatctataaagcatttgtcctcctttttgtttttgagttttagcatttttagattggttaaagctgactagagccaagtgtatcatttgggaattcctattgtttgagaaaattaagaggattatgtgtgagaatagagatggtaaatttaccagaagattctaagtttcgtggtcagcaaaagaatatgaaggatgaaaaaatatatatattatgtatttaaatataatatctggagtcaaaagtgtatatgaccatatcatatctgcacccccctgtgccttactcaggtgataattttttctttttctttcaaaaataatataatattttctatttaggttgtcaatgcaagttatcactgtcttatcaaggaaccctgtcgtgataaacttctatttcattaagaaacacaaacaaatacacttgtcagaattagatggtgatattttacccatatcaagttaaagattaggttgtgtgattatcctcaccaactctggacaatggactggttttccttatataattaagtcatttttaagcaatagttcttctgcattgctgattgattgtgttgctttaggtacactggactacac

SEQ ID NO: 43451 - DNA, 903 bp, Manihot esculenta
  Intron number 1 from transcript cassava4.1_015132m (locus cassava4.1_012890m.g) derived from phytozome v7.0 (chr-ID scaffold11668; pos 47399 to 48301)
tttggattattgattcttctgctcctttttaacttgcatatctcgttttcctctggtgaagcttctctctttctaattctttgttagggttctactttcatatgattttcaatttggttatcctgattattattcttagcccgtttctactttgatgatagaattcatgtgcttaggatagcatatgaatgtaaattttctaaaaatgagaatgagaaattttgtcatgtttgtgaatttgtatgtcacatcttgatcttgtgttttggttaactttaccttttgcctttggttggtatttgggaaaatttggaaaggatcatgctttttgtcgttaatttccaaaaaggcagaatttctatggagtcgtatagtttcactatgaggctcttatgagtttgtattttggtggtgattcggtttaaaattttggtaactttgggacttgtttagttattaaggaagggcattggttgagaatatgaagagggtggacattgcaatgagatgcaatgttttgacagtaacactgcttcagctttatttaagcttcttcgagatcacatgccatatcccataagccatgtagttactagaattgcaactgttttgaaatttatgttgtttattctgtgttcttttagcgttggtatttgtctgacagagtatagaatctcaattgctggaatatgctgaacaacgatgtagataaccttgtgatattaattaaacgagtctgtaatttttttcttcatatttgatggttttctagttgagtgattagggaggccagaactaattgctaggtgcaagatggttgtcgtgaaaatctatggagtaccaacttgtccctttgtacccatgatattaagtctctttatgctgcctacgcaggaaaacttg

SEQ ID NO: 43452 - DNA, 463 bp, Manihot esculenta
  Intron number 1 from transcript cassava4.1_028833m (locus cassava4.1_028833m.g) derived from phytozome v7.0 (chr-ID scaffold04300; pos 69368 to 69830)
cttctgcacccaaaatccagcgacattggatcgaggtgtttttggcggtgttcagctcctggcttcatgggcttccttctccgacaatggcacctccaaccttgactgaaatcacgagttttaaagagagagaaaatggatagaattataactttctagtcagattcccgctaattggatcgtcatccagatgatccaaggccacctctaaactctcctcttgtcgagagtataccgaaaaaattttgaagatgtgaattatataaacatataaatgagattttttggaaccacaaaatctagtctgtttgaatatccttaaaataatctcttaaataataattcaatatcatcactaaaatagcttaaataaatatcaaaatagtacttgaatattattcaatgctgattgcagacgtggattgtttggaccagcctgttgtgcaatactactgttggattc

SEQ ID NO: 43453 - DNA, 970 bp, Manihot esculenta
  Intron number 1 from transcript cassava4.1_011640m (locus cassava4.1_011640m.g) derived from phytozome v7.0 (chr-ID scaffold01551; pos 1332444 to 1333413 reverse strand)
atcaagctcgacccttcaaatcccactctatataggtaagtgaaccaaattagggttttttaatagcattttcatgttcttaaaaataaaatattgataggttattgaaatagttcgattgagtgtttgaattgtgcgttctcttgttttagattagccttctatttgttcatcttttttttttttttccttctcttcttctggattacctctcattaggaattgcttgatgctttgcacttgtggaattggccttagttattttaaactgtttgtgcgcctaatactgtatcttttcggaaattgtatacgtcttaacataactgacgcaagagtttcggacttgacctgagctaagagttgcgacagaatggcatatgtatgatgaagaaatgcactttctagttccaaacatttatggtacaggcatgaaagttaggctattaagtgtcaactttggccttttttctcactttttttataattagatcaactgttgtaacatttttttttcccatttaatacgagaatcaaagtcatctatctttaaaaatgcaaagaaaatgtactacagtttatatctacttaaccacaaaagtacgtagagtcaataacagcgtgaaagttccatttatgaggttagttcatctctagcatgtcgcgataggtatggaaattttagttttccaggcagcagaaagtggtgtgacagttgaaaagacatcgttacttttgaactaacataagcaagtctgtttctccatgttaagtcctaagacattttagtgtgcattttactttatctatgtttgcttggcagcctgctaccaataaaggttttgcagatactttaactaccttttcaaaaaatttaggtatattggctaacaaattatttttgtgtctaacgctgcataatgttaattatttcccagcaatcgtgctgctgcatttctgcaattggttaagc

SEQ ID NO: 43454 - DNA, 783 bp, Manihot esculenta
  Intron number 2 from transcript cassava4.1_016882m (locus cassava4.1_016884m.g) derived from phytozome v7.0 (chr-ID scaffold06512; pos 197824 to 198606)
gcggaacacgttcatccattcccaactgctggtgggtacgaaaacttgacctttctcctccaattgattagccttttacgtgatctgtgattgtattgatcgaattgttttccatctacttgattttggaatgcatttgtgttgtccctgtccgacgatttatttacgcaacagcactggggagagtaattcatgtaacatttgaagtagcatcgctatcaagcttttgtttgaaaaggaattgaagtaattacctatttctgcagtagaagttcgtttgaaaattcatgccttcgagaaactggctgttttaaataattcttcatttttaagaagccattgaaaataagttcggtggatggtagtattagttctgttgtgtgatccagttgttcgatcaaatgcttcaaagagatactgcattgtttctaaaattcttctgtaacctgcaccaaattaatggttttcttttatgaaagttgactaatttaatcttttgatgcttttgattgttactgggatgatagttcgcatgatctgatgaagattgaaggcttcatatctatatcttcagaattgggttagagcatttttttttggtggtgtgtgactgtgtgttgtatagtctctaaccggtgtggatggtcttccactactaggattccattgctggtcccgttcacaaaatccaaatttcagaaagatgccgtagttgttcctctagttagcattctgtgcaagttgaaacaatttgagagttgcatttgcagagtgtaatagaaa

SEQ ID NO: 43455 - DNA, 846 bp, Manihot esculenta
  Intron number 1 from transcript cassava4.1_000677m (locus cassava4.1_000677m.g) derived from phytozome v7.0 (chr-ID scaffold03329; pos 35445 to 36290 reverse strand)
acgaatagcttggaattcgatttccataatcaaaggtaatcttctcacggatcttattattctttcgttatttatatcatatttaattcatttctcttcttctttttcttcataatttttcaattgcttcatgttcaagctgaatgtttcttctgttttttctgttcattttttgtttttaacttggaggtttaatgcgttaaggtgaactttcgtggatttgagctgatttctattgtaatttagagctgctttcagggtaattttgtttctaatctttaatatatttgataaagttacgatattctttttttgtgtgtaatttttccccctgattgtcatcttgttaatcttcttcttggttgacacttttagtggtttcaagtgattttgtgatattttattgctgggtgaatttgggcatggtttagattatgagtttctgttctgggttgatgataatgtacacacattatatgtcgattgtgcttcacttgacatttaggctaataatggaaaaattttttatctggttttatagaaattgagctggagctgaaggagtatttttctttcttttttttttttgttttttctaaagttaagtttgggaaattcatcttctatagaaccaattaacatgatttagacaactctcttactttctcccttttattatttttgtgacagcatgtagtctggtattttctttttctggcccagcttaaagtattgctgtctgataaaacattattggcaattgtagcatatattttaaggaatttgtgctgttgataaacaatgtgaataattgtttccatatttttgcacctttttttttttcag

SEQ ID NO: 43456 - DNA, 657 bp, Manihot esculenta
  Intron number 1 from transcript cassava4.1_012424m (locus cassava4.1_012424m.g) derived from phytozome v7.0 (chr-ID scaffold01551; pos 3221960 to 3222616 reverse strand)
agcctacctcttgaggttcgcttcttcaattcctaagcgctctctctctctctcgtgttaataatacataattaaatttttttaagaaaaaaaatgatccccttttggatttaacttttcgtttatgaatttctcaattttttccccaattgagccgcagatcttattgtttctttgtttctttgggagatttggagggttttgctgaataaattatgaaattttttgaaaatcaattgaaagatgtttttatgtggctatcggccattgaagtatcaattgttcagaatcaatgttaactttgctcttcgagttaaggaattaatatttataaaaatggtgattttccttgtgaatattacgcaatataaatcattttttttccttgggatgaaatgaacatgatttagataagttttttttttttaatatgttaagtaaaaaaagacaaacagcgtcagtgttttaattggtttccctgtttccgttctagctgattcctgtttgttttcttaggtttgtagttgaacgatgtttacatttgtatcccaatcccattcatgttttgctgtcactttgagttgcaacacctactcttcttgctatatcttataggatatggtcttttggctattatttccaggagaacatatttga

SEQ ID NO: 43457 - DNA, 748 bp, Manihot esculenta
  Intron number 2 from transcript cassava4.1_019632m (locus cassava4.1_019632m.g) derived from phytozome v7.0 (chr-ID scaffold03614; pos 1328442 to 1329189)
accttaagcaacaggtatgcctaatcccgaagactgcatagacttggtaatgttctgtgaaagtttattttatgaatcttctacatgtttgaatgtagtgctttttcagtcttgctactgttgggttgttctcaagctccgcattttcctcttcactttttggtgttgggggatgtatcgcagatgaagtttttgaaaatattggggataagggaaagctagaaatttgattgcaagaaaaacgagaaaaggagaaagaagaaatcctaggatgaagagtaaaacatttgcacaatgctcatggtcgcacaggaatatatattttttgaatcccctaggaagaaacgatagaaattacttaggaggcatagaattaaccgtctagatgattcagttgctgactaagatccgtaacagttctctgagagctggacttatctccaaatgaagatgattgctaactacttgttatggaatgtgattgtgtagggacctgctgctctgaactgagcttcaattttgcattatctaactcggttgctaccatcaatcgtgttgaatcgattttgctttctccaaaaatgctatttccattaatttgatctgattcactagccagtagccagaacaataatttggtttttttgattgtataatagtcataattaaacgtatttagtttgtgatatgagtttttttattcccttcaaatgtaaccctttcttgtcttctttgttgaaataggaaa

SEQ ID NO: 43458 - DNA, 744 bp, Manihot esculenta
  Intron number 1 from transcript cassava4.1_009808m (locus cassava4.1_009808m.g) derived from phytozome v7.0 (chr-ID scaffold03614; pos 2886363 to 2887106)
ccaagcttcaaaatctaattctttaggccttgcaggtaaagatctcaactgggtttgtgctcttttgttctctcactcattatcctttccgtttgggatttgtctatatttgttctctgtttatgtagtttcttatctaaatttctgttcttgatgaaattaatgacattggtagtttgatttgtgtttttttttttcaattacgaattttaaataaagataactttcagcagtgattttgtttttgccatagataccttgctccatctttttcaagaattttgctttcctttcgttaaagtggttttctggttctatctatacctatttctagattacgattgtttggctagaattgcttcgttttccttgcctcatgttctctgcattttctataaaaatttctccttagtagatttcataaactttgactgtgacctattgatgggttgcgggtgagaagctcgtattaaattgtaaatactgctatggcaaatgttttcattttcctttgagataggtaagagctgaagagtaattataacatcagcagtcatctcagctggtaatcttacctttttctctcttttgaggaatggcatttgtttaggatcccagatagtgaagcttttatttcatcagtctttgatacttggttaaattacagtgattttaacacatttctgttttgtctgatgcatcttggatgttactttaactgtttggctgatactgtgatacagt

SEQ ID NO: 43459 - DNA, 435 bp, Manihot esculenta
  Intron number 2 from transcript cassava4.1_019758m (locus cassava4.1_019758m.g) derived from phytozome v7.0 (chr-ID scaffold03614; pos 4039634 to 4040068)
tttctttgctaaagaccgctcaggggcatcccgtaaaaatataattttttttactccatttgagataattttaccttcaatctcaaatttccaattttttttttcaataggaaatgtcgaaagaaaatgtaattgatcctaccaattgtaaattcttaacaaattacttgtggtcctgaaaaacaaaatagcaaccattaggtttttgtgatagtaaaacattgcaaatatggctttgcctttgcagaagcaaaatgctaagttgggtatcttgaattaatatcaaaatgttaccagaaaacatgtaactgtagcttgctttcttttccttttgttttccataaagctagttgaatgattaatatgcagcggaatggtgagttctcttattcttgttgaatattcgtgcttttgtgtagttggtggagcttaaga

SEQ ID NO: 43460 - DNA, 526 bp, Manihot esculenta
  Intron number 2 from transcript cassava4.1_006569m (locus cassava4.1_006569m.g) derived from phytozome v7.0 (chr-ID scaffold02877; pos 10765 to 11290)
gatttcttggaagctgagaaagcaattctggtggggtatgttcttcttttccattaaagcctatgatttccatattttttggtttcgccaccccccaacctcggggagaggacgcattggtttatagtcgttagatattcttggaatgaatacttggtaacagtgatgaccctagtcgtattgtttgtctgaccttcactggagtttatacgcaaattatcgctttaatttctgattcatagactttcttaggctcatatcggattcaccgaaactgtttgttatcaccaatgagaggcacaaatcaatgcaccaacaaatagacatagctctcctgcccaggggcactctatttgcctttttctttcagtttttgatcattgaaattggtcctactatattgttttaaatctatgagccatattagttttactttgtagatcctttttggaaacgtatatctgaatatataaaaaacctttacatgctaggcattctgctggttctcttgtagctgtcaattcat

SEQ ID NO: 43461 - DNA, 615 bp, Manihot esculenta
  Intron number 1 from transcript cassava4.1_000845m (locus cassava4.1_000845m.g) derived from phytozome v7.0 (chr-ID scaffold04233; pos 118331 to 118945 reverse strand)
tgttagccaaggaccagttgcagcaatttcatcaggtaacattgcatatctaacacaacccctctatttgtttttattgtaattttctttctagcaatcatcattactgtttttctttttttttttcctcttaactttctctgcatgtgtgtcatagggaagttctcatatggtttttatgtaaagattcttataaagttttttcttttcctttcttttcttttcttttcctttttgctggcctaacaagcaattccttcattttgtttttattttgtttcgtctgctttagttattatacacgatgctgtgatactttattgtggacctgtatggaataaaataatttcttttttcctttttttttaattcaaagcagaaaagcaaaagaatgaacagaatttaattgccagaattgatttttctggctgctaaaactcagatattggatgttcttaattctgttgtggcttcattttttaaaaccatgtttagatgataggctagtagtgaaaaggtaagaaagaaaaagaaaattgattccagtagcttagctttttctttctgaatctgcaaccagctccagaggggctgcaacgacgaaagcattcgcct

SEQ ID NO: 43462 - DNA, 568 bp, Manihot esculenta
  Intron number 1 from transcript cassava4.1_005332m (locus cassava4.1_005332m.g) derived from phytozome v7.0 (chr-ID scaffold03614; pos 3456795 to 3457362)
actctcggcagtgtcccggtaactcccttttttttctctcctttttttgattagtttctacttctctgtttggtttcttagaaaactgtcgtaaagagagaaaagggacatacaaagttgttgtcttttggattcattagtttctgggtatccaaatttgttaaacaatctaatctcttaattagtcgttgttttaggaagacagtgtgtttttgaatcaattgtcctcggccctgataattggaataaactgagttatgtgatttgagctaaggccttggttatttcttttctctgctcagccttcacctctacaatcagaaagggcaaactgtataatgttcattttgaagttcaaattttttattttttttttctttgtttggttgatgaaaaacttgggaatgaatgcacaaatgatggactatgcagagcaattcaagtttttctgaagttcttttttaaaaaaatgttgatcattcatagatcttcacacgttcaatcgtttttcctttttgaaattattttggtggattccagttgactactacggatattcaaattgtgg

SEQ ID NO: 43463 - DNA, 373 bp, Manihot esculenta
  Intron number 1 from transcript cassava4.1_010155m (locus cassava4.1_010155m.g) derived from phytozome v7.0 (chr-ID scaffold06512; pos 307858 to 308230 reverse strand)
gagacacaagctacgctctgaactcatcggttcaggtaattaatttctgcttatacttgtggcttacttttattggtaataattcaatccatataattaatatttggttttatttttgttttttgtttttcttcaaaaaatttattctctaaatatatatatattctcatataactgtatactagtgaaaccagccaatcgaaatactgaaaattgttggttaaccgatagaaaattgtcatccacaagttgagtcaatggtaaaacgacttaaattcaagatatcgataaattcaaaagttgtcataaatatttgactgcataattcaagatattaatcagctcaaattaactgcagcaaaaggtgatatcc

SEQ ID NO: 43464 - DNA, 388 bp, Manihot esculenta
  Intron number 1 from transcript cassava4.1_027836m (locus cassava4.1_027836m.g) derived from phytozome v7.0 (chr-ID scaffold09501; pos 276436 to 276823)
gtcctggttgtggacacaagattgaagggaagccggtagggaaaatataattcctcgtaatattcatagcttcaaataaattttaaacaaaaagaagaatattgcaaagcaaaaaacaagaattatgcttgatgttttattcttgctctttcttctttctttctttctttctttctttttgggtctgagtagtaatatcttttgagcaaaaccaaattcagtaggactcaagctttgctctctcctctctagctctcttgccctccatccttttatcatccttttttagcatggattaatttatttttgttaacttcaaatttcattttaccttggagttgaatgattttcaggattgggtaggtctaccagcaggagtgaaatttga

SEQ ID NO: 43465 - DNA, 797 bp, Manihot esculenta
  Intron number 5 from transcript cassava4.1_018294m (locus cassava4.1_018294m.g) derived from phytozome v7.0 (chr-ID scaffold03614; pos 3413422 to 3414218)
atcttggcaggggtaagctttaattcttagctttgagatcttgtttcaactcttatttagtattgtcattgatgtggacagtggttcctgcctcttgataactagcattaaattttgagttgtctctcaaacattccaactcaggggtaagagaggcaaatttaaatttggggaggcactgattgctattttaagtagtaaacttcattactattgaaatatggagcctggcattcttaagcattttattgaaggttaaattatagaaattagaaatatatgtgcccagcatacaccctatattgtagtaaggtttaacggcaaaatcattgtgataaaatgggcccttaattgtgcagaagttgttttctgatggcattaagtcccgggggggggggggtgctgttaaaccaactttctactgctggtgcccaaggggagacttaactaactattgctggtgtgttgatatgtagttttttcttcttttccaaatggatgtgaatttgtgctagaagcaatggaattccttgtgctttggtatttctataatccaacgtttcctcatcattatagtatggctggtgacaagctgaatgcttgctgtggattttggtctgtttgatgcattgaagtgacccttagccagcccaccatctcactctccccagaaagctatgatgacccattgccttgttagcaagacttgatatgttctattctgcttcttagtcatttatttcctgatgaaagcaagagctgctcatggcgcgattcatttttgtatgcaggaggac

SEQ ID NO: 43466 - DNA, 655 bp, Manihot esculenta
  Intron number 2 from transcript cassava4.1_025901m (locus cassava4.1_025901m.g) derived from phytozome v7.0 (chr-ID scaffold03482; pos 47661 to 48315)
gaggtaaccatattttttcaatagattatcatgattgttttgactcggattatataggttgtaacttctaaatgaattgtactcggtcattgtacattctgccttgcaagaaccctattcttctatagtatctttatgaatgcctcatgtgttattcgatctttttgtaattttatcaaagtagcttgggtattgtagacgaaggcaataatttttttcatgaggctattattttcagcatttgatggaagaagagttattgagcttgttggtaactgaggcattagttaccaagattcatagataggtagagatgttgatgtgattgtagaagtatgaaactacaacatatctcttttgattttgtgtcgttttttttctcaactctttattatgtgatgtggtgtccactcattgtctaaaaaaatggctgatctttctccttttcccttctttttctttttttgtaataattttattttattttattttttgttattgtcaaaaaatgtaatcttggaattttaacatcttagtaaatgactaatgtgctttgtccaaattattgtgcttcattttgtttcggggttccagctctctgtcattttttaaaatttcaggtttccatcattctaccatcacttattgctgaatt

SEQ ID NO: 43467 - DNA, 792 bp, Manihot esculenta
  Intron number 1 from transcript cassava4.1_010098m (locus cassava4.1_010098m.g) derived from phytozome v7.0 (chr-ID scaffold03614; pos 2977289 to 2978080)
tgaccccaagaagcgatctggtctcggtgccgaaggtgagtatttatgggctcctttctctctcgatttgctctattgaccatcggggtttccttaattatggtgaattttcagtttttatcaatatttggatgagttattagtttgcgggtatgaagatttggactttggagcttcatttggattgggtctcagttactgttggtactataatttgatgaagttttaaatttgtttgtttgattgttgaataattgagatttgagatgttgaaacttggcgttgattgattgcgcatatagattctttaagacaccgtgcaaatgcttagactcgttgattgttgagtttagcattgatggagagactgagttgggctgcttatgtctaatcagtgtgaagccatgaagaacttaagagaaccacatgaagacacacatcaaatgtgtctaatggaaagcagcatatctggcattttttttaattattattgtgtgagattgtgcacaaaacagcagattgcgccaagagagactcattgggagaacattttcttgatgctatatttgtagattgattcttgtttctaattttgttggaggactttagcctatcttattttagaattgtagcctggcattgctatgaattgagttgaatagtacacacacacatatttcctacctgaaagagttgctgaaattcaaagattttcgtttcctccccttttagggaggtatacaattattggacagtacttctaaccagtaggttttcatttcttgatgcaga

SEQ ID NO: 43468 - DNA, 541 bp, Manihot esculenta
  Intron number 1 from transcript cassava4.1_015225m (locus cassava4.1_015225m.g) derived from phytozome v7.0 (chr-ID scaffold06512; pos 1274009 to 1274549 reverse strand)
tttctctgcaatattcaccttcttctttgctttaggtttgtcttatatctttattcttaggttttctcttcctttgtctggatatcctttggaattcttcttgttaattaaatatgttgattgaatgggattttgatgcttggatctgttttatgttttctgatataagttttgttttgggtttttcttcaattattgatattttctgggatttgctgtgttactatgttccattgtcagttttaattccaggtataaaatcttgatatgtttatttaaagagaaacagcgctctgtttgtgaaaatgatatgaatataattatgtatgaagaggtctccgtataattgctattgaataatacattgctgggttcctacaattaaagatgtcaaagccttgaacagtaaattcctttaaacaaaatcctttctttgttttgctttcattttctcaaagaactctggagcatttgctgtccctgagaatatgtgctaaaggaattgacattattgtctgtagtgggcaccttgttaggagcc

SEQ ID NO: 43469 - DNA, 1011 bp, Manihot esculenta
  Intron number 1 from transcript cassava4.1_032228m (locus cassava4.1_032228m.g) derived from phytozome v7.0 (chr-ID scaffold02853; pos 469299 to 470309 reverse strand)
tcctttgaccttcccctcttgcttaattcctaattgtgagtttctctctcttttctttctgttgcaccttaatagatacattgggtttgtaccggtgtttgtatgtgtgattatcccttccctgctactatgttttgtcatttcaagaaggggtgggaacactataactatagtcatctcccttctttttatacatgaaatggctacaataatgtcaatgtcatgaagtagaaaacgttcatgtgtgtgtcagcttgtttaaaagattatgaatgtgtatggaaaatacctctgaaatgtaaaatttcaagaacacagtatattaggctgaactggacattctcttggtctttgctaattttatattattaccattatcagtattttttttcttctagtgcatgtgtgtgtcagcttgtatggtaagagtatttttccttttttcctcccctctatttcttaggtagatgatctggattccatcttgcaagcacaataattcttcctatgtagaaccatgtgcacaaagaatagttccagaatatgaattcccccatttataagtacctaaaggaaaaataattggtggttttaaccactattttaatcgttaaatatatactaattgatcgtatttttttatcattaaattttctaaaataaattgctgtttagctatgcgatgcacttgtgattcttcatgatttcctcatatttcaagcaaaaggtgttctttgagttccttctttcacaagattttacacttggcttgtgaatgccgactatttttatgtgcattcttatcctattagtagactagttatcaatatgtaagatttttctgaaaattcttttattctaccatctgaatgtgacttcattgatatatttggagctgatctcatgggtttgatgtcttaatcatcatcatctttttcttcttcttttctctttgctacatagaaagaggaatgacaagatcaccatttttgcaggcacagttgatttgca

SEQ ID NO: 43470 - DNA, 944 bp, Manihot esculenta
  Intron number 2 from transcript cassava4.1_033564m (locus cassava4.1_033564m.g) derived from phytozome v7.0 (chr-ID scaffold08078; pos 89851 to 90794)
ttcaaggcgattattatatagctcctgtgttcttggtaacttctgctacctgctaatactcaattacatctaaagtttgaaatattatgatattgttggtatgttcatgctagatttttcaataattttctcccgcttggcttcatgcctgcaaaaccgtagtagaaatactttactctaattgatgtggtgtatcctatttatgagctatgaattgcgttctatttcctgtatgtcctttgcttctttttatacttatctatggatcatgaccttggatattcatggtgttcaaattttgtgctttgtttttgacaggataaagttggtaagttgtgggtttggccaaaggtgaagaaactatgatgaattatgttgcagtaagaaaagttggtagaaatgaaatcatcatcctctcaccttggtgtcctatttgcatgtttattttttaattatagttctttctttatttttggtttgctatttgtttaataaggcactaagtggttattggatatcatttctaggtccttttcagcctttactttgctaagcattcttcttatgactatatataatatacttgtctgtaacagtgtatatttgttaaagcatatgtgaagatattaagtttaatccaaggcattttcgtgcatgttatttgaagcttttccctgttgcaatctattttacgatcttttgtgtaattagactgagaagtggaatgactttgtttttatgctagtcgtaagttcaaaagctattagctgtttccatcctgaatcatttccctctatttgagccaatcttcttcttgaatagggcagtactcaagtcttaagcaatttttgttttgtgacttgtttgcaattgtactttttttaaaatatattagtgtctatattgcagatttgtgacatcttagattctgtatttagtatttc

SEQ ID NO: 43471 - DNA, 902 bp, Manihot esculenta
  Intron number 1 from transcript cassava4.1_018864m (locus cassava4.1_018864m.g) derived from phytozome v7.0 (chr-ID scaffold06697; pos 310778 to 311679)
gcctcaccagattcactctgcaagcacccaaaagtgtatgcttttctttttaaatgtatttttctgtcttgatttctttcaagttcagtagtataagtttgtgtttgtcctggattgctttgtttctctattcttatttctagggttgttttggctccatgtttgatcggtttattgtctgtttagtatttgtttgatcaacattttcatatattttgcttttggaattgtagtttatatccattttattagaattttaaactgctctttactcaatttgtgcttgcttaatgatgagctagatgtactcagattgatgatttgtctgctaaatagctttttgaggacatctcatgtgtattatgttccatcttaaacaagagcattaattgtgggaagaagtcatttgaatattgtaattcactatctgaagtttggctatagatggattggcagtagctttgtattttcctgatttatgagagacaacttacataaccaagtgggttatgtttcaacaactgtaaaataatgtttagattcttaggatgtgatttaatatatgatttgcatttgctctatcacaacttcacattggggacccatgcatctgaagctgtgggcttcaggaattctgaaatgttttatacttattagcttattggatacttagtttctgctcgtgaagaactctaattgcacattatattaaagactaaatgagaccactacgtctgtattcttttatcatagtttctttggtgataattaatattctttttttttctattgtctctcaaggttgcttatgcttattttaatttatatacttagctgtcatgttgttcacattgttatgttcttttcgaatcttttggtgcaggtagaggtggagtattcca

SEQ ID NO: 43472 - DNA, 546 bp, Manihot esculenta
  Intron number 1 from transcript cassava4.1_024923m (locus cassava4.1_024923m.g) derived from phytozome v7.0 (chr-ID scaffold03614; pos 2990170 to 2990715 reverse strand)
gccacctcatctccactcccctttctcagtttgaggtcttcattttcaaaccctaatccctctttctctctcaaatttgcacattccgctccaattagtggattttttttttttaatttatagcgttaattcagctgttcatgttttcccttttgttttcttcttgttggggaagctgtcattaaactctatgagctgtatatttgtgtgaatttgatttgaaatttcgtggttggccgcttttggtatttttttttctcagctgctgttttgactagagtttggagttcttatatatccacgttgttttgtttttgatagtttagatttcccttcaacagctttctttacgagctatttcaatgatttcatttctgcatcttgttagcatgtggatgccttgttttattgccttacattttggtggctgttgtgttaattctcagtgatgttttgataattgggttttaagatagtacagagaaaagaactaatcttctgctttttgcaggattctcctgtgtttaattacatcaacaatctttc

SEQ ID NO: 43473 - DNA, 922 bp, Manihot esculenta
  Intron number 1 from transcript cassava4.1_013136m (locus cassava4.1_013136m.g) derived from phytozome v7.0 (chr-ID scaffold06731; pos 63486 to 64407 reverse strand)
ccacaagttttggtaggttttcagagctgatttatacctatttctgatcgtttcccacaagagttattaggataactaaagtcaagttttgaagttgtgaacataagttcatttagaatgtacatgggagaagaggctttccatagagagtggtatttcacaaaaaaatatttacatgattcctccaatggttttgtagaaatatagagtatggtaatatgatgatcattgcatagctgcagtctacaaacatgaggatgcatacattacactagtacctgggtggaaaatttcagctaactagatgtaacttttattgggttgaggctaacagaaaataagcctttttttattgcaagctttttattaggataattaaattcaaatttttagtttttatggctgtgttcacatgttcatttggaatacatgcttaggcttcatttcaacataagtgttgaaaggatatctccggaaactctttaaacaataccagagttatggttgcatttttgctgggataatgattgattggcagttgtgatcagatacaaacatgacatgcatggcattatattataaactgggggttgaagattaactatgtagatataacttttagtgggttgagaatatagagaaaataacctttttttacatggaagctaatgttaataagtgaacaatgcgtgttgaaaagcaaatgaaatgcatacgcctgatgccctagtgctgatgttttttgttactagaatgaagatatccatgttgctcttatcactttttatttgcaagatatgccattgcttgttcatttaattttgatctaaagcacctcattttctattgaaaagtttcttattaatactttactggttcactttcaggatttaaagaagtaaaggaagaagataaaagtcaa

SEQ ID NO: 43474 - DNA, 851 bp, Manihot esculenta
  Intron number 3 from transcript cassava4.1_025111m (locus cassava4.1_025111m.g) derived from phytozome v7.0 (chr-ID scaffold06631; pos 156717 to 157567 reverse strand)
aagggaataggaggaagaaaggtactagtatctgatcatttgagaaactggcacttttatgtgctttctgaaaatctaatacggatattgaatgttcggagtatacagtttacttctcttttgttctccctttcttttatctgttcaatagcattatctgctgagtttttgacaatatgttgtatttcaactatttgatattttatagtaaggagatgggatatcttcaacttgttggtttgaattttcattttagaactagttaaatattgaaacagtatgagactattagaattgctgagatattcccttgatttatgggatgactatgagaaatcatgtgattgattagcaaaattattggattagttaatgttcatattaaggaagatttttggaaaaccatatagatattgtatcttcccctataaatatggattttcatgtattatgctaatatactagtcaatgaaatgcaaccctttagggtcttgtgttgtgacgtaggctctcagtagcccaatcacataaatcgtctttgtttttttatcgtatcttttctatcattctaaatttcaacagagactacatttctcagtttttttgttggtatgctgaattttggttttaaccagtctattgcactggtttcaaactctttgccattttcattataaactcttctcagaatttacatatgtatgactgcttctgttctggtgcttgtttctaaagcatctctatgttgtaattcttcacattctaatgccatgtcatatagaggcaaaggcttttactgaggcacttctcttgcagaagcgacaacacgatagatctatacctacaagtga

SEQ ID NO: 43475 - DNA, 707 bp, Manihot esculenta
  Intron number 1 from transcript cassava4.1_033873m (locus cassava4.1_033873m.g) derived from phytozome v7.0 (chr-ID scaffold07012; pos 1561038 to 1561744 reverse strand)
aggttcttgtaggtacttactcattccttcaacctccttaatccaccttctttcattccttagcttgtcttattatacttttgtgctgctcaatcttgaaaaggttgaggcaaaagataaagtgttattttctttgcttggaattatatttttgtgttgtaggacaattttatcatgagtctgattttccatgtttagttgtctctctgaattagtttaggtcccaaatttaagtagtattatgtaatttgagatttgtgaatggtttgaattattcatttctggtttgtgttttggaaagaatccttcaatgcaatgaactgagaaaaattcacgtagatctataagttaaagtttgagaaatgttcctattacaagtgccattgtcatgatattaaataatgagctaccaggtccatgttataggacaatgtatttataaattgaacttttcttcaaataaatatgtgtactagctacgtttgtcattgctttaattcagtaaccggctattctgctgcctttttttttgtgttgggtgcaagcaataagctcatggttggcatatgtgcttcaaaagaaagttatttgtcatcttttcaatcaataatactgtgtttgtgtataagcaatttggcaaaaaggaagcgtaacatatttgtgatgattattatgcagaaattgtggcctcattttcttttgaagct

SEQ ID NO: 43476 - DNA, 949 bp, Manihot esculenta
  Intron number 4 from transcript cassava4.1_005066m (locus cassava4.1_005066m.g) derived from phytozome v7.0 (chr-ID scaffold09835; pos 14260 to 15208)
ttggttctggccaggttcttcccccaccctgacttctcttttgctaattatatcttatgtttttgtttcctggatgtaagacgcttattctgaaatcacttgacattttctcttgtttccatttctacacgagcagcatttgttggccgttataggccatgtcatctaatacactagacatgttaatcctcacatctgataaataaaatctgttttcaggcttttgaatatgttcttaattaattaaaaaaagttctgggagtaggctttgtattttcaatgaagaaaacatctttccttaaaacttgaaattttagcaaaaaaagtgtgcacttagttttggcttgtacttgtgaatggcctatctacatataattttaggtctggaattttgaaaaatggttatctccctcccttgcaagtgcatgcaatgcttatttgtaatattagacaagtttgtcaaaacaggaaccttaaaattgctaaaagtacttgaaatacgaggaaaataaagcataaagcaacataagttaaaattacaagaattaaatataagttgcatggtagttgcaataagatattacaaccattgcatcatgtattaggtttggtttatgaggcctgcagtagtaaggtgtttctcttacccatcaccttaccactatatgtggaccctcagtttcattatgttttatggggctcgtcagtggttaatgccgtcatgtaaactctctcaaaacttcaaaattcccctttcactccaacactgaactcccaagtactatatgtcaatgatctttgtttcccttgcgatgcaaactgagttatttatattttctgtagcatttttctgaacaaggtttaatttgtttgctcttccaaattctatttaagtgattgaattaatctttcagggttatcttgcacaagttctttctttccagtatca

SEQ ID NO: 43477 - DNA, 625 bp, Manihot esculenta
  Intron number 1 from transcript cassava4.1_018730m (locus cassava4.1_018730m.g) derived from phytozome v7.0 (chr-ID scaffold03614; pos 3473717 to 3474341 reverse strand)
atctttctgcagtccttgaataccttgctgctgaggtaaatttaggggattttggtttcaatttgtttttgtgtgttatggttcctttgggttttgctcccttattgttttgttaagttaggttttttcttatgctattttttaaaaaattatttttcttatgtttcttcctgatcttgatggttttgtttaatgggtcatgatttggatttaactgttgcactatgggtcgaattgagtaatgctattgactgtaaacgttgccggtattaatcatattcataacggcaacagaaggattaataactattttctttattcttaatagataactgttttttatactcattagccgataggatgacgagctttttcttaattccttgtagcttgcgtttctgtggattggttttgtattgctcgtaaaagttttcttggttcttaggatgtattgctgttatagctgggaccataaatgtttttctattagcatcagctgaggttcttcgtttcttgcgttttgttgcctgtttgatttattagctgtttattgggttatctttggggttattgccagtgtttgttcgctaatggttattggtttaggtattggagcttgctggca

SEQ ID NO: 43478 - DNA, 705 bp, Manihot esculenta
  Intron number 1 from transcript cassava4.1_015475m (locus cassava4.1_015475m.g) derived from phytozome v7.0 (chr-ID scaffold03049; pos 246201 to 246905 reverse strand)
gtttggtctcgggatataccattcgggtgtacaaggtttggatttttttctgcctttgttgttcttcagttctatttttacatttcatcttccaatttaaattcgtcgtttcgtcccttttttgttatttttatttcatgaattttgttatggtgatattttagctcagatctgcgtctgaaacgatcttatttggctttgtagaaaatgggaggaagtgcaattttcattttgaggaataattattagtagcaatttttatttgcctcttttttctgtatttagattatttaatggctcagtgcagaaaattcttcgaacaatggagacgtaatctattgattctatatctaatctcacataatatagtttttaaataggaggagaaattcgctgttgtcaaatgtcaaatgatagtttgctaatttattttgtataatttaattattttgatctcagcagtcgagagctggtaaaacttggtttggttgttgagatttggtggcagaagaattgtgattaggccaacgagtgtggcttttactataaattattggtcttttttaattgttttagccggttgcgaatctaaacagacatagtgagactttgttttcattggttttctcgttggcttcttctgaattaaccaaagttgggtttttggctgagatgatttctatgattctacgctttctgcagttc

SEQ ID NO: 43479 - DNA, 1017 bp, Manihot esculenta
  Intron number 2 from transcript cassava4.1_007507m (locus cassava4.1_007507m.g) derived from phytozome v7.0 (chr-ID scaffold03614; pos 2796076 to 2797092 reverse strand)
attgatctgggctgtctgcctgtggagaaactgaggttagtccctgtccaaactgcagccaagtctcacagggcaccttcttttatggttagaattggcaatcatataaacttattcctaaagaacaaggcatttttatattgctaaattcatgaagctgttagctccaatgattcactgcatgtttttggaatttgttgctggatcatgttagttattgattggtcagtggcagttaactgcgcactagagagtattgaactttaacagtggccttagcaggtgttacttagtttactatttgatgtttttgcttaagttgcaccttttgtttttataatttttttattttattgttaataaatatctcttgaatccttggattttctcctccttttccttttctacctttcacttgtgctctaattgaggtgttactttgaccttctgaaattaatatatgtatcgttagtttctgtttcctttatttgggtccaattgtcgggggatattaaggatcaccaacactatgcaaaatgtaatttgatctgtcgaaaccagaggatatgctttagtgctgttttccttagctgttaatcattatgagcttctgtttatcaaaatagttctttgtatcatcttttccatggtcctgggctgctgctaatgccaattttgcctaatctgcttgaattgtgtgatgtctttctggctctgtatgagcgagaagattgaattagatatcttttcacagaagcgttaagaccactttctgcagcatgagatgtaaattctaaagtggcttttcatctgactttgagctggtttgatgtattggttttttaacaatttaggctaattgcacacgcttgcatgcctcacttgacgagaaatcaaacagacagggcaaaagttttgaacattttcatctctaacagaaaatatcctctcaagtctgtgtgcatctcttgattttttgcaggccagaccacaatttgcaagatataagggccaaaa

SEQ ID NO: 43480 - DNA, 896 bp, Manihot esculenta
  Intron number 1 from transcript cassava4.1_007390m (locus cassava4.1_007390m.g) derived from phytozome v7.0 (chr-ID scaffold03614; pos 1541446 to 1542341)
cgcttctctgcctttttcgtcttaggtacatttcctaattcacctatttttttatgcctgctaaatttcgtttaattttccgtaatttagaatttgctgttctggatttcttatagtttttttgcacattttgatgcttatttgaggcgttgactttattgcgaagctttctaattttagtgttgcgtctgtgtctgggtcattgattcacctgcttccattgaatcttacgtagttctgatgccttttgattttcttgattcgggatttgtggtttttgggttgggtgcatggtctgatatttgctttaattaatcagatttttttagcaaaaatttatacagccacttaaatttcattttctttccttcttttatgatgttaaagtgcatatggtgtaatttttcctagaagaccttagctccatgtcccactttgtgttgcttaacaacttgcttcactaggcttaagttgctcttcgactgttgataggcattttgatttcattactccttatggagcagattttcatgacaattgaattatatattttctggttgtgctttcttatctaattcatggctgtgcgaaccctttttcatgtttgcatgatctctggtccaatagtttaatgttaattctgcctttgcaatgcccatcaactcaatttcgtggtgtgctgtggcatttcagtatattgcaattgtgtatatgctgttgttggtatatatgtgtctgtggggctaatttcaatatgcatggatttcattacaagtttctgttacttctagtttcgctgttggagtcttttatgttagcttacaattggttctcattgtttagcattattgttttgctcctttttaacttagtgttcttgttgtttgctaggtaca

SEQ ID NO: 43481 - DNA, 662 bp, Manihot esculenta
  Intron number 1 from transcript cassava4.1_014816m (locus cassava4.1_014816m.g) derived from phytozome v7.0 (chr-ID scaffold06314; pos 110938 to 111599)
ctcgtaattgtctcataactctctgcctgcttttgcttttgtaattgtttctgctattatttccttttgtgcatttgaattttgactatgtagccctcagttgagtcgtatgctttcaatttagctctatatggctactgggttagggttttctattttcagttggtggctatcttaatctcgaagctttaaaatgtttgtgcctgctttagcctgctttagaatttgtggagatgaaaaagtaatcctgatagaaagaaatgcttacttgcgactctcagctgcttttgcttagaaatctaattgacatgcatttgatttgtagtagtaatctctaggtttacaaatgtagaagtgggtactcttacattgatgcacagagtgcttttttgttctcgtattaactggactgcctactcggtagtacattacatgttgattgatctacagtgtagtgaaattattgtgaatacttgatgaagtttataatggaactctgttggttttgtaattttcagattaactaacttactatcatcttgtgaaagtggtgcactttctgttgaaagctcttctgacccatgcaattgcaatggattttttctataaattatttgtcattcgaaactgtctaatagggatttcttttctatattgtagtc

SEQ ID NO: 43482 - DNA, 839 bp, Manihot esculenta
  Intron number 2 from transcript cassava4.1_016860m (locus cassava4.1_016860m.g) derived from phytozome v7.0 (chr-ID scaffold07107; pos 26918 to 27756)
ttcaagatacttttgcacaagagactgctgtcgttgaagatcccaacatgttaaatatctacttacatcttttttcttcttcttccttgagctattctaactgtcattgttagcattttctaattgtgcatattagctgctctttcaattgatttgtcgacagtaaaagataatgttttctgtaaattatccatcactctgcttggagagctcgagtagagagacttactgaatgtctgttcatttcatattgtggcaaatacttgcttattttttaattgatggatttttttgcataatgttaattatccagttacctttatcgcttcaaaagaattgttacaattttccaattaataatattaaatataaagttaagtttttaattgcaattgatctatctcatgtgttaagttatgatttagtttacagagtacttgttcttcgattgtatctatgtctgtacttggcatttaaatcattcatgcacaatcttgtttatcagaatttgtttacctgtctgtttagacatgcaagaatattcttattcatttggaggttgctgtttatcagtgtcttgcataggaatgagttgtgttgtgggtacattctttatgctgtttataataatgctggtttaattgagtggctgctaggagaactgttttttttttaatctccaaatgaataatcataattatacttcttttagtggtgttttgattttattgatttatttattagtctttttatactgctatgttttgtttgaaatgattacttttcaggtcccttagtgttgaccactcatatgttgtggttatctaacaggttgaagt

SEQ ID NO: 43483 - DNA, 729 bp, Manihot esculenta
  Intron number 1 from transcript cassava4.1_033473m (locus cassava4.1_033473m.g) derived from phytozome v7.0 (chr-ID scaffold07595; pos 219589 to 220317 reverse strand)
gtggcctcaatttgtgggtgggattcacatcagtaatttaaaaacccttaattttactttttttccctgtctatttacttaaaagcaagaaagtgatctcaccgtataatgtctatagtattccacctagttgttcttgctcaatgagtagttgctgttaattttcctcctaaatgctctttttgttgactgcaatgattggtttgtgagtttaatctctttgcaaatatattagggttctttgttgttccaatatgcagcatttttattatgttttcttcttatttgttttcatgtatttgatctgaatctgatacaagttctgaatggagtgtcaagtgaaagtgactgctcttacaaaaacttccttcattcgaaatttaatttgagtatgtatacaatgtttgcatgatttcaaattgaaaaagaaatctaaggtttgtgaattattgatatttgaccccgttttcaattaattacagtaataaatctggttctcctcatcccttgtctcattttttcaaaaaaaatttgagaaagtcagtcccttagattgctatggttatgtattacaatgccttggctcaaaatcttaattgtgatcttcgaatcacatttggtagtgatccttttcaatgagttactatcataatgtatttattctctgtgctgcatttatgtctcactgagacagggaggacaaaatcttgatagaacaaattgcaagag

SEQ ID NO: 43484 - DNA, 752 bp, Manihot esculenta
  Intron number 2 from transcript cassava4.1_029166m (locus cassava4.1_029166m.g) derived from phytozome v7.0 (chr-ID scaffold07519; pos 343445 to 344196 reverse strand)
aagcctttactatctatcgtgaacagtgaggtcctttacttacctcgtctttgagtcagttttcttgcttcagtagtgatattgccccaaaagagttgctaaggattcccccttcacttttccctttctaccctatttttttttcaaatgaacttttgtggtgattatttatgtaaatgaaaagaaagatttactatttagtctctggatattatcattattaacaagtcagtctctcagttttgataaacctattaaaaaataaagatttaataggtttctaaaaatataaggactaacttattaataatgataatactcatggagtatatataggggtttactgagggcaaaattgggttttaaattttttttttctcattcttcatttattttttacggaaaaaaggacgaaatgactatttcgttgataaagagaaaagataagaatgttttaatagatttctgaaaatgtagaaactgacttgttaataatgataatactcagaaactaaaataataaatctcccaaatgaaaatccattatatccttctctctgtaggctattgctagttttgattctatgatattagaatagaacaaaaacaatgttttgcccttttcaatcaactaattcaaaaaaatgcttttaacttttccagtaaagtttttatctccttatatcattttcatttatttgtgctgtctaaaggttttagcagtctgatcaactggtatgctggtaggtatt

SEQ ID NO: 43485 - DNA, 828 bp, Manihot esculenta
  Intron number 2 from transcript cassava4.1_007826m (locus cassava4.1_007826m.g) derived from phytozome v7.0 (chr-ID scaffold07991; pos 240267 to 241094 reverse strand)
cgttgacattgagaaccaatattataactctaaaggtttttaattttcatttttcattttctaagcaaattgtagaaatggactctctccctctccatatttggaaaagttccttgatattgaattctgcgtataaattaattcttacagtggtgtagagttctttgatttgattgtattttggaaaaaccttctttattttttagtattaggttaatgttgtaaaaatttttggtaacagctaggagttattacctaaaccagtgtgctgactacggagcaaattttatgggcttttccttttttattcagtggcaatgccttgtactctgtattgtggtttcttttgaagattattaaggaattggatctcaaggaatggatttctttttatgttatcctactaagatttattttgaggcaaaaaaaatttatggaatgattttacatattaaaagaatcagttagggcgaagatgaaattttgttttgttacaatttcttttttttttctatgtaaatgtgcttttctcgtttgaatgctttcacatttcattaactggtttcactgaggcaatttatggtccattatttacatccttgattaacagttttcagatgactagccattggctattatgaaattccttaaaatttgttgttggaaaatctattgctctatgatgtgctctatatgcagagaaggttgtaatttttgtatcaggtttgctcattataaatttactaatttattgtttctgttcccccctacatttcgtcttcattgtaaaaaggtctggttgaaacagacccagaaggagcacttgca

SEQ ID NO: 43486 - DNA, 942 bp, Manihot esculenta; identical to SEQ ID NO: 42931
  Intron number 1 from transcript cassava4.1_005646m (locus cassava4.1_005646m.g) derived from phytozome v7.0 (chr-ID scaffold04374; pos 101624 to 102565)

SEQ ID NO: 43487 - DNA, 819 bp, Manihot esculenta
  Intron number 1 from transcript cassava4.1_027603m (locus cassava4.1_027603m.g) derived from phytozome v7.0 (chr-ID scaffold09876; pos 587699 to 588517 reverse strand)
caggtgcctgatttcatccctctaagacttacctgtctttattcatatatttttatatatatatatatttcaaatgcatgaggaagtttattaaaaattttgaaatatttccggatttcaaaagttttacatggtcgattatcttcattcaagaagttttctcttcttaattacatgatttttaattttcaaaacgaatattttggtacatggtccggcaactatttaaaccaaaatttaaattctctaaaaattaatatggtaatcgatggctaaaaatcatatagtattgttttttttttaataaatttcttagttatattttttgaaatgggattggggatggaactggggacagcaaatagaactgagacctctcacatgtattgatacacttataactaagtctgtgagtttaaattttttaattatttaaaattaataaaatatatgatttataaaaaatattatgttttttttagataatagtgtaatttataaatatttattaatgataataactagtctgggcatctccatgtttaattctgagtctgccctcctctttatttccttctagattatcaatgatctccaaccaacacgttctacacagcgaaactcgaaactatataaatcactgattaatgacattgctttagctatatctggttggtttattaaacattaactatctgcctatgtgaatttggtttattaaacattaaatatctgcctatgtgaattccaaggccaaatcatatgattgttattgatatttcagattgacccatctaagtacaagagcatcacatctgg

SEQ ID NO: 43488 - DNA, 920 bp, Manihot esculenta
  Intron number 2 from transcript cassava4.1_031776m (locus cassava4.1_031776m.g) derived from phytozome v7.0 (chr-ID scaffold06512; pos 746023 to 746942)
gtcctccacaggcaagcatacatcatccttaatttcttatcattattcattaatctctctctctctctgtctgtctctctctctttttctctagctctctttgacctaaatattgtgaactccctcttttcactcctttaaaagtctataacagaagtttgttaggaatccattactatcagttcacgtatgaaaagttctaaagtaaaacctgccgcctctctctctctttctttatctaagggacaagatgattagctcttgaaaaattcttcatggaaacaaacctaacacaacccacatccatctcaatggattagattcttcttctttttaatttatgagaatttcctttttttataataaaaaaaaaaaattgagtatacatatgccttcatgaattgatgaacgactttgaagaaatccacaagaataatttatgtcggtgctgtgaaccttctaatcttagagaccctagtaccatattaaaaaattattcattcaatcttgtaaataagtaacacaaaagtttttatatctttgaccatgagcactgtagatatgtgtgaagatggatgcctcccaccttctctaagtcaaaagttagctttcctgttccaagttcctttcttttatgggattgcctatgtcttttttgttcattttgtcaaaagaaatattccaattcccttctctctccttgtttatcaattgcctttgacaactactactgcatatctaactaattaacatctctttaccaaacaacaagaaacttacaaaagtcccaaagaaattccatgcaaaatctttctgagcttgtcaaaaactaagaaatcatattagagagagagagagcttttgatacctctaattatgttaattaaaaagtttttggttaagttattgcaggaagaagg

SEQ ID NO: 43489 - DNA, 562 bp, Manihot esculenta
  Intron number 2 from transcript cassava4.1_009618m (locus cassava4.1_009618m.g) derived from phytozome v7.0 (chr-ID scaffold07571; pos 585139 to 585700)
cagattattttatagccatcaacgttaaatttgaggtaatgtattaagattaaatcccttcatggcaaactgaaaaataggttgctttggtatatatatatatatatcctaataatataaaatctaccatgaatttggatagtatatgacaaagttggcaatctagcattgagattccattgatattccaaaaaaaagaaaaaatacatgtaacactgcaaactttcacgggtcttcaaattccagtccatattatgcagacctcactataaaattcttttttttttaaaaaaaaaaaaatcccaaatcacattacagaaacacatgcatgtgaataaatttacccattagttggtagatttttaaataaataattgtaagtggggttttaaattcaaatacatatattgtaaataggcaaaagcttaaatttttaccaaataaaatcctaatactgcgtatcaaaatttgaacagaaaaaaaaaagtcgattatggaattttatatgttaataattaaaattgcagaacacagctccgcacgagatagggtccaaaggagg

SEQ ID NO: 43490 - DNA, 719 bp, Manihot esculenta
  Intron number 1 from transcript cassava4.1_010540m (locus cassava4.1_010540m.g) derived from phytozome v7.0 (chr-ID scaffold00080; pos 511822 to 512540 reverse strand)
tatttctttcgacaatctcttctttttacctccaggtaactttcttaggggctacttattcctctttttctgttcattctcccaagtatcttctattttttccacctttgtatctctgcaactttgggggatcgagtcagttttttggatttgttgaaaatttgatggatatccggatatgaccatgcttgatgtgaaccatgatacgtgatcaagagttttaagagctaaagttatcatttttgttcagttttgaatgtaaagctttgaccttttgctggacggtttgattctttctggtggatgtcttagtgatatgtgtaacctaagctgaaattaaataattgtgagcttttgtttgtggaattttaattcgtaactgtggattcttatatttatctacttttatgtgataaaatttcatgtaatagacttaaagaacatatcgaactcaactgctctgaaaaaaaaagaagaacatattcttctattctaactgtcttggagcttgtactttgtgagtttaagccaatctgaagaggttgatgttgttttcctctgcttattatttttcataagatgataagtggaggttcttcattctgaatattctgtctttatgttttgattttgaaaattgctatctaaactcttttaactgaataaacgttatcttttcaacagtttattgctgcagcaccagattccaagctgaagct

SEQ ID NO: 43491 - DNA, 843 bp, Manihot esculenta
  Intron number 4 from transcript cassava4.1_009087m (locus cassava4.1_009087m.g) derived from phytozome v7.0 (chr-ID scaffold04175; pos 250187 to 251029 reverse strand)
acacatcaaaggtatgtgattttccctattattaacattgttatgctgctcacaatcgctagattgcttttgtacaagtttgttgttatcagggagctttctgagtctctgtttattcagaacatgttttcacaatcaggtatataatgaatagcaagtcttttcaactggcaaagaactcaaagagctactaggtgtttgatgctagttgattgattagggagcagcaaattctttgattgggtgtccactttgcttttgttcttatgttttcattttatttttttggttcttatgataaaaaatataatatttgagtgccttttgttataagaaacctgggaattggtttattacaggatgtaatgaatgactgctgttgaatgatacacttgcttccagaataacattgaaaaagcacgattgttattctcacaccattgcctatctaaaaaaggatacatagtgcttctgtaatgcgtaatattaatgatgtggctgcatatgtgtaccctacattattgattttaaagagcatttttaattgttacatacagctgggctacatatatatatatatatgtatatatatatttcttctattgttgattatcatagaactaccagtgtcattttgcgtactcttgcaaattcatcacatgcatgaccatgcaacatgcctctacaatttgtgtaatattatagtgcacaacccaagtagcagtgttctctttgttaaaaagaagggagaaaaagtgaagctctcttatatggtcagcataattttctcactcacagtatgctttcttataacttctcagatttgggtcccttcaaatcccc

SEQ ID NO: 43492 - DNA, 937 bp, Manihot esculenta
  Intron number 1 from transcript cassava4.1_009087m (locus cassava4.1_009087m.g) derived from phytozome v7.0 (chr-ID scaffold04175; pos 251714 to 252650 reverse strand)
atcttgctttagctattcagaatctgtttattcaggtgcattttacatgctttatgtatgcaatctcaagatttttgctccttcaacttcaaaagaccttctcatgatactaacaactttcctttgatttgtttcgagctactagtaaatagatgaagttcatttacaagcaattctagctgtattcttatttactttaagctgtttcttttttttcctctatatctgcttttctgtcctaatacaatgccggggatctgggtttttgtgttgattacaaattaagatttagatgttaattaaaagggccatgaagtagcttgattatgtaggtaattaaatttgaggatttgaattggagtctcttgaattgcgtgctttggtttgtttattttgtaaaacaggcgacttggttggtttcccagtagagttacttgtaaaagggctcagcacatgcttgtatgatggtgttttaggaaatgttagtaaataagtagagtaattttataactccatgaattgagcaatttctgaggctatgaataagcaaagtcatttagagagtatgactaatggaaaggagagaaagaaggagcttattatcttggcaattcttatcattttagtttctcactgacttttgcattgtaacaggacttctttactttgtaacagaatacaatttcattttatatgacaaacttatatcggttccattggattaattatacagttttatggtctcaaaatttaggcacttgcttcctgaccatgttgcataatttcaatttgaatttttactttggttactattgtgttttcttgttctggctaattcttcttgtggattcatgaataatattcatggactgatagtgatatccttgtttactgctatgcaggttttcgttccttccctaaaggtctctatctatat

SEQ ID NO: 43493 - DNA, 222 bp, Manihot esculenta
  Intron number 2 from transcript cassava4.1_022421m (locus cassava4.1_022421m.g) derived from phytozome v7.0 (chr-ID scaffold00080; pos 363318 to 363539)
aaaggtgttcccctaaggattgaaatagggtccaaagacttggcaaataatcaggcatgctaactcattgtcattttctttgctgtttttgttttcttccttgtgcatgatgattattttgaatattatattgctcttggtttgttcccctttgtagataagagttgttaaatgctaagatgattttgctatgttctcaggtccgtgctgttcgtcgcgaca

SEQ ID NO: 43494 - DNA, 376 bp, Manihot esculenta; identical to SEQ ID NO: 42688
  Intron number 1 from transcript cassava4.1_014528m (locus cassava4.1_014432m.g) derived from phytozome v7.0 (chr-ID scaffold07991; pos 349107 to 349482)

SEQ ID NO: 43495 - DNA, 545 bp, Manihot esculenta
  Intron number 1 from transcript cassava4.1_015441m (locus cassava4.1_015441m.g) derived from phytozome v7.0 (chr-ID scaffold07595; pos 201619 to 202163 reverse strand)
aagctatcgcggttcttgcagcagtccaggtttgaatttcatacctttaaacagttaaaaaccctagttctattcttaatctccattagtattcagtttcgttatttttgtttgtttcttagtaaaatcattttattttccctgttatgggttttcttagcaatcaaattagagtttatgacattgtctttttgctcttttttgaaaattgtagtttcctagggtcatgttttgatttatttacatttgagcaatgattgtatatcgagttatagttcctttgattggaagtgtctgttctcatttattctacatgttaagagagttgaagttgggcatttttgagaaacttttcattattcctttcctacaatcccctaggaatgtcattaaacacataacagatctctaactttaatgtataataaagttgattccttttagttatttcaatattgtttaggcttgtaatatttgctcttttagtttctgattttctggtggttacttttgcgtaaataggaattcatttgggaatcatattg

SEQ ID NO: 43496 - DNA, 924 bp, Manihot esculenta
  Intron number 1 from transcript cassava4.1_031625m (locus cassava4.1_031625m.g) derived from phytozome v7.0 (chr-ID scaffold08107; pos 153940 to 154863)
ctagtgttcgtgaactcaatttgcagctcactcaggtatcatattccacggattttatttgaaaattaaaaaaacatatttcattataattcttttccttgatttggagattttaacttaaatacatacctttcgaaaccttctaaataaaatagcaagacaaacaacaaatcttagaagttatcgaattaataaattttttatcgtagtttttatcgaaactcaaatttgaaatcttataattttataaactatcgaaaaattatactcaattttagtattctcgttacgaattatcgccctttaaaattttaatttttaattaagagtaactcatatataatttatttttaatgtacgctatatttaatagcctcttattttttaaaaagaattagaaaattgattttttttttattgattctgattaaataaaaaataaaatgagtttaaatttaataaattataattatatttttagtaaaactgattccagttaaattataatttatttagtataattatattaaatttaatttaattaaataaaaattatgctcttattaagtataaatatttagaaataaattgaattaaatccctgtatttttacttaataaccaaataagtttaatttaaaattttaaatcaattaagtcattaaataagtctgtaatattatttttttaataataaaatattatttttataatttaaaatatcaaaaatttaatactttaattaacataaaaaatttaaaaaatatatagatataataaataatttttaaaattataaaactgacatgcatgataatgtatagtgattcaacaaatgaaagttgagcaaatttgccaagaaaagttgataacttggaaaatactaaccaagagatgcatgcatcaggtttgcaaccaattggaa

SEQ ID NO: 43497 - DNA, 809 bp, Manihot esculenta
  Intron number 2 from transcript cassava4.1_003384m (locus cassava4.1_003384m.g) derived from phytozome v7.0 (chr-ID scaffold01551; pos 701554 to 702362)
tggagcaacaagagtggtattcaatcatctctgtatgccctctttttgctttactagaagcatttctttttggtactgacagttatattccaaggtttgcttggttggatgatgaggaatcttaagtgatatcttataataaatttcttggtgaattgtgaatctatagcttaatatttgttgggcactagtgcttttcattgaattgcatttacaattccttttgcagttttatctattcttccttttattttatttgttttgctaagttaaaacccctgtcagttcttaagtagattatgggcgttgataattatgctgcttaagtccctttgcagtttccttaagaggattgtaaatgttgatgttaatatgttatgatgtttttgttgaagttgttgcatgcagaagaaggttaatcagcaaagattgtataaaaggaaactaaatgatttccctaattttaatagttaataccaacattttcagagaatctgcaagcacaatacctaaagggctagaggcttttctttccttatcactggttcaggaattaatcattcacaggctaatgtgaaggaaaaatgctaatatattttaccaaataatctgtagttagttaaccaaaaaaaaaaaaaatctgtagttagtgtagaatcagctatattttggccttgaagtattgacttggtgctttatgaatgttggtatttagtactgttcacttaggtatttgtttgattgttgattattatgttttattcctcttcccagatccagtatcacttgttcgagatcataacatcaaa

SEQ ID NO: 43498 - DNA, 415 bp, Manihot esculenta
  Intron number 4 from transcript cassava4.1_017906m (locus cassava4.1_017906m.g) derived from phytozome v7.0 (chr-ID scaffold04882; pos 100639 to 101053 reverse strand)
aagctgtaggcaaggttgttcctggtacacctaatgtaagctcaactatttgaagcctccacatctttatgattcttgaagcattaaaacatctatagaatagaattcaatacggttgagcagattgtaaaatgttatatttcaagttttcttctgcttctgtattgttggcttctatctccaattctatcttttgcaggcactgtgcaagttgctaatatgattaaattttaggtgtatatattcctagtgatcttctgacatctagcaattcttacaccatcttgattgtagagacaggaaatatagctttgatctttgattaggagatgcatttgaataatttgaatatgtggttctctatttagtttcctgaatatctgatttggtttgcaggagatccttctagtgctag

SEQ ID NO: 43499 - DNA, 779 bp, Manihot esculenta
  Intron number 7 from transcript cassava4.1_005023m (locus cassava4.1_005023m.g) derived from phytozome v7.0 (chr-ID scaffold03332; pos 90563 to 91341)
cagttaattggttttcttcaaaatcatcaaaaaaggtttgtgttttaaattgaaattggtgcgtaggttctaaaatattacagagtgcttctttttttagtttataatgcaaggaaccttttattttttcttatgcatgctaacaatgaatgataatctttataatagtttctacagctatttctgtatatttgctaccaagacagtcttttccatttgggtttttggttattttgaagtcttttatgtttcaccgcatggactatcattgaattgctgttgataatattataacaataccgccatacttggattttatctcttcttaaaggcttcaggttgtatatgttgaatatgtcaaatattcttttgcctatatgttgaatatgatctaatttacaccctctgatatgtaacatcaagtggaaatatgtgaatatctatttgcctacctggacttgtagaaaatttcattaatgtcctgaaataaattcctttgatcattataaaaaataaattttctgaacctgcaagtttgatttttttcctttcaatttcagttttcaggggacaagcttgaacacttaatcattgcccattggcctaatgatactaagttcttcatacatgcacaatacttgtgttgcattgtgttcttctgtttgcttttgagttataagttgttattggtatttaacttacaccttattaccttcctttgtgctcaaaatttgtggtattttcataggtgcctctatcctcggttacatccatcattg

SEQ ID NO: 43500 - DNA, 413 bp, Manihot esculenta
  Intron number 1 from transcript cassava4.1_026878m (locus cassava4.1_026878m.g) derived from phytozome v7.0 (chr-ID scaffold03614; pos 1685380 to 1685792)
gttgtgtctccaccattcttgctctgcaacaacaggttcattaatttgattgtggttggctttacttctactctttctttcttctattttttttttttttgatcttgtctattcattctaaaagattatgcaacagaatggcactgcatacactatacatttacgtaggcaaggttgattttatgcgaatgggacatttctggttgttatatttcattcactgccataatgctctttggttctttttggaggagagaaacaaacttacttaaagatgtagagcgttaaagatgacatatcaacaaattgttttcaactttagattaattatagtgttattcttaaaacgtaagttgttgttaatattaaggataaattacttgcaggttgcgtctctgcaggcggagcttgcg

SEQ ID NO: 43501 - DNA, 708 bp, Manihot esculenta
  Intron number 1 from transcript cassava4.1_016643m (locus cassava4.1_016643m.g) derived from phytozome v7.0 (chr-ID scaffold03332; pos 793123 to 793830)
aggtatttttctagttctttttacttttttgagccaatacattcgttttattttacgtgggttcttcgatttgcgcaaatttgctttcgttattgtggaaatttgagaaaaaaaaaattgaggttttcgttaatgtttctgatgcaagtgctttggtattaatttggggggggtattcattatttgctacagttttttttttttctctctctgtttcaacctgttttatggagtctttcttttagatttgtagttgcgatggataaatcgagaaattttcttgcttatttaatggtggacccgtggtagagcaagaatctcgatgcgagtgtcagaaaattttgaaataaactttggatttatgcttgtcatgtactgaatcgttagtttgttccaggcaaagtcagtggaaagtggagactttaattttgtttaatcgtcaattagtggaagctgagaattcagatttcacaggatttatgtttgtagccaagcgtgcatgttaattgtttgttcatgttcatttatttgacttggattgtttcattgaacaatgcaattttcttatttatgagtcagatctaggaaaaacctgtaatttcctttagcaagcttcactcagtttgtttctatatcattactgtacattcattgggcttctctttggtctaaggagctggaagtgagaggcgagtggaagaatcactg

SEQ ID NO: 43502 - DNA, 486 bp, Manihot esculenta
  Intron number 1 from transcript cassava4.1_000179m (locus cassava4.1_000179m.g) derived from phytozome v7.0 (chr-ID scaffold02828; pos 7971 to 8456)
gacccgtaagctattctatgctctctctttactgtcatgatcagttagttcttcgtttcaattggaagccatcttcaatttataagcactggcatttagttttatcagtttaaaaaaaccatgacttatttgttgtgtttattttattttatttaaaaaagatgacttagtttgaattgcttagaaaatgtagaagttttgatgttgtattcttttttggaactttggttcttgaaagggaatttctttttcgttttctcagtggtaacaacatagggtacaaaagataaaagaaatacaagcatctagctttgtacagagaaacacaactaattgtggaatagagatgcacaaataatttatctcagtttcatctaattgagaataactgatgtaaatgatttctttaattctatcttttgtatttttttagcagcatgagtttatgaactgatgtctgatcaaatttcacagcattggggtcca

SEQ ID NO: 43503 - DNA, 446 bp, Manihot esculenta
  Intron number 4 from transcript cassava4.1_008770m (locus cassava4.1_008770m.g) derived from phytozome v7.0 (chr-ID scaffold06005; pos 205667 to 206112 reverse strand)
atagaaatcaggtcttttttggcgtctctttctctgcaaatttgcctgtttatttattgtatgctctgttattatttgttttcttgaatgggaattttgtctttttggcttaacgatggtggtcaccttcggagttgagaatctactgtaaatgttttatgtattagcatcatattcttttgttgacttgttttagtttttgtagaaaaatctgcttagctgtgtcttagccgttttgacttttagagcaccagggctaaaaaggcttttctatttagctaatccctgttgtctcagaagaaatttcccattctactaaatttttatacttttggcttatgataattacttgataattgcaagtgttagcttccgtttaattcaaaaagcttagaatgttgatacaagtttctgattaaggatgtttatggatcatgtgtagcttc

SEQ ID NO: 43504 - DNA, 945 bp, Manihot esculenta
  Intron number 2 from transcript cassava4.1_029874m (locus cassava4.1_029874m.g) derived from phytozome v7.0 (chr-ID scaffold12725; pos 73905 to 74849)
tactgttatctatgttttcttctataatatttattatactgtttgctttaccatatacttattaaatttatgccaaaatcttttgttgtctgactaaggattaaggtgccagattactgatattctgtggatgcggcttcactatccccatccatttctcttaagacagattgattttagtttaatggctgcaatataatttttatttgttgcaccgttttctccccttccattttctgggggaaatattaagctgtcggaatataaggaaaggacaaattcccaaatcggctaggcaaagaaaatataaatggcatctaaagtgtggcaaaccaaacccaaatggcttgggccatattggtgacgaggattcaagtttcaactgtataagttgaatgctagctattgttccactgcagctagtaatatgtgctctccctaattatggcacatcgtattctgtttgtaactctaaatttcacacctatctttagcctttttctttagtatctatattttgatcgtactaaagcagtttaatttccaggtactattgttttttctttggggtttcatttgctgcaaggtgagcagatatctagtcatttgttctgcgtgtttattattacttgcgcatcaaatattttagatttgatggcagcatagatgacattttaaatacaatgtaaattcatcttgtatctccttaatggaataatggatgcatatgaaattgcagattggatgggattctgtcatgagaatgagtgtggatttacgagacctttttctctatgaggcatttttatattacaatcctcttcttcttgtggttagtaatggttttctattggggatgactggatgagaccaatttgatctgattcttatattctttttcattgtgtagtgagattttttttcctggttttcatattgcagact

SEQ ID NO: 43505 - DNA, 271 bp, Manihot esculenta
  Intron number 1 from transcript cassava4.1_014036m (locus cassava4.1_014036m.g) derived from phytozome v7.0 (chr-ID scaffold01199; pos 20982 to 21252)
ctaggtttgtatttgtttcatagctgattgagttcccaatttattaaattgattgaaaatttttgttctttttttatttggaatttggttccttttggaatttgagctgatttatcaaaattctgtttgattcttttcttggaatgttcactcgtatgtttaatcctatttgtgctactgcttctaggttttgttttttgaatgatattgatttgcatgccagttgttgctttcagatttggtatatttccttcgtggggtctttcacaga

SEQ ID NO: 43506 - DNA, 511 bp, Manihot esculenta
  Intron number 2 from transcript cassava4.1_014036m (locus cassava4.1_014036m.g) derived from phytozome v7.0 (chr-ID scaffold01199; pos 21484 to 21994)
ctctttctttagagaaggtttagtttttttttttttcttaaattttaatgtgattttttgcactgacaattgacatcaatatatcaaagaaacagcaaaaaaaatattgcatttaaaaataacaacaaaatttatcaatcaaattataaaaaattatcagttgtttattaaattaccaaccattgactgacgaaagtttatagctagtttttcacttgtaatattgagctttagttttatgggagccctagggatgggaggtattgagtttctgtccatacctatagagagttttgccttcagtgctgatttcatagatttaagtggagcaaagaattcatgaacagttatgataaatctgttattcgtacttgttttacaggtactatgttgatgaatgttgagaaggcttattctaagatcagcaatagagttttgaattgattatctgattaatttaattttatataacattttaatttattccaggagagggcatacgagtattaca

SEQ ID NO: 43507 - DNA, 824 bp, Manihot esculenta
  Intron number 1 from transcript cassava4.1_028994m (locus cassava4.1_028994m.g) derived from phytozome v7.0 (chr-ID scaffold06711; pos 429223 to 430046)
ggccaaaaggctgtcaagaacaataagtttccaaggtcagtacaaaagttttctacctcttaattaccatctacatgtatagctaacataatgatcatgtataatttattatactgaaaacaaaaaaaaaattatattatttaaactcgatatcttatttacttcttaccctcttagaagttgaagaaaaagctaatcatgttattcctgattggcattaaatcaaatagcatttgtgcgcagatgagttcctcacaaccacataggtgttgatgactatcatgaaggttttaatttcattaagaaaatccctatctcttaaactttcactcttaaatatttaaagcatattaatcatatccaattacataattattctataagcctgcaattaataattatatatttctgtataattactgtgtgttatatcataaatcataggaattacatattttaaattacctttctccaccttaatgttttcccatttaccaaatattattaacctttaattttataaacatgtaattatttattttttagtatcactctcaattttagagtttatcatttcttaaatgaattgacgaaaaaatatatacgatcgcttgattgttcaagttcgactccaatctctccacctaccgatgaaaaaaagtttttctacattaacttgttttggagttttcaaatacgtgatgtagggtatataatgatgaagcttgattaattgaccttaattaccatcagtgtgaattaattaacacgtttgttgtttaatgcttgtagaagctattaccggtgtactcacaaaggttgca

SEQ ID NO: 43508 - DNA, 221 bp, Manihot esculenta
  Intron number 1 from transcript cassava4.1_010009m (locus cassava4.1_010009m.g) derived from phytozome v7.0 (chr-ID scaffold03614; pos 3820948 to 3821168 reverse strand)
tcaatcctgctctaattagagaaaccgtaaagaaggtaaccactccccttcacggctgctgggtagctcagaaagctgaagaaattgggttcatttggaatccaccattcaaaatgtcttttctcttcattttagttcatgggtttcgattgtttttttgtttttcttttctttagaataatgggtatgtttattttccatggatttgtgaaggtggataa

SEQ ID NO: 43509 - DNA, 584 bp, Manihot esculenta
  Intron number 2 from transcript cassava4.1_008979m (locus cassava4.1_008979m.g) derived from phytozome v7.0 (chr-ID scaffold11236; pos 44946 to 45529)
aaaaaattggacagattgaagaaaaaggtgattctctcgttgttattttctgtaaacattgtgtttctcagttgtatgcttagttaatcttgtgcaaatgacattctcattacactgtaacagttaggagaagattattggttatttttcaaaactcaagtgtaggggattgatatcaattgtatgattgtggaagaggaaataatattttggctgaatttttgcccattgtctgccatatcttttagcataatagatgcttatagattgaatctgttttttctcgatctacagtacatctttacttcaatatgcttgtaaacttcctccataaagcatattccattttctgtatttagatcgttatggttctagaaagtttaaaatttgatttaataacattttttttctcgttttcatatgaaactgaattaaattaaagagtaccaaatgtgttgccagcctatgtggggaaaaattagacttaaaagtatctgttgactttccttcttgtagtgtagttgacttttttccacttgaaattttcaggatccagacttttgtaagtttttggatagcaacaa

SEQ ID NO: 43510 - DNA, 721 bp, Manihot esculenta
  Intron number 1 from transcript cassava4.1_025763m (locus cassava4.1_025763m.g) derived from phytozome v7.0 (chr-ID scaffold06914; pos 1394375 to 1395095 reverse strand)
agaaacgatttgctagacgcatcttgtcaatcgtggtatgatttatgtgtacaattatatttctaattggctatggaaagtggtgctacatctatattgctttgctgtcataactcacatcgtgactgtgtaacataaactgctgctcttcttaacctctattgtcgttattgataagcttttctagaaatgtttctgctttaaagtaacaactatagtgagacatgaatcaaaaattggggagagaggggaggaaggtattggggtcaggaacaaaccatattgttcatccttttctatcagttggaaatctacatccttttgatgtgttcatataactgaatgtgcttactaattctgctagatgttttatactttaattcgttaggtccattacagttcataactcaaaagttatcctcatttatgaagatgtttttataggtcaacctaatggggcagttactttaataattattttgcgctgtatatattgcatgcggttcagtgttcaccaaaatatggatagactttaataaagcgtattatttttcttttagtttatatttatgattaaatcttggaagaagttcattttattctcttatatcttttcattgacaaggaaatatatttcatcgcaatgtacacatatttcatgaatctgttatgactttttacttctctatttctgaaccccggtacaatgcataggattaca

SEQ ID NO: 43511 - DNA, 930 bp, Manihot esculenta
  Intron number 1 from transcript cassava4.1_005879m (locus cassava4.1_005879m.g) derived from phytozome v7.0 (chr-ID scaffold03614; pos 1190810 to 1191739 reverse strand)
tcttcttcttcttctaatagtattgtttgtttcaggtatggcattcatgaccctttgttcccatttctttgccaatttttgtttttcatcttttttcttgcaagaattaagattgaattatttgcttcttttctgggattgcttcacttatttcactcttccttttttttccttgcttcttgttcttttgggcacttttctaggtatctccaccttctgttgatgaattccattataacccagaccatttccaatacggttaacattgagaataaacaccattggctgtcatttttttctatctaataaagaaaacaaattgttgctgtaattggagttaaaacctgataaggttggaaattgctagttgaagatgattatatatgctttttcttacgaccctttagttcatggtttaacattcttgtctcagcttatagaatttcacttgatttttggggactatgcacagttccaagcttgataactcacttgaagtatcgttctataaacatgtgaaatataggtctaatgaggctaaactcaggtcaaggttttagataatttgttgttagtgttgtactggtactgatgtggttttatgtttaatttttattttcattcacttgttgcataaaatatttgttcttcaagaaacacaaaattgaattcaggagagttttctggatatatacatctcttgcatctgcttgtttcccaaacatgtgattgtttgaaatgaaatgttcttatggccaaacatgaaacaaacttatgcatccatttctttttcattgtctacttgactgtgttacttctcattctttgtttgatttagataaaattgatacaaagaagcctgagaattgtcctttttcttttcttttttccccagaaggctatcaaagtgatctttgggatattaatata

SEQ ID NO: 43512 - DNA, 977 bp, Manihot esculenta
  Intron number 1 from transcript cassava4.1_032287m (locus cassava4.1_032287m.g) derived from phytozome v7.0 (chr-ID scaffold08316; pos 181162 to 182138 reverse strand)
tctgtcctgatttctggccatatattcttaaacaggtataaaaggttttatagtttgtcgactttgaatttaatttgtaccttttgtttggttggtggctttatatgctttcttgaaattgaggttctttaatatgaaacggcacttaaatttctgaccagctaatagttattagcttttactgttgataactttggcttgctatatgcttaaatcttcctttgtcattaacaatgtcattcttcttatgcaaatagaaagtgcaaacagtactatagcaatagctggtgtggactatggccttttgttgcgattaagttattagcaagtgggtgtataacagttttccttgcagaagtaaaaattttggtcttaaatccccttttcagttcatttcagatcggctgtggaaaatgctagttttattgctcactttctagcctaaatggagcattcacattgcacaaacatagggcattgcattcttcgtacaaaaaaccactagattaaacttgaaggaggaacaaccgatgcttactgcctcactctggaagctttgttttttaatgtccctttatttatttattaaggctcttcaacagttgaacatagttctatcttgatctctaggacttttagcttttcaagtcctaggatgcttgctacttctaccatagtcatcttcaagaaatttttttatcttgcttaccatgtccaaccttattatcttggacactgaagattcacaaaaaggtactacccttgtcgtttagaagcttgtcattggtagggtttcatgtattatactataaataattattaatagctacactgcagttattcctttctctgattcctttagcatgcatttttatttccattgaattattttcttatcatttttttttcttattggcctttttctttgtccaattttggcagttcattaacagaagcattctgcatagcaatattag

SEQ ID NO: 43513 - DNA, 638 bp, Manihot esculenta
  Intron number 1 from transcript cassava4.1_033091m (locus cassava4.1_033091m.g) derived from phytozome v7.0 (chr-ID scaffold05329; pos 95979 to 96616)
aggaggaacgcgccgctgagaacgtctatatccaggttactttttctttgcttctcctcttagttttgattgagtgcctgtttggtctagggaaatagaagagaaataaagtattataagctagatatattatagtaaaggcatgttatcatttgctgtgttgataaggtaactgcgttacttcttttatgtgagatatgttgttgtaatgaatgatccggtgaaccgttggattaactgagttcaggtggttccttggtgcccagtcgatctaacggcttttatttattaataacaattgatgattttgtttagaaagaaaaaaacctatagaactccttttggttgccaggaaaatgaaggaacggaaaggaaaatgaaatatggagcttattagtgtgactacttgttgcacaaagtaattttagaatcatataagtatgatttctttgtgtcatatgaagatgatatttacgtttgatttcctccatctcctctaatatgagacatggatgaacctggcggactttaattccacattcatttgtgcgagtctgtttttgtgtttgatattcccaattccatatatttttttctttagttttatttgacaattgtttaacatgtgttctaagaaa

SEQ ID NO: 43514 - DNA, 606 bp, Manihot esculenta
  Intron number 2 from transcript cassava4.1_027563m (locus cassava4.1_027563m.g) derived from phytozome v7.0 (chr-ID scaffold06512; pos 2160454 to 2161059)
tgttgatctttacttcaatttggccttgggagaaggtatatttaattagttattgatggatttctctactttcacattgtacttcttttttttttttggtatgtttctttggaaccatgttttttcttctaaaaaaaaaaaagaaaacttttgaaaatgttttgaatactttaaaaagaaaaacaatttttaattattagtttcacaaactgcaattaaagagggcactttgggaattgatttgcaagttgaagttgaaaattgtagacggtaataaaaataataatttaaaaaaattaaatttattgcaagcaaatatctcagcacttttaatacaataattttttattgtttaatgaatgataaattaaaattataatatttttaggatcttgatattataccattgaaattaaaaatattttagttaagtgaagacccttgaatccaaattcaaattcgaattaaattctcagtaggaataataatcaaagtccagggtttaggtccaaatttacctgatattatatcaatcatacgaaataaattaatccattttgtatatttacaggagcttacttgcctaatctctgtgacaatcctcgc

SEQ ID NO: 43515 - DNA, 581 bp, Manihot esculenta
  Intron number 1 from transcript cassava4.1_005194m (locus cassava4.1_005194m.g) derived from phytozome v7.0 (chr-ID scaffold08316; pos 601760 to 602340 reverse strand)
tccccacagactcgctcctttatctgtaagtttgtaaatttatgttctgctttgcataattgaactggtttttgtgtgtggttgattgatggaactagctaggacacctattgtttgatttaagttctctgtaaaaagctagtatctggtggtgtgattgtttaattggttgctaaatgagaccgaattttaccttacactctgtttaggaggaggtaaggttttgtaatgcatggttttataagttagtgcttttcatggttttcaaactttaataatttcattgtttatgatgaaagataagattttattttttaaggtatctgaaggttttaagacccaatcgactgatttgttgggttgaaattgaagattttttgaagtttactttaaaaaccatcgctccctccaaaatacaagtttaaagttcttaaaccatgcaaaaccttccactactttgaaaaacctcctcaaaaacagagttttaatgttttctgtctatggcatccaaagttagaaactaggctgttggatttcatgatcttgataggttccttttggtttgtaggaagggaggattg

SEQ ID NO: 43516 - DNA, 713 bp, Manihot esculenta
  Intron number 3 from transcript cassava4.1_028400m (locus cassava4.1_028400m.g) derived from phytozome v7.0 (chr-ID scaffold03332; pos 250219 to 250931)
gctaacttaaatcttattgatattttgatatcagggtaaggtagagtcggtgaagttgatattttgattgattttttttttttttattgatgtatcacctctactccataattaaatccagtgttggctttgttatattgcatgttttaaccttttttactctgtccagacaatttttgaaattcatatcttgtatatgcacatgtaaaaattagtttggtgccatttgattaagaattacgtgtttggactccattgcaaaaaccatgaattggcatgagactctggggttcatcacaggtgctgtgactgtgatccctcatgtttcttgtctttcccgttgacatctactaaacagtggtctctgcttctctaatttttgaaattcctttattcggtatgcatgggtttgggttgaggtccttgtttatatttgaactttatctcatagaatattataaaagcataaaactgcgtttagaaataaaagcaacataacacagaatgacaagtggagagaaaaggtgaatttgagatgtgcatcaggcaagaactagttgtgctatataatatgactttgtcacattaaggtgtaattcaaagctttctaatctctatggccatcttataagtgtcactggagctaagtatcttcatgatctactacataatttccaaataatgttttgcttgtattgaattcgtgattaggt

SEQ ID NO: 43517 - DNA, 952 bp, Manihot esculenta
  Intron number 1 from transcript cassava4.1_012030m (locus cassava4.1_012030m.g) derived from phytozome v7.0 (chr-ID scaffold03614; pos 3786048 to 3786999 reverse strand)
gccagcgaaaatacaggttaacactttaaacccatctctcttttttttccccccttcattttacttgttttttcttaccgtggctttgcttttcttcgttttattgatctgggtatggcgtttttatgtctcgtgatcacgatccagtgatcatgtcaattgggtagattcaaattatgtgattttttttatttgatttgcaatagtttaacctttggagtttggttgtacacttactcctgcactgaatccgttttgcaagttatctatgcggcgaggttctgttctaagacagtagttgttcaatcaacatgatcaggaaattattttgtctaaaaaaattaaattcttcaagtatggggcgttttatgattgggtggagcaataccttttggatttctcagtggagctaaatacacaacgattcaacttgcagaatccatgatcatgagagtaaaatgaagtaaatgctatcatttttattaggatgattttggatttaccaattttcttcctcccctattgattaactttttaaaactcgtttaagggaacagatgcagtgtaaggactagtgaaggaaacgtctccataagttgcctgctttcaaatgtaacctttttgataaattgcgttgcagctagttttatttcatcagataaagtgttaatcgattactttaggcgtccgtagcattgaaatttttcatttttttctttttcctgtttggtatggttgaaactatattctcttattctgttctccttttatatatatatatatataaataaaattttttaatctatgatttgttgatgggattattagcaatatttatgcttttgatgttggttctatggccttttattttattgtcgtggatcgttattgtaagacataatttaatagtttgtttattgtttgttttgtggctcatgtaggaacctttctg

SEQ ID NO: 43518 - DNA, 842 bp, Manihot esculenta
  Intron number 1 from transcript cassava4.1_009463m (locus cassava4.1_009463m.g) derived from phytozome v7.0 (chr-ID scaffold05335; pos 198817 to 199658)
tttgtgggaaggtaatttttttttattttatttttcccatggatattggctctgtttcgagtttgacgttaatgagtgtcttgtgcttttatctgtcttgaattaacgttcaatggattttttttttttgaaaaaagcttcaaaaatgtgaaattgtggtcattgcttttatgttttcttaaactctcgaagttggctgatagatttattttttgaattcttcagatgaatgaactttttatatggttctgtgttctttattattcttgtttcttccccttcttttcccctttttctcctcttaatgctttcccagatttttagtttcaataagttttgatgtcacagtgcactagaaaggaatatgaaatggattttttttttgcctttggacgtgatgtttgttttgcacatgaattgtttacaggttgaaatttaagatgtgaacatattattatttagattgctgggtattatttgccttttttatttgggcaacatgtctttcttggaggaggaatattgagacaatcttttgagagtcaatgaaaattgcttagatatacgtctctacgtgtttcccattaaatttttgttcttttttttcgtctcttttcttttctttcttgtccatagattatgttgtttcatttggaacaagctgaaccaggatactggggcattgaattgcattattaagatatggtgctttggtacaatctgcatgttgtcgctaagcacatttagggatatgtttgttttgctgcaaaggattttgatattatatggtggcttaggattttttccctgatttgcagcaggactcccgtgtagctttgagc

SEQ ID NO: 43519 - DNA, 458 bp, Manihot esculenta
  Intron number 3 from transcript cassava4.1_002108m (locus cassava4.1_002108m.g) derived from phytozome v7.0 (chr-ID scaffold07510; pos 93117 to 93574 reverse strand)
ctttcaatttcaaatatcccacttaaatcgccaaggtatcaacatatcttcattttgacacaaacctcacaacattttatgaagaataagatggaaagtttgaatgtttttctatggctgatgtgttggatattaaagtagaattgttccttttttcatcattgggtttgaccattgagattttttttttaaaagaaaaaaaaaaattggattagcctattattgtagaaatgctagttagtatggcatgtttgctatatattgtagctttttatgaacggattcttaattatctgtttgaacttgttttatcttcttttgagttgtgcttctgtgacactatttctgtttttgtcatgtcatgtatttcttattgacagctgcatacttcttcagttttctgaacattgtaataatcttgttaacttatggattgcagattttggacacatatagtg

SEQ ID NO: 43520 - DNA, 189 bp, Manihot esculenta
  Intron number 2 from transcript cassava4.1_006418m (locus cassava4.1_006418m.g) derived from phytozome v7.0 (chr-ID scaffold03329; pos 167049 to 167237)
ggtatgattatgtttgtatagaatttgattcgataatgcttaatttggaatctgatttggaatttatctcccgacttgttccctattttggttgtgggtgatgatttctgttttcttttctatcctttccttattatttttctttgcattgcagagtatagaactgtatctggagttgctggacctctt

SEQ ID NO: 43521 - DNA, 917 bp, Manihot esculenta
  Intron number 1 from transcript cassava4.1_026811m (locus cassava4.1_026811m.g) derived from phytozome v7.0 (chr-ID scaffold06656; pos 989528 to 990444)
ttcttctccatctccaaaacccaattcaaaatcaggtacctttaatatgtttccttttctcattgctttaccttctttgatctgatcgatccatgttttatatctgtttgtttttcaggtcaattattttgcattgtgctgttctttttttttttttttttttttgtttgacgtttattgttctttggatttgagactttggctttactgggttcaatcttcatgtctctctattacagctttctcgagtgcatgttccgagctgtttctgaattttgttctattattttgcatgcttgcatttgaacttggtttcatgtgtttttttcccttttctttttggcattttcaatcttttttcagaaatttaagcttttgcattctaaactcgtaatgggttttttgcttggtttatctgtgcttgttttcattttcaggatctcgaggccgcaaattgggcatatatattactctgtgactcctgctcaactattattgttgttgctaaattccctttgacctctgcctactgcttttgctgatatttttgttttcagagagccttcttcttaagctgtaggataagcaaacttctattgcaataatatttcgcactttgagtagtttaaaatatttgaatttttatgatagcttgtctgtagggatacaaacttacttgcgtgttcaaaggtaatttggatatctgagatcttttgctcactaggtaatcgctgtcttttttaaaattatttggttgaagttcattgtgtatgtacctctgctgtgctaattgagttattttgtttagtcaatttccttggaattcatgggttgtatccttttgatttatctgagtatttcattcgtgtccttgaccctttcacttgctgaatatttgccttgtattttaaatatag

SEQ ID NO: 43522 - DNA, 714 bp, Manihot esculenta
  Intron number 2 from transcript cassava4.1_019569m (locus cassava4.1_019569m.g) derived from phytozome v7.0 (chr-ID scaffold01551; pos 3193241 to 3193954)
tcctcctctacgcttgccgcaactgtgatcatcaggtctctttctttcaaattctttttgatttttgctctttttcttttggatgagggacttagggtttgcctccattgctttttgtttcaagttactatttttctatgctgtatatttcatgcgattttgtatttgtgcaaaagagtgagttttacgcatcaattttttttgcatgaaatgtcttctcgccaaagatggatgagcaaataaagagacatttagatgctaatgcatgtttctttttaccaatatgcatcagtagccgcaatgtagtttgatattctagtaaaggttggttgctctggtgatcctggtgaagaggaatgctcgcagaatttgtccttaattttcgtctatttagtttcatcatgtttttcagaaacaggaaacaatccattaccatttgaaaataaataaataaattgcacctatctgaacattaggcggtcgccatgttttgtgcatttttgtgaatggcaatggatagtttcttgttttactgctgtaagatgcttcctgggatcatggtggttgctgtttatttagttaatattgcaattatttactgtaatggcacaggtttacataaacataaggtctgtattcttgcttcctctatttattccttttagcctcctatcttgttgcaggaaattgccgaaaataactgtgtctacagaa

SEQ ID NO: 43523 - DNA, 391 bp, Manihot esculenta
  Intron number 2 from transcript cassava4.1_008837m (locus cassava4.1_008837m.g) derived from phytozome v7.0 (chr-ID scaffold07991; pos 635886 to 636276 reverse strand)
cttttccctcctgtgagtatttgcttcttcatgtgatgttaatcgtgaaatctgtcaattcagtgtaaggaggtagttaagttaggatactgtttcctcaagtgattaattgtttgttgtccctataatggtaattgaggttttcattggatcctgtgcgaattttgagtcagtagctcaaaggtgcaagtctgatgggttttcttttctttatttaatttttaacttcggccgagatcctttttatcaagcgagcattctgccagaaaatatctattagctgtttgtgaccattgtaagtgaattgctagttattatgatattttttattttgacgtgggtttttgaaattgtagacaccgctgcaaactcccattcagacaccattacc

SEQ ID NO: 43524 - DNA, 783 bp, Manihot esculenta
  Intron number 1 from transcript cassava4.1_006840m (locus cassava4.1_006840m.g) derived from phytozome v7.0 (chr-ID scaffold08910; pos 199067 to 199849 reverse strand)
gctatttctggtactttcttttattcaattactataattaggttctatgtttatagatttaaattgtttcgatttagttgtttcccattgttttatggtttcatgcttttaaatccctggatttggggaatgccattgtttatttgatagaacaggagctcccccctctccagactaggtacatttgtttactgtttggttgctgaggaagtgtaaggaagggatggaaattggctttttgactgatgtatttgctgcttctttggtttatacaaattaaagctgagataaagtagagatattaaaatcggtagaaaaaggtctttgctttgttgggttcaagtcagttacacacggtcagctgtttctgttgaaggttaaaattaatgtgatttagtcatttgattctcggtgaaattcaattgcagttttcaatataaacaaatgtgtaacttagcattgaatttttgttggatttgatagttgtctataatattactttgcactaaaattgtctgtcaacttttagttgtcctctaattttattgtcactggccataacctatttgctttccatactagtaagtttgagttgcttaggatagaattgagggtgtaaacaatgcttggctttctttgcctccttaaaagttaattaagccttgctgtttacttttctagtgaaatgaatattcctccttgatttggaaaatagtggtattttcacttattcttctcttttaatcagagtctggaaagctcattacttggggttcaacagat

SEQ ID NO: 43525 - DNA, 268 bp, Manihot esculenta
  Intron number 2 from transcript cassava4.1_031343m (locus cassava4.1_031343m.g) derived from phytozome v7.0 (chr-ID scaffold03049; pos 861970 to 862237 reverse strand)
gtctgatcaaatttccaagtatgcttcatttgccaacttagagcttttgtttgttttgaatttcttacatactcatttgttactttatgatagttcctttcctgcatgcatggttgcatacctatggctaatgcaatgcatattcttggtaaaatcctttaaacctacaggaagtattattaatgagccttgcggtgaaaattgttcttttccagtgatgccctacagacgaatatccgagtaccaactcttttagtaactggctcca

SEQ ID NO: 43526 - DNA, 632 bp, Manihot esculenta
  Intron number 1 from transcript cassava4.1_007551m (locus cassava4.1_007551m.g) derived from phytozome v7.0 (chr-ID scaffold03614; pos 1880630 to 1881261 reverse strand)
cccaggtccaattctttctttctttcttttatgtattttatgtaattaatctgatcatttattttgtataaaaaggtcttgtagtgcaagggaatcaaggatcattgtgcttctttctgcttttctctgagtttttgggttttaaatcaataggaatttgctttataagattttgagctatgggatgattttgatttctccgaattctatatgttccgttttgcgtaagaagtgtttgatgtttgaagatattttgttcaggttttttttctgtcttttctttttctttgtagttcggtaatatgcaaatttgagcagtttgaagagataattgttgtgtttgtggtgaattaattctttaggctgttcacttggtgtaggaattttgtgtaattcaaatgccctgattttacaagagcagttgaggaatatgaaaatcaaaacctaatactaaatttgaagcagcataattttccatttgctatttttagggcgttgattccaatgttgtctaaatcaattttgaactgcatatctcaaggttggatcctatgacttcattactccctttgttttaacctgattagtgtttttcatgttctactgcagtgatacctcgataggtgttgaac

SEQ ID NO: 43527 - DNA, 416 bp, Manihot esculenta
  Intron number 2 from transcript cassava4.1_025886m (locus cassava4.1_025886m.g) derived from phytozome v7.0 (chr-ID scaffold05335; pos 800293 to 800708)
cacagtaagaaaatagtctgcgtttcattattaaacagttataatttagacgatcgttgtggagttttttaaataattggtgtagttgggattgaatcttgaattcttcctcttgatggttatagtaatgcctggatagtttttctatttgattcatttgatggagggagcaatgtggtcatctaattaactcagctatttttcatttgacatcgttgttcaataagttgtggaagttcctgttactctgctctgtgttctgtgctaatatgcattttcattcatttcgcttgaagccatatatcaccaagggctaattcttaacatttcataaaaaaattcgaaagttcttactgttttgacttgtcagcaagtttttcatttttatcttttcagttttttgttctttcaggaag

SEQ ID NO: 43528 - DNA, 773 bp, Manihot esculenta
  Intron number 1 from transcript cassava4.1_003015m (locus cassava4.1_003015m.g) derived from phytozome v7.0 (chr-ID scaffold03614; pos 3979982 to 3980754)
acaccgctttgctcctctacgctttgtaccagcaggtagcttagcttagtttaactcctcaattctcattttcactctctttttcctatggacgatccaacgacttcccacacttcatgatttcttgagatcttaatcattattctctacgtaacggtgctctttttatttgtttaacgtgaaatatatttttatgtgattcatgttagtttaagcttatattttgatagctttaatgatatattgcaaaaatttactggttgttagcaaacaaattgataattctaatatctgaaagtgattcgaagtcatttgccgcaggtgttttagtgcaattatttgttcgtttctttgctttgatcgtcttctattcacccgtgctggaaaatgctgtttgtaatgagtctgtttgagcgcgcgtttgggtggatctaatattctgaatctcaatgtgatattgagaatgcttatccgttgtctagacgtgaatcttgatgtaattgaggctaattcaaatgaattatatggttttgcatttttttttaataaacaaaaactggtggggttgagactgcattttgtggttggattaagtcgataatttatttgtgctgttggctcggtatttgctctctgatctgtttgtatgcataatgatttgaatggatagctagatctggagaggtcaatgggagattgaaactatactaatctgtgctagttgaatatgtgatgcaggcaactgtaggaccttgtaatacaccaaaaccgag

SEQ ID NO: 43529 - DNA, 707 bp, Manihot esculenta
  Intron number 1 from transcript cassava4.1_001594m (locus cassava4.1_001594m.g) derived from phytozome v7.0 (chr-ID scaffold08107; pos 17695 to 18401 reverse strand)
ctttatcccaaatactcctgctaatagtccggcaggtttgtttcttttctttcttttttgttcttttctgtttggttgatgagaaattggaagaaattacgggatggagagaaaaacttaatgggtattcgtttttaggtttcataggaagtaataattccagttaactagaaactttagcatgtgggtttcatctaattatccttttgatttttgtggggacatgtgtcttggcatgggtttattcatttttctgccgggagaagtcttatcgtttcgacttttttgggaaaatcggttttcgggtatccaggcaaggtttatgccaggatcagtatgggtgctcttggatttcctgtttgggttcatcatatgggaaaggataggaaaattgatgcatatttattatttgtcggttttctatttcgtgcaaaacaacatcctgagagtggatcttcattttcttgggaaaattttatcagcaaatattttattttgaaacaaacggcaactcagaaagaaaagactaggtatgtttggacttgagcttgtctagtatataagtttgacatagttttgtaaaattttcacttttccatagcaatcaaatagcgtagcctagtttggcttcctggttctgattagtattgctcttattttgttgagtgacagatcatctgcgaagaagctctatttttaaagaaaat

SEQ ID NO: 43530 - DNA, 474 bp, Manihot esculenta
  Intron number 1 from transcript cassava4.1_033331m (locus cassava4.1_033331m.g) derived from phytozome v7.0 (chr-ID scaffold04175; pos 468366 to 468839 reverse strand)
ctttgtgagtgttcttcctctgatacttcttcatgatttagctttgcttttctgctgatcgaggggtagaaaaaagggaccagtttgttcatgtgtatataattttcatgcacgatttttcatttgagcgatgaatttgtaaaatttgggaatttttagaaacaaattgtcaagtgggtatttgaaatttagcatgaaaggctgcatttttttcacacaagattttatcttgatgttggttctgtactttatgcatagtcaatttcagctaagtggattgttttggctattactggagcatcaagtagagatggatacttctttgcttttagcaaaattggttaaaagttgtgttcttgagtgtgatcaataatatatcttaattacaacatgattgagtgaactaatttgctaattggtttgagttgtggtgtatcagggctgctgcaattccaagaggcaagagtggtgcaa

SEQ ID NO: 43531 - DNA, 688 bp, Manihot esculenta
  Intron number 1 from transcript cassava4.1_030665m (locus cassava4.1_030665m.g) derived from phytozome v7.0 (chr-ID scaffold09501; pos 641700 to 642387 reverse strand)
ataacactgatcaggcatgtcttccatattcttttcttgttcaatacatgtatggttttcttggttttttttaaaattattttcctttccttcttttccatccttctatccaaacatgccataagataacaatttttaaagttctacttagttatttctgtctttattcaattttatttatcactttttaaatttattctatttaaaactatttatccgtttaagaatattaaaaagtattactgaatttatctgattttaccttatttttattaaatattataactattttcctaattttctaaaagctgtcctttatatttttttctccatcaatcatttaacttttttaatcattgatgttggagcaattagtataaatgataatatttagtcaaattaataatatttgttataatttaaatgattaattacttcttaattattgtataaaaatttcacaaataattataaagtttgattttataaaatatagaattttttttaaaataatgaccagattattagttttgacaaattacactcacctataataatttatttaaaagtttaaaatatttttctaatttgcttgtgaacatgaattcgtgggtgatatgcaatatagcattcaacatcctagattctctgcaagcttttgctgatgtcttttttctgtttcagattt

SEQ ID NO: 43532 - DNA, 945 bp, Manihot esculenta
  Intron number 1 from transcript cassava4.1_000128m (locus cassava4.1_000128m.g) derived from phytozome v7.0 (chr-ID scaffold01551; pos 3210393 to 3211337 reverse strand)
ttggttgagaggtatggatcatgtttattgcattgacctttttctcatgtttcagaaaaagttgttgtttaactgcatgtgtgcagtgctgaactaattttttccccataaaattacaatgtaataataaataaaaagcatgagtaaaaaataaaaaaaaaaggagaaatctctgagactgagcatattcatataactttcaataatttcaactaacagacagtattaaacttatcagcaaaacaaaatattcttcccaaacatgggtatcccgagaaacaaccctctgaaaggaaaaaagtcttataacttcagttgtatggcatttatcataatttgagttctattaatacaattacacatactattataagaacaatatgaatgaaatggtatgagtttgtaatggataaataaaacctacaatatatttgaaatcccaagatatccccatgatagcaatttgatatccaatatgtctttatacgtgtctaatcaaataatgcctatagtatttctttttttctttttcccacatggcaaaaagagaaggtgtcaaacctatagtattaaaaagttaaaaatgacaaatggcaaactaagacggtttcgaactcagttttatgtatatatggctaaagtataataccagtatatttgtggttgtttcaattgacaaaaagtcataaggtaataggttcatattctttttatactgttttatatgaattgtaccctatggatcatgttaattggttgcaatgtagacttatggcatcccaagtatgtagaaatggaggatctgttctctaaagaagcaaaggattgctgggatcagttttgtgccatatttttcttttataatacttttgacttactccctgcatcaattgtatatctcaactctcaggtatcctcacattgagaaggatcacttggtaaagc

SEQ ID NO: 43533 - DNA, 604 bp, Manihot esculenta
  Intron number 1 from transcript cassava4.1_003416m (locus cassava4.1_003416m.g) derived from phytozome v7.0 (chr-ID scaffold06656; pos 1092925 to 1093528 reverse strand)
gaaggcactttgattctcaaactggtactcttcttgcttcctagatgataagttctaaagtaattatgttatgttgttgctcacaactgttgaaagtttccagtactcaactttctgtaataattgtgatgcaagacattctaggattttaggtctatttatattttttattttgtttttcttaatcccaagccttctaaatgaccaaaatattaatgcttaattaagtatcctaagcttagtcctaaaatagatatacttaaaatccctagtagagtatcctacatcaaactgtctttcccatgagaagagatacgtgactttgttttattgttttgaagtttgaccctaattgcaattcagccatttgcaattgtttactgcaatatgtttttgtgtgtgtgtctatgtttgtatgtatatatgtatgtatgtattacatttctaattgtcatgatgatcatcttgtgtccaatacctaattatgcttttcctctcatcagggtcaattgatcgaaaaattttattctgtttgggcatttgtgttggtatagtcacttctcttctagataataggagagagctagacaaatttaaacaattg

SEQ ID NO: 43534 - DNA, 819 bp, Manihot esculenta
  Intron number 1 from transcript cassava4.1_017191m (locus cassava4.1_017191m.g) derived from phytozome v7.0 (chr-ID scaffold00631; pos 33664 to 34482)
cctcgggtggttttgactttgtcgttgctcctctggtttgttttcttttgaagatatatatatgtgtgtgtgtgtgtgtgtgtgtgcatgtatgtagctattatgatctaatggttgccagttagccaccttggttgcatgttgatatttattcaaggtatcatctgcatttgtttattttcagttattcccttgttcatttgaagctctgtcgaacgaacttattctatcttcttcaatatgatatcaattttctattagtaaatgttctcacacttgtatttccttatctcaaacttgcatttctttatagcatttcttttaggttcctgtggatatggccttcatgttctttacttgtttgctatagaatttgtttgtgacacttgttatattttaaatccggtggctagtttccacaagttagcttatatttacttttgattaaaaactagtgggctcacctacaacaatgttttggttgtgggctggtggcctttttccatatgtcatgattgcttttgctggtggctgccactgcaaacaacattttatactgtgtaattgtgtgatagctgttgttgaattcattctatggtcataactttttttgtgtcataatgtcataaacaatgaacaactaatataaaggaaactgttttctctggctgtacctaggtgttttcatccgttaacttttgtataaattttcaaccatattatcaagcatacagcatgcagcagtatcaagactgccttagaaaaaagcacaaaattcctatttgttgaagctgattcctatataacttcatgatacag

SEQ ID NO: 43535 - DNA, 280 bp, Manihot esculenta
  Intron number 4 from transcript cassava4.1_019110m (locus cassava4.1_019110m.g) derived from phytozome v7.0 (chr-ID scaffold07778; pos 500135 to 500414 reverse strand)
actgcctgacgaaacaaatacatacaaatctataggtaaaatggcaaatacattttcttttacagtcattagtatgctataaaagaacccaccagtttgattattgagttgaccctcaatgcgtgtcattccatgatgccttatttctacattaacgaagaacaagtttcttcaccttaaacattagttgtctgtttggatgagtcaattttccgtcttgactttttcagttgactgtttttttcccttttcctttttgcagggagaacgtgagtagtgc

SEQ ID NO: 43536 - DNA, 519 bp, Manihot esculenta
  Intron number 3 from transcript cassava4.1_019110m (locus cassava4.1_019110m.g) derived from phytozome v7.0 (chr-ID scaffold07778; pos 500474 to 500992 reverse strand)
atcgaaactactgccaaattgaagcaggtatttttttttaaaaaccttgtgatctgtgacaattttgatattttaaatttttatagaacctccttttctaataaaaagcctgtctttgcaaatcttgtgttattcaaatagaatcttaaattacttattaatacatttccgggctaattgagttcatctttgtcctaagtttgatttattgtagttaaggtagatctagcactttgaatagtgttgcttttacataaatctatgtttttctgctaaataatcagtgtcctagcatcttttttgatgaatatatatatatatatcatttagttcttaatcagtttgtttcctttttgtgtttcttcaaattttggttctgtatacttccatttgatcttacagtcaacttatggatgtttagttaaacaatatgttctgcaatgtgtggtctcgtgcctttttattcttaaacgatttgaactaaagtgagtgtactaagtattgcaggtgcaaaaccag

SEQ ID NO: 43537 - DNA, 503 bp, Manihot esculenta; identical to SEQ ID NO: 42969
  Intron number 1 from transcript cassava4.1_016822m (locus cassava4.1_016829m.g) derived from phytozome v7.0 (chr-ID scaffold07012; pos 1175881 to 1176383)

SEQ ID NO: 43538 - DNA, 585 bp, Manihot esculenta
  Intron number 4 from transcript cassava4.1_010225m (locus cassava4.1_010225m.g) derived from phytozome v7.0 (chr-ID scaffold06550; pos 681042 to 681626 reverse strand)
ttcaccttttactttagtcctactgatctattttggtatgttctattgactgacataattctgactagttctttagataattctattattagaaatcataattaatgtgtaacaaaaaaacagaatcataattaatgctttttattgttgactgcatctcatatatgtatagatctgtagtttgatgcaagtatctgcatgcatgccttaagtgtttgaagatttgaactagtcattcacatacagttatggtgattatagaatttcgttgcacattatttggttaggtgttcctgtgctttctagtgatgtggagtttataagcattcatttgattgtaaaaatataagttgtggtttattgagaatatgcgatgcatatttggttgccaaagttaatgttggaagctatttgtgacttctctgaatttttattctgtcattcaagtatccatgggtatctacttgctttcctgtgcgtgagtctcctagcttccaactattgacaaagtgaaatttagagaaatttaatgcaatttttttttcctcaggtactgggatccatattactataggaggcgacaag

SEQ ID NO: 43539 - DNA, 655 bp, Manihot esculenta
  Intron number 1 from transcript cassava4.1_002991m (locus cassava4.1_002991m.g) derived from phytozome v7.0 (chr-ID scaffold00253; pos 6840 to 7494)
cctcgggtggttttgactttgtcgttgctcctctggtttgttttcttttgaagatgtgtgtgtgtgtgtgtgcgtgcgcgcgcatgtatgtagctattatgatctaatggtggccagttagccactttggttgcatgttgatatttattcaaggtatcatctgcatttgtttgttttcagttattcccttgttcatttgaagctctgtcgaacttattctatcttcttcaatatgattatcaattttctatcagtaaatgttctctcacttgtatttccttatctcaaacttgcatttctttatagcatttcttttaggttcctgtggatatggccttcatgttctttaattatttgctatagaatttgtttgtgacacttgttatattttaaatccggtggctagtttccacaagttagcttatatttacgtactgtccgttacggctgcaactcaaggggggccgttgggtaatggccgaatgggtaacggctccccttgataccattacacaacagccattacgttatgtaacggccgttatttaaaaccatggctgttactaaactaaattttcagcttaattaatgtggtattgctgagctgatggattgtgccaaaatttgcaggttctccctccagttccttctgtgg

SEQ ID NO: 43540 - DNA, 524 bp, Manihot esculenta
  Intron number 1 from transcript cassava4.1_000653m (locus cassava4.1_000653m.g) derived from phytozome v7.0 (chr-ID scaffold06656; pos 972144 to 972667)
tggtagacgtctcaaccataggaggcttcttccaggtgattttcataactgggtcttgcttagtttccaagttattttagtccttacatgaactaattgtcctttaccagcatgttagtatctactacttgtcttgttctgatgaactgaatatgtatagaactgaaatttttatgcattcgctagtccgtttcatggttcttgctaaacgttcataaatttgacatatgcagcatagggagattagttctagcatcttgatgattttcttgattagttatatctttctatccagtgtgttgttgcaggcacctttttaattctgtgcaatcacttccatcatttattcttaaattgtttttccattttatttttgtaatgctaagtttttatcatgggtcaaccttcttcattgcaattactttgattaatttgtgagctaaagcattttatgattgtcagaatcctaatgcttccgttgtagtgcaggtgatccccacttgaagaatagcagcactgaaagg

SEQ ID NO: 43541 - DNA, 725 bp, Manihot esculenta
  Intron number 2 from transcript cassava4.1_018635m (locus cassava4.1_018635m.g) derived from phytozome v7.0 (chr-ID scaffold09501; pos 249323 to 250047 reverse strand)
aagtaagtaacttttttcctttttaatttgtaggatggtgttttgctttagggttattgtgcttgcagaactcagaagagtggcatgaattatttgcattcagaagttctaagtgtgcttagcgttattgcttctttgatttataaatatatatttatgtagaacagaactgatcagctgaatggccaagaaaaaaaattccatatatccaaacctcaacttgggattaaagcttagttgttgttggttggtttctttttatttgtgtagaacatatacctcttgttcggaataaaaaattttacaagaattcaagtcacttcttttctatcagttttattgtttgaaatgtaagaatttactttttaacttataaaatttttcaaaaggaaatgagatcatgcataattttataagaatttatataaattcttttcttataaaatgaatcatgcaaaacggagggatactgattactgtgtggagactgtgagtcaatttctttgtaaaggtccaacacacattgcataagtgctttggaggttaggaatgtgtccagtcttggagcaaatggatgacatgagctataaaaagcactctggaattccttcttttttctacatttattgatttggttttgttgggttctttaagtttgcttttccagaattaacctctagttcctcttaatgtatttctcaatattctcccttgctttttgcaga

SEQ ID NO: 43542 - DNA, 972 bp, Manihot esculenta
  Intron number 1 from transcript cassava4.1_009716m (locus cassava4.1_009716m.g) derived from phytozome v7.0 (chr-ID scaffold10173; pos 127454 to 128425 reverse strand)
cgccccatcggtcgcggctctatcggcattgtttggtaatcttttctgtctcccctcagcagagccaattttatgtgaaacaaatagagagagttgcatattttctatattaaaattatttatatactcttcacatcatatcataataaaaaagagttgatactattgtcttttacaaagtaactacaatacatcaaaacctgcctaataatctctagctaattgttattttgattcatcttcctcttttgatcatgttgtttgatttcttggatagtatgattaatgatctttccggcaggacttgctcaatttatcaaggattgggaggtaaacaatgccccaaaagcggcttaaattcaatcaatgacctttttgatacacaaagggcgtggaagtagtttgtttctaggcaaattatagaatacttgggtagcatgtttacatacaccatcgtctaacccaaaaaaaaaaaaaaatcagtttttccttgaatatggaaggtgagatatatgctttgtgagtaagcaagcacatacactaaatgtactgtataattttccatgtttctgtggtttacttctagatggggcaaatggataattttcacattcatgttgcagtagttcaaatttatttgttcatattgataactctcattaagttatatatctctttgataagtgcatagatttgtgaaaagattttttcatgtttggagctttggcatatatggcttcaactaccctttccaacttattacataccttgaaggacagacaattctggtgtgtttctcaacagaaacttaatctgtaatacaaaataaaatctctgttcacataatgaaactccatgaaagatccatttgttagacctaatgaaactccatgagagatccatttgtcagacaattaagtgtatggtggaaagagtggtaatacaaagaaatgttttcttttcagtgctgct

SEQ ID NO: 43543 - DNA, 847 bp, Manihot esculenta
  Intron number 2 from transcript cassava4.1_019774m (locus cassava4.1_019774m.g) derived from phytozome v7.0 (chr-ID scaffold12541; pos 35484 to 36330 reverse strand)
ttccagctttagaacgtcttgagctaataagtgaggtatgcagcttcctgaaatatctgtttacagcttatagctaggtgggatattcaaattactgaaatattggttatcggaagttgtccaatgagagggaaattttcttgagcaattgagactcttcgtgttgtgcaagtataggaatgtttctggttgcttcctctttttttcccaattgttatttgtgcggttggagctcatgccaatgccatctatccgagcacacttgaaattttgtgtttgttttcactgctacattttagtgtatgcagcagcattgtagcaaaggttataagattattgccttattactgctgatgcaatagtttggcaacaatttaaaattattataaagaaaatttaatttttcactatgtatattaatatattgtaataaataatttttgaatgcataatacgattataatgctagctgctgcacttttttatctgttttgaaaagataagtaaaccgttgttttattttatactacaacggagagaagcagcggttttcaaaccgttacttttgatttatagctactgtcttatgtacataaggcagtaattacagccgcagctttaaacccgtttttattataatattttttatagcactgaaatttaagctttgttataaaggattgctagaactattaatagacttgggatttcagcataaatcacatgcgtcttcaatcctattagtcatgctattgggtgttttttttgcccgacaacttttttctttctaaatgatggttatgttattacaggacaaagttggccgcagacttaaagtgtttcgcag

SEQ ID NO: 43544 - DNA, 669 bp, Manihot esculenta
  Intron number 1 from transcript cassava4.1_006508m (locus cassava4.1_006508m.g) derived from phytozome v7.0 (chr-ID scaffold03332; pos 738149 to 738817 reverse strand)
actctgtcaccaagagcaaggtattgtttacacttgctaatttatttgagctttagatctggcttggatctgggtccccgcggcttagatctactacgtttttgctaaaattgtttgctctgtgtttcagtttctctactattatttgctttatgggtatggattaggttaatttgattagctattcatcttgctgaactggaaaggtttctttgtttgctgatttaattttaggcctggtattgcttgcttggttttaaagagcattaatctgttgtttaatcgtttgaaaaaacgagttcacttatgatttagaccgagttttagtgcagatctgtattcataagctatggtctattttgatagaatgcaacttagtttcgtctgaatgtcatcaattttttcaaacctaattggccaaaatgagttatcaatcgaaaatttattcacttggtgctgttggctgccttattcttctgtcatgttagatgaccaattgtcacttatcagctagtattcataggcatttggctgtcaattcaaatacagaaactgcagttgatgaatgccatatggaaatataaatatctgatccggtgtaattcctttgacttgttattgacgaacactcatggatactactatttttgttgcagtttgataacttgt

SEQ ID NO: 43545 - DNA, 1014 bp, Manihot esculenta
  Intron number 1 from transcript cassava4.1_009264m (locus cassava4.1_009264m.g) derived from phytozome v7.0 (chr-ID scaffold09120; pos 233465 to 234478 reverse strand)
caattcttcttcattagataacagtagccctcgaggtagcattttaaacgccttcactttttgggtataaagaaccccatcgctgcagtctactaattgccaatcggtcatttaatttcacacaacttttttttacttaaaacgttttgtcttattctgttctttgaatttgaggtagtgggtatttgttagtgagagctgcttttcttgggttccttttagttggatttgtttggttttgctgatttttaccaatgggtatttgctgatgtctcttgatttggtgattcaatttgtaatcttatgttggttttgctgttttaatctgttggattaaatggtgttttttgatttttggaaatctggattgcaaaacatattattccagtcccttgtttcgcttgttttttttttcctctcctggtatttaggcgcttgcgaaacgattaattatccctactttttttctttcttcctcgagtggactcttatggatagtgtttagtccccttgactatatttactcaattgcgtttcaagtgattggtttgggagcattggtattcgttaatgtcactcttactcttcgtcgtaattctagtttatagaaaattacttgaatatgtaaaatattaaaaatgttttttgaaaaatatttaccaataaaataactaatttttcactgcctagttttaattaaaaaaatattaataaatttatatataacggtaataataaattttgtttttttttttttttatcataggaagtcattttgcttaaaagtaccttaattgttcacttggcaaggaaaatattctgttgatcaatttttttaagtgtcctcaaatgtcataaaatatgaaatctcttattctgaaaacacttcttacataaatatgtaaatatctcagacatataactggaatttcttagttcctgttattagaattttgttgaaagtcttttccatcacaaattcttttgttgttcttaatcaaatggtattaggaa

SEQ ID NO: 43546 - DNA, 922 bp, Manihot esculenta
  Intron number 1 from transcript cassava4.1_015956m (locus cassava4.1_015956m.g) derived from phytozome v7.0 (chr-ID scaffold01127; pos 774315 to 775236 reverse strand)
cggtatgaattttattgcattttcttctctttttctggagatcattgaaatttttgtggagcttcagatagttgataattaatgagtcacggattattctgtttcaattaggacttcctatgtttatggcaaagttctgttagatagatctcgtcctcggctattatgttcattattttggctgtccatgttttagttcccacatcgcctaattaggcaagaattatcgttttttagttgccttctaattaacaagtagagatcaatttttatggctctctcttctctatctagttggtagctggccataattcacttgttttatcaactttgtaatcgatgcataacatctagctattgagaatttgagatgatgttggtaacatctgtcatttcccttttgcatggactaagttgtccagcgaagaaatcccccaatgtggacatgtgagttaggttcctcgaatagcacggcagaaaacactaagaaatatttggagatttaaaagcttaggttacaagagactcattctgaaagattacgatgcactatttgttcaactgtttgtgagttgaggttctatatatataatattttatactatgcagcggtgcactttgaactgtgtaggtggttctgtcttttccgttattaattgttgaaatggtttttttacatcaatctaagtttccagcacaatcaatgacatttccctccttttgttttgtaattgctccctccatggaagcaattacttgcattatgcttctatttacccttgtaattaaatactgaatataatgtattgtggattatgctaattagcttcttttcactttacattgttgggccatgcatggctgctgctgcacatacgtgttgtcagggagtaagtcaaaatctttagtctgattatttagt

SEQ ID NO: 43547 - DNA, 781 bp, Manihot esculenta
  Intron number 2 from transcript cassava4.1_010891m (locus cassava4.1_010891m.g) derived from phytozome v7.0 (chr-ID scaffold07762; pos 177171 to 177951 reverse strand)
ctattattgcagtgaaggtaatcactgccacactttcttcgtgtttacttagaggttattttctattgtttttttttccaaaaaagaaaagaaaagaaaagatctgtttgttctctaatgtggtgtagatttagttgaaggtgttcagtgcattacttattatagtcaacttcaaattagaaatttggtcccttatccattagaagcacgatcacagttaagttaagaggaacactgtaagacataaagaaaaggacatattgatgattcttttttgacatgggcacatgggtctacattttctttattattattattattattttgtaagttttagaacatgctactgaggttttgacatataaagttgcaatttaaatcatttatatatatatatatctgtgtgtacacacatactcccatatttgaataggatgtcagaagatgatattagcatttgcatatgatgcacatatctttaagagaacttgaaaacttcagctttaattatgtacggatgtaaattatcaatcattatgatcctgttgatcttctataaaatcaaaatattcattgatggctgattcaggaacactttggattaaaagataaagagtttttgttgcaaatagacatgcagagagattctagaagtgccagtagtgatcttgcagcgccattacttcattgataaagcctttatcctcttctgtttcacagaattgattttatgccataatattttccatttgctagactaatcaagagggctcttggaacc

SEQ ID NO: 43548 - DNA, 533 bp, Manihot esculenta
  Intron number 1 from transcript cassava4.1_030087m (locus cassava4.1_030087m.g) derived from phytozome v7.0 (chr-ID scaffold08379; pos 39992 to 40524)
cccaagcgcgttttggagaaattcccagtaagtctaaatgttccatatacacttatatccttctcattttcttttccttctcataatcactgcttggttcccgagaaaaacttatattattcttaatggcattgcattatactatcgatattttcttttatataaaatgaatcgtatatatatatatttgaatggttggcgaggcttttggcatgaatttgacttgcaagagaatagaaacagtgggtctctgctagtactttgaatatagaatgcatggcggctattagcgtgtaagaacaaaaaatttttgttttatgggtttggagctaagaccagaatcttcactgtagttatgcgtatggtttacttttcaaataattagttattcgttcgttattttaatccttttaactttggctttcttgttttctattggaaacttagttgtgactataattgcactgatttatatatatcacatcctttaaaaaattttggtcttttcttggttgcagactccagaaatttgg

SEQ ID NO: 43549 - DNA, 856 bp, Manihot esculenta
  Intron number 1 from transcript cassava4.1_006098m (locus cassava4.1_006098m.g) derived from phytozome v7.0 (chr-ID scaffold07488; pos 247602 to 248457)
agattattaaagggctcattcaggtcacttctctctctccctcaatgattttaacgttaatttatttaattttctcgagccttttcttcggttgtggacaagtttaaaaacttcatattaaatgtgagattttacatgattttaccgtatttaccattctagtaaattcttttattagatgattttatatacactcaaatacataaaattttttattttttatattttattttaatattttaaaatttaattaaaatattttacttttcatataatttaactttctaaattattaaaattaataaactattatcactaattagttcgatttaatttttttattttttttatcaaaatcaaattgaattaaaataattaaaattttttaaaattaaaaattaaattaaattaaaataaataaaaaattaaatcaaaattttaaattaattcaattcgttacattttttcaatttagtttaaactgttcaccctacattttatgctcttatttagaacaaataattttacaagtttttaatttgaattattttttataaatatttttatttttaatagaagaatttttttaattttaaaaaattgatgtttaaaataaattaaaatcacgtatataaaaattcacttcaatttttaagtgaatttcttttataaaaaaatttaaatgaaagctaggataaggataatcttctagcatgagttggtgcataaaatcaatccaacgtcattttcaattcactgtctcctttaataaacatgtggatgctgaactgttaaacttgaaatatcttctctattttttacaaaatttaattattattcaatatatttacagacc

SEQ ID NO: 43550 - DNA, 535 bp, Manihot esculenta
  Intron number 1 from transcript cassava4.1_027078m (locus cassava4.1_027078m.g) derived from phytozome v7.0 (chr-ID scaffold08316; pos 451395 to 451929)
caacttctcagttcccctgttattaatcagaaaaggtttcttccttcaactggaaatctacccttttatcgtcttactaattctaccattttctgctcattgttcaaaatcctcttatgggtagttaggatttttatcttctttgctactgcattaaagtgtctattttatcatttttaagcaatggaatttcagcatgccatttaaatctcatctgggtagttagggttttaatttttgagtattgtttgttctgtagtaatgtagccttcattgctaatgttctgtagtagtagaagttttgaaagttgattgaactttattcactttctaatctctgtcaaactttagaaattgactgggatatcaaggatcctttagttagagagtagcatctgtcctttttatcaatgaagttccaggcaaatctggttgtttgacttaagtttaagttttgtttggtcgcttagggtaaagtcctgcctcataatgtttatggttatactctgaagcaggaagaaagtgattggcttgg

SEQ ID NO: 43551 - DNA, 612 bp, Manihot esculenta
  Intron number 2 from transcript cassava4.1_007980m (locus cassava4.1_007980m.g) derived from phytozome v7.0 (chr-ID scaffold06550; pos 525553 to 526164)
agtcaggtgaattggcaatcatctccaaggaagcggtatgctctttactgcattcaattgaaatcatatcggatcattgcattcatgtggcttgatttggttttttaattatttctacaagaatgaaaccagatgattttaaaattcggatgcaaattgttctgttaatgacttggtattttggaaagtcaaacaatccgtagatttttcatttggttttttgtacccagaacttgagtttctgttaattaattcatcaatttgcaaaaattgttcaaggacagtgtagcggtaatgtttgatctccttcatggttaaaatgaaaaattatttcaactttttttttttttaagaaaataattttaatagttatacaagactttgtgttttttaagtgggcacaagctactgatggttgcattttgattatagtcattttcgaggaagagaagtcaaaagccatccatagacacagctattaagtttactggattcttttttacctattcatggttctgctattgcgattagtatttatagctttaatgatgttatttctgctatgttatttatcaatggacataatttttctgttgctgcaggtggctcctt

SEQ ID NO: 43552 - DNA, 410 bp, Manihot esculenta
  Intron number 1 from transcript cassava4.1_011114m (locus cassava4.1_011083m.g) derived from phytozome v7.0 (chr-ID scaffold07991; pos 310780 to 311189 reverse strand)
tcattcgtcgattgaaagattatttgcatcggcaggtgaatcgagccctttgtctaaaagtttccgttaatctctcttttgcttgatcaatttgttcggtcctctttattctaaaaaattcaagatgcctctttgatcgttgtcttgcaattcctgttttgagctgatttaattgaagtttaggtgattgattcaaagtttatttcgtagattttaatttgctattgcgtgaatctacaaattggaaaccctaggtttgttttcgagtcagggtcaagttttcgatatttactcgttcgattgatcgatttgaaaatttcaatcttcagcctattttggttgttggtattttgattgggaacccaatttgatactctattcttgctccagttcgatctccagaattcaag

SEQ ID NO: 43553 - DNA, 861 bp, Manihot esculenta
  Intron number 3 from transcript cassava4.1_011743m (locus cassava4.1_011743m.g) derived from phytozome v7.0 (chr-ID scaffold06656; pos 642028 to 642888)
agaggtatgttactctcctgttggcatctgaatttttctcacaaaggttctgaatttctattctgtacttcctgctgttgtgcaaacactttgatttcgttagaatggtacatgggtgggatatccttgcatttgagtaaccattaagaagacctctgcttgcattaattcagtcaattttagatttttgaactaaatggtagtttgtgtaaactttcatgaatttgaatttagggtgatttgagcccatttttgttaaggtgatttctgatatgtaactgtatgatgtgaatcatgtgagggacaagtctcctgaatagaacttgaagacggactttcaagaaaagagaagagtgcttaagggcttattaatctttcattaaggttgtaccttactgacgtgggattgtaacattaccccatgcttggagaaccaacatctcgttggtcatggctggcacagtggcaccctacacattggaccatgtacttacacaatggtcctaggcgaccactataagtgctgaaaattttctggcaattgtgtgatcccaggttgtgcaattaataattgtataattcagagttgaaagtgtatttgtgtgtcgtaccttttcaaaataggaaatcatttatcattgtcaatactgatatacaagcagttataatactgatcaaaatttctgtccatgtaatttttagatattcatttgccaataaaaacaaggatggattcagaaagtgtttggagcgtcagttgttgtttgggaacctaatgaatgataaaactgacgtagcttgattaactataatctgtttctttcagatttcagatattgagagatcttatacctcatagtg

SEQ ID NO: 43554 - DNA, 431 bp, Manihot esculenta
  Intron number 1 from transcript cassava4.1_006278m (locus cassava4.1_005338m.g) derived from phytozome v7.0 (chr-ID scaffold02305; pos 28437 to 28867 reverse strand)
tctctcacacgccaaaacacaaaaacttgatattagtgagtgatcgccatcttcccttctctttctcgttctatgcacatacacataattgcaatttctgttcttgtttgaattttgattttgatttttgatttttttatatgttgattgatagaaacaagggatgagaaagtgactgtgatctcgacctatttctgatttttgctttgatagtctagaaattaagtttttgggattttcttttataaacttttttatgacagtgccttcattgaatgctttgatttatttattgttgggatttttcttttataaaattcgtgattgcaacattagcagtattaattaatcattgctttcttctattaattactcaggatgtaatttttataatgtcaatgctttgtacatgatttgggtgtcagataagc

SEQ ID NO: 43555 - DNA, 687 bp, Manihot esculenta
  Intron number 1 from transcript cassava4.1_001584m (locus cassava4.1_001584m.g) derived from phytozome v7.0 (chr-ID scaffold08847; pos 419413 to 420099 reverse strand)
gaatccatcctggtaatttcttgagctgttcttgatttattgtcatttttattttagtttaaatttaaggtttttttttggttctttcacttcaatcttcctcttcttcttcctttttttttaaataaataaaaatttatcaaatagtgttggtgttgtaacaatctctagtggggatatctgctcgttgcagcagtatatttcctttagctcaataatcttgaatctattccattcctttatttctctctctcttttaatcttgataaccagaagcttcttggttccgtccaatcctttgtttgattcatttctatctatccacactgaatttttccttcccttttcatatggtgttctctctcttgttctcaaagaatcttttgtgctgctatttttttttcctatgaactcgaaaatctaagctgttctttgttttttcacattgaagtggttgtctctttcttgttttagagcaacttattggccttgtttgaatgaagcttgaaaaggctatgttctgatttaaatctcatagttgttgttcttaatttcttggattacaagatctgagtggcttacaagcttaatttttgagggttgttttccagtgaggaagattttgtttaaatgagagatttttcttgaccaaattgctagattcgttgcaaaaacagacaaatataa

SEQ ID NO: 43556 - DNA, 1007 bp, Manihot esculenta
  Intron number 2 from transcript cassava4.1_007963m (locus cassava4.1_007963m.g) derived from phytozome v7.0 (chr-ID scaffold03777; pos 128617 to 129623 reverse strand)
aggatctaaaagaacgggtggatcaaatagtgaaggtatgccatagttttaacatataaatttaagtcatgatataatgtaagaccatgagtgattgtagaccagtaagaaaaaaattctcacacattttggaatgtcaaactgtgtaaactaattgtgagcacctaatgagggcattactgggtacttaactaaccagtatttcttacattcttgtttgcgtcatttccatatagggagagtaagttttaaccaatatatatttacttaatgattatgtattagatttagaaacctgaatagtttggttactgacatctgctgattactttacatgtctccctctgtgtgctggttccttgaggacaaggagaaggagggatctgggatttttttttttcttctttttttcttgaatttcctttcactcacagccccttttacaacttaaccatttctttaacttttccttaaatttttcccttcaagaagtagcaaacagtccacatccaacattgaaatttgacatgggattgccttttttattgtcgatatcatatttaataggccacaataaattccatatcatgccctgcatgataaacttcctgccagtttacatttcatccacaagcgtacgacgcaagagaatggcgttcttccacatggtaaactaggagttcatctatcaattctggacgtaaacacactgtccaacttaaggcataaagttataagcatttcaataatggttgtcttttgttctttgcttcttctgtgtggagtcccactcttttcagcgttattaacttacttgcatgccttttgtagatgggttcatcctttttcacattttgattattgatcactcatttgttattcactagcacttgtttgctatgtcctgttaatataatggtgcatgaattggttcccagtttctaactagaggtgaaacttttattttccatgacagtcagctcctggtcagcttgaagcatctagag

SEQ ID NO: 43557 - DNA, 930 bp, Manihot esculenta
  Intron number 1 from transcript cassava4.1_009478m (locus cassava4.1_009478m.g) derived from phytozome v7.0 (chr-ID scaffold00486; pos 20980 to 21909)
agcttgaacagttcgttgctttcgctgtcgttcaggtccaactacactttgtcctgtgacattctcatgtctatgcagatttgtttacaaatgcggcgtgcatgtttgctggtgtttttattaattctgaactttaaccggttagggttttctagatctctatatcatgtcggtaagggaaatttgggtttgggcgctactagaatttggggcttgcagttttcttttttgcaattcagggttttatggggtaattagggttcttagatttgccaaaggttgggttaaagactagggctgatgagattattagggtttaaatttggaaatgaggtttctttttgtattctagattttgatatgtctacggttcctttatcctgctctaagctgctgagagtattctcggctctattaactaattataataggttaagctcatgcaagtttagtcttttgctttgcctttaattttcttcttattttatttccagataacaatgatttgcgaatattaggagttaaatgtaaatccaaacaccaaacttttgtagctatcaagaacctgggtgctattgttatttgcagattgtttggtttacttagcaagtactcgtaatgttttattctttataagctcgaattaatcttgtgaaagcataaaaatatagtatctgatgtacacaggattgtggatatgttgtgagaataaaatgagtcattcttgccacaaatctcactccactatatttgctgatttctgttggaggctgttatatggatatatcattgatctatatcttgatttctctcttccacacacatatcagtgaaaatttcagtttgtctatgtgcatgtctaatgcatttttttggttaatgtattacatttcaggctggtgatacattgatacagctgtatcataattt

SEQ ID NO: 43558 - DNA, 982 bp, Manihot esculenta
  Intron number 1 from transcript cassava4.1_017490m (locus cassava4.1_017490m.g) derived from phytozome v7.0 (chr-ID scaffold06914; pos 335810 to 336791 reverse strand)
ttggtgtcaccaacaatttctctcgccggtgcgttttatctatttgattaaatttccatttcataaattcaatgaaaatgcggaaatgggttatatttcatatgatgttacagcttttgtaaatgggttaattgtcttcatgccttgaatgttgtggaaataatattgtaatcttgtctagtaagcgaaatttacgaacttgttgataattttatctgtttttaggaataaatgaaaccaccactagaatgtgttttgccccgttaaatttgtgggatagaaatgcaaattttcggtatcctttttggggaacggagaagaagactgcttcaatatcttgttttattgtttaatgatctcttgcctattgagtgacctagaacaaactcggtttatggacacagaattggtgagtagaaatcatacggtatggatttgaaaaaaaaaaaaaaacagaagttgatgaagaagtatctaaaatgatcagtgaaattttaagtatggctatgacttttccaacaatctgttgatgtcgcaacagaggagagattgcatttcctagttacttggaatcttttttggggtgttggaggcaatattgttatgctcattattggaaatttcataggagaattcttaggctggcaagagaggttgtaggattatgacttcacttaagagcagttcaattatgtcaaaagagaatttagaattcccagtaccaaaatttaatgggattattaactaggtaatggcccaggcacatttttaatcttggtttataatcaataagttattagacctagtatatctcacttccgtgaaaaattctaatgcctacaactagacaacaccatactttcgaaacttttttactaggttgtggtttttattcctatctattcttcataagttagctggtagcatacagttatcggtttgttattgaaactgcactactcttgcagtttaaaacaacata

SEQ ID NO: 43559 - DNA, 713 bp, Manihot esculenta
  Intron number 1 from transcript cassava4.1_027311m (locus cassava4.1_027311m.g) derived from phytozome v7.0 (chr-ID scaffold06005; pos 161158 to 161870)
aattacgtgaggagaaagttggttctcaaaatctggtatgttctgtgagtccttatgtgtttcaattgtttgcctgaattgttttttataaggttgtgtgctttttgttcggtctctaagaaaagtggggaaagaaatttttaatgatagattttgtattccgtttgattgtgaaaagctcgctttgagaaaagcgtcattttgactggcagccaagaatttaaaaaaaaaaaaaggaaaattcaggttttagatgagaactttattttcccttcatcttcatcttaagttagttctctcagtggcgaaacggatgctcatggtagtgttgtaagttatatggtatgtttttttttggtatttggtgagagcttgttatatggaaagtatgatggttttttgtttggtgagagcttgttagagtatgtccatgcacatatgtgagaacctgcttgcactacggacgaacatgagtgaattgcaaaaagaaaggagtttcccctatgcgtttcaatggagaactggtggcttattattaatttgtaagagctagttacaagtttatttctatttcggtgctgcatgttaactgattctcattgattaatttacatattaagtggagtatgtcatgcccttgcaaattcacatgaatcatacccctcaattctttttcattgtattgcagggagaacatccttactgtattgcca

SEQ ID NO: 43560 - DNA, 517 bp, Manihot esculenta
  Intron number 5 from transcript cassava4.1_001048m (locus cassava4.1_001048m.g) derived from phytozome v7.0 (chr-ID scaffold09120; pos 588956 to 589472 reverse strand)
acctcgctcaaatacttgtatgcttgctctgtctcttttctctctctttccttatctttttattttgggtaaattaccgtaagtctttgagtttttatgaaattaactattcgtcctaattcaaaattattttgtaaaatccaactcttttgttctggtaaaaaaatggttagatattttgaattatttatattgtttaatccttataattttaattatatgtattatttagtcttctgtaatttttaatattcatattatttgtttctctaactaaggctaaaataaattaattaacgaattttttgacaaaatttaaagagtttgattttacaaaataaagggactttttaatggattgatttttaaataggaatggactagtgagtttttgaaaaatacagagtcctgatagtaattctctcttttagtttcaatctacaatcatttcaaccttcttaatatggtttagttgtatcttgatggaaaatatttgttcaggaacctagagaacaat

SEQ ID NO: 43561 - DNA, 373 bp, Manihot esculenta
  Intron number 1 from transcript cassava4.1_008927m (locus cassava4.1_008927m.g) derived from phytozome v7.0 (chr-ID scaffold07991; pos 357688 to 358060)
gtgtgtaatttgttattggagtaacaaaaggagaggtgggttaatgaattctttacgtttttcattcatgggtgtataagttttcttcttttttcttttcccccttctcttttataattgtttgctttttttcctattttattgcaagtagaaagttgcagtcaaaaaacaatccattgttgttgtttttgttttctggataaaacccttttgctgcatcaaaaagaaacatttttggttgcacacttagatctgctcttttttactgcttcaattttgttctttttttttcttcaagacctctggagctcaggtctctctttgattatcttttgtaggaaaagagcttcaaaagggtaccttgattcttgat

SEQ ID NO: 43562 - DNA, 305 bp, Manihot esculenta
  Intron number 1 from transcript cassava4.1_030349m (locus cassava4.1_030349m.g) derived from phytozome v7.0 (chr-ID scaffold06512; pos 1668001 to 1668305 reverse strand)
aaggtcaatatatatcttcttattcctcattctagctgcattgcatgcttaaaatgatgaatgttctttccttggtatgttgacatttgaaacattaattgtgaaacagtgtcacataccccattagtatttatggtctgtatttaactaaatatagatagaaggctaaattggtagtttaaactttaatatgaatgtttccacagctttgcacggagaattttctctattaatgtttgttaccatcgttgctacgatttgattttgcaggccattacaagcagtttgtcttcctgttgaaggat

SEQ ID NO: 43563 - DNA, 772 bp, Manihot esculenta
  Intron number 1 from transcript cassava4.1_017335m (locus cassava4.1_017335m.g) derived from phytozome v7.0 (chr-ID scaffold04151; pos 288152 to 288923)
gatccgccagctcctcactcaggccgtcagtctaggtcagtgtctagttttatgtatgcgtgaaatatatgcatgctcatgcaattctcctctggcattgagtaatggaggtgcgaagatgctgagagaaatttgtattttccgaagtttaatttggatttttttgaaggtggctaaaatactggaactttaatttgtcaaaaattttgagtttttgattaattaggcttcaaaattcaagtttgacactttattgcccttgtctttccgttggtcgatttgcttatgtgattctctcttaactaccgaaggagctgaaattgatacggagggtgagacattttgcactactgttgagactaacttgctggctaagcctaaaactggggcttattacagtgttgagcttcaaggaactaatcaaatttgtaggttcatccggtggatgcaaaatacattgaatttatgattttttgtttggattatgaactttggagaatccttttacaggaaaaatcacgtactactgctatattttgtgtttggatcaagttaacgtgcttatggttaagttgcttttcctctactttgatggattggaatttgccctattgatatccagacatatttgatcagataatggtacagacatttgttttgtaaagaaagctgcacttctaaagaagagcatggaacattacgatttctagttctgtcccatactcccatctgttagcgaatgacctatcaatatctgttttttgtttcagga

SEQ ID NO: 43564 - DNA, 533 bp, Manihot esculenta
  Intron number 1 from transcript cassava4.1_030822m (locus cassava4.1_030822m.g) derived from phytozome v7.0 (chr-ID scaffold09876; pos 784873 to 785405)
tttttgggttgctcgtcaaatcttctctatcttttacgtgcccatagcctcatccgctcatcaattcccataaaacccatcaatcgcacgtgccaattcaaactcctgcgaacgcaataatatctgggcaatgcttgctcctcacccgccattatagactaataaagtttttgttgcctgcaaccgcctattctcgctcattgcgtttcaaatccaatctcccttcttccccattttgactcgtctttttcttgacccatcactcctactcttttcttccccttctcactgattcgagtcatattttttatagggtctttccttaactggaaagctgtttctattttaattgtttgatttgtttcctattgattacttggtcaacctcaccggtctacaccaacaaacagggaaaacaaccgcctttgatgcagctcatgatatccctaccccacagttagcatttccgcaatttgggtgtttctatcacgtccggagctagtcacgccgtggaccaccttgttgggttgccg

SEQ ID NO: 43565 - DNA, 446 bp, Manihot esculenta
  Intron number 2 from transcript cassava4.1_031544m (locus cassava4.1_031544m.g) derived from phytozome v7.0 (chr-ID scaffold09460; pos 12418 to 12863)
cggatcgcctcgctgccgccgtgagtgtagcttccttctttctcctaaattttttcggagacttactatttttttactgtaactcaaataagctgggatgggcattttgcggtagtttaatttagtcattaaagtacaaatgatggtgggttgtgtttcttacctagagatttttttttttaaatcactgataaagttttaacttaattaacaatgtcgaatctccttgagaataatcagtcatacgttttaaacaagcctgcttatctgtaaatctactcaatccatttatggatttattgctttctgtttgtcttaatgggtttatttttctaaccccatttctgtttaattgtggtgagtttcttctgaattaatgtttcttgacgcatcagcatttatttttgacaggttgaatcggagaaccattgtacaagtcaactgcg

SEQ ID NO: 43566 - DNA, 396 bp, Manihot esculenta
  Intron number 1 from transcript cassava4.1_008610m (locus cassava4.1_008610m.g) derived from phytozome v7.0 (chr-ID scaffold01551; pos 2028752 to 2029147)
agaagttgctgctccgcttttggagaaactcccttgtgagtcctattcctcactaccttcttttttttctatcccagttttcttctttttaggccaaattttgattcttttagtcctaactcctaaatgcttgtaggtttgggtaatttagaagaaacatattttcattttggtatgatgagtgctggatgctttttgcagtaaatgtctgacaattgtcataattcgtaataatttatagatacaagttgggtttttcatttaattttactaaggtgtgttgatgattgggaaataattgctagtgtggaattatttgagacttgttgttcagttagaagaatctcatccatatatctttgcagggataaaatcttctgatactcactcggagga

SEQ ID NO: 43567 - DNA, 857 bp, Manihot esculenta
  Intron number 1 from transcript cassava4.1_031954m (locus cassava4.1_031954m.g) derived from phytozome v7.0 (chr-ID scaffold10015; pos 219314 to 220170)
cagcagtaatcgagttgaatagaattattattcaggtcattttgaaaccatagccaaaattcatttttccttgggtgttattgtccattaattttggcttagcatgatcagccttatttgttgtgcaattgtcttgcattaccaaccgaatactcaacgcatgtttagtgtggatttatgtcactgcccgtagatttatatacaactattccaagcattttttttgttcatcatttcaattaatgtgatgcagtctcttctgatggttaagatgcattgctatgatacaagctctttgtcagtatttatgtcaatgtaatttgaaatttgtaccatgaattcgttgcttttctcaatcaatttttattttggaacttgattttgaactagacaaagatcagatcacctaaatatgattttattaacctttgtatttcaactaaataaaatatgcagatcttcagagcatgagtagtactcattcccaccttttatctattaattaatttagctttttgctgatgaagtaacatagaaaattcagttgcatattcatgttttggggttaagttaagtttgccatacttttccttaggtacatgcatcttgtggaattttaagaaaactgatttccacttcttttagttgataacagactctgtttattagtgtttgagattctaaatgattaagttagaagtactgttataagcattcaattattttgtgcatcagttttacgtccttgcctattgtgattacttaagaattggtttgtttcttgtcataagctcaacttttttgaataatggtattgtttcattctttatttcaggctgggggtgctccatcacaaa

SEQ ID NO: 43568 - DNA, 802 bp, Manihot esculenta
  Intron number 1 from transcript cassava4.1_004149m (locus cassava4.1_004149m.g) derived from phytozome v7.0 (chr-ID scaffold03614; pos 3597464 to 3598265 reverse strand)
tatcgaacgttagagattcaagactattcgtatctgtaagtactattatttcttgttgctttgtttggtttctgataaaatgcctgaaggaggaatagaggtctagaatgctaaacttgggagagaaaaaccctcttggctttttgactggtaaagttgtgagtaggtttcctgattgagggtgcgtttagttgctgagaaaatctcggagagaaaaaaaaaagtttcaattttgaatctaaagtatttcactttttttttcccggggagaattctcaattgttatgtggcgcatgaaaactatgaggataatttttcttcttcaatgtattagcgaagcgaaacgaaacggaactctgtggtggtcaatttctcataatgaacaatgagcttatcccatccattctcctaccccaggagaaaaaagaaaagagaaaatttcgtttattattaatttggacccaaaatgactaagtttcaagctttattcccttgcatttactagtttttctttggaccaacatggattttgtttttcccaattatatttctgaaattggagttgatttattgtgcaagtggaggtagttttatatattgttttccttcagggttgggagatcaagaagctatagtcacttttcaaatggtatattgtttatcttcgcattgtctaatgttatcattattattattatttttatctaacttataatggcggatttcattgatcacattttttttctttaactaggaatttcattttgtccacttaggggccagaatactcttccttggactc

SEQ ID NO: 43569 - DNA, 744 bp, Manihot esculenta
  Intron number 1 from transcript cassava4.1_016773m (locus cassava4.1_016773m.g) derived from phytozome v7.0 (chr-ID scaffold07991; pos 120374 to 121117)
cacttcctatctgcagtgccacccccaccacaaaggtccttctctgcactttatctttttcgagaatctcttgatttttatttgcactgagagaaaggaagtgaacccttggttgattcgcagctcaaaccctaacctaatattgtaactcctcttaagttttttattttggttccttctgttctttgctatttacttgtttatctttctgccgagtatgtatatgatacagaaatttccctaatctctatctgaattccctgtgttttcttacccgttctctattcttgttagttttttattgttaaattgttttttttttttttatgtagtttgctttaaaagcgtcattggtatctcgtttgatttgaattttaatatccttctactgtaagtgcagcaatgagcgtctgtttattatcctcaagttagtaggacgattaacttaaatgaaattgcctcataagcttgattttaaatgttgaatttgtgagaatcagaactctgaatgagcctgatcatcaaatgtaaaaaatcttggtctgggctcaggttttatccttgttaggaaaaataatgcaggtctagctctaaactgccccctttggttttcaaaagccaaagagctgtgatagtgatataccaacaatttcttttaaattttttgttccatatggtataagacttttgtcccttcagtaagagaatattgacattacggatttatttgacagatattttgtc

SEQ ID NO: 43570 - DNA, 631 bp, Manihot esculenta
  Intron number 2 from transcript cassava4.1_008321m (locus cassava4.1_008321m.g) derived from phytozome v7.0 (chr-ID scaffold06512; pos 270904 to 271534)
ttctggtcctcagtaccaggtatgtctttttatttattaattttccttctttttcttctcttctatattgatatgctttgtttactatgattcaattctcatatcgggggaaaaaaaaaattgaattccctttcagggctcaattatgaaagcaggaaatgaaggaagactgagagattatttcttatttgatatattttttgaggattcctaccactggaaaagaaaaaaaaaaatccaaatctttacatttcaatccatttggataaaagaggttttgaaatgggaggttatttgattcacatatgttggtcttttatgatattttacttgaaacacaattttaaaattccagttgcacctgcatttaaatgcacgcatatccaaatgcgctcatagataatttttccactaacaagtgtttatagcatcaaaagctggttatgttatatccaaagtccagcgtggctcctcaaagcagcaacttgcagataagagatttagctcatgatcatgattctatcggttcttttttaactatggaatgcaatatgcaagtaggataagtgtgataacgtttcttcaatacgtggcttaactccattcatctgacttacatgtttgcttgtag

SEQ ID NO: 43571 - DNA, 886 bp, Manihot esculenta
  Intron number 2 from transcript cassava4.1_014959m (locus cassava4.1_014959m.g) derived from phytozome v7.0 (chr-ID scaffold04681; pos 266413 to 267298)
ttgaatgtaagttttgattttcctttaggtgttatctttttccaccataaagtttgataaatttttctatgggggataagtataaccattatggtggatggagattggtaaatggagagacaggagggagggacagtgagggagagaatctcctgagctgtttgctctctccagtgcaaatttctctgaccaaatggggaggctgccaaaaactgaagttattttgaagtgggatgagccttcaggttagatggattgggtttttttgtatggtgggggtggggggggcgcagagatctcaaactgtcgcacagattaataagctcgataaaggtggtagtgtgcagagtgtttcaaaattcttattcattgaagatcacaaacaagatgaaagataagactttatttgaaaccccattctcagtgccctcccttgcgcaaatttgttcgagaaaggcaattgaacctcgtaataaacccctgattatctttatattgacatatttcaagcttctctgttaattttcgttttttttcttgtctttgttcttgtcctttttttaccctaaatcagggttgaatcttggcatatgttaattcttttgcgaatttattttaaatccttgccatatggattcaatttagtgacaatatcatatatgaattgcagtgcagcacaccactatttggtgatcttttgatttcacacgctgcctttggattagttggacgttgtttaaagctcaattgcattgacagtttcttttacgttcttgtatagttgtatttgctgattgttctttctcatgtggtaacttattctttttgcacttttccctcaagtttcacaccttccttcacttttcaggcttgcgaagacatcaga

SEQ ID NO: 43572 - DNA, 384 bp, Manihot esculenta
  Intron number 1 from transcript cassava4.1_019947m (locus cassava4.1_019947m.g) derived from phytozome v7.0 (chr-ID scaffold04175; pos 750010 to 750393)
cgaatccttgatccaaaatctagcagtttttcgcggtaagtctactctatgcctactttcttcgcttcacgccacgttattcctttcgctcacgaaaccctaacccgcttaaaagtttattcatttttcttggatttgttcgtattcatctttgtaaacaattagctgatttagcttctagattttctctaattaatcaaacaatagtctgtttaattgtttatgcgttgagctttccgtgcaaatgctattcacaacgggttacttttcccgtcgtgtatttgtattcgaagtattttgcttgattgttaagtttccgaaatttgaaggtggttgattttgtttatagatttgaaagaagaaaagagatcgttttgaggatca

SEQ ID NO: 43573 - DNA, 690 bp, Manihot esculenta
  Intron number 3 from transcript cassava4.1_019947m (locus cassava4.1_019947m.g) derived from phytozome v7.0 (chr-ID scaffold04175; pos 750557 to 751246)
cactttccagcgatcctagaacagagaacagggtatgtatcatctggttttatctcatgtttttaatttcctgggtctggttgtgatctgatgattatcttttctcgctagtgggaaaatgtgttaaaagtatgattgtttaattctccttcattttagtgggaaaatgtgttaaagtataatagtttatttctcctttgattttattgatgagatttcagaaaagaataattattttccttttagctctgattgaatttgttcaaagtgttggtttgtactgaatagaatctgatgagatttctgtctgttaaatagaatgttattaatttgctttcaatataaaaacatccatgactcttttatctgtacaactgttctttgaagccatactctgagattctgataagatttttccttatattggtggggacaaattaaaattatatcagtgtgatgtatttaattatttgtcttgatcttttttttccccttcttccaatttggatatggttataccacttatttggttcttttttagcacaagtcaatgtggttacaagtttgtgttttatttatttattttgtgcattctggtttatctctagggagttgtggttatgggattattgattgtaataagctttctggacaggtttcgtgggtttttctggaaggcagccagaatag

SEQ ID NO: 43574 - DNA, 635 bp, Manihot esculenta
  Intron number 2 from transcript cassava4.1_017486m (locus cassava4.1_017461m.g) derived from phytozome v7.0 (chr-ID scaffold09151; pos 905071 to 905705 reverse strand)
ggctgttgcaggacaaaagaaccaatatttttttggtttaaagtctatctattagcattcatatggctaaaatcaattaaaattcatgcatagtaatagcatgcttctagctgcacagggcttaatgattatgctgctattttcttacagttcctattttttggatcatattcatttgtctcctagaatgagctaattgaactatgtgaataaaattttcatatacatgcatactgctgtagggtcaagtgcatatgcaattgcactacctagtgcaaggggtagatggctcatatgttatttaattttttttcctccatattttatttgttggttaattgatgatctaatgagattcctttaggtagtttttctcatcagagatttctgaagtgtttcaatttcaaaggttgctaaaacattgaatatctctgtcttaagaagagtaactgttttataaaatttttgtcatgaactgagatgctaaatagaatcttgtgctaaatcaggttttgcattccattctctccctggtttgtgttgtttaaatagatctctcttctttgtaaaattcaaaaaccgatgctagattgcaaggcattgatatctcattcttctgtttcatgataggaaat

SEQ ID NO: 43575 - DNA, 834 bp, Manihot esculenta
  Intron number 1 from transcript cassava4.1_017486m (locus cassava4.1_017461m.g) derived from phytozome v7.0 (chr-ID scaffold09151; pos 905724 to 906557 reverse strand)
tccatcgaagcccttaacatctatttctctttgcagtatgcttctctcctcctgctttctcttgtttattatgttttgcccttttctgttataatgccgacttagggttttgttactatcaatactagtgttccattattaagtttattgggctatcctgaaaatttttcatgtatgtttcttcaattttttttttttggatttcacatattggtttttcgagaatttaattggacatcgtttgtgggtttgcttattttggatcatttgggttctatcgtaaatattttcaactagattttcatattaccttattatcttcatggatgtattattgaacttgcatcgctcaggagtgttctagtgtctgctggtaattgaagtagttagttgcgggtaatggagggatgtgtctctgacacttatgcagtcatgattgtgcattggtttggatcattcaaaaatttcatccataatacagagatcatgtgtattgttgggacacaagccttctaatgaaggcagtgtggccagtcaagattgtaggaatctactatgatatacactaaagttttttgcaatatgtagaaagtactggagagtatgtctttgatttggcactgtgattaatcgttattattgttctcgcttatacttgtttaaaaaatgaatgttgtgttggggcgatacactgatatttcttcattttttgtgaattcatctctcctgctttccttttttctttttctttgttttgttttcatagtgtcaacttctactgaaatatacattaatgcagtcggaagctggacgaagataaaaagcatcctctgt

SEQ ID NO: 43576 - DNA, 712 bp, Manihot esculenta
  Intron number 4 from transcript cassava4.1_005040m (locus cassava4.1_005040m.g) derived from phytozome v7.0 (chr-ID scaffold04285; pos 283703 to 284414 reverse strand)
tggcacacttatatcttgttctatcatatctataggtaattgagaacttcacatgtgctatgcttctgtattttcatcgaacggacatgtttaaacatcaacatgaactcgacttctccaagtttgtcaaattgtaccattcactgcgaaatgggcctgcataagagacggagctgcttctctctgttgttttcctgctgtgccaaaccattttttctttgtcattccttttttctatcttcaagtgctatcttatcctcaatcattcctttgcaatatttgaatcttccttgccgtttatcaaattgaaatcaaactgcagaagtattgtactaaacatggtattcagcaagctttgaattgcataagttcttttgagcataagaagtgaaaaggtttaatcatttcagctgtcattctatatatgtttggcttgtttgttaaatttgtggcttggagtatttggcttaggatctcaacaaaaatcagacatttggtcactttcttgcttacaatgcgttatgttttcctatgaaggaaaacagaataaatagaattccttggaagtaaatttgttgatgttcagtctttgttgacatcaataatcaatgtgcttgacttggctttatggtggcaagagaaatatgtattactgatcattacaactgttctggcaggtgctataaaagcctttgagaagatagatatcggt

SEQ ID NO: 43577 - DNA, 708 bp, Manihot esculenta
  Intron number 2 from transcript cassava4.1_019258m (locus cassava4.1_019121m.g) derived from phytozome v7.0 (chr-ID scaffold11668; pos 40675 to 41382)
cgctggctctactcctccggtatcccctttctctggtatggtttgtcctcgatctatagaatgacaattaagtccctggtctttttaccaaatgcctaaaatgccctctcctaagaaactggagctaggtgtatctagaaatgtctacagtcagttttgtcattttgggctgcttggcaattgggtaatgacaattaggtaaattattgctttgctgctttggaatttggatagtgacattttagctaggtcgtcgttgacgtgcacttatgctttgtctatgcatgggttttggccggctcaggataaccataccccttttaaaccaagtatggttacttgaattgttaattaatttttttttaattattttttgaaaaaagaaaagatttaaccctgttgaaactatatgataatatgaaattatctagatcaaattacttttgagagtcaattagttggtttatcccagtcttctgtagtttggtacaaatgtaatccatggtgttcaatggatgagatgacaacttatgatgctaatttttttttagtcttaggtactataatctcgacctaaattgatgaaacttgttacaaattgtaaccttgtttaagatgatttactcgtcatatagctgatgagcttttcttttggtgtttataaaaaaaaaaggaggcagagagtcatttcggtttcgaagaagatcg

SEQ ID NO: 43578 - DNA, 605 bp, Manihot esculenta
  Intron number 2 from transcript cassava4.1_012916m (locus cassava4.1_012916m.g) derived from phytozome v7.0 (chr-ID scaffold03614; pos 3617399 to 3618003)
tgttcttgattccactgtctcagagaaccttcctggtaactatgcacttacttaccctccatttggaatcaaaaattttacaaatatccaattcaattgatcttttttttctaacaattatcttctttgaaatgaaaaattttccttttaactttaaaagaagattaattcttgcatgattctacaggaattcatttgaattattttcttacaaaatgaatcatgccaaacagttatatttcagtttggtgattgtcctttttctgtgtgtctgtctttggtatttctatatttatgaagtttagcttaaaaaaatttaacattattgaggttgtttgttagtgaatagccattgtcaacatccttttgcaagctggaaaaattcattagtttcagttgtcatttatcttagagatgaggtacattgccaaattcccattgttttctcatgctgcaactcttctcctggttaaactgtcatcgataaagacaaggatacaattgaaaaaatcacaaagggtgaaatgtccaatttgttgtctaatcatgaacagcagtaactatgtgctttgcaattgcagtattggctacagaggagaagtaca

SEQ ID NO: 43579 - DNA, 893 bp, Manihot esculenta
  Intron number 4 from transcript cassava4.1_000530m (locus cassava4.1_000530m.g) derived from phytozome v7.0 (chr-ID scaffold03614; pos 2448425 to 2449317)
tcttctgtagctgcgcaattgatcaagaggggctggtaagttgcagatgacatttttgttattaatgtcttaaataaataggcaagcctaaaccacctccaaagctagctcaaagggaggggtgtgaaagctttataagagacatattaacctaatcccaaaccaatccgggaatttaacacatcctaagcacatgtgcatggagtacttgtgggaggtctaatagtgaatgaggagctctgttctcatcttaagaaaatgaactgagcctaactcaccctatctgaagagggggccaatgctaagattttatgaggtgcaaaatgcccctaatggggatttaacacactcctcatgcccatcttaagaaaaagggttgggtctaactcactcccaaagctagttcaagggagtagaagtgtccaaggggcacattaccctattcaaaactagcgtgggaatttatcaatatgtatgtatgtaacatatgcatgtgtagctctcactgtggcaactgctcttacttgtggcgatgatgcttcaactttcatacatgtgacatgacatggaatcatttgctgtgtgcaatatttatatattatggtttctatgccattaactgtaacttgcttgtgatattgcattctgagctttgcccaatgagatgctcattaagggtgtatcatgtctgaaatttttgccactccatgtagcatttcataaaatttcaagagactttgaggtcacaattacatagaatttcaatgttacatctggagacttgatgaattctagttttactttgctttggataaactgataacttggtagttatatttgaatatgttttgaatgtaggcttgattttacagctgttgaaaaggagacttttt

SEQ ID NO: 43580 - DNA, 870 bp, Manihot esculenta
  Intron number 1 from transcript cassava4.1_015611m (locus cassava4.1_015611m.g) derived from phytozome v7.0 (chr-ID scaffold09876; pos 90410 to 91279 reverse strand)
ctccactaaacctgataagcgcctcattctcatcggtctctctctctctctctctctgcatatacaataaatttatgcgtttataacatgagcttcaatgtcaagttcattctgtttccctttgaattagttctgtgaaattaaacggtgcattcagatcctttaattggctgtcctttttgttccgagtaatttgcttacatattttgcttggtagctgggataaattgaggatattggaagggattgtgctatagtcaagtacgagctttttgtccccttggtggattttatttccctaatatgttagtattcacaaatgtatgtaatttttttttgtattcatgatgaattaggctttgtaataagatttaataatgaacgaaaacaaagaaggcctctttttattcaggccatgttattttatggtaagcatgggcaagattatgctcttcggatatttctgtaaaacgatggaatttccagagggacgttctataaagcagaaattacaacaaagcaaagcgtaaaacagctgtctttcttcgttaaactccctttactgattgccttataattggacaaagaatactgtttttttttcttttagatttacatggacaacgcaatatactatttctactattgcagtttttattttttaatcttagggtgacttttgtcgactttattctttttgtcttaggttcttatccagcacatgtatcttatggaaatagttaatatgttgcattattgcatatgattcttgcaactgagcaataccagtaaatgcatattttcgtattgtaacctttagtagtttgattggcaggtccacctgggtctggtaaaggtactcaatcacca

SEQ ID NO: 43581 - DNA, 534 bp, Manihot esculenta
  Intron number 1 from transcript cassava4.1_019355m (locus cassava4.1_019355m.g) derived from phytozome v7.0 (chr-ID scaffold01551; pos 414972 to 415505 reverse strand)
agcttagaggaaaagcaattgccttgcactcacaggtagcccattctttttgtaactattgtttatttagatttgctattctgctcattcagaagagaaatttgatatatttttccttttcacgatttattttctaaataaacaaatagttttgtattactatctcctcaaattagattagactaaaaaaatatatatatcgcaaacgtttttaaaaatatatttccttttatttatttattgtggtttcctgtgctgtgtgatttcgccggcccagctgtactgcaacatcaacccatttttagacgactgcttcgagtggtctgccggagccagaattctaaaaggattttttttattattatttgttgtggtggttgaaaggcgtaaaatgttaatttcaaaataatttgattgatattaaaataaaaaaaagtaattgatgaagttcaagcaattttactgagctgcttaagttgttaacatgtaaaatgttcaggtgattacagaattctgcaaatcaataggagcaga

SEQ ID NO: 43582 - DNA, 948 bp, Manihot esculenta
  Intron number 1 from transcript cassava4.1_012457m (locus cassava4.1_012457m.g) derived from phytozome v7.0 (chr-ID scaffold03614; pos 3407657 to 3408604 reverse strand)
ttagcttgctcaatcttgcttggtgcttctttcaggtttgtcactttcaatttggaatccaaaaggttggctaatttgtttaatttgaattatttgaatcagcatcgtatttgtttgtttcctgaatgtagagttcactttgaattcagtctttttcaattttattacggtatatggttaattttacatggttttattgatttagctcgaaaatttgggtggtttttatggtggatattgcaattgtggctgcaaatatgattcagtttgcaacgtctaatatttcctccttctagtgatcattagtagttcataaatatggaaattagttgggtttaaatgggacttccagttttagttttcagttcaggggcctttagcttctttcatttaatataggtgtgcatttgtgggtgtcaggagtattgtactttgtccaaatgatggtaaataaaatgatgttaattaactgttgttgcaaaaaagttgtttacagataataggtccattgataaactcaaagcatatacactgaagtgtctgaaactattctttttaatagatcactaatcttttcttccaatgcgcaggaaaaatctgatgaaaccatagttaagatgggtatactaatttattttgattagctactgaccaaaatgtgtgtttttgatttattaggttgtgcatctttgtatctttgttaggttcctctgatatattttccaaatagtgggtactaattacagttattgggtttattattgggtactaattacagttatagctgtcaacaacagttcactgcttagattaattcaaaatttattgaggattatatgacaagttgttgttagttttaagacttaattttggagcttcttcttgcttctctttctgggctggcctttttggtgacaattaagtgaaatactgtcttcattgacaggc

SEQ ID NO: 43583 - DNA, 305 bp, Manihot esculenta
  Intron number 1 from transcript cassava4.1_016362m (locus cassava4.1_016362m.g) derived from phytozome v7.0 (chr-ID scaffold01127; pos 19834 to 20138)
cgcccgatactccatcctcgtaagcctttcctcctctttgattcattcattcaatcaataattaatcctttttttcattgacttgatcaaggtttaatttgggctttttatcactcttatagttgctttaacctagtcaacggttttttagcaatttcatttagggtttatatctcctgattgcgtttatgtagaaagttcacttatttgctttatttttccttgttcatctctctattttgctcgttttcttctttgacttggggcgaattgttttaggccaaagagcatatacaaggatccag

SEQ ID NO: 43584 - DNA, 429 bp, Manihot esculenta
  Intron number 2 from transcript cassava4.1_016362m (locus cassava4.1_016362m.g) derived from phytozome v7.0 (chr-ID scaffold01127; pos 20176 to 20604)
tgttcagtgtctagccaatcctacttatatccattgtaagcgcatgaaaaaattacatgcatttgcttgagtgtttgctttgcatcagatttttaaggggcttaatccgagttatgcatcttccaaactcaaagcaaactgcttttcggagtattttctgttatatttgccagtgattttttttttcttggagtgattctatattttacatccgagggaaaacttatttgtatgcattatgcatacatgtgttggttttttgctattaggagtcttagcaacacatattacggtgtggaggagcgtgagtgcgtgtatttttgggtgtctttgcacttgctctgctcaggtgtcgactttcattcgctgtctgatggtgggttctattttttttgaatgtagatttggctcagaatcgctattttgaag

SEQ ID NO: 43585 - DNA, 511 bp, Manihot esculenta
  Intron number 1 from transcript cassava4.1_011780m (locus cassava4.1_011780m.g) derived from phytozome v7.0 (chr-ID scaffold07088; pos 178983 to 179493 reverse strand)
ggagattaccctcttggttccaaggtctatttcttgtctctttctcagtttagatttaaaattgactctttcttggttaattttcatttatatagaaccgtattaagcaggatataccttaaaaaaccaatcttctgcaagctttagggacacgaacatatttttatatttctaacattacaacttgaaacctgatgtctttatggtgagagtaattggaaatttggaaggttattcaaaggattgatccaaattttgcaaatcttgggaccaagaactatatagatggatgatactgtggagaaaagcttatcagattattcatgatttgattccatgattgccttgattcaggcaccttccttaattaaaatgggccctgttgcttcattcttttctgacacatagcttatacatgatctcatagagcatatcatcatcaaatttgttcttaaacagcaaaaaattaactgcagttaggggggaaacgagttgggattgttgggttcgg

SEQ ID NO: 43586 - DNA, 1019 bp, Manihot esculenta
  Intron number 2 from transcript cassava4.1_027350m (locus cassava4.1_027350m.g) derived from phytozome v7.0 (chr-ID scaffold03130; pos 89864 to 90882 reverse strand)
ccagtactaattctgggaagacaaagaattctaaggtttgggtcaactttcagctaaaatgtgagatttattctggttccatgatttaccatagtcttcacttattgagctgtttctaatttagaatttaaaatgtttaacatattcacatctcattgactagtctctcttctggagtatattaccttttgcatatgcagttgtctttcccctctctttctaagtgcaggcattcttctggtttttgcctttgatttctttttgatggaaattcttggagattaagcaactaatggagaacaatatcatgatctgctaaaattttggttaagagcatttattttgtgtcctagtcatcatcattattgttgttgttgttgtttctctgattcagaaaagcgaattgattgataaaagggcaaccagtaggttgcctgctaataaagggtgtatgttttgtgtgttctaaaaaaaataatattacattaagatacttgggtagctgattaaaattttattaggcttcattttggttggagtggtggtctagttgctcgtatgtcttaggattgtcacaccttgttcatcccaattcctgactgctaggaatgagcctctggtacccttctcataaaatacaaaggtgacaagtagcacaaatcactgagtagatttatctttcttgcattgaagttaatttacattgaaaatgaaatctcatactggtcattttggatgttggcacaactattattgtaaagcacgagttgagcattgatcataaggattcctccatggaatcctacattgtacaacagtaggaactgttgtcatctgctcaattgacacttgaaatgtgctattgaactaaatttttatttgatctgtgtaacgatacttgatgatggacacaatatcctggtacttggaaaagcttcgtgtgtataactacatgtaccaacatggtggttcttgtgattgcagcttactcttttctctgggtttgtaagctaccagat

SEQ ID NO: 43587 - DNA, 852 bp, Manihot esculenta
  Intron number 3 from transcript cassava4.1_012650m (locus cassava4.1_012650m.g) derived from phytozome v7.0 (chr-ID scaffold06512; pos 1108704 to 1109555)
cagcttcttctcaagtacagtgatgttctcagttattcctctttcttaaatcagaacgtttggacctaagttgcttgattagtaaaaatttttaggtctaaaatctatctaattgttgggtttggtttcttagaatatttaggataaggagtattaacttattgaatgtggagtttcttcatgttggacttgaaggaaataaagcacccctttagtgtacagcaattattttgcacagttcatttgtggaaaaccaagaaaagttaaagaggtttcaaaattctcttgttttcatttcatttgcactttcagcaaccaaacaaatcatttctgcttgttgtttgctgccagaatgttaactttaatgtgcaactcacatgatgcttaggatgattatgatggatgtgattctttgcacttagacctcatgtgaatatcaaattccctgtgttgactcgtattgtaatacaaaatatttaaatgatcatgcattgaaatggaagagatgaaaattttaaaaattgtaaatagtcatggatgaaacatatgttgttcttcttatgtatttattttcctcattgaaataaaatttcatttatcaaaatcatgaaaatctgtttggttaagctaatggtttattctttgaccaagaaaaaaacacataatggtttatcattgtgggttagactcgttagtatttaagagattggcattggtttggtcagtagacgtccatttttgggctacaacagcttcacaatcaagtaatttcctgtatttggttttgaagtccatgaattctgctataacccatatcatccgtcaaatgttttaggtctgttgattcacttg

SEQ ID NO: 43588 - DNA, 761 bp, Manihot esculenta
  Intron number 2 from transcript cassava4.1_010894m (locus cassava4.1_010894m.g) derived from phytozome v7.0 (chr-ID scaffold00341; pos 117749 to 118509)
ttagtggaggctggaaaaggtgattacgggttctcctttttatggataactgagttggaaaaaaggtttagattagctacaagtatatccacttaggcgatcattttaacttctgatactgcaaaacaaagggcgtttagaatcacacttgcattgaattaagaagctattgactacggggtgatatcaactgaagttgcaataattgcacttttctttctatttctcttttttcttttcttttttggtgcagtggtgtatttgatagtttattttgtaactgctaatggtgtcaactataatttgttgcgacattgaaactcacagtggcattatgagtaagagtttctttatttaataactaaaaaagattggaatgtactagcaaaacaaggacaagctttgaaatattttgttttttaagaggaaaattgggaatgcagtttccattaccattaaatattgttttattctagcatcaattgatccctatctcaaccttatagcattatcattcaaacactacttttttttatgtttctcatgaataatgaattataagtatgaaattgcatctccaaaatccttcatatttcagctctttgattttttttttttttaactatgtctatatctcatgtatctagaactgaacaataaggatcgaataatagctgtcttgagaacaagaagtttttctgacagtaatttcttttccattgacagtgaagacggcaaactgagttgtggatattcaagtt

SEQ ID NO: 43589 - DNA, 572 bp, Manihot esculenta
  Intron number 4 from transcript cassava4.1_019904m (locus cassava4.1_019904m.g) derived from phytozome v7.0 (chr-ID scaffold04465; pos 56364 to 56935 reverse strand)
aatctgagtggtgaatctgtaagtggttaccatagtttaaaatgtacttcatatagtcgaggcttattattaaactatagggatgcaatttgtaatatacaacaatacataatatttttttctttttttcttttttttggaaaaatatgttatacaagtcattagttcattatcaatggtgtgatgaaaattatataaaatcaaattcataaagtttcctcaattctcacattcttagggacaagaatgtactaatggggacaatattgttacatataagaggaagagattcaggataagggtagttttggaagaaataattagattgttctagaaaggcgggaaatagaaaagtgatagtttgctattctgttgaaaggaagcataaaagggcgctagaagagtttgttaggattctagaaatttgaatgaatttaaacttttgtcatttcctccctaattctctctttctcactcttttctctccatcctttccctcttcattcctcaaatctccctaattccttcttctattctttaaacatttctctttccgtgacagatcctttgtg

SEQ ID NO: 43590 - DNA, 909 bp, Manihot esculenta
  Intron number 1 from transcript cassava4.1_019904m (locus cassava4.1_019904m.g) derived from phytozome v7.0 (chr-ID scaffold04465; pos 57492 to 58400 reverse strand)
atacttcaccttcagcttctcagtccagagacttggtattctctttctttattttctgttttgtgaatggatgcaaacatcatttcccaatttgatcctgaattctcctgactttgagacttattaacatttaatcagtggattataatggaaatattcatatttgacatcttgtagttgggatgatgtaactcggaaatcactctctatttgtgctgtattcagttggctgttcttgttcatgctgtgacactatggttccctgtatgagacactagtagtcaaagttctaaatttctctttggttgctgttgtgtcttggagcttcattaggctgtcatttctgttcaatccctacatgtttgttacacgacagtttatggttaaggattgctttgttgctaacttgccaactatgtgagtgttattttagtggtacaatgaaatcacgattcatgggtacttgtactgtatatgtttcaaaactttggaactgccacttgaggttggttgtgaaatgtgtaaatgtgttaatgtggtgtggatgtgaggaagcagatatttaaagtgttggcgtaggcctggacggcattttaaaaatttatttctgatcagctatttttgggagtaaagctggctcttgataattgttaatgcatgtctcaaatggatttgagaatttttaaagtggattatttttgggctttagttataattaggcatttaatattggaagattaacttaatcttgattattgattattaacaagtattttaaagtaaactttgaattttttttttaattggcattcttttcccttaacatggggctaaattgacatgaatttgatttgtttaattttattcatcacaggtgagaagaaatttaattgaagggcaaaagcattt

SEQ ID NO: 43591 - DNA, 948 bp, Manihot esculenta
  Intron number 1 from transcript cassava4.1_005433m (locus cassava4.1_005426m.g) derived from phytozome v7.0 (chr-ID scaffold07591; pos 12058 to 13005 reverse strand)
ttcgaggatacctcataccagcgactagatcccaggtgagtcagcaatttcagatctctctcgcaattctatgttgttcttcagatttatatttcaatctttttattctcatgtttatctctcttagattatatatatcctttacactttgctttatatgattctctgctcactttccgttggcagtgaatcttcaccaattctcaacgatttcacttgatcttccagtcctctttgtggtagtggtagggttcttgatgaacaatgaataccttccccaattctcaacagattattgagtgaatttcgcttatattacatttatttgttttctgaactgtagatattgaaactatttagataatagagttcatgtttctctctctctctcttgtgtgttttggaatgttctgttctcatctttttctgggttgctgctatacatgtctgtaatctcagagaatgatgtccttactgatgaagcaatctaaaacttacagttaagcataggctaaatacctttatttgtgtgaaggcagtaaaagtaggaatggggaaatagatgtacgaacaactgattatttttgtcgtaagacttgtgtagatagaatgcgcattggtcattgcaatcctgatctcagattcttttttcgtttcttttcatttccttactttcttagtaatcaaactgacctgttaactgttgcttatgtctgtttgattggtgatagattatgtatagatccgagatgggggtttcctcaagattttagatcactttgtcttgtttaatatttaactaactagttgtttgtttaattggaaataacagcttgaaattaaaattaattgaagttgaactgctcttaacttttttttttcctggtgatgttaactgaatttcttttttcaggggctgttaaatacaaacttttctgtggtctattt

SEQ ID NO: 43592 - DNA, 757 bp, Manihot esculenta
  Intron number 3 from transcript cassava4.1_012773m (locus cassava4.1_012773m.g) derived from phytozome v7.0 (chr-ID scaffold01551; pos 2161985 to 2162741)
tttatctctaaaggaaaggttgcttctttatttatttcttgctatatggacattataatctcttgcagttgtgctcaatctttctgtgcttttcgatcttatttattttgaggggttaagaagtgtaacgtggttggaattcatgtttgacttgatcatgttttctaatcagatcaacttagattttctttctattttaatatggctggcaaatgctgttgttttatgactactgtaggcagataaaatatttagcagtattgctatatgatagtcactgttctattaaaccggttattcatcgagttttttggtatggtagtatacgagagtgagctgaataattcaataggtgctacataaaaatccctcttgacatctttttgcgcttatgtgctaatgtggaagttggaagagcccaactgggggattctaagttagggacttacattgtttctagttctctgtgatctattcttgaattcttccagatataaagtgcatgttattgatagaatttcaacttctttatctttctcaaccattttcagaggcgtgtagttttgttgatgattcagttgtccatgtggataattgaaaatctaggaatgtgctttgttcaatcgttgggactcagttattacaatccatttcttgcttgtcttgtctcttcatctataacaaatgcagtatataactccttttttaaatgccttttataggatccaattattgcaggtatagaggacaaaattgc

SEQ ID NO: 43593 - DNA, 573 bp, Manihot esculenta
  Intron number 2 from transcript cassava4.1_004833m (locus cassava4.1_004833m.g) derived from phytozome v7.0 (chr-ID scaffold04882; pos 47434 to 48006)
gcttggctgagcgcacccttgctgatcgttatcaggttatgttgtccggtggtgatggctatgattctcgcagtatgttttctttgattgcttacgattctttgctacaactctctgctcttcctaggttttgataggggcattctaattagaatttagtgggcaattgattagtagttgcaaattagtccaacctctttattgaaatgtgttcgaaattgcgcaggcttattgctgcattgtaaggccttgtttgcattgagtgttgcttcttccattattagtgtagatagtttatctatctatttactattttgtcatgctttctttctaaaaagttgttgtctctatctatttactcatagtttctttctgaaagggctctttcttcactcttgaattttgatttttaaaacagaccatggcattatacatgtgattgttatactattttcattatcttttcctctttgtgttttgaagattatattttaatacttatcttctaatttctctctctctctctctctctccctctctctctcgttcttttaaataacagtcgcagattgg

SEQ ID NO: 43594 - DNA, 277 bp, Manihot esculenta
  Intron number 1 from transcript cassava4.1_031221m (locus cassava4.1_031221m.g) derived from phytozome v7.0 (chr-ID scaffold01701; pos 120194 to 120470)
tgaacaaaaaacggaagatatctcagcttcaaagggtaactaagtgacttacatatggctctttttcttctctttttggagaattttcattttgtctgcatattgtttgtttctttgtttaaataatttgattcattttggcacaatggtagtttaatgtcatatatttgcttctgcaggaggatttcattaacaaattgccaaacgacattcttatatccattatatctcatttaagtttgcaataggcaataagaaccagtgtcttatcccaaag

SEQ ID NO: 43595 - DNA, 543 bp, Manihot esculenta
  Intron number 1 from transcript cassava4.1_000097m (locus cassava4.1_000097m.g) derived from phytozome v7.0 (chr-ID scaffold01551; pos 1353973 to 1354515)
ctttgggtaggtttttgatccgcagtggccaaagagtaagcccttttttttttttgcagttctgtgggtacccatttggttgaagtttcatcttttttattttgttgtttacttgttttggatgttagtcgctactagcggatgcatacgagatcagtttttgttcatagtcgtggtagttcattcgagattattattttttccataggtgtttccacaaagattgcgtttttatactcctttggatcatcgactactagatttgatttcgctgaatttttttttggaaaaaaaattagtcactgtgtctaggtgttttaatgttcctttctttatctgcaaaaggacttctctggagtcatacaggcagtcatttttaatgatgcatattactgcttcttgcctaatggacttgggagatctaaagaatacatgattcttcaatatatagccccctggtttctctttgattgatttgtatttggttttgttttcacattgtttgactatatcttcactgttttttgacaacttacaggtttg

SEQ ID NO: 43596 - DNA, 930 bp, Manihot esculenta
  Intron number 2 from transcript cassava4.1_002563m (locus cassava4.1_002563m.g) derived from phytozome v7.0 (chr-ID scaffold06988; pos 60902 to 61831 reverse strand)
gtgcttcagtttcataaccaagttgaggtaagctcgaatttacgtatttgccaacgtcaagttcaatacagttgtccacggactattcgcattatttgttactatctttcatttacctgttaaaatctttttctttttcaaaataccaatgtttgtcgcccttgccttacggtccaaacgagcaagagaattagcgattgatattgctccgagagacagtgattgagcggggggaaggggtggggagagtaagactggcactggacttctattaactatatcactattgttcataacttttgcctgaaaaggccttgaggcaaagcctgctgtgaaaaacaaacaaattaagtttaatgataggaaaggcatgtgctctggaatttcatgtttcaaatttcgaggtcaagtaggggccacgggaatcttatggtgcgttgggctccgagtggatcattatttattatactaggaatatagatttcaactctagttgtatggtaaaacacatattcatgcttccccaatttttatacattcctacgtgtgattgaaaattactgttaaaattacttggaaaaatgagaataagttattaaaattgatttactttatttgggttcagagatgcggagtgatatattctaatttttatggcaatgtcttctatgtgtaccttagtcttttgaaatgttggagaactaaaaattaagaaattctctttttgaaaaaaaaagaagagaaagaaatttctcaacaggaaaatggtgtgtgaattaagagttttgccatattggtgtttgcatttgagttgagtcttatgtgttgatacgttgcttaactatattttatttgcaatcctttgaaatagttgatgattgtctgttgactgtaggtgggagtgaggattaaggttgtgtcaagcaaatc

SEQ ID NO: 43597 - DNA, 1025 bp, Manihot esculenta
  Intron number 1 from transcript cassava4.1_002257m (locus cassava4.1_002257m.g) derived from phytozome v7.0 (chr-ID scaffold01551; pos 1366950 to 1367974 reverse strand)
agacccagatcaccacttccctttctaaattcgaggttgtggtgatgctatttttcttttcttcttctgatctctttcctacatttcggtgaattaattggattttctttgctgtttatcgctggtggatttgatgtttgacttgagttttatcttgttttatttgcatgtgcttgattttggttctgagtgggttcacttactgggtttctcgggtcaagatgctgtttcctgaattagatgtgtgcttcgtagtttcccgaacttagttttctgcgtaaattcagtccaaaaaggaacagatccgtagttgaagttcaatctttgcgttctggcttttctgggttcttgtgcttttaaatctctgaatgcgttttcggtgtttgctgaattatctatgcccaggtccctttcaacttctggttgactgaaaattggaaccaaattttcatgtttgagatcttagattataatgtttccgtgaaaaatatttttcttctcgcaagcatttaactgaattcatttgttatttgctcatgctgatcaatgcaaaaggatacgtttatttttttatttttatttttttgtggtttatcttttgattcatcaatacattatttttttccaacctaaagtgaaaaattatgctgtacacactgaagctacctttgagcacatttagattgccttacgttttatacttctctttttcctaattatggtcttctttcagtttcgaggggctgtacaacgtttactagttgtcgaactgctgcttcgctgttttgcttaattttgaatgtaaaatttataatcttttgccataaatttataggaagctggtgctttgagaatatatacaatctctatatttgtaagtgaaattgtatgcatgttagctcaggtatagtatttgagattatattttttctcaattgagttgcttctttttgttccatcatctaagaagaatctctattgctcttgcaggattccccggtcttcaactacatcaatagtctttc

SEQ ID NO: 43598 - DNA, 480 bp, Manihot esculenta
  Intron number 1 from transcript cassava4.1_034312m (locus cassava4.1_034312m.g) derived from phytozome v7.0 (chr-ID scaffold06512; pos 544531 to 545010)
caggtatatacacaacataaagttgcttaatatatttcttcctctttttttttttttttttttaaaaaagatattttccttctccaacaactcaaagttcagtgattgactctataagaatgtagaggcacatcaacagagtatctagagaccatatctattgcgtgtaacgaaatcgaccttcatagtaaaaacatcagcttttcttttctttttcttcccttttacttttcctgatattgttttctagtattcctgacgagtggattgacagggaagaaacaattttttctcctctttgcgtgcgagtgtggttttttttggatatctgtgtttatgcttttcgtctggcctttcatattacataaaataatttaataaaaatcctatttttcttctctcaatgcttgtttaatctgagctgatctttcttctaacggtttagggttagaacttggaaatttccctgcagaagttagc

SEQ ID NO: 43599 - DNA, 839 bp, Manihot esculenta
  Intron number 1 from transcript cassava4.1_032661m (locus cassava4.1_032661m.g) derived from phytozome v7.0 (chr-ID scaffold03332; pos 575189 to 576027)
gtacatcctctccctctctcactagtctttgttcatagggaaaattgaatcattttggcttcaaaaactgaatttagtgttcgtacagtaatttcacccaatagtttcaacccgagaatttagattttttttctttttggtcatattgtagcagttttcttcttaaagcaaaaaaaaaaaaaggatcgaatttggctataaaaagcacaaacgattactgattggttggtcaagcttatctttgaatttcatttattctttcctcctaattttatttgtctttcgagtcatatccctttaatatttttccccaaaagttattgctgattgtttgttcaagttccagtactatttggacttaattgcattaggtgcttgatgtcttaattggttaaggatttaagagatttgttagtataatttgagcaaataaaagctaatgatggttgttgtagcaataaaagcacgatatggtgcctgttggggaattaggataatttagatttgatccttttgcataatactgttttatggtgtcttctctccaatctgttgtgtaatcagagagtcgacaaaaaaggagcttataccaggactcttacttccacgtcctcaacctgcaaacccatactccgctgttcactactctctttaccaaaagcccaatgctgctggtaacgaggggttcccaaatgcctcacgcactgaaattcatgcttcaaaaatcggcagtgatgatgagatgtctgttttgagtctatttcctactgctgacactcaatgtacctgcaacggtgttctcgagccagtttgtagtgttacatctcaagattgtgcag

SEQ ID NO: 43600 - DNA, 1032 bp, Manihot esculenta
  Intron number 1 from transcript cassava4.1_032740m (locus cassava4.1_032740m.g) derived from phytozome v7.0 (chr-ID scaffold00341; pos 677547 to 678578)
actccaaagcgcttattgttgctgttcaaagtaaaatatttcctccgtttcttcttctgcttttgcttttactttaacgtctgtttggctgaagaggaaaagaaaaagttaccactttttgagtcgtttaaataaaggaattgccttttgaataagcttttcactcgttctctcgctgaatccagaataatttaattagaaataatggaagaagaatgattttcccgccgaaattatgtatgaaaattaatgcttgtgtttgtgttggtttggtcctgtaagttttgtttgtttaattttattttgtagggatctgtttgtttaaacttaacaaaccaaacatcattagatagaaaaccttggattctatttccctggagctaagtgaagacgacaaatagaagcaaaaaaaaaaaaaatcattcttcttttattattttctccagttctaatataccatcaaggaacaaacttcagttcaaaattttcaaatttaagataaaattggaaattggaattgccttggcgacctccattgtaaatttttggctcagcaatctcaatttcatttccaacgatgcaaaacatgtttgggttggatatattttggttgttgcacgcaattgcgtaggagacgtaacatacaagccacttttatttttcttggtaatatgattgattctatgaggctgtcatagcttaagttacaagctgggacacatgcagcttcttcgttaacatgcttgacttgcctgtttcctgcttcaattttacttttcatttcaatttgtggcactttactgccgtgttatttctttcagatagagatataaaatactctggtttggttgattcgctggtttcctaagccgcaattagtccaaaatgcacaagtcattcgtttttgtggtttttgcccaaaatatttttgagatccaaataaagagaatcagacattctctgctaccttaatgtttgatttttctgcttgtggcagaggctccggaatctgctgaggctaaaaatactgag

SEQ ID NO: 43601 - DNA, 1002 bp, Manihot esculenta
  Intron number 3 from transcript cassava4.1_008118m (locus cassava4.1_008118m.g) derived from phytozome v7.0 (chr-ID scaffold01701; pos 51434 to 52435)
agagaattcgggagttctctgttgccattgttgtctgtatttatctcctcttttcttttgttggtgctcattttaatgtatttgaaaacttgtggccattttggatttggagtaatgaatagcctaaaattgggtttttgggaaactaatttaaggacattttaggaagaactgcatcttggcttgttgcatgctacattcttcccatatttagaggcaggacaatttaattttatagttagttgccaaaaagatcctaaatatgaggttgattacaatttcgacaaagtattgcttggggttttagttacttctgtgataagttctgggtttgactttgacatatgcctagaagttttaactcttagtaatttgaccacaattcaattcacatgtccactgtgtttggcatggctttttgttgcaaatgacaagcttattcaatattatgtatggtggtttttcctcccctctttgagatggtatctcaaagaagtgggcttcctttatccctttagatttgattgtctataaaacataaggtgctagcttttcatttaagtttttgttttaaagttttccatcctaggatctaaaaatgcacttgttgacagatcagcaaaaataaaaagtccttttctaagtgtaatttatcatttcatttatccattacttgatgtctggtcagtatttagaaaaagggaaatttgtattggtagaaaattcatagctctatgcttgtagcacatatatggatatttttagtcaaatttgttggtagtgttatactgaggctatataacatggttcggccatcccgtgaagtaagatgaatcttgagtgattatgattttttttttacacattaatcctagtaaatatttacatgcaggcattctcaatcaattatcattgccttaccagatcctttatttgtttttaataaattgtttttattttatcacagggaattggtggtgttggcagtgttgcagctgaaat

SEQ ID NO: 43602 - DNA, 778 bp, Manihot esculenta
  Intron number 1 from transcript cassava4.1_003989m (locus cassava4.1_003989m.g) derived from phytozome v7.0 (chr-ID scaffold03718; pos 427703 to 428480 reverse strand)
ggcgtgtaagttccatggttttttctgattcttctctgcaattaattatcatttggattcttcaagcaggaattaacatgaaattacacttgtattcatttctaagaaagaattgcacagatctaacatgcaaagacattggagctaatgcaaagcacagtgagctaatttcatctaaccccattttgattttcttgaattagcctattcattttaagaggaaattttatttatttcttaatttttttttttacaaattttactttatttttcaattgccaagctggtctttgtttatatattaggtagtaaaagaaattgtcaagttgaagacatgaaatgaccccaggaagtctgaacattgaacatgtgtactatatcaaatcatattggcaaccttaaataatattaaatttgagattagttgcgaatgaattatacaaattaagttggattatcatgtttctttctcttcatttctttattttcgttttaattttttaaatcctacaaccaatctatttacagaatttccatatgctacaaccaattatattatacccataatcgtaacccataacaaagtatgttttggactctcttttaatttcagaatataaagtttaaatacaatttttcttgatattctctagttcttgaatatctaagtgttttagaatattaaaactaaacaaatgtgcacattatcagcagagaatgctgagagcctctgtccatattttgtatgcagttcagagaagttctggggaaaggagcc

SEQ ID NO: 43603 - DNA, 1004 bp, Manihot esculenta
  Intron number 1 from transcript cassava4.1_007659m (locus cassava4.1_007659m.g) derived from phytozome v7.0 (chr-ID scaffold06512; pos 1712103 to 1713106)
gtctcgagaccttcttgctcttgttagcttggaaggtaacactttatagtgcttctctctgtataattctagatttcaccttctctatctctttagacttgtcgagtattcggatgcttcttctcacatcagttgataaatgacatatcttcatgcatccactaatgctctctgtattctctgccgcttttatccttctcctgaatttctttttttggacaagtgtctgaattcaattcctgtatcttatttcatgcaagaaaactatgacatattcgctccatagctcaagttagtataagatattgacttcgaacatacagtgaactacaaaacttattggagagttacaagagaagctgaattatttctgcaatttgccttgatctaaaattgatctgagatgagaaacaatcttttgtatcatttcaattcatcaaagaaatgaaagagatttttaagacaaagcagattctttctaatgaaatgaagatctagctagatggaattctctttatttttttatgatcttacgttataatgcacttccacaaaattttttacttaaatagatattgctagattaatttcttcacaatgttttgtaaacaaacaatgtagaactgggaacaattattaagagtcaggtttaatcttctgcagaaaaaaggggaaatataatctaatgcaagtctattttatggatcagattgctagattctaggctttgtagtaattgttttatttaaaaaatcatttgacttctaatttagtttacttatctgctttgtctatgacttacttattctctgttaactcttgtacttcagtaatgtactcggtttttttttgtccaacaattgttaacttcaattcaggatacaaactgcttattttttgcttaaaaaaatttgacctttgcttcttccttgctatcaaataatatctatgggacaatattttgcttaggtctttttgcctcagagagtgtatctcctccgtgg

SEQ ID NO: 43604 - DNA, 576 bp, Manihot esculenta
  Intron number 1 from transcript cassava4.1_026505m (locus cassava4.1_026505m.g) derived from phytozome v7.0 (chr-ID scaffold06675; pos 23633 to 24208 reverse strand)
gggtttcttccaggtatgctcactcactcgttcttcttcttcgtctttaattgacgcccaattcaatttgcaagaaatatcattaaatttactttacaagaaagtaccagttgctttactttactgttgtaggaaattgtgtacgaccatgtaacagatctttgtaaaatcaaaattcttaaaattgatgggaaacttatttgagaggggagcaaagataagagatttagtgtgaacaaacgaattcaattgaacataaataaatttttaacgaaaaattaatactcaatttctgtaatataaaaaaattcattaatttttaaattttaaaaatttattaattaattttttcatattagaaatattttaaatttttttataatacttaataattaaaattaacgtacatactgaatgtatttttcaagtcattaattaatgaatttttcaataatcaaagctggaaaaccatgggtaagctggtaaaccattgtcggtgcttaaaaaatcaaagctattgtagcttgccttagtttttgtgcttgctgcatgtgctgaaatcacagttggtaaacc

SEQ ID NO: 43605 - DNA, 762 bp, Manihot esculenta
  Intron number 1 from transcript cassava4.1_005470m (locus cassava4.1_005470m.g) derived from phytozome v7.0 (chr-ID scaffold07519; pos 69259 to 70020)
caccctgcatctgattccaagcaatcttgaatcttgtgagactctctcctcttattttttctgagaactattgctctttttttatgctcatatacagatgctaaatcttgtgttctttttatttgttctaaacttttagctcttgattgtgggtattgtgctagtattgagatcttctgatgtttacccagtatttagatgatatttgggattttgggttagtcatttgattgaaaaaagatgagatttttagcatgatttgcagcttattcagctgagattctagctgaaatcaaatctagtattattattattgttattattaaaattcatggttgagcttgaaatgggttctcatctaaattacaaaatgagatttgggatctttggacttgtctttaggaggtagatgtaagggatttttggtgttgctttctttcttttagaagtgagagatttgactttagaggttaagatgttactagtgtttctatggtattagggttaggatgttgatttcctgagcaaatatgtggatgaaaaatactatgcttgtttcttaatatgattgaagcaacagcttttattctgggttgaaaattttttttgttattttggccataaaaatgggaattctgaataattgagacttggattaatacttgtctttctggacatcagaatgtttctgctgagtttgaatttctagttcctgttaaaatttcaggtttgattagcattgagacttaatacagagaaagc

SEQ ID NO: 43606 - DNA, 682 bp, Manihot esculenta
  Intron number 1 from transcript cassava4.1_010407m (locus cassava4.1_010407m.g) derived from phytozome v7.0 (chr-ID scaffold09151; pos 750900 to 751581 reverse strand)
agctcggagcttttctcattcaatcccaattacaggttggtcattaagtattaatctggaacttttgttgagctgtttggtctaagatgcaattacaatatgttcaagtggttggctttttaatttgttgaatgagctggagtgaactcaatagattagcatacacttgtttctggatgtttattagccaacccatatctgatgttcttcggtagaaaaagctgttaattgatcaaattgcttgaatcagtggagttgtttttaaggtttagtagagatatgcatttaaaggtcagttgctttcaccttgaaattagaaaaacacttgtttcttattttgactggtaatggctggatatattgagcgtgaagatgggttccttctctcactgatttaatgagattttaatacatattctggtctacggctacactctgtggttccttctaatgtagttagtattttgagcaatttagggaccaaattagttgttttgattaggcattttattttgttttccttttaattgctatatttggccatatcacatatacagcagttggatatttccttctatcttcaagattttcatcattcatgtacttgataacctctgtgacttatgcattactcttttatgctacagtctgctgggaactctagtgcgcttttcctgactgc

SEQ ID NO: 43607 - DNA, 1033 bp, Manihot esculenta
  Intron number 2 from transcript cassava4.1_024817m (locus cassava4.1_024817m.g) derived from phytozome v7.0 (chr-ID scaffold06550; pos 782308 to 783340)
ggaagcatattgatagagtattcactttcgacaaggttattttctctatttaattttaaaaaaagattcaatttgttttgttttcctatttttaatgctgaggatgatgcttggatgatgcgacactttacgttttgcttatgtttgtaggggtttaattttgcttatgcttgtttagtgtctacaatttctttatagtatgaccaggttaggacatgctggtgtctgcatgaggtcaatgcagcacttcaatttagtgggttctaatgaatcgttcgcatttgccatatttgccatttttgagcttttgcttcaatcattcatgctactgtacccagaatacggtttggcatctgagacattcccatttcggtgtttactgttcagtatgaaggttgagttctgtgaatgccaatgcttctttaacataattagatcgtctgcaccatattgccactcataaagctttggataattaccatcccttcgcttctgcatttctaggtctttcagggctttgcaacttgcgttaaaactctttcattactaagctttaccctgtttgagctttaacttaaacgttcaataagcgtccacttatttgtggctctacttgactgctgccaaagggtcatatggatgtgcatatttatgatttcatccctttaagttacagttgctggtctgtggaccaacggagctcactacacaatgtgcccttgtgatctaaccatattcccctggtgacaattccctggaaaaagtctctacatatttcttcaattgaattgaaatatacttatgcaaataaatgcaatatgctatatgaatcaagttcgcatcatctttttcttttaattatttttttaacaatgacattcaatttcatttgaggtcttcaatgtaatatttttagttattttctaagaatggagtaggaatacatttgtaatgttctaatggtggcagactctgatactagcttacggtgcatataggtctttggtccctctgctcggcaaaaagatcttta

SEQ ID NO: 43608 - DNA, 891 bp, Manihot esculenta
  Intron number 2 from transcript cassava4.1_011603m (locus cassava4.1_011603m.g) derived from phytozome v7.0 (chr-ID scaffold06011; pos 232896 to 233786 reverse strand)
atttggaccgattcctttattcccgtccattgccggtaagcttctcattaagtatcttttagttatgtgaaaaatcaataaatcatcttcttaaaaacaaaaagggaaaaaattgcaaaatttctgcccggtaagtaatgcataaacgcttttgactgtaggggtaactgcgtttgacttttcaaacaatgaaaacgacgcgggtaacctaactacagccgcagcatctatttggcgcggttgcgctatgggaacatgtttagatcttggctatcatgaattcaaagttaaatgaaatttattttttttatatatatattttgggtttataatagatagggtctaagtgagaaatgagtgtctatatgtataatattttcttttttaatttgagcaagtaattttaattttaattttaattttattgatttttttataccttatttggttgatggttaaatttaaatttaattaggagacatatattatcgttgatgtagtgtaaatgggggcacctgtgccttgatttcgagggaataggtaggtattatgttggaaacatgatccgaccgaacaattattgttaatctgttaggcttgccttagtagtttatcaaaagtgttaaactttattggagtatcctcgtaaagttttggtactgtttataaattatggttttttttgaaacttaattaactgtcctgccacgtggcaatcactgtatctgcattttcgggtaaaatgagatatatcctaggatgaattcatcttaatgacaaaatttatcatcattaattaacttgattttaatattattataaatgaaaataatgatgctttttttttaaaaaatgtttcttaatggattgtgtcactatttcagcaagcaa

SEQ ID NO: 43609 - DNA, 582 bp, Manihot esculenta
  Intron number 1 from transcript cassava4.1_009194m (locus cassava4.1_009089m.g) derived from phytozome v7.0 (chr-ID scaffold06656; pos 1047571 to 1048152)
gctttaacatgtaagtttccaagttacatcttcaatgttttctgggtttttagttttggggtagtttgatgtttgatatgatttttgataatgattctcatctctttttcttgtttttgcggttttaatgctgtttcatctgttttccctctttattctggtttattgggaatgggatgtgttctgaaattaagctgatgatcttgggagaaatagtgcgagaattcgtgcatagtggcattgatgcgtgcaatttatactttagttactgttttatgattgtttgtttacaatgcatatccattgcatatgatgctttgatcttgtttaatatctttatgtgaccatacaaactaagcatatttccattagttttttcctcatatcttacaacaatttgtagattaaaatcctgtaatcaggttcagcagtttgttctctatatagcgtcgaacataaacaaacctgtactttgtttttttctgggatttacctcgttcttggtttaatagaattgataaattgcttggtgctatagcaaatgcaggttctgttctgatcatatttctgtcactcacactt

SEQ ID NO: 43610 - DNA, 561 bp, Manihot esculenta
  Intron number 2 from transcript cassava4.1_009194m (locus cassava4.1_009089m.g) derived from phytozome v7.0 (chr-ID scaffold06656; pos 1048271 to 1048831)
gtgagattccagaagaaactgctgctgcatacgtatgtatgcatgtgcaataaaatccatttgcgcttttgccctttctgttcatgtatttgattttccgtgtttgctacgtattcatatattagacttttcatgaggggatatgggaaatctcagttgcctcaaaattgtcaaatgttctgctatacaattattgaattgtcttgttgttcctggtcggtcaagctagtagtttattcagtgacaagctggggcacacatgcaagaaatcattatctgttctggttattacatcttttagctggatcacagattgctccttgtcccaaaccaaattaaatgggttcatattgaggaaaatctcaaaaaacatctttgtttcttttcccagatcaaattaaattggaaaaaattaatttcaaattctttcccccaaacctgaaattggttttaatttttctttttcctcatttcactttacctgcatttgaagaaaagtcttcctgataacccctactgcttgcagagagccattgaagaaggagcagactttatagaaac

SEQ ID NO: 43611 - DNA, 513 bp, Manihot esculenta
  Intron number 1 from transcript cassava4.1_031906m (locus cassava4.1_031906m.g) derived from phytozome v7.0 (chr-ID scaffold09876; pos 277188 to 277700)
gtgaggttctcgcggcgattcccaattctcagaaggtaaagctcgaaactttttcagttttttattttttccttcttaattcagtgattactcttctaaaataaaaccatggatcagtaatggcaaggtcataagctcaagaaagatgtgaactttgtttggtcctgtaaatctagtcacaaagcgaaacagggaaatagaagtttatagggttcagattggatctgaaaccattctcatttaccaaattttcttctttgaaacctcaaaccattatcatttaccaaatgtgaactttgttttttgagtcgcttcagcttaatggatccaccaaaacgttcaaaagactcatcttttgagccacgcatccatcttatgtttgtataccatttatttatgtaattagccttgtcttgcaaatttgtgaagtatattgcacattgctggaattactaataaattatttgtcttcaaacaggcaaaagcttttgaaactggttcaaccaccaacag

SEQ ID NO: 43612 - DNA, 651 bp, Manihot esculenta
  Intron number 1 from transcript cassava4.1_012271m (locus cassava4.1_012271m.g) derived from phytozome v7.0 (chr-ID scaffold04047; pos 167540 to 168190 reverse strand)
ctctctagggatcctcacgttgtcaggtactgtgtttcttgtatattttcccgtattttctcccccttctagcaacctttatcttttctcatcttgatttttacactatgaggtttcattaatattgcgttgttctcttttgagtttttgggacctgtgtttcttgtatcatttccaaggcttacctgttctgattttgggtgattagagtttgatttaaatcacgtttcgtcatctaattctgccattttatggtgtcaagtttcttctttatgtggatttgatattctttttctcttccttttgttgtgcttcgaatttggcatcccgtagagtctttcatctaatcaatcaggcagttggtttgtgagtatcaacataactggaaccggttcattatctttcgccaagtgattagcgttcaattctattttggggtacattatggctggtgatctctttgttaattacctctgttacccttcgatcgacttgctatgtttgcttttatgaggttctcttttatgacgaagagggggttcttgccaaggctactcccgattaagcattgagcactgttcctgttcaatatctcattacaaattcatcaatccttagtaattgttctgttttgttcttaaacgaagattg

SEQ ID NO: 43613 - DNA, 904 bp, Manihot esculenta
  Intron number 2 from transcript cassava4.1_000691m (locus cassava4.1_000691m.g) derived from phytozome v7.0 (chr-ID scaffold06631; pos 623429 to 624332 reverse strand)
tactgagcctttcagtccaaaaattaattgtgtcggtaagtttgtttttcccttccaaattcttttatatatagattctgaattatatggattgaggaatgatgaattaagatttttgtactttattactattctgttactataatccaaacacaacttttttgcttttaaatttcccgtttccttattatcattttttagattcactgctaaattgtcctttattatctgattcaaacttaggtctatttttcagctactcacatcgaaacaaatattatcagatactacatttacaatcagtgaattgatagctatttgcaaaagtttgacacatcaactgtatattttcagatattacaagtagtgaatgaatagctatttgcaaaagtttcaaatatcaaactttccaaaaattggcttttggcaattgaaaatcgagttttaaaagtttgttgtctgttaccatacagaattgcttctaacattttgtctaaaagttatcattagcaataacaatcccaaacatgctcatggacaagtcaaaatgaaggaccaaccaaactttttgcaactgaatataatttttaacaatagctctcattcagtagaaatagaattcaaggctttttcctcctgacgtctcagtgttgagtcctttaccattggaaaaggaactcattatattagaggcttcattttaggatcttcactatcttttgctttaatattagatcacgcttctgtgtaatgtccaatatcctgattaaagaacttttgttctgccttttaattttatcagtgtatttgatgattgacttggtagtccttctaagatggaatgttctgctacttactcttctaaaatttttatatttatccaaatcttttgcagttggcgcta

SEQ ID NO: 43614 - DNA, 651 bp, Manihot esculenta
  Intron number 1 from transcript cassava4.1_011544m (locus cassava4.1_011544m.g) derived from phytozome v7.0 (chr-ID scaffold07519; pos 58561 to 59211)
ctcttaagatcaggccctacaggcatttttctcaggtggagaatttttctgggtttattttatcattaagattgatttcagttttcattgttattttgtcaattttctttttgcctactctcaatttggcttctaatataaatttaaatgaagaatattcatgggttggtcatgttccttttcgctgcttaaatttgccattatttgttgttttacttggtgtttagcacgctttggtatctggtcaatgtggacttagggtaacttgtttcgtactgtgattttgtgttgggtattttgagttttatattttcagtggaagaacattgtgcttcttgcatgtaggattcaacaacttgttatgtatttccatgttaagagcatcagaaaattttgttgatccatgaatccatgtttgaaaaattctctttttgggtgtctgtcattgcttgtgaaatcgcgtgctgatttttctcgagtgcttgtctttaatgtgtcttgtaaggaaagatgaagagatataccacgccttttctttctcattgaatcaattttattctttattgcatggtttgtcatgtcctctgttttccttaatacttaattcaacttccaggtcctctttgagcactgtagttcaccaggcttgac

SEQ ID NO: 43615 - DNA, 1005 bp, Manihot esculenta
  Intron number 1 from transcript cassava4.1_011459m (locus cassava4.1_011459m.g) derived from phytozome v7.0 (chr-ID scaffold05948; pos 44035 to 45039 reverse strand)
aaagatagaagccaattttctaaggtaagattgatcacagaatcctcaaagtagtatctctttttactaattaatttttaattattttgtctctcaaattttaaaaaattattaactaatatttttattagttttagaatattttattatttaatctctataatttaaaattttttaattttgtaagaagtatataaatattttaatttttttataatatttaactgttaaaattaataaaattaaaatctcacaattaatgagtttctatataatataaaaattaaataaattaaatagtaattttttttaatattttttgcatgcacgtgttgattaattttaataataaatcatcatagcatttgtgatgttgtacaagaaattaatattcaaactgtaatatattggatatctctaatattttattatgatgataatcacgcgggtcctctactttctcttattcttcttctcgactaattgagccccatcaacattatcgatgcatgctgcagattcactgttgctgcatgctgcaaattcgatgcaaagtcctcagttttcaatatttgcttcatactgtgcatcaaatttgtaaaatataatttattgatacagatttataaaaatataattatttacatatagatttatttagtttaatcttttaattttgtagtgtgttgacgattttgattaattaaatttttagttttgatctctaatcttttggatttggtagtggaatttcaaatagaatttggggatttttgttgctgggcatggtgtctcaaaaagttagagggataatttggtatttttcatgattttttaacagtataactaaataaaattgaatgaaatgacttaattattgatggaaataaaaaaaataaagatattttaatatatttaaaaaaataatttcggaaaatctcatcaactctctttcgcgctcttattgcaggtcttactcgtctgcttcattacgagcacagtcat

SEQ ID NO: 43616 - DNA, 617 bp, Manihot esculenta
  Intron number 1 from transcript cassava4.1_008528m (locus cassava4.1_008528m.g) derived from phytozome v7.0 (chr-ID scaffold01038; pos 13041 to 13657)
ttgtcggctccgctggctcttttgtcatcaagcaggttagttctgaagcttggggactgggttttttagctttatgtgagaatttttcttttattctatttggctgctgagaaatagtattgtaagaaatttagaatttggagagcttttttttttctttttcccctgggttctttaattgcaagagtataattttgtgattcggttggctgttgcagtattcaggcttaactcaaactgttggctctagtttttccttttcccttttcccttcggtatttggatatgatttatgcatgtggaaaccgcgagatacttttttaagagttggaaaatcatgaactttttatatatatagctttgcttttgaggtatctgaaccactgcaagcctgcaatgaagatggagggggatttcttgatatatttaactgttctttacatttgacaggttcttacagttgaaccaattgctggttgagctgaattattctagtgtttaagattgacatgttactcctttatgaagtgggcaaccaatatttgaaaggtttattaatttatttatgtttgtgttctgatgtaggcccttccttacatacgttgtattggagaatc

SEQ ID NO: 43617 - DNA, 623 bp, Manihot esculenta
  Intron number 1 from transcript cassava4.1_009531m (locus cassava4.1_009531m.g) derived from phytozome v7.0 (chr-ID scaffold04622; pos 51953 to 52575)
catagtaattactcaatctttctctttttcttctctttcttttttgttcgggctctgtttctgtgcaatttgccctaaacagagcataacaggacagaggtagaatctctatagttgtttgatactgaggttaattgcgtattgtttggtttgttgtgtcgtttgcgcgtgatcaaagtgatattcgtgaactcttttggatgtatttgcgatcattcattttgcttcatcatttgtcaatactatatgcatccatttgtcgtatcttattaatcaattatgatttttgttagctttctttgtgtgattctgttgtttccaactgaatgagctgttgtgtttgattggtgggaaaataatggacttttgaatgccttaaacttcaatatttggtatttgagaatttaggaggaatgattaaaaaaaataataataaaaatacacccaatcttgaaaaaaaaaattacagtaaatgtgagactcagtttttgctgccaaacattagggttggactcgctcatcaaagcctcaaacctatctatttgtgtgtttgtctttctcccactcaattttatgttttattcgcagaatttgctatagagcaagggggattatcagctgat

SEQ ID NO: 43618 - DNA, 768 bp, Manihot esculenta
  Intron number 1 from transcript cassava4.1_007286m (locus cassava4.1_007286m.g) derived from phytozome v7.0 (chr-ID scaffold03329; pos 8721 to 9488 reverse strand)
tctttgaagcagaggagttccctctgtttttctgggtattgcttaatttattgccttttgctttcttttcttcctttctactttgctgtttttcttgttagatctattggtttcttgggatattctctgtttttctgtgaaaatttgtgtttcttttcttatttggaaggtggtcccttagcattgtaccagttcttggtttctttttctgtctggaaaacggtaagtgagcttggaaagggaaagggggagattgttttcttgaatcacttttccctgcctttttttttctttttttaaacaataaattgctttgaaaacccttttttttttctatgataataaggtttttaaaacaaaacaataataataaaaaactaggtcaactcaattgataatatttagctccattaggccaaattatttagctagaagtggagttttgggtgtttctttggtggtgtttttcatataattcttcagttttaattgtactgtacagtttatattattgggaattatctgatggaatcattttgggaattatataataattcaagtaattttctgagatttagttaaatttaccatagtattaaaacaggtacagaagcaaaattttgttacttttttattgttttgttaattggtgcagttacctatgtatttttaattatatttttataaattgggcgattgattttgaaggaaatttgattgtttttgctaatatgtttttggtttacagtgctataggtcgataaaaag

SEQ ID NO: 43619 - DNA, 606 bp, Manihot esculenta
  Intron number 1 from transcript cassava4.1_017470m (locus cassava4.1_017470m.g) derived from phytozome v7.0 (chr-ID scaffold07762; pos 377760 to 378365 reverse strand)
gaacatttttgctataagatcttcagaactatcaggtacgttcagtttgatatttcttgttctcgacgaatttagttttcgttttacaggttagggttctgaaaaggaattcaatcggtgcaactgggtttaattttgtggatattttagttggggtaattcgcgaatgtctgtcttgttggttgatgtttgtttattgttatttgttaattgatggcttatttcttatcatcctaataagatatgtttatgttctggattgctcaggggatttgttttgattttattttattaaggacacaactgcttaggggatttgagggtgttgtttatctcaaatattagtttcctattatgttgtttgtaatcagaagatgattgatagagaattggaaaaaagagaacaagaatggaagctatttttacatctgactactaatatgggttttcactatgttggtatttgcttagtgactgtttggcatgacagttaatttacatttaaacttatcttagtctttactgtaaataaaacatcttttactgatacatttatttattatatcattcataatgctagttgctaaaccttcaggtgcctttgag

SEQ ID NO: 43620 - DNA, 950 bp, Manihot esculenta
  Intron number 2 from transcript cassava4.1_000439m (locus cassava4.1_000439m.g) derived from phytozome v7.0 (chr-ID scaffold02994; pos 405520 to 406469)
tttccacaaatctcagcctctattcgtgtctggaggtgcgggaattgttgtcttctccatttatttctttatgcgtattttgagtttagttgccttgccagaatgattggaaatgtatcgtttatgctgtgatgtttttagttgaattcctagtttctgattggagaatattaggctatgttgtgtcagttgtgctggagtttacactagatctaggcgatttttgctcaggttgattggactccgccttttcttttagggtatcatcatttggtaatatcaatgcagcaatataatgttgccacttagcttcaagaacctgattgctttacttaacttcaaagaggacattcatctctttttccccttctgttggttccatacttcaattttagcatttagcatcttaactcaatatgcgaagtttattagatgtagttttaggtctgctgttgtaccctattttaattctggatgtaacagtcagtattttgcatacaatatatgttagtaaacatgtatgcatgccttttgtcaaggtatattttgtttattggagaagctgtatagccccatatactggacattgcttgttaatataatcacattcaaaacttcccatcaaaaatctgttgtggaaaggtatattcttagctgctagttagaaggaataatggatggattcattttcaggtctgtggttgataggaaagagaatttggtcactagtgttggttggatctgaattatgaactaaacactgacccagtcttttgctgtttaattcggctattactctgtgcttgaaagtttgaacctataatttttgaaacagccagtagattgatgagaaaatgtcagtttggaatgttgttgaaatggattacttgattgccttgaatttgtcatatggggtatctatttctgagtaattgatttttctgcaggcg

SEQ ID NO: 43621 - DNA, 537 bp, Manihot esculenta
  Intron number 3 from transcript cassava4.1_028919m (locus cassava4.1_028919m.g) derived from phytozome v7.0 (chr-ID scaffold09876; pos 617114 to 617650)
agtaccctgatctgtttgattatcaaaattattctgtgagtgattttttttttcctccaattacttcactaggtctatagtttagtgggcaatgttgctgctttattttatgtttttaaccctggatcatggtttcgttagattcctttttgtcatcaacaacaatcaagcaaagaaatcaatagacataagagctacaataactaattgcagtacttatagtctttttctttgtaaatttgtaactatttgcacacttccctccaatagttgatactttatggaaaagcttctggttttggtctttttttaccctgtttagtccttaattttcctcatcctttcaggaaaattgcatgagatatggtggttaacgattttgatatggtgttaatgatcattgatatttttgaagtcctcatttagcaggttctggtctatgtttggaattgtttactgatagtagtaatcatcttacctgaacagatatgtgacaacgaagatacaaaatatcagctctatctttgaagaagcctc

SEQ ID NO: 43622 - DNA, 748 bp, Manihot esculenta
  Intron number 1 from transcript cassava4.1_002496m (locus cassava4.1_002496m.g) derived from phytozome v7.0 (chr-ID scaffold03614; pos 71495 to 72242 reverse strand)
actcaattacaaaactgctcatctttagcatctttgtaagtgctttcttgctcatgtgattgttgatctttgaaagttatgtttcactgattctctctagtgctattaactgtttgataaattattctcatattattcttgtgcaaggttcatgtgtgaatggcatgcacacttaagacaaatggaaatggttatatgaaacatttaactgtgttatgtctggggttgtttgaaaattctcaaatttgttatttggaactgctgaattgcctaaagcttatgtgtgctcttagttgaatacttgaattaactgcatatttggcatttgatttgaacacctgtggctcaactttatagcagtaggacttcactgagaagggtttgttatacactcgtgggtgcctgtggtcattatgatcagtattgctcgttattgtattgagaatgaatcttgaattgagaaaaagcagttctgcaattgcgacaatttaatatttatttattttggatagttaaaagtttgtaacctcagctaaacggttgaagttgtaaaagaatagtgaaggaatatgacactaaaattcaggtgctatggcattcccatgactatttctttgttttttttcttctcattttatgaatgaatagtattgtactggttatattttcaacccatattttagggatcctgcacagttttaacaaattctctcttctgtttttttttttcccttgaaaattggtcaga

SEQ ID NO: 43623 - DNA, 1047 bp, Manihot esculenta
  Intron number 1 from transcript cassava4.1_014907m (locus cassava4.1_014907m.g) derived from phytozome v7.0 (chr-ID scaffold06512; pos 1894905 to 1895951)
gctctcgaagctgatatccagcacgccaatactctgtaatactctctctctcgctatctctctctctctctgtgagattgaattatttgcaatttcttgttgcttaagtttttctgctgaatttggattttgttttatgatgatcaaagaaggaaatagaaacaaattaatcgaaaaatcgaggctgttctgaatttattgatgaacgtacggtaatcgagttgccttgaacacccactatgacgatgttcctattgaggatatttatgattttcctgattctatccgaaaaaggattgatttttgaatgaggatatgttgggtgggccatcctttcatcttttgtcctgtctgtaaacagaataataggaattgcattattactacttgatattattgttctggggaaagtgtatgatggattttttacagttaacctttttgaacggtttttctattatgtaattgtaaagcatgtttccttatctgttcctcttcccttccccttcttctatagtacattcttaaatacggtttcaggtaatgacatgaacttacaaatatgttccaattaggatctttgttataactatttcaaagagatatacacaagtagctgctattttaaacaactttgggcgttccagtgtaatgatgttcaattaacgttttgatgttcattgttgcaagcaggctttgtttgataagggttacatatccctatgcatgaggtttcctgtctgtgacgttgattttttttttcttttgccatatcattaccatcactctttcagacttgtgtccataaggattatctaaatgatacttttttatcttggatgattaactgtttgatctgtattagtctaacgtacctatctgcttcacttggcgtggtaacaagaatgtgtattttactttatgtgtgtgggttgcattttatattactttgattatatgataatagatggatatacattgaccttttttgcgttcctttttcgcctccttgtttacacagtgctctagattatccaagggagattg

SEQ ID NO: 43624 - DNA, 503 bp, Manihot esculenta
  Intron number 1 from transcript cassava4.1_004813m (locus cassava4.1_004813m.g) derived from phytozome v7.0 (chr-ID scaffold01127; pos 656500 to 657002 reverse strand)
tgcttcgaccaagtccggaaatctatcagtagcaggtcaacttctccgtttgaattttcttttcttcttgggattttaaattcgttcttcaaagattatcgagcttcatttcagcatttaatctcacctttttttttagtgaaaggtaattcttttttacccaaaaagaaaaaagaagggttgttgtttgttccatgtgtagtgatttggacgttgggtaattgaataacttattgaaagcgtatttgaaggatttgtttggattacgtgtgtagaattctgtgtattaggatttgatatgtgacatcagattctattccctttgataattgtcgctcaagtatttttccttataacgatttatagtgattttcttcttcttctgcttcttcttaccttttttcccattaaatgctgtattgaattctgtttttgttcgttaaacgccgtgttattttgctttctcaggctactggaggcgatttcttgtgtttgatcgttga

SEQ ID NO: 43625 - DNA, 1055 bp, Manihot esculenta
  Intron number 2 from transcript cassava4.1_010475m (locus cassava4.1_010475m.g) derived from phytozome v7.0 (chr-ID scaffold09761; pos 233898 to 234952 reverse strand)
gttttggtgcattgctttgctggtgtgtcgagaaggtataacatgaatgtgtgtggagcttttgttcaactgaataacatagaatgcttttaatggggttattttgtgattaggttaatttttagattgcaatttttgtgattttctctagtaaaagctaatatgtatgatcactgatgtgaagtgattcctcaaatagagtttctgtcgagttgttgtgacagtactactgattctttcggtattgatcagtagaaccaaagtggagagaacctagaatatctaattgtcatgctaacagtaaacatatttttagtgttcctgtatgctacttagtgtataggcacaataactactgcaatataagagaacaaaccctaatagaagtaagaaacagttcattagacaatttgtaaataaattccctaattgcaaagtttaggttaaaaagtaagtcaaatcattgtgttgttgtcccctatcaaaatcttaagaatgcacaggttagctatctaagtgtgtatgaagtgaaacatttgatgagtttgcttatatccaattcacctcctctgttatttatttatttattttattttttgctttttgaagttctttttagagaaccttctattcaaacacttgtagagctacttgttcgttttgcaacaaaagaaaatcagggaaatgaagttgatgactgagatttggttttatttagagcaagaatttcggtctaagtgcttgattctttcctattacatcccaatgagtctccatatataccaacaaaagtgttgattttctttctcaaagagtattggcagtttagaggaagaagatcttttacctggctatttgagttttcatgtacaaatatatttcatattattttctttttgaagaacaatgtaaatcatttttttctatgatctttaactacattaaactagggaaagaagtaaacttttccagtttcatgacttgtcaagtcctaagcgttcactcccttctttgcatgtgtttgttgcagtgctgctatcattacagcatatttg

SEQ ID NO: 43626 - DNA, 642 bp, Manihot esculenta
  Intron number 2 from transcript cassava4.1_031984m (locus cassava4.1_031984m.g) derived from phytozome v7.0 (chr-ID scaffold05162; pos 503487 to 504128 reverse strand)
gaagtacgtgtttgaagtttttgacaagacaatgtccattttgaatatgagtagttccttaaattttctctcaaagatataattgtttttcttttgttggtactaaactttttgatgctgaaatataactttggatgtgtgtctctctaacttctctgattaatatgcaaatgcgctagtcattttcacctaggatgtatattttaatttgtctgtgtgtagaagcataaggccctgcacaattattttgcgtttctattatgctcctatccttcctttcctctgttttcttttccttggtatgatacctttccctctctttgaaaaagcaaagcagagaagtattcaaatgaattgcattgctaaggattttataatttcactgatcccaagcatcaaatgtattctttgggtactggacatagagtttgcaaaaacattgttggttgtgtatcagttctaggatgcaacatgctagtagtcaggtctcaaattagtgtgtttaaaggtcatatagactagaactattgcttcattgttgtttagataaaaagtatacctctttattttttccagcaggaaagttaatataaatcgatatactcatctgtaacttggtccttagggtggctggaaccccaa

SEQ ID NO: 43627 - DNA, 925 bp, Manihot esculenta
  Intron number 1 from transcript cassava4.1_009388m (locus cassava4.1_009388m.g) derived from phytozome v7.0 (chr-ID scaffold06005; pos 113501 to 114425)
ctaccttcgacctcgaagtgaaacctgaagacaccgtatgcttctttcgtactacttgctattctctgtttgctggtttctatgattcttgttcattagggttttttctctttcttaattattgttacttgctagtttctcaatccaatttggaataattggaattgaattgagattcgtcagtgtttgctataattaccaaggccgcgtgtttggactatttttgtgctggttgaatgggtgtttaattggtttagttagcgtagctgctcagtgaacttgtctctgttaggatattaagggatgtcggggctgattagggtttggactgtgtggttttgtaatttatatatttgaactttggaaaatttgacgcatcatctgtgccttgctctttggagctttggagttaaaattgattagattcaaattgcctgacagtaattacgtggaaagcctaacaatatgtgttattaggggactgtagatgtgatatgactcgaacacttttgatatgtagtggggtgtgttattgttacctgcacatcagttattgtagcatatacattgttggaatttggtgtttgtaactaaagaataaagactaaggagaatgggaccaaaactgcagctgtttctatcaacccaaattgcttaatatagtagcatgcgtattgtccatgtgactaaagattaggaaaatatttgggtacagaagttcagaggagtttgtttcaatcatcttttgttttgtcattgttggtacaatatttcgttatattttcatttattgctattatttctagagccacattccacatgtgatatattggtcataaatgtgttatagctgatatttgttgcctattcttcagtttaatttattacgacagttaaatacatagctattttttccagattgctg

SEQ ID NO: 43628 - DNA, 319 bp, Manihot esculenta
  Intron number 2 from transcript cassava4.1_024878m (locus cassava4.1_024878m.g) derived from phytozome v7.0 (chr-ID scaffold05335; pos 9688 to 10006)
ttcgtggtgaaggggtaacaatgctcattcatgtgaattctttgtttaaattatttgcttcagttatttaagtgctgaatttacattttgttgacgttttagatgtctgcatgaataatttgaattaataattacttgagatgtccgtaaagaacagggtttctagtgagtatgagttgaatgtaaatttcttggtcaattatttcatctttttttatgaattgatcagcgtattattttttccatttgcgtttctctaatcttctgataataattatttttctattcttatattttctctggctatgctttgtagata

SEQ ID NO: 43629 - DNA, 923 bp, Manihot esculenta
  Intron number 3 from transcript cassava4.1_024878m (locus cassava4.1_024878m.g) derived from phytozome v7.0 (chr-ID scaffold05335; pos 10131 to 11053)
cctgtagtgaggtgcgcatcatggttacaattaacaatttctttctctgctgagtcttatttgcatcttttatttgacggagttgttttgccatttttcttacgcttgccatatgtttatgtgcgtgaatctttctaagattattgacttgtgcatatcttttgttgttgatggttatatatatttattgaaaataataactgcgtggtaaaatatagtagcttgagatgacagtggtaataaaaatgatttaaaatggtttgtttggtattaacaattaatggtactctcagattagcttttgcactccaagactaagtttgctccctcccatattgatatgctgcattcaagataaataacactagagtgattttcagcaaagtcgaaccgtggttgagtaataaccatgatactaataattgagcaactacgtttacataaagtattgtagactgttctatcatcaattatttcatgcttggtaaaatattgcggcatgtatgtaaaattaatgatctttttctagggaaaaaaaaaatgaaccaaggttcataaaaaatcttgccccataccttttctctttgaggtcatactgcatcattaacttgcactaataatagtgatggttaaagtgtttgattttttgaatgtgtatttataaaagtgtccacttcgtacatttcatgtgaaatcttgcaatatatttcatattaatttgatggaggttggagtgttttaggtcaatttatgaatatgttttttgttaacagtaatcacatgcatccgtagtaacatagtaaaaactgtgtagtctaaggtaatatatcatattgtagatttgatacttggttccttttcttttcatttttcatttgtgtgatgcagattcgtgctggccatctaagcggagattgtcatta

SEQ ID NO: 43630 - DNA, 986 bp, Manihot esculenta
  Intron number 1 from transcript cassava4.1_003065m (locus cassava4.1_003068m.g) derived from phytozome v7.0 (chr-ID scaffold01551; pos 3607767 to 3608752 reverse strand)
cgctcttctgtaattaatccattttgcataacctttgcctgttttctcttttactcatttctctccttggttttctatgttactcgcaattgattcagttgaagtgcgcctttttctctcttgtttttttacatcatagctataatgtgctttagagttgatatttgctatttctggatttctgtctactacatgctggattttttgtgtgattgagctattatggataaaaggatgtgtatcgatgtggcgactagatttttgtttgggtgttgaccggcgatccgtgcacgatttgtcttttagtggattttaatgttattgttgccgtgaacaggttttgacttttgggaaattttctaggcattttatgatttgaagtttattcatgtctatactattagattgtttggtggcacaccttgttaactgatttggttcttatttgttgggtgtattttcaattttttgagatatcatatgcttattaaataagaccagtaaaattatctttttgttgctttgtgtggttattgtaaatggattttttttttcaactggtgatacttatttgggttagttaggctatctacagtcgggctgtgttggcttcacatacaaagttgttgctatgccatttattttggaatatactgtcacccacgcccttactctttatgtttccatccactttttatgctgcaataaaaagatgatctgcatagcatgtgcttaagtttttccatctactctacatgggtggcagttctgtaatggaaatgtatcatttttctggtcatggaaatgcgagaaactttgtattgcaattaaccgcttatactactttcttactcaataaattgtttgaatggtgttgagatgttaagttgctatttgttgggtgcattgtttagttctgctcggtaatttctgtcatgattggtcttctagattcaaggtgccgagattaacctctttgacaagtc

SEQ ID NO: 43631 - DNA, 634 bp, Manihot esculenta
  Intron number 1 from transcript cassava4.1_025057m (locus cassava4.1_025057m.g) derived from phytozome v7.0 (chr-ID scaffold06631; pos 310663 to 311296 reverse strand)
acctctatactctggtatttcttttttcccttctcttttttctcttatcatatatctttttatatttttttggaagatttctttatatatttgtctttcagtcttttttattttttattttattaatagacatttgagagaggagaattgaactttgatccacatgattttcaatccattcttctttcttttttttttttttaagtttattctttgccgttgatgtatatatttaccatctctggatgaaatactattttcacctgctcgttcaaaatttagaaaatcatttattaatttctgatttataataaaaattactgttatctcctactaatgtaggacagaaattactattactattcattcaataatgtaaaagagaatgtacagacaagattataaaattttcagtttcaatacatcatgcaaaataaatataatttatgaagcgatggtccaaaatggtatgagttttttttaataatctatttattaattaaataatttaatctaaaagaaaatagatcatataaatgagatgaattaaaaagagaaattaattttttgtttgcatgtgtaatttataaatgtggaattatttaaatatataataaatttgattatgcaggtg

SEQ ID NO: 43632 - DNA, 766 bp, Manihot esculenta
  Intron number 1 from transcript cassava4.1_025037m (locus cassava4.1_025037m.g) derived from phytozome v7.0 (chr-ID scaffold07519; pos 797721 to 798486)
ggaagaggtttccaggtgattgattttgatttttgatttttcttttgtaatcatataatttggtgaaataataaaaagtttcagctgtttctactcatgcatggagatctgtgtattcacctttctctgaaattttttttgggttcttctctcttttcttttttggatctttcaaaagctttaattgtattatttatatgggacatttttcagttttcttggtctttggatctttcatagttaattaatttaaattcttgatcaatcttcatcaacacaagtcattagatttgaatttaatttgcttaatttctttataatcttaggtttcttctgtagctgtactgataattctgtagcttttgtcttgttatttctttattttttccttcttttggcctaattctcagtagagagaaggaattagcctactaaatgtttattgctcccaacatggttggtgtggttccatgtcatcatagtttgttaggacttctctcatcttttctttcttttcttttcttttcgtttcttttctttccttttcctttttcattttgatcatctcagtttgtttttcttttattttcattattatttgggtttagttttctctttcatgttgtttattttatgtcacaattgttattagatcttattctatgattgaatttctcttttgatcaatgggataaaatcagaaatggaagtttttgaattattgtcatcaggaaactagctgagcttggttattatcgaagtgcca

SEQ ID NO: 43633 - DNA, 140 bp, Manihot esculenta
  Intron number 2 from transcript cassava4.1_004465m (locus cassava4.1_004465m.g) derived from phytozome v7.0 (chr-ID scaffold07519; pos 163086 to 163225 reverse strand)
tttcaatcttcaaacactagaattcaaaccgtaaggagcaattattgatcttctctaatcaaattgtgtctgttttgtttgtattgaaaatggtttttaaagatttgtttgattatatattctcaggcacagcaacaagg

SEQ ID NO: 43634 - DNA, 1024 bp, Manihot esculenta
  Intron number 2 from transcript cassava4.1_019146m (locus cassava4.1_019099m.g) derived from phytozome v7.0 (chr-ID scaffold03614; pos 4085762 to 4086785)
gctctactcctccggtatctcccttctctggtaaggtttgctttcgatccaatcgaatgataatcatggccctggtctttttacaaaatgcctaaaatgacctctcctaagaaaccggagatgggcgttgctactagaaatatccaaagggcagtaggtttgcaaatttaatagagtgaggctaattttgtcatttagcggtgtgggtctgcccagcaattggataatgataatacacctctctatttaagtgaattattgatcttgccgccttggataatgacattttaggtcgttgtttgacgtactttttatgcatgggtgttggccagctcaggctaaccatacttaaccatgcgtggttacttgacctgttagtttaacccaattgcgatattacctttccttttttgacatgcaattgcgatattatcattattaacaatattgcaatagagtatctttaaaaaaaataaataagggataaagcaccagttgattttgtatgaaattatcttgaacaaattcttatgaagagtgatctagtgtacccaaatttagttatgacaagcaggtgtctgtagtagttgattttgaggcaaaatataaagccaaatgaatgaaaaaatttatagaatacaaattgaaaatttctattgtgtattgggatggcaagtgatgatgctagctcctctattaatcttgactaggtggaactgaactttgctttgtgtttgtctattgtatcgcaaatgggttgtgtacttgctatgcatagacgtacgttttactcatctcatagtaattataaaagaaagaatgaggccagtagaataatagtattgatggtacgctgagccatgtgtgggacaagtagtatatgatcatgagctcattttatgctcataagctgcatgtatttgtatttacttaagatgagacgattgtatataaatgctgatgagctgttttgttatgatatgaaggaggcagagagtcctttcggtttcgaagaagatcaaca

SEQ ID NO: 43635 - DNA, 801 bp, Manihot esculenta
  Intron number 1 from transcript cassava4.1_002462m (locus cassava4.1_002462m.g) derived from phytozome v7.0 (chr-ID scaffold06914; pos 683255 to 684055 reverse strand)
cttaatctgcaacttggtatcaggtacctagataaacaacctctgtctgtcctacctactctcataccatttttaacctacttttccttctctgatgttgtttttctttttcctccttacctcgctgaatagtttacttttccagataattccctgagttttttttttctatattcttttgtttcataaaattttttatactcataaattaatgtaaaactttctttagactactgttttgcagaattgcaagagaatttattgcacaacacatagtgttaaaatatactctgcagtgtgcatgatgatatttggatatgtcttagtcctgactaatgagtctaccatctaatgctaacttggctaaacatgatgagctgaatagttttcaactatttgactttttcattcataataatcatcttttcatgcaaattagagagctctttactacatggcttgtatcatatgcctttctggtagatttaaaaagaacagtagcttggtcattcacagtcagcattcttgttaggtgtctagcattctttctttgggttgcaatgttaatagctgaaatttgagttggtatgcacacgatagtatttttttttttaataaaattccattatcataagatttaaatttgcatgccttttctctttgtttactaagtttacttttatggtttttgaattggttgttatcgctcaatcttatgtgtcttctcaacttatttcttcattttaaaatacttgatttgaagttcacaggtatactgttggcaagattacaccagtgccc

SEQ ID NO: 43636 - DNA, 541 bp, Manihot esculenta
  Intron number 1 from transcript cassava4.1_009089m (locus cassava4.1_009089m.g) derived from phytozome v7.0 (chr-ID scaffold06656; pos 1047571 to 1048111)
gctttaacatgtaagtttccaagttacatcttcaatgttttctgggtttttagttttggggtagtttgatgtttgatatgatttttgataatgattctcatctctttttcttgtttttgcggttttaatgctgtttcatctgttttccctctttattctggtttattgggaatgggatgtgttctgaaattaagctgatgatcttgggagaaatagtgcgagaattcgtgcatagtggcattgatgcgtgcaatttatactttagttactgttttatgattgtttgtttacaatgcatatccattgcatatgatgctttgatcttgtttaatatctttatgtgaccatacaaactaagcatatttccattagttttttcctcatatcttacaacaatttgtagattaaaatcctgtaatcaggttcagcagtttgttctctatatagcgtcgaacataaacaaacctgtactttgtttttttctgggatttacctcgttcttggtttaatagaattgataaattgcttggtgctatagcaa

SEQ ID NO: 43637 - DNA, 589 bp, Manihot esculenta
  Intron number 1 from transcript cassava4.1_007372m (locus cassava4.1_007372m.g) derived from phytozome v7.0 (chr-ID scaffold10015; pos 333695 to 334283)
atctcaagagcaacgacaattctcttctaagaaaggtacctttttcccttaatttccttttacattttccttttattatcaatcgtggaaatgatttttcatgtttattcatattttctttttcccatggaaatcaaatgggcacacaagccagcattatatcaaactttattgtaaatctgaagtttttagtagtataatggtggttttgatcaacgtgcaattgtaagtaatcagtttaattgtgacaaagttgacatctcttagctattgtaaaaccgaatgcaaaaatttgttcttgaactaacgattaagaacttatacatgctagtgaagatgaacctttttccaaatttgaaaggaagctggttcagtgagaaaaaaaaagaacaaatttctgatgtatttatatcaacttgagatcaacaaagcaaaattaaagttgaagggaagttttacaagttttaagggtaaatttagatagttaatagtgagtaaatttgtttagctggataatatgtggtagcttaatactgtttctggggaaatggaagcaggacaagacttggatcagtctgcaggtaaaagt

SEQ ID NO: 43638 - DNA, 793 bp, Manihot esculenta
  Intron number 1 from transcript cassava4.1_021526m (locus cassava4.1_021526m.g) derived from phytozome v7.0 (chr-ID scaffold06512; pos 1126492 to 1127284)
gagtggttccctctgacattataggtactacgtttattattattttactctctttttttccccatttttaagctgattgaatcttattttttgagaacagaagtgtatacatgggtaaggaatcctgataaggtcccttggcatgtccttaacttttctttctcaggaagccaatagcgttatttgcaaagcaagtttcttgctcgctaggttttgtatagattgcgtctgatatatattcctgtggtttttgttttagtttcgctcatgtgaattgctgttggagaatcactttgttttcttttcttcagtttcactgttgattaggggtttctatatatcctcttggatatttagatcttaggatccgtatgaggatgagaatgttgacttgattttcccctatccactttctttcttaataaaatccatcagctaataataataaaaaaaaagagtaaaaagaagaaagatatttgagatgaattcatcaacttattagaaggaaaaaaaaatattttaacctacaatgaaacttgtaggaacttcccattggtaaattttagccaataattaattatagatatcttcactattgagatttaaattagtaaatttgaaagtcgtctctaaaacagtaaattcttgagttcaaagaaaactctcaatatataaaattggatgatttgtgcaaattcactggggttgaatgaacacttgtgcatgaaaattaaaggatcttctacgtacattctcagctcaagaattaggtgtgaaggatctgttgcctgct

SEQ ID NO: 43639 - DNA, 796 bp, Manihot esculenta
  Intron number 1 from transcript cassava4.1_019079m (locus cassava4.1_019079m.g) derived from phytozome v7.0 (chr-ID scaffold01551; pos 2134623 to 2135418)
gagcagtttcgtgttctccgggagaaaggaaccgagtaaatcctaaattttcctctatcctcctccattatattatcatttcatatcaaatcaattagtctgttaatgtttgattattttcaactcttctatttcagttgtcttactagctttttagattattggaattgccattcgatcttatttgaatttgtccaagtggtcaaatctagctatggccaagcgttgagattcttgatttttcgggtattgctgtgattctacttcagttcagtttgcatgtgaaaataattatgcttcccgaatccgtttacaacagaagaagtgacggcgttttttagtgaattgtttcatttctcttgtatatctaaaagcttatttgttcacttcaactttttgtgttccggaaattttttgcttgtactgtaattctactcttggtctttgcttgaaacttggaataaccaaacaattgtgcgatgaaaagtttcttgatttgttccaaactttagttgttcactataacaaactaaaatttgaaggaatttaactatttgcttctgtcattttctgtgtcatgactggctcttctcatggtcatatacttttattttcatgtatctgcttttagttattctcttgaatgtatgctagcaatgagtctggatttaaatgtttgtttcataattatgttgtgctaagattctcatggcagcctgtcgctgacctttaagatgtgtctctctcattgtgcctgtgttgatgacatgacacaggctgaaattcacaggagaat

SEQ ID NO: 43640 - DNA, 763 bp, Manihot esculenta
  Intron number 2 from transcript cassava4.1_031944m (locus cassava4.1_031944m.g) derived from phytozome v7.0 (chr-ID scaffold06218; pos 11381 to 12143 reverse strand)
gcttttatcctattgctagacaggttttttttttcttcttttatatttaattattagaactgttttgctggttaaatttacataagggtacatagagaattatgttcttttgtgagattatacttgagatggtcatagtgctttagttttctttcacttatgatgttgaaagttaaggtctcttggggattataacctgctaaaatagttagttgatgtgcagtttaaacaattccagagttaacaacttattcagaaacttccattgtgtttacctccaattaacccgggacttgcactttgctacctagggtgatgaggtcatccaattgttagaacttggaattccaaaatgtcaagtatagacgaaggttatcttctattatttagtccaatcactagaatcaatggtagaaggggattttttgttataatctctaaggataacttaggctctgaagctaaaatcttagcttcttgaacatgggagtaatcaaacattattctttagataatcgtaaaattttgtttgttcattgatgcttgattcctcgactgttattaggtcaagttggcttagctatttaattttagagatataatttacatttcctctcgctatatatgttttttttttttgtctgattctatgcttttacagtagtttaactcttgttatatcttctaaattaaaatcacactagtttaatagttgtgaattcttcaaatctgcacagtggttatgaatttcatttgtgcaggc

SEQ ID NO: 43641 - DNA, 1029 bp, Manihot esculenta
  Intron number 1 from transcript cassava4.1_031665m (locus cassava4.1_031665m.g) derived from phytozome v7.0 (chr-ID scaffold00341; pos 820156 to 821184 reverse strand)
ggtctattaggaccgccattgataccggctgtggggtaagcttcaagaatatttcatattcgctaaaaaaaattttcttttatttggtttcctaatgaatatttaatcatatatgctaatatgtaaaaaaatcttagcatatatgtttaacatattaataaatattaatgttccttattaatatgtcagtgaagatttgaactttcttttaacaaatcttaagcttgaatcgaataagaaaggttttaaaaatgaaggggtacctacaataaatgtatttaatttgtttagtatttagatgcattatctactacgaaaaaaatcaaaaattgaagatgcggagttaactttagattttggttttggtgagaatttacttttatatttatggaaagttagaagaaattcggaaaggtttgaatgttcatgtgcgtagtcaattgttttaatcgatggatgggataaaaatggtatgtgatcctaaagatttttatgaagattacacgttttagggaaaatggcatttacatacaaatttgactattaagttttttttttttggaataagctagcagggaaaacgtgagaaagagatggaatttataacatgacatgtaggatagtattaaaacaaagaaaattttaggtgcaaaactagaaaaatgggttctatttgatttttttcatagagaagctcaattgcataggtcttgagtttatgggatcagatattgatgtacatttagtatctaatcaatcccaattaatttaagattaaaatttaattgttattaatttgattgaaattcaaaattgaaactttttgaaaacaatttttagtctctctaataagttttgatttctcggataatgcattaagaatatgtatactgcaattcgagaaagtcaaagaaaaaacaaacgacttgagaatagtattatattcggatttccaaagtattttatcaatgacttgatatttgtaacgacgcaggtagcaagttggggtgcctatcttctctcacgcaa

SEQ ID NO: 43642 - DNA, 607 bp, Manihot esculenta
  Intron number 2 from transcript cassava4.1_008701m (locus cassava4.1_008701m.g) derived from phytozome v7.0 (chr-ID scaffold01127; pos 25659 to 26265)
aagggaggaatcagataccatcctgaggtatgtgatcactgttttttcctgctactgttgaaaaattcgttcgcattactttttctttaggtcctatctgatttgattaagacgtgttgggattctgaatggggatacaacgttagttttgtctgggttcattgtgatccatctgtttggtttcgaattcttccggaaatagaggagcatatgaattagtacaagttctagtttgaaaattatgctcctgtaatgcttttaggtctaagagaaattggaagggattttttttgtggtgttgtatcaactactaattgctggtattccaattaaaaattttatggagaagtgaggtatgttgtcaaattgggtttgttgctgttgtttcctgctgtgccttacgcttccgaacatccacctgcttctgtttcctgttgttgatgttgtgtacaaatgaaatatagcaaaccaaaacatcttttcttcaatcctttcggaacaaaagactgggcgaccttttttcttgtttttctttttggttcttgatacattattttgtgatttttatgatttggattttattttgattacttgaaggttgaccctg

SEQ ID NO: 43643 - DNA, 965 bp, Manihot esculenta
  Intron number 1 from transcript cassava4.1_027625m (locus cassava4.1_027625m.g) derived from phytozome v7.0 (chr-ID scaffold03332; pos 524544 to 525508)
gtaggtcctttctggcccatgtcacttcctctaaagccctgaatttcataaccagagtctagaaacattaccatctccagtcacggcaccacctagattccgtgctacaacagatgaataaacctttttctcagggttagtgttgttattattgtttttagtatcccgattttgcaaccttaaatcttcacttttccttagaaatagcaagaaaccctcaccgaaattgacgtcgttgtaaagatcctcgtaatcgtcctcttcgcccaagaatccatcattggcaacgtccgagattgcctggttgcgatggaactgctccatctgatcgccgccctcgccttcgtccatgtatccggtgctgtctaatctggaaagttgctaccgagatttctcggattttctatctaaatctaataataaaccgagtgcttgggtgcttgatgcacagcgcactgcctgcccctgttttcggataactcgtcttcttgagaagtcctaatattcagcagatacaataatataataataataataataataataataataataataataataataataataataataataataataataataataataataataataattttgtcaagccagacaacgaaaatgtcaagcaaagccagtcacgtccttccaagtgacggctacatccccactgtagccgtcacaaattaccctacccaccaattccaacggtcacatttccccctcttcagcgaccaaaaacaccgagttcactctccttctccgccgctctatatatatagatcctttcttcctctctttaaaccctccttcaaaagccaaaacactgcgtttcccatttcgcagttgttgccagtttcataaacgcccactcaacatgttgcagagattctttctattactcgttttccttgctttgactttttctaactctttcattgtacatgcagaca

SEQ ID NO: 43644 - DNA, 797 bp, Manihot esculenta
  Intron number 2 from transcript cassava4.1_010331m (locus cassava4.1_010331m.g) derived from phytozome v7.0 (chr-ID scaffold09151; pos 994112 to 994908 reverse strand)
gaggctgcacgagaggtttgttgattttgtggtaaaatgtccaatttattatcttcatttaacttgtttggcattgagatgaataagcttgatggagatgtgtcgaataaattattaagcttattggaatttgtttaaagttcctgaggacgtgaacatagcagaatatggattgtggaatggaatgaggtttctattttctttaggagcttaggaggggggggagggggggggggttaggtgggtgggttgggggtgcatgttattatgtaaatgtgaaacggtacttctcatgataattgtcaatctgtctgtttctaaagcataaattgttttgctctggtaacatgaataaatattacccaacgctcaagcataagttgatttagctactgaaattgaaacatgaataaattatcaaacaggtgagccacagacatatcttgaaaggatatggttgctcaacccaaccattgaagtgctgcaagtgcaactacctcattaagccttttgaacaaagccaaacactaaatagtcatttttctcctttctttcctcatagggtcatcttcatatacaaattgcatatcaaaacgaagattcttccttcctaagctttcttcttaagactcttttcccacgatctgaaatcctgaaatcaaacccctatgacttgtaaatggttgcacaaaatttgatctaatcctagccatacaccacaagtaggcactgataaaatagaaagacaaaattgttcattctattatcctctcattgccaggtcctccttaagttca

SEQ ID NO: 43645 - DNA, 545 bp, Manihot esculenta
  Intron number 1 from transcript cassava4.1_010331m (locus cassava4.1_010331m.g) derived from phytozome v7.0 (chr-ID scaffold09151; pos 995066 to 995610 reverse strand)
gcctgagcagcaattttgttgcttgtacaagccaggtaactgtaatcttttgtacatttatagaattaatgtcgtccaggaagtttggtttgaacattggcacttggtacagctatgaaagactttttatgaacagttgtgattagtgagatcatattctctcctgtctttatatttatgtggttacatttttctatggtttttaataaatacatttggatgttactggaaaaggaaaagagcttgaatttgcattcctgcaccaacttaattaagataatttgaattgtatttggacaatgttgttggttaaacctttttgctttagatccagaaacattgatactgagatggtggtgtaggttctctatcatgttcatctagttctactctatattttttcgtgcttaaggttagtctgatattgtacaatattatgacaattagttagaggttaaattttcttcccttgtatcttttctctttaattttaaacttttgcgtcttcaggatagggaaaatattgagcgtcttgagattaccgg

SEQ ID NO: 43646 - DNA, 216 bp, Manihot esculenta
  Intron number 3 from transcript cassava4.1_015602m (locus cassava4.1_015602m.g) derived from phytozome v7.0 (chr-ID scaffold09876; pos 440281 to 440496 reverse strand)
ttgctgtaagttactatgcattcattattttacatgcattaagtgcatctttctttattctgccaactttttcttttaaaaaaattgtttcttttccttcaattattaacaagaaactattttctttccttttgattaacttccacttagaattcatgtttccttttcttgtcatgaacagattccaaatacattgggctttctctttggtatagc

SEQ ID NO: 43647 - DNA, 488 bp, Manihot esculenta
  Intron number 1 from transcript cassava4.1_026057m (locus cassava4.1_026057m.g) derived from phytozome v7.0 (chr-ID scaffold07991; pos 330399 to 330886)
ggacctccggtgcaacggctggcacagtagataaggttagtttccttcctaaattaatgttgcattgaactggattaatccaagtacttgttgtcttacttgtgctcaatgcttcaaattctgtcaaataactactgattagtcaatcaaacattttaaagcggggaatttctcaaatatcttgtttttttgtttccttattctttagcttagtttcaatcttcctcttgaacatgagagcttgcaatttaggcaaatagtaagaatttcctttacggaataaaatcttttagacaagctcattagaaaaagggaataattgcctaagttgtatatggaaaatctctttggtgtagaatagtgactagctaggtaagtagttaattgttttcttttcttaaattttagctctagatttggatcacgttgtttgatatgacaacgtgttgcatcatttgcaggctttcaccgttcctcttgaaaactag

SEQ ID NO: 43648 - DNA, 583 bp, Manihot esculenta
  Intron number 4 from transcript cassava4.1_019007m (locus cassava4.1_019007m.g) derived from phytozome v7.0 (chr-ID scaffold00926; pos 189680 to 190262 reverse strand)
accgggagccaccacagcgtttccttaggcgcagggtactaatttttttccttctgtttttattttttgttttctacatttaacctagtttgatttatagttaagtttgcagttatacttgttttctgttgaatctcaaaattggtaatagaactaatatgttgaagcattttaacatgaaagttcaaagtatattcacttgctgctttagatttctctcacattctaattagtagcttaatggtatagtgttgtgtactcttaggtgcaaagaggtgtgtaggataattgtttgccttaggcctatttcagttgtagggttcagatgtttatcatgtgcaatcacatgatgtaagttgtttctcttcatattttagctgtattctgttctgctcatctcagttttcctttcctgggtttataatttctagaaatatgctgttggttatgttaaagtagtagtttttattgattttcattgaaccatatatgatgaccttgttttacatgcgtttgtattgttactgttttcattcattatatttcaagattgtttcttgtttttgtggttgtgattctcagg

SEQ ID NO: 43649 - DNA, 513 bp, Manihot esculenta
  Intron number 2 from transcript cassava4.1_007809m (locus cassava4.1_007809m.g) derived from phytozome v7.0 (chr-ID scaffold04300; pos 176521 to 177033)
gccctcattcgcaaatcggtaaagttaataattttgttttccttattatgactagcttttttgttatattagatgaaaagtgggaagggggtggggagggggagagagattccatccctttgatttcatgggttattgatagttcttttacgagtctgatttaggctttgaaaatgcattccataacttggaagcatttctttccattaatgagttcttccttccacaagttcaaagctttagtttgcttcatcaaatgaggcttgatgtaccctatagtttgttcacttcaaagtgtcttctaatcaatttcttgttctatgtttaaaataatgagcagacagtaacgctatgaatctcatcaaaataatgcaattaaggggaaaagaaaagaaataagaatcagtgcttgatgatcaatttccttgggcatgatataatatagcaatctgagctttatttatttatttgtatataggttgaagcaaacaaaggggagaaagctctccataa

SEQ ID NO: 43650 - DNA, 605 bp, Manihot esculenta
  Intron number 4 from transcript cassava4.1_028922m (locus cassava4.1_028922m.g) derived from phytozome v7.0 (chr-ID scaffold00926; pos 72514 to 73118 reverse strand)
agagtttgattcaagaggttgactattcatcagaggtaattaggccatgtcagtccttccttttgtgaattattgtaattgcatattgttgctgcccatttattctaatggatagtcttgtgtagaataaagatgatgatcatacaattaaaattttcaaaaactaagttttcatttgacagatgggtttgtgtcccataaattgtgctatagaatatgaacttgagttttcatttggttactggggagtcttataatcaactctaatcctcgaaaatcaaaatttcttttctcattcttgtctccccaaagattaaatattctaggttctcatcctacagcattgtagcacaatcgtgaaaattattattttcagacatttgtaatccaggtttaatgaatactttggcttatatttactagtttctctgattattattcttaaattttggtcacatctttgtctcccgcatagaacttaatttcaactacatgctaagcatgatattcttttaaagataccatcttcaataaggaagcctttcccttctttcacatttgaggtttcgtagattcagaaaaagagtgaaattgtttgcaggtgg

SEQ ID NO: 43651 - DNA, 338 bp, Manihot esculenta
  Intron number 2 from transcript cassava4.1_028922m (locus cassava4.1_028922m.g) derived from phytozome v7.0 (chr-ID scaffold00926; pos 73336 to 73673 reverse strand)
agtgaccaacccagatcgccgtttcgattctttatgttcgtttctcaactctcaacctcctatgtaaaaatgactacaatcattcttatatattcttttatttgctcttaaaattgcatggtttttactatctgttttgaattagtataaaagcttaaaatttatttgaattgtaagtgatgcaaaatgaagaaaatgcttgaaatttaatgtctcagcaaccaaacactattagataatttaaggcttatgacaaatttgaaccaggtgagttgtttcccctctttttctcgaggatagtataattgatatgctggggattttacagggaagatttt

SEQ ID NO: 43652 - DNA, 834 bp, Manihot esculenta
  Intron number 1 from transcript cassava4.1_005898m (locus cassava4.1_005898m.g) derived from phytozome v7.0 (chr-ID scaffold09501; pos 264532 to 265365)
acagaactgcagcttcacggcttagggctctcaaggttggtaccatcttagctttattaaatccttattggaatttctttcttattgattcaatctcttgtatcctgttcacgcacagttggtactttattcgctgcttgatattattgtttcttgtttaacctgtggtttcgtgattgcttagctaatagatctgtgtataatttattcagtggccttttgttaatttgggagcgtttctgtttggttgttgaaaatgtgagagaagggaaaagaaagaaaagaggtctgggtttctaatgggagctttagcaatttttctaagcttaaggatacgatgttattttggcttgttttgagcttagcttttgtcttcctagaattggtaaaggttattctaaggcttaatacgtgtttggcagcatattagttggattgacttgaatttcggtttgtggaatgaaaagcccttgctgttactggggaattctttgattttggataagagttgcttgctgtttgtcttcttggtgaaataaagaagtttgctacaacttttatcatatattaagaatcatttttttatgtacatgtatggagaagatagcctttatgattagatgatagcctttatgattagatggtgacttcatggtacatattgatatgagttgtacaaattttctcttttagattttctttatctggttaagtacttctgtcttatgtcagtgtaagccatgaatttgatagagtaaaaagtgagccattttctgattatgaatgcgtgcatgaacagggccacagaatcagtaggctgcctacaagatttgc

SEQ ID NO: 43653 - DNA, 868 bp, Manihot esculenta
  Intron number 1 from transcript cassava4.1_033940m (locus cassava4.1_033940m.g) derived from phytozome v7.0 (chr-ID scaffold06708; pos 342450 to 343317 reverse strand)
cccggaatccctctgcacaagttgtggtaatcaagtgattctttaatatcttgcttatttcgtcgccataagcctctttttgccgctaattcttactatgcaacacttttcatgttcgtcatgttttgtcacttactgataccatttatttaactttccaattaggatgtgctcatttgtgtcatttgttttcatcctttgctttgaatttcaaggttcttttgttaattttgcatgaagaattatcaactgatgataggttttctagcaaatatttattacaataaaaatttatggttgaaatttaaaatggatcattgatatagtacacaaaaataatatcatttcatcccataaaaataagtttacttttcccttttatttgatcctattttacccactttcttttcttgagataataatttattttataatttattaatatattcttatttaaattaaaatgaaaatataaaattttattagtttcaaaaataatttagtaatatgagatattaaatttttaataaaataatataagtggaagacatattaagaaaataaatactaaataaaatttattgttttaactatgtattaacaatatttgcttaaactatatataaaaaagaagcaaaccaatttttatgtaataaagcaggtattgttttatatatgtgcccgcatttcttgctactgtgaaaaaaaaaaaagcaatctttttaaaatgtttaaggaaggtattaataatagtcaattgatcaaatttgaccagataaatcaaaatttttttaataaaatattttatgacagtataatgaaaaatgttctatgatgtttttttttgttgtaatctcaggtgtacagg

SEQ ID NO: 43654 - DNA, 397 bp, Manihot esculenta
  Intron number 4 from transcript cassava4.1_006521m (locus cassava4.1_006521m.g) derived from phytozome v7.0 (chr-ID scaffold07012; pos 1231642 to 1232038)
atataattgggtggcttgttatttcttttgctagagtgagttccagtgacgcaattctatacagattttacagctggtttagatagataaggaaggaaaaatagtggaaagaaaaaaaggaaaatatgcaatattttctttgaatatttttcctccatttcgaaaagaaaataagacataaaagagtaaatgtacaatatgtttttttgaggaatgaacaataaagttaagaatggaaaattaaaaaagttcccttctttatcagcacgcaaggatgaaaaacaaaggataaaaagatggaaaattttccctctattatttttctttccttttcatgatttatccaaaacagagtgttaggctcctgtaaaatgctgacacaaaccggttatgtagg

SEQ ID NO: 43655 - DNA, 878 bp, Manihot esculenta
  Intron number 1 from transcript cassava4.1_009263m (locus cassava4.1_009263m.g) derived from phytozome v7.0 (chr-ID scaffold07571; pos 487293 to 488170 reverse strand)
attcggtgcctgcggatttatctacctgtcaagtggtgagttcgcctcctttctttctggttgattctctcgattgcttatcatgttttcttcccaagggtttgctttgtgaacttcaaataaaaatagtaacgatttagtgttctaatgtttatttagttgaaactgagagctagtaactgattgcttcttgaatttttttgtcagatgttaaaattatttcgtttacttgtttagatcggattttgtgtttacgagctgaatttgtatagagaagttttgcgtcatccatggaactggagaattttttttcccctttaggatcatattggattgattgactaaagatcatggttgagcagaatagtctaagttatttaatccctttactcgattcatttcttagagcaattgagtaattataattatatgggttaagtcgcaagccaaaacaaaggttgttctggtggaagaaaaattttgatgcacgttatggcgccggatggttactgatctactactgtcttctttgtgttatgattagtaaatctattacactttgtcttgtttgcataatatatgattttgtaatttaatttcttctctttcaataatttaataatttgatggagctgctgatttctgttaagcaataattcattggaatcgtttctccatgtttgtaatgagaactggtaataagaacatctgtgctgagtatgtcccatatgttcaatgaaccgtgcaaatttttaattgtagtcattgtgagatatgaagcgttattctgaacattgttggtgttatgcaagaagtgaaaaacttaaaatccattcatacccttttgtaggatataaaatctgctgagaaaattccag

SEQ ID NO: 43656 - DNA, 719 bp, Manihot esculenta
  Intron number 1 from transcript cassava4.1_026102m (locus cassava4.1_026102m.g) derived from phytozome v7.0 (chr-ID scaffold07991; pos 135372 to 136090 reverse strand)
atcattgtcttgccaaaagaaggtttgggattgagtcttgtatcttattactctctccctctcataatctgtcctcttttgcattttcaaaaaatataatttttttattaactttttaattatattcctcataaatacattaaattttattaaataataaaagagatattttagaagatttcttgaaaataaagacaaaactaaatagaataataatagttaatttatacattactatagtctaaaaaataaagtggacaataattttggaataactaaaaaaaggaaaaatggacaaaaattatagaatggagaaagcattcgtttgttaagaacttgtagttttaaaattgctgtgacaaacagcaatgctattttttttttccaggaaagtggctgatgatgaagaagataatgacagcaacgagtagttcaacaggagcagaaaggtaagtttttgtgttctcttaagaaattgaaaaaggaaagcattatttaagttggaggattgctactgtttgttacattgttttaagatgtatctaaccaggtcttcacttcatattatcttgtattttatcaatttgattgatgcatataactgtatatagatgccaattcataagaattgcactaaaacttggtaccataatttctttgacagcatgatactgctcaggcaagcggaagcggcattggcagtggcagaggaaggggta

SEQ ID NO: 43657 - DNA, 714 bp, Manihot esculenta
  Intron number 2 from transcript cassava4.1_014220m (locus cassava4.1_014220m.g) derived from phytozome v7.0 (chr-ID scaffold02960; pos 580312 to 581025)
ttcagtccaggtcaagtttttattatcatttttctttcctcctattcgacaaatttgattgttcttattatttttcatgtccaatcttcttgtttccaatataagataagtatcattctacttaaaatacagcagtataggaccaaaatgtgtgaacgtgtaaaatttcttcataatatgacgattatcttaagtcttaactgcttattttggtggcattttacatcatgataagatgtttcactacgtgtaattgatatgctaagtagtattactcattcaacaagaagatactaaatatttttgttattgtctttggtgcatttttatgggtacattgtgcacttcctaatgagatatacggcaccttgttttaacttgatcaattctttttatagaaccttaattaagtttgtgatctgctgtatccttttgaaaccttcgggttttctttaattaggttattttacatcaactgcaagattggaattttacattaaaatgggcagatagctagatacacaaattttgtcctggcatattcagcatatcactttataatgttcattattctgggtttgtaatactagtgtatttgtgtcagtattagatgatacctgatcgatacataggaaaaattggtgccttgtgcttcttaggcttcttatttaggatctcatgcagtttttgaagattttaaattattaatgcagc

SEQ ID NO: 43658 - DNA, 556 bp, Manihot esculenta
  Intron number 1 from transcript cassava4.1_003792m (locus cassava4.1_003792m.g) derived from phytozome v7.0 (chr-ID scaffold05749; pos 76084 to 76639)
gcaggtgcttgtaattttcattactctgcattttcttttcattatttttcttttctagttccgttcaccgtttcaaattcaattaccgagttgatttcaaattatccttttcactggctactctataatcctatatgttagttgaaaggtttagcttctctttgctgtaaatccatggcacacgagttggtttagttttgatttgaactgtttgttgactttttgatatttgttatgcgaagataagcttttttgatgtgattttctttttagcttcttcctgtgtaattcttcttttttaatttattggtgtaaggattaaggattgcataatttggaatcaagtattcaatttaaaggaagaatgataaccttttctatatgggctgtgtttatttttttaatcaatttattctctttatttatatgtaatgaagaatggaaaaagttagcattgctaggaaaatctgcaacattaacaacacatggttccaacatattgaataaggaatttacggatatgggatctaataaaattccaaattcttatgcagca

SEQ ID NO: 43659 - DNA, 870 bp, Manihot esculenta
  Intron number 1 from transcript cassava4.1_008818m (locus cassava4.1_008818m.g) derived from phytozome v7.0 (chr-ID scaffold03049; pos 816844 to 817713)
agtccgattggcatcgatacaatctcaaacgcaaggttatctttcttaagtctttatatatatatatatattcttttttcattttttgcgtatggattgctgctttgaattggatgaaatttcaacttgcttttcccttaaatatcctttttattatatgttttttttaaaatccggttattgattctttttatagctgagaagaattttgtttgagttttcatcggagcaatggcagaattttttaagatatgtattagagcactggattcgtatgtggtattgcataaaactgatttttagaacttattgtctttaatgtcgttttcttcattttggtgattggagtcgaggagatattatgttgagcgtataggtggtattggtggttcatttttgctagtttgatgttgaaacccaattaattttcagttactaacttgcttaccagttttacttggctaaataattagaaaaatatattttacttctttccaagtaatgggattattgttgtagcccatcttttcgccagagattgataggctaatttgtgatatttaaaatgtgatttgcttgtttataaagtgattttggcatgtaagtaacaactcattaaggacaagtgcagctgcatgagttctttggacttaagaaagaaatgtatgatttcagctgctctggcaagagtctgtctacgctggtagtcagtggtcatcccaacagattattcatttgtcttctgtcaatcgaagagaatcatatatcctaatgatgcattaacactgttttcttatttcttactctgtttgtattccttcaaaaaatatatcaggtagccggtgttccaggggtgactgaagcactgtt

SEQ ID NO: 43660 - DNA, 976 bp, Manihot esculenta
  Intron number 1 from transcript cassava4.1_028791m (locus cassava4.1_028791m.g) derived from phytozome v7.0 (chr-ID scaffold06314; pos 138327 to 139302)
gaggtaatctttctttcaattctgttttttcattgtaggcgatgaactgatagagttcatctgtagggattgagtcccttcattgataggacttttttggtggtttctttgagtgaaagaaggtatactatgccctaaaaaatctcaaagaaataccttatctaacatttttaatcattttctgggctttttatctttatttatttttaaattttttttttagaaattgcacattcagatattcctggcaataatgaaactcactagagtccaatacttttgcatgataattccttttccataggctggaactaataattattaaaagaattagtgtattttttcatcacataataataataaaattattggttatatacagttttttttaaaataaatattatataatgactcatcaacaaaaaagatataagcaaagcaaccactctggatttctctctacctaaaataataataaaatataaaattaaatccaacacccacatggccaattgtgtactatgccacctgcttgcgggttacaatcccaggcttcactcctatattgaagatttttcggcgttcattttgtaaccgtccatattccaaaactaataaactatctctgcttaatttaatcatgtgcagattattattattattattattattattattatatgattgctgccttgtaatatttatatttactatttttaattaatttcctagaaatataaatcaggatcaagatgatttgacttgatgagatatgtttattaatgaaggagatttgaattattgtttttttcctcattattgtgcatacttctatccatagcatgtgatgtatattatctattgttggaattttgtctatttatttcgtttttatgctgatatttcgtaattttcttcccttttttttaatttttgttttctatttttataggtcctggttgttcatctttggggt

SEQ ID NO: 43661 - DNA, 498 bp, Manihot esculenta
  Intron number 2 from transcript cassava4.1_024029m (locus cassava4.1_024029m.g) derived from phytozome v7.0 (chr-ID scaffold06550; pos 553420 to 553917 reverse strand)
gaacaccacaacttgcttttgtcggcaatcggagagtattgaccatattcttttatcatcacctcaatatattattagtttgagtttgacatcataaacattcgactcttataaaaccttaacaataaaaaatgaagataagtttttttgctccgcaatttttctaataaaggtattttcagttgatttcataattgaaacaactgaattttttattcattaatatatattagccataattaaattttttaatcatatgttctggcttgtatgtttttttctccccaaagcagagcgtacaagttttttccattaaacgacatcgtgaagctttccaccaatatttatatatatgtatatatgaatttctacccatcttttttcatgacaaaaacaattcacagaaacaagtctaaattggatatgctatcaatattcttctttttttttcttttgtttccagtgagtctatagccagagaatccaaaatacacagct

SEQ ID NO: 43662 - DNA, 608 bp, Manihot esculenta
  Intron number 1 from transcript cassava4.1_018395m (locus cassava4.1_018395m.g) derived from phytozome v7.0 (chr-ID scaffold09761; pos 824139 to 824746 reverse strand)
gaggttcgattcctctctctttctatctttcgctgtatgcctagatctgccttgtattttgttatttgtgttgatttgattcttatttctctcgattttcttgtggctatattactattctcatgcgttgttgttttttctttgtctcgatttgggatagtttgatggtagaatcgcttcttcagaatttgatttaatattggatcttctatttgacccatttttgttgcaaatgtgaattccgatttgcattttttaggatttggtaattgtttattctgggtcagaaagcaagaaatggggattttgattctcttcttccttataaaacacgtatttcataacaacaaaagtcgattgttacataagcaggcatattcacataatatcacaacattatgattcttcgtgtctggatccatgaaaccatttcagctccatttctatttgtttgcatgattgcattccagaaaatgatgtctagctttccatataagttatatttccctcctgattgtgatcatttcactttcttactacgtctctaaccatggagattaattggaaaattggcaggttgcattaccacaaaggagcttgggactgtg

SEQ ID NO: 43663 - DNA, 654 bp, Manihot esculenta
  Intron number 2 from transcript cassava4.1_023693m (locus cassava4.1_023693m.g) derived from phytozome v7.0 (chr-ID scaffold06711; pos 278304 to 278957 reverse strand)
gaagaagtatgtttttcctcattctctatttgattttcattcattttcatgcatcaaattgtggtaaatgtctagttttgtttcatacttcattgcaattatcttttaaacagaaagaaagaaagataatgtatttggttctaaatggtattataacttgttttaaacactggcttatgtttcaagcttttgatttcttctcagatgtgttgcatgctgaaaaggatggttatagtttgtcttagaggattttgggtttacttctaattttatcactttatctattgcatgaagttcttgtgcataataatttccataagctctcattctttccctgttagatggtgtgattgcttggaatagcaatggacttgcaaagctggtcatcttaaactatctggtctatgctttcattttgtaaaacattaatgttttctttctctaagttttccttcttaatgagtgtctgtatgttcatgcaccacttagaagaggcttcttagattgtttctgatgattaaactttttatattctcctgtaaattcctccttcgggtctgcattactcttattggttttggtattatatttaatcctaaattgcattttatgttctcaggtagaggaaaagcttgaagcggggcaagggaaaac

SEQ ID NO: 43664 - DNA, 487 bp, Manihot esculenta
  Intron number 2 from transcript cassava4.1_018403m (locus cassava4.1_018403m.g) derived from phytozome v7.0 (chr-ID scaffold00374; pos 22043 to 22529)
gcgtcgataagggggtcacttctgttgtcattaaggtagccttcactttctttctttttgtccaccttctgttgattttgatgtagcaattttccccatttgtgattccgtttctcttgtaattgaggtctctgaattggcttatgcaaaataactctgtaagaaaagacgaattgaagaattggtagtgactttttagtttaagcaagcaactggaacatcatttgtcaatctttcgagaatttagttgccatcaagtatgattttagtggctttctttttttttttttttttccaacaacttcctagtgctccttttttactctaattttagcatttgacttgatttttatgattgacttcattgtcttatattaattttcttcattttgctcaattaagtatagttatttgtttatttagtgaatgcaatcaatctatctttttgacagggattggcagagcataaagattcgttgggtgcacc

SEQ ID NO: 43665 - DNA, 205 bp, Manihot esculenta
  Intron number 1 from transcript cassava4.1_007359m (locus cassava4.1_007359m.g) derived from phytozome v7.0 (chr-ID scaffold07991; pos 436083 to 436287)
ggtaactccagttttttcttttttcttcgttaaatttttgtcttgtgagaaaataatttagtttgatagctcaatttaatcgcgatttatttatccatttaactagtgtgttgagtttttgaattcacttcctggattttctatgtttaatgtcctcgacttgatgggtacatatttgttctcaatgtctccagcttacttggtt

SEQ ID NO: 43666 - DNA, 550 bp, Manihot esculenta
  Intron number 1 from transcript cassava4.1_003832m (locus cassava4.1_003832m.g) derived from phytozome v7.0 (chr-ID scaffold01895; pos 92446 to 92995)
tttccgatctcataatctcaaaggttgatcgacgtgtaagttccttcctctcattcgttctctctctccagttgcttcaagggggcgtccctttccttctctctttaccctttgctaaccttttccgtccaaattgagctccgtgtatcatttttgagctatcctgattttgtggagatctctatcgctctgttcatattcatgatctaggttggttgctgattgctcagtaatgagagtgaatagaagccaaatgagctaagtagttgtattaggtttcagttggtggatagagaggaagacaaataatagggtttttctcagtttctctttagttgattccttttattgtctgaatggtgttctttgtttagattcaaaattgatcctagtcgtgcattactatgtcctttctaacttttgatatatgttttttcttctttgcattgccttgattggtttcttattcttagagtactcttgttgataatcctaagcttgactttatattgcagattgatttgacttcgcaaattgcacgaatcacttc

SEQ ID NO: 43667 - DNA, 702 bp, Manihot esculenta
  Intron number 4 from transcript cassava4.1_002768m (locus cassava4.1_002768m.g) derived from phytozome v7.0 (chr-ID scaffold06512; pos 527866 to 528567)
cagccacatgtatgttgtaattttaggcaacagttttttgtttgtgtttttccttattgcgactttgtttacaggggttggttaggtaggttagtttttttttttttaaaaacaaacttttttggatgggaggcaaggggtagttcttcaagcattaaactcagagtttagacatgggcatttgtagcctgctcacttttattacttcaactggggctatccgttgtataccgaaactgatatctttttttacaggttagaaccttaaataataaagaaattggatctggaattctgatgtaatcttgtgttcccttgtacaagtctgaaatatgttccactgttggagtcgctttatcatttttttccattttctctgagtttgtgcttactttcttcagtgattcttgctgcttcaattttcaattttctatgcattcatgcaagctttgctttcagatcataattctttacctttataatttgtccagatataagttggagacacttcctataaacttgttaactagctagcgttgcatagtttcacagagatgctatactattgtttgaattaatgcaacaacaaaaactaagccttgatctaagtggttgggatcggctatatggatccttgtttgaactaaataatattatatgttcaatgttctcatgtggcatctttaattaccatatatccag

SEQ ID NO: 43668 - DNA, 805 bp, Manihot esculenta
  Intron number 1 from transcript cassava4.1_029752m (locus cassava4.1_029752m.g) derived from phytozome v7.0 (chr-ID scaffold09460; pos 101267 to 102071 reverse strand)
gccgctgcgtctcgccgcgtcctacgtcattgcaggtgtgtatgggttttgagatttggtttcagatgtgtgctttctaaaatttgtgagatctattgatgtgggtttctgaaatttgtgacaatgttaagatttatgagaatgtgttgggcttgtatttgtgagatttattgaaagtttgttgaaataaatactgttgtgaatggactgagagttgttttagtgagatcttcgaaatgagtttctgaattttattgaaatgttaacgtgagatttctgaaattcttggaaatgccaagattttatgtaaatattgccgagggttgtaattgtgagatttattgaaaatttgttgaatggatcaaagttgtttttgagagattgaaattctgatctgagattgtgtgaaattcctttttttgggggttttgattatgagttaatcgggttcaggtagttcggatagtaaatgggtattgttaaacaggtttgggatggatgtgagtagggaaatctaatttctaaataggtttgggacggatttgggatgtctatttcttaacgggtccggggtacttaaaattttgcaggtatcctacctggtgccatccctaaaattcgctattttcaccttattcgtttttaggttttgtacattgaatctgtatgttataagttacttgaatacctgtttcttttttgatgaaaaattaagaatgccatcaatgtttatatgaactcatgacctgtacacttgttttgcttcctaattcagcatatattagatcattttaaagtagaaggt

SEQ ID NO: 43669 - DNA, 957 bp, Manihot esculenta
  Intron number 1 from transcript cassava4.1_006311m (locus cassava4.1_006311m.g) derived from phytozome v7.0 (chr-ID scaffold03332; pos 722357 to 723313)
atttctccagcttcatcaggcaattaaatacctatgtgagttttatctaatagtttgttgttgtattttgtgattagtgggattattgtagagtttgaaccttgtttttggtgcttttttttattttttattattttattttatggaagtgagacagttcaaggactaattatgagtttgaagtgttaactaattcgagtatggtgaattaatatggtaaccctcagtgacagttatcccttaaaaaggcttaaatttagtctcggagaactaaaaatggaagagtttgatatgctttcaataacttgaatctcagtggcaagataaagatattcacaagtaaattagtttagaaaaacaattagatgtatataattgttgctatttgtaaatcatgtattatgcaaatgcacacatgacgcagatcatcttttcttcaagtttagttgaacctatgatggactgctacattcatttctttcatcttggtgaatcattcatttagttttgaccctttctttttctttttgtctgggatattctcttctagcttgaattttaagtttcttcttgtgactcgttgctttcttaaaaacttgtcacactatttgtattgcatccaacaactaaaacttgtcagcaattctgtgatgcaagtaatttaacctttgcgcttttgtttgttgaggaaattttcccatttatcaaaggtgctctttggatggttaatttatttctagacatcttgatattctgtaagtctctttgatattctggtgccggtgctggaattcatgatatcactatggttttctctctccatgttgtagcccattcatctctttctcctcaaaacaatattggcggagaggtttttgttctgtaattgacttattcatgtgtctcagcacttggtgtaatttgatgacagggattcagaaagattgatcctgagag

SEQ ID NO: 43670 - DNA, 350 bp, Manihot esculenta
  Intron number 2 from transcript cassava4.1_028115m (locus cassava4.1_028115m.g) derived from phytozome v7.0 (chr-ID scaffold04300; pos 159362 to 159711 reverse strand)
ctcaactctgttggattttatcaggtttttttaaccgttttctctttcttcaaactctgtatattggttaatttataacatagtatcgtttagcatctatcattttaataatatataatttagtttttgagattttattttgttaataaaatatatatttattttaatgtattttttaaaattgagtgatccatttactagattaaataataaattttattttttaataaaataaaataaaaattcaaaaattaaacttcaagaattatactgtaaattacccttgcatatatacattaatttctaaattctaatggttattttttcatgtgcagatttcaaagttaagc

SEQ ID NO: 43671 - DNA, 782 bp, Manihot esculenta
  Intron number 1 from transcript cassava4.1_021356m (locus cassava4.1_021356m.g) derived from phytozome v7.0 (chr-ID scaffold09360; pos 170505 to 171286 reverse strand)
cacctgaaggtaaaagtcagttaacttaatatattttaacttcaccaatgttagtagaaaagatcaaatatttatttggtgacttggtccttttaagagatttcaataaaatttacttttggttgttttcgcgttgtataacaaatagagacaggtgagtttactttggattgattttgattttgatttttattttatgacttgacttgcagatgcagccaacatccatccaccatataattttttaacgccaacatttaggaaatagatgccaagttgttctcttgtcagacaatccgccaatttgtttggatagttattcaagttcaaaatacgcaaccgttttattatatgattgattttgtgtataaggtgtctttatattaattagtctatccaaacacagtataaaaatcatgcaactgaaaattgaaaacaaacagaaattaaagaaggcatttcgcgcctttaagagagaattaaatatagaattttgcaggaccaagtcctctcgagttggcggttaccgtcactgtataaaatggcgcttctactcctcgctcgtctgcaattgtactcgccgttctcttcctagcctccttttccctcacttctcaacttcatggccgtaagatttcatcatctcttcatatttatgctaaattctaagctcattttcctcttttctattttaaatttcattttttctttcatcaatttttttgcagattgactttccttttcttgatattaatcgtttgcatttacctggatttccatag

SEQ ID NO: 43672 - DNA, 473 bp, Manihot esculenta
  Intron number 3 from transcript cassava4.1_002769m (locus cassava4.1_002769m.g) derived from phytozome v7.0 (chr-ID scaffold07088; pos 3692 to 4164)
ctagacaatcaggtaattggagttatgtatgaatgggcttatcttatctgtgtgcaatcaggtgttcttctcttatattctgttgaaagagataagatggaattgattaagaatcctgagcggaaaatattgggcagatgtccgcagaggtattaagttgcatggctgtgtgcataaatacttatatataacagcatgtgtatgcaaattgtctttgtttttatgtgggtgaatatgcttgtgtttcaacaatcacttctcaattgtgtatcaatgcaaaaacattgaggcacatttgagattcttcatgagattttcataaaaatttcaagttgaatcataacttgagtttgaatatggaatcatgttaaagtattcttgtaataacaatttatagattcattcatgttaaattatttcttgtaataacaatttcagattgagaagattgtcctttttctcttggaacaaca

SEQ ID NO: 43673 - DNA, 159 bp, Manihot esculenta
  Intron number 1 from transcript cassava4.1_019023m (locus cassava4.1_019023m.g) derived from phytozome v7.0 (chr-ID scaffold03332; pos 175611 to 175769)
aatctgtaggaacggttgaaactcgtaagttttttcttcttttgttatttatataatcaaatatgtattaaatctggtttgtattatcaatgtcaaatgtatagtaatactattgttttctctattcattaatttatgtagaggagagtgcaacagccg

SEQ ID NO: 43674 - DNA, 773 bp, Manihot esculenta
  Intron number 1 from transcript cassava4.1_028111m (locus cassava4.1_028111m.g) derived from phytozome v7.0 (chr-ID scaffold06656; pos 121700 to 122472 reverse strand)
ccaagttagttctacttccgacaaggagacaagtaaggaatctctattctctttctgcaatcatggaaatctgtgtttatgtttactcgttctgttctgtttgtcaattggctagttatcttatatcatcaggttttgttatagtctatatgattttggtataatatgtttgttgcaacagttttagtcagaagcatttattgttttgttagatttcatatttgtgtattcaaatgcaactttttttcattgatttatgtgaatggaagaatttcataaatttgggttgctccctttagcatttttttaaaaaaaatttcttactctttctgaactttgaagcatgtgacagaagctttgtttatttatgagaaacgtatggtgattgttttaatgtgtccctgatgcttgcatgtagaaagtggtggtgatttgtaagaaacttgaagtcttcttggcttaagatttggttcccattaggagcaaactaaacatgtttgagaatttgacagaggtcgttccttgtcttgcagcagatagttttgttctctaatagcttacttatttgttttcatgagtttgttcaagattctaacacattttatctgaacctgttagagctgataatttctactaaccccagaatgcactccagaactggtataatattgcaaaaatatgcattttcatatagtaatctagtttattttgcttcagtatctttgattagggggattctcaattttaatttcagggttctttgaacaagttcc

SEQ ID NO: 43675 - DNA, 795 bp, Manihot esculenta
  Intron number 1 from transcript cassava4.1_006490m (locus cassava4.1_006490m.g) derived from phytozome v7.0 (chr-ID scaffold03614; pos 1065591 to 1066385)
ttctgggtcttggccaagctgtatttctcttttttcaacctgttgttttttattttaaaactttcttgcttcttgttttggatatctactgtttcttcctaatttctggaaaaagaaaatgatgggtgaattgacatacaaggaaagaaattttaaataaattgtgttatttactcaagagcactcttcattcctattgccctttatgtttgtgtatttgggttgtacgcttcaactacttaataaattatcttacagacgagaaaatgtaagagatgagtggaaaacacaagtcctctgtttgtgcctttgtggagggtggattttgaataccatgataattaaagcatgctttgccttttttgggcctgttggagtttttttttttttcattctgtttggtgaaataatatatttataatttaattattcatctcacactgatgaacatgcgtttatctttggagatgaattgttatgcattcctattatcagcttttgtaataagtttgtatatgttcaaagtaatttttacctttatgccattttatatgttggagattatgttgtgtggaaaaaaaagaagaaccctggcaatgttgactgtttgatagttgcttcccacaagtttcttttgtgacatatcattttccctctcttgtgtatatgtgtttgtatttttgtttctttaaatttcatgcaatgtttaacccaattttgtaatatggtgtggaaaaatcaattaacattggtgttttatctctgttcttacttacttaggtagatttttctggt

SEQ ID NO: 43676 - DNA, 756 bp, Manihot esculenta
  Intron number 1 from transcript cassava4.1_008109m (locus cassava4.1_008109m.g) derived from phytozome v7.0 (chr-ID scaffold07012; pos 1384970 to 1385725)
cctcgactcatcgaattgctacatccagtctccaggtttggatttttcgctattaatacttcaaaagcctctccgccgctctgtttcccactctctctctctctctctctctcgctctttttcttttttggtggctgtgatgctctgtacagctattttgaaggaattaaacttaattttgtgtttagtgtgctctctaattgactttttttctctttcttttgttaaaaatatgaacttgaaagagttgattttgagtgccattgacggggcttattactttgcgagctggaactgagtttttgtttagtaattcagtgatatagaagagctgagcgatttaattctagtactactatattgtgaatttataagaaagaggagtccataaacttcaccaaatgaagtagataaccatatagatggatattgaatcaacgtgcagccgccccttcggtatcaatttagttgtgatagactgatggtagctcctgttcagctgtgccccttgtttaattcgtagttttcttgctgcttgctatggttcagtgagaatgatatcagataattataattgttgatctaaaggattctagttgaacaaaaatcatgggatgcttaatttgctttttcgagttaatattgtctcaggtattgggaactatagtatgaattctttgttgatgccataattgtgaggattcttatctgtgttgtcattttgcctcggcttatttgctagattggctcgacttc

SEQ ID NO: 43677 - DNA, 660 bp, Manihot esculenta
  Intron number 1 from transcript cassava4.1_023943m (locus cassava4.1_023943m.g) derived from phytozome v7.0 (chr-ID scaffold02620; pos 139894 to 140553 reverse strand)
aacagagttaacaataccatagtttgtcaggtcaggcttcatcttcttcacccttttttctttttcttccagcttgttatttgccaaccatcttgggttgacttgattaagactcagaatgcaacgattagaatttacatggttcatgttatgtcaaatcttgagaaaatattttagggtttcaatagaatatgttgttcttgctgaaccaggcctgcaaggtttagctatgtgaacttcaatgacccaaaagcctcaagagactacattttcaatctgggtatactgggaaatgaagcttcatttgggttcttatgaaaaaacttgtgacactacaatgagtcaactcattaaatagcagggccctctgttattttctcttgactactgtttcacttcacgttgtttctttcaaaactaggggggaaaagagaagaaaagggagaacaaaaagtgtacaccctgtttgcaaatctctgtttcctatgcatcttttaagattttagaggtgctttacgcctccatagaatgggttcaaaaaattccatcccactacatgagataaatgatcatgaatgtgatacactgacaccattataagtttctgcattttttaacaattttgatatatttttttattgtaatttcaaaatttgcaga

SEQ ID NO: 43678 - DNA, 473 bp, Manihot esculenta
  Intron number 1 from transcript cassava4.1_030166m (locus cassava4.1_030166m.g) derived from phytozome v7.0 (chr-ID scaffold04151; pos 393886 to 394358)
cccttgtgagctgttaattgctttgccacacattggtctgtttggagaatgatagatatttgaagtcatagaatgactcttttgattgcagaatctatattttggaatttgtgaatggaatgttttaaaatattttagtctgcatttagattttctatttctgttaatagaagtttaatagagcatagaagtaagatggtcatgctattttcatactactctttgattgaagctaagattaatttatgctttattttagttgtttcttcaaatgcattttatatgaacttcctcacttctttttgtcataatttatatgattgtgcaggatctcatatacttttaaaagtagacggagaattgtagatttttgaagatgcagaagcacagaagcatcggttcaaagtcttttagacaaagttctgagcgaacagaactatacagacccataacaccacttgtatcagctgagg

SEQ ID NO: 43679 - DNA, 1047 bp, Manihot esculenta
  Intron number 1 from transcript cassava4.1_005060m (locus cassava4.1_005060m.g) derived from phytozome v7.0 (chr-ID scaffold06914; pos 572986 to 574032 reverse strand)
atttgtcgcagaaggagtcgaaagttagccctgaggtcagtagttaattaatttgtaggcgaaacctgaaattgagcatttcttgtgtaattctaagtttaaaaaacagaactttgaactcaactagcgcaaataacttgggggctgtccactgcatgaatttcttccggactgagaaattataaacattttgatcatttggaagctcacgatagaccatttttgttttttcattttatcatcggattaacttctcacttatgatcagcaggcaattgttgagtttcttttgtgaagtaatgtgctttgttcttgagtgcttagtatatctatgtatttgtgaagtaaattgtgtgcagacagatatatctatgtatttgttgaaacattatccactggagcagataacttaagctgaaattacagattagcattctttgtcaacctctgctgattatttggaatggggcaagtaatagcacatatgcctaatgttataccatgtccaaatggggtttcaaactaaatttgctagcaaaatgttaagctgactaaatatcaatgcataagttaaaaaactcctctggactttctagtttctgctgtattaattcagtaaatgatactagaatgtggagaaaagaagtgctaggttttggttcttccagcatattcaggagccatgataatcagttaagcaatttggatgttatgtttgatgcctttaagttggctattatattccattaagaccaatattctccctttttttcttgtacacacacaattacacgtgctattatcttagcacacagtttatgagcaattcaccagcatccgacatttaataatgcctaagcaacagttttctgacctcaattgtttatgctaagggcccgcttttattgaacaagtccactagaattgctcataactaacctagattttttccttggtcaccgtgaagatggaagattttatggcaaactttctaattctttttaaattgcaggttgcccttgggggaggtggaggagatattgggaa

SEQ ID NO: 43680 - DNA, 976 bp, Manihot esculenta
  Intron number 1 from transcript cassava4.1_024105m (locus cassava4.1_024105m.g) derived from phytozome v7.0 (chr-ID scaffold03332; pos 879024 to 879999)
ggcgtatttggcacctcactcgcaagaagaagcaggtcactgccgtatatatgtgtaattctgtgtgtgtaaaatttggtaactcttgctttttcaaattgatgggtcgctatcagtataagtcctagttttcggataatcaacattggcaaattctgtttggatgcttatatgtgtatacataatcttatgctaattgatttttggaggtaggcgtcatctgtgatattacgtgtcttcagtttagagactaatattgattttaatcaatgggtgatgaggattgaataaaaattcaacagcttcgagtttcgttaagatgttgtagttttcatggacgattggtttagtttcattttcatattatatttgtttttttttttagttattattattgttagtctctgtttcttttctgtttagtgaccgagaatcaatgttcattgattcaatgtggatgcagtcagtcatgagagagaattttcatgaatattaaatgagccttttcagtcagtcagtcatgaccgagaatcagatagttgcctttcgaaattctttatattaattttttacatcatttggacacgaatgggatctaccatgttcatgaaattgaatgatgtcaccaagttgggctatgtttctattgagtaatgccttaactttattgcttcttatgtttgccctgtcaaaatcagccataatatggattccctgccatctattcctaattcatttcaagcacttgatgttatggtgtgtaaaatttgagtgagaacctatattgctttttctctttcttgggtcatagaatatacagaatcttcctaagggtataatgtggctttcttgccgtccttactatcactcgacatgctattgaaccaattatgataatcttatctgtttttctttttattattatgtatttaccaaggtttaaatgttaatactttctgattcttgaacagttgga

SEQ ID NO: 43681 - DNA, 604 bp, Manihot esculenta
  Intron number 2 from transcript cassava4.1_018122m (locus cassava4.1_018122m.g) derived from phytozome v7.0 (chr-ID scaffold08316; pos 459192 to 459795)
agctgtgagaaaatagcaaggactctttcttgcaggtagttgttcagttttcttccctccattgttgtctctttatatcactttaaatatgccattattgggaatcttggagctcattatatttatatataagataaactgatttgtttatcattacattctgtggtttttctttcatttatttatgttatagcagtttctgaatgtaaacagctgtggttatattgtgaccagaagtatagatacatattttttcttgtgcatctatattgggatatttgctgggtaatggtgtaaatttaagactgcaatttagttgtgcacttttctatgtgcgtgtttatttgttttctttaatttaatcaatgtttttaaagccagaaattattccatgatgtctgcatgcttcttgatcttttacatgcaaataaataaactctaagatacttctattttattgtggcttttgatcaatgcaacctttggacaagtttggcatggttagcataagctaaaggtaatatcctataaattgactaggaacaaatattttcttgattcgtttatcttattttcagcattattgattctgtgcagaattccc

SEQ ID NO: 43682 - DNA, 718 bp, Manihot esculenta
  Intron number 1 from transcript cassava4.1_011381m (locus cassava4.1_011381m.g) derived from phytozome v7.0 (chr-ID scaffold03614; pos 1683020 to 1683737)
ctggtatttgttttctgtcacccattaatgtgattcattgtgttattgctgcaataaatttgtattcttggcagtcatggattttgcttatgtgacatttttcggaggatattggtgttatactgtcccatttgattgataatattggcctttcgtaattaagccaggtggtagaatcttagaagccaaatattaactagcctggtacttgttgggagttcttggcaatgaaattcactgaactgataaaccatatattaggttacattcccacttgaagctcagtttagcattttagtactggggtgaagtaaactactgaacaaatgcagtgctgtgcttatgtgatttttctgataaaatagttgaggtatccactttgttgttgccattctcatatgcgcatatgtgcttcctgtggattttatagcataggtgtttactaatatccattgaactgtttaaggttgtgcatttatatcaagttacatgattaattacattatgttgtattatgttacaccaaacatgggtttagttctcttttacatttttctttttggcgtgtatcgtttcccattgacattacatcttgtttcttggagcattttggtccagaattaagtgcctgagattatttctcttgttttgaacttcattctgattgagctttgcttgaacaggtgaactcttgacaacaaaagaagccagaagcagg

SEQ ID NO: 43683 - DNA, 898 bp, Manihot esculenta
  Intron number 1 from transcript cassava4.1_028927m (locus cassava4.1_028927m.g) derived from phytozome v7.0 (chr-ID scaffold02994; pos 363122 to 364019 reverse strand)
attctgaaggaaaaagagaatacccgttctatgtaagattgtttcttattaaactacattttttgaaaaattcttcttatgtatggagaattgaaatgctcagaattggaaattgatcttttaagaatcgttttggagttctgtgacttgggttggagttgaatgtcaccacatgtatcaaattcttctgtaaattgtgtgatcaatcacagtgtagctagaactgtattttatttgcgtttcaagctgttgttttttagtttaccttgggctgaatgcataaatttttccttcaccttttcataagggtccttaattgtgcgaaggaaaaaaggagaaatgaagagagaaagaaaagaagataacttttcttttctattcttttgatatcttacctaacagaattaattaattgccaattgttttaattttggttttacattgtatcagtggtttgtatgtaatttaaaaataaattgtaagtaattttaataaaaattatttttgttttcctctattttcctccatttgggttaccaaaatttctcccctttttctctcctcaattattgtccaaacaaggaaattgtagaatttttttttttaacaaaattttctctccattttccttaatccaaacaaagagtcagtgtaaaggtgagtgatcaattatgtatttggcctttatcttgtacctttagctgtatggtgcttattggcgtactatctctcaggacatacaattgaatgtgaaaaaaagaaaagaagaaaaacaaaaaagagggaatctcaataatgtattacttccagaaaaatttagttgacaaaatagtttgagaattatttttctgctgtctagaaagagtggagaaacaattgattgggttcaatcttggaa

SEQ ID NO: 43684 - DNA, 678 bp, Manihot esculenta
  Intron number 4 from transcript cassava4.1_012502m (locus cassava4.1_012502m.g) derived from phytozome v7.0 (chr-ID scaffold03614; pos 4035039 to 4035716)
gaggaacttccatcaccttatatagaggaatatcggtatgcttctgagtttcttggttgttaaaagaggagcacaagtatgcaaattcttcaatttgaatatctgttactggattttattttttccaatttgtattgtcattcgactttattgattaagtccctaagtgggtgccttttgtcttgtttaagtagctcataattttaattagtcgatttattttcaattcatttttttatcaatttaattttagccatagctaactgtgaacaattatgcattatatgagttcccactttggttcaagacttactttctattattctctaaccttcctgttacaaacagatttctgaaaggattctgaggactcaactgttaaattaatttttaacttcattcttgtttgagtttcattttaacttgctgcttaattcttttatattctgtgcatgcttatggtgatttgggttagaattgtatgattattttgtgactttcgggcataaatctacttgcaagaaaatatagcagaactatgattaatttgtggcacatagaaaagaaaatatagcagaactatgattcgtttatggcacatagaaagttggtagcagttgttttttatgcctcacttttcattttcttatattattgaatcaattttgtgtggcagtt

SEQ ID NO: 43685 - DNA, 581 bp, Manihot esculenta
  Intron number 2 from transcript cassava4.1_033320m (locus cassava4.1_033320m.g) derived from phytozome v7.0 (chr-ID scaffold07488; pos 240006 to 240586 reverse strand)
accttttagaagccttcaaagctaggggtggtgcagtaagttctcaaaattactactctataataggaagagcattgagcctccatagtacttcccaatcttgggaagtgaccgaattacaaacttacactttattcatgatctgaagttggtgaatttgtttggttttttggtctattctttgtcttattcctgcaaaactaacttttttgcccactcactttcctgcccataaggctttttgacatttaaagagtatttgtcttagcacttttcatgctcgaatcatgcaacagttggagttttttataattaaaaatgggtagaagttctcagcaagaatatggaaaataattaaaaatgcaataaagtcatgcctagaaaatctttctgctacaatccattttgttctgccctgaacttttaaatggatgcagttatcagacgagaatgcaccacagttagaaggaattattcagcagaattatgagatggcacatgattgtctgaaaaccaactactatggaaccatgttagtaactgaagcacttcttccactcctggaactctctgtctgcaag

SEQ ID NO: 43686 - DNA, 469 bp, Manihot esculenta
  Intron number 1 from transcript cassava4.1_025054m (locus cassava4.1_025054m.g) derived from phytozome v7.0 (chr-ID scaffold01508; pos 373237 to 373705)
gggttccattttctaccatttcttctgaggtactcactcactcctacttcgtagattcttcgttttcagttattaattaagtgttttttttcacatacccatctcctttttaacttgctatattgatcctcccatcgtagattttggtctaaagcactcggctttgttgcctagaaaatgtgtctcgatattcgtagtacatctctttgagctcgagaagttaatcagttatctaattgttttggttgccgagaacatgtgggaaattaacctctaatacccattacgttccagggctttttatatgtctagaattttgttttaagaatctctgatcaacaatcaaatcatcttgtttccgcaactctcactttcctttttggttttcttttgctccttaatcaagtcagtgaccaatagacctggaaattgtctttgtgatcaggaaagtgatacattggcagctttg

SEQ ID NO: 43687 - DNA, 443 bp, Manihot esculenta
  Intron number 1 from transcript cassava4.1_025633m (locus cassava4.1_025633m.g) derived from phytozome v7.0 (chr-ID scaffold05875; pos 263133 to 263575)
actggtaatgttcttcttcttcttcttctttattttactggttaaatggttccctgatttcatttctcggtgatatgcttttaaaatatcagtatgagtacggtgaagtgtcaagagacctgtttcacaagtacggagaagcggcaatggaattttcatttggtcaagtcaaatgggtttcgtttatttgattattaattgaagtatcaaggtcatgagttgattgcataagtgtgaaattaatatctcaatgatataattaagtgactgagatttatccaatagaaaattagctaatgctactggtgattgaatggatgtgatttgattgcactaagaaatcttgcatagtttagtatatgaaattttttttcaaattttgtaatcaagacgaactaattatggtattacatgttcacatgtgttaatgtgtgctgcagact

SEQ ID NO: 43688 - DNA, 518 bp, Manihot esculenta
  Intron number 1 from transcript cassava4.1_010088m (locus cassava4.1_010088m.g) derived from phytozome v7.0 (chr-ID scaffold11028; pos 18566 to 19083)
cccacctaagtcaagagtcaaatatactcctgaaggtgatcttcatctttgtaggatttccttatatacactttttttggtttgtaaatttatttatttatcttttgtctattagttaccttttggacatggcttttgtggtttacaagcagttggagttggaaactttgcttttttcttgcgtgtatgcacacacacacatatgtatgtatgtatatataacttatataaagctgattgtcggttggttacttggttaggttatagtagctttaccctgtttctttgaagctgaaagaattgaatattcaattcgtagtcctataatcctatataaagaagatgttattgtaagcagagaggaatttcaattatttagttatttctagcaggtctaagtaaagaatttaaggctgaaaaccttttcagtctttttctttcattctcttagataaacattgggctatgcctagtctttatttttcaaagttgaggatttgattatgtggacataggtg

SEQ ID NO: 43689 - DNA, 543 bp, Manihot esculenta
  Intron number 1 from transcript cassava4.1_019976m (locus cassava4.1_019970m.g) derived from phytozome v7.0 (chr-ID scaffold00318; pos 12702 to 13244 reverse strand)
tctgcctccacctcctcccttcgatcccagtcgaagtatattttgctttcttttgttttttcatggttttgggggctttttttgtttttcccttttagggtttcttttctgctttctatctattcattcgttgcaatatattcctgaatgtgaaattggtctactggcttcaacttttgtataaataacttttatctttatatgatttcttctttcagtgaacaaattactgaatccctgttgtatatataacatgaacttctagcctgtgatgatggtgtttcctggttgaaacgtttattatatatgtgcatatgtacttaaatggcttcattatcttcgtgtgagacttgaatcggttattttaatagctaacaagttctaagttggtgagttgtttgattgaatttttgctggaagggattgaagattactgtgcttttctggaatccaaacttaatgctgttttgttctttgtttttgacaatgaaaatgtttttgttacaagtgatcggtatcatcaaaaggaaggctttgataaaa

SEQ ID NO: 43690 - DNA, 962 bp, Manihot esculenta
  Intron number 2 from transcript cassava4.1_021467m (locus cassava4.1_021467m.g) derived from phytozome v7.0 (chr-ID scaffold09667; pos 4530 to 5491)
tagagggtatagtacctctaccagaacaagaaagggtaaaaccaaatacaagtttaagtaggatagaactgtaatacctggctagactccggtatcgaaatttctaccgtccggtggaatcttgaatgtcggaaacctctagaaggataaaaccatgttttcataagatgttttaatgtattttatggttttaagcaagaaagaaaatgagttttgtatgaaaataaccttggaggaagacccaggttcggccgccgaacctcaagttcggctgtcgaacatgcatgcatttcgggagtgctttaggcccccaaaggcatgagtgaggaaagtccaggttcggccgccgaacatggcatgcatgcggaggcacgttaggcccacgaaagtggcctggccagccacctataaaggggtccccatgtccgaacgggtgagcttttctccccgttttcggccaaggtgagttctccaccatccctcattgattttgagcttcttcctttgaatcttcatgattttcttatgagttttcacttggtttgaagatatttgagcaaaagagcaagttttgggagcttggagaccaaagagtttatttctccccatctccaagctaggatcgtctttcctctcgatcttcaagaggtaagcttagatccaacctgccttgtatgttttaaacaaattttatgaagatctatggggtagaaatgcatgtttaggttattgttgagtttatgggtctatgttatgtttaagagcaatgtgggttgtttgatgtgttttggttggggtttaagttagtttgagacccctatgtgcttgttggcttgagtttgcatgttgtagactaggtaaatgcatgatggaatggattgggagttatttgtgcatgttggagctgagtttctgtccctttgggagaactcaggttcggcagccgaagggactttcggccg

SEQ ID NO: 43691 - DNA, 571 bp, Manihot esculenta
  Intron number 1 from transcript cassava4.1_001806m (locus cassava4.1_001806m.g) derived from phytozome v7.0 (chr-ID scaffold00560; pos 37985 to 38555)
cctttttacaggaagtaatccattaacttttgaagaaactgttcaagaagagaaatggagaattgctatgaaggatgagatgaatgccatttctaaaaatgatacttgggaacttcatacacttcctaatggacaccaagcaattagagtctagcgggtattcaagactaaacgagatgcaaaaggagaaagccagactcctggcgaaagggtacaaagccactcaaggttggaattttcaaatatttgcagaagaagctcgaagttatggcaccaagtgaaacaagtttaaggagggaatttgttgaatattaaacttgtttccatatcaaagttaagttcaatcaataatacatgttctagaagcataaatttattaaacaatttctattattttcttatcattttttatatttatttatatattttaataataaaatacatatatatgtaaataaaaagtatacatttatttttagtagtaaaataaagtgtacatatatataagcttaatgttgtcacttagattcagaaaacaaaaaagagagaggtatggaagcggcaaagtctg

SEQ ID NO: 43692 - DNA, 796 bp, Manihot esculenta
  Intron number 1 from transcript cassava4.1_024488m (locus cassava4.1_024488m.g) derived from phytozome v7.0 (chr-ID scaffold10963; pos 811717 to 812512 reverse strand)
ggatcttccaagtatgtatccttttttccttttctgtttctcgattgtttctgcatatcaaaattaattcgtgtttttcttttctttgatctttagaagaagatgatgatgaatatactagggcttggatagagagcacccagtaaattttgatgattggattattaattaatttaagtttttattttagacaagttatgtggtttctgtgtgaaacctatagagctagctgatcagtattttttgacccatctagggttctttcaaactgataagtctactatgtacgctaatggaacattttcattaattgattctgttcacatggcctttgttttctgttggaaattaataaaggcgagcagaagctcaaagaacactaaataaagcaaatacggctatacgcaaccactatagaatgatgcagaagccaaggaatgagcccaaggtggatcatgcactcgaactatctagttgttagttgtgtaatataaagtagttcaattttagtgcaaggcaagtgcacttttgggacagctacatctttacacgagaagatcagattaaggtccttaaccacaatggtaatcaaagattaacacatctcccggaaacgtctcatattcgaatatccattgagtaactatttactattttgatgtaaaaaagaaactgtactaagttctgtatatattaccctcgtatgaaaatgtaactaaagcatagtcttttttctttgttgatgatatatatatatatagagcctagcagcgttggagagaaagaagggtacttc

SEQ ID NO: 43693 - DNA, 737 bp, Manihot esculenta
  Intron number 1 from transcript cassava4.1_010753m (locus cassava4.1_010762m.g) derived from phytozome v7.0 (chr-ID scaffold03581; pos 1230315 to 1231051)
tttcgctattttaattcaaagatctagtgtttttggtaagtttttctcccatcttttttcctttgcttagctctttctgaatagtaataggctaagttaatttttgcgtttgattcttttggtttgtttatgtttcaattatcaattgaaggcatgaatttactcagttgttctcttccagaaagaaaaagaaaagtatttttattttttcatagatgaagctcagattgatataggtatatatatataaatatatatgagacccagctctcaaacagttgtgtctatttttattaaacatctagttttttttttatatattttacttttgattttttaaggtcttatttattttccattttttgttgctttctaaaccggtttatactgtataaatttattgtcaggttgaattggaaatgaaatttgacttgcgggtcctttgatatgattttgatataatatttgtaaggaattaagtgggaaggttctgtagttgtagcttcattatttttatttttggattagtttatcatttctaaatgatggtactgtgttgatagcgtcacaatttctcaatttatcttgcatacgttctgcttggttgcaatccattctagatcctgcatattttgtactagtattgtacaattctacttgattcatggaatttgtatctcttttagcaataaaatcaatgggtttgttttgtcaactcattgcagtaaataaccaag

SEQ ID NO: 43694 - DNA, 472 bp, Manihot esculenta
  Intron number 1 from transcript cassava4.1_010855m (locus cassava4.1_010855m.g) derived from phytozome v7.0 (chr-ID scaffold12794; pos 1025463 to 1025934)
gccaggttctcttcttttcttccttgaaatgccgctttcttttgggctgcatattcctttctcttcgcttaaattgctagtttcatatctatgtatcgttggaattttcagatattatatatgtttgttttctagttttatgaatgattaactatgtcctaagaatattaattgaaagaaagagaaaaagacatggttaaggagaacaactctgtatttatttattgtattttatactaagaataccaattaaaaatatatttgcataaaatgtgtataaattttcggaagcaatagaaaatttctctggtggtgtaattgattgacttagctcttaaggcaacatgattatcagttatatgacttagttttcttaagtcttcatcaaaattattaggaagcttaattaatccatgaaatcccacttaaggaacatgttaaatattggacaggagaggcacacttgtacgag

SEQ ID NO: 43695 - DNA, 853 bp, Manihot esculenta
  Intron number 2 from transcript cassava4.1_018642m (locus cassava4.1_018642m.g) derived from phytozome v7.0 (chr-ID scaffold06582; pos 73947 to 74799)
cccaagaagcccccgactgctttcttcttcttcttgtatgtgagtttttccttcttaatcttgtaatccattcaccccttacgttcttattatcagtagataatctaatgaaaacttgacaatttagtttatatgttttctagctgttgatggtcttgaaatatgttcattattaaaatattacattgcatttgtaggatttgctattaagcgcttgatgtttatgacgaccatgtccttatattatggtgacaattgtatacaaatgctaattagagataattctatgaacattttattcttcgaggaacgatatctgtttgggaattgggtatttctgaaatgataatatcctattgttactgaagtaactgctctccaataagcatggtatactttccatggctccatggctatagcttcgcgtttgtttttgtctttcatgcttgtgtttagtttgttatttttgctcatatcattttactttgcttaagcttgtgccgcattaacatattaatttagggtatccctgctgcattcgcaaaagttagaccgacttccatgtgacatcttggaactaagtcgctgggctttgcctgagatccctcgttcatggttcttgtgcttttctagtcctgcttgtcgttgctattctttagcatgttctctggaaaatcatcagtatttccttagttgaacttgttcttgtaagttttaggtgactgctgagcactgaccagttctgtttgatataatttcaaccacaaaaacctttctttggcccctattgctcactgaattttactttgaatttgaagggaggattttcgcaaggattttcaagagcagaacc

SEQ ID NO: 43696 - DNA, 681 bp, Manihot esculenta
  Intron number 1 from transcript cassava4.1_010145m (locus cassava4.1_010145m.g) derived from phytozome v7.0 (chr-ID scaffold03859; pos 126624 to 127304)
ttgttttctctcctgttgcgtagagtttagccaaggtctgttctctctgctgtcacttctctttttttctgtgtagtttcattcttgggattttactaacatctgaatctgataacttggttatgtaatcttcatggctcttgtgaaaatgggttttgaaatttttgttttgagtcgaatattattgcttgttatctcttgatggtttcttggtagaggaactaatcagactccctgattttcagtttttggttttgttttcttttgctgctgtttcatctaataatgagttttgtctgttataataaaatctaaacataaaattatatgctcatgatgcgtaatctgtaatgacacgagctcaaccaagctgctcttattctttcaatagaattcttgtagtggattttcatttgtacataatctatgaagcctccctctcagtcaagaaaacaggacaagtagcagagttttttttgaatctttcatttgccatcattttccccatccaaagcagcacacggtgcgcaattgcaggggattctgagttctggatgttctatagttctttgtcttcattattttgataaatctatgaagtgtgaaattgaagctgttctaataacctcgtgtggaaccttttcagatactgtggtgaggcacaaataatcagtttgggaa

SEQ ID NO: 43697 - DNA, 900 bp, Manihot esculenta
  Intron number 2 from transcript cassava4.1_004279m (locus cassava4.1_004279m.g) derived from phytozome v7.0 (chr-ID scaffold07859; pos 195729 to 196628 reverse strand)
cttactcaactagaggtaagctcttttcttcactagtaaatttgcccttaatctaatatgcttttatttatcttgcagcctgaagcaaatcaagtattgttgtcaaatatttgaagtccttttaattgcatctgctggtcaaaccttcaggtgttcagtagttttcctagcaaccgattgtcagactctgggaaattcactcttcattatgcaagctatttttgctttcctctagaattaaatcattgaaaataatttttgagagttaaagagcttagcattcttaggttttgtggggaccttgttcaatagagtaatacctgaaggctgataacaatgccctatattaatcaaaataatcttctatatagctcttccaaagccaatgcaatttattatctaaatctgatttacattcctttctttgtctattgtaacaaataccacaagaaacagtgctgttgctgaaagtctgtagaatagcaattgaagatgttgggttggatgctaactgtgtgagcaatgccttttatgccttactttggcagagtagtctggctcccctaaaattcgactgtaatccttatgtgtagcctccaattcttaagaggttgaggcctgataactgggggttactgattctgttttgtttctgccctttcattcgtgttttaacctcttcttttgcttttaaatgtctgctttactagctgcatgcattgggttttgacatgtttgaaggaacttggtcgtaagagtcacattaagttgcattacactagaaattgcaattctcttcattactgattctgtagttcattattttatttttcttcctatatatctgtgccagtaaatatttacaatttggatgctgtcttaaactgtagcttcaagttg

SEQ ID NO: 43698 - DNA, 895 bp, Manihot esculenta
  Intron number 1 from transcript cassava4.1_004279m (locus cassava4.1_004279m.g) derived from phytozome v7.0 (chr-ID scaffold07859; pos 197476 to 198370 reverse strand)
gatccatttgatttggttcgcaaaggtatattactctcccttttagatcttctttgttttcataccaatttcttgttttttttctttttcttaagatggttttgactttttggtttatgttgttttctttgagatctctgtcaatcgattgcctggataaagcgagcttcttcttctgtttgtactctcttgctcttttgattgttttagttattcataggggttggttttctcagattttgtgcaaaatccggtcttttttatttacttctcagggtttttaattttttttatggggattttgttgctttactttctttgttggaaatatagctatttaatttcttctatttttttgagggggggggggggtggagtggagggtaaataccattaattcgtggattatgggtatttctttacttcgcgcaattcactcatattcaatgcaattagccttgtgttttcttaagttgtaatgttttgatttgggtattactgttttttgtgcttgacttcttctgtaacggtatccagttgaggtcgtttgctcatcttcaatggaataattggaagtgtctttttatgctataattaaggctcatttgttaaatgttagtcaacctttttgtgcttgtttagcgtaaataagtatggatggcgttgtgtatgttgttgaagttgatgcataaattcttccaacacatttataatagagcgtctgaaatgagtgtcattgagataaggttgttgaggtcatttgtagcatggactggactctatgcatgtgagcatgtcttggagtatagctcattggtctgtttggctgtttagtataagctattgaaaccgttttgcaggttttggataagtcttgctgcagctcaaggttact

SEQ ID NO: 43699 - DNA, 445 bp, Manihot esculenta
  Intron number 1 from transcript cassava4.1_004922m (locus cassava4.1_004922m.g) derived from phytozome v7.0 (chr-ID scaffold08359; pos 2366593 to 2367037 reverse strand)
tattgattttggactctcagtatttttcaagccaggtttgtgcctttgttgtttcttgtcttaatttttataaagtattaatttattcttatagttgttagaagtttgctttatggtgttctgggtggtcgctgagcgttgagttgtgggtgtggacgggtttttgtttgatcatgggttttggctggattttgtacttgaaccttgagtttgggttttggatttcatgctagaactttggagaacagttgacgcttgaccttttgggttgttacttcgtgtggtttgttagattattcgttgatattcgagtttgagggaaaatttcctcagttctcatgagattgtgtgcgtgtatatgtatatattttaatttggttcgagttatgaggttgttatatttgtcacaggggagaggtttacagagatagtggggagtccatat

SEQ ID NO: 43700 - DNA, 587 bp, Manihot esculenta
  Intron number 1 from transcript cassava4.1_002848m (locus cassava4.1_002837m.g) derived from phytozome v7.0 (chr-ID scaffold00218; pos 154167 to 154753 reverse strand)
ggaaaagagcagcaggttagaggaagggcaagaagcacgtggaaagtatattctagaaaacccaagatgccagtagatgagctggcataaattctgttataccagaaagcatgaagcttgtgagaagggcatcaattgtgtataaaaataatagagtatggtagaaggaggaagaagaagaattaatgtctattaagcagttctctgttgggagagattgtttactctatcttttcagcgattaatagaatttctttcctctggtgattttctttttttctcttttaatccgaccttctgaccgatttctctcattctcttacactcttctaccttacaaattcctttctctatcaacatcacacagagagattctcttggatttatattgtcaattcatctatgatcaaaatattgttcattgttatttaaatgtctctatgagtttgaagcttttgcttgttgcttatattggtgttttcttttgtatttacacatttatgtattataattttgtaactttttttttggtttttttttaaatttttgtagctttctgccttgaatcaattaaggaatatatttgg

SEQ ID NO: 43701 - DNA, 1014 bp, Manihot esculenta
  Intron number 3 from transcript cassava4.1_017829m (locus cassava4.1_017829m.g) derived from phytozome v7.0 (chr-ID scaffold12525; pos 781661 to 782674)
gccaaggctgttgagaaccaggtaatttagttgtattgctatctcattttcttgatattcattcctgaattattgtttaccgtgccttgattatttaatggtttttaggtgggttgaatagttgcgaatgttctgaaacctcttcaaattgaccttgtttgattttgtagacacgaatacttcttttgttctattttatatttatctttttaatctattattgagtaacttcatataaaaagaaaaattctatcaaaataaataaaatgggcttcctaagtcaaccatgtggtggtgaatttgatgagatccttcattctaaaaagctctcgacagtgaagaagagctgacatctcttttcaatgaacttgtaaagtttcaacatctttagtccgttattgttttctattaacttgatgtcatttctacttgtcttactgattgtttcctcattttattatttgcttatcgcacatctttttttcccattttattatttacttgttgggcatctttctacatggtctccttttcgttggcttaatatttttaagattttgtaacctttcatgttttaatcgtgtgtcttgtttcaagatgtattcataaaatctgattttatttgggaacatcataaaacactagattttgtgcaagtcaaacataatgcaattctcaagtccatctggacaaatcatcgagtttcctttgctgtgatgagctgctaacatgtaaggagaactctgcaatgctgagtttcttcgatgaaatatacttgttacgcttggcttctgagctttgagatcttttattaacctgtatgtactgttatcattggttgtataccaattgcatctggcttgatgtgtatggcgactgtgttattttattcatttgttgttcctttttcttttattaatggtcgactaagtgaagcctagctaggagctcactactaatttactcggccactcctcagtgtttgctgtattcttcagtagacataggcagtgt

SEQ ID NO: 43702 - DNA, 925 bp, Manihot esculenta
  Intron number 2 from transcript cassava4.1_010650m (locus cassava4.1_010650m.g) derived from phytozome v7.0 (chr-ID scaffold07859; pos 543385 to 544309)
ttcaagttggttctgggcaaaaatttcaagtacaggtattttttgcattgcaaatgaaatggaacaatatctacttgattttttgtctctgtgattgtgaatgggcattagtcctttcttattcctttagcaattagcagttctatggccatgaatgagggatggatccagatttttttttctttttgtattttactgtcaatagacgatttgtcttttcttttcttttctttttttttttctatggcatcagtcaccgttccttatgagtttccctatgttgatagagttgactaactaaccgccagtttgaagatgctttaaaaaaataacattttctttccggaaacatcaaaatgacaaaataatttttataaactgattttctataaagctatctaaatgatatatttttttcccctcacaacctcaatatcaaacaacttaaaatagcaacaaaaatattgagatttaatagaaaattcaactagaattgaccaaattctcacaaagttctcaaataaataaatcaataataagtggacaataacagcacaataaaaaaaacaacttaaggctatgtttagtacaccatgatataatgtaatgaaattaaaatttatattgagatttaatagaaaattcaattgcattatatttcattacattgttaccaaatgtaacatactgttaatgggatttggaaattaagaacttttgatttcttaaaaacaagctatggctagtcatattcagcttttctcatgtgatgtgaaaacttataggcagtcaatagttccactgatatttttgcatgaacatgatcataccaaaagccttttgctttgctattccataaagtgattttgtttatatgtgaaaaaatgcagttgttgttatttttctgacaaatcaaacaccttag

SEQ ID NO: 43703 - DNA, 728 bp, Manihot esculenta
  Intron number 2 from transcript cassava4.1_018394m (locus cassava4.1_018394m.g) derived from phytozome v7.0 (chr-ID scaffold08425; pos 87174 to 87901 reverse strand)
aagcttggaataccaaacctggagctccaggtttgaataatagatcttgattacatatttacttttgttctgtttctttatagctcttttgacatttacaacataatttttttgaaagtatttttcaggggagcttattcttgtgtgagaatctgcaattattaaggctccatattgcaatgagtttcagggtgaaaagataaaaaaggcttttcataaaagcaatatttttagatgttgaaataagaagtttagaaagggttgttttcttcttttaatgttcttatatctaaaatatttcataattattttttactaatttttagtaatttgtaaataatattttaaggaagtgttctatcagtacctattgtaacagaaatgcaacagatcttaagtttactattattgtatgccaccttcatttgtctaataaaattttagaaataacgtagtgcttatccccttattcaagcctaaagagtctttgattgaatgcacgcatgttatatcacaattgctatagttctgtttttagttgtttaagtctgtggattgagatgtactttaataattatgggattatatttatgctctgttttagtcagttgattgattaatttactttgataaagggaataatacttcagcttaaacttatgatctttatccaattttcatctccattaacagcttgattcatctgattcatcctgctgtattttcag

SEQ ID NO: 43704 - DNA, 574 bp, Manihot esculenta
  Intron number 1 from transcript cassava4.1_018394m (locus cassava4.1_018394m.g) derived from phytozome v7.0 (chr-ID scaffold08425; pos 87938 to 88511 reverse strand)
ggatttttagctctatatttgcgcctccttctaaggtagtacttcacttgtttaattatcaggtccttactttttttagttgattctttactacttgaaattttttttgtttaaagaaaagaaatttatggcactcatttgatgttgctgagatattctgcattccttgactttcaattttagtggagggaaattctttgttcatggtttctatgaatcactggtcctgtttaggggttttaggcaattattattctatttctggtttgcttgttgttttgattgtgatggacccctgaggtttatctgatagtttgttaaatactgataagagcagttgaagatttgaagataagtcttacaatgagacgtgacatggtcttaataagttattagagtactggataaacccccatgtttttaattctcttcagccatgctctgttatttacctttaggccacttgttcttggaacatgagagagagattttacttgactttatctgtagtgccaaggtttgaaatttctgattttgatgttggttcaggtattggggagagggttactgcgat

SEQ ID NO: 43705 - DNA, 765 bp, Manihot esculenta
  Intron number 3 from transcript cassava4.1_005982m (locus cassava4.1_005982m.g) derived from phytozome v7.0 (chr-ID scaffold03604; pos 270133 to 270897)
tgctgcagcgtaataatctttaaaacttgatctctatcattgtaacatttgcttgacttatttatttatttatttttaaaaaatttttctctgttggttttgcatatataatttcatagagtgattaatttttttgctctctctctctctctctaaaaatgttagaactttttattgatagttgggttaatgctaggaatttgctcccccttggcttagttaggtttggttattacttctattacgaggtagggaggagggacaaccaaggaggttgtgaaatgtggcagcagtgctacagaagccctctggccatagttgaagttcttaataactaaaacagaatctacatttatgagctcattgtacgaatgattctgaaacttgagaattgttttttgatatttgaccagtcatttcttcagattatggaattacttcagttgcataaacttattaaagttttaacaatatttcaagtttatgccttttgttttggatggatgtgaacaaattaacatatccataatgccattcatccccaatttttcacttgttttctggtgattcatgtatttttgcatttttgcaccttattttgattttatttatctgctattaccttttatacttcattccccaattgtcttatcatggagcatgtcttcactattcctgataatggcttgacagcttcacttgattcttacacccaatcctttttattgttcagggttggttgcattcttttgtccgttggtcagg

SEQ ID NO: 43706 - DNA, 948 bp, Manihot esculenta
  Intron number 1 from transcript cassava4.1_018823m (locus cassava4.1_018823m.g) derived from phytozome v7.0 (chr-ID scaffold04890; pos 158041 to 158988 reverse strand)
ctcttcttctctctcagtcccttcttccttctcaggtagctgaacccatctcgaattatgcttcaattgttgttatttttatgatattctgttatgggcgtcctcggttgttgttatttgtgtttaaattacttcaatataatgattatcctatgggtttgcggtctctgatttgagtgggtgtctcccttctcttacattttacttttaagagctaaaatggagctgtaaaaatttttattcgggaacttgaatgatgattggaaactttacttgaacattgcttctggaatggttttggttagcatagaagggtaattgtaattttgtgggataataattgaagtaaattttggttcttttcactaaaatcttaattttgaattgctaaacaagaaacttaggataggcagatgttggaagaataatttagaactcactattactattgtgcttgcggcattctaatacataacattataatttcattaattttaagaaggtatacaggcatttaatgtttatgattcctttttctgtagcatatgttgaggcattgctcaaaagtatggtagagcatatactactgtacttctgttacctgtacagcattctccttgtatagaagaacaaatatgttgaataacatgacattaagatttcgtttgcaatcatttgcactgctaactgcgtaaggtatgaatcacttgtttatggagtccaagtttctgctgtttcataagaaggttgtcatgcactgtactagctgcataagtttaatccatttcagagcttagtttagcatgcttaatagtggcagaagaattggattgaaaaacttgaggagttaaaattccattgcttacacttaggtgactcactgttttgcaggtttatctttggggttggatttgaattctgacaatggggtcagaaagggaagaggct

SEQ ID NO: 43707 - DNA, 464 bp, Manihot esculenta
  Intron number 1 from transcript cassava4.1_005503m (locus cassava4.1_005524m.g) derived from phytozome v7.0 (chr-ID scaffold05875; pos 618630 to 619093)
ggggtgttcaggtacattcgtctagctagatattcatttttattattgtcatatagtatatgctgtactggccaaagcaattcactgatagcatcattagagtgcgagatcagaaataaatggattgggcatgagcaatagttttacttgatgaatgtaatgtaacgatttgcatattgattccaagtgttctgttaaaaaaggttgtaactattcctagcttagcatttgaatttttaacttatttagattgacaacattggctgcttcatcacaatctgcaatctcatttgttttccaaacaatcgaaggagaactcaagactttgtttgtatatattcaaaggatatatagcttccatcttcatatggtcagtattgtacacagttttttgatacgtaggcataaatttggagggatctactgcaggttgctaactattgccgtgatcgaatccattgggc

SEQ ID NO: 43708 - DNA, 441 bp, Manihot esculenta
  Intron number 2 from transcript cassava4.1_002789m (locus cassava4.1_002789m.g) derived from phytozome v7.0 (chr-ID scaffold09517; pos 94488 to 94928)
gagaggctcgaactgaggaagctgtgacaaaatatgtgcgactgtcatctattatttgctatcatcatttttgtgtggttatttttattgcctgttgttagtcactcatttgaattacctctcttcttcatttaatggtctgtttcagtaaaagatgaaaccattttgagatagtgatacatgagtgctacttaatcctgccaaaatccactagagaatttcatttaattataaagataattatggacctcaaagatcctttgcattttgttttcccatccaaatacactagacaagaaatgatgtatttccaagggagtaatacggttatatactatttgaagtatacattgcaatctcatttcaatgtctttctattcttagtcttaagtaagatcttgaactcttttaaatgctgtcttttgtagggtcttgaacttg

SEQ ID NO: 43709 - DNA, 988 bp, Manihot esculenta
  Intron number 1 from transcript cassava4.1_007892m (locus cassava4.1_007892m.g) derived from phytozome v7.0 (chr-ID scaffold10305; pos 155148 to 156135 reverse strand)
tttcaactgtgagttttcttggtttctaatggctctctttttcatacatttttgttctgttctctaatgccattttttagattattttattctcattctaagtataattgaagttctatttgttgagatttctgtaattttgccaaggaactttgcctggtcaattctgatggattaagctttttcattttcactcgggttacttccctcaacattttggattgaattctttgattccttctttgtttctgtttctcctctgtaaattgcatgttaatgattttttttgggtaatgaattaaaatggagcaaaattaggtcaaactgtgggatttcttgtgattgtcttgattgacatggggaattgtgagtttttcggattggctactttttcagcatgtatttatataggctattgggctctcatacttggtctatcacattaacgattggctaaatgcctaaatctagagaaaactagaaacaatgatattattgaaataaataaataaaattgagtgattttgttaacacattgaaattcagtgattaattttcgtgaccatgagcaaaaatcacctctactctagctttgttttttcctggctgtcataattattttaatgaactgctttctagaatcacgaactcagatatggcatggtgtttttttttttccctgttttgagtgataaatagatgacttcatatactaaggttcttgtcgattcttctggtgttgagaaattcatggaaatattctcttgaaattttggttttcccttatttaaagatctccttgcatttttcattagtcattaagtggttaaatattttaattgtactggattgaaatgtaaagggtacatgatttaagacatgaaggtgaacgttattcacttgcttattgagtatgaatagggttttggcactggggttgtggaatgttgacacctaaactgccatgagccaggctgaagtatcaagg

SEQ ID NO: 43710 - DNA, 443 bp, Manihot esculenta
  Intron number 2 from transcript cassava4.1_014793m (locus cassava4.1_014793m.g) derived from phytozome v7.0 (chr-ID scaffold04851; pos 695087 to 695529)
atttcttggttcattcttttcgctcgtgacatttggtaattctttcttttttttttctaaaaatttactttccttgttttatatgctatttgctttcttttattggtagtgtttcattagttataaccgctgttaagtgtttcttgggatcgttcatcttgttaaaaatttattaacttcaaagaatttcatcaccagttcgtattcatagggcatcaatattggcatcctgatttatttatttgatttgttgagggtcatacgttcagataggatttattttattgaattaattatccaatgcagaaattatgtaggagtgcaaccctttagttcattttgttttcccttaaatttatgaatcatgcaataataggtcgtgatttctaatctattaactgaaagcattattcttgtctgcaggaacatttcttcagagaagt

SEQ ID NO: 43711 - DNA, 712 bp, Manihot esculenta
  Intron number 1 from transcript cassava4.1_027902m (locus cassava4.1_027902m.g) derived from phytozome v7.0 (chr-ID scaffold10305; pos 587168 to 587879 reverse strand)
gatttcagccaggtgagttgactccgcctcacaatttcaattgctagcttagacggtgttgatttttttagggttttcttgtaatccttttgtgtataatgttatgcgtggcattttaaatcgatctgcctttccactggtggattttgagctttccctctgtttggttcgcggcaaaagattgataaaatttacaagaaaggaaaaggggacgagactatagaaaccatttagttttgtgttggtgctgaagttcgtaagtatagaattagtatgagaactgtggtgtaagtttcaactgacaattgtgatattgagaagacataaaatgaaatttgtgcacgtatcctagtttcaaatttgttttagtttagacgtatcaatgaaactatggaaacgattttccttttttggaatttaattaaataagttatcgaagttgcagttgtcacttctgagaatttgtgctcctcaatttccttttcgaaattaactaaatgaattctataaatttgcagttctacggtgtctgcattagatggactgtacagagattctactggcagtctggcacttttatttttctcttaataattttcagttttatgagataggagtgttattgatgttaaaaccctgatcaggactaatcataagttctgcttctcaaatgatatattttaacaatgttgacagcctcctggagagaatt

SEQ ID NO: 43712 - DNA, 441 bp, Manihot esculenta
  Intron number 1 from transcript cassava4.1_027346m (locus cassava4.1_027346m.g) derived from phytozome v7.0 (chr-ID scaffold04616; pos 139829 to 140269)
gaggaattttaaaacagaagataagtaaagaaaatataattcaatttacgtcaggacattggaattcagcccaattaaattattctactattaaaaaagaaattttgagtattgtgatttgtataaataaattccagtctgatttgttaaatcaaaagattttagtcagaattgattgtaaatcggcaaaggatgttttaaagaaagatgttaaaaaccttgcctctaaacaaatttttgctagacagcaagcaattttaagtatttttgattttgagatcgagtatattaaaggtagtaataataatataccagattttctgactcgagaatttttacagcaaaatgggaagaaagaagaataaacagaaggaaataaagtccagctccagttctacatctaaagccatttccgaacattcagaagaaatcagtaaaacc

SEQ ID NO: 43713 - DNA, 424 bp, Manihot esculenta
  Intron number 1 from transcript cassava4.1_014924m (locus cassava4.1_014924m.g) derived from phytozome v7.0 (chr-ID scaffold12794; pos 650635 to 651058)
gttatcacaggtgaacgcctataacccataatctctctctctctcttgttaaatttgatggtcgattgctttagacgaaggaaaatagtttgagtttattaaaaattgattgtcatggaagattaaacatttaaaccgatgtttggctgatgaggaaaagaaatggaatctgttttttttttttgtcttgtttatgaattttatagcccaaaccctagcagcttactataattgtcatgtttaaataaatgaattattcactttcctgaacaatatatatcttgcatacgctttctgtcaatacaaggcatgatctttcttgatccattttctctcatagtgtgcacaggttatatattctgaatgttatcctgttgttcacctctcaggttgttccagtacactcaaggtgccaatctcaatt

SEQ ID NO: 43714 - DNA, 768 bp, Manihot esculenta
  Intron number 1 from transcript cassava4.1_015538m (locus cassava4.1_015538m.g) derived from phytozome v7.0 (chr-ID scaffold11581; pos 981152 to 981919)
ctgcttggggagcttaggtgtgagaaccaagtcaggtatcaacattctgtgtcccagtattttaaaattggtttcttatgatgttgaagacgcctctccaatctctcaccaaagagttactgctattgttttctttgtttttgcttacttataatatgttttcatgtgtttcaacatgatcatcaccaatgagctagatccctgagacctgacattctaataaaactttgaacacactagagatactctgtggtgcaagaaggaggcgtggaatttcttgcaggttaaaattgatggaagtacagtttgcagtaatgaattagaagccacattaacctttttttttttttgggggggggggtataccataagtttgttaacctggagaacatactggggttagtggactataaagactaagacctgccttattttcccatattagagaaacttttttttatcaaaatgaaagaacatcaaaagttagcgaggcagccttgttgatttttggaatttataagctcaaatatatgctcgtaccagaagtatgaattactgatgcaatgcttcaatcatttagtaatatgaatttattgtacatactcttgaaaatccagctgctgttaagaaaagtatgtctttattatttagatgtgacagttgtggaacattcttattaattcggttattgcacattcttttgggattaagactttgttattcgtgtaatcagttgagttggataagcaaagttattgtgatcttaaa

SEQ ID NO: 43715 - DNA, 448 bp, Manihot esculenta
  Intron number 1 from transcript cassava4.1_014812m (locus cassava4.1_014812m.g) derived from phytozome v7.0 (chr-ID scaffold11287; pos 22714 to 23161 reverse strand)
gggcaaagaatcatcctcaattgtcgatatcccaggtataaatctttttcccctttcatcccaacaatcatctagtatcgttatgatgagatcataaaactatttcattaaaactatgcttcaaaaatagttttcaataaaatattactcttttcttttacatcataaagcggatacgaaagctcctacagctccttaaaacctctaatccaaacgctttcttaatatggtaaagaactccggaacgaaaattcaatggtaaaactcatgaaaaagtgtttatcacattaatggcaaaagtcgagaaaaataaaaatcaaaactttgaaatcaatgctgtagagattaaataggaattcttccaaataaaaaacacacaataacttagctagttccccctttgtttgtgacaggaattactttaggtgtacccacaagtacgatcaag

SEQ ID NO: 43716 - DNA, 356 bp, Manihot esculenta
  Intron number 2 from transcript cassava4.1_004119m (locus cassava4.1_003622m.g) derived from phytozome v7.0 (chr-ID scaffold05340; pos 39598 to 39953 reverse strand)
agagacgccgcaaggaggaggagaaggccaaacaggtattttgattttaccgccccttcttgggttttctgctttattctttgcaatgtttaacttatgtgtttgtttcttctttatattttcagtaattaggtaatgataattctctctatttttttatggaagcaagatagtgttgagttagtctaagacgctattgattttgaactttgaagctgattgtagattgagtttatcaatgttgttgtagtctaatcatattgggctacgtgtttctgttatgtctcacgaagaaaatttacatgtgtaacttttctccaggctgcagagagggctagctccaaggttcagaaatc

SEQ ID NO: 43717 - DNA, 525 bp, Manihot esculenta
  Intron number 1 from transcript cassava4.1_011688m (locus cassava4.1_010846m.g) derived from phytozome v7.0 (chr-ID scaffold06582; pos 646930 to 647454 reverse strand)
tcccctctggtatgctcttttttttttccccctgctcaattactagttttctcttcaaatctgttcggttttactttgatggtttgcttcgggttttgggatatcaatcctttttttaacgattttgatctaatccttcaattgttttcttctttatatttgatcgcggaaagagttgattccagcactcgaattctaggcccttttattaacaatgttatgtcttcttttaatcttctacaggactctgtattgagtataaaacattaagaaataagaaatttcattccgtttattctagcttactttacatgttttggatcttacaaagaacactttgttatattcattatttattgcttcctgcttcatatagatgtttcctgctgcctatcattattagcctgttgaagtgaagtgctgtgactttatttggaatcagtttcttgctctattaattttttctgacatatccctttccctttcctagctgagaaaacaggttctactgaaagcaaaatccct

SEQ ID NO: 43718 - DNA, 626 bp, Manihot esculenta
  Intron number 2 from transcript cassava4.1_028557m (locus cassava4.1_028557m.g) derived from phytozome v7.0 (chr-ID scaffold03942; pos 390752 to 391377 reverse strand)
ttgaagtgagaactatgtctccacatcttgattatgttgcgacatccaaatggcaaatgcatttagtggatcaatgattcctatgatctaagagctttgtgtttactcttttttcatattagatttttacaatttttccccttttcgatatgatggttttactctttttatgataactatcatcacaaataaggggttagcttgtaatgcacgtcttagtgagctagccaaaggccaatagattaaccataatcataactaaaattttagtcataatgcaggagttgtattgcatagttgtagaggagtatcattgaatagttgcctggactgttttaggaaattcttttacatggtttgcttactctatttaattgtttaaatgattcgaagagtgaacttatcattattcattatattagaaaagaaaaacaaattcaaataaatgcattatgtggtggagttaatgatatgttatcaactcttatgtatttctcctttttaacacatgcattctcttcataaactttgcttcatatgttgggtaccaaattgccaatttagttttttaataatttagcctcatgccttatgcataaattatttcctgcagattggtgcaaaca

SEQ ID NO: 43719 - DNA, 703 bp, Manihot esculenta
  Intron number 1 from transcript cassava4.1_022822m (locus cassava4.1_022822m.g) derived from phytozome v7.0 (chr-ID scaffold03581; pos 735304 to 736006 reverse strand)
ttatacctgaaatcaaggtatgcggtatatgcctctgtctttctatattatatcctgaaaatccttgattaatgcaattctgaaaaaatttatctcaggcgtgagttaatgttagttctgccatttccctatcctcttatgtttaaatactaaatacactcattttgttctctgatttattgcataatctatatttgtttgttacttagtgaaggataattgatagtcctataatataccttctctgcggataattctttcttctcggcaatagcagtcattaggaatttagaattcgtgtatttgtacggagttcaagggttcttcagctaattgtatggcatgaattaacatttctattttagttttgaattagaaaaagagtgacaaggcagatagattacttgggaacttttgaggattctagctttcttcagtttttattatattttttaaagctttcttcagttaattgtatctcatggaccaagggtttcatattttaattttggatttgaaaaatagttataagaaagaaatacatttattatggcttcaagaaattctcttctcgactcattcatagtttgatccaaagaaagcatatgcccttttagttcctccctttcagaaagaaagaaacccattaaacatccactattttgcaggccaaggatttgagaagatcttacggcctaagatt

SEQ ID NO: 43720 - DNA, 385 bp, Manihot esculenta
  Intron number 1 from transcript cassava4.1_029900m (locus cassava4.1_029900m.g) derived from phytozome v7.0 (chr-ID scaffold03436; pos 113107 to 113491 reverse strand)
tgggtattgcagtaccacaacagcctccattagctgtagtgttctttgcttgcttggatatttgtttcttctcttgtattctttttgttaaccttctatggaaatatttatttttgtcagttgatggttaaattgtaattatatctaacatttgttcaccactgtagatgtagctgaggaaaattgtactaacgttctggcaatgtaaattcatatctgaggttgctgacatttgattgctgtatcctctacgtgtgataattttgtcagtactacgctgtggaggggctctaattgaatgtattgaaatgtatcattttgcattggaaatatggaattttgtaaacttttgttgttgtgtaggttaattttcttgtaattttcc

SEQ ID NO: 43721 - DNA, 566 bp, Manihot esculenta
  Intron number 1 from transcript cassava4.1_016513m (locus cassava4.1_016513m.g) derived from phytozome v7.0 (chr-ID scaffold05875; pos 250463 to 251028)
catcgttaaatcgctcgagtcttctctagccactggtaattttttttccctttatgattgttgatttcggaaatattatggttttgatttttcaaagcttgggatttttttttcttgaacgggtataatctgccgataaatgacgaatataactctggaaaagcaaaacttataaccattgcataatgattggcctgggattagagaaatttgtatgtctattcttggattttgtcttctgatagtaattgacttacaagctttttttggtcaaggtgtttgtttttgcttctgttttgttgttcattttttttatgggactagtaatgatctgtgagaaaggtgttgataatgaaaatgggatgtatggaaacccaaacttcaattttcgaagctcattttactcctggcatctgccacgagaaatgtcagttgagtaattttgtatatgtcctggtagatagtttgctgttgtctgcctggcaatcttttatgcttttatttgtaaaagtaggctgtagccataatatctttaataatttttggctgcaggtaatttgcagaag

SEQ ID NO: 43722 - DNA, 966 bp, Manihot esculenta
  Intron number 1 from transcript cassava4.1_006634m (locus cassava4.1_006634m.g) derived from phytozome v7.0 (chr-ID scaffold03574; pos 4265 to 5230 reverse strand)
ctccgctgcaacacaggagcaagaagaattacaaggtaaaagttttgatttctttcatctttttggttttctggctcatgagcaattttgttttggtgtttggtgatatgggtttgtgtttttgcgaagaacacgagcaagaaggattgcttgataaaatcttgatttctttcgtctttgtctgttttcttgctcatgggcagtgtcattttggtgtttggttatatgggttgcttttttgttaagagcacaagagcaagaatggttgttaggtaatcgtcttttttgttttcttactcaataggcaattttgttttggctttttggtgatatgggttgtgtttttgttaagtaggcttcttgaaatttggggtttagctcatacatgattcagtttgtatgaacaggtccgtggccgtcactctctatagatccatggcatctgtttgcttgagtttggtattcgtgatactatcccgttaactcttgaacatttgggtgttttgggacgtggctagacatttcttctaagtagaattgtttgtttgataaggttcattttctgcaactgggatctgtaatggagtccatagagcaaaagttttaatccccatgtctctccagattgttttattatttgtttgttttactaaatttcaaaccacatatatgataaatggaaaccttgacccaagatatgtataattgaaattaactttgggtgtgtgttgtcaaatctagcttttggggtagcatacagtcagcaaactgcatacgtcttaattaaatttgcattgcaaatttttagtttaacataataattcgtatgtcaagatttattattatctttgagacgagtgattgtttctttagattttgggtggttaataaggttttatctttaacttgtttgaattgttgtgttctgattcttattttaggccatcctttccatagcatataaaa

SEQ ID NO: 43723 - DNA, 867 bp, Manihot esculenta
  Intron number 1 from transcript cassava4.1_022661m (locus cassava4.1_022661m.g) derived from phytozome v7.0 (chr-ID scaffold10963; pos 525360 to 526226)
tcattttccagctcaaaaaatctgtggagcttagggttagtgattgtacattcatttcatcaacgggtttgcaatttattcccattaattttatattttcagttttggttgatacttggtagttggcttttgattcatttatttcgggctaatagctcatttgatcccctgatgaacgttttccctctcaaagtggtagtagtttccacaaattagcagtaattattctgcttttctgtctatatatgcaatcactattgagatttgctttatcaatgctttaattatcataatatactgaatcacatatttcatgtacggtttcgcacaacagacaagaaaaatcaactggacatactgttacttatcccatttttatcaacaaaatgtattacaattaaacttcttgccttcctaattagacgttctctaatgctaattttatgatcggatttgttcatccgggatttgaaggttatgctttcaaatgcattttttgccctttaacttattcaaatttcaaagtgattgcatattaattttagtaaacatgtttaacataattgcttgggtttatcttaataaatgctgctctgtttgtggggcttctgttccgttctgatttaaacacaaacgttacaagcattatgttatccataatttactgcatatttgatacgttggattgtaatgaaacacaagaaaatgacttatagtccatgttctacagaactttatgcaattacaatacagtgttatgccaaaaacattttttctgaatatagaattcgttgtcataagaagcttccacgacacgatattaactccatttagcattgccgtttttaggatcaggtgctcttaaga

SEQ ID NO: 43724 - DNA, 786 bp, Manihot esculenta
  Intron number 1 from transcript cassava4.1_017426m (locus cassava4.1_017426m.g) derived from phytozome v7.0 (chr-ID scaffold06825; pos 49050 to 49835 reverse strand)
aggtatagtagtctttgtccatgatttgctcaactgtcctcatgcataattggttctttaagtggaatgattgttagggttcattttgtccttgaatttatgagatcgtttcttgtttctttaatttaattgcttcttgctgttgtggtttggccttaattacgtatgacagtcattatatttgacttttaccttttattttcccattgcagctggttggagcttttcttagatggatttatattataacctgcaaaatctatatgtctatgcgtatggaaagttgcaggttaagtatttaaataagatgaaaacctttgttttcactcaaaaatttttattcctgtttcactattagatttcaactgcgccgaattgtgtgaatacaagagaaaaatgccgataaatttgataatttacataaaatgctaacaatatactattaaaaatattagagtttgcttctcacacgataatgcttacttttttagtagaattacccaagactggtttgggtgattgaaagaggaaattcaacaaggaattcctcctttatcctccaaggaaagatcttacattgcttatacattttccctattcttttccttgtcctattctccttttggggtttagcaaaaaaaaaggaaaatactggtcctagaagttcgaagttgaattttttgatgtgcagtttatatatggtattccaggttgtgtgtaattttagcactaatgtagttgagagttgagacattgtaaatttcgataacaggtggctttaaatca

SEQ ID NO: 43725 - DNA, 273 bp, Manihot esculenta
  Intron number 1 from transcript cassava4.1_029711m (locus cassava4.1_029711m.g) derived from phytozome v7.0 (chr-ID scaffold02431; pos 167764 to 168036)
cgaagcagacgtaagttgcatgaagaaaatcagcaccatgttggctttgtttgtttataagaaaaaaaaaacaaaagaaactgttggcacttgtgaaacagcgccagatattagcacctgttagacaggcaccaatctcttgacaggcgccacttataagattaaccactaatacataaataatttaggatttgaccgctaataggtaactaattctgaatcaaactcaaaaagttaacttttttttttttaacaccaaaacccaaaaagccc

SEQ ID NO: 43726 - DNA, 668 bp, Manihot esculenta
  Intron number 1 from transcript cassava4.1_010489m (locus cassava4.1_010489m.g) derived from phytozome v7.0 (chr-ID scaffold09880; pos 325197 to 325864 reverse strand)
cccgatttaccttttctcacaatcaacactctcaggtaatggcttagttagagctgaaattgccaattgctgatgctcaggtttcttagatttccttttctctttgtaattcatgctgcttgctattgtttggttgcctagaaagcagagaaaaagcgaggaaaattgaattctgtactagtgcttttaattactcactgttttggtttccaatatcctgatttttgtcttttaatcgtcatagttagatcctgtgctttaactgggttgagttggtccggatttctctcgctctcaccggagctaaatagctgcaatctaataattttttttccaatgaatttccccttgcaaattattctgaaattgtgtatctacggctgattgagtgttcctggaaaatcgaagaggaaattgagctgatatgatttcatatttatcactttctccggaacaaaaactttagagtttctggcaacataagatctctttgtctctctcaaaatactaccatttttctctgccacacaacagtcctgtgtccagttgagatggtgtattcaaatttgtgctgtagtttcaatattttgaatttttggaagcttaatctcagtttttttgctgttgaattagggtttgctattgcttttgaagttttcgttttgtac

SEQ ID NO: 43727 - DNA, 895 bp, Manihot esculenta
  Intron number 1 from transcript cassava4.1_016680m (locus cassava4.1_016680m.g) derived from phytozome v7.0 (chr-ID scaffold03081; pos 246876 to 247770)
gttgtatccagaagaaaatttccttcatctcgcaggtaagtcggttcactattctttggtttccctgcatctgcaaggaattagtcgggtgatttgaataaatttcatgattattttcttgggtttattcttgcatgttatttctacatctgcatctcgaaaaattatttctttgtggttggttccctgcatctgaatctgctctttgcttctcacgttatgaatgctctagaacccatcacggacacacccgcgctgtcaatttatcatttaaggatgaaatcttttttatctggtgcttggggtctttttttttttcgatttatagatttcagttgttcttgaactagtaatggatgattcttcatccgttaatagtgaaaacgttactggtccttaccattctgaaaatatcttcagtttcgctactttcaaacatcagagctgtcaatatatgtatggtgtgtaaatcagtatgtattagatttgtgtattcctaaaatccagcaaattgagcacagtttaaagaagtaatggttggttttatctttgtcatgaggttatagtagtgcctacgcatgtcgttgtttgaattgggtaggggttagtttcactctactgcattatatctaaacacagattggtttttggcattatctacattttaagttaaatttatgtttcatttataatgttataaaaagtggtagctgttcaggttatatattaaaattctgtgtctctgcctgtctagaatataaacttgctcaacatgaaatgatatgagatggatgtagtttaggctcaccgttttccttgtcattgtcacttacctaagtggtgccacttcttcattttaggtcagttctctttactgaagtaaaaagatagggga

SEQ ID NO: 43728 - DNA, 298 bp, Manihot esculenta
  Intron number 2 from transcript cassava4.1_012509m (locus cassava4.1_012504m.g) derived from phytozome v7.0 (chr-ID scaffold08301; pos 126676 to 126973 reverse strand)
gtcagaagttcagtggaggtgcattttacacatcagtaagttctaattatttttccaaaaatagatcaatgcttttatgtccaacatataagtgttgttcttaccttttggaattacaacttttatttagatcaatgggtattattttgacccagctagttggtagtttgtttaggtttcttcaactattatctttgcatgtaagctaactatttatattaatcaaattaagaactcttacacataatatttctaattttcagagtgctcctccagcttcgaactctaggctttcacc

SEQ ID NO: 43729 - DNA, 773 bp, Manihot esculenta
  Intron number 1 from transcript cassava4.1_012509m (locus cassava4.1_012504m.g) derived from phytozome v7.0 (chr-ID scaffold08301; pos 126967 to 127739 reverse strand)
aagaagaagttaaccccttttctgtgagtctcttcctctttactttccctttgttattctaatttttgggttttattttgtatgatggacggatgaagttggaaatttggtggtttggttttctgggttatgggttttagaatttatgcttaagtacttgggaattatgagatttactggctgttgagctttagtggttgatgtagctttttgatgtggaatttatgatttgatttggtgctttggttttttcagttgcaaaatcctcaactctccctctatgcgtagctaattttttcgctttgccgcaaatattttacgtttttgagttagtgtgaaactacgaggataattaatgtaattaatatttgtatgatggtctgtgaataaacattctgattatccaacttagtattgtgattaagtggtttgatgatactgttatgtgaattgtgattgtgcatgccggtcttcttctttaagtactgtgaattagctcagaggatagcagataaaaagcccaactttatctgcttgaagaaaaattttggagacttgggcaacgtggttagcacaagtttttttcctttgaacagttcattatcttttccatatgtgatcaatgtacatatgattggctacttgattttttcttttctgccttatatttctaatatttttgttctttatactattacaaagctagcaacttatgtttaatctaatttttgtaactaggatccagctgtaagggggaaatcatcgggtcagaa

SEQ ID NO: 43730 - DNA, 486 bp, Manihot esculenta
  Intron number 1 from transcript cassava4.1_013318m (locus cassava4.1_013318m.g) derived from phytozome v7.0 (chr-ID scaffold07007; pos 117103 to 117588 reverse strand)
ggtggataccctcttgggagcttcaccactttctggtaagttcaaacttgttcttttcaattctctttttgaaagaagttgccattagtaaattgttctgcttgtttcctcatttttcatgggcgtgcatttgcatggataattttaaaaagaaaaaagaaaaaaacttttcctctggggaacaccatggatgcattgggtgtctacagatttgaatgttgagaggggagagggaaagctctttctttaaggtgtctgcaagtgccatgccttttgatattgaccatagactgcaacacctctgcttttttggcccatttcgtaactttcttgcagaaaaatttcaattcaaacctcgtttttattatctcaaacagaaaaaagaaaactaaagatgtttaataattgaccattctgaaaaaaaaaaaaaacaaactcataatcgatgcaggtgcaacagtaaagttacagtgcaataataccaag

SEQ ID NO: 43731 - DNA, 935 bp, Manihot esculenta
  Intron number 3 from transcript cassava4.1_014247m (locus cassava4.1_014247m.g) derived from phytozome v7.0 (chr-ID scaffold03834; pos 171528 to 172462)
gcctgaaaagctacgttaccaggtcattgatgttctgcattgcctttgtagtttcaaatagagaaaacttacataatttgatttcatttagttctgaaggggaactttcttttctccttgaggtatatgcctcattttcaaaatttatctctatcttactccaaaggttatccattcccacatttttactaatcttataggtttcttgcgtgattctcctatctcaagcaagtttatgaggataagtttggtcgccaaatgattgatactatcttgttgaccttcaatagtcatattacttaaaatagaaaaaaaaaaaaagaattactagataattcttgtgcttgctagagttcaccttagaaagaggtagatgtacagataggcaatacgtttttatgggtaactaacggatccaccctcttgcttggtcaagaaagcacaactggtgcttcctattgtaaaataacagatcaaataactttcctgaatttctgtgaagcaatcttcaatttcacactatgtattatgctgacatctgtggcaatttgtcaattacaatctacgaattgaagggaacactaagcccttcctcatgaaaagcagccatcaaaggcttaggatgcttaaggtctgatttgttagaagctaaaatttcttcaataatttttttttaagtgttgtgattctgtaacagtaaagaagtttattaattagaaatgctgaagtttttcccaacctggcttggatgacatttatcctactgttgaaaactcttgatttgtgctcttataattttctgtaaaatttgatattgctccttttattctttgttgcttgccaggtgtttttcttaaacttaacagcaatatcttttgtaaattggaagctctaagtccagtccattttgtgtttcttctaccattgacagggag

SEQ ID NO: 43732 - DNA, 383 bp, Manihot esculenta
  Intron number 1 from transcript cassava4.1_006899m (locus cassava4.1_006899m.g) derived from phytozome v7.0 (chr-ID scaffold12794; pos 910563 to 910945 reverse strand)
ttctacaaagtccaatcacctccctaagctttcaggtttcaattcttcattctttctgtcaatttttcttttcacttttctgtttggttgcagcatactcttaccttttccaattcttaaaaagcgaaactctttgcttttatacaatcccaagagggtattgacgaaaagataaaagagtatgaatttttttttatttttctgagatttctgtgatcaaaaaagggaaaaaagtattttgtcattgtcggttctgtggtactgaagcattttgtatgaaatgattgtttttcgtgtgttttttggaggttaaatataagctttccttgtgtgtttgtgaaatttcaggtggtttcagtgtaaagaggaaggattttggggta

SEQ ID NO: 43733 - DNA, 616 bp, Manihot esculenta
  Intron number 2 from transcript cassava4.1_033110m (locus cassava4.1_033110m.g) derived from phytozome v7.0 (chr-ID scaffold10217; pos 115584 to 116199 reverse strand)
acctgattacagatagggagtttcttagccagcaggtaattgaatttttcaacttctacatgtgaaggaaaaaaaaaaaagaattgacccagtctttatttgaaccattactcagcttgaagttgtaatacaaccaggcattcacattcttacatataaaaatatggcaaggattgatcagttgaccagaaacaatgaacttaattagagatcaaaaggtgggttagcactaattattcaatttacaaattcccttaggcaaattggaaaaaaaaaattatagtgatcgattatttatcttataatacatatcatgaaacacaacatttcattttcagttttagtatagataatgataacataatagtgaaaattcaatgattatctcttcgacgaagacggtttgattataatttagaagacggtttaattataatttaagaatatatatatttttttgttttttgaatttgggattggagattgctaagtagaatatgagatctctcatatttacttagacgtacttattatcagactaagtctctaagtgcagcatgttttttttatagttaatatttattcggtcataatgaatttacacttagcagggtgt

SEQ ID NO: 43734 - DNA, 665 bp, Manihot esculenta
  Intron number 1 from transcript cassava4.1_010827m (locus cassava4.1_010504m.g) derived from phytozome v7.0 (chr-ID scaffold06582; pos 636398 to 637062 reverse strand)
ttccctctggtatgctcttcttttttcctgctcaatttactagttttatttttcttgaaatctattggggttttactttgtttgtttgcttcgagttttgtcggtcctcctctaaggattgcgctctaatccttcaattgttttcttctttatacttaatcgccgaaagagttgatggcagcactagaattctatgcccttttcttaacggatgttttctttatcttcttttaatcgtttactagtactctgtattgagtataaaacattaaccctttatttcgcatgattcattttgtaagaaaagaattcaaatgaatttttgcaaaatcatgtgagatttcaacatgtttgaaatgaaaattttttaagttgaaaagaattgagttcttttattccaaacaaaagataagaaataagaactttcattccgttccattttggatactgtacatgctttggatcttacgaagaacactttgttatattcattatttgttgttcatgcttactatggatgtttcctgctgcatgtcataattagcctgttgaagtgaattgctgtcactttatttggaattagttacctgatttattaatttttctcacgtatcccttgccttttcctagacgagaaaacaggttctactgaaagcaaaatccct

SEQ ID NO: 43735 - DNA, 859 bp, Manihot esculenta
  Intron number 1 from transcript cassava4.1_019354m (locus cassava4.1_018322m.g) derived from phytozome v7.0 (chr-ID scaffold11328; pos 25152 to 26010 reverse strand)
agtgagtatccaaagcagtgtgcaattgttctcatttttaaacttgctttgagcttgtgcaattagtagatggaagattgggcaattaaatttgttatgcaaattttttgccttggtgggattttgcacgccattgcgtttatggcctgtaaatgaatcaagccacttgcgacctgcttgaggcttgggttttttgtttaatttgagcttattaatactcatgcatttaggcttgctagatggcttgtcaataagttcgtgagccagatggtttatagacttgtcaatcaggtcgtttgttataatggccaactcatttgttatatgtatgtatgtgtaattatacatatgttcgtatatatataatgggcctagctttgcaaacgaaaatgcagctgaactttagatgagtctagctccagcttctaatctgatctggagtttaattaaaatctaacaagttgagcttgagctcttcaaagaactcaggttggcttgcttacacacctaattgtattgttgtgctaatactgaactgctggcaggcagtttttgtgcatccatgaaaaggattaattcttagatgcctagttatttatagttgttgtcaatgatattctcattattatgctgtcaccattggcttaccatttctatgttccactagaaatgacacatccacatgcagacatgccctcagcttacaaagttagcttgctcatatagtctgcataactgaatactttttgtggctgcatgattgctgcagtttctgattatacaaatttagagtttgccttaaaacttttcataatccatttttatgcttgccagagagaggattaagcagagactatca

SEQ ID NO: 43736 - DNA, 707 bp, Manihot esculenta
  Intron number 1 from transcript cassava4.1_010154m (locus cassava4.1_010115m.g) derived from phytozome v7.0 (chr-ID scaffold02477; pos 337145 to 337851)
gatttcaactccctcctttcaagctctctgttagagtacgtgctttcttattactacttcagtttgttcctatgtttttgatacttggaggaagggagaaaatattttaaattttttaataacaaccctcattcgtttaactcgacttatttcaataaaaacaaaagcccttattgaaatcgcgtttatttcaatgaatggctcttatcgttgatcttcattcgtcagcaatgtgtgtgaatcaagctaaaattatcatcttttttattggacaaggaaaaaaggtaatgtctttatcaatttttactcattgaagatttgaaaggattaaggagttgaatcccattagctttcccttttccttctgtaagcacccatctacttggtggctaagagaattgaaaatctttcaataggaatttttagttgagctgtgacaaatgcatgatttaggtttaacggtgtgtatgttttactgaatttcatctgcagcttggtcaattttttatttgagatttatggacttttttatttttatgtcttctccatctatgtttcttctcattaattgctgtgtgtacttattttacgaaatatgttattggtttgtagcaaatacttacctttttattttacgctaacacaaacccactccatgtacatgcaactcaggatttcgttaaatctagagaagtaggtgaatttct

SEQ ID NO: 43737 - DNA, 800 bp, Manihot esculenta
  Intron number 1 from transcript cassava4.1_031425m (locus cassava4.1_031425m.g) derived from phytozome v7.0 (chr-ID scaffold04851; pos 49769 to 50568)
atataagtatatccacatagaattaattcaagtaggtataaatccaataacaataagagataaaaggccagaatagatagtaaatgataccgtagtccagagtgaatttccgcaaaaaacgatgagtaaaatattacatggagataaagaaataatttgtgtaccatataaagtagttaaagaaaatgatacagataaaaaaataatggagcaaaataattttagtaatgcaagtttaatatgcataggaacccaattaaaaaagatgaaaaaacttttaaaaaataaacagatagaagaaaaggaggaagtaaaaccaaaaattaaattacatatttttaaaccatatcaagtctctagctaagtcaaaaagaattaaaaaataataaaaataaatttttacaaagtttaaaagatcaattaagcaaagtagaaacttctgaatctagtaaaaatatagtataggagactccacagtcaaaagttataaatgtaatagaagaagaagaattagaaactgaaaccaaccagattcagaagatatagaacaatttgaagtaaatcctatattgcataaggaaatagtcagtagagcaccggacctaagattattagataaaccaagtattaattcccaatttaagtataatgcttcaacagtttataaatggaatatagatggactatctgaatataatatattaagtttattgcaacagatgactatggcagctaatgcatataaaatacagtcttttgcttcagatagagcaatagctgagattattatagcaggttta

SEQ ID NO: 43738 - DNA, 592 bp, Manihot esculenta
  Intron number 1 from transcript cassava4.1_010353m (locus cassava4.1_010353m.g) derived from phytozome v7.0 (chr-ID scaffold07032; pos 168222 to 168813)
ttgttgccgtaaagtatatcgagagaggtgataaggttggttttctgatttcatattattgttgttattattattattttgatttttgtttgcttgtctatttatggaaagtattaattgttttttgttgtggttttgtggcttgccaaaatttagtatatttgaattaatgtttggtcatttatggatttaatcgtgagaatttatggtgttttgtacttatcgttttattttctctttccttttccctcttccctttttcctttttggcgtatgcatatttggagcttgactgcgagaaagttctcttcttctttctttcttcttctctctctcttttttttttttctgaaaacttttttcccaagtttgaaagttcagtggttataaattgcatatggttcctgtcggtggtatgtggattgggtaattttctgtcttccagaaggacaacgaaacttttaagtgtatacaagtttcgttcattagttttgccgagtaacacgctatataattagaaacttcatttgtattttgaatgtaaatgacagaattcttgcagcagttcattgttgtactgtgttgcagattg

SEQ ID NO: 43739 - DNA, 618 bp, Manihot esculenta
  Intron number 1 from transcript cassava4.1_022147m (locus cassava4.1_022147m.g) derived from phytozome v7.0 (chr-ID scaffold05623; pos 188758 to 189375 reverse strand)
agagaagtaagcacatttgatacaaaatttcattttacacgtgactatgtgcaatgaggagatatagagggagagtatatgaagacctaggaacagttagctgatatgctaatgaagcgtcttggtcgcctgaagatggaagagctgcggctcaagattagaatcaataatattaagcaactgcaacaagattaggagagtgaatgtactgtttaattttattgttgttattggtttgtttactggtatttgttttttcatgttgcattagttggttatttttgtataacacattgtttaaagtgttggttagctgttggttagtcatgaatttactggatctaatctttaggaaagtggagcatatttttaggaacgtggagcattatatggcatgtatttaatcttcaagtttatttgaataaaattgaattcagagaaaaacggtgttgctattatagcaacagaaaaaaattaatcagagtgtcctattcatcatttacttcacctgatttgttgtgtttgattttacttgtgggttgtttatctaacaaattcaccttatctttgctcttctgcgcaggttgtagacgtccattccttcaatactctgctaac

SEQ ID NO: 43740 - DNA, 583 bp, Manihot esculenta
  Intron number 3 from transcript cassava4.1_008494m (locus cassava4.1_008494m.g) derived from phytozome v7.0 (chr-ID scaffold07894; pos 196251 to 196833 reverse strand)
tagaggtttgccaacagcattcgaattattcactggttagtactgatgattcataattacttttctccattaatatttgattcattgcaagtactttttcttagactttcaatgttacaaaagaaagcagttgaaatctgctttattttcattgtatgcttagaaatttgtgagcttttgattactgggcctctgttctttagtagatttcagttcattgtgctcgaaattgcaaggttcggctagcagctacaaatttatcttgcttttgggtttttgttcagaaagataactattgtttctaggcaaatcaaaatatttagttttggaaaataagggtgttcttctttaaaaaccaggggatgtgaaagaattagccgtataaaaactttctagcaatcagcttaatctgttcgttctggagtttaacttctatacttgtagctgccctttaacatgctggtgaaattatgatgtttggtcactcagctaagcaacagttaaaatccagagccaatgttgtattgctgttctttgttcaataaaaagcattaataaatatccattgttctgcaggttcagc

SEQ ID NO: 43741 - DNA, 967 bp, Manihot esculenta
  Intron number 2 from transcript cassava4.1_016621m (locus cassava4.1_016594m.g) derived from phytozome v7.0 (chr-ID scaffold10954; pos 24078 to 25044 reverse strand)
ggcaagaagtcggtcaagaacagccctaatccaaggtatttacttatttatttaataaaaaactatgtagtttattattaattagtcatatttttcattttaaatgatgaaacaatcatctgggttttgataatattgcattataattaacccatttgcacacatcctcttagtgatctcttctttaatgctacttttgatttatatgaaaaagcagtttttctaatcattaccgagaaacaaacagcccattaccacctttcttttctctagatgatagggaaaggaattcattttcctccctatttttgtagaatttaaaaagataaaaacatcaagatttaaactctcgtatcttttaacttctcacaatctgtatcttttgtttgttgctgaaaatagaccatgcaaatatttatcgcccataattgttatagcctttgcacttagaaggtgactgaaggagaaacactgacatagtcacatcgcacacacgccattatttttctaaaagagacagatgggggtcaagccactcccgtggttttgaatcttagctttaacatgttgattccagcaatggaaaggggaccgatttacaatcgatctccaaacccaaaggcatcatatcgtcatcacatcaacccacacggctcatacgtgcataaaactgaagtggacttccacttttagatattaacttagaatatataataagaaagttaaataattaaattgtagagttttatttaaaccagttaatactatggtcagagctaggaggccatgcaagttgattacaccaacatggtctgcggaaaacttaagaatcagtttttttaataagaacagacaattcaattcactttcagacgagaggatcccatgaagtttatcatgggacacaatgaaagattatagattttcattctttatattttgttgaatgttgtaggaactattataa

SEQ ID NO: 43742 - DNA, 780 bp, Manihot esculenta
  Intron number 3 from transcript cassava4.1_014384m (locus cassava4.1_012896m.g) derived from phytozome v7.0 (chr-ID scaffold05865; pos 164686 to 165465 reverse strand)
gtggagttgccatctaaaaaggtcctcttcaagtaggccttctccacacaaattacagcactttatttggatttctttttgttgggtatatgatgaattggacaaaaatttcaaacttccaattcagtggagttgttcttgtatagttcacactatgtaggaagtgaaatagtgaactgcttcagatggatttatttctatgtctatctcttccttgagaaggatcttcacagttaacttccaagagcctttaggttgacaccacagaagtaattactactccctccttcccataatttttttccatctttttttttttcccaaaattattgtccactttctttttttttttttttgttaagtacttaagaaacatgtaaattgactattataatcttatttatctcatcttattttcaagaaacctctcaaaatatcttttagcatttaataaaatttagttattaaattttagtgtatttaagatgagcataattggaaagttaataaaaaaaaattgtatttgttaatatgtgtgaaaaattaatgtgtgaaaaagtaagatggacaaaaattatgggacggagggagtatttcacatggattttgaatttttgaagatagggcttatttctgtttcacaagtggaatacatttctttcttcttgtttgtgtgataccaaaattaagttttaacttgttcttctttataaaagtgatgggtgtccattgtttgtttctaaagggtagaatccagaaagccagaacgatattcatctg

SEQ ID NO: 43743 - DNA, 292 bp, Manihot esculenta
  Intron number 4 from transcript cassava4.1_007870m (locus cassava4.1_007870m.g) derived from phytozome v7.0 (chr-ID scaffold03363; pos 451078 to 451369 reverse strand)
ggctattctagctctggagaagttttaaactgcaagtatgctaattttttctctctcttcctatcattttttgaacagatgagtaatttcacaaaattattcaccacaagctgtcctcctttgtgcttttgactgttttctaaagttgattgaacctaactctttaatgaaatgactgaagtctgctgcaacaaggaatacatgcaaaatcattattcttttttgcatccacaactgtttgttcctaaagattgatgcattatgcattatggtttcatatacttcagcacgt

SEQ ID NO: 43744 - DNA, 281 bp, Manihot esculenta
  Intron number 1 from transcript cassava4.1_031871m (locus cassava4.1_031871m.g) derived from phytozome v7.0 (chr-ID scaffold12765; pos 24435 to 24715)
ctccagaatccgacgccctccgttggaagcggaaggtttcaccactcatcctgatcacttagttctctgtttggttgacgagaaaaataaaatctaaagagttattttgattcttccgtggaaggaattgttatctcgtgtcgtcggctttgttctcgtgttttttttttctattatttggtggcttttgagttttgtaggcagccaaacggaggataatgttgcgtttctgttaatgaatttcaggctaaagagcggaaagaagagcttcttcgactcag

SEQ ID NO: 43745 - DNA, 461 bp, Manihot esculenta
  Intron number 1 from transcript cassava4.1_006285m (locus cassava4.1_006284m.g) derived from phytozome v7.0 (chr-ID scaffold11882; pos 69488 to 69948)
aaccataatctcgtttggccttctctctcttgccggtaattttttttaaaaaaattctgtgtttttaatgctagagtcaatttctccctcctcgctttctctagggattttccagtaatatgatttttttttttcgcgttctattaccttttcattgcttgagggtgttcttgtaatgtgaagctgtgttcagcttcattcccatttttgtgatgaaagggcgagtgattaaagcatgaatatttatggtcataattcatttttagctttttaatttatgcaggactacggttcacttagcttaatttctttgtatctgagctctgcaatgagtgggcttacttctgtttgttttatctgttactatctttttattattattattttttattcatttgatttgttggtcgatcttcttgtgaacaggtggggtccacagcttgagctagctgcttgcaaga

SEQ ID NO: 43746 - DNA, 566 bp, Manihot esculenta
  Intron number 1 from transcript cassava4.1_004482m (locus cassava4.1_004485m.g) derived from phytozome v7.0 (chr-ID scaffold12525; pos 538862 to 539427 reverse strand)
agtattttattctcttcttcttcttcttcttcttctttttttttggttgctgttgttgtatttctctaacagtttgcttttgctctgctgggttgtgaaatggactcatggggtgcacagatccaaatggtgagtttttttttctgtctttttgttatatatatttttttattcatccatataagttctgagttcatttagcagccattgatgacctcatcaagaatcccaaaagctttttttgtttggatgctaaagattctgacttttgatgcattccatgttttgttttggcctcttcagtcttcaactcaatcttgtgaacaagataatttaaaaaatatatatatttttcttaatattttctctactcttccattgttatatgcattggctccattttttataatttcactattctgaagtcttgatgctgtgttagccatatggacagtcaaagacttaaatttgtggataaatatgatttttatagatcagaagtataaatttaataaaaaatccttcttcaagcagtctattaatggacgtggctggttgcaggacca

SEQ ID NO: 43747 - DNA, 503 bp, Manihot esculenta
  Intron number 1 from transcript cassava4.1_010920m (locus cassava4.1_010920m.g) derived from phytozome v7.0 (chr-ID scaffold06748; pos 59812 to 60314 reverse strand)
gcatttgcgaggtttgttttatgtatttggcattattattattatttatcatttgggttttccttttgctgttttttgttggactttgatgggcaattctcatttggtgctgttggggtttaacttctctacatgctcttttttttcttcatttttttttccttgtggttgtgctctgtttggtagttgagaaaatgtgggaatttacgatgttagctcccttgttattttgacgtttctgtttgttgaatagtttagaaatgattttacatgacaaaacaaaattagtgtttattgaaccactctgttattgctcacatcctttttctccacaaccaaacagggtagtttgactcatttgcatccttaagcttattgtggtgttaaaaggctcttctcttgtttctttgtgcactgttttattgtttttgaattcttattgtgacctcaattgtaataataatcataaatttgataagtcttcgctgtttaatttcaggaat

SEQ ID NO: 43748 - DNA, 827 bp, Manihot esculenta
  Intron number 3 from transcript cassava4.1_012294m (locus cassava4.1_012294m.g) derived from phytozome v7.0 (chr-ID scaffold00492; pos 11483 to 12309)
cataatctcatatttttgcagggttggaataaaaagtgagtagcatgtatcatgtaattgaaacttatttttgtttgagaaaggcaggaggatgttggagctatagaagtcttgatcaatttatttactgtgttctccttctcacttcatatttggtgctcaaagtactttatggattttacagtttggatttgaggcccccctcccccttttaaagtttgagtttgtaactcttgctatttctttttacccatttatttgtgttacattatatttataatttagtcaatgaatggatttggtggagaaaaacattttttcatcaggttttaatttaattacataagctcctagtgaagataataccattatgcattctattggaagatgacattcattttatgttgttcatttttgttttctcaaataagcttactaatgagtatatatgaatataaaattatcagtgtgctttgctttttaccctctattacagctcactggtcttattttatgattttatgctttctgaaattcacttttttaaaatgacttgcccttgaagtgcatttggatctttgtatttcagttaattttcgtcacaaaattgtgtcttgcttgatttgcatatatctaatacttatgcacccatgttaggtaatattagtaccatcccacctgaatttggagacatgtagacttgtaattgaaaggttcagctgggaaaggaatataactaagcttctctaatttggtggcttattctgctagttgcaaactctgataattttttttatttctggttctctatttctccaatagttggg

SEQ ID NO: 43749 - DNA, 977 bp, Manihot esculenta
  Intron number 1 from transcript cassava4.1_029191m (locus cassava4.1_029191m.g) derived from phytozome v7.0 (chr-ID scaffold03181; pos 34197 to 35173)
gtggacaaggtaaatatgatgccggcgctctcatagttttcatttcttttcacttcgcctcttacccttatttagaataaaaattttacacgaattcaattcagtcaaacagaaggttagagcttccaaattgatgcttttttgtttatcttttcacttagtttagatctgttacctctatctgttctatggcttactttgtttgattagttttcaatgttgttcacatatttgctgatctatttttctttttaaaattttcactgcatatttatctatgatttcttcagttgtactgactaacctaataaatctacaacggcatagcagtcttgtgggtcagctctcatggcttctttttcttttatttggctgcatattatcactgttatcattttgtacctattactctcgtgggtggctttagtgttaataccttcttttgtatttgttgactcattttgagaaggtcaagaaagttgatttcatgacatttattactgtttattaccctttagcagacatcctttcttttggctcagcagtattgctgaagagtaattttaccttttttgccaataatttatcatcgagaatgacctcactgctttttggggggagctttagctgtagatttccctttaaatattgcttttcttttctttcttttttcttttcccctttttttagtcatagtttgttttagaagcttaaaagttgaattttcttatcactttccttgtctgctgggtactgaacaattacttaatttttgctttagcaaaacaattgttagttaatattctgtagtttaaagtcccactaaattttccactctgttagtccttttatgtgatcttttggtgttagctttgtattaatgtgcaacaattttgactgcatatatctgttttctgattaattcctattggattttttcagaagcttatttcttcttattcagggagattaagcaa

SEQ ID NO: 43750 - DNA, 801 bp, Manihot esculenta
  Intron number 1 from transcript cassava4.1_019145m (locus cassava4.1_017346m.g) derived from phytozome v7.0 (chr-ID scaffold10183; pos 16334 to 17134)
ctaaatcctgctccgaaatccctcttcatttgcaggtcccttttcttccttctttctccctttccttcttctattttctcatcatgctctctgcaaaaccccttaatttatttcttttttcttctaatttctgggtttttgttttcttcctctaattttttcatgaaaattttttaatggaataaacgtttgcctcttttctttttcatgtcaaacttctttttataggtttacattcctagtaattcattatggttgacaattttctgttcacttcagagaattgttctggttttttgatgatttccttttttttttttaattcacagcacttgctcagaaattgaagagaattatgcctatttagcctagcttcagttttttaaattgttttgtgttaattaaaattgcatttattgaaataattaagacttaagattcagtctgcttcattttttttatttaatttcattttaaagagttttttttttatatattacttaattaataagtaagaggcaaaacattatgaataactgatcttcatcagtaaaattaattccaaactctaagaatttaatttctaaatcaattatctttgaaactaaaactttaaaatttgaaaataagattataatagttaatttatatataattataatgtaaacaaaatagaaaataaataataattttagaataaataaaaaatataaaaaattatgggatgaaatgattattatatatttcatttattttatacgtatttttaatatgcaggagactaaatttagataagaattg

SEQ ID NO: 43751 - DNA, 960 bp, Manihot esculenta
  Intron number 1 from transcript cassava4.1_007002m (locus cassava4.1_007002m.g) derived from phytozome v7.0 (chr-ID scaffold11581; pos 1500159 to 1501118 reverse strand)
ttggtgccaatcggaatcaagcttttgtcgaattcgtaagcttatcctctctctctcgctctctctctctctttcttttccgtttttgttgcatctttacctagaaattgtttttattccgtgaattttttcgttaggtagttgaagagtttggagatcgattgagggttacaatagtaggcctgttttgagtagcttaatcagtttggttcgaatttgatccttcctattatcataaaacagtctcctgaaaattttggaagtttgaagtgtatacttttttatattcaactatgcctttatatgctaaatttgaactaattcgggtttatctatttatttatttattttgcttgtttgtttttaatgcactcccggaagttcgttggagctacagaatttcaattttagtgcagtttgcttggaggagaaatgcttcattattgttttctgaaggtgtttcatttattatagagctaaataaaataggtcttagttaattagggttatgctggttccaatagcatagcgaatagtttgagtagtcttactgcaagctgtaacatttgcttttcctccttttgctgctgcggaagtaattcagttgggttacctttgggagttggatgtgtctggaaatatgtaggttagtaggtgccatgcataaattgggaacatggagtaatagtgtgctccctagtggttgaaagagcttttttatgtgttcttctattcaaatgaacttgttgctgcagagttgtcatttagttattctcatgcccgtcttgcttataattgtgattgtttctttcagctcattactatgatattgtgtttacttgctcctaaataggccccttttttctcataaaaagtatcatataatcttcctgcttgacctaaatgttgactggagttgtaaaagcacttttgcaggcagacttaaatcaggcaattcaa

SEQ ID NO: 43752 - DNA, 648 bp, Manihot esculenta
  Intron number 1 from transcript cassava4.1_026805m (locus cassava4.1_026805m.g) derived from phytozome v7.0 (chr-ID scaffold06948; pos 399033 to 399680)
ttgaagctaggcatcgtttatcttcttccatgtgagttcttgctttttgtttttccagtgatttaagtcaccatgcaaggctagcttcttctgtttcatcatcatcatcatagatatttccttcactttcctgggaaaatatggtttgaaatatgatcaagcaaatattattctttggttaataataaacctcatatattaattaatttggtataaaataccttaaagtttagtacaattgagaacatttaaagcatggactataattgcaaattgaagtaatcttttgttgttgatctttctctttctcccatcacagcttatgctattgctaacattaattagggaagcatcaatctgattacttcattttaaaattttattttcttttgaaatgaaatataatgaaaaaattataaaattattaattttataatcaaagactaaaattccactttgaaacaacaaaaattgaagtttatattatggaaaatatcaaagtatgtttttttttagctaagcaattgtaagaggtgccattaaatttttttttttccccttatagtcatccttgcctattattcacaagctatagctatatctcattgaacagtgaagacatatacaaaagaaggttacaaaaaaaca

SEQ ID NO: 43753 - DNA, 570 bp, Manihot esculenta
  Intron number 1 from transcript cassava4.1_013305m (locus cassava4.1_013305m.g) derived from phytozome v7.0 (chr-ID scaffold03942; pos 385128 to 385697 reverse strand)
tccactcgctggaatctcttgccaatgtaagctgtatcattgtcactatttaatttgcaaaaattcttgtacaatatgtgtatagattggtgtgcgtatatccattttggcttcaaatggttttcttttctttctctgcattgatggagagactgctctagagacttgttttaatttgaattcaggttgatatgctttttagttgacttgtccctatctcccataaaatttagtagttgtagttcttgacaaattattgcacgtataattggctatatttgcaactaataattggtattaatctggtattgtctcgtctgtaatgagtgtagattgttcaccagggaggaaagggaaataaaagattaggcccttggggagaagaatgtgctcatgccttaaagtctctcttttaaaaaaagaaaaagaaattcatttattacttattttgtttgaatttccaccgtgtggtagcagaaatggaaaactctaatgaattggctgtggaatttgtttttatatccgagtaatatctgattttgtattgaaaatatttgtgcagggattaac

SEQ ID NO: 43754 - DNA, 224 bp, Manihot esculenta
  Intron number 2 from transcript cassava4.1_014366m (locus cassava4.1_014366m.g) derived from phytozome v7.0 (chr-ID scaffold03342; pos 186312 to 186535 reverse strand)
tctagggatttaagcagagaagtatgtggaaacttaaagagctttcaataaacaaactataagattaaaaaataaagattcatcaagttctataaccttttgctagtattcttttctttcaaatacagattatgccatctttttaagaagtggaagattgtatgcaccatagtaacctgtcaattgttttgaattgctttgatgttttcagctttctaaggttg

SEQ ID NO: 43755 - DNA, 301 bp, Manihot esculenta
  Intron number 1 from transcript cassava4.1_030845m (locus cassava4.1_030845m.g) derived from phytozome v7.0 (chr-ID scaffold09619; pos 83345 to 83645)
aactgtgctaatctcgattgcaacttgctttttctgtaagtctctttctcttctcttctttcattacttaaatgttggatatatttgaatttagccctcctcaaatgtactgtttcttctctaatatattcattagactttaatttgtgatgcaaaatgctgaggaatttggcaaaatataggaattttgctttgaaagttgctcctggagtaaattcaattgggccaaactaaaagagcctctagcaaatatacaattgggacttttttattattatgttctatatttcctgtttcagtt

SEQ ID NO: 43756 - DNA, 713 bp, Manihot esculenta
  Intron number 1 from transcript cassava4.1_030210m (locus cassava4.1_030210m.g) derived from phytozome v7.0 (chr-ID scaffold00492; pos 265016 to 265728)
ctttgcttcctgaactccctgctaaggtgttgttcgtatttgttaaaatgtttgttaatgatttgtaaaagatataggctcaacgaagtaccattttccttgatgatcatgtcatatgcaatattgggtgccttgatgaacgccatcaaacttaaaattttttattgatttctctaagctagcgttgccattccagtgtctattcctttaatcgattccacccaatttgaaaatcaagcatatgaccgagtttgagtcttttggcaagcgtactcagctttcctatgatgcgatcgagtcttcttcctttttgttgggatgtgggaaggaagtcaatttcataggactgagtttattcctttgcatgcaattaatgggttccaagttaattctttttatatctaggtcataaagcttggtagctttcattccttgaaatcttgatttggattttggaatttttggccgccggaggacatcacttcgcttttagactttagggttttcgtgattcaaatgtaattattccatcccaattacatacatgctatttagcttttgatggaactagaattggatccattattgcttcataaattaatagacaggttactttctatatcaatgggagaagttaaactttctgaacttcaaagttcaaaatcttaatctatattttgctctcgtacaggcagacaagtccagcattattg

SEQ ID NO: 43757 - DNA, 723 bp, Manihot esculenta
  Intron number 3 from transcript cassava4.1_018012m (locus cassava4.1_018012m.g) derived from phytozome v7.0 (chr-ID scaffold08359; pos 660165 to 660887)
tgcaggtatctatttttttaactgtgattgatggaattgtagtaagatgtttcctgatgagagtgaagctgttgaacatttattctgatattttacaaatttcttttattctcattcttccttggtgatgcttcagaactgaagataaggattttcatcttattctgttaggaaagagcagtttctgttccaatatccaatcgaaactgatatattgtgttttactctgtttcattgtttgacttgctatctgtgcaattattatctaggtcaataattgtgtgtgactggatattcttttctgcctgaattatgctccagacaaatataatgattttggtattttactttgaaatttgtatattcttctaatactttcattaatataattactaaattcttatattagagcaattttctttacgctaagtgcccaatgtcaatgtagtatttggcagcatctattatgctgctagttacaacttttggcaacttgcgttgcataatttatgagtttgatgctgttcctatagaattcgtagctggggattgcaaagttgcacctctttattgttgaataattacctaagaggaaactgtttgcttttgttgcaaggtttttttgtgcttttaatagtttaaaataaaattttcatgttcatttgacaattgatggtcttcttattagtgtgcagggtgtgagcaatatcacaaattagctga

SEQ ID NO: 43758 - DNA, 625 bp, Manihot esculenta
  Intron number 1 from transcript cassava4.1_018187m (locus cassava4.1_018187m.g) derived from phytozome v7.0 (chr-ID scaffold03363; pos 441593 to 442217)
tctctggcatccccgacgagcatcttcgcaggagggtatcatacttctctactcctatatatttaatttggctcgtttttggtggataattcttttgttgtttccagaagttcacagttaacggatgatgtggattcgtttctacttcaatttttaggtggatttgattgattagggttttggaagttttccattataatcgtgataaccgcatttaatagacggggattttgggttttcttttcaatccattgcgaatattgattctccgagtgttatagtaagaagtgtggattatgatgtttccctgttacacacagagttaggtagcccttagaaaatacttcaggtaaggtctagaacagatttgtttgattttgggcaagctatttctttaatgattttgacagtatgtcatttgccctttatctttcacataatctaaatctgttgccatggagttcatgaacattgaggtccactctgcactgttcttcatctttcacgccggatttgtatcgctcttttattcatgctttctgcttcctttgttgatttcattagcattttagttctgatgttgatcacaggtggtaatttactcaccagctagaactgcaacgca

SEQ ID NO: 43759 - DNA, 532 bp, Manihot esculenta
  Intron number 2 from transcript cassava4.1_018187m (locus cassava4.1_018187m.g) derived from phytozome v7.0 (chr-ID scaffold03363; pos 442261 to 442792)
tcaacgcaaaagtatgttctctttttggcttatttagctcttccgtgaattttcttcatccttttgtctatattttctgtggaaccctatgatttttcaaatgtttccaatggctatgcatgtttgtgaaccattaagtttgctgaataatgatccttttccagtgatgcttgaagatgctgacaattcccatgtttttgctaaggaaaacaaagaaatatatcttttgaaagtcgatggagcacccaagctttgtttttgaaatcctgaggcattattttttcttcttatcatatgactattgagtatcctgtattttgcaataccaagtacttcctttaccatctgcagacatcattaattttcaagtacttttcccagcaatccttcagattatgcaccctttttttgatgtgagggattatagaatttccaagtggtcaaatattttagggaacttgctaccctggacacttgattaaccgttttacccatctctgattaatatttatgcaggtgggaaaatccattg

SEQ ID NO: 43760 - DNA, 804 bp, Manihot esculenta
  Intron number 1 from transcript cassava4.1_010551m (locus cassava4.1_010551m.g) derived from phytozome v7.0 (chr-ID scaffold10963; pos 261122 to 261925)
gcaccagagatccaaattctgatacccctcctagggtttgttctttcatcctctgatctagggttctaatatacatctatttcctatatgcattgcgcatctagcatttattgacggtacgaatttagtttggttgttaatggtgtaactggaaaaatgtcacattttttccccttttggattgttgagaatgtcgttaaggttatatagatttgcacttttccttctttttggctctgtttggtttctaggaaaacgttagtgtagaaacatgaagagtgcgagcaagttgtttcctcgtcatcgtgagacagggaaaactcgcgcttagtaatctctgattcgggcggtcaggtttttctcccggaacaaatggaagttcctggatggccaggtgtgaagcaactcggtgcaaatattttgcctgattgggaaatttgtgctaggtatttttttcagcgtttaggatttaactgacccaggattgtcgggatttgattgggaagtttgattatttacttgtgcttctatgaatttttgtgatgagatcttgttattttctcattgcacacagcttttgcacttccttagcagccaaaaccagggcgacataactattacaatagttagctccccctttccccttatcccgtccataatttctttttctgggtcgataattcattgtatttggtgaatggttggaattttctttcacttaaagtttttttaaggtcttttggctatggtttctgattttgtacaatatttttttttctctttagagacaatctccaaagaagg

SEQ ID NO: 43761 - DNA, 835 bp, Manihot esculenta
  Intron number 1 from transcript cassava4.1_013744m (locus cassava4.1_013744m.g) derived from phytozome v7.0 (chr-ID scaffold09140; pos 82802 to 83636 reverse strand)
tcactaaagcaaggtggcagatctgccactcaaaggtgaaccaagtttcttggctcttataccatgaaaccgttgatgaaaagaagaaaaagagagcagaagatttgcgagaaagtacttgattattcccctcaagccaattggggtatatatattatatactacttacaagaatacatactaggtaagaaaataaattaattccctaattatagcctaatcatatcccaatcatatcacacaatcatatccctaattattagtacaaatctaggctatttacagaaataatctcaacactaaccataacaattaaaaattaaactaaagataacaagctaagctgagagatgataagatgccaatcccttatttgttgcaaccactttgatcagaatctatcaagtagatggataatgcacatcaatatccctactattgtgctgcctaaatagaaataatttttcttctacatagttgactttctatgatactattcatgtgggattatgccttgaagaaaaaattcaggtactatatgaaatttgattctgttttagtaagtgttgaattagagagataaagctaaagttgatgagtcatgagcacacaaacgcagacaaaaacattcaatttctattagtagtgttcccttgacattttatctagtattgaaaccatatacaggtggtgccatgacattggaagggaacaggctgccaacaaacctcttcttaaaacagtttttcaggtactccagccatttttcctgtggctaacatgccactgtgtgttcacttacctgacagtccattttctgtatgctacttaggtc

SEQ ID NO: 43762 - DNA, 764 bp, Manihot esculenta
  Intron number 1 from transcript cassava4.1_032856m (locus cassava4.1_032856m.g) derived from phytozome v7.0 (chr-ID scaffold11279; pos 16725 to 17488)
cgccgctgcttctgcctaccacggtcacgacacaggtttgtttggatagttgagatttgttgcttaatggatttctttctttgagtggttttctgtctcttgctaaaatgagtttgtcttccacggtctctcgactctttgaatggatttgtattatgtttctgaaattctgagatttgtatgtatttgttgagatttgttgaagttggcacatctgtatttttttccatctgcgagtcattgcattacagtttgaaatgacatgcgagaatgatacacaacctaaatcacgagggataacatttatccaattacgaggaagatgagctaattttgcagcagatatgagatttgccttttacatgttatgctcaaatgatatggaatttttcttatttggttatttctaaagctagttccttttacttttgttttcttctttgtttattgtgcttctacctgggttcaaaccagtaattgacatgtagttaatcggtttgggcatgttcgggtcgttgcagaaaatgatagtataatcataaacggatttgggatggagtcagatttggatattctaaattttgctgataccccacctgttatcattcccaatttcatatgcatgcgtacttgtttctgctaaataatttctcttcagggcaattacgattctaagtttgatgtagcttctttatttatttattttttttttctcaacttcatcttttttacaggtaaaagggggattttttttcctggtggcg

SEQ ID NO: 43763 - DNA, 874 bp, Manihot esculenta
  Intron number 1 from transcript cassava4.1_000260m (locus cassava4.1_000260m.g) derived from phytozome v7.0 (chr-ID scaffold05656; pos 140836 to 141709 reverse strand)
cggaagcgattcgacgcgtaattcttcttactggattttaatgagcttgagtctcatcatttttccttaatttgatagtttatttaaggttttcagatagtagttcatatattttgcatttcctttgaattcaagaggtaatttggtttggaaaagaactctttgacattttcatttctttgtgaaaattgttttttgttatggttgagagttgtttggaagtttgaaaaacttggaactgctaagttgatcagttggtgagctcagttgactacattccgatacttcttgtagactggacgagctcacctaattttctaattttttttgttaattaatttgatagctagacggctttaagaattagtttaaagttaaaattaacatatctttttcatgaaaactccaaaacaactaaatagaatttattcaaacagttttttagcactatctaaaatgctgaatttgttttttttcaacaaatggttttcttggtctccaacctcaaccccgagtgggggccaatgtttggtttctcagaagaagaaaggaaactaaagtttgagttaaatttctatcttatggtatatggaagaacagaaaaaaaaaccattattgagcttaatggttatttgaatgggtcaaaggatttaactactgtgcgacacagatcttccttatattattatctgaaattgtgattttttttaatcgccttggcatttagtaaattattcaatacgtaattgcaacattgctgtgtattttataatgatttattctcataaataacttcaagttttggttacaattaagttttcatttgtctctattcacagagttgatttgaaatttccaaagattgaagttcgat

SEQ ID NO: 43764 - DNA, 691 bp, Manihot esculenta
  Intron number 1 from transcript cassava4.1_016931m (locus cassava4.1_016931m.g) derived from phytozome v7.0 (chr-ID scaffold03581; pos 1300252 to 1300942)
ctaaaattctatcggtgctattgctgttatcgctggtatttttaattatctgtgattcttttatagaattcgttttcttcagctctattgaaatctagctgttcttgtttttttttccctttcgattgttttgcttgatattgggaatatttttagtgttaagatatcatgatttagttgcgaaattttcgttatgagatgtgaagtgctaaatcgcaagctattggttgttgctctagggcggcattgcttattttgttaactcgtgctatttgtatactttatctcgtgctgagcttttttaagttgtttattaatttttttgggggggaattcagatcatttatccgtgtagtttttgttagccccacaaagatctttgaatgtaattcgtactttcgttgaatggaagaaaatgattcacagagtctgacgtcagctagattgttattgatgcatagttgagttgtgtccttaatttccttgttcatgttattggattgtgtatcattttagacattgtggaactggcaattttgttatgtacttagtttcctttctcggcataagttttgattgagtgtagttcattgtttattcaaagttatagtcattcttcatggttgtccacatgttcctgcttctgttacttaattgtcttttgatcatcctctgatgacagacaggaact

SEQ ID NO: 43765 - DNA, 596 bp, Manihot esculenta
  Intron number 1 from transcript cassava4.1_005169m (locus cassava4.1_005169m.g) derived from phytozome v7.0 (chr-ID scaffold06631; pos 772903 to 773498 reverse strand)
ggaagcttatctgctcttttgcgtgagtatttcttagtttttccctttttgtttcatatcatgttcagcttttctatttggtgaatgattgtggagatctctgttgtaattatctcttcaatctgaattcctctggccatgcaatgatggactgatatagattttgtaattcttttgaattatgtctaaggagccttctgagtcttttgcccatggatttgtttaaatcggcttgtttcttgtggaacaatgtgggttttgctgaatgtgtagaggtcaatgtaatttgtcatttcttgtttgatattttcttgaaactcactaatgggtaacttcaaatattccctttaggtggagttatctagttgtgttcttgcattgatttaattgtcatggaattcacattgtcttatttacatcaatgttttgttgaactattcttttcatgctttgttttctgtagttttggtctgttagatgacagttttggcttgattctttacattttgcttcattaaatttattttcaccattgttctttctcgtaatccttgaccacagggaacaaaggagctggtaggactcctttgagctgg

SEQ ID NO: 43766 - DNA, 444 bp, Manihot esculenta
  Intron number 2 from transcript cassava4.1_008537m (locus cassava4.1_008537m.g) derived from phytozome v7.0 (chr-ID scaffold03299; pos 60003 to 60446)
taatactaggaagaacggtcagtttcagctaccttttggcactctttatatgattttatgtgttttattatgttctaaataaagtttgtgcgtaattattgacttcatgtgctgcgtcttttctgagaaatggagatgaaaattacccgtagaaaactgtgtttcctcctttttctttcctttacataatttttgtgttccagtgtttttggctgatagaatttaacatttttatcggtaattcgtgcacaatggaagatgtaaaaaattttcttggttggtttttgtcaaaatcatgggaagttttagattgtattttctggtttgatttattataagagtggaattgtatgtattccctgttcccttgggggcttttttatttatcagtattatttattcaatttaggtagaagtgaagaaagctatacccaaaagtgaaca

SEQ ID NO: 43767 - DNA, 864 bp, Manihot esculenta
  Intron number 1 from transcript cassava4.1_003588m (locus cassava4.1_003547m.g) derived from phytozome v7.0 (chr-ID scaffold10365; pos 59061 to 59924 reverse strand)
ccgtatgatgacgtagtcatcatctagaattaaaaatcaattacaatctttttttttttttttgccctttttcttaaattaagatgaggtaatttatttaattaaaaatccagtggaattttaaaccgtaaatacaatatctacaaaacaagaaacgactatgtaaattaatcattcttaaaacttatagatgcaaaatgctttgtgtattacataatttttaatgaaaatataatattgaataaccattatgctgagatacttaagaacaaaaattcacatgttttcattgttaagaagcatagctaaatctctatttaaaattaagattgagcgattaaaaaaacttattaaaaataataatttaagtattagtaaagttttatgaattaatttcatattttaaattatatcatattatattaaaattagttaatttttaataacatgatatttacatattcaaaagcatgtcttttagcagtaatttaaataattccttacaggtttaggcatcgataattattacttttattatttttatatatatttttaaaaataaatgttagaacaatttaacgaaaagttttgcaatttaacgatatcaccacttcctcaaattgtaatgacaactataagagtcttctcaaaaaaaaaaaataataataataacaacaaaagagtgcaaaccacgcaacgttgagcacgtgaaagtgagacgaagtaagaagtaagagtcagaacacccattggaccttcatccggttggaggcagatccacgcgcaaagggcaataccgacatttcatcctcccactgtccatttctaggcatccggcgtcctcgtccatatcggttcttcttt

SEQ ID NO: 43768 - DNA, 523 bp, Manihot esculenta
  Intron number 1 from transcript cassava4.1_016861m (locus cassava4.1_016861m.g) derived from phytozome v7.0 (chr-ID scaffold10305; pos 302777 to 303299 reverse strand)
aggtacacgatagattgttagtttctttattggtctgtttggctggggagtaaatggaggacgataaaattttatgaaactttattttgtggggtagattctttagctgaagaattgaattctctaactagttgaagtcatatagcttaattttgatgtgtttgtaaatgacaattatgctgattaattataattcagagggaagtagagaatgaattgggttttttaaggatattttcatccttttaattggggttagaagaaaacaaacaaactatgggcataaaagagccaaagtttacttgtcaaattgagactatagagaaattgatgtttatatatagtgattattgtttgggggatcgtaatattctatctgaagaaagtaaaattcatccaattggcatacaataactgtttacaggctcttggacaacttaggggaagctttaaatctgaactttttctctgtcatggtctttttgcagagattagtccaacaccagcctacacagtatccaac

SEQ ID NO: 43769 - DNA, 380 bp, Manihot esculenta
  Intron number 2 from transcript cassava4.1_011964m (locus cassava4.1_011964m.g) derived from phytozome v7.0 (chr-ID scaffold09136; pos 20815 to 21194)
gaacagcttgcaaactccactgtggtatctggcctgtatgtgttctcatcttctgtatgttccggttatcttcgttttgtagtaatttacttttgagttctgatttcctttgctagtgaaaatgacccccctccgtttttcccttctttgtgatgcttatatcaatttgaaagatctctgtacaaaattccttgttgtatgctttactgttgaatagttgtcctagcatgagatagacattgggtcatgcataacgactttgctaattagattgtgttttgacaaacaaattatatttagtgattgagttgcttggtattgactggagaactgttcttgtgacagaaacttgaagctgctctcaggatcttgttacttgc

SEQ ID NO: 43770 - DNA, 873 bp, Manihot esculenta
  Intron number 2 from transcript cassava4.1_021964m (locus cassava4.1_021964m.g) derived from phytozome v7.0 (chr-ID scaffold00480; pos 103562 to 104434)
ttttgtccagttctttggaactgaagaaatgtaattgtttttttttttttttttttttttttttctggtactttaaattatctaatttgtttgtgcatggcgaattcttggaatagaatatcttgccgactttagttggtttactcatatgttcgtttgttttcagtttgtatggttatgtagactatttagctacataattgagttcctataagtagggaattgttgtcaatgttttagttcaaaagtttgcactggatttttatgtacttcatgggcacattatttatatgaacaatagtagttatttatatgtaaaatagtagccttgctttagtaggctggttgtggggttgttatatttccttttaactcttccttagatagatgtgggtagggactagggagtagggacactaccatttccaagtgaagattatgaagcccacaatgtattttgtttaaatatagatgaacaaagttctgtcttttaattattttaagaaaatggttcaactttattttctctacataattttctttttgccgtgttatcatttttttttttttgaagaagattaaacagataagctaaagcaaattataactagtctggggatgttattgtaagttatctgtacactagcaagggaagaaaagaaaagaaaaataagtcaaagcatttaacagctacaatgagagggcaaatgtgctagttttttcttctttcttttagtactttattaagggctagggattctgttcctcatttattaggtttattaacacgtgttggggacctcatttcattccattgttttattttcttgtcctccagagcttttgttgcacctgctgatattcagatattta

SEQ ID NO: 43771 - DNA, 446 bp, Manihot esculenta
  Intron number 2 from transcript cassava4.1_002320m (locus cassava4.1_002320m.g) derived from phytozome v7.0 (chr-ID scaffold04305; pos 132245 to 132690 reverse strand)
gttcttctcctcgaccttgggctcgcatttgccaggttttctctttatcttctctgaattgttctccacatgtttgttgaaatgcttcatcagtgataatagaatagcgtctatggattataattttctaaaatagaataatatggaagtatgtgcgaaatggtgtgacgaatggcagaaaactttgcacactacacagatactttctgcttgcttttgtttttttgatcatatgatgtctacatttctaagccaaattgaaataggctttcctctagtgattcactgcctcgaaaagtattcttcctacttcttttacctattgcttactatttatttggatcatgcatgaactttggtttttctacgatggttgtagatccctgtaatgcaccttacttcgtgtcaaacagaaaattgctttgatttgcaggatactattaata

SEQ ID NO: 43772 - DNA, 668 bp, Manihot esculenta
  Intron number 1 from transcript cassava4.1_003405m (locus cassava4.1_003390m.g) derived from phytozome v7.0 (chr-ID scaffold05875; pos 49492 to 50159)
atctccttgaaaagtagtttcctggtaatataaaccacacccatttctctattcactattttcaacctctcacacttcacacaaattattcaaaccatatattgaatcactgtttagcttcgcatttcacatcttcactcactaactcgtagattttttttttcttcttatgcttagtcgatttgcatttctgggcatgtttcctttaataaattcttttcaccccactttactttttccatatctgggttaaaaaattgaaatttactttaatttctgaaatttttttgatcctgaagtttatcaatatctgggactgggtgttgtttgcttaatagattttgttataaattcaaagccaccaagttctccttattcattttaagcatttttgtgctgaactgtttgatctccgaacatttacaacttcttggtaccatttaaatgtatgggtttcttatattttcatttcacatcgagcttcaaattggaaagcaaattgttttgcttctgataaaaagattttttttaaaaaatgttaataatttatcgatgattgcattattaactcacagcaataaagaaaggcctttagttttgttattgtactaatcatcatcttgtggtcaatagagtaacacgggcatctcaggctcgtgtagcccttt

SEQ ID NO: 43773 - DNA, 756 bp, Manihot esculenta
  Intron number 1 from transcript cassava4.1_000775m (locus cassava4.1_000775m.g) derived from phytozome v7.0 (chr-ID scaffold07859; pos 317092 to 317847 reverse strand)
catagtaaacgggccaaagttaactctggttctcagtaagtctgcttcagtttcaaattttcgttttgtttaggaacgtagtgcattgtggtgtatggttggttttcttggagtatttgtgacattttgcgagatcacaattcaaatgacagctttgatgcataatttactaattttattattttttgctgattgcggcatgcatttttgcctggcatcatcttcgtttccttttcctcttgagagtggattattatctaaattatgggggacgtaagttgttacttgggtaaagaatttgaactattttattgtgacgtatttaataaatttatattgtattaaaaattgttgtattgtagatagtggttagttggacaatggtaatatcttgatcatctgtgtattccctattccccgcagcacttttaaggtgcaatttctaattataaatgcctctttttctatgctttttacgacgccttggtcctttacgcttcacacccacccaccaaaaaaaaaaagttctagagtagcctggtttgaatactttaaacttctaatttataaccccgttacctttatgaaatagccttcatcatcttcattttcaataattagattaggtgatgctgatgcatatgctgagtggatcctttgatagcatggcttcattgtttgatggttgacattctattattcttttatgattgaaacttcttttctttctgcagtgattgtcattatccaacggct

SEQ ID NO: 43774 - DNA, 599 bp, Manihot esculenta
  Intron number 1 from transcript cassava4.1_002723m (locus cassava4.1_002723m.g) derived from phytozome v7.0 (chr-ID scaffold05875; pos 1946457 to 1947055)
aactagaaaagccgaacctttggtctgctgagcaagtaagcaactccatttcattttgtttaacaaattttatggtgatgcaatttagactgactccatatcactgtaattttctatgtacttttatttaaaattttgaagttctagtttatttttatacttttaagttctttcaaccctagcttcttcttccatattggcccttgactaccctcaaaaacttgtagaaagactaatcaaatagaaatcctcttctctagttttaatcctcttgttaaccaaaaatctgttgtatgtgattacctctcttttacttttcgtaggggattttttgcttttgcaaaccttaaattagcctttgtgctccataaaatggcaaggaaatagcattccagacatccatgtttcctccaaaaaaatctttcttagcattttctcgttttttcaaccttcttcaaataaattttgtagaaaccatttagtcagcatattcaagagtcatttgcaggcttttgcctgtttattttacttgtggattttgatgtttgcttctgttttccacagccgaacctgtacattcttgttctcaccctcaaaga

SEQ ID NO: 43775 - DNA, 942 bp, Manihot esculenta
  Intron number 1 from transcript cassava4.1_011393m (locus cassava4.1_008198m.g) derived from phytozome v7.0 (chr-ID scaffold09880; pos 643655 to 644596 reverse strand)
gccgtactgtaataccttctgtttgttgcttatttgcttatttttcttttaattatgcttaatccctatgctgtagtttcttggttgaggttgttttgttggtttccttagtggattgctagtttttgaattgttagattctatcgcttttctttctctccttttttttctgtgtaattcatctgcggtgcatttgggttgtttgatttggtgtcttttttacgggcaattaatttttttttctgataagcattatttattgtgggacttctgtggctaatttttaatgttatatggtgcttagtttctttagttggtttgttaatttgttgctcaggagaactcatccccggttggatggcaagtctttaacctttaattgatacaagttgatttgtcgcaattgtttttgagggattttaatgatttttattcttatcctagttgcaatgtttatggagactgtgatagtttacagtaaggcctagatgggttttgctcgcttctgtgatgaaagtagtattgtacctcccttttttttttctcttgctgaaagatcccactcacgagatcatgagatatccacactatttatagttgaattttctgatgctgccctaaaatatttattcaattaaagtttgttctgcttgagtctgttattgttagcttttcaggtgtgcttagtttgagtttccctgctctaaattttggaaccaaacaaattctgcattttgtttcatgtattgctttttttctgtagttactttgccaaaatgtccttaagactggactgctggaatctgacatgcatgatatttgcctgagagtttgccctctattttcacttttagaagctttgagcattcatatgttttttttcagcagtttaaatttacaatttgccaacacaggtagaggctaagagggctttatcaagag

SEQ ID NO: 43776 - DNA, 580 bp, Manihot esculenta
  Intron number 1 from transcript cassava4.1_010710m (locus cassava4.1_010710m.g) derived from phytozome v7.0 (chr-ID scaffold09702; pos 29665 to 30244 reverse strand)
tactcgtgctagaaggaattccaggaaacccaaatgtcattttttggcttttttctcctacctccattttgatttacgtgttgattttgcgtttacgttgttctttttattgaaaaacttcatatgttttttttgtatctggaatgacatttctatgattctatcaataatgtgattgatattcactttgatttttaaggttattctactgaattttggacgtaggttataaatgcccctttcatcattttgtatccgtaaactgtttagcatcgatcgaagaatttggttctatttgtgcgattggttgttatttttcgtttatctacctgcttgcatgcttacctgtttggctggtgattttaatgccttttcatctgttgaaatattgatgtctttgctttgaatttcatttataaatgtcaaactagaagcttattctttatccccactctaccgccattttccttttggagggttatccgatgagtaattgttttctccgtagcaaaaatttggacaacctttgttcttcttggatgcagattctaggttctcgcagcaagagcttcctgcctgc

SEQ ID NO: 43777 - DNA, 361 bp, Manihot esculenta
  Intron number 4 from transcript cassava4.1_001647m (locus cassava4.1_001640m.g) derived from phytozome v7.0 (chr-ID scaffold05219; pos 127276 to 127636 reverse strand)
tcgatcgtatgagttatttttggaagacaatctttctatcaaaagagtgtaatttagtggtttgtacaataattggttttttctttgcttttatttatagccatttaatcttagtatgtcaaatctgatcttattgtaatcataatcattttttgctttctgcattttaagttttcattgtggatttaagtctaaatgttcaccccctgtgcccattttatgtacatgggcttctttagctttctctaactgttcaatatttattttgtggttcaaatgcaatgccttttttcttttattattattcactattagtttctttgcagggaagtcgactcttacagattctcttgtggctgct

SEQ ID NO: 43778 - DNA, 720 bp, Manihot esculenta
  Intron number 1 from transcript cassava4.1_029423m (locus cassava4.1_029423m.g) derived from phytozome v7.0 (chr-ID scaffold06791; pos 165934 to 166653)
taaaagagcaattggtgttctagaaagcaaacgtaagtccaatcttgtgtaaatttgttgttatttgtctttgttggtgcagcactagaatttaaccatatcagttttctgctgtcttttcaactttgtatagtacttgttatatcaagttattgcgacaggctaccttgttattaatagtataacatcgtatttttaacaattttgtcaccggtgagctacagtgttaaagtgttgaagctggaaggcatatgttttcccctactggagaaaagcaattaaaaattttcttcttgttttaacactttgctttttggtcaatagcaaattatttccttttacactgggtgtttctggaattaaaagtttgaatgtctgtctgcaactgatccatgtttttgcgctcatccagtttgtttagagaatgcatcttggaagtttgaaccctaattttgttgctagactgtataaagtttttctgtggttatgcagaagtttcacattgactagcagaacaatgtattcatgtaaatgaaaattgagactaaatcaacaactgtatgattttttcaaatagattttacatttgaccacagtactataattgatctttggaaattttcttcaattatttagcaattaaagattctaaagctcaacacgcatctttacattggttttccagggaaaagtagtatatttcttatctcaccgttgttg

SEQ ID NO: 43779 - DNA, 921 bp, Manihot esculenta
  Intron number 3 from transcript cassava4.1_017606m (locus cassava4.1_017611m.g) derived from phytozome v7.0 (chr-ID scaffold06799; pos 72644 to 73564 reverse strand)
aaggtctcctgcatttcgtcctttcttttttcctatttcccttttcacttttttctgtgaattggcatttctaatatattttcttggttcagtatgtcaaattctcttacttttgtttgaatcatttaactttttgtaggaaaatttatatcacagacccttctcaaatagtttttcctctgtagatattgccattttaatacacaattgtcgaggaaactaccttgtgcttgtttatctctgtttttcttctcttcaaaatgtttgactgttaatgttttaatttagttgattaaacttttggacttgggcttttcagtttctcaattgtatcattttttttatgcttcaattgggaactgtgatgtgtttttcaatttatagaatttgttcttaccctttgtttggcttgagagaaatggagagatgagaaaacaaaagaaattggaatttctgtaatttctcttgtctggacagtaaatagaggatagaaagaggagaggaggagaaatttgatatcccaatcccctttcattactctaaaatatttttctccaatatggaaagatatagaaggaaatggagattagatattatttatattaaaattacccttaacaatatataaaagcaaaatcacaactgaagacaattaaataattttattaggggagaaattttatttctcctctattatagtaagacatccaaacaatagaaataaatttaatgtatctttttttttccctcttcatttctccttgtttcctccatagtgtttaaccatgggttagcagaatgcattccttgtcaaaattgatatcactcatatttgtttatgttgtctccgcataaaactcacagctttaataatctcctattgcaggatatttacaaaagaagtctaagagcacaaaacgt

SEQ ID NO: 43780 - DNA, 966 bp, Manihot esculenta
  Intron number 1 from transcript cassava4.1_017606m (locus cassava4.1_017611m.g) derived from phytozome v7.0 (chr-ID scaffold06799; pos 73854 to 74819 reverse strand)
gcccctgcccctcgcggcgtcctacgccattgcaggtttgtatggtttttgagattgtggtttcagatgtgtgctttctaagatttgtgagatctattgatgtgggtttctgaaatttttgacaatgttaagatttatgtgaatgtgtttgggtttgtgagatttattgaaaatttgttgaagtaaatactattgtgaatggaccgagggtagcgagaatattgaaatgactttctgaaattcttggaaatgccaagatttatgtaaatatcccaagggttttaattgtgagatttattgaaaatttgttgaagtcaacactattttgtgattgaatcagagttgtttttatgagattgaaattttgttctgagattgtgcgaaattcctttttttggtgattatgagttaattggattcgaaaagtttccgattgtaaatgggtaaaactggtttgggacatatttgggtagtgtatttctaaactgatttgagttcgagtacttaaaatttcgcgggtgctctaccggataccgtccctacaggtgccctagacacttgctttctttcaactggaagttctctttcccctcctcttgcctttcccccaaaatcttgtcattttgctgtcaactacacccacacgggataaacgatgtcatatagtctctgagaccctcataacagctgcagcttcttccattccaactacaaccaaaccaacacatcatcagaccgtctgttcggcagcgccaccgccactgctgccttcaaccaccaataacacgccaaaaatcccctaattcagcaactagaaatcatgtactcctgttctcattttgtttcatgtgattcttgctctataataaaattattttcttttcttttccaaatcttcgaatcttacatagaactcacgtttcttcttttcatttttttgattaattgcattttgagtttacaaca

SEQ ID NO: 43781 - DNA, 478 bp, Manihot esculenta
  Intron number 1 from transcript cassava4.1_018818m (locus cassava4.1_018818m.g) derived from phytozome v7.0 (chr-ID scaffold12794; pos 2237404 to 2237881 reverse strand)
gcaccttggaaagcttcaggtaaaatacatgaaaaaacttattatgtgcatatgaaatttttgctaactgaactgtagtttcattaccataataatgaagtttgcaggtttttcttgcaactcagatgatacttctcatttatttgtgaatgtccattaaggcaaagaatgctcatgagcaattttgagctctatgtgagattgtattaagaccactttattcatattaatacttggaaccagaacccagctctcggttaaatactcaaaaatgaaattctgtcactttgtattctcttgctaggttagttttccaatagcctgtatcgtgtgttgttatgttcggaatgaacacggctttagctcaacctggctgaaaattcttcccaaccaaaatgtctttagttacatgtcctgattttgagctgttattttgtggataggtggggctttctcgtgctcaaagacttgcacaggg

SEQ ID NO: 43782 - DNA, 810 bp, Manihot esculenta
  Intron number 1 from transcript cassava4.1_012175m (locus cassava4.1_012175m.g) derived from phytozome v7.0 (chr-ID scaffold05875; pos 1128785 to 1129594)
gaacgttacgtcttcaagcgccgcagtatatattctgttcttcccttggtatgcatgtacatgcctgtatttatggatttttcctgcccaaatgttcgtgtttggatgttatagcaaatgcaccctgttctcgttttctgtaattcaggtttgtggtttgttaattaattatttatttttgggatggttgggagggtgccattgacatcggattagcttaattaggagatgtcagatctgtgctctgagggttatttggaaactattatgtctctgttcagtaaccttaggctacaatttttatctaaatgttgagcattgtgttttaactttggatgatgtgaatttgttggttacatgacttaaaagcatttgatagatatttgtgagccttgctttcagttttcctactatgctgacaggatctgaaagaaaaagctactagttgtattcataattgggttatttgaattacttacaaatgagtttgatttagttaagcagtgattaccaagttaagttgatatatgtggaaattttgcttttatttggaatacttaatatgcatttatctatatgtagcacccatatattagttgtttttgttcatttagagatgcttgtatatgaatggaatgtgtacattatgattttgcgtgccatatctttaaatcccagaattgtttgccattggccttcttacacgagttctaaagtttaaatatattggcaagatgttttggatgttagttgaattcaattacttggtgtttatccctcaggaatttatatcatcaatcttgggaagac

SEQ ID NO: 43783 - DNA, 645 bp, Manihot esculenta
  Intron number 2 from transcript cassava4.1_016695m (locus cassava4.1_014956m.g) derived from phytozome v7.0 (chr-ID scaffold08301; pos 192609 to 193253 reverse strand)
ttgtgattcgtcagcttgcagagttcgaggcagtaattattattgctattatgttttgtgaaattttggcttgctttgcgtgactgaagtgattgtttctgattcatgattttgttgtttacagtttaatcgaagtgaagtgtttaatttaatgtcttagtgaattggaagtaactgattgtttagggttttagattttgttttgactcattaacttatatgctgttgttaattaggcaggtgtggtgtatttggagttttgattgattttgagtggtgtggactatactttgtttccaagtaaaatttgatatagcaaaggagattgttcaattgaaaataatgattggactctgtcactaactagccgaataagtgtctggagcaacagagcttctagtttagctttccgtcaaatttgatccacttgggcgtttaaggaacccctgcccatgagatttgcatctacaacaagttgaattgtgtgaagtttaaatagtacagatgcaatggtgtaaatttttttgaatcttaatgcctagataggtctagactctagagtaaatttatatcatgctgttcttctcatgtgtatgtttattgtgcacaggctacatcaaaaaaggtgattacaagagaagactg

SEQ ID NO: 43784 - DNA, 410 bp, Manihot esculenta
  Intron number 2 from transcript cassava4.1_000292m (locus cassava4.1_000292m.g) derived from phytozome v7.0 (chr-ID scaffold04165; pos 437439 to 437848 reverse strand)
agaagcttgtggcagagaaatcagctaacatcctggtaaaatcatcaaaaaattggcatgattttgcagcaaattttctgacattttggtaaaatgggctactaagttggtttttttttcctgcaaaaagtttgttttgttgcctgctttcattttttttttccgggtacttcctgtaaatgttccattttcctttgtgtgtatgattatttcttcaaatttttattattgttcttaaataataaatttctttcagctgttaatgtaattgtggtttttgagtttgaaaattgatttctttccattgatgtaattgtagtctctgttaattcacttttattgcgtccttgaacatcagtttaataatcttctattggcagactaaagttaaaccccttggtggtgttcct

SEQ ID NO: 43785 - DNA, 876 bp, Manihot esculenta
  Intron number 2 from transcript cassava4.1_015972m (locus cassava4.1_015972m.g) derived from phytozome v7.0 (chr-ID scaffold05859; pos 583218 to 584093)
ttgaggaggtattatgccgttgcacttcttttatgtttaaaagttgtcatttatgtggtttaggtgttgccaatctttatcagatataatatttttatgtcaaaattctggatcagtcaacttctgatagaccattaataactgttggaatgtagtcttatcttatacaaattgcatggaaagttaaatgtgctcactctgagggagtatttggcagagtgtttggattaatgggataatatgataggggagcacaattgatcttgatgctccaaatgtctttaatctcttaaagaaatttttttctctttaattcctattcctgtgcaattctgttttttatatgttgccctttatgtttgatttaaaacatttttttacttattctcagcctaacatcaaatgtaccttttttatacagccctataacacattaatttattcaatttttccttttaatcaatgatcagtaattcatcttagattgtcatgcaatttttttggttactaagttcgtcaaattttcatgctagtagttctatcattatgtcctctgactgttatgatagtcatttcatcatctgctctgtcatttgttgcatgttttctgtaatttatatgtggctgttactttcttctttataaagaaatgactcatcttctctttatctaggcatcttgagctcaatgcttctttggattggctattattatgtcatggatgtttctttagtcaacaatgggaatgttataggttgtgaaagtggatttattttcttagttgaggtcatggtgagatgaatttcagtccaatgatttttaacaaagagattccccccttcttttttgggagcaggcagagggaataggtcttca

SEQ ID NO: 43786 - DNA, 661 bp, Manihot esculenta
  Intron number 1 from transcript cassava4.1_025539m (locus cassava4.1_025539m.g) derived from phytozome v7.0 (chr-ID scaffold03299; pos 143421 to 144081)
ggacttgcagaaaatcaggtgagctttatattttcacatcgtgatttggaattaaaaccattatcacgttctcaaatatcagtagctgaattacttttaaaaaagagtaagtaataatttcttttctcattattattaaggagattaattgtcaaatttcactcctgtaatcttcaactttttatttaaattaattagtcgataaaattagctaaacttaatttagtttataaataaaaaataggctgagtttcttgatttagttcaaaagtcaataaagtcaatttattatctttgagtaaattattcttttcttgatttgactcaaaattttgaaaactcaatttcttaataatacatttatgaaattaacaatgtatcgttatgatgcacatgtgagattggatgtagaaaagatgtgttactagaaatggcaaaaaaagaaaatggattttatatggcagcatttgcaaacccaatatgctttgtctcctttgtttgaagatatacatataattttgttataatattataaagtgataatgtccattttgatatatttttctcttttactttctcattcatcatatgataataactccagcagtgactctcttctttggcagctttccttcgaccttcttgaatcttggctagaaag

SEQ ID NO: 43787 - DNA, 451 bp, Manihot esculenta
  Intron number 1 from transcript cassava4.1_006070m (locus cassava4.1_006070m.g) derived from phytozome v7.0 (chr-ID scaffold10963; pos 344563 to 345013)
agtgcactgctttctacctcaaaatctggttccaagtactctccctctctgtatttctgctatctttgaaattctagccctttgcctaagaaacagcttattaataagtaatggttgatatagctcaaaaagcagatgctgaccctaacaaatagttgagtatctgtttttgttcttaaacgccatttttaggccaaaggggatatggcaggggaaatttttctcacaaaaattacacagtggcaaattgaaaataagcccagctatggccatgagactcaaagtataacatgagactcaaagtgtaaactttgaaaatttgaattaatgcccctattggtttgtaagtaagcttagatgcatttgtttttatttcaattattttatacaccagaagatcggattctgatgcgttgtttttgtaggaagattttgagaacttctggtcaga

SEQ ID NO: 43788 - DNA, 851 bp, Manihot esculenta
  Intron number 1 from transcript cassava4.1_015556m (locus cassava4.1_015556m.g) derived from phytozome v7.0 (chr-ID scaffold12759; pos 35567 to 36417)
cactctgactgtcttgcatttttctctttcttcaggtattaggcatatgcttctgcttcttctgctccctttgctctctttagttcacttattgaagtccttgtcgtcttcttcttcttcttcttcttctattgaaaacagagagcaaggggaattgaataacccatttgtactgaaattttgaagtattttctttttctagtttgcaatgctaatcaggtgttgttcatggcttaactttgattaagcagattttgaagctcacttcgccttatcagaactacaatcaatgattgttactatttatggcaaaatctttacttttaaatatttcattgttttttttgtgaattttgttaatgtttctaaaaaaatttatattcatttgtattgttttttttctttgaagttacagactaatttgagatttccaaaattagattttccttttcgtttgccttaattccagtggtgatggaatcaaacttttggggattttttcgaaagtgcataggatcatctgttttagattgcttataatcaggtgaatttaatttgatggctgtatgatcgtagttaaaaacttcattcaaaatagtatactgggttctggcacagtgttatatcaaaatggcttgaaagtaatgattcatgaggatcacacttttgatttgaatcgatcagtgttttatttattgaattcaatcttactccgtgactcaatgattgcacattcaaagtttccttatcggttctcgccctctttttatctccctgaaatgctgtaaatctgtggatttttatttgtcgctgatcttttcttttttcttttacttcttcaggaactgtaa

SEQ ID NO: 43789 - DNA, 504 bp, Manihot esculenta
  Intron number 4 from transcript cassava4.1_025123m (locus cassava4.1_025123m.g) derived from phytozome v7.0 (chr-ID scaffold10963; pos 539861 to 540364)
gattccccagttccaattacaaggtcatttgttcccctttaccattatctttttattcttgacttgctatatttattgttgttgctttccacattagttctgatgctcccttctaccatcatcatttcaatacttgatagctaaattgtcttcttttctcgttgtgttctgctaggtgtgttcgttattctttccaatcaggtttttctgtaaattggagagcatatattacaatttaacaagatagataattagctgagaccaatttcagtttctaattcaaaatgaatctattgattgcacaaatattgttatattttgttgcaaaatcaaagtcttctttcctatttagttgcatttttaacgcttcattcagtatgttgttttctagtctggggacagatccagcaattttttagtgatacttattacttaaaattcaagagatcacttactatggtttgtgcaggcaaggcatctctgcccttgaatttgacaccaagg

SEQ ID NO: 43790 - DNA, 228 bp, Manihot esculenta
  Intron number 1 from transcript cassava4.1_021157m (locus cassava4.1_021157m.g) derived from phytozome v7.0 (chr-ID scaffold12513; pos 70819 to 71046)
tgcctgattctgtagctaatactagcagttcacaggtgactctctctctcactccctcttgtgtgtgtgtgtgtttcaaacattgaaaactcgactaagttcttctattattacttggcctaatacgttaatgaatgtgatgatttaaaaattaacttgatgttggttggttggttggttggttttgttttttgttctgttgtttgagctatgtaggtgagacagggg

SEQ ID NO: 43791 - DNA, 880 bp, Manihot esculenta
  Intron number 1 from transcript cassava4.1_019331m (locus cassava4.1_019153m.g) derived from phytozome v7.0 (chr-ID scaffold06582; pos 181334 to 182213 reverse strand)
aactctgtaaagaactgctgttgcccgaaccggtttttttttttccttttgtcattttccattatttcatctgcaatgagggttttgcttttggtttcttgtgctaattttgagcttttccatgctttgatttctgataattttgggctttaagtgaaccaattgcgtgtgttctctatatggtatgtttgagaagacttctgattttggtgatttcttagggaacctatatttgtttgttcgtcatttagtgtcatgtgtttccattattaggaaatagaaatctaaataaattttatatctcttctctcggaatgagcaatagccgctattatggatggatttgtgaaattgaagtcagggagaataccattgtaaactgagaagattgtgtttttagaacattctttgtgtgtactattaggtttatgtgtttggatggaggtgttgtttatgtaaggaagctgcaggaaaacgactatctagttttagcaattacttgaaactgataatccccttatgttatctgctctttaaaagactgtttgaaaatgctactgaactttcagaacattaaagttgccagagctattcaaagtgcactttggagatatattcctagtgaagatagtctacctggacttagagagtgggtgtacagctgcaagaacttaggcatgggccatattagggattatctagtgactctaaattgggatctaacattttgtataattggaatagctttaatcgtcaccattttactcctttcatttattttagttaatgtcatttattctttgggatactttgttttcatgtcattttggttgtgcagtttggacttctaaaagttttcttcctgtacatgatatttagg

SEQ ID NO: 43792 - DNA, 997 bp, Manihot esculenta
  Intron number 2 from transcript cassava4.1_005051m (locus cassava4.1_005051m.g) derived from phytozome v7.0 (chr-ID scaffold06825; pos 480280 to 481276)
gtacaagagaacaaatacccacagagaccattcaggtgtgctcttgttgccgctgaaatttttatttctaagacgttgtgcatttgtacttttcatatgaaaactgaagcagccaatcaatttgaatatagactacagtttgtttgagttatttggtgttcttacatgcaaaatatttggttgctctaagcttgcatccatttcttagttgagcattggactgttttctgatggtatcaaaatttaacttgttgactgacagtgtttatagttgtcatggcgaaataataatgctaaattgcattccgtcaactaaatgtgaaacactaaagtaaaattgattcatttgttcctatatttttagaatagaagtgagattgtgaatcttcttgaagatccatacttgttgccttagcttttgcatttgaatgactgtggttctacactgcaatataattgcagaaggaacgcctatggatattaattgaagtcagttagtatgtgctattagcttaacgttattgtggaaagtgtgtcgactttctcttttcccatgtctcagtttttaggttaaaggtgtctttgttgtcgttgagaaggagattattggttcagccatgggcatggcaagagtaactgaccaagaacttgtgcaggcaaattctgcagctttattgcgttctccctgtatacatatgcattttttcgttacatactactaggagcttttatatggtgtcagaagttcatcaagaatatccttttagctttcctagtaatgggtgaggagtaacttagtaaaactatataaatagatcccactctctaatgctcttcagattttggattttccttattgaccttttagttttactttgttctgataacacaattcacttgttttctggattctttacctatgttttgctattttatttgatcaagagttatatggagtcctattcccttttttttttttggcagattttgactgagc

SEQ ID NO: 43793 - DNA, 583 bp, Manihot esculenta
  Intron number 1 from transcript cassava4.1_008406m (locus cassava4.1_008406m.g) derived from phytozome v7.0 (chr-ID scaffold05019; pos 231723 to 232305)
ttgagttcctctcgagccaagcagttgttgatgtatgcttttctgacctttgtgtttgtgtctttcttttgtctgtatgttatttctgtgactcatcctttgattttctagattattgtagtatttctaagctatctaatggtcttttgctaaaagtttatgattgccagcaatttgggaactggacacagaaatttacttccttctcgatatatgtaacatgaatgtgccatgtttatgcctgtaaagtttcttgaaataatcaagttgcacctataatttatgatctaaactcagggagaatgaagtatgggtgcaaatcaatttttcatcaagttttccggacacttaaatgtcaattatcaatgacctttttgacttccatttactgaaatcaagtgacaatctatttatattcccatgttaaaataaaggagtaaaaattgactgatggattcaactcttaaggatgatattgatcttgtatcattttcttcccctgttatctctcctcttatccctgctattttgttccattacaaatgcctctctctgtaggtggcacaatataacgatccccgag

SEQ ID NO: 43794 - DNA, 668 bp, Manihot esculenta
  Intron number 1 from transcript cassava4.1_015991m (locus cassava4.1_014302m.g) derived from phytozome v7.0 (chr-ID scaffold05280; pos 713219 to 713886)
aaagcccgtccacaaggtcctcggtggcggcaaacgtatgtttcctttctcaacctttacgaattgtctgttttggtgctttgctatgcatcaccatttctttatgttggttctttaggaatgtgtcagtgatggtaggtgaattttattctgatccctcattatatatctaggttaattattgtttttatgtcgtgatatatctgctggttattgaagatccagatctggtggttattaaagatctagatctgactttgcgtcagtagatctgggttctgtagttttgattaaccgatgtttatttcggcctaaaagataggaattttatttagtagattgaaagagtgcttgatgtgaagcttaccagtattcttcttccttttgaagcagaattaagctgagcaatcataagaggaggttattaaaagtaatttagtttttcactggccagaaagatttcctgcacgaactttggtaattttttagaaatagttaattgggtattttgactaattcccatcaaatgtcttggtactgtactgcattgcacattataaattattgataaattcttatatgttctactcagttttgatgacgtcaatcgcgtgcttcttttttcttgcatctaatttctattaattgtatgcatgaaatagctgccg

SEQ ID NO: 43795 - DNA, 658 bp, Manihot esculenta
  Intron number 2 from transcript cassava4.1_013596m (locus cassava4.1_013596m.g) derived from phytozome v7.0 (chr-ID scaffold03859; pos 405729 to 406386)
ttcactgttggtattggtggtcctgttggtactgggtaggtttctccttttcttttatgcaatgctactgatggtattatctgcaattattcttcttctggtaagcatttataaattattgatattgctagtttacataccacttctttcattatattcattcaatcaatgcatagattttgtacttttgaggttctaatatgttgtgcaaatattaggaatttctagcttttgtttgacatttctttccttaacaatgttgcagctcttcataatcctggataaatttaccccttgtttggtactaaagatttcacaagaattcaattcaattcaattattttctaccaaatttcttatatggacttgaagaatttatttcttttttaacttgcaaaatttttgtttttaaagaatataaaatcatgcattatttcgttagaattcattttacttcttttctcatgtgaaatgaattatgccaaatggaggattaaaaaataataggaagttttactttatgccttctttttcattttcctcctccaggttttcttgctggactcccttatctatttcgtatttgcattactgtcctaaaactcaagaatgcattctgatgaaatgtcatttcacactgtgcaggaaaaccgcttta

SEQ ID NO: 43796 - DNA, 893 bp, Manihot esculenta
  Intron number 1 from transcript cassava4.1_001815m (locus cassava4.1_001815m.g) derived from phytozome v7.0 (chr-ID scaffold12525; pos 609479 to 610371 reverse strand)
ggtaaactctccattttatctgtttcattctgtatattaatctctctaagcttttgcatttcaattgaagctttttcaccgtaattatatatctcattgccattaatttatgcagttattgtcatgcgttttggattaattttgtataaatgtgattgcggtttctgttttgtctttaactttcagaaaattttcatacaacatgaaagatatagacgcattagataatgaaaatgagtattaattattttcaaacaatttgatatggtatttggattttcagaaggtgtttataaattgcagatttgtttttaggttttggaaattggatcatgatgaaattcttaatcatactcaatggctggggaaaagaggagaaagggaaaagagtttgttatttggagaatcttcttattggggtttgtggattcatacaaagtttttttctactttgctggtgacaaattagaggggcgagttcaatagattgtgcgaatttgattattctcaatggcattggaaaagccattttcaggattatgctatacttttcattttcgctttctcgcttttttttttttttcgggcaatcaaactgatgttgatggtttctgctaagttatggcaatgaacctcatgagcagattgtttttttttttttttttttttttgtaaatatcactcttatatgtgcatgcccggattgatatttatttctctttcaatttttttctttaaatttcatatttaaatttatagggagatgtctgtggattggacctgtttcgaaggtttttaataaaaatgtcctctaacacgaataatatgacacttattgaagctctattgttgtatcataatcaacacataacaattctggtttacagcgaaaa

SEQ ID NO: 43797 - DNA, 172 bp, Manihot esculenta
  Intron number 1 from transcript cassava4.1_021252m (locus cassava4.1_021252m.g) derived from phytozome v7.0 (chr-ID scaffold04137; pos 242196 to 242367)
atccaactgtcatcttgttttctttggtttgttcattcattcaaaggctagatatatatgggtccgacctgtttatattggaaagaagataagtacatcattactgttattattcaatttttctcatcttctgtttgttttgtacattgtatcttgtgtgtcagaacttgca

SEQ ID NO: 43798 - DNA, 716 bp, Manihot esculenta
  Intron number 1 from transcript cassava4.1_000903m (locus cassava4.1_000903m.g) derived from phytozome v7.0 (chr-ID scaffold06906; pos 371253 to 371968 reverse strand)
ggtacagtaatagtgatttccaataaatttggagcgactgattttgtttgttttgcgtttttgagcttgatatgctgtctttggaatctagaactgctattttttatcgatattttgggagtccatttcagctcgcgctaatgatcgcagaatttagtttgggcagacaaattcagtaaaaaagaaaaataaaaaaaaatcgctgccttttgtgtttggcaaatggaaaatgaatatattctcttcaatcaagctgggtagttgaatttgatcagtcaaaggttttaaatttctgcagtttcatcttgctttaaattcctgatatgaaaaaaagttaatttatttaccatctatcatgaattgattgtgactttaatttatttatcatctatcatgaattgattgtgacttttcaccacattaatggcaatttttggaattttatttgggcgttttgtaaacctcatgccgttttcaatcatatctaccgatgcttctgagaataactattttttagagttcatccaaaaaagtaaacgttttagtgtaaagcgtcacttgtgtcccaaatgctagcgaaatttcttgctgtttcattactataagagtaaacaagagttttaattctagtaagctagttgttcacttttcatttgttttattatatatatattttttcagctgctgaacatccattcaagggaatctttacaact

SEQ ID NO: 43799 - DNA, 915 bp, Manihot esculenta
  Intron number 2 from transcript cassava4.1_018357m (locus cassava4.1_018357m.g) derived from phytozome v7.0 (chr-ID scaffold04251; pos 206768 to 207682 reverse strand)
aaaggtttaagtctttaagctcaagctctcactctctctttctctctcgttttcttacatgaatttttacctttcttcttcatgaatatattacgatatccaaaaatgaagtaagatttttgaagcatgcaaagcttcaagcatgtgcgtggttttacccgttgcacaaatcagcgaatgaactatgaagcctaaaaattacccatcaaaagctttttagacaattcaaattagtccctctatctttttagaagaatctgcttctttattgttcccttttcccttcaactttctttacctttgttgggaattcttcgtggccaaaatatataggctgctctatggagtccccaaggaaagaaactcattaaaaaaaaaaaaagtaagaagaagacagaaatttctgagatttcttgcatggggaagtggggaagaagagacctaacaagcgttgactcttttctctccttgaagtcctccttacaaaatcagtctgcagacagcattaaaattttctgcagagagggttgctatttccagccacccttttgctacttgtgcttaccaaagtgatttttcttatgcaagtgaggcaaaattcaacaatttaggccaaatcgtttctctttcaaataggcaaaaagtacaatatgaaacagcaagattttctgggagcactattacagctgctgttgacagcaaaaggacatcattttccataataaataaaccaaaccaaacaccacctctaacataaggttgtgaatgaaccaaccagctaaactgccctctagtcatttcaaatcataaattcatgagctaactcaagttcaattcttgtgtttattatgtgctaactttgtttgttttgaatatgtaggtgtgaagtcggtggaggtaaacagaaagcaaagc

SEQ ID NO: 43800 - DNA, 610 bp, Manihot esculenta
  Intron number 5 from transcript cassava4.1_006472m (locus cassava4.1_006472m.g) derived from phytozome v7.0 (chr-ID scaffold04857; pos 109094 to 109703 reverse strand)
gaaaggttgggtttgattctatctccctctttctctctcaaacagagcacaccttgagttcttgaccctgcacagacaactacaaaggcacttttttttgtttttttcttcgctggctccattgtgcctagattactaaactatgagccaacttgggttggaatgccagaagatgaatagggtggtcaaacttagatttaaaaactaagtacacccaatttaatcaggataggtgtagatccaattaaggtgcacagcagcacaagctagatagattgctttgttgcataaaatcatccaatgttttgtgattggaatatgtagttctgagagtagctttttgttaaaactcacattataatttaatgttggaatggcagagaattataaagggttaagagttaagtacaccaaattgaaataggctatgggcggctcaattcaagcagcctgcctgtttgttagtctacactctgtgatttgcaatattcaattattggatactttaatttctgaaaaaaattagaccatttaatcaaattagtgctctgggattttctgataatatagtcaacaacttttttacaggtatatagaggaacccttccca

SEQ ID NO: 43801 - DNA, 459 bp, Manihot esculenta
  Intron number 1 from transcript cassava4.1_005177m (locus cassava4.1_005177m.g) derived from phytozome v7.0 (chr-ID scaffold10963; pos 253294 to 253752 reverse strand)
cctcagattcttatccagatcttcagaatttcttggtgggtttttgtcaactgacacattgtttcactatttgaactcaaaatcttttgagttttttcatattcttaatagtggtattatttcatttttatttgcaggtgtccttcttttttttttttatgggatatttattgtataaatctacttttttttcccttttttttgtgaatttattctccattttgtctttctgggtttctggaaaaattgaatctttgtatacattttccatgtcttttggagattcctcctttcttttctctctattttttaaatcaattatttcgtgaaactaataaaatttaaattggtgcaagttcctacatctagtttgttgacaaatttatttctgttattttgttgggcgttcttgcaatctctgcaggattttgcttttctttggtataaattggaagtttt

SEQ ID NO: 43802 - DNA, 954 bp, Manihot esculenta
  Intron number 1 from transcript cassava4.1_013115m (locus cassava4.1_010509m.g) derived from phytozome v7.0 (chr-ID scaffold00131; pos 172007 to 172960 reverse strand)
tcttgctacaagggcaaatacgccggtaacctcttcttcttattctcctttctttggttttagcttgtttggcttgaatctggagtttttttaaggctattttcttgttagatcttatcttcggttactgttgttttgttcattgttctgacttgattagatctgagtttgttcttatttgattcttttcattttcagattatctgttagatctattgctgaattagagatgctgaacttgttttgattctttatatgatttccccgatcactgtgttttcgttggaatctgattcttcttcttaattatgatctacctatctgatttgcgttttcatttgtgtgacgagtgttatggcatgagtagatctgtttgttctctgcaaatttcttaatgagcttgttttttttttttttaattctagactatcaaatccttttttattatagttcactttacgaagaacagtagtttgtagaacgaaatggttgcagttctctgttttgatcgatcaactaactagtcttgtggtgtacaaacttctgatttacgcactcgtcttttgagtcatgaagtgtgttcagctaagctgaatcacttgggtcacctgaacaaaggaaactatgttattatcattcatgatgtaattatattttgttttctgtttctaaatcgcgatgatttggaatcgaatgaatgccaggtaccttgatcgaatgaaatcttgtgataaatgatgttaaacgttggacaagcgtaaatgttagtatgttattagtcgccgctgaatttggcgctttgattggtttcttgattttatgttgtgagtttgatcttcaaattgaatgaattttgctgggccttccagatcttgatgcttgtctaattggtttcaaattccttcctcatatatgcatctaaacgtctaataagatttttctctctcattgcag

SEQ ID NO: 43803 - DNA, 561 bp, Manihot esculenta
  Intron number 1 from transcript cassava4.1_010192m (locus cassava4.1_010192m.g) derived from phytozome v7.0 (chr-ID scaffold11581; pos 791624 to 792184 reverse strand)
atttgctcgttctatacccttcatagttctccgtaattgtctccctatcttctatataatgattttgttcttgtttctgttctgttcttgattatggatgtttttctgtttctgggtattttgattttagtgattactgcttatgagagggcatgattggagcttactatgtcaagtatcagtgcttttttgtgttgtatgctatttcagtgaattaattaaattggaaagtataaagaaatcaagtatgaattttatgggcatcctctataagctgcaaactgggattagattcttgaaaaatagaactggcagacttgcaggggttgcatatcttttatttatctggtttatccttaatggtgaatcattataaggcgtcaacattgtagaagaatttttgctcttactttttaagaaggtgtggagagtactctacattttcttgaattgcatatcaaatcagatggattttttttgtttcctttatgttcttattgattttgtttttgttcttctccaaatcattcttgtcccttctatggcaggaattggagatca

SEQ ID NO: 43804 - DNA, 784 bp, Manihot esculenta
  Intron number 1 from transcript cassava4.1_006605m (locus cassava4.1_006605m.g) derived from phytozome v7.0 (chr-ID scaffold02477; pos 306457 to 307240)
gagctaaagtcattctttctagtcatttggtatgtgcaattcactcaatatgaagattttggtttcctgttttttattttttttttttattttttttttttttttttttggggggggtgctttttctgagtttgcaagtccttttcggtggaagtttttgtcctttactggaaaagtttgccaactaaatttaatttttatagtttccgatatttgctaaactttttcttgtattgtctttgttttagtttaatcgtagaatccatgtacctatatgttttgatctgtactattttaaattagctgcataattagaattctcgtgttttggttgctggtttattggaactccatttctgcatcaacgagtctgaaagtctggtactaagtctttagattatcatttgttgtgaaagtttttcacctttttcttttctttgggtggttgtgcttattatagtttgtttttacctatttaagagcatatatgagcaagtcaaataatagctgcattctgcgtgaacagcaagttcaaacctatggctggtaaataatgccactattgatttgtttacaaggaatttgatactttccagaatataaacgttgcgtatcagtttgcagccttattgcatatctgatgtccattggcaaagaaccagagagatgaagagggcggggattctgtgatattcaaaatgcttgtggcttttgcccatgatcttgtatttatttttaatggatttcagggacgcccaaaaggtgttactccaaagttcagctt

SEQ ID NO: 43805 - DNA, 889 bp, Manihot esculenta
  Intron number 1 from transcript cassava4.1_011284m (locus cassava4.1_011284m.g) derived from phytozome v7.0 (chr-ID scaffold10954; pos 20988 to 21876 reverse strand)
cgggcaggttcgagttcttgttgtcggcgattcaggtctgttttatttttgatcgcttctttggtattctgcttactttgggattccgattggtttttctggtttgttataaacctcccatcacctttcacaactgcccttcaaagtgtacacacaccaccaccacaaccacgacggccactaagccttaatcccccaactaggtggaagcggctacgtggatctctttttgctattcagttctgtttggagacaatactcaaattatataattatgtgaagaaatggtatataatgtggcagagagattcatctagggatataagtgcatctccaccagtgaaataattataggaactttatggactatcaataggtggttcttctgtaacttcccaatctgcacaaggtaattgttgataatgtgaatattaatgaacttaaaggttttttgggttttgtattgatcacaataacatcacatgtggttgaggattgttaatgtgttgtcttaactatctaaaaaggttaagggacagcacgctttggttataagttagaacacaggttagtcttttgtatttcaagaatgatttatgtccgcaattcttgcattggttgaccttattaattatcttatagtctcttgaagtcaaatgttgattgcaagtctcaagcatctcctactatcatgattctcaagttttatcacaataatcctaatttcgtgtagttttgctgatacttgattatactcccactcgctcccctcagtttttttttctttttgtactttatgttccgcttgctgtatctgaaactagacttcatgttctattattatttcttgttaggtgttgggaaatcttctcttgttcatctgattgtc

SEQ ID NO: 43806 - DNA, 959 bp, Manihot esculenta
  Intron number 1 from transcript cassava4.1_013546m (locus cassava4.1_013546m.g) derived from phytozome v7.0 (chr-ID scaffold12525; pos 543227 to 544185)
gcctaagaggattcttcaagctagctttatttcaagtacgtccgtcctttgcatacactagtagttacatttctgttctatatgattattgattggctatttcgtgaaatcaaatgggtgttcagcatttcatgaatatgttatgttagttcaagcgtcactagcatttttaagcggctctgacgctatgcggttggttccccttttctaactttgtaagcatttgcaggttctgtattgattcttatcctttgtcttacaagaatcatgtacctattaatttgagacttattttttcatgtgtggatgaatgctaggcagcaactagacttgaatatttaagtgttccaagctatccttggcttaaaagccttggaggtagcagtactgatgtgattactttgcagcttgaaagtttctaatacgaaaacaagatggaaccaggaagtttagggaccaagtgaaacaaattctcaataaaactttacttagttgtcaacagttaataattcatgtaatcagtgttaataataatagaaaagctagtcctttttaaccaaccaaaaaaaaagaaaaaagaaaagctagttctacttatggagtttgaaattttaatcacattagggtttagaactaagtaagttataattaggaataccgcattatcttaaactaaaatgataataaacctagtgttactcttgaggtgtctttctggcttactagattttatggggtatttgtaatcttagacttacgcaataaaaatactttgcttagttcaacagctttaacatctataaattatgaaaaaaaaaaggttccattaatttcaagatgccattgtctctgcctgtagtaaaagtgctgatggacgccactttcatacattatcatgctgtttgcaggttatgatggtattcaataaagtcatgttttgaccaggtgtttccttacag

SEQ ID NO: 43807 - DNA, 704 bp, Manihot esculenta
  Intron number 1 from transcript cassava4.1_008272m (locus cassava4.1_008272m.g) derived from phytozome v7.0 (chr-ID scaffold03581; pos 1054084 to 1054787 reverse strand)
caagatctccatttttgttcgagaagtcgtggctggtactaagacaactaatacaactacctcctcaattcaattacaggatttattagccggattgttgacttgtttgatcttgttttagtttggaatcacttctagccttttgggtttccaagaaatgcagtactaaagtgaactaaaccatatacttgtattagacatgatgtacgacaaccgcgaaacaatttaagaggattgcttgcatttctctggaagatggttgacactattgtctttagacggataagatatctcaacgcttaatttcaatctacttgcattatgtggtgcaaatttgaatgaacttttgtcaaatttggattacaaactcaacgtggttcctagaatccattttaaggatcagacctttatgctggatcagtaatctatttatgtcaccctaaggctatggatgtatgcttttgtctgatatttgtactgcaaatttactgctcaagcaacattgcttgaacttagtgtgctctctagttgtagaaaaacctagcagaagtgtcattttgaagtatttaatgcgtttttagattttttttctccctctcctcattttgccccaccatattatattacattctttagcaatccctggttgattcaaaatgtgtgttgcagttgggaaagaagaacaacaactgccttacctatta

SEQ ID NO: 43808 - DNA, 346 bp, Manihot esculenta
  Intron number 1 from transcript cassava4.1_028046m (locus cassava4.1_028046m.g) derived from phytozome v7.0 (chr-ID scaffold02967; pos 146246 to 146591)
aaataaaagattctccttctggtaaatttaaacctccgttgtttgattcgggtggaagtgtcagatgcatatttatttccaatatgaatgtgtgtaattgtttttcctatggttggaagattatatcaaagtggcatatgcattcaaggatctgatatttttctgacattggtgcattgcgataagtaataattcttcctgtggtgggtgttctgatagccatcttcttgagcatgtttatttttttcaagaattttttattctaggttttcgttgcaagtatgaaaatgaatgaccagcatttttggttacaaatttaatcgagttgcttcttatgcagaacaga

SEQ ID NO: 43809 - DNA, 497 bp, Manihot esculenta
  Intron number 2 from transcript cassava4.1_016188m (locus cassava4.1_015252m.g) derived from phytozome v7.0 (chr-ID scaffold02998; pos 146688 to 147184)
aagaaagtaagatacccatcagagtattcttcaatttcagtgcttatcttctaatgggctctgttttaggattgggaaatcatgttttagaagaaacccttatcagttttaacttcgatttttgagttcaaattaaatttctcactgcctagcatagagtttaaatcctgaaagttggtgattggataatatgagtttttctatccacaaatttctacccaaattatgccctttgactttggtttttttttttttttctggtagaaataattgatagacttctagttttcgtctttcttttaacttgaacaccaattgattgaagatatacctcagtgtgcagttagtaatggaattttgcaacaatgaataagtagatgttggctttttaatgcaaaaagttgcactatagacaaccttctttttttctgtcttgtgattcacaataccaatttcctttaggcaattgcagaagaagattgctagtgttgggagtt

SEQ ID NO: 43810 - DNA, 315 bp, Manihot esculenta
  Intron number 1 from transcript cassava4.1_024138m (locus cassava4.1_024138m.g) derived from phytozome v7.0 (chr-ID scaffold12794; pos 2137678 to 2137992 reverse strand)
aggtgtttgatgcagtggtggttgctactggtcattactctcagcctaagataaatcccattaaaggtctctgcacttatttctcattatcacctcaagaacgagtaattttacattgaaaatggaaagagaaaattttcttgacgctagcaatctcatgtacatgtcaaagttacagtgacaatcatcaaaaaagaaaactttatgtagttgaaataaatgtttattgggagaagcagtacttttgtgtttgtttcgatattcactttttcttttcttgctttcgaagttcatgtttgtttgtgttgaaggtca

SEQ ID NO: 43811 - DNA, 768 bp, Manihot esculenta
  Intron number 3 from transcript cassava4.1_001308m (locus cassava4.1_001308m.g) derived from phytozome v7.0 (chr-ID scaffold11882; pos 56149 to 56916)
ctgtcttgcctgggaagcgccttctgcattgccatgttctaatagagggaacacttaattttgatttttgtatttaagttgctggtgatttgacgttgaacttgaaaccattcaacatcctcatttgaatctgggatttaatagttgtgatatactacaccttttgttttagtcattttagctttgtgttatttttctttacatttgatacctcggtgccatgggtgttgagttgaaagatcatatctgccaggaatcctcaaaaattttctcactgttacttgctctcagttgctatagaaggatgtattgtctgaagacgaaacagcacattgacaatgggaaatattctgcttttaacatgcttctgaaaatttctgttattactccaaaattgttaggatgtagctttgtttcatgatcataaaaaatatgaagtgcacttatgagagccactacactaaaatatgccgatacactatgtttgttctcatttgaattgcacctttattatttataatatttcattacgtctacttgttctttgctacatgtatgtatgtataaaatccaaatgattttgcaaagcaatggaaccttttaatgacaacggattacaatatttggggtattcccatatatatttgactggcagttttttcccattgcaagctcaatgttataatgttctggttgtcttcatctgagttgcaggtcctgatatctctcatgcatcaactcctctcccaagcattggctggaaaaaga

SEQ ID NO: 43812 - DNA, 899 bp, Manihot esculenta
  Intron number 1 from transcript cassava4.1_032160m (locus cassava4.1_032160m.g) derived from phytozome v7.0 (chr-ID scaffold01497; pos 95289 to 96187)
acggcatcacacatacaagaagaaccttccggaaggcaagaacggaaaagagcattcctccacaaccaggcctagaccaaaaccctctcaccaaagccactaaagacctgcaaaaccaataataaaaccaacaaacatcaaagaaaaacatgagaacaaaccaatagagggacggtggaaaaccaaaacaaaagaaaggcaaacaaaccgaagaaaggtcaagctaaagattgttagaaaaggaaataagtggattgaattgttgcatgagatttttagaaactgaattccaatccatgacgttgccatgtaacacatcctttccacttctttaaaactctttttgattcctcctctggaacttcaattttttacttcgacaaaccctaacttgttctttgccccgagtgtgatgcgcattgctcaactccacattcgataaatgcatccgatgaaaggcgccgaaactaagatcattccacagcgatctggcccttgcagcaccagaattccatcggagccatcttctttccaggcaacagttgtaccgtttcctctcgttgtgctacttccacttttctcacggtttcgctttctttatcaaagattttaggaaaaaaaaaaggaaatcaattgaaaacaaagattgaccattctctctctacctactctgataccatgtagaatttgggatcagtagcggtgaacaattctcagaaaatgagagaatagctctgttttttattctgttgtggtaaagaagatcagagagttatataaaagcgctagtagaaaacacatgtaaaatacagtacaagaaaggtaaaacatagccaggtcttaactacttaatttggttacataaattatttattgaaagcaaagaaggaaagtatttg

SEQ ID NO: 43813 - DNA, 602 bp, Manihot esculenta
  Intron number 1 from transcript cassava4.1_022099m (locus cassava4.1_022099m.g) derived from phytozome v7.0 (chr-ID scaffold04495; pos 57281 to 57882)
cagtaaagaagctctaaagattagtgcctggaaaggtatgtgcaatttcctccttgttcttctaccttcacgattgtgttttatgtcttcttctcgtggaagttcgtaattagtttttccttttcttgaaattttgtttgaatttaaattttgagggttttaattggctccattttggttctcgaagttgaattttatgtggttgatgagcttggtggtgacatgaaatggcttttgtggaatgctattgcgtgttggtgtttgatagtattgtttcgttacttttagttaacattcagttgagaaacgtaatggactgcttgttccaattaatttctgtcctggcttgtttaggacactaatgtgatagattggaacatcaaatctatccccactcttcggagcggatgattgcaaaaatttctacatattgggaagtgattaactttcttttgttttaattttgttttagtttttggatttcttcaagagtaatcggatttctcagtaaacattttgttgaggtcaaaggggtgttactattgctttagtacttggtgtattgtgatttattacttatggtttataaactaaaacaggtg

SEQ ID NO: 43814 - DNA, 346 bp, Manihot esculenta
  Intron number 1 from transcript cassava4.1_028777m (locus cassava4.1_028777m.g) derived from phytozome v7.0 (chr-ID scaffold02544; pos 19913 to 20258 reverse strand)
gtgataccacacagttagctgctactaaggtaagagattttctgtgtttttaatgaaatttgatatttatttttcttttcatctttgtgataacctcatattcctttgtttatttcaatatctaagctgtttgtactcttgttttgtggctaatattttacaaaaactttctaatttgtattctgctgcttttgtactgattttaaatatttattttctgtttttgaattttagttttaatttagatatctattttctgttctgaatccacttgtcacgagacttagtttttttatttcaccatttacattgctatatatgattgatgaagaaattatacgaagaa

SEQ ID NO: 43815 - DNA, 1037 bp, Manihot esculenta
  Intron number 1 from transcript cassava4.1_015589m (locus cassava4.1_015589m.g) derived from phytozome v7.0 (chr-ID scaffold06906; pos 305724 to 306760)
gcttcttcaattactccttcttttcaaaccaggtcaagaccctaatccgatccctaattctcaattttcttgtctattatgtttcatgctttgcaattacatattttaacttgcttcattttcggtctgcatttcatttggctgttcttgtgccaaaatgttggaaatttgagtattcattttggtcttggaattgtgttcaagctagatacttctgatgggtttctgtcaagttcttgagtaacaaatcacggaagctgcctcttatcttacgtatctaatatgggtaggaaaatattgtttttgtgtatgataatggatacgagcatttccattcatttcttctgcattgtcaattgttgctaattctgtgtattctccaatggaaaattagcttttttcaagtgttttgaattcatagtttttcttctcaatcaccccaattgcaatttgtttacttggtagactctctgctaaactgaagcgctagtgcttctcttcttctttgaatgtataatagacagttgccccacatgagggaatcttgaaatttaaggaagcctgtcatagaagaatcttgcatttcctgctttctcaaatcatgtaaatatcctttccagtttcttattttattcctttgttttttggaccactgagaagccatttggtgtgggcttcataggctaggctagcactccaatctttgtattcatgagaaagttgatggtccagagactacagtcaagatttcaacattttttagcaattaggtttgatgtagcgaaacttaagaacaataggtactatttatgagctataaatgatcaaatagatcatctggcgaatgtgaatagggtcttttttttggtaattttcatcttgcattctttgatatctatggattcagatttcagaataatcttttaactaaaaacgttgtagtctttagctgcaattgacttgttctgaatttctgataaaattcctcttcatgtgatgttttagcaatctgagaactgtatttttgggtgagagaa

SEQ ID NO: 43816 - DNA, 686 bp, Manihot esculenta
  Intron number 1 from transcript cassava4.1_025428m (locus cassava4.1_025428m.g) derived from phytozome v7.0 (chr-ID scaffold11581; pos 580837 to 581522)
tcgtgatcggtctgatagaaaatagagccaaagaggtacgctctttccgtttggattccaggaacatgcgtgaaaataaagggaaattctgtagaacttgttatttgactggcactctcgccgttttaacttacttttgaattgaagaattaaaatgctagcatctgctatatcttcttctctttttttttgttcccctctatgtgccaatttcatttcagatcttcaattctgattacgcttaagatgcttgtttatacttaatcaaatacatgacagcgttttctcaatttgtttgaaaatgcttgtatagttttattattttaccaaatacattcaaagttcaagagtatttcaatgtctggttacggtctgctacaaataataatagtaatagtgttacctctttgctaatttgaaagggggaataaaaaactcaggattcaagaagaaggatctggtctatatatttagaacgaaaactagtgttttaattaaaggatttagctatgcagtagcagttcttaagttaaagacgttgtataagatagaatttgaaattttttacttctaaaaactttgaatattttcagtagtctatgctttgttataaataggtttagcaaggtgaaaagatggattctatataatcaacagagttgattttgtctaacttgtaggtcggc

SEQ ID NO: 43817 - DNA, 1030 bp, Manihot esculenta
  Intron number 1 from transcript cassava4.1_009416m (locus cassava4.1_009416m.g) derived from phytozome v7.0 (chr-ID scaffold02415; pos 182436 to 183465 reverse strand)
tttggctagcgagtgttcatcacccaattctcaaggtatgataaaattttcctccctgcttattcacatcaggtaattatttttttaggtatttgatcaattgactgagaactaaaacttgtagagatgcttttcatgggtctatagcttgctatgtctaattagcatggtaggaaaaacctagccaactgatattgtacttaatgacctcttttgagcttaaaatgattttgcatgacaaggtatttttttcatctaaaccattcggaatctgaaaacgtccagacagaaatatagtttttaaattaaattgtgaattagtagatattgccaaagagagtggtgatgctatatgcaaaaaggaaagactcatagaatggcggagacaaatataacttttacacattttttttaaccaatgaatagaatgtatataaacaccaatgaataggatctatataaacatatagactcatagagctatataaacccattggcccgactaacttgaaatccagtcaggaaggtctgctaaaaaggtaaaacgcttctttccaagttaagactattggttagaggagaaaagactcgtattttatctcatctcaccacttgagatgcataacagggttatttaattaatgttagatgcccatattagtttccatgatccaagcaagaatctgaccatgttggtgtgtccactacacttcagtagaagtactggcaaattgtagacgaggtaaaaaagaaaatgctaggcattaaaccaatactgaagatgtccagaaattgtttgagacaaatagtgaagatgttttctgagtgtgtcgacactgttgaagcaattagtaatatagctttgtttttattatttgagaagaaaatcccaaagcattgattgggagcacatactgagttttgctcctcagcttctatggatgtcatgtacaagaagttccgttggaatatcatatgttctacactaactctctgatattagctgatgaatgttaaatgaaatgtgcag

SEQ ID NO: 43818 - DNA, 600 bp, Manihot esculenta
  Intron number 1 from transcript cassava4.1_000200m (locus cassava4.1_000200m.g) derived from phytozome v7.0 (chr-ID scaffold05280; pos 636035 to 636634 reverse strand)
tctggtggaacctctccccctccaattccaatccggtaattcggttcagctcgttttttagtcactgttgctttctgcataagcctcttatctgttaggttccgttgattagaattatctgcacggcagctaagttttgcatttatggtcatgtataaagtgttctctttttctttttgattgttttcgtgttttgaattcttttcctttccacgggttatgtagctggagtttttttttttttcgaaagctggagtttaattgaatgctctactttatctacatttcgcaaccattcagaccttctatgtttctgcgcatatgctgattagttccatggagaacaaatgcctcttttaggtactcattaggtgattattttaattcttttcgtgtttgaatgtggattatgtgtaaatatacttaaaacatgacaactattcttttgctctgcatttttgtgatgcctaaagttgtttacttcaatttatattattgctttgtttcaaaattgaggttggatcgccaaatatttgaatttttaaccaacatgccagtttatcaacgtacttcacttgacaggagatcaaaccagtcgct

SEQ ID NO: 43819 - DNA, 476 bp, Manihot esculenta
  Intron number 1 from transcript cassava4.1_016346m (locus cassava4.1_016346m.g) derived from phytozome v7.0 (chr-ID scaffold03806; pos 41100 to 41575)
accctcttgaaggttatcatcctcggtgacagcgggtcagtcatctgtgcatacctaattatcttgtctgtacgagttctagcgttttgttaggtagattaggcggatatttcgagatcgtatgagtttcctcgagttgaatattgatctgatttgtgaattctttattttcactagttgatgttgtcgatgctcgatttttgtgcatgcttttttttttttcccggttgaacgtgaatctgaagattgatcccccttttttgaagtcttggggtgactgttttgtttaggtgtttttaggataaaatttagcaacttattcttttttctgttgatgcaaataataccatgaagtgatttgaactcttaaagctgccgtaattgttattagtgattgtttctgcattgtttttggtaagtttgtattaacaaattgcattttgattgtgatgtacagggtgggaaagacctctttg

SEQ ID NO: 43820 - DNA, 925 bp, Manihot esculenta
  Intron number 1 from transcript cassava4.1_008282m (locus cassava4.1_008282m.g) derived from phytozome v7.0 (chr-ID scaffold11581; pos 1278781 to 1279705 reverse strand)
gacatcgtttctacccactccatcttcatttccaggtcattgcattcccttctctttcttctttccaaaacatgtttcgacttcgccaattagatttttagccgtttattcaagtgtagtatgtgtttttttttttctttaattaaatgggcctcagggtctgtgattacagacccagtagcatgcattctgggtttttgtccaatgttgatatggatccttcaaactttatttcctttgctgatcttactgaaatttgttatcttttctatggtttacgtttgtgtaagctatcttaatgtttatgcttcttatttagcttacgagtgaattgtttatttatttatttatttttttcttgtcaaagagcttatgagtgaatttagacaatgtagttaactaccttctcagtaactatggtttcaagctttaagagagcaaaagacggtatacagatgttggttctaattatgcaccatacaaggttcctttatgattatatgctacaagacagaccaatgtttgtcttaagtggtcgacttttaacaaaattgaggcaatgaatcattcctaggcaacggagtcagtttttgcagttgacattgtttaatgtacctcccagaatgctttctaaccttgtagcctttgagtcattggtacaagcacagccctagatgcccactaatcacgacaggatatcaaaacaagaagcactctgcttcttttcattacatgctttcgggcaatactcaattctttctctttctgcggatcatattgagataaatctaagttgtaactcccgtgcacttttgttgtggcctagagcttttattgtgcagtgttttagaagatatttgttattggtgctgtgatgctattcaattaactgttgcaacttttggcttttttagagctgttagag

SEQ ID NO: 43821 - DNA, 882 bp, Manihot esculenta
  Intron number 1 from transcript cassava4.1_003686m (locus cassava4.1_003686m.g) derived from phytozome v7.0 (chr-ID scaffold05875; pos 1635247 to 1636128 reverse strand)
tgggctttccgtcgagctgctgttcctctaaggtatctctctagctctgtctctctctaatgcacacgctttggggattatgtattattggggtctccatttctaaattaaaatcatttcttgagaattttaatatcctacaagtgtaatttagtagctaattttttgtttattttatctataaagactgtaatagcaggaattatcaattctcaattgtggcatttcagtgcaagaaaaaaagaaaaatgaattttgtttctttccagtttttctttctgataagtatgcttcttcaatttcttccatcatatccttctcgcctcctatgaatagctggggttgcggaatatccagattcccgaaaggcttttgggatttggtatgatttttatcttttttgttccatttgaagactggaaggatcccaaagtatcaatctttcttttagtcgttgaacccttctttgattgatcaatatgtgatacctgaatcatcgtactaatgtaattgaaatgatctatgcatttataagaagatccttcaattggctagatttactcccttggacgaaactggatctttctggtttcctctgctttagttaatgttgtagattcctacatgaaatgttcatgtcaaatttttatgttaaatgaataaatattgtttattgttgtttttttcttctaagaaaaacacttgctttcacacctcattgaattgcagctggggttctttgtgggaggggcttgaaagttagtgtttcttgtagtatgttcttttccaaataaaagcacagtgcttttcttgtttgatttctgtaatgtgtttttcatgcataaagatggtttaaaatgtcttcttttattcataggccac

SEQ ID NO: 43822 - DNA, 1033 bp, Manihot esculenta
  Intron number 1 from transcript cassava4.1_031981m (locus cassava4.1_031981m.g) derived from phytozome v7.0 (chr-ID scaffold10524; pos 166428 to 167460 reverse strand)
agagcttcttggatatccctcctcttgtagttcaggtaaccttcttttcttcagggctcatgatctttactcttatcacttttcttaaataattaactaatgagaagcttcattagaaagtgttttgtagattaactgaattaagaagctattggagttttggttaattaaaatattttatctttgaaaattttagcagattcccagttagcctagtgctccattaatatatatgacctcccagtttagcatttatttatatacacaatgagggtttcctatctttctcttacaatcatgcatccctgggaaagtgatcttgccgaggaaagaaacaattcgaatattttcttttttcttttgaaaaaaattattgctattaatttttataatattaaaaaatttattaatcaattatttaattttaaaaaatatattaaaacgtattattatttttaaccttttaaatattatataaaaatttaaaatgctcttaatgtaaaatgattaaatagtatgtaaaataaataggttaataagttttatctaatataaaaattaaataataaaatatttaatagttaaaatttataaaattaactaattagtatattattttttcaaaattaatgggaagtaataagtttttttatattataaaaattaaatattaaaattttattttgttttcatttatacgaagaagaaaaagaaatttcaactgaaattgagaggtggagaggagcacctgagctgaattttgagtatagtctggctcatagctcaaagagcgacgccgtttttacctttcctggcctatatcattctcctccaggaaatgtcaagctcaaaagtaggtggccctaccctgatacttattgcttctcctactccctttcaccaactaagcttggtcagttggttggtgaatatgatcttatagctttggtctctatcttctttttccttgtaataaaactttcctaattttttctttttaatttcttcgttgtttgcaggtaacgaatctacg

SEQ ID NO: 43823 - DNA, 885 bp, Manihot esculenta
  Intron number 1 from transcript cassava4.1_011505m (locus cassava4.1_011505m.g) derived from phytozome v7.0 (chr-ID scaffold07035; pos 16521 to 17405)
tctagggttttgtttttcatacactcttttgaacagtaagtgtcgcaatcaactctttatcccattggtaatttaaagtctgatttttattccccttttcttattaattatgatgattaatttccgttttcaatttctatgactgtgaattggggttccacattagatattgtctgctattcttttggaatttgagctttattgttgtggttatgcttttttttctttttttccttttttttttgggttgatgttattaatatttaagataggattcttttactatatctggtgaaattaataaccaggcttaattacttccatatgttttgctgagtttttttatttttttatttttctgttaatagtaggaatgcctacagctaaatgtagaaaaatttatgtgctttatcatatgagaaagttagtttatcttgtatttaatgatgtgaggttctaaactcgagttcttgggtggatatatatgtggatacatttttacaatactacaacataaaaattgtactattatgtaaattatccctcaagtgtacatctgaaactagacttttgaactccttactctaaataagtaagactggtttgtgtttgccataagttacagtttccatcagtgtagaatagcagttagacatttgtttaaattgcagttgatattgaaatctcttgttgtatgtttaatgtcaaatcccatttacttgtttttaattgttcgacaagaaactgtgtaaaagaaaattcaaaattgtcatgcttaacatgaaaacatgtaatgattttgtatacatgtcaggaaaaggctgaagttgttctacttgtctctatgcagtaacaaaattattaacctttattggcactgcattg

SEQ ID NO: 43824 - DNA, 311 bp, Manihot esculenta
  Intron number 4 from transcript cassava4.1_011505m (locus cassava4.1_011505m.g) derived from phytozome v7.0 (chr-ID scaffold07035; pos 18135 to 18445)
ataaggtagttggactcttattttttattatattaatatatttgtaatccctctgtacttaaggatgtcctagacactgtttcttagtattataatgaagatgcatgcttatatcatatgattttcccagatacattcaatatagattttgtaggctctctttttttctttttctttcctttttttccctttcttggccataggtttgagttatttaactctttgtttaatgatgtacatgcaactatgtaaatgaaattgtaccacaaatgtgcttgctgtatcaatgcttgattttatttgcagtggac

SEQ ID NO: 43825 - DNA, 539 bp, Manihot esculenta
  Intron number 1 from transcript cassava4.1_011394m (locus cassava4.1_011394m.g) derived from phytozome v7.0 (chr-ID scaffold12794; pos 682544 to 683082)
attatcatccacagctcaaagaaaattgtgctttggtgagttcatgaattcatgtagtcaggtcagtgcagatttagggttttttctttatttaaatttgcaattaggttaggttatcctttggtttctgagaaaaattgacggaaaggaaaagagtatgaaacttgaagcttttatgtttgtatataagagaatatctgcttaaaaggaatttaatggtgttttatggcataaaatggaaatctgtttctggaaaaaaagaaaagctcggcctaattcggtggatacagaaaggtaaattttgcgattagctttttgttgcaactcaacttaggctattgagctgtccttttgaagaatttatgtgagcagaattcttcggaatttatatatattttttggcggtgaaattggttttataatttatctcgtttgtttttatttttagtcaaaatactttttttccccttcttgctgattgatttttatttatttttgtaatatactaacttttatttgaattaggtgttgttcagtaa

SEQ ID NO: 43826 - DNA, 958 bp, Manihot esculenta
  Intron number 2 from transcript cassava4.1_011394m (locus cassava4.1_011394m.g) derived from phytozome v7.0 (chr-ID scaffold12794; pos 683132 to 684089)
aaggtaatttaagaaatgttaaacttacaaattatctgcgcatctgggtcttggatgaaatgcagatggtgtggaggttaatacccataagagtttaatctttaagctaattttccttcacgcatttgggcctaatgcctttgcaacaaaactgtactgtaccatccatgttaaattcattgattcttcatgtacaagagcccttggtgatgaaacaaattttattagtgggtgtagtcatgtttacttcagtctctttttgtttatatatgttttttttttcaaattgtttttaagggaattgatgcatgtctatattttgttatggaagttgaaccaatcattgacctttgagccttgatgtattactttggcaaaatgtttcttggggagaaggtgacgatttggtcaacttcatagtttatttttcatgttgagtctctgaattttgaagtgaatttggtgaaattgatacattgtgtgtgatgtgtgcaggttttagtccactgaattatgtacttgagatgaatataatggaggaatacaggaaatgctttttttgggggggtcattattattgttgtttttgttttctttatttttttctttctaacttttgacatgtgctcgtttttattctaaatattgcaatgtaaggaatacacatgagaacatattagtcagtcttgtattctgtctgtttatgatcagtagctaattttaggtgtactattgaaccatggtcacgtgagccaatttctatgtgattacacagcacacgagttaaagccaaggaggttattaacacactgttttgcaaaatcccgtctttagcacccgatattttgtaattatgttggcttctcaagttatagaagataattccatagcttctcagattcagattactagtatctaattttggagatattgcttttgtgtacaattcagagttctc

SEQ ID NO: 43827 - DNA, 700 bp, Manihot esculenta
  Intron number 3 from transcript cassava4.1_000546m (locus cassava4.1_000546m.g) derived from phytozome v7.0 (chr-ID scaffold07575; pos 143836 to 144535 reverse strand)
cggtatgtgtatttgtgaattctgggtcggtcctccatgtgtagacacagggagggttaatgtgcaattattagttatgtttagtaaaatttttgctcgagttttgtttttttctaaatgctcttatgaattccaaacaccgtgatggctctaatctgttaaaattagaagtgataatatttcagatatttatgcatatagaggatgaccgagtcaaatacaagaggggttttactgtttgcattttgtgattaaatgagaaatcatcaagttttctgctcaaaatataaacgtttatgttagtatgttgtttctcttccaacgctctggtccttaatagcgtgagtgctttgtggattatttaatatttagggagaggtcatgttctaagcgtcaataaaatcttagtgatcctgtaaccttcaagtttatgttagtaaacatagatttggctgctacatggaacagatgttattgttattttcatgtattttttctgataaaaaaatcacctaaagaccttaaaggtcacatatcttcaggatgttttcaattctgtggttcattgttggtttcttcctattattgtaaagaaaaaaacatatacacatggcaagaaaaaaaacggtgttatggtaatggatttttctcggttacttttgtaggcagctgaagaagagaggctaagggaggagtttga

SEQ ID NO: 43828 - DNA, 668 bp, Manihot esculenta
  Intron number 2 from transcript cassava4.1_019492m (locus cassava4.1_019492m.g) derived from phytozome v7.0 (chr-ID scaffold03410; pos 124367 to 125034 reverse strand)
caaatttaagaaaagtgcaaaaggtattgccagtgtattcatatgtatttaaaatatttccttagattttgaagtcgtgttggcattcctactgtatcttcatgattagcactccttatcttgtaaattagtccttttgtcatataatattctttagattttgctatcaccttacattcaatccacaatatgtgcacaaaattgatgcctgtgtcagttgacttgtcataggaagcctctagctgtaaggttattttggcactttgcttttgagtttctgttaattattttgaattctagctccctgttagtgaacaagatctctctctatctctctctctatctcaattccatccatctatgtgtgtttggtgtgtttagtaatggaaaaaagcagggggtgggggggtggggagaagacagttatggttcacttggaaaatctttaccttattgaaattccacatatgtttcagattgttgttcctctttctgttttcttatgagattactacattttggaatggtgaacaaaatcgttgcataattttttgtgttcccctgcatgatggctttgcttttgcattttaatacttccctctttgtatattatccctattcttttctcctttttacgtttctaaatttgtttttactgttacagaggt

SEQ ID NO: 43829 - DNA, 284 bp, Manihot esculenta
  Intron number 4 from transcript cassava4.1_002538m (locus cassava4.1_002538m.g) derived from phytozome v7.0 (chr-ID scaffold03410; pos 32321 to 32604)
cagcaggccataagggtgagcgctcacatcaaatcaacttaactaagcattaacatagatcaatttcaattatgaaagttcaaatttgtttgaatagttgtaaaaatgaaattccatggtaatttgttttcttcagtaattctgaaggcaatattagattcaatatatcatgatttctttttctaaaggaccttgataaaagcataaaatcaattgaattggccttttcgtcatatattcagtttataaatttgatcctatagggagttgtggaggagtttggc

SEQ ID NO: 43830 - DNA, 510 bp, Manihot esculenta
  Intron number 1 from transcript cassava4.1_012949m (locus cassava4.1_012949m.g) derived from phytozome v7.0 (chr-ID scaffold07410; pos 2116 to 2625 reverse strand)
cactcccgagattgttctcaggtatagaactctgtttcccctttattttgcagcttgctaccaattttctctcttctggccttttgcttcccttgttacacatttcttattatggaatcaacttattcgtcttccgaatctttttgatgtttctgaaagttcttattaattttaaacttttagttattgagttgtcatactttgtcaagtgtataatttggtgtttgcgagtatcttaaagaagtgttactttgaagctaagggcagggagctttcattcttcatttctttgttctctagaatatctgtataggcacttcagtttaattaaagtatacttctaaatgtggtcagcatatcattgtgcacaacattttcatgaaccttttgttggcaccatgtatttatatgatttacacaggctgtcatcacatatgcaaatgtcctgactgtataaatttccttttactgttaggtacaacgattagcagcaatttaccgtttgcgcag

SEQ ID NO: 43831 - DNA, 1031 bp, Manihot esculenta
  Intron number 3 from transcript cassava4.1_006183m (locus cassava4.1_006183m.g) derived from phytozome v7.0 (chr-ID scaffold06607; pos 15885 to 16915)
agaggacaaaatattgtctcacttctaaggtatagtcctcttccttacagcttctttttttttttaaataataattatgatctaaaaaagaatgtttgggaatcagaattttgcaaagataaattttaattcattatttgtgtgaattttcatgtttaaaaattcaataatcaaagaattctactcttgtaatttaaaaaaaaaattgaaaaataaaaattttgtaataagattttgtcatgtgattttttttttaaatgaattttctcaaaagaaggctaagaaacaaataaataaaggaaaaaaaaaaatgctgagctcatatattcatttcagcccatgtaacgactagggagtttgttgcaataagagtatgggcaaatgtctggttttctcaaaaaaaaaaaattcaaattatttacttttaaatttaaaaccttagaataattataattaaataattatttaattatttaaatataaaacattaaaagtaacttattaaaaaatatatattttacttattataaaatttaacagattgattattttattaataattaataaaaaatttaaaagatgtaactatttcaaattaatagcaatctagactgagggattaaacctcaatgactaaaatatctaccataacaaatgcaaagtctgacctttgaatttttacatatcttaagcactaactaatcatttatccaaataattaatctatccattttaattttcaaagtaatttcacgatgtttgtccaataaaatagacttttatcaaacatttccaatttaaaattaaatgggagaactttattttcttaatagatttatacgacgtgaatctgaattaatcgaattaataaatttcacgtatcaaatagaatatactaaaaaaaataataattctttcaaaaactccaaagagttttctattcctgcaaattaacttctgcaacgtggcatttttgcttatgtattgcaaatgcagatccctctaggagtgatattagccattccaccatt

SEQ ID NO: 43832 - DNA, 911 bp, Manihot esculenta
  Intron number 2 from transcript cassava4.1_004615m (locus cassava4.1_004615m.g) derived from phytozome v7.0 (chr-ID scaffold05144; pos 94083 to 94993 reverse strand)
accatcaaaaggtatgagttctttgcaaattggaactagctttgccatttaaagtagcaactatacatctttcatgcactcgatggggttgtgtaaaactagagaattcatcattatgaaagttatggggaatcttagccaccgtctgccgtggtgttgcattattaatataatgttgttgcttataaaaacatgctcatacggaagtaagtgttaatctgacacagttcatatgatctattttcttacttgcttttagctattcattgttagactacggcaatgccttgcattccaagtggtgcaagctttcacacattggtgggaaaagaaaagggaataggatctatataatgctagcctcaactactataataatttgattaactatttcaggtctagtggaaaaaaaaaaaagagtccaaaagttatttacatcagttgagcctaaactgtacaattggtattagcaattgtgcttgatatatagcataacagagttgtgatggtattagcaattgtgcttgatatagcataacagagttgtgatgatgacgcaaaattaagtgaatgggatatatattctcctaatatcatatgctataataacttgggttaaccaatttggacctagtggagaaagagtccaaaattatttgtgttgattgggcttggctgttacacctatagttaaatgcttgttttcatatgcatgatatgtgagttcaaatctggtgtgacaagtttaggattttttccttaacccaattgcctatatttttaattcttaaggaatttccagtcatacaaattgtaccttgagtttctcttcattctaactttgcatttccattttcatatttttaacatatcaagcaagccagagtacatctccttgatactgagccttt

SEQ ID NO: 43833 - DNA, 784 bp, Manihot esculenta
  Intron number 1 from transcript cassava4.1_006606m (locus cassava4.1_006583m.g) derived from phytozome v7.0 (chr-ID scaffold08053; pos 104677 to 105460 reverse strand)
tgatagctctttaagcggtattacaactcagtgtaataatctattgagtgcctttcgttttgatttcgttttgatttttgtcatattgtatttgattaagaatggtatgtcttggtggtgaagctagttttactcatttttgtgctgtggttcctcacaccaggcaaagaaaagtcatacgctctttgaacttttaggattgactattaacattcttctatcatcaggggttcgattccataggaagttatcatgaggataaaagttgtagccttctcccccttttttcttttgtgggggtggggcgggaggggagggtttgcagtaactttcttatgttcatgtgtgagagtcgtgtcatgcatgaggtgagcagggagcaccatatcaagttttgtaaaattatgggatttcattgtttttgtggtgatgatacagggaaagttaagataaaggtgtcccaaaacttaggttgttttattgaatagctcagaaatgaggcttttgttgagttggttggagccttaatgaagattgtcgattttaatgacaatttattgttggaatcatgtttgtttaaacagcagctgcatgatcttttgccgtatagtcaatcaaaatactgctttgatagcaactatattgtcagtaaacttgtttaatttcactacctaactgtaataagaagttcatctgcataaatgtttagagagttatgaatttgaatagcaagaattaatttgttttgcattgccttgttgttcagtggaatctaaatctactg

SEQ ID NO: 43834 - DNA, 461 bp, Manihot esculenta
  Intron number 1 from transcript cassava4.1_031966m (locus cassava4.1_031966m.g) derived from phytozome v7.0 (chr-ID scaffold03542; pos 149128 to 149588 reverse strand)
tttctacttgaaagcttcttcttcatcttcttcaggtaaatttcataaatgtactccaagattgctgcttgtttgatccaagttattttagtttcacatttgtatatatgcagaagaagggtttttatcatttatcgtggtcctgttaatattggtaaataatgaggaagagctttggatggtgtggtgaaattatcagaaatgagagtttagaacattatctgcttttgaaaattcgatggttgattagatactttagcaagctctaattctggaaaacagaaagaagagctcctcttgacactggggaatttaattatagagacctggagtagatcctgatgatatatttgctaaatctgctatttgtttttatgtgaagagattttgaataatgtttccgcaaattttaaccaatggctgcagttggaagcgcggagtacgcggaggaacccgcaacc

SEQ ID NO: 43835 - DNA, 798 bp, Manihot esculenta
  Intron number 1 from transcript cassava4.1_009467m (locus cassava4.1_009467m.g) derived from phytozome v7.0 (chr-ID scaffold04137; pos 328645 to 329442 reverse strand)
atatttgcgaagacgtttgtggccaggtaagcttttgattttttttttctctgttcgtttgtattggctttgttttcaagttttgagataacggatgctgttattttaatctatctttgattaacgctaatgggatttttaagaaaatcttcagcatatgaaaattgtggggattgcttttatgattccttaaactcttgaagttggctgatagctttgatttcttaatagttgagctaatgaacttttacgtggttctgttttactcttcccctcaatcctttttttttcctcatctttttcaatttatctatttctgagattcgctgaacttgttatcacaatgcagtacgtcaaatgcatttggcttttgagcttgaggttactgattttgcatctgaattgaaatttttgctcctgtggtattaccataagctttggtttagtttatttctaggcagcagttgcctaggagggacactcagattatttattttgagagtcaattgaaattctgcttataaatgtgcttttctaatgtcccattaaactctagtttgcttctgcttcatacagttccatgctagccttgatggttcaactaaaactagctgaactgtaattctaagatatttgaattatactgttaaagctgtgatgattggatgtgtattttgaataatgtttcagcaagtttattttgatgatatgttgtgatgcaataagatttgtttgctcttggtgtcttaggaaatttttgttttaattttgcagcaggcctcccctgcagctttaagc

SEQ ID NO: 43836 - DNA, 461 bp, Manihot esculenta
  Intron number 1 from transcript cassava4.1_028676m (locus cassava4.1_028676m.g) derived from phytozome v7.0 (chr-ID scaffold06407; pos 81815 to 82275 reverse strand)
ttggcaagactgctggctaccacagcagaacccaggtaaactaagaaaaaattgctgtttgctttaatgacaattttattttttcaatgcaagtttgggtttttattgattttgcaatggattttgctttttttgtccatttttcattgcttaagttcagatttttggggctcgctggaattggctgtttggattttgttaggggctgtattctggttatattcttttcaaaatttttctctcttcatcaactggtccaatttcctgttaataaatttcaaattttcaatttctttaaactggtttttgagattgttttagctggattacatctttagttaagtatttgattgcttgtgtgtataattcatttcatgtttctttaaataatgggattgggactgtgttgaaatgagattagaagtagttttgtaatggggttcatttgcaggaggagatac

SEQ ID NO: 43837 - DNA, 737 bp, Manihot esculenta
  Intron number 1 from transcript cassava4.1_008369m (locus cassava4.1_008369m.g) derived from phytozome v7.0 (chr-ID scaffold02538; pos 423289 to 424025 reverse strand)
tgcttccgattttcctttaatcgtttccaggtcagtttgatttcatgatgaagataattgcctgtcgatctgttttgaatctgtgctatttgtaatcagaggttttctttatgattgtttggttgatgaatgaattgatgattttggatttttggcttaaattttggtgttttagcttcaatttgagcttgttttgactagaaaatttttattgatttagacgtagatctgatcagtctcgttcaaaggttcaagtcaattttactgcatgatttttttttcctctttttgttttttactataagatttatgcttactgtttgtcattactagatcatggctggcagcagcgaatttttgtggtatttacatttttttttttggttaaattgttccgatagaaacacgttagttttctgtttaatgtaaacagtgttagatatagtgctgacttgattataacttaatagcagaatggaatttaattctttgttagtgcaatcattgataacggatttttaagcaattacgattgtagatttttgtggattttttttggtaatcttttaattgcacactcgtgttggttaggaattttatgatctgaaaccacataagtaatgaagttctatgattatattttagttcctaattttttttatttataattctatacttttatctattttccaattttcattttctgacttggaattttgtaattctattaggaagac

SEQ ID NO: 43838 - DNA, 864 bp, Manihot esculenta
  Intron number 1 from transcript cassava4.1_018301m (locus cassava4.1_018301m.g) derived from phytozome v7.0 (chr-ID scaffold12794; pos 1588486 to 1589349)
gcctttctctcgctcgtctcatcaaattttgactggtttgcttcctttcctcctcatttattatcgtttgattcctattatctggtttttatgtgttttctagatctgcctagaaattacaaggatctgtttgcttgagctgaaaaagcataaaccctaactttttttctagattgtttggttgcttggaaatccgtggcctgaatttcgtaatgaattggtttcttgttccgtttaattattcatttgttttgttgaaatataactctgatttttttattggtacttaatcagaagtctctttcttctcggatgtaaggtcaattttatatttatgctagacgatttctaaaatgtattcgtattccagttaggcaaggaacaactaaattctgttttatctttgttgtttaaagtttaaatatggaacaaatacgtctaaattgccagacctatacataactgtgtatgttctaattaacatgaaattcggaaattgttattcaacgtgtggtaagtgaaaattttcatttgctggttcgggttgtacatggaattcgacgtgcactctctaataccaggtattcctgctttggcgattccaaaatactacttgttcctatcttagattaagaagtcctataggctccccatctatagactacaagtatggtataaatttattttttgtgcatttgcagtcagaaatgtgattgaaatagcaatttcttgttattgtttttggttcattcagcaacagttcgagagtgatatcagcttaactgaattttgctttatatagttcaaataatttacaaacatgactctaaattcttaatgggttgggatttgtaggttgcaaca

SEQ ID NO: 43839 - DNA, 780 bp, Manihot esculenta
  Intron number 3 from transcript cassava4.1_018301m (locus cassava4.1_018301m.g) derived from phytozome v7.0 (chr-ID scaffold12794; pos 1589605 to 1590384)
gaggtgagtaatccttggtaaagcttaagtttaaaggaggggcataccaaaagtgtgaaatcatgcaaggatgcagcatgcttgttcttaatttttacacttgaacccccctcccttcccctcttgaatcttaggttgtcttttctagctcaccttaacttggttagtattggagcaatacaactcttcatacaatataaagtgtatactgggttatagtcaggctttagagcatctagtaatgttgcatgtgtaccttgtgttttgtgtatgtgcaagtgttgcctcctagattttgctagtttgatttggataataaagataatgtttccttttataattctgaattgatatgaaagtttttttggggggataaataaaatatcaatgcaaacttatttgacctttgcaagttattctcagtatgatttttcatgattattttcattttggaacgaagttgagctattgtttgccgttgttccagtttgggcggccgacttctttgttgtgcaatatgtcaatcataattgtcttgtcaaaggcaaattgatcgttaaattgtgctcttatggattatcctcagtacaattgaaatggagatattttatgcagtggaaaaatgctttccgttttttcaactttgccaagtctataggggtgtgtttagcaaatcttttaactgtatttatcttgtatgactgacaatgctcatgaaagaaaagtttatttttgagtttttcaggtacgttcaaattgactttacagtttactgaggat

SEQ ID NO: 43840 - DNA, 697 bp, Manihot esculenta
  Intron number 2 from transcript cassava4.1_011580m (locus cassava4.1_011580m.g) derived from phytozome v7.0 (chr-ID scaffold11297; pos 781549 to 782245 reverse strand)
aagagactgctcggattcaatgtaattctttttcctagctccacaatgtttcaacttgcgcctctttagtgtttaatggaaaatggtccttttcttttcaattgtatgtaaacatctagtacttgcattcaagactgaagagaagaagcagcaaacatttttgtgagttcatgtttatttaaaattggaataaaacctatggtaataatttactttcttcatatttttctgtggaggtggtaatgtggacagttggatgggttgatggattaaaaaccctcaaaagttcttggtagtatttattattggtcatgatccttctcttttatctttgatgtaattagcgttgatcagttggagaaccacaagttctccagtggcttcagtggaagtatgtataatgtgttcctatcatttatgggaattgggatatggtcgacctcctcacaactgtgtcaacgttgtgagtggaagtgcactctaacttctaagatcttttctgatgtatagtacaccatgtttgaaaatactttaaggtgttggatgatttttggagaaaagaatttcaatatccctgtggatgagttttagatttttaggatgcctgaattatcatttataatcagtattggaatttgaaataattaatttatttgttgcagatttggcagagattgctaagtttcttggtatcact

SEQ ID NO: 43841 - DNA, 653 bp, Manihot esculenta
  Intron number 1 from transcript cassava4.1_011580m (locus cassava4.1_011580m.g) derived from phytozome v7.0 (chr-ID scaffold11297; pos 782276 to 782928 reverse strand)
gctcttcttcaagtcagtctctctctttctctcatgcacatacaagaaattctaaagctacccaggctagatcttgtattgctttgttagttttgttccttaatcgaatatgagccacaaagaaagaagaaattttacgagtagaagttttgattctctgttgacattgtagtgtttttgaatgttttatagctcagaaagtaaaaattaaaataactatttttttaaaaagaacatgtgcagaaattccctgtgagaaagtaagagtcaagattgcagcttctttgacatttgctataattttgtgtttgaattgttcaacaattgggtataaattggtactcttgttgttctgttagtaattgtatggcataattccgtgagttttttctccatttcattttcttttcctctctgaatttagctcctgttattatggtttcaaagttcaaactgggcggctttatttcttgtgagaaaactagtgagaaaatatggaagcatgacaggaagagcatgtaataaatttcagcatttaactcctccaattctctctctcccagcaatcgattgttggcttaggacaagttgaaattcttttggtaatgttaactgcagactattaggggataaatcacccttctcacagcaaa

SEQ ID NO: 43842 - DNA, 883 bp, Manihot esculenta
  Intron number 1 from transcript cassava4.1_016835m (locus cassava4.1_016835m.g) derived from phytozome v7.0 (chr-ID scaffold03081; pos 80751 to 81633)
agctaataagcttaagaatacggagtccatttaaggtcagcttcttctctcttctgagcttttctatagtcaagttttctgttcatagctctctgttgtttttagcaatttactgtgtgattttgattcttgttattttttttttttttaattctatcttttgcatctctatgcatgtatccaagtaagtttgtctctctttctttttgaaaaaattatttttaagtttactgtgtattttatatcggtttggaagtataagggttgtgaattatgttatttattcgttccagatctgcttctgatattggaaccctagctttttattgcttttggatcttttgttttttttgggtttttgattgatgatatatacctacttaaagaaagcttactttcaaaaaaagaaagcttacttgctgcttttaggtcctaaagtactgggtaggtaaagatcgtgggtattcatttcttttagcgttttattttggatttttttttcttggggttaggtttttgtcacatttgatagacatggaggcacattggaattttgctcttttgatttttttttttctcttttaactttcatatgaatggtggtaccgtaagcatttcacttatggcgtttccttagtgttcagttcttaatatgattagaaaatcaaacattttatgttaagattgtgaatcttcaattgaatgaatacctatcacatgtaaagcttttgtcgttgcaaaatttgtagttcatttattgcttgttgactgttgagtcattttatgctaaacatgagtatttgttgtattttactcttctgcaaatacacagctttgtttgattggttttttattttctgcaggattgtgaaactattatcca

SEQ ID NO: 43843 - DNA, 995 bp, Manihot esculenta
  Intron number 2 from transcript cassava4.1_005278m (locus cassava4.1_005257m.g) derived from phytozome v7.0 (chr-ID scaffold12794; pos 1070301 to 1071295)
gcgtgagtataatactttgattatttctcactgtctttgttatggtgcttaggttctgtgttgaatttctcacagaaagtgctgtgtgaatctttctgggtatgttttgtgtaaggttttaggatttgttaattgttctttagggtatgcatattgttttacttgaaaagttgccttttgagctacctttatctctctctctttgtgatagataccctcttttcaaaaggttcaatgtggttccgtagaaataaaccctactgtcttgcagattgaatattctgctcgtatttaaaacatgaaaataacaataaaaaaggaaaaaggatattcaaactgctttctaattaattattctatctaattttggaaaattataaaaattttaatatattttgttttcatttctattttgagattccttgttgagcacagaggttccagtcttctgtcggtgataatttcaactatagtcttaatttgatttttcttataaaaattttcctcctcttactttatgtccacctttatatttttagcagtcacaaaatattgttcacttccttttaacatataaattataattataacactatttaattttatcttattttcaacacaatctctcattatttgtttatttttttccaaatgagaatttaaaccatctcttagtatcttataataaagatgggtataattgaaaagttaataaaaaaggtcttttaactaaaacaactattatttaaaaaaattatgggattcagggagtatttcttttagcttttggtttttcctacggctgaaatagggctgcaggaatccactttttttattatgctgcatttgtgtatcatatttctcacaaattcaaaccagattttcttatagctatttgcacttatttcttatgcattaatagtgtgcatgagaatgcgttttgttgaacttaagaacacacagaccattaaagagtttgtttgtatgtgatgcag

SEQ ID NO: 43844 - DNA, 724 bp, Manihot esculenta
  Intron number 3 from transcript cassava4.1_014733m (locus cassava4.1_014733m.g) derived from phytozome v7.0 (chr-ID scaffold12525; pos 682974 to 683697 reverse strand)
acggccttctacatagggtatctctctctttctctctcatccatcgccagctcccttgcctcctccttacttttccctgaatacagaacaaattttgcgatcctgtgatagaagatacccatgtatgccttcttagatttatgtgcgagttaaatttaaattctcatgttcttgtttgtttggccaggacatgtatgtgaatttagttagtggtaaactacccaatttccagtataaccgatttggtttgtgtaagctgagttaagctaagctaatttagggggtttatcagatgaaaaaaggtgtagcgcatgataaggtagcatggaagaatattcttttggtctggtgtttcttggagttttaatgcttatatggctttcatttgggtctgctagtgtttagctggatagattatacttggcacctagaattgctgcacgtttgtgtgacttaaaagcatagtctgttacatgagaactttgattattcagaaccaagaaagtttatggactttgttctcccgttgagctgaatttgtcagtatatttattcaagttggcgaatgtcacaagcattcatcttattacctaccaagcattgtgggtgaaaaagaattgatgcatgcaggattgtttgatattatttttgccctgatccttttccttttgttccttcctcacttgaaggaagagctccggttggccttattgagaactccagc

SEQ ID NO: 43845 - DNA, 240 bp, Manihot esculenta
  Intron number 1 from transcript cassava4.1_014733m (locus cassava4.1_014733m.g) derived from phytozome v7.0 (chr-ID scaffold12525; pos 684011 to 684250 reverse strand)
gattcaacgaggagctctctggtactcttccttttctctcatataagccaactaaaaagaaaatgaaaaatctctcctttttccttgcacattggaaatgaagcagaagcaacaaacccattaagatttttgttgtttctttgattttccatcatctgttcatagttatctaatccaagttttactgggtttatggtatgaaaaggagaagagctcaagctatttctccccaagcgaaag

SEQ ID NO: 43846 - DNA, 641 bp, Manihot esculenta
  Intron number 5 from transcript cassava4.1_000135m (locus cassava4.1_000135m.g) derived from phytozome v7.0 (chr-ID scaffold03581; pos 645720 to 646360 reverse strand)
atttgttgcgccagcttagtagagcctttgacaacgttagtttcgcttcctcacccaactttatgtcagtctttcagtttaagcggcatttatcaatattctgatcgtgcttgatgctcatcttgcaatagtttttttttgtttgataaagtgtgtactggcctcattgccagtcaagttctaatttgttaaagttgaagaatttaagttagcaataatttgagtttcatgcaaaaatctagaaccacggggtaaaactcgtgtgaggcttgcatttttcttgacgtactcaagaagcagcgtttccttggaaaagtgaatggtttttcctcactaagcatgataaatttgtttctttgttggcgagtcctcagaatgttactgatggagtaattttgttagcaatggaatttttttaaaaaaattttattgtgctggttttcctgcttatgatcttttgacttgataattggacaaagaataatccatgtgcatgtgctgaatgtgttcctagtcattttctcagcgtatgacatcaataatcaagctttatctttgaatgatatatttttagttcatttttcttttccttattgaatatttggttgaggtttcaaatttgtttctcaaatttcaggctt

SEQ ID NO: 43847 - DNA, 343 bp, Manihot esculenta
  Intron number 2 from transcript cassava4.1_018430m (locus cassava4.1_018430m.g) derived from phytozome v7.0 (chr-ID scaffold03155; pos 78731 to 79073)
ctgttaaggttttcaaggtcagtctcttccatctttctccattaatctctattttttttttaaaaaaagaaaactaaaaattcttcaattattaataatttttgaagaagattagagataagatgtactttcatagccttatcatttcacaagcattttgaggcctatatcctacttaaattagcatatttttgtctgtttcatgcacatggccaaccttgcattcgacattttatataattcaatttttgttttattttattttttaatatttattttcactggcattgcgagtatacacgtctgtgatattataataaattaatactgcacgaactcagac

SEQ ID NO: 43848 - DNA, 965 bp, Manihot esculenta
  Intron number 2 from transcript cassava4.1_021613m (locus cassava4.1_021613m.g) derived from phytozome v7.0 (chr-ID scaffold04324; pos 435661 to 436625 reverse strand)
acaatatttttcttgatagtgattttaaaccaaaggtaagatattttgataattattgaaccctttatacagtgcaacatcaaatattgttgaatgtcaaaattttatttttaaaaaatattgaaatattatgtgaaactccaataatttgacaatggtatttaaataataagtgaacattaataggtttgatcgtcttcctttgtgctttagtgtttttaatcgtaaactaataattaattagttcttatgattgcataaatttttaaaagacaatctattttatttcatataattttagaaaattaataactagaattcgaatcagaatttcattgaagtctttgttataattttgaaaaatatattaaaatatttttaaaattttaaaaagtttattgattaatttttttgttaattttaactattaaagattataaaaaaaatctaaaataacatcaatatagataaacaaattagaaaataacttttaaaaattgagaaattaattaataaatttttacatattataaaaatttaattataaaatatttaatagttaaaactaacagaatgattttatataacagattcttatacaaaaaggaactagtcaaagaacatttgtgatcaaccactaaggaagagaaggtggagcactttgcacacggcaaaccatctctttggccatttcacactatccaatccataaatggttaaccgattcttcaagagacaagaccaccaacaccatccaactttgctgaacctttagcatatgcccgttaatgatccacacaaccaacttcactatacatcaattaaatactatcaaagatactccatccgcaaaagtcaatgcacaccaacaatgataaaaaaaaaaaaaccctagatgcactcaaatacaacaataattcacccatctagctgcaaatacaaacttaccaacgcgacaacatagt

SEQ ID NO: 43849 - DNA, 876 bp, Manihot esculenta
  Intron number 1 from transcript cassava4.1_012951m (locus cassava4.1_012951m.g) derived from phytozome v7.0 (chr-ID scaffold08686; pos 58324 to 59199)
aggtatgtatttatataggtaattgcttcctttctgggtatttctggtttggttgattgtcctgagaagggtttccatttggttatggtggatttttctgttgtgtttatttatttgttgtcgtatgttcttgttttggcaattgattcaatacccatttgctgatttctgattcctccttgtttgatgattgattcggataaaattaaataaattttctggtattaattatctttagttctagattaagatgttttgtgattcatgttgctgcctgccaactttttgtgaaaattttctctctcaaaattttcctttggtttttggatttgttgatttgtctttttcttctctttctcttctcagttgttcctgtctttcaatatgttcctttgtgtgaggttaactgatggaaataattggtgtcatggaccaatttttgatctgagcatttgatttaattatgttgctggctttacaatcatttcttggggaaaagaaaaatgataaatttggttgctgctttaaatttgatcatgggtcacatatttcctgacttttctggaatctgtcggcatcatttgtcattatctgctaatgcatattaatttatgggttttttttagaattgaaggtttaagattttaatttattttttctaaaattttccccctttgtgtcgtgtgcatgccatgaaggtatcctcaaattgttctaattgagcatctgagatcttttatatatgtgcagaaaggaaatgaagatttagcatgtcaagctttagtggaaataatttatcaggattttcaagttttcatttgatgcagctaagcctgtgagctttgttcttacttgatatttcgctattttgcagct

SEQ ID NO: 43850 - DNA, 936 bp, Manihot esculenta
  Intron number 3 from transcript cassava4.1_005598m (locus cassava4.1_005598m.g) derived from phytozome v7.0 (chr-ID scaffold03542; pos 128189 to 129124 reverse strand)
gggctccagagctgtgtggatcttttttttcaaaggtatggtttgcctaccatgtatattcattcttttttctctacagcaaggtatgatggtatgatccacgcaattttggttatttctcttatcttctactcatatctttgcaagtagatggaggtttcacgtcatttactgatatgcttaacttcttggacatgtttcgaaataatgctcatgatattaccttatgaaagaagatgtagatgtattgactagagaaggatatggtcaatgcacttgatttatgagcaattgatgaagaaagcaaaatttatgaacatggtttgttgaagttgattggttggcttgattgttataaactattgttgaagatgggttttgcttgaatttgttgctgatcgattattttttcaaacctctgttcatatgtacttgtatgcccttgaaaaatgtctatggattatgatgaaaagatacattatattcaagtggtatgattcagacgtatttcttcagagaatctcaatgtttgtaggcaatgataaaaacacatgccttgacttttttcattttacacccttgttcctattggcttttcctatgcttttagggtgaaccttcttctgctcattggtaaagttatggaatgctatttttatgagctatggaataacaatgaagcaatgtagttctctgtaaaatgcttcgaagtgctttatgtaagcagtaatgcctagataaaaataattcttgttcagggaggactatgaactctcctggaagttgaatatctgtcattcaggtaattgtgtcaggttatgccccagtccctggagtggtttaactacagtaagaagtttctaatactgtttgaattctgatttgttggtattctttgcagtatacaccagcaattgatatttggagtattggctg

SEQ ID NO: 43851 - DNA, 1003 bp, Manihot esculenta
  Intron number 1 from transcript cassava4.1_010150m (locus cassava4.1_010150m.g) derived from phytozome v7.0 (chr-ID scaffold11581; pos 935920 to 936922)
gcttcccactaagccgcctccgcctgcccaggctggtgagtctagatttggtttatctgacccttctttttctttttttttttttctgatgtcatttttggttttatattattggaaatttatctgctttttgcaatatgctgttgtctgtaattgattgtatgttacagtggaaaattgttcgttttagctgtcttgtttatctggctgctgagatattaatttaaatggaaaatctttgatttttattataggtttttgcagaaaagaaagataataaatttacttactttttcaagattttagctttcttccttcaatttgaatgactttgtctctcttcatctttatgttgttttttcttcaattgcattgatagagtcagtttttgtgcattacacgtttgtttgttgggttcttattgtgaatggagaccacatttgttctctttgtagtgatgctatccactaatatagtactgttaagttttcgatatgggttcttattgtaaatggagaccacatttgttctctttgtagtgatgctatccactaatatagtactgttaagttttcgatatgagttctacttgactatgtttatgctactaaaagctgcctgcatgtatcatcctttttaatgatgcaactcgctttagtgctcatgaactagactcgcactttatttggtggtgctttttgtcacaagcgcacattgggtattaattttatcttgacactgaatcttgtcagcagattctggcaagagaatctgagacaaattagtacactgcaaggcaaaattacattgaacaaaatgatttaatatatgtattaagacaagttgccctttgaattttgtgactttatgtgttatcaacttttgttgcacattccttcaaaatttttaactatggcactatttgtggtagaatttgttgagttttgttgtgtacttgatgtttttctgctctaattatcttgaatagtgagggaagctaaga

SEQ ID NO: 43852 - DNA, 683 bp, Manihot esculenta
  Intron number 1 from transcript cassava4.1_012137m (locus cassava4.1_012137m.g) derived from phytozome v7.0 (chr-ID scaffold05965; pos 195091 to 195773 reverse strand)
atctctgcttctcttcctcatccttttctttccaggtaactttacaaccatcccttcaaacctagagttcttggaaacttctctgtgtatgcatattgctttattggatgtatattatgtttattttgtttctgggttttctttattctcttcctttttgtgggtattttggattttgttgtttttgggcgtttgcatcctcccatctgcttctttctctgactctattgggatgtgtattgtgtttgtttgtttgtttgtttgttatcttttggatttgttttgttagatttggtttttgattgatttttcttacagtatttgaagagctgtaaactgtaatcagagtgtcatctggtctctgcatatgggtatagtgaaattttggaatactgttgagaattaggaaatgttatgacatttggcttatctaactgctaaaacatgggattaaggcatcggttgaaaattgttgaattcttgtttacttatttttttcaacagatacagaaagctctgcccttctttataatttatcttatacaattgcttgtattttccttttcttttccttggaaggtaatacgttttgattatataattgtatttgatgtcaggtttaatgctattacatgtcttgcattatatctgaaagttaatgtctttaaggttgtgttgcagat

SEQ ID NO: 43853 - DNA, 727 bp, Manihot esculenta
  Intron number 1 from transcript cassava4.1_019688m (locus cassava4.1_019692m.g) derived from phytozome v7.0 (chr-ID scaffold04953; pos 131741 to 132467 reverse strand)
caacatccccaaattctccggcgctccccggtcaggtaagcttctatgttggccttatcttatctcctcatacatcgtcgttactctcagccagaaatctaagtttggtttttcattttaggagctgactgttttaaaaaatgcacaatcttttcatattagaatgagaaagaaaacctttgtagatctaataactgattatgttggattattagcttcttttttgtaatttgtttcctttcatttttatgtgtatggtcaaatattaatcatggattattctgctagatggtttaagggattaattcatgttaggttaagctctatttgagagagggaagaattaatcaaggggattggtgtgaagttcaggttattgctttgagcgaggatcatgtctgtttgcacttctaagcagtgggttccggaactgaatgaattggggagtggaaggaaactggttgcttgcttgaattgttttggcttgaaaattttccgctcggcttttggggtttgactcctaaccaagccatctattgcccatatgtggatcagggagctaaaacataggtggagcagaatttatctgtatcgcatcttttagcaagtccataaaaaagttcggaaattatttgttctgtatattttactcttttgttcttaaaattgttccgtgttgtattatttgacctctactttgtttgcaattgttacagaggtgttccgt

SEQ ID NO: 43854 - DNA, 302 bp, Manihot esculenta
  Intron number 2 from transcript cassava4.1_004500m (locus cassava4.1_004500m.g) derived from phytozome v7.0 (chr-ID scaffold03604; pos 899603 to 899904)
cagtagaacaattggaaacctcctttacacggtaagccaattcatatatacattcttctgcggttatgctgccgagcactttgcaaattgagtatcctctagatatcaaaattcctttataagtattcttttagtttatgcattcccattcggtaaaacttatgattccgtttttatcaaggtggtttgcatgcatttcttttccccatgaatcttccattacaaatgttaccattttgtgtatcatatgaaactctggtgttcgttatatgtttgacaggtagctacaaagtacccagcaa

SEQ ID NO: 43855 - DNA, 819 bp, Manihot esculenta
  Intron number 1 from transcript cassava4.1_027190m (locus cassava4.1_027190m.g) derived from phytozome v7.0 (chr-ID scaffold06548; pos 79072 to 79890 reverse strand)
tgcaaagaagccagcagtcgtcaccatcttcaattgtaagtaagaatcagaattcatttatccgtagctagtattgcatgttggtctgaatttgtgtgtaatttgcagacaaatctttttccacatcctattgtgtcatcttcgacaacctcgtcttctactgcaccttctcttggtagagagcccccttcaaaccaaacatcacatcatcaatggactgctttatggccagaggaagacaaggcaagttgaattaattcacttttttatttatataattttttaccttttcttgtggcagggtccattgtgcatttgttttttgttggagaaaaagaactcaaaattttcacctgggatttttctttttgggcatttgggtgtctgaaaaaattaataataaaatatttcactaagttaattaagccttttgcagtccgaaacaggattgagttagtctggcaaagttatagaaattaaaggactggaaaatctcattaattcttcatttattactattaattaataaaatctcgttggtaaccctttttcgtttcttgcacaatgtttgttttgtaataatttcttgttatttcttagaaaatataatgaggattattaccaaattagaggaagaaagaaatgttttttctttaatgacaatgattaagctatatgtgcaagtaatggttagctctccttatttggaaattgagtttgttactattaaaaaaaatgggtgacaaattcaacttctaatcttgaaaatggttactgtacacagatagtcggtgcaaagagatcacggccattctccat

SEQ ID NO: 43856 - DNA, 801 bp, Manihot esculenta
  Intron number 1 from transcript cassava4.1_004249m (locus cassava4.1_004160m.g) derived from phytozome v7.0 (chr-ID scaffold08359; pos 338561 to 339361)
tctcagaggcagccggcgggaacgcattgagatcggtcagagcacttgtcacttcttgcttttatatctaatttcccaataatacggttttatttccctaatttcttatgctatcggatttttttttgaatccttaatcctctttttgatttcttggaaaaccatagaaaatgcacaagaaataattttcttgatatttgtgatattcttctcgctttcatttcttgaaataagttgaaaattttaactagactcgtcagagctaaagagatgcatctaccgcgctcgattgcctccctttttttttttgggagggggggggggggattagttacttatccgatcaactcactttccactcaatttcatccatttctcagaatctcgacggagcatacgatttagaatccacgtttcgtctattcctttttgcctttatccgcctcgggatttgaattttagggtttgtgatctatctcggcgtctttatatactagttgcttagaaattttgtgaccataaacgaattatggggtcttcggataaaatgcatgacaacatttgtttctggttgttggatctaactttgcatttttgtttacctgctttctaattaaaaaaaaaacgtttattgttaattggatggaagatcaatttgattgtgttaaaacatggtaatgaaatactgatttggcatttacttgtgggtgatccattttgtcatttctagggatgcttttctaccctggtctcattatttcaatctgttttggcgttgcgttacaggaaatttgagataca

SEQ ID NO: 43857 - DNA, 702 bp, Manihot esculenta
  Intron number 2 from transcript cassava4.1_004249m (locus cassava4.1_004160m.g) derived from phytozome v7.0 (chr-ID scaffold08359; pos 339720 to 340421)
gcgacttggttgattggttcattcctctggtcaaggttgggaaattatgttttctgcagttactttgatggtgctgtttatttatctgttgaataagatttactaggagctgaattgaacgattgtcaacattttggtccttgtagaaacacactgtgctctttggtatcttgaaaatgacctgccatgtcactagattgttagtattgtgattaattgattcaatgccctatgctatttattacaaatttcatgtctgcatctcctatatcagttgtttatttttttctttttaattaaattttataacatttatatttatggtaaggataaaaagctaggtgcgatggagtatagtgaagtgattatgtgactcttccattgcaccaatttgttgggcctgcataatttatagtgattctgcaagtatatcgttccagtctgctgctttattgcagcattttctgcttgtgtttttgccccctatattacatttttgtgcatctccatatgtatgagaaaggttgcatgtgtttatttgattttttataggtgagaatgtcacttccttttgtattttttgggtactaatgattaagtagatacacttttttggtcatacttgcttgtactgccatcattgctaattcttcggttgttacttgtttgaacttcttaatatcagagactggctgctggaga

SEQ ID NO: 43858 - DNA, 694 bp, Manihot esculenta
  Intron number 1 from transcript cassava4.1_012000m (locus cassava4.1_012000m.g) derived from phytozome v7.0 (chr-ID scaffold06825; pos 87338 to 88031 reverse strand)
aggattaccagcagtggagaattattcagcgcgtgagaattaatttgatccttttctccttcaccaattgattttgttctggatagaatgaaaattgggaaatgcttccattttttggaaaaaggatcaattgtttctctgatgattgttcaatccttcttgcatgttttcagatgcatagggactaaattgggaaatgcttccattttttggaaaacggatgaattgtttatcagatgattgttcaattcttcttttcatgttttcagatgcccaggactaattttgaacgttttggattaaaatcagacaatttgcttctatttgttctgcaagctaagaggatccctagatgctttatatttatattctgcaagatgtttgcatacgcgtagaaacttgttgaactttattcaatctacaatatttttatataacaaatgctaatgcattcaaattgaattcacaaatctagtgacatgattcattaatcaagttgttaagcctagtgctggtgcagctttcagctttaaagacttaaagtttttggtgtgctttactttggtttgtttttcttgtgaagtttacacttagtgttcctttattacatttgtggaattcttgttttattggtttattctttggttgaatttctgcaggttcgtgatcttgatttttcaataagaataatagg

SEQ ID NO: 43859 - DNA, 855 bp, Manihot esculenta
  Intron number 1 from transcript cassava4.1_019608m (locus cassava4.1_018888m.g) derived from phytozome v7.0 (chr-ID scaffold00321; pos 77581 to 78435)
ttctgctgccgctgccgccttgctttctgtcttctgtaagagattgattatgtcttcttttgtttatgagtgttattgatttatgcttagataaatggaaccagtagagggaacactcggccactaggttgaaaggaacatttatgcttaagattgatttcttccactcgctggttccacaacactaatttattcagtctcattgattttcatacttgcttacagccttacacagttgcacaatatgatcatatatgtgtatatgaagttataaactgcattacgagttaggtcaagggaggaggaaaaaaaaaaaaataagcagagagcaccaattcatgcttaaagctttaagctgagccaatcaaatcgtctcgaaacaccttcgtttcattcacttctgcgagtttctcccttggtaactcagtcctacataacaatcgtactggtaagccactgcctcactcatccaagcataaacaattttggtcttgcgaagtggcaatgtatcgttggacaatgaaatgcggtactgggtttcatactattctttgattgaaaatccaagatgaattattcctaaaattctttattgttgcaattaattcatggattattgctggtgtttgagttttgttgttgaaatttggtatagtttgagttaaatttctgggttttgatcggtatttttttttatttttaattttttgtttaatttaaatatagtaaatgattttaatttttaggtttgtttggactttgactttttgccgtttaagtatatattcaggttataactaaactacaaacccaaacggtgctgtagaggacggttgttctggaagctggtcaggc

SEQ ID NO: 43860 - DNA, 891 bp, Manihot esculenta
  Intron number 2 from transcript cassava4.1_020781m (locus cassava4.1_020781m.g) derived from phytozome v7.0 (chr-ID scaffold06028; pos 321548 to 322438)
atcaataatatcattgttggatctagttagatcaggtaaggcaaagacctctttttgtcaagttttttattttgttggttgctatgtgtgattgttgttgttgttgttgttcagttttacctattttgggattgagtgaaacggaggaaagataaaaagaaatttgattctcctaatttctccgaacggaaaaaggagcagaaattacatttctcaaacccaaaacatcaccgataattattgggaaatggtgagaattcaagagaaataagtcttatttgtttgaagtacttcaatgtcctatttttctgaagctttctgtgtcttttaagagataaattgtaatttcgcccctattctaatgatatatccaaaccaacaatatgggatatttctttaattttcatttctcctctttggataatggattctcttcatttttgctgctgtctttgtgtcatattcgggagaatggagtgcatgtccttcgtctctcttacttgatgtattgtctcatgatatgctttaagttaaaggaagatgtgtttatttcaaaaaaaaaaaaatactgcctgtggtattttcgaactaatcagttaatgttctctcacatggcatgttttgatgatctattaattggaaggtttgtagatgtctcgaaatctaatctagtttatctagatcagctaatttacccccccccccccccaaaaaaaaaaagaagcctgaattgaactgtattctgattgtgtaagctcaaaactgaactatattttactgacagcagatttaatgtgcttataccatatttaacatgaagtagaacctcaacaaaatgggcatatgaaatctaatactttgttcatattgcagagaatattgatcggtagc

SEQ ID NO: 43861 - DNA, 484 bp, Manihot esculenta
  Intron number 1 from transcript cassava4.1_004240m (locus cassava4.1_004240m.g) derived from phytozome v7.0 (chr-ID scaffold03404; pos 22579 to 23062 reverse strand)
ctcttgctggaaccatttcctacaaggtataaaggcttttgaaactgtgtttatcattaccatgatctccaagtgaactgggttctaattggtattgaatatggattaattatttgcttgaactttgaaatgatcatgaaattttctctcgatttggttgcctgatattgctttgatgctaaagccaatccaagcttcattttatatttcttcaaaagatgaacgatttagatgctaaactcttgtaagagtttccaccaggcagctagagctaaatggtgtacgaatgaaatggcactatgtgtatgttctattaaaattttcctatgagataaagtacatgtctgaatatttagtagtagaattctgtcttaggtttttacataaattggcataatctggattttcatttcattttgtttattgattgcttatatgttcattattttgattagtaattcacttcttgaccagcactgcagca

SEQ ID NO: 43862 - DNA, 838 bp, Manihot esculenta
  Intron number 2 from transcript cassava4.1_020390m (locus cassava4.1_019865m.g) derived from phytozome v7.0 (chr-ID scaffold01796; pos 16719 to 17556 reverse strand)
atcaacgagaacaaactcctctctaagaagaaaaggttcttttttttttcgatgacattacctctttgtttaatttcatggcttcttttattaattagttggattttgttctcttttacctcagtaaattggtggaaattggttctaggttttgcttattgtacatctcaaccgattgttttcatgcaatttggtagtcgcctgcttgtttgtgggcgtgctccttttgaatttttggtatattaccatcaatttctgtataccttgatggagctctcgattatatatatttattaatttggaattaaatttggcatctattggtttaaaggaatctagtatttgacatgtattgctttagtaaatttgacatgtagttttcgaatagctttttcatcgtatttggattataatccatgtctaatatgctacccctataagtggaagcaaattgttgagtataggattgttgacttgatctcagctatattaatggctttgctactcttataatataaagtggcttagtgtagctaatgatgttctgcgacaattatgagttacaagccagtaattcagtgctgtttgcatctcaaaaactatattaaggatacgtgattgctggataacagtagtagagtgttgataaatcagcaaccagagtgcggagctatttggcatcagggtctgaagtttcttttttttgttgtttgttatataccttttttcttcccatcatgttgtctttaacactatttgtgtttacacagtaatgtagtttacatttgaaaatctgatgggatgattctatgttacatggaatttatattgcttgtag

SEQ ID NO: 43863 - DNA, 839 bp, Manihot esculenta
  Intron number 2 from transcript cassava4.1_001157m (locus cassava4.1_001157m.g) derived from phytozome v7.0 (chr-ID scaffold06137; pos 124177 to 125015 reverse strand)
tgaccgcaagcttcctcgactcctccacgaccgtactttctgtattcaaacttgctgctgttaatttatcacctgccattttctagttctgctgcaattcctcaattttctttcttattctttctgtagtctgcagtagattgttttctttattgttatgcccgattattatactctcacattatgcttctggatgtgaagtgattttgtttcacaaattccttagtttaatttcatacagtttgtcctttaatgccttgcgtcctgacatttacactagtacatcgttttctaattgtatatattgagtaatgttgttgtctctttatctttccattgtcgagtattgttttttttttctttggattttatgcccaccctaaattcataatccccttattaaaatttcataaggattcaattcaattcttttcttttcttttctatcattttcttgtttgaaatggaaaaattcttttctttttttgacttgcaatattttcatttttcaaagaaagtgaagtcatttatgatttttcaagagttcatttgaattcttttcttgcaaaaaaaaattatcccaaatgaaggaatatgattatcacatctttgcaccagcacattccacaattgccccttttgggtataggaaagagtatgccagggtggatttcaaccttatattgtgttacagttgatgcattcaaatttagctgttgacaattagatttttggcaatgttagctcaaagtccatattattgtttggtaaattagtttgaaaaactatattcagaagttcgtatcatttgatccttggatttttgattgcagatactg

SEQ ID NO: 43864 - DNA, 935 bp, Manihot esculenta
  Intron number 1 from transcript cassava4.1_000964m (locus cassava4.1_000895m.g) derived from phytozome v7.0 (chr-ID scaffold05694; pos 44985 to 45919)
ccttttcagcttcaattttgattcactggatctgggtttgttttctttctttccttttgcagatctatattcacactgtgtatgaagtttattgattgttttcccctctttctgcctttttttttcttggctgtttggtggaggaagccaaaccccagctctgatttatctaggttgttggttctctaatttacgccttgaattgtgtttttgatgttgaaccttcagtgttctttcataggttggtgggttttgagtttttgtttctcttctttcttttggtccttataaaggatctcatgttagatttaatgaatgcaatatgtttattccttttatttgtttctgtgaaaattcaaccttaattgaaaaaacaacatgattttaacttttgggttggtgattgatctgttacagattgctcttacataaaaaatttgattgcttaatttctatttttccccctttttttggattgtatctatttgatgtggaattaggggtgaattcagtttatttggatcaggtgatgttcatagtgttgtatttttacttctattaagcttcatacaaggttttcaggcatatgactttattctgcagttaaatttctttattagtttacttcttgttgaggtttgattttgtaactattttgtacttttccttcattttcttgtcatctcaacattcatttgcaatttgcccgtacttcttttttttcttttagttttaggaaaacttgattctgaaaaggtaatctttgggaaggttgagcaattgttggtatatcactggactgtttctcttgtagcttgatttcttttcctgctgatttacatcatagtttaactcattcttatagcagaaatttaataagttatgttcgatcttgaacagtgcataagaggagacttggaattgaagattcacac

SEQ ID NO: 43865 - DNA, 888 bp, Manihot esculenta
  Intron number 4 from transcript cassava4.1_001276m (locus cassava4.1_001274m.g) derived from phytozome v7.0 (chr-ID scaffold02581; pos 68792 to 69679)
cggggactgtttgtatctggaactaccagtcacaggtaggcacatataacaatattacttccaaagtgagaggggggaacttctgtattcttttgtattttctgcattgcaatgatttaaaaacattgtacataagtttaaaaaccaggattgatatttttaagtttcatgaggtgtatcattaattcattatggacagatattgcttgtgcaatgatgagttcatttagctttgagctttattgttctcccaagagcgcctgtgctagagtgttaataatttatcactgtctgctttgcgttttacaaagaaaagaagctcaatgagtgttgcagcatgttgctgtgtaattaggttcataaaccatgttgtcacattttaatttttttgctattggaagtagttttcctagtatgaagtttgaacactggtgatgaattcagttgtaggaaattgagatgcagcatgggagaaatgataattttgtaacatctggcaaataagttgcaattctactatagggcatataatatctttagctaaagataatttggttattatttgaattgaccctcttcttccaccctatctttagtcccccttggcaattttttgatggatgacgaagtgagagagctaagatcatgtagtggcatatctttatttgctatagacctaaaaattgttaaacaaagtgcttttctgcctatataccaagaaaagaagattgtcattgtcagattgaataagaaatttaaataattgtttgtgattttcagagagttatctttattaaaatctattggagctatttttccttctttctttgaaaagattcaagattttgcattttcctaacttgcatctccttgatcctcctccagacc

SEQ ID NO: 43866 - DNA, 678 bp, Manihot esculenta
  Intron number 2 from transcript cassava4.1_001262m (locus cassava4.1_001262m.g) derived from phytozome v7.0 (chr-ID scaffold08359; pos 1667881 to 1668558 reverse strand)
aagctatatttagggatcaggtatgtcctgtctcaagttctattgcaaaacgcaaatttgcttttcacatacacggggataatcacattcaatgcgtgacggagataatcatatatgtatgtatgtatatatatatatatacacatacatacatacatatttgacttctttaacagagaaaattgatttctggttggccataggattatggtgtaatttattctaagtttctgagaagagttcaccatttattttctatggttgttggtgaatttaaggtgcaatagctctagctgcatcccacaaaaagatgaatgcccatgctctctgctcaggttgcaaaactgaagttgactattaaagtttccatttaaaacatgctagttatccccaactttaatagaatttcccgttgatggttggctcccaatgcacttgtggtggacacaagtgggtgatgagcttgaaaccttgagccttgcttcaagtgacaaaaaagtatttcttcttttgaccatccaaatctgacctaacagccacttttggaccctttttcttgtttgatacctcaatttacgtatgcatgacactagattttgatgtcaattatctatattattcaaaacctgttacggttattgaagtgtgtataagttgtgcttttggctgtgtagatac

SEQ ID NO: 43867 - DNA, 942 bp, Manihot esculenta
  Intron number 2 from transcript cassava4.1_028454m (locus cassava4.1_028454m.g) derived from phytozome v7.0 (chr-ID scaffold06951; pos 49819 to 50760)
gtcttcagtatatactcctatccaaaggagtaattctgttattggagttcgaagaactgaagaacaagtagctaatccagtctatgaaatgcctcaaagcccaactccatccgatatgggctatgatactgaaagtgtgctcttcagatcattcaaaatcatgatacttgaaaagaagaaacaccattcgaaaaatggttcagtatggagatttccaatagagaacagaaattatggcggagaaaatatggtgtgtataagaatcagaagtagggaagtaaagactttcctaagttcatacatcactgttttactctacttaaaaaaccataccccaactttgaagacatctcctttctaaccaccctagaatccaattacaaaacctttataaatccctaaggaaaaattctcaaagacatgcatccacccttaacagacctcatctatcaacccacagagaactctaaagtggagtgcatccccttttcacatgacaatagtgaaaatcctgctgctcggcaacaaaacttcaccaatctaatccttcatacaattgggcaatagttgagcagagttgagaatcaagtctcaaagatagcagctcaaccatcaggagtagacattcttccacaaaaggaaaaggcagaatcatcagacactaaaatggaagaaaaggttttatttaaacccatggatagtaagagcatcaacatcaagctagacaaaaaagaagaaatgctggaagaattaaccaaaagattggctaaactaggattaaaagaagatacaaagaagaaatcgattgttccattaactatggaatctgagatcgagatagaagaaaaagaaaagcaaaatgaagaagaagaacttgctcagctcgaatctatgctacaagaaatagaaccagctgaagtaaataggataaagtatcctaaa

SEQ ID NO: 43868 - DNA, 715 bp, Manihot esculenta
  Intron number 1 from transcript cassava4.1_018572m (locus cassava4.1_018572m.g) derived from phytozome v7.0 (chr-ID scaffold08359; pos 1837700 to 1838414 reverse strand)
agttatattgcagaagctttggtctctgttttgaggtaaattacctaactttttttggatctcttctctcaatcgcttcagatatcataatccttcttttacaatgagacaaataaaattatcagatatatgtgttccaagtgtgtctttcagttaatatatggcttctcaatttgtagtttctgtaattgggtgtggttggattcttgaaaagttagtagtggttgaatgatgggatatggatttcatgtgggtagagtgggattttcccaatatggaagagacttgatgttggtgttgtgtggttgaatgtttccaagttcttatttgttctttatatatcttatatatgtgtgctgctgttttaatggaagtagcacaggatgatatatgggatttattctttgctcttttgctgataatcttactgtcaattaattaaatttgattgctgacgaagtatttgcgatatggtctatggtaaattggattctgaaattactaggaaccacgttggtttataatttaggagtgaaatgtaaaaataatggaacttcagaggattatttctaaaagaacaagaaaatagaaagatgagagtgacacaagattgcacgttaagaaacaatttctatttcctaggaggtttgagctattagtttccagtctctcctcattctgttttgtgttatgttcttattaggttattctagca

SEQ ID NO: 43869 - DNA, 666 bp, Manihot esculenta
  Intron number 1 from transcript cassava4.1_005189m (locus cassava4.1_005192m.g) derived from phytozome v7.0 (chr-ID scaffold09880; pos 257706 to 258371)
gcaacctcatcaggtaagttttttgattgcttctccaattttgtagttcaattcagctttttgttcaatgtaagcgggatgttgtggttattttcttgctatcaggtgattatatgcaatttattggttaatgctagctgtgtaggtctaacgatttaattattgtttgggttttctttattgatttggtgattgaaaaattgaaaataattggttctggacggatttagttctcgttgtggagactaaattggctatgttttgattggataatgcgtctattctttttaaatgattcagggaacttttttccccaaatattcttcaatctgtttgctgctcttatgcgaaatactgttcctagttctcaaataaaaagaaatagaaatcgggaagagacctgatgcatcatgtattctggacacttttttttttttttggggggggcgggcggttaaataaattataacatgatgttacctatagggaaactaattgattaatctacggatatagagcatgctcaatgtgactttgtttttgtattatgctaggaagatgtgtgttatctgtttagagttgacaagctgtggaaagctaactagtctctgtctttattgttgccttgcagttgcgtttaagtcaagggaggatcacagaaagcaa

SEQ ID NO: 43870 - DNA, 618 bp, Manihot esculenta
  Intron number 1 from transcript cassava4.1_006876m (locus cassava4.1_006876m.g) derived from phytozome v7.0 (chr-ID scaffold12455; pos 641433 to 642050)
ccttctgccgccgatttcgttaaatccatcaagaggtatctgttcttccgatcgcaacacatatttgtataattatatatatttctcccttatgctatcataccatgtatttcttggctttttatcattttctcgtcgtttttagctgtgaattgtgattcttcctgttctcaaaagctggagaagcactttctagatgtttggcctcccctcccctcaaatccggaagaagtaggaaggcttagaatatgttctggatttgatttttttttttccggatttgcattggtttaggaagaatttaattgaaatagtgtctatatatgttaactttttttttaataaataaaagatgtaggaatgtagttggtcaatacagcacgttgcttagaagaagcattccgtgaaacgagaaggagtttcttaggtcatctgagtctattcaattgcaaatgtgaaagtttcttgttgaccaaaataatgacatttgtgagagtttcattgtcttcttttgcaatttggttagtgaagtagagtattgctagtgtacaaggcaatgctgcaaggtttgagtgtggtttgctttatatggcagcttcattgtctcgttttcaaaca

SEQ ID NO: 43871 - DNA, 609 bp, Manihot esculenta
  Intron number 1 from transcript cassava4.1_014818m (locus cassava4.1_014818m.g) derived from phytozome v7.0 (chr-ID scaffold03834; pos 336040 to 336648)
cacttcaagcccagaaccagaagcttcaggcagaggttagtttaactttcagcaaattattggacacacatgtataacatgatccaattgatcttatgcaaaattctctctactgttcttcaatggaagtataggttgtaggagagtagaaagattctgcatggaactacaataattttgaagaatatatttagagttgggagatcaataacaatgattatttctctggtggattttcccttttgactttttcttctgtaatgattttcatcaactttatttctgttaacttctcaaaccaatcatgggttttagctagcaaagcttgttttgttagatatcattagtacaaccttttgagaggttgcttgaacccaaaaaaaaaataataataataaacaaaagaagaagaaaagggaaactttttaattgattgcttgattcttgatggtctgaattctgaaaccaaaggtaatcatgaccctgaaagattagatctctcttttttgtttttccatttgaaaattttggacttaaaatattggaaatcttaattagttaattgtgggtgcagatatcagcactgaaaagcagggaaccaactgagtc

SEQ ID NO: 43872 - DNA, 760 bp, Manihot esculenta
  Intron number 3 from transcript cassava4.1_015189m (locus cassava4.1_015189m.g) derived from phytozome v7.0 (chr-ID scaffold02477; pos 349846 to 350605 reverse strand)
gaaccataataggtgtgccctcttctttcactttcattcttcgtgcatttgtgattgtaaccttcatgtatttttcaaattaagctaaatacattttatctttaatcataaattgagtattgatacccaaataacatattcatcaaagatggaaggtgatatcagtttccttgaagcagctatcgcccctcctactagttcatggaggtgtctgtagagaatatgtaacttataaaaggcaggaaaagttgttagggggttgaagttattaactgagctgaaaaacagttatgagatgtttgttaagctcacaggtaggtgatgagtgctgctgtataatgtatttaaagaacctaatatgattcaaagagattgcttttttgattctctggtatactttctttcagtgtctcgtaattttggagataattttgcactttcttataattgccttaataagtgaaactgtttcatgactagctgtgatcactaatagatgcagttctatccattttaatgccaatttcgtagaaacatgaaaatgcagagcaccatatccactagtgaaatcctatcttgacagctaaaccattgaaactgaacttgattgtgtggaataatggggctttatgtgggaaatcaatcttatcttgataattaaaattcatttgtgctgtgacaataagccaagttttgagtacatatttgactctgaattttagcagatcaatttattgcttgtgggaaatcaagagattct

SEQ ID NO: 43873 - DNA, 717 bp, Manihot esculenta
  Intron number 2 from transcript cassava4.1_014563m (locus cassava4.1_014540m.g) derived from phytozome v7.0 (chr-ID scaffold12525; pos 89369 to 90085 reverse strand)
ctgtggttaccactttgaatcctgcaaacaaccaggtcggttttcttttttgttgtacgttcatttttgtttttgttaatctgggtttaattccattcttcaatatcatgggataataatgacccttttatcatgatatattattattttaggtgtatgtttctttctcatttccatggttagaggattaattatgagttttttttttgagttgatgtgatttgctggctagtattttagtttcttatcttgtttggataatcaattagatttaatcaaatgttttacaaattactatggtcgttgctacccaattattcaatagtggattatgtattgctacagaaatatatttcttgaacttcagctggcgtctctaagctccaagaactagttgtcatataactgcgcactgagtgcgtatggtccaagggaaccttttctttcagactgcatcaatttcttttttccttctcaaaaattttgctagagttgctgctatgtacatcactacatccatcagaattgcacttgtttctgagcattgtcttagtctaaagaaatttttgtttggaaatagaactctcttgccttggtagttgcctgtttagtgtctcctgacatgattgcattctagctttacatttgtcaagttcatgatttatcctctatgttgacacagacaatagctgaagttgtggagggttccattgaaga

SEQ ID NO: 43874 - DNA, 461 bp, Manihot esculenta
  Intron number 1 from transcript cassava4.1_014563m (locus cassava4.1_014540m.g) derived from phytozome v7.0 (chr-ID scaffold12525; pos 90186 to 90646 reverse strand)
tgtttggttgataggaaaacatcgccaaagaaagggtttgtgattttcagctctttttaatttgatgtcttttgtgtttgtgatgctgtttttttagtcatttcgttaatgagaaatgaaaaatgtttaaagagataaacttaaatttcaaagctggtgtttattttgttgatgttttaggttatcctgtctcttgtttgtgtttggcgtgctgaattgtgagaaaatggtaggaaaaagttatttttcttgagcttaaaatttctttcttttagagtactgattgtggcctgtgtttggtttctgagggaaaaaaatgtgaagaattttggagcgataatcgaatccagatttgaacttcaatagactctgctcaaatatttatttatttctttttcttttatctttctttgggtaaatggattgacattttgagttcttttgtttatttgtatgcagag

SEQ ID NO: 43875 - DNA, 802 bp, Manihot esculenta
  Intron number 1 from transcript cassava4.1_019116m (locus cassava4.1_019116m.g) derived from phytozome v7.0 (chr-ID scaffold09788; pos 307268 to 308069)
aggtcaaatataaaatctttctccattctgatatttatgcttgtaagaaaataaatgatgataggatcgtatgatgaagtttatgctttaattgatacaattgaatggagaaaattttttgttatagattatacctcctatgttgagctttgccgtgaattttatgcaatctatgagttttcttttgatgcacaggattttaatttgaatatttctacaattcgttttaggttgcaaaataaaatggtccaatattcagtcacaatatttaatttgtacttgggtatttatgataatgaatatgtcaaaactgttgaatatttagatttattatgtgactaaccagcggattgggatccaattttagcatacaaagatttaacagggaaacctgagcttaaatttaggggtggaaaatctaaagctaatgatattaagagctctggtcttagatacattcacaggttcctgtgttatacattttctggaaaaaataaagatccaaccaaactcacaaaagatgaactcttttcttatggtgcatgttaaaaaagaaaaagttaattttagtttttggttatccttccaatttaaaagtatatctgatgttgggtgtagtatatacttggattttgtaatttcaatgctagcagtgggattgggtgcacttgatattatacacatagctgagcctattcttccacttgacatatctgcacttaattcatgggcttactttgcctcaacgagaggaaagaattaaagaatttgtattttgtcctccaggtcatatcattccact

SEQ ID NO: 43876 - DNA, 793 bp, Manihot esculenta
  Intron number 3 from transcript cassava4.1_011789m (locus cassava4.1_011789m.g) derived from phytozome v7.0 (chr-ID scaffold00097; pos 187181 to 187973 reverse strand)
ccctttccaaggtactttgaattacataatgcttttgtgatcataaaatgtgcactaaacagagatactcggtgcctataaatacttcttccatattaacttttgtttcatccatattaacttttgtttgagaaatgttctttttagtcattcataagacattgtccttttgttaatcaaacatcctgcagtggttgcttgtggtcattgatgaatatcagatgattctttcttattcaaaagaggtaattactagcttgctttggaatgtaacatgaaataaaagtaaattatttggaaaatggttttaaaaaagggtaaaaaaactgcttgcattagatgcaataaaaataaagctcttgtaaattataggttgcatatgtacttttctggctgtccctactttaatcaagaaatgcctatataattatcatctcgtttgtgttgatttcttcattacaaataaatactcacgaatgacttctggtatttctgtaagtttcactgatcctgttttatgacttcaagaattgtaatctgttaccaagaaattcaaaattggcttgcttaaatgtatgcaatggcttgtaaaatctatatagatgattccagtatatggtggtaattttttaccactgaaactacctgacaaaattgtacgctaagtaaatttacccccaatagtttagttccaagtttaagtgttataattttgaatctattctgctctctttttctttgccacatcttattagatcaaatttaattttataatgctgacaggtgcaccagg

SEQ ID NO: 43877 - DNA, 1030 bp, Manihot esculenta
  Intron number 1 from transcript cassava4.1_023419m (locus cassava4.1_023419m.g) derived from phytozome v7.0 (chr-ID scaffold01584; pos 156451 to 157480 reverse strand)
aacttgctcttcttccagaggattctgtgagtatctatgctttgttttttctgcttgcatttgtgatttttgtgcatgtttcttatgtagacgtgcatggcatttgttgatgaatactattattggaattatgatatagctgtcttctttgattttaaaatatcaattctatatccataaatttgtttaaattaagataatgaattattagctgctggaaaggattaaatattgtaaaaaatggattgtcatattgtttaagtaatgcacaagaggttttaagtgcataatgtaatggaactgaagtttctttcatctaataactaataaagttggagatggttcttgttttgccccaatttgacttcccaataccaggactttatttttcttaaataattatttctttttgtcttgaaacatggtatgcttttgatgtgggtgcactaaacatttcaagcagcaaattaaatgatgaggagagaaaaaatggcagaagctcctttttaagcagacttgtgtagagtaaaatgggattacttggtaatggtgtcagccatcatgtgcattgttatcctcagataaacttaagtagtttgtctccatttttggaccaatttgtagcttatgttttccttcttttcattttttgtttgtgtgccagaactagtgtggcaatcataattgtaaaattttggaaaaatgtattggatccagggaattatctgtagatacccagcatcttttgttttgaatgtcttcattatgtagtttcaaatatcttggctgcttgctgatttgtgcttaaagtctagggaaaactcttgttattaagggcatttagttaagtacttcttgttatgctttaaaaaatttaatacattttttaaaaaataaatttgaatgtaagcaaatgaaacttactctccccttggtgtttttcatctgttaaatgatgcaaaggaggtccatatgaaaatattattaaacgttgttgccttgtaggagtgttgtatctgcctgtcaagat

SEQ ID NO: 43878 - DNA, 785 bp, Manihot esculenta
  Intron number 1 from transcript cassava4.1_031749m (locus cassava4.1_031749m.g) derived from phytozome v7.0 (chr-ID scaffold04251; pos 172444 to 173228 reverse strand)
gcagcgcagaaagcgaaagtgtcaaggctcgtgtaagtttttctgaacattaaccctcttctcatgccatgtttactgggtttcatttcatttcaattaatttatttatttgttatgagctctgaaatatagatccatggaggattattcttcttctcatgccctattaacttattatatcacatgctatttttattaatttttttaaaataaaatattaataagttttatatatatactagtagctcattaaaaatcacatgtgagtttgaacttgaaattaataataattaatgacaccattaaaagtagtaaaggtttgactgtgctagaaatgaataaaattcaacgaaagcttcagttaaagaaggtgaggatgagaaaggaaagcatgtgggagtagagtttctcttccttaagaagaggccaattcaacaaagctttagttggtgttatttgaccttaatattaattataaggcaaagttatattcattaaaagtgaatcatagtcacacttggagacctttcccatgtggttagagcctaacaagcttctgcttgtccttttacttaacaatgtgattaaaccatagattaatgatataatcaactttaagtatacatttaaaattccaacacccttttaaataatcgatttcccctaatcttttaattaattgaatgatccattattgaaccaattaatttcattaaataattacttcttttatttacttatttattgcagaaaagagtgagcttccatccaatcagtgaaggaga

SEQ ID NO: 43879 - DNA, 528 bp, Manihot esculenta
  Intron number 2 from transcript cassava4.1_004913m (locus cassava4.1_004913m.g) derived from phytozome v7.0 (chr-ID scaffold12525; pos 276718 to 277245)
ctgccacagttggaaagctcagaaggtcccctcccccttccttttactgttggtagtcggtactttttataactggtagagtactgaatgtgaaggtgaacttggttctctttttgtctttcatgtgggtaatggttagcatgtttttgtatgtgataatttgcatgagtatcttttaaatgcatgtttgtcacatgacgtcttccaaaatttggtaggatgttgtgatttgatagttttagctttgctggtagtttttatagtttggctcagtttttcctcaaaactgttttctaaatgtttttcattttgaactacttttatttcactgtacaagggagtatttgaacccaactattttctctaattgaatttcttgttgtctggcttactcatattgatttaaatgtggtatgattccagttaatgccttgtcaacatctaatggcttttttactatttaactgatgttgttggttccatattttgccaggtttgtcaccatctgagaacacagaagttgatcca

SEQ ID NO: 43880 - DNA, 997 bp, Manihot esculenta
  Intron number 1 from transcript cassava4.1_028098m (locus cassava4.1_028098m.g) derived from phytozome v7.0 (chr-ID scaffold11581; pos 1418419 to 1419415)
aagttcttgctagacagggggacctccgtcagcaggtgatatactggcttctattttctttcttctttttcttctgcttgaaaatgccggattttgagtttctgaagaaaactctgccattgcttttagtactagattttgaacgtagataatgaggtttatatggttttcttgcggtatttggacttgtttgtcaaaggtgaagtttctaagagtgctggaaattgaatatgattcttacgaagccaattgttagaaaattatctttttcttggaaaaacttagttattgagtgaggatacattcgaaggtgattgttgttgcaaatcctttagccttgcaaaaagaaaaaattcaatttgatttggaagaattttgcttaaggagaaaaaggaatcaagaaaaagaagatatatccatatgaattgcgaaagaagtttgctctttaaatgagttcttgttacacactgtaggaaaagatataggaagcaaagaatagtttatcttgttcgttcttcttgattctctctataatcttcctaagattttctcttctattcttctctatttcttccctgctctttctagattctctgttagggtgcagaaacccaaatattctcctactgcaacaaagcacattgtctgcaattatatataggcctacaggggttgaactaacatattgtaaacgttgaagaacttaaaatcgcaatggattgattagattaatgctccttcaactgtaactttgtttgaattgtgatctttctttgcggagatctatagagcttcaaccataaatataccattcgagttgcggacaattttaaaattctctctagattcatcgtgtgcatcttaattccttatattctttattttatgtctatgcttgtaattaaacatggataaaggaacactaaacttcagtaggttactgaaacgatcatactttgcagattgccaaaagaaggaatttggtttcttccataaa

SEQ ID NO: 43881 - DNA, 445 bp, Manihot esculenta
  Intron number 2 from transcript cassava4.1_014223m (locus cassava4.1_014223m.g) derived from phytozome v7.0 (chr-ID scaffold12455; pos 88043 to 88487 reverse strand)
attctcctgatcgtgcttgcaatctggctaaacaggtttgtgaactggattgtgatcttcaatatgtatcttgcgtttatgctcgtatcctaagtagtggtggacctgtttggcgtaagctttgaattaatctacaattgtcacttttttgtgtagaaaacgtcgattgaaaaggcaagtttcttttttagaatcttatgccctatgctttcatcacttccacgttgaaaatagtagtattactttgcttcttggatttttcactagatttaggacatgaccctttttgcaattccaaaatcaatagtacttgattgatcttcgtgatttggattttcacggtggctaaataattttatgctatttatgtggagttacagtttgcttatcatggtatgcccccgttccccatttctttttcccctcgaattttaccaggcttttg

SEQ ID NO: 43882 - DNA, 1054 bp, Manihot esculenta
  Intron number 3 from transcript cassava4.1_012631m (locus cassava4.1_012631m.g) derived from phytozome v7.0 (chr-ID scaffold03363; pos 424097 to 425150 reverse strand)
ttggttcaaaagaaatacttgcaaggttgcatttcttctgatttcatgatatttgtgcgatgttattttactcaacttgaatatcttttatggtggtttgcaatttggattttttttttctaggaataatgtctaatggtttatatatcatatatttgaatagatgcagccaagttgtcgttgtatacatggacaagctggggagtggattgggctgtgcctcgcttgtaaaggaaagaatggttcaactttgtgactaacaatccataaacaggctattataaattaaaagaatcctcagcgtgaaatatatttgtagatgaaggtgaataaaacaactaaaaaaaaacagtagtcttgtaaactagtttggttatgagacactcacatttttgtgttcgtattggttggtctgagatatttcagttgttcttttatcttcatggcaccgtaatgagcacatcaattccacaagaaatttacccataagtcctcttacatgaggtgctcacagctcttttaggcaattcttaggtgcactgatagactgattcatgagctccatgaattcaaaaactgaattaaaagcagcaaaaatgggtagcacaagaatgattacttttgggagcattatatttgaaacagataactgtttagattcattagcactgttaataaaattccttctactataaggctgaaaacagctctgtctgcgaaatgttatccggttcttatgacttatttgtttttccctgccactttatctttttccaatcactttagtgcgctgattgccctggtgtcattgatatgacaactagggaatatagatcccgtatctaatcatttcaaattcatttgtggtggaaaactatgcaagtggttgcatattttttaggagaatttaaaagtagagattattgtttaaatggtgataggtgaaataggatagtttgcttgtgtagaaaatgccatccatgacattgatttattggaacaaactttggtggttgtaggttggataatctaatattagaggctattacaacat

SEQ ID NO: 43883 - DNA, 783 bp, Manihot esculenta
  Intron number 1 from transcript cassava4.1_012631m (locus cassava4.1_012631m.g) derived from phytozome v7.0 (chr-ID scaffold03363; pos 425795 to 426577 reverse strand)
tcccttccaacttgtcgttggttcctttcgatcaggtactatccacacgccactacccaaaacatcacatcaatttggttttctaattggtttcttatttccgaagaaataatgatcagattctatgtttttcaatttatcagctgaattgatgcattgcttgtgtgatcttgagtaaaatttcctggattttaattgactcaggattcaggtctacctacacagcaacaggagttcttgccatattgggtttcctggttctatgtgataagtgtttttgttttgtctttcttatgcgatgtctgtagagcaaaagcttgattggacctaatattgacataatttataaacatccattgttgaaatgggtattgaaggaaaatttctggtgtatcaagttgagcttaaataccttgttgcttgattccagcttatcggagtggtatcgatttcaatttgtcactacaagagtaggcaaattaatttttttatacaattttctacactggtatgcatccccaactgcaatgttggaggaatttgttactggctctagaggctcaacttgcggggctattgtttcacgtttttttatactctcttcttgttacatatttcctgttaatttaaatgcttgtttttggttgtgtaatttgatggaagtatgtccaaaggttgaggtactatttagtgtttgatcatgtttatatggccgtagtagctgaaaatgtggcagaattcaactgtgcagatattttctttgagggcgttgaacctcccttg

SEQ ID NO: 43884 - DNA, 324 bp, Manihot esculenta
  Intron number 2 from transcript cassava4.1_033011m (locus cassava4.1_033011m.g) derived from phytozome v7.0 (chr-ID scaffold01817; pos 63617 to 63940)
ggccaaaagaaagtaatatactctttctcttccaagcaattgatttctttgaattgaaaatgcatgtgaatgcgtacatgcagtcatgcactcaaataatcctgtaagatatgaagaatgaataatgacaagatttgagaaccgtagcataatgataagcctgagttgtgccataaagagctacaaaaagttctcatttttttgttttttgttttgttttcaagtctaataattttggaagagttatgagattttgctctttatgactgagattttgttctttatgactatgtttttatgttatctctttcgttgcaggccttt

SEQ ID NO: 43885 - DNA, 356 bp, Manihot esculenta
  Intron number 1 from transcript cassava4.1_025065m (locus cassava4.1_025065m.g) derived from phytozome v7.0 (chr-ID scaffold00069; pos 253316 to 253671 reverse strand)
tcgccgtcgcttgtggtcccatcgtcaccattctggtaatgtcaccatatttcccactttgatttttatttccaccctttttcttcttaaaaaaaaaaatcaacgggtatgtacttcatgtttctgaaataattgggcttgactctgttttgagaagttgattagtgaagccataacttcgagcaagtttgaaacttttaataaacagtgctaaaaaagacctcaaacaaagtttggtagtagttgagattcgggattttttttttaaagccagattaataagcttgcttttttatttcaatgtattttcttaattatcagaatccagcattgacatttggacctcgaggcttaat

SEQ ID NO: 43886 - DNA, 877 bp, Manihot esculenta
  Intron number 1 from transcript cassava4.1_008738m (locus cassava4.1_008738m.g) derived from phytozome v7.0 (chr-ID scaffold07434; pos 76350 to 77226)
gcaaggatcaagtgagtaggaaatgcagtccatctataggaagatctgaacaccaaaagacccaatgcatcatcaagactcgtctttccctcgaacgagtaagtctcggcacaaagttactgttattgaacacagtccatcgtattcccattacgcttataatcctgggatcaccaacatattagctgacaatatcctctatcaagcttccggttatatcaccgctggataataaaaaaatattatatttatctccaccttcttatagtataaaggaaaaaaaatcatatagataaatgtacactgttctctaaccctaaaaccctaagcaattaattacattttttttatttgtccatatactaacttgagtcttagagtgactgatatgagcactcaccgccacttcacatttttttttttataaattctaatcaatcacaatactgtttcatttcaattacatcatcaatctaatcttagtaatatcaataataataataatttatttataaaaatagtaaatataatttttttagtaaaataataattataaattaataaaaatataaaaaattaattataaataatattttattaataaaattataattaaatatattaattatttcaattaattcgattatcaaataaagataatcaaattaataataaaaaactaattttttatcaaccattgagaaccaaatcaaatatatttactcgatttgattattttgttgcaacggaacagtgcacgccctaattattaactttatttatttactattttctttccttccatccatgcttcttgaggctatatattgacgattccacagtgctcccttttctgactcggcgcaaaatttcattc

SEQ ID NO: 43887 - DNA, 697 bp, Manihot esculenta
  Intron number 1 from transcript cassava4.1_019243m (locus cassava4.1_018049m.g) derived from phytozome v7.0 (chr-ID scaffold02431; pos 410187 to 410883)
caaaggctctcttcagttcgtccaacgccccagtctgttcctttctcttcctctgtgtgtatgtgtgttctttaagcttaaatagtggatttattttttttgtttttttgttgattatgccaatacccgtaatacagggcctacccatatcacagggaagataacaggcctatcaccaggccttcatggcttccatattcatgctcttggtgacaccaccaatggctgtaattccactggtattcagtctccttatccgtgcttctgtaaatactgaagtataaattctctgggtttgaaagtgtctttagacttaatttctttctctttggtgttctttcgttttccaaagtttcttttttccggcgcattttatctattcctttttgttgaatttgagctgggtttttgaatttaaccaatatggtttcgatttttgttatcttgtaagtgggtttaatttgtgggctgcagttaagatgtcctgtcactcactctctcttctgaagtatgttaagcttgaatgttcccaaatgccaaatgcaaattcctatttgattttaagctcattgctctaaattcctaattacagtttattttattgactggaattgcaatctgtggttactatgtcttttaattatcttacttcttacttgaacattaggacctcatttcaatccattgaagaaggacc

SEQ ID NO: 43888 - DNA, 971 bp, Manihot esculenta
  Intron number 2 from transcript cassava4.1_031535m (locus cassava4.1_031535m.g) derived from phytozome v7.0 (chr-ID scaffold03001; pos 3851 to 4821 reverse strand)
gcttctaggaactgttgattttgaaaatattggaggtatctgcagcaattttttttctcccttatcaaaatttcattgttctatttgaattgggtttttgaaaggtcttcaaattcaccctatatttcctaaacctcttctctcttgtgtatgcaaagttcctatttattgctgactgcaatttttttttaatgggttaaattctttcaattcttatgcaatttcactttctatatatttccaatttttatacaactttgataagggccttcacaaatgacagaattatattgttcttctcctctgtttgacattgaaattaatgatgtttaattaggtcggcgacctaattaagccattactcaaggtacttgcaaactctagaagctaaatagtattggtttactgagaagggaattccaaattagaagcaatgtagttttgatatctataatctctcaatattggaagcaagaatgtgtacaaattgccagtttcctttatctgaaaccgagcagcaagcttcacctttttgcttgtcacaatggctaagattgtatggctgaagattttctgaagttggttcaatttgccacaggcaattgcttaactggtatgtgcagaatcaagtatttacaggaccataagcacagatataaaccccggtcgcgtgttcaggctatcatgttcatagcataacagagatggtttgtcactgtgcaacttctttttaacaacagttgcaaaaatatagtaaataataaaagggttaattaagattaggaatacaactcctaagactgtgatctgtggttgattgtttttgtttgactttaacttattcatgcactaaaaggatttgggacatttgtgctggagaaaatctcaaaatggagggtgctgtttcttctccttataaatcttctaaatttggttttcccaatgatttattgcagaaactcttgaaccag

SEQ ID NO: 43889 - DNA, 817 bp, Manihot esculenta
  Intron number 1 from transcript cassava4.1_018855m (locus cassava4.1_018855m.g) derived from phytozome v7.0 (chr-ID scaffold08686; pos 668744 to 669560)
acgtttcttgccaccagacaatcttgataaacgtaagttatcgatgtggtatgtgggtccactattcttacttagtggctaagagttcatctccctctttaatttcataagccttttctaacgtcctctccattccttcctccctctctctctctctctcagaaccaaccctggatcttatgtgcaagcctctgtttttagtggatttaaggctctccttttacaaatctctccacttgtgggaagggtcctctgtcctttgattttttagttgccttgcttgggatcctcatcaacgaagccaatatctacaatggcggttgattatttgcctaaagattttgtactcaacatcttgttcaaattaccccttatatcatgtgttgttagattcaactttttttatcctaattttatatatataaacctactctctcaaatgtgatgattataggtttaaatatttggccttttcttttcgttgctctgatacatttgacatgtctcctccacaaaagagacattggttaacatttgtccacaaaagaatctctcatggtagtgatttttaacaaagatacctactaattaacattcgtaaaatcttttataatgtagtcttaatggcttacaatagatataactgatagttattgcttgtaagtattggctctgatcgttaataatacctagtaggtagtaattgattattgtatgtatcatatttttgatatttttggtgtaatggtataatctttttaaaatttgatctattggaacagatattatttccaacaatagcttgtacaagattgtt

SEQ ID NO: 43890 - DNA, 514 bp, Manihot esculenta
  Intron number 4 from transcript cassava4.1_029282m (locus cassava4.1_029282m.g) derived from phytozome v7.0 (chr-ID scaffold09657; pos 119008 to 119521)
ccaggcattagtgatcctggtgcagaattggtaagcagattgtatattttgtttgtgttcttaactgaatcaaggattaaatagctatcctttctggtttctggaacgtccatctaaaatttgaaatcccatgagcttggatgtaagtctttgatggtttgcccgcatgtttctaattgatgaatatgaaacctatccaaattttgattggaactttttgatcccttggacactagttgttcagaaacagtatctccatttgaaagttttcatattcaaatgactgaaattaagttctttgcagcataaatataatcttttgtttcagttcctttaaatgttcttgaaataatataacgaatcagaattttctggtcctgttcatcaaaattttggaacaaaacttaaaatttgcatttagtttgctataatcatgcaacttagttcttgcatttttggttaccacatagagtctaatgaatacatattctggaatcttgctacaggcaaagtt

SEQ ID NO: 43891 - DNA, 588 bp, Manihot esculenta
  Intron number 1 from transcript cassava4.1_003628m (locus cassava4.1_003638m.g) derived from phytozome v7.0 (chr-ID scaffold08359; pos 595111 to 595698 reverse strand)
caacaccgaagagtccagcatcggattgaaaaacggtatcagtttttatcccaaatttgggggttttcgttattcctttacattccttctgcaaagttttgatgcttttcttattatctaatcattttgttgcctacgttgagtaggctagcttcttgccagatttctccccgttttttaatttttttttcttgcacacagataatttggggcttgttcttgaaatgtgtggttattgtttggtgcatacatctaatttgatatttctgtaggattagcttaattcattaacttgtatttaatgtgctgcttcagttaaccgttatcataacattccacttcttcctgcaattctttatgggttttgtaagcaagtctgtctatggaaactaatgtgtgtgtctgtgtgatatgctttctaattaatattcatcttaagactacgatgccaattcttaacaggaaatactgttttcttgattattatcttcatctatggttaccttgagctctgtagtatgtaacagttattttgttgttcatatgttggcagtgcggtcatttggaacagaaggaaggaaaaaagat

SEQ ID NO: 43892 - DNA, 858 bp, Manihot esculenta
  Intron number 2 from transcript cassava4.1_009681m (locus cassava4.1_009615m.g) derived from phytozome v7.0 (chr-ID scaffold04251; pos 647267 to 648124 reverse strand)
ctaggtttgatcaagaaaaacaaggaaggtttcggtaagtagctcttacatggctcctctatctctcttaatgatcaatttatgtatcaaatgtccttagtattatttagaacaacatattactgttgatgttagcacttagcacccactttgattcaagtataaatagaatgcacatctccaaattcttgtttttgcttttttttggaaaatttttcctggtagcttccttatgggtaatcagccaataatgtaatctaataactgaagttcttgctgataatgcaatacgtgatgcattgtgggaaatgagctttgcgacctgctaaatagatgatttatgtaactgcctttcttagaaagctttttttatagcaaaagttgtgcagggtatcaatagaataagactagtttatactgtagtttgcttttttggtagggaattcacttaccagaagaattgctgcgaattcctatttcagatattactgaatttgtggaggtttttaaggtagttattttgttagtacttgttattaggagttatcaatttgggtatgctattaaggccatccatttgttggcctatgtcagctgtgctgaaatgaggagcttcactctgaatgacttaccaaccatcttgcatctggtccattctcttttcttaatattgtgatgttgaaaaattgttataacaaaccaagttggacctatcttgttatgattcatgctcttgattcaaagtggcattttattgtttatttagtattgtttattctagaccactcagtttatgaattcaccataggtttttttttttgtgcagttcccatcacaattattgcttccttcaggaaa

SEQ ID NO: 43893 - DNA, 634 bp, Manihot esculenta
  Intron number 1 from transcript cassava4.1_013994m (locus cassava4.1_013994m.g) derived from phytozome v7.0 (chr-ID scaffold03803; pos 29896 to 30529)
tcttcttcttcttcttcttcttcttcttattctttgtaagcattttgtcctttctcttcttgttttttattcttttattcgttctatatacaaattccttagattgcatgaacacttttttttataggcatggatttttagacgtttttgtgatctgggtatgtttaattttgcttaaatccatatctggtggagtcattttttttttggctttagccttttcatcctaatgatcaatatcagtgagttgaattgccattatattgtcaatttggattcaatctgcacagtgatttacttgctgttcatccctagaagataaatttataatttaaacttcgcgtatattatgtgggagaattgaattcttctaattttgagtcatggactttgcaagggggaagatgatcttaatcttaatgttcttttgctttcaatgcccttgaatttgatggtgtctatttgatgctctcgtccactttcttttgcccaccagtgtgtcctctcgttgattcttggagttttggtgctaaattctctgtgatatatttctttttttgaccataaatctgtgtgtgatgttgcatttgtttaacttgttaatgatggagctgtgaaatttgttgttgaaagg

SEQ ID NO: 43894 - DNA, 844 bp, Manihot esculenta
  Intron number 1 from transcript cassava4.1_014813m (locus cassava4.1_014813m.g) derived from phytozome v7.0 (chr-ID scaffold04851; pos 674158 to 675001)
atgtaatgtatccaattctgcaatcttttcttgatttattttatttttgcagagaatagaaaatgttaagtgtggtgaagtacaggttgatttcaagtgcgttctgtttgttctctgattgaaatctaatctttggccgagtttaattagtgtttctctctcaaatagatgttttgcattccttatgttctattaatgctagtatactacaattctggttacggagatagttgtttgtccattgcattaattttgttatttatttatatattttttttttgtggaagcacttgtacttttgatcatctttctaacttggttgaaataagattttgttaataaaccaaattttgcttaataatgtaacgaggatgtataattgtaatgtttcaaggatgtagtacaattatagtttttcctgagaattaaaattggtcaaaattggatatgcacactgaagatttcatagactagccttatcttctcttttatcttttcttcagttccttaggttacaactaagtttgccttttacatgttttatatcagtatctcttcatgtggtgttaccatttcttagctatcatatttgcttatttggaaggatcttgatttgagcaagtatttatattgttatatcacatacaattttttttgccttctaaagggaaaaggaaaagatgttatcagagattatcagagattcacttcattgtctcccagcaattattaatgataaagtttgtgatataatatatggctgacttttgtttaattgagtgtttacatttggacttttcttatgtcagtatcacttgggaagaggtcatattggtgcatctat

SEQ ID NO: 43895 - DNA, 936 bp, Manihot esculenta
  Intron number 1 from transcript cassava4.1_001407m (locus cassava4.1_001407m.g) derived from phytozome v7.0 (chr-ID scaffold03115; pos 91855 to 92790 reverse strand)
aaggtacctctctctctctctctccttctcatctaaactaatgattcttattgttcttatgatgaaactgtcttcttcttcttcttcgtcgtcgccgtcgccgcagtagaagaagaagaagaagaatagaattcaatggatttagcaaacaagccgcaaataagtgtggcagccatcttattatgatgagcaaatgcaaaaatatatctcaccacgatgatgattcttctgtacagcacaaatactaaacaaactaaattaggtttcgttagaggtaaaaatatatctatcattttaaaccaaaaaacaatttcacaattatttaactgttttactaaataaaaaaatatcaatttaattttaaattaaattgtagtattatttaagaaattattttttttctattacaaatataaaaataaaatttgtttactttaagttaaaatctttatttttttttatagaaaacaaatacaataattaaaattaaagtactccggaggaatataataaatatatataagtttagctttcaaggcacattgtgaacgatcaaataaataatggtgcagtatattagctgacaattttgatttctgttatttatatttctacatctctccttaaataattgagggctcagctaattcattgtttgaaattaggatacgggatatttgaaacaaaaccccaataaatatttacattttctattttaagatgatgatttactttgttttcacaatattttttcctttttttaaatgatctatcgtggttttttggcgccttttcttaatcccagtggtttctctcgtatgtttgatttctgaatataattctctgataaggaagcgtaaactcaccttgattgaatcatttataactcggttaaattgatgttgcagcgagagctttgaattctatttttcaaca

SEQ ID NO: 43896 - DNA, 760 bp, Manihot esculenta
  Intron number 1 from transcript cassava4.1_011228m (locus cassava4.1_011226m.g) derived from phytozome v7.0 (chr-ID scaffold03581; pos 1577592 to 1578351)
aggaactgggaggaagcaacaattagcttcccttggtatgatttctttgacaaagttgctttatgttatatattcatagaaaatgatgcattgtagctgaatgagattgcactaattatagcttggtggggagattttcgtttgtgcatgtttttaagtacaattttctgaataagatgcatcttttctattgtcattgatcggcttgttactgcatggtagatgaccagtttgcttgttaatatggacattgcaattggaacataccaggatgtgcagaaacccttcactttcaacttcaaggcagactgactgactgacttaaatagaatccattagattggttgaactgataattcaaggtagaataagcagttgatgctacctgggatgtgattgtttaggaacaggacctttcgtcataatcaaagcatttataattaggcttggtcaactcttgaaccattaattgctccaaaaatctattaagtaaccagggtaaaagcatatacattgtacttttatgcatacataatcacaagtacacatctatatttaaatttatattatttgtgcctaaggcttttatttgttcatttaaaactatcctcacttttttttttgtttgagagcataactctgacgtttgaaatgagctggtagatttatcttcggcaagttaaacgcacagaaatttgtctttgtatatttgtaatatttggtgtttgaatgatgtgcttttaattgttttgctaggcga

SEQ ID NO: 43897 - DNA, 797 bp, Manihot esculenta
  Intron number 1 from transcript cassava4.1_010005m (locus cassava4.1_010005m.g) derived from phytozome v7.0 (chr-ID scaffold03581; pos 1234427 to 1235223)
gtattgtttggtaagattcttatcgacttccttgttatcctttttcgcccctcttatccaagatcatgtggtttattagcttgttttcttgctcttcagctgttcggttcgttgtttaagtttgtttgcttagtgttctgttgggtttgtttaggattcgattgtttttggagtgttgcatgcatacataatattcttaccaaattagcttagttttcaactgcaatttggatgatctgtatcgtaaatatatagttgacttcaatttcatgatttgattaggtatgtattgccctacttttcttctaaaaaatcttccattattgttttaatgctttcatagctgtctatttccaaccaaataatcattttatttttgttgtgaaacttcaattagcatcattttaatcttattgttggtttttccagttgttgcaagtcggaaattagtagtttcacttataatcagtgcataatgcgttttctactgtgaagaaacggatttaatgttcaattaggtttaaactctcaactgtgttgtgacatgtatgccttgcttgctattcagcagcttgctcgaggattatctccattttattccataaatctttctggaagagacttctttgaaatctgttttgttactgtccggagaactatttttctggtgaactaaaaatggttatattttctttacatttgactcgattgttttgtcttaccaacattgtgaaggaagatgtgattttttatttccttcagtgctgctatcaattccgagacacgggaggaagttg

SEQ ID NO: 43898 - DNA, 403 bp, Manihot esculenta
  Intron number 1 from transcript cassava4.1_007326m (locus cassava4.1_007326m.g) derived from phytozome v7.0 (chr-ID scaffold03581; pos 792736 to 793138 reverse strand)
ttctaccgctaatagaacgcaaatttcggaaactggtaagtaaaatttcgttccattttcattttttctttgctttaatggcatgcataaagtaaataattacaaatcaaatgaggaaatgttttgtttttgttttcctgaaatgggttgttcttgtttctgcttttcttttctggaaatttgtatgacgacgtcgctgctagattagaaaattatcttttgagtaatggaaaatttgcgaagttttatctttagaacctaaccaaaatctgaaatctgaacactagcatgtctataagatttggtatcaaatagaactgtgttccattctttgtggtttgtattgagctcctttggatatcagattgtgtttaatttggtttgcaaatgtggttgcaggaga

SEQ ID NO: 43899 - DNA, 975 bp, Manihot esculenta
  Intron number 1 from transcript cassava4.1_007693m (locus cassava4.1_005601m.g) derived from phytozome v7.0 (chr-ID scaffold07402; pos 219337 to 220311)
accgggacgccatgtaatcaccaataatttgattttcttcttcctcttcttcttattcttcttcatttttttttttatagttttaatataactttggggattagggttttacattttgcatttatatctgggggggatcgagaaaaagaaatgaatatagtgtcagtcattcgagcttttagttgctttattttcttcttcctttttctttttttctcagttcgacttctacaagtgtttgctcattgtctcatgatgatgggagtttagttgcttaatagtatatctaatctctttttaactggctccaatattttggattaaggtataaataactgttaaactaatcaggtattggttaccaaattctggtatgacgtcctgttgaatgctgataaagattgaggaatcaatatatatgtatgtatgtatgtatatatatttttaacatgacatgtcgggttttcaatcccagctaataatactgagtttggttgccaatagaatccgtagatagtttgaaaaacaatacctgagggaaattcatgcaactagtgtgctctcattagctctttgaagacttcttcttgatttaattttgaaggttttttgttaactctttgaagtctcaagaattaagaaagtccgttgtcttatagattagagaaagatcaataagttatctgtgtgtctgtgtgtgttaagattaaatttgtcattattattattattatttgaatataagggattttattggcaaaattgaactgaaagggatgaattcttgcatcaaatacttttgattcccaattgatctgttcaattggcacttcagtcttactgtatagtttttatttgtataatacaaatataccatttcaattgttgtcactgttacctgattttgtttctccctccctctccctctctttctctctctctccatgagtacctacagtggtgctgcttcatctg

SEQ ID NO: 43900 - DNA, 1037 bp, Manihot esculenta
  Intron number 4 from transcript cassava4.1_019545m (locus cassava4.1_019153m.g) derived from phytozome v7.0 (chr-ID scaffold06582; pos 179636 to 180672 reverse strand)
tagtcagattttatccacagaagcccgagaaagacgtcagttcacatctgaaattacttttataaattctatatgtagacatgttttttgtgttagccactttttagcagatgcattcttgttaatttgttgctttatacttgcattcatgaaaagcatattacttgcttgatttttacttcagttaatggattttatagtggatgtaagttggtttatttttgtgctgtattctttgtttgtgaagcaataatgttgcatgataacattgagcattacgtctcattgaaacctatgtggttaagaaatattgtacgtcattgaattgctacatagagtaactagattctagagtgataactaaaatgcatttgatgaacttcttcactaggaagaactttatgatacccttttcttcctcttcaaactttcatcatgtgccattgtggttttgtcagtttgatcttcatctaatcctgtatcccatttgtgactgcttaatgaattccagcagtctgctgatgttggcctcttttatttatactaagttttgtttttgatcatttactcttcttcctccacctctctttgtatgagatttggtgttgaactgtgatgaatctgggaatattccctaatcaagtgtggtcgatgggtgttgacatgctgattagatttgtctgaaccacttttggatgaatgattctgaattggtgctaagttaaacaatcagatgtgcactaacttttgggaagtcagacataagaagttgaaaggcaatgcatatctaggcactgaagtatctctttgaattttgtagcagaggttcaatatttttgtgagtgcagaagaatagctcagtttttattttgtcctttcctttgtcacataaatattggaaccatttctataattaactctgttttgtttttttgcattttcttttgtcctgtaaattattggaacaatcttgtttcctatgcaatgatacaatctctgcagttgcccgcattgctttagttaaacctgaaaaggca

SEQ ID NO: 43901 - DNA, 912 bp, Manihot esculenta
  Intron number 1 from transcript cassava4.1_019545m (locus cassava4.1_019153m.g) derived from phytozome v7.0 (chr-ID scaffold06582; pos 181334 to 182245 reverse strand)
ttcacttctgtagaagcaacgcgattcttaactctgtaaagaactgctgttgcccgaaccgatggtttttttttttccttttgtcattttccattatttcatctgcaatgagggttttgcttttggtttcttgtgctaattttgagcttttccatgctttgatttctgataattttgggctttaagtgaaccaattgcgtgtgttctctatatggtatgtttgagaagacttctgattttggtgatttcttagggaacctatatttgtttgttcgtcatttagtgtcatgtgtttccattattaggaaatagaaatctaaataaattttatatctcttctctcggaatgagcaatagccgctattatggatggatttgtgaaattgaagtcagggagaataccattgtaaactgagaagattgtgtttttagaacattctttgtgtgtactattaggtttatgtgtttggatggaggtgttgtttatgtaaggaagctgcaggaaaacgactatctagttttagcaattacttgaaactgataatccccttatgttatctgctctttaaaagactgtttgaaaatgctactgaactttcagaacattaaagttgccagagctattcaaagtgcactttggagatatattcctagtgaagatagtctacctggacttagagagtgggtgtacagctgcaagaacttaggcatgggccatattagggattatctagtgactctaaattgggatctaacattttgtataattggaatagctttaatcgtcaccattttactcctttcatttattttagttaatgtcatttattctttgggatactttgttttcatgtcattttggttgtgcagtttggacttctaaaagttttcttcctgtacatgatatttagg

SEQ ID NO: 43902 - DNA, 792 bp, Manihot esculenta
  Intron number 1 from transcript cassava4.1_033976m (locus cassava4.1_033976m.g) derived from phytozome v7.0 (chr-ID scaffold03581; pos 927618 to 928409 reverse strand)
agctagttttgaagcagcaatagctcttgtgggacagttccaacctaatacctgcttggctttgttcatggtatattaaaaaattattaatttttttttaatttttattttttataaaacggttaaacttaataaaaaattttaattaacaggggcttaaggcttttaaggatatttgatagtaatttttttataaaaaaaaaagcgtacaaagtgtgaaaaaagccatgaaacaaacagaaagggaaagtattccatctttttgggtgccagtaacatggcttcatatcaataataagaagaaaaacaacaagtgacacaccctctcatgtcatgacacaaattcttcgcagatcttccctatcacaccctacttcaatcttattcctaggatcttccaaacataatcacgacgaacccatttgtgatttggggatttttttttttcaaaaaatcagaatctttgatcttttcttgaaaccacttttcttaactaatgtgattctggtttacctgctcaaacattgttcgctttttcatctaaaactaattcttgggtgctgtatttgctttaataatttgttgcaaattcgtgattcttggtttgatcgtttctgatctcattcttgtttctatttgtcatccattgatatcttctctgatgttaatggattgaatgcaacatgtgaatcctgagactggtttgggcgatcctgatgggttgtgaaagaagaagctcgcatatcatctgcgcaatcttctatatctggtttttgttattttccagcgttt

SEQ ID NO: 43903 - DNA, 790 bp, Manihot esculenta
  Intron number 1 from transcript cassava4.1_034187m (locus cassava4.1_034187m.g) derived from phytozome v7.0 (chr-ID scaffold06028; pos 282175 to 282964)
ggtaagaaaaacaagtaatttacaaattttttttttaatgaaaaaattatcatttaatttttataatatgaaaaaaattattaattaattttttaatttaaaaaatatattaaaatattataaatattttaaaaatttactaattaattccatcattagatattaaattttataaaatatttaaaatatttttaatacgaaaaaattaattaataaatttttaaaaaattaactaataaattttttaaaattataaatattaaatagtaaaatattttaagattaggataggccaaattaaaattagataattatgctggaatttacaccatcctctcaggcttccctccggcagagggttcatggagttgcctttttgaacaaactgggaagatgaagtcacacaacgagtaaaaatgaaggtttgagctggccatggtagttgactacgaatgtgaaaatcttaaagtatgcagttattagtctgacaataatagttgtggtagttgtcctcaacatttcctcgattccccaacatgaatccattatgcacattagatgctgcctccctctcctctcacctactcctatctcttttttcctctgccaaaaaaataaaaagaagaagaagcttatctagttatctgcttctcttctttgattttttttctttctccttttgctcaaatgtgaagtacttgcagctcctgaaatggtgttgctagtgctttttaaactagtgctttgtgttgcagtattggctgtgggtgcattagcttcagctgagcca

SEQ ID NO: 43904 - DNA, 356 bp, Manihot esculenta
  Intron number 1 from transcript cassava4.1_012117m (locus cassava4.1_012117m.g) derived from phytozome v7.0 (chr-ID scaffold03363; pos 154349 to 154704 reverse strand)
ccattgaagttctctgctcgctcaaagtggtactcaataaactgctccatgtttcaagtcttttcttttcattgcagaggtctcaatgtttattctccaagattctggttattttaatgtttctcaactttgatcttgacttttaagttgatgtaaactatcaaaattaacaatattgggaattttaattgaatggtaaataaagagtacgattgaattttatgcacaaattgattgaaggtgagattattaggatttgaatcaaattaccctttccttcttggatatagcttggttaagtttatttaatttagtttctttcttcagttaattaatgaatgattcttgttctagga

SEQ ID NO: 43905 - DNA, 839 bp, Manihot esculenta
  Intron number 1 from transcript cassava4.1_034085m (locus cassava4.1_034085m.g) derived from phytozome v7.0 (chr-ID scaffold02431; pos 272922 to 273760)
tccagacctgctatcggttcttggtttgttttcttttcttctactcttgatttttagcctcaattctcacctacatatgatccatcataaatctaaaaacaaataagcgagtctcgttatattataataataacataatccgtaataatcaatttgtaggatgaatattaaatttgaattagatttaattcacttaaaaattaatttaagaggaggagtggctaagttcttacgatacacattacccctatccaaaatatttatctcaaaccgagttggaattcaacacactctctcatgttcagtattacaccggagcgtgatatatttatgtgaaattcaacatcgggaggttctgataacgcgttaatttggatcaggcctaactcactccaaaattcagttgaaggaagtaaattgtctaaaatttttataaaaaacacattatttttatttcaaattcaacaattgaatgtcttattttgtttatgttgttatttattatagttgttatatttattttttctctttaaattagattgttttattttattgtgattttagttgtatcaaaattttttcaaattttttctcttaacatttaagagtttagatttaaaaaatttttatttgtatatatggatttaggaatgtgtcatgctaagttctgttaataaaaaatatgataagttgcaataatattagatgtgagctatggagtttggctcaatctactacattgcattataactttttttgcataatttattatgttaatttaatttattgggtgaatatatgtaggtttcatctaaaggaggcagtattggaaggagtct

SEQ ID NO: 43906 - DNA, 705 bp, Manihot esculenta
  Intron number 1 from transcript cassava4.1_019895m (locus cassava4.1_019895m.g) derived from phytozome v7.0 (chr-ID scaffold08686; pos 117032 to 117736 reverse strand)
tctttctttctggttgtacactgagactcaaactacctaataattaatgttgaggtagaaattataactagtttgaacaatttttattgatattttgcaaattttaatacaggatgttcaattttactatcaaaaaccttttagcattattatgaagttgctaatggcctcctatattgtatgaaggttttttgtcatgattatctaaggtctaaagtacttgaaaacctacaatattttgtttgactctaacatgaattcgtagatatcaaacttcagaacaataaggaattttggtgaaaacaaagtgaggctaatacaagtagagtttttggagctaaagtgttattacgttgcttactatcctttaaatatattctacactcacattagatgttatcattctctccaaagtaatgacggctaaaaccttttctattgcttatttttgagattagatccatctaatattgttatgaaatctgttcttttatggattcaaatagcataaacatagcctttgagtatgcaagtggagcattaatttccataaaattattagttttgaagtcattttattggagatattaatgggaagaagaacagtggcttttcttagaagagggtaaacctccttaattttgttagtaatttgccgctttttttcaaggcaacgattgtagcattaatagtctaattctattg

SEQ ID NO: 43907 - DNA, 795 bp, Manihot esculenta
  Intron number 1 from transcript cassava4.1_008007m (locus cassava4.1_008007m.g) derived from phytozome v7.0 (chr-ID scaffold12794; pos 299408 to 300202)
ctcgtctgggctgggacgtttctcaggtccccaaggtagcagcttttgttctttcgatcttatgtcgcttgtttttttgtttcacttttgcagatctgatcaattttgtttaggtttacttgtgcgatatatcagttagggttgtttctagtttttcacctactcatgttgcataatatcagaactttggttttatttttatgcagatctaacattttcgttgtatttgggtctttctctctgtttaaattttacacctcttgggttttctttgctcttagcatgtttctttttcttcctgtataacagatctgtacatatacatgtatgtattggtttaggttattgtgatatgcgtcttgttattctcgtcttgagattatcaggtagattgtgctttttttgcggtggataattgtattttagatttcatgctgagaaatctgagaaatttgactgtgtatacctggaaagaaatcatgctttgtattttcgttaatttgctgaaattattaatcgtatgatttttcatctatgttaacctgtttttaggatgcctcactgtatatattgtattatctactttttgctctactgttaatatgattttgtggttttttgtcaactgggatttgtttctcttctttcctgaatgagtatttatcaattagtgaacgggattcccaagggtatgatggtatcaggttgaagttttcatttaatttcttaaaatggtacatgaatgggtggctatgtgtaggctcaggtaggaatattttgtggacaagaggttgg

SEQ ID NO: 43908 - DNA, 922 bp, Manihot esculenta
  Intron number 1 from transcript cassava4.1_003593m (locus cassava4.1_003593m.g) derived from phytozome v7.0 (chr-ID scaffold03859; pos 380690 to 381611 reverse strand)
ataacgccaagttccgccaacgctctttcgtcaaggttcttagttctcacctctctcccagatctctttctgttgagaaatcaattctactctctttctcttcggagttagttttgtgtttgattgatgataagtagcctagcttgatgagtttacgtggaggttggtttttggtttttgtgggaatttgagatagattctatctctttttgctttaaatatcagtcagttatgtggtaattttatcgattatttgaattatgaataaataatagcaatgcaatgtagttttggtctttgaagtctcaactctgcaattagagtttggctgtaagaattgtatttcctgctactatttaactatttgtttgtttttcttcagtggttgtgaatctcttgtgaataacagtgtcattaaatcgtgaaattaatttttccagatctaatgatttctatccatagagttctaaatttggtcatcgcttttttagccacagtttcaattatgtgtttggtggagatgtgtgcttatgaaattcttatcttgtaaagcggcattggattctttaaacgtgaagcggtatagcgtatagaccaatgttactcactcccgacaacccccacttgtgcccaaaatttaatcattaagtatagtcaatgcatctatgcaataggcgtgatattgtaagatcacaaataagttaccaaactgcttgggatgtcctcaatcattatgttacatattaaagtttgtttatctgtttcttccccattccttttacagttatgtatttattgtatttgaaagtcataattttccttgatgtagattttcattcattcacttactattaatgcttgtcactgatcgtgtcttttcctcccaggtgatagcgcagtccttcgttaccagtaacttaaa

SEQ ID NO: 43909 - DNA, 671 bp, Manihot esculenta
  Intron number 1 from transcript cassava4.1_002166m (locus cassava4.1_002166m.g) derived from phytozome v7.0 (chr-ID scaffold06906; pos 229511 to 230181)
ggttcggatcaacttcagggctttcacttggtcaggtctgcgcctaattattcatgacttgttaattaatctctctttgatctaaaaatttgctctcatttgttttgctattgtgggctcagtgtctccatcttcgttgatctcgtttttctttatacttaaagcccttgtgttgtacaaagcagatctttgtttcctcgccacttctactgctgtggagcttaaagaaggtttattaagtcggtgatttaggtcattagaaaataatttgacatttctggcaaaatccttctcgattcttgcaaaacgcgtcaagtcttttgctctctgccactgcacaaacactcgcagacacagagaaaagagagataacaaagcactataaaatagctccacagcttcatttcattttcaaatgacttctgttgacttgtgttttttcatctgcaagatctaaatgttctgttcatgttagataaagatttcaaactcttatttccttgactaacacttcactacacacacacacacaaacactgtttattttgatggggaggtgtgggttttagcctttcttttgagtggaaattttcttttccattctcttgttagattgaaaaaccataagcttcaagaaatcttaaagatctgtagatatgttccagccaaac

SEQ ID NO: 43910 - DNA, 258 bp, Manihot esculenta
  Intron number 2 from transcript cassava4.1_022153m (locus cassava4.1_022153m.g) derived from phytozome v7.0 (chr-ID scaffold08686; pos 743319 to 743576 reverse strand)
gtggctataatatcagcaataaacattactgggctgtgcgttctctctctctctctctcttggctcttctgcacatcaacaatctttatttggaatacaatttatacaatattctttggcttctaatgctttgatatggagttgtagagtgaatgaaatcaattataagttatttttcatctgggttctattttgaaattatttttttgtttatcaactgcagtctgttagtttaacggcagctcccttctttctcat

SEQ ID NO: 43911 - DNA, 838 bp, Manihot esculenta
  Intron number 1 from transcript cassava4.1_009845m (locus cassava4.1_009845m.g) derived from phytozome v7.0 (chr-ID scaffold03115; pos 162471 to 163308)
cacacaaaactcaaatctttactcctctctttaatgtgagtgccacagaactccatttttctaaaatgattaccctatgtttgtctctagtatttgattctatatatggattttactccctttcttctgttttccgtttcaacatgtgactttgggttttctacttgtgttggattgttgtgcttttttgggtattgatttcgattattccgttttcaagtatcgattattttgttttatgaagtttgagcttgtgatggtaaaatttatggcttgttgctgcaatcaaccttgagttacctgagttgaaatcgtgcgtactgtaagttgattgctttagactgtgtgcgctactgcattttcaattttcttgctagctaaatttgagtagtgatgtttcatgtacttatgcttattgatatatgtgtgagcttcagaattggtggtgggttattggccgcttctttgttgtttccaaattactatagaatgtctgcttattttttttttttttttgggttgggggggagcatagctgcttgtgatctgcctctcttggcttaaaggattctgcattaacaactattgttgtttgtttatgttttacaggacttatttttttcaaacgtttttactgctttctgaattagctatcgttttgaaaaagcttcaactttttatcagcactgataattatagcactttatctctaaaaaaagagataactatagcacttatttgtagccgtattaattattccaagcttccttttgatctttagtatatattttatgtttctgcagaaaagatcatttcatctgctggctgatcctgtcta

SEQ ID NO: 43912 - DNA, 263 bp, Manihot esculenta
  Intron number 1 from transcript cassava4.1_024378m (locus cassava4.1_024378m.g) derived from phytozome v7.0 (chr-ID scaffold03511; pos 22853 to 23115)
cattgatatcttcgtcaaggtaggttacttgctacagtttatttatttatttatttttattaggaattaatttgcaaggtgtgaattaaaagaagaaaaaaaaaaaaaaagaaaaactaaaattttacgcattcatgacttgatataaaggaaattttttggataaagttgtcaaataaaaataaataaatagtcaaagatatataaagtcttacatgcctttacttcaataggcgagatatagaagagcagcaaaagcatta

SEQ ID NO: 43913 - DNA, 674 bp, Manihot esculenta
  Intron number 1 from transcript cassava4.1_006335m (locus cassava4.1_006335m.g) derived from phytozome v7.0 (chr-ID scaffold05144; pos 120421 to 121094)
gtcgagacttcagcaggcaatgtactatttctttgatatatttgattttaaattttcaataaatgaatgaactaaatatgtgcatattagaggtaatggtaaaaagtatatttaaaatttagcattcattcaattttaggaccatgcaactcatgtaatgataaagtggctaatatgctgtgtgcctttcttttctgtttccttatctttaacaatttatgtttatcaactgattctgaaaacttggacttttatatttcttattttcattacaaaatgaaatatgaaatacaagttttacagaagtatctagaattctcatgattaatgcaatttgcaattgctccacatgggtgaaactggtgcatatgttatacatatatatatatacatatatatagaagctatccttaggcccttgtttttagctcggcttttattttccccaatcagcaaattgacaaatacgcactaggtcatatgcattaaaagaatggatgagaacattttatttatggtccattttctgatctgagaaaaaaaatgtttgatcatccaaatgattcatgtgatattactttcattgtttttggaaattgttttactttctttttgttgatgcttctggaagagttcttgatatttattattttgcccatctttttggttagcag

SEQ ID NO: 43914 - DNA, 1019 bp, Manihot esculenta
  Intron number 1 from transcript cassava4.1_003546m (locus cassava4.1_003546m.g) derived from phytozome v7.0 (chr-ID scaffold04851; pos 299697 to 300715)
ttgttttgctttctccacttgtttagctaggaagcgtaagttcttatgctcaacttttctctctctctctttttcagtagttgtgtgattcaaattttgataattcgatgcttcaggatttcaattagtgattcttgaagctagtttcgctttgcatttttgttgattttgttcatgaaagaatgtatcttttgaatgtgtatctatatgatttatcaattgttagctgtttctggtttggttgattatggctttatatcttctattttctcttttgatgtcgatgagtggtgaactttttgggtatatgaaatgtatattttaattagcagtttggatctgcttgtttgctaggaaatgttaggaaaaaaaaaaaacaaaaatgaaatgaaaattttcttaatatagttttgcttcgttagcaacttgattaagcaaggaaaatttctttaactgaactgcgtatagctaattggttcagttgatgttgatttaatcaactgtgtcaaaaagaacctggaaacgcatggttagtatttatttcttttatattttgttctcagttcacaaattcaggagtgggatagttaatgtacatagaaaattgggttacaagaaaaaaaaaagaaaagaaaaaagagaaaaaagaaatgaacaattgactttctctattgttcattatgtttgaatgcttagtagtgatggaggagctgaaactgatgatttctcatcacgtccgttattaggtaggttgagaaaatagatagcctggtcaaacacttgcttgccttatgaacaataatgtaaaatataaacttctaaataacacaagaaagtttcatattcaattgaagttgatttagctattgctatctttagctcggaggttcttttttcttttttttttttttttctttttcctgatccagtatcttttcttcttggttttttggtgttgaacttacaagatttattttctaccagctccctgggttatacgcatcagctgtggatctcgt

SEQ ID NO: 43915 - DNA, 982 bp, Manihot esculenta
  Intron number 1 from transcript cassava4.1_012266m (locus cassava4.1_012266m.g) derived from phytozome v7.0 (chr-ID scaffold03542; pos 318344 to 319325 reverse strand)
acaatttccctactaatcaaagggtactgttctgttgctgatcatctgcattgtgatatataattttcctttgaaatgtctctatagttttcctgcctcaattcctttagttttaattttgactcgtggatttgatgtctctttctctcttttggttactttattcgtgtatgaactgatgggttgttcggctccttccctttttttttttgggaaattctagttaaaaatgtaatcaaactgcacatttcagccgcgactttaaatgggtttttgaggtttaatgtctatatatatattccctttatgttattgattgatcgatacagttttacacttgtattgtgaaattggtaacagttttattttagtattttgatgtatctgaaatgccatggtgatgggttttctaattgccacttattcatttatttatttgaaaataaggaaaaggaaaagaaaaaatgcatatccgtatggtttctgtttttttgatgattttacagtgtaatttattttaaactagaatttgctctaccatagctatttccgggaatatcaattttcagcctttgttccagtcctctcctcctccattcacgacgatttatatttctctttattgttgatatgcatttgttggttttctttttgggattgatgttagggatttggtctatattttgcagttgttatccaatgattaatattaactgagcagttgaaactcgtaactaatgggagatttatttccttttcggtccttgcaattttttttagagcttctaattctaacaatgtaaatatttatacattgacatatataacaatttcattgatatttgttttttcagaaagaattttgttcttcatcatcagtgtgttatagacttgtgtttctttttttcctggcctcaattggtgaattttatgtttgcacttttcagagaagaaacaactataaccaggggaagaggaggtt

SEQ ID NO: 43916 - DNA, 1025 bp, Manihot esculenta
  Intron number 2 from transcript cassava4.1_011455m (locus cassava4.1_011455m.g) derived from phytozome v7.0 (chr-ID scaffold05019; pos 285815 to 286839)
tttccaaggtacttaattgtaaatgctctcgcttatcgactataattacactttgttcaatttctacaattttgttgaattcagttgaattttttggtttgaaaagaaattagaatttaattctagaaattgaattccatgaaaatcaattcattcaagttttgatggaatttgaaaatgctacagaatttacgagactattttatgggctaaaatgccccataacaaaaccttttctcttttattttaccagttaattaaataaataactaaaaaaaataaataattaaaaaatattaatgattaaaaaataaatgattataaataattttaataaataattacactttaagtttttatattgttttataaatattaaataaaagaaatagatattactaaataaccaacggcctactttaagcctccattctcttgaatggaaggaaaattcttttacacgagtacatgcttatatcaactcacgtgttaatttattttgatattgttagtgggtttacattttttattaattattagaaattcattgtgaataagattttttctacaatagaaaattatatatatatatatatatatgcacacgttacttttaaaggtaatttaggaattgagagcaaatgaattttaattctgaaattaaactaaatagaaattatatagaattcaattgaattctgcattataagttatatcaaacaaaaaagtgaaattcatttcaaatgaattctatcttaaattcaattgaatttcacatgattctactcatagaattgaaccaaacgctatcttagatgtcagtgatgatttttgtttttcttttctcattgcttaaacttgctctgaaattggatttgcatcttttttttttttaaattaattttgtttgatgtaaatttcataggaattggatgcacttggatggaggtgttgaaaaatatatgtgctcccatactctttaattttttttccctttgtagttggaggtgttcaggaagacactc

SEQ ID NO: 43917 - DNA, 309 bp, Manihot esculenta
  Intron number 1 from transcript cassava4.1_010139m (locus cassava4.1_010139m.g) derived from phytozome v7.0 (chr-ID scaffold11279; pos 399686 to 399994 reverse strand)
ggtacgaattttcttattcttattgtttttttttttcaaatctgtgtttcatgaggaggtgatgtttgtatggtttgatgtttatccccattgagacaaattatgtcaaaaagaaattttttatgccacgaaacaataattaacagtttaatactctttcttctccaaaacatcgatagataagcaatgggattatacagcttttcacagcttgggttattttataaaccaactggctttctgcttatttgtgaaattttgagtctatggctagaaacaagggaattgaagccaataaaagaccaggaa

SEQ ID NO: 43918 - DNA, 966 bp, Manihot esculenta
  Intron number 1 from transcript cassava4.1_021533m (locus cassava4.1_021533m.g) derived from phytozome v7.0 (chr-ID scaffold03604; pos 122536 to 123501 reverse strand)
gccagattagtcttgctccttttgaggtaagtttcctcatttgttaatagtgcttctgtcaactgttcttaagaaatgttgacttcctcttttttagcaaaacttggatcatgttaagttgtcaaatctggaagatggttatatcctattctttgttgaaagcaaaaggacaattttgaaaaaatataggtcaatagtcgtatagacatttaaactttgtttgaactcttttttgtgctcaaacaagctctttaactattgaaataaatcaaataactcctttaagcctttaaaataattcaaatatatctttaggtccttgacatttttaaaataagaaaaataagtccttcaacttttagcaatagatcaaagtacactggactatgcttctaatccaaattcaatcaccatcaccaacttcattttgattgtaaaacttgatattgttctattgagaataatcttctttattgatttatttaatacttaaaggatatacctggatccaaaaaagtttcagggtttatatgattattgatctatactttaaaagcagaaataggtcttttgcctttgctcagtaaattttagtatctgtccaccatgagagagagagagagaaattatacttcttccttttctttttttttttttttttcaataaactgaaattatgcttcttatgtcccaatggaataacgtttgtttacaaatgtaccagagtttgcgcattgttgtctcaaaattctaatccattaaccatttaatctgttttttgcccttttacttatgagctcatgatttgatctcccagtatactttttattaattatttcttatcagaatacaggaaaactgcttgctaaagcaaggtgattgattaccttttgaaatgagccaagtaaattttttcccggttctcttgcagattgtatccctgttcattgaggcctttgcctggtt

SEQ ID NO: 43919 - DNA, 938 bp, Manihot esculenta
  Intron number 2 from transcript cassava4.1_005032m (locus cassava4.1_005032m.g) derived from phytozome v7.0 (chr-ID scaffold04957; pos 46840 to 47777 reverse strand)
ctcctcttgagacacttaggcgctggagggtaattcttcttctctaaattctctctttttctattaatggaatgattgcgtttattacaattgattttgtgatgcattttccttttcatatatacttgaacatgcaaatgggtctttcaagtagtttgttgaggaattttttccaagctcagggactgcattgtagatgatttaatgagcaactacttgcattttgattaactgcaatgatttccaattgtttatcagttgtgcactgcaaatgtgtttccatataagcaaataaagaaaatgtaggtaatttttatccattgtctctcagtttaaaggtagttacacttcatttctcatctttagtttgttaaatcttataaaacgttaacagttacataaaaatcactcatctttagaacattatataaaaatctcttagttaattttcagttcatttacatgagggaagtgatacgtgggagtaccgcagtttgccaaagtggaaaataagaaattaaaaaaatttaaaagtgtgttaagggagagaatgttgttaatatttatgtggcactttttgattttttaatttcttaatttttatactatgtcactgccacaaattagtttttccagataagtaaacataaaatgtattacatatttaaagatgaggaactttgtgataacaaattgaagacaagggactgaagtgtaacagcctctaaagttgagggatggctactatgaattaccaagaaagttttgatacttctttttgccttttttttttggcttgagttttcttttctacgtatgtggtagatgtgtgctttagaattatatggaattgtcccaagctttgtatgtatttttcgtcttggaattagggctaaatgtgtgcattggccgtttacagcaagccgcacttgttctaa

SEQ ID NO: 43920 - DNA, 1055 bp, Manihot esculenta
  Intron number 3 from transcript cassava4.1_010325m (locus cassava4.1_010325m.g) derived from phytozome v7.0 (chr-ID scaffold03942; pos 155827 to 156881 reverse strand)
cggtgttcttttcagccggcacatcctcaaacaaggtatgactcggtttgtgtcaattgcaaatataagatacttcttttactggaagcataattacatttctattgtgcaattagatataattgtatcagtttcaatctttttgcagactaacaactaatcatacagaaaggagtttttttctttttctttttttttggtaataagaaaggagttgttttcattacatttaacatatgttattcttttggtagattaatgggtcttagaattttgaattcctttccattgacattgtaagcactggcactaatttgtatatttgatagaatggctttaattagtttttctttctacacgaaaaatctctctctaactgttatgtgtaactattatataccttcatatggatgccaaagttcccatgtacaatttttataattttcgtttactgacttattatgatttacgaatgaaaatttctttagatctttatcatctcatgaaatatgttgcatcctatagtcattgataccatgaatatagtcaaaagcatggcaaaatgcaacttccttttgttataaattgaatagttagttatcattacttgtattaaaatggttgattggctgaaatactaagccatgaacataattgtcaattgcctaatgtctgttacctaatgcagtttgtttgtgcgtgtggtagttatgtgcctgtatttagaaattggttttaatccaaagaatgacaatgagcatgagtagcatacccgaaatttgccatttcttccagtttgcattttatttgtattaattcaatgaactttaccattcaattctttcttgttaactttcacaactcacagttaagcttatccttttgtcctgaagaaaattgtgcaaactttggaactatgaagtatgaattagtgactgattttgattatttaattgtttatatgttgtttattccttgaaatattgcagactatcttaactcatacacatggtgctgcagtttcatcatcaacatcaaattttaagcaagatctg

SEQ ID NO: 43921 - DNA, 438 bp, Manihot esculenta
  Intron number 1 from transcript cassava4.1_010325m (locus cassava4.1_010325m.g) derived from phytozome v7.0 (chr-ID scaffold03942; pos 157051 to 157488 reverse strand)
acttcaacacctgttccttcttatatcagctttaggtattgcagaaattaatctctatcattgattccctgtaacatactcaagttccaagttcgaagttttgcttggtttgtttgcggtataatatgtgcctaatcttgtgatactcctacaaattatagctccgtggagtggctgactttgtgttcaaaagagtatgaactcactaatttctaagatacttattttttgaaatttcttcctttcctttaacagaaaattaacaccgttggagagagagagaaagggagaactaattatgggctgggttgcattgcctaaatttgaattccattatttattgtgaattcatgtgtagcataaccacgtttgtgaattttttatgtcatttactctgtaacagtgaacaagagaaagttaaatcttatcggcaaaaaa

SEQ ID NO: 43922 - DNA, 340 bp, Manihot esculenta
  Intron number 1 from transcript cassava4.1_004596m (locus cassava4.1_004596m.g) derived from phytozome v7.0 (chr-ID scaffold12525; pos 815175 to 815514)
ccgaggttggtttccatatcttgagctctggcttgcgaattgttcctatcgattgtctttgtctgctgaaacgtttgaggaaagtttagtttttttttgggtttatttgcccttgtacttttattctttaattattttgtttatgaactagctgcaatctaccaatgcataatagcatatcgttcaagtttaaattgataaatcactgggagttggcttaaaactgaaggaagaaggcttttgaagttttggacttttttctttttggtccatttggccttaatttgtttagttatgctgtttgatcttatgagaactacaggtaaccaaggtgaagaca

SEQ ID NO: 43923 - DNA, 519 bp, Manihot esculenta
  Intron number 2 from transcript cassava4.1_004596m (locus cassava4.1_004596m.g) derived from phytozome v7.0 (chr-ID scaffold12525; pos 815693 to 816211)
ttccctgtgatattaaatttcattacagaaataaggttagtacaatgcagatgcattttaaaaattggttgagcttaaacatttttagatttgttgtatttatgcctgtttgttgtaatgttgacattttaaaaaatatttcattgcactaaaaagttttctaaatgtaatcataaacagaaaaagaagaaacaatgtgaaatgaaatgagtaaacatgtacacatcatcatgaaatgtttaatggtgccattgtaaatttgtaatatctatgatgcttcattagtaatttgagtacaatgctgaagatgctttttagttgtccataatgtgccaaccatgtgacatataaatagttctacttatagtcatgcatgtcgctggaatcttcctatacttataatagcacctgaaagatgtgcatttttgctggcttgacaatctgtatctgctctgtaccttgccattctctaactgtgtaagtagaattgtttgagttgctactttaatttgttggcag

SEQ ID NO: 43924 - DNA, 866 bp, Manihot esculenta
  Intron number 1 from transcript cassava4.1_012834m (locus cassava4.1_012834m.g) derived from phytozome v7.0 (chr-ID scaffold08359; pos 1655929 to 1656794 reverse strand)
aagagacgcaaccctcttcctcccttggtaagctcacccttctagttctcttgctttctttctcttcttatgaatttgtgtatggagatgggtattttttaatttaattcatagatttttcaaacggatagccaaatccccatctactcaaatctggaaccatcagctgatactaatctctggtttcagtatttttgtgaatttatctattatgtagatgcgaatgtgccctccagataattggatggtaaaaaacaggggtatctttttatttttcttcttcttttttaatatgttttcataaaatttacccacatccttttgtttgtcgatcgatctttcactaatagacatgagaaagttagatgtgtaaattttttaatggtattaatgctgattgtgatttgtgaagttggcagaagttaatcaatttaggcgtatttggttgctttaaagtatttgaagtagtgggcaattgtttttatatgtccttaatatcttgcgaattctcgtggagttgtggggtgtgatgattcattcatggagaaaagtaccatgaatgggcaacctttggtttcttttgctttactattttcccggatacttggctgccgctctaagagttattttatttattgaatgagcttaacgaaaagttgccagaatgatgtatactgtcttgagcatgagcaagtgatatgctatgcccaaagaacaagcccatcaaagttgctaggagccataacatattctccaatctagcatgcttaatttcgtgatgttataaccacaggaaaggaaccatagttttgtaattttgacaatttgctgtttgaaactgtatcgttgtaggtttgtgtccatca

SEQ ID NO: 43925 - DNA, 982 bp, Manihot esculenta
  Intron number 5 from transcript cassava4.1_014369m (locus cassava4.1_014362m.g) derived from phytozome v7.0 (chr-ID scaffold10018; pos 38377 to 39358)
ttttcaaagaaggagctggatacatcctccacagggtaattttagtttaccaggcagtgaatgccatgactctgtttgcaatgtaactgtattggtgttttgtcattggggtatacggtgcatagacagtgatgattataaataaggttataggcaatgttatttcagttttagggttgggtgtggcatagttataactggagagtgattggtaatatatatatttatatacatataattttttgcatttaccatgtaaagctgcctgcgtttttctggtagtattgctaaaatttgcacacataaacaattgatatgaatgtggtgtcctttttttaatatcatatgcacgtgatctttcaggattgggctttttaattgattgtgctgctgtcaaatctgcaatgaagctcttttgctttttagttttggggtatacatttctctatgctgttgaaataaaacttggtgatttgctgaacttgttgagtgttcatgtatacaaaatagcacctttgtattcaagtgtgcctgaggaacatgttcattttcatgataaacacatggtgatccaaaatagttatggtttgtgtactccaaaagtctatttcaagtgggtgggctggtagacaccaagtctatattaaatttaattggtagtgcttcatggactgtgtatgattatagtatcatgtgtaaacttctattcaaaaggatccatatggcctatctcaattagtttgggattgagttataattgtgttgaattgagttgtataaacttttgcttttcttgttatattttattgggcacctttttttgtgaatttgaaatattcttattttcatatggcctctggggccgttattgttctttgaattggagttgtgaccttgaaacttcatttgttgctattgagagcattcctaataatcttccaatgcagatatcaacctcctcttccagttgatcaagtgaagc

SEQ ID NO: 43926 - DNA, 390 bp, Manihot esculenta
  Intron number 1 from transcript cassava4.1_000724m (locus cassava4.1_000724m.g) derived from phytozome v7.0 (chr-ID scaffold09466; pos 18300 to 18689 reverse strand)
aatcccatctgggtttgctagatcgaattgcacaggtcagtattgcggtgcaattatcatgttatttaggctgaacattcgcctttttttttcttttgataaagaaatgatgatttatggaagaaaattatacttgatatgggtttgaaaaacagaaacatcttcttgagttgcatttttattgttatatttgaaaaccaaggtgtttatttttcaattgttagataaatcaaaagaccgttgtcttaggactgtagtctgagatttagggctaccagcttgcttttgcaattgctgcatgagaattttatttttttttctaattcggagtttccgaactttttggaaatgtaatggttgctaaaatctttactggttttttcttaccag

SEQ ID NO: 43927 - DNA, 893 bp, Manihot esculenta
  Intron number 1 from transcript cassava4.1_011749m (locus cassava4.1_009350m.g) derived from phytozome v7.0 (chr-ID scaffold12004; pos 324079 to 324971)
aaggattttgcaattttttttctgagattggcaaggtatgtttaaaccccacttttcaattttgttctgtaatttttttgtaaacccatgtgtttacattttttttttctgttcacttggtcttctagtttatatcttactatttctgggctgtgcactacggttttttttttttccagattggtgttcttttaagttttattttgtgaagcatccatggagaatataagttcacaaggcatgttagagaattgcatgttacttgttcttgtgctttgggtctcgttcgatgcatttcatcagaaaccctctaaagcttgatagcttcttgcatgttctttatcattgagatgattgttttgcatttgaattatgtcattctctatatatagtttctgggtctgcctattaacatgttatgatattttactaaacagattgatagtgtctgtattctgatttttgtctcaaaattcattgactttctaggtagagtggaaattttcttcaaatgctgtggtgtgctattatagtgtagtttgatttttgtttttcgtgtatgtgtgtatgtgtgtctcaaacttgatgttaagcagtttatggatatgcccatgaatacagctaatttgtttgatggctttttatttttgcattaaatcaagatttgatttttatacctatccacaatctacttgatactcgattaatgctgctttcatccttgatctcttattctttagtttgacacatttcattcgtttatcaacttactattgctccacattatggtccatatgccttaaaatatcatattccacatttatcgaatgtactcctttaacttgtgtactgatgtgtttgtgctgcagattaatagtttcttgcatattgat

SEQ ID NO: 43928 - DNA, 642 bp, Manihot esculenta
  Intron number 1 from transcript cassava4.1_002185m (locus cassava4.1_002183m.g) derived from phytozome v7.0 (chr-ID scaffold00069; pos 40313 to 40954)
aggtggtaatctacttattttgttttgttatgttatgcgtttgggttggttcgattcctgagaaaaatgttggaagttgtagaggaactgaatgtttgttggctaggggttttattattatttaggtatggtacataatttgatgcaaagtgtgtttccattgattttatcagctaccaaacttggagtttgggatcctcattcttttcagtgatacaaacagaaggcttgatgagaacaatttggttttgatatagctttacaccaggcctttgaggtaacctggtgttagggtttattggcttatgtgttcacttgtaattaagtggacaaatttgaactttttgatacgggcataattaattgaaattaatttactgtgatggaaaaattagtctccagttggttgtgggaacttaagtccggtgtagagtttcttgttaatgaatgttgtcctgttatattatatgatcaacattgaaattaaccaatattttattatcaaaccttggttgcttttttaatccattttctgggtaattagtaacgttcctaggatgcattacatgtattgattctttgtcattaacttaaggacttgttaatcacaggaattggaccggccaaatttggggcaatcgg

SEQ ID NO: 43929 - DNA, 895 bp, Manihot esculenta
  Intron number 3 from transcript cassava4.1_004729m (locus cassava4.1_004729m.g) derived from phytozome v7.0 (chr-ID scaffold03942; pos 428949 to 429843)
ttgaggaaagtcaaagcaatttgaggtattttttcatagtgatttgatttgtcttgctacatctgagtggggttggtttggtctattgattccatcttgataaatttaaatacactcgatatgaatacaagttgtgatggagacttatgtcgtctcttcaaaggaaagtctctttctctatctctttcaaccagctcgagctgtatttatgaggattaaaaaaatggtaacaagcttcagaatcctgctctctcctcaaagcgcagaagataaatctgatgctatattttacattattcatggatgaagagtaaagttgcagaatttgtttatttttttacttcccaccattacctttaacagtaagcaaaatatctgtggtgagattcagaagggtatttcgggtatttgaaagaaaaccaattggccgactgtttagctgagtaaaacataagttgttttgttaaccttgattccatccacgatttttttattttttatctgaaaattgtttattatggttaccatagtagatttaatttcggttggcatttaattatcacttgaaaaagctatggttacgactcgtgtgggcatcttgatattggccatttgattttgttggtcggttcttgcattcaatgaaacaagcttcgtgtgatcatcaaagaatcccgaagctccttggcctgtttgtttttgtttctgttttattttaaaaccagtaccctttatttataatttatgcctgatgattgcaactgctccactgccttcaagttttctatgcaaaaatcgtttctttcattttcttcttagctgggtcatcactttatgcgttggttttctttgtaatccagttggtgcagctctcttcatcaatccgatccttgcc

SEQ ID NO: 43930 - DNA, 207 bp, Manihot esculenta
  Intron number 1 from transcript cassava4.1_026471m (locus cassava4.1_026471m.g) derived from phytozome v7.0 (chr-ID scaffold09492; pos 350271 to 350477)
cttatcaggtggagcttctcaaattcgcctacaaggtcttgtttcttcttttttctctcttgtttaagtacgtacccactaggaaattaatgttcttgcttaatttgtgctttgttttgataaaaactttgttagtttcaccactcaatgccagctttgaattatgttcttgtccaaaaacgtggtttttctttatagggattatcg

SEQ ID NO: 43931 - DNA, 683 bp, Manihot esculenta
  Intron number 4 from transcript cassava4.1_014177m (locus cassava4.1_014177m.g) derived from phytozome v7.0 (chr-ID scaffold00318; pos 459583 to 460265 reverse strand)
atagccacagcaacaatagtaagtagtgtatttctttgtttttggcaattaaaacatgctcaaggttactggtacgttatatttgaatacatatgacaaatttgaacaatgtttccagtcctcagtcttcaggaggaaaaattaggagttcttgagatggtttggttatatagtaataagccagcagcaatagtaaattatctaaaatatatactttttttttgtgaacgagacttgcacaaggtattgttatataacatttgaaataagtgagcaacttgaaaaaaatgtgatgcttcttttgcacaaggctatcttctactaacatgcatggcgcatgcaatgataaattcatttttggcttggattaaatataatttctgggatattgctgtcagcaattttaccatgttttccatacatattttcttgttatcatacaattttttacttcaatttctgcagaaggtcactttcacatggtagaatacacaataaaataactttgcagggaaaatggctttgtcaatgtacataaatcaagtacctttcagtagctgtagtcagttttttgctcttcttttgccaccacttaacttttgcttcaaccatttgcagtttgtcatttagaataaattaataactgaggttcctcttgcagtgtttgtctagagcccttagaa

SEQ ID NO: 43932 - DNA, 433 bp, Manihot esculenta
  Intron number 1 from transcript cassava4.1_008248m (locus cassava4.1_008248m.g) derived from phytozome v7.0 (chr-ID scaffold02476; pos 14176 to 14608)
aaggtaaaataaactgcccatcatttacttggaaaccatagtttttgcattgcccttattaaattgaaacgttaatccttgctgtggacctttttcattgatatttgaatgttgctgttcttgagtatgaaaaaacacaatctcatttctactgaatgattcattgaagcagcatcttaatgacaaaaacaaactgcttttcttcttctgaagtttgtagagtttgaaacggagctatcgttaaattctggagacgtttgtttcatttttggcactcccacaatttgattaagcagttatagtgccttctttatttatttttctaaaataaaattgacttgcagttgcagattattaggtagaagctgttttgttttaatctcatgttctaatttcaggctgtcactgaaattattgtccgcagacattttga

SEQ ID NO: 43933 - DNA, 817 bp, Manihot esculenta
  Intron number 2 from transcript cassava4.1_029691m (locus cassava4.1_029691m.g) derived from phytozome v7.0 (chr-ID scaffold11297; pos 820691 to 821507 reverse strand)
ttgagtgggaaatctcagttggtttgcgatacaaggttagttgttggtccttatatttagattctgattagtttaacatttcattttgtggtgtcgtactttacactctgaatttaaaatgtgaaaactgttctgtattataacaagaagagtttagtagcaaaagaatacttgatgataagtgatagttgacattgacgcagaaattagactgtgtatcgataactctggtaagtaaaatgaattcctctgtgattatcgggctataatccttatctatgaaaatgatacattggagatggatataaaattacttttggccgaaataagtgttaccgtctctgtccttgtactactgagcttcaatggtgcctccagtgtatgtgaccatggactttaaaaactcttttcaagtcaccattattacagctgttgttggccattaggctttagctctcaatctggttctttctattagtaatttgtttttgcaaaaaagctgatcgcttttgcataatatcattaattgcatttattaattttaatatgcatattatggtatctttttaattgtatgattagctagtatggaagagcattaagttggttcagctctgaactgaaatggaaaaaaaaaaaatactgatttcatgtagaataccaacagacaccaaactgaactaagagaagaaccaaatctttttggttcagttcaggactgttgttttgaatcagtccaacttctgccgttttatgaaaaaaataaacactggtttttcaaattcatcccttccacagaaattccatcaaataaaca

SEQ ID NO: 43934 - DNA, 932 bp, Manihot esculenta
  Intron number 1 from transcript cassava4.1_025058m (locus cassava4.1_025058m.g) derived from phytozome v7.0 (chr-ID scaffold02538; pos 156468 to 157399)
agacattttttgaaatcctcaaatcacaattttctgtagaactttatgtaaagaattatttgggaaacattgtttctttgccttagcctcttctttatactcaattcttgtaaaatgctgctacaagaactttgtggaaagatggagaagaacataaaactcaataaatggataaaagtatagcaatgggatagaaagaaggttttcaatcaatatgaattgaggtttgataaatttatcactaagccatttcaatatttactatagaaggcatacttgctcattgcaaaacacaactgtagaatgatatttcatcattataaaaagtttctagcattgtcctaaacatacaaaatcttgtgtgaaacaacatcacagctggaaatatgatgatagaaaagatttggacaagtatcaatgaaaccaacttgcagtgtcgaacccatatgagtaatctcaatctgtaagaatataaaaaatacttcattattataaagttttttctagcatggtgctaaacgtgctaaatcttgtatggaataacaccacagctgaaaattcatgataaaaaaatatttggacaaaggatccatgatatcaaattgaagtgtcaagctgctatggttaattgcaatctgtaagaaaaatgcgattcaaggttttatgatatcatttggagtgatttcaattcctgaagaaaagcagggtccaagtaatctcatctggattttattccaatcccttgagaagaggttctgacttctgaggactcatcctttcacccagagcaacacttaaatatcttgtggaatactgtagtagtagttgtgttatatttttgtggggtatcattattcatgaaaactaaatttttttgcctgtatttcatttctgtaggagtgagaaaacaaagcttctcttttgtacaactg

SEQ ID NO: 43935 - DNA, 874 bp, Manihot esculenta
  Intron number 1 from transcript cassava4.1_013791m (locus cassava4.1_013791m.g) derived from phytozome v7.0 (chr-ID scaffold08615; pos 30674 to 31547 reverse strand)
ccgagcacttatctgctgttcaggtaatttcgaccatgtactttactttttctggttagcgagttaatctgatttttttggggttatttctctttgagaacttaacggatggtcattgaagtttgcaagtgctttttgattttttacaactcttattgagatcttacgcatgtttgggtcccttgagcgtgaatttagaattctattggattgtcaattcagttttagttttaattaattaaattaaatttttagaataatattgaatttgcaattaaaattcgacatatttcttttcattttattcaagttgtttaaatataataaattcaaattttattccagcaattgcatttcatcatttcatctccgtgggtttagctttttgaaattgtgaaaagcaaggttactttatcctcgtagtactgcttttcaaaacttttgtgcatagttttaactttataaaagaattttttttatgttgtggatttattgaaaggaaaaaaagcatctaaatgttttcttatggctttctttatatattcttatacttttgttgggattctgcagcaaaccacatcttttcttttttatttcaaaagaaaatctgttttttttccctgttttaccaaaagagaacatttgaataaccagaggctcctttagagcagcccactggctgaagataaaggatatcttttattctataagagcaagaaaagcagggttcttttctttgggcaaatgggttctcttagtctgaagtaatgtacaatcttgacaattattttatttttctggttaatattaatgagattctagcgtgttaaattctaatacttcttattttgggggttattgcacggcagtctgg

SEQ ID NO: 43936 - DNA, 855 bp, Manihot esculenta
  Intron number 2 from transcript cassava4.1_021615m (locus cassava4.1_021615m.g) derived from phytozome v7.0 (chr-ID scaffold02998; pos 113650 to 114504)
gcctcgggcagcggctgctgcaggtacccctggctttgcatgcataaaattttaagacttgcattggaaaatagctctgtcaaattgaaaaatgctttttacttttttctcttaatcccataatttagattcatgataacaggacaacttgctctgagttccaataattagtgatcttgggaatcattttgacttctacgggaaattttaccacaaaagaggattttttttttgggacataagaggagaatatgtgcaagaaataataagactttctcctaaaatgaaacacaaaatttgagtatgacaaaaagaaagttcttcaggtaagtgttctttctgatccactggatatcaattaaaggaactcacttgaaaatatgaaagcaaaccaccttaaaactggcccagtgtaactcaaacaagcataaccaggtacttgacgtgtttcaagaaaaatattttttaaaaagcattttccaccacttttagcatttggggcacacagaaaaattagtcgatggcagatattttcctgatcaaaaagaaaacttttttgaaaagaggaagttattttctacattatgatgatcttataaaaaatatttttcaaatacaagttattttctgtaaataagcggatgctaaatttgcaatactacctctttaaatctcctcaccatgagtagtgcttaatagccaccagtttattcatttgcagctgtgcaagtattgttgttttcatttatcaacaatcatagttgtattctgaatatcaaactacgatattcttccggaaaaaaaaaaaaaaagcttttcttttttacttactgttctatcatttgcagagcgctt

SEQ ID NO: 43937 - DNA, 759 bp, Manihot esculenta
  Intron number 1 from transcript cassava4.1_001535m (locus cassava4.1_001535m.g) derived from phytozome v7.0 (chr-ID scaffold06582; pos 247039 to 247797 reverse strand)
gttaatctttgcttcattttatttgtctcattcaggtaatcgtttgttttatttgatttctttgctttttaatgggaaatttttgcgttgcacgagtttgatcaaattggtactttttgtttcaagtttgtttttttttttggtcttgatgctgctgggtttattggttttcttgaatttgaatactgatttgacctttttgaggtcaattaggaattgggtttttgcttcttcctttgttgtgctaagtagtaatttgaacttcagatatcctctggcccccattctcttctccctaactacttatccacctctctctcttttgttccatgctcttgtttcttggaagattagcgtttattggattattggttgcgcctatttggaacttgtttgctttctgtccaagcggattgcagttacatgctctaggtttgggtaatgtttgtccatcacagcttagctcctctgacaataacaatgtttcaatttgatgcttttgctttctttatttttgcgtgacgaaagttttcttgtggttgtttgtgggccttccgttcagttcagggaaaaaaattatgttaaatctttatagttctcatgtccacgtaggttttccatgcgtgtgattttgttaatttgtttgctgtttttactttctggtcgtaatcatttccctcaaagatctatgatatctcagactagagtaacgttataattatagatttcctttttcttaactggagtagatctttatca

SEQ ID NO: 43938 - DNA, 1035 bp, Manihot esculenta
  Intron number 2 from transcript cassava4.1_006169m (locus cassava4.1_006169m.g) derived from phytozome v7.0 (chr-ID scaffold06556; pos 86516 to 87550 reverse strand)
ccattggaacaattctggaggctgctctcgcttgggtatacttatgatttcatcaaacttttggacattgttgattcatcttctcagtatatattgaatcttgaactatatatcctatagccaattgaactaactagacaaaatcttattattagactggttaaagttcataaaaaaggtgaaattatggtacctgtcttcaacatcatatgatagctcttcgctaagattagtctttcagagccataggcaaaagactttttccttggagttttattcagtaatattactctatctgtgacctcggagctcccaaatttgaaccatggaaataacctttctgggaagcagaggtaagagactgcgtacacttcttccctagtccacaagtgggattcttcatcgcaaaaacgtcactttttttgttctatttctatttaattgtttctcatgcttatttaaatatatagattgcatgagctaccggggcctaaaatttaggaagtttcagaagtcagtaaaattgttgtgcacctgactagttattgttgtgtgaatcgttcttcttctagcattaatattgtcttctctattattgtgggttgtttatgttctctatggaactttttgcattacttctattttgctaagcgatgggagtgatacctgactcaacacattgttgattcatatgtgggaaaaaagatatgaaatctgtcaggttcggataaaaaagtttgaaatttgtccgccatctcttgtttttaaattggtatatataaattttctacttggtctacactgtttcacaacattaaatagcaatgagtgtgcattttttagttgtccaagaacacattgttcttcaaagcttggccaaatcattaactttggggcttacgccaagctgattgttttttgtactgtatgattatcatatataataagatacgcatttttgaaatatcctcatcctcatccaaatgttatatgtttgcaggctattattccaagattaggttggaggtggttact

SEQ ID NO: 43939 - DNA, 648 bp, Manihot esculenta
  Intron number 1 from transcript cassava4.1_015702m (locus cassava4.1_012247m.g) derived from phytozome v7.0 (chr-ID scaffold09692; pos 10125 to 10772 reverse strand)
tccgataggtatcaaattttctcttttttcttttttgaaaaaaaggattagaatttcttttcagattttaattatttaagctggatcgcttattatggtgttgcgtttaattgggttgtttttggatcgttggttagctattataggaaagggattgattgaattttaagcatcttgcgcagattttttgttgttcagaatttgcaacaataaatcaatggaatgctcggatttttttttaattgttatttttttgagtttgtgaaattatgccgtgtttgggcaatccgataggggagtcgtactgatattgcatttgatcttgaatttggtagggtattgatgtcttctaatgttgaatgctgttaattgagttcttaagtctgtagttcacgagattgaaattcagctgcttaataataatgatgaagaagtgattaacacttcttcttcttctttattaaataagaaaaggaataggtactatcatgaattctttgttttgtctgtaagtttctgctttcaattagatagtcgtattatttgatggcagtaattagtttaaagaaaagtgaactatttcaaaatcattgctaaggtgaagtaattttttgatttcaggttggggcttgttgcaactataaaggt

SEQ ID NO: 43940 - DNA, 385 bp, Manihot esculenta
  Intron number 1 from transcript cassava4.1_031862m (locus cassava4.1_031862m.g) derived from phytozome v7.0 (chr-ID scaffold04324; pos 79880 to 80264)
ataatactcaaactcaaatccgtacccattttctcaaatctgttcattagtataatactatggtttccctgatttgattgttattaatgctggttgggctaatgataatttagatttgcattattgttcatgcatcattgaaccaaagttaatggaaaatgttgattattttataatttctaccattgtagaaaaaacaaaatgaagataatggacaattttcttgatcttgtttaaaatagaaagaaacccttgtacccttttctttttctaatcaataattgttgtcagatttagatttggaatcaatcctacgtgatgtttgagaaaattcttagttggtttattccttgatgggtgtttgtagctggtcctgaggaaacag

SEQ ID NO: 43941 - DNA, 888 bp, Manihot esculenta
  Intron number 1 from transcript cassava4.1_018088m (locus cassava4.1_018088m.g) derived from phytozome v7.0 (chr-ID scaffold08359; pos 389490 to 390377 reverse strand)
tctctcacctaatcaagtctttagccctaaatcaggttttctttctttttttttatttaattattctcctcttccctttaatttcttctttatttctttcttttacttgaattagtttgctatgtctctctaattcgatttctattgtttttaatccttaataaccgccaatcttggacttggatttatgaatcagttttagcacctttgctagattttccgattcaatgctttgattggtgtaatttgttatttctttttgctgtagtgatgatgttgaactttttgctgtaatttactatccttaattagttgtttgacattttcgattctcttatttctcaagatattggtgggtttatggaaaaatttgataatttgtaagcaggaagcttaatctagctttctagggatacaaaggagacaactgatgcgtttctccactactctgttgaatattggcttcaacacatctaggagaatagccatgtacatcttaagctgaagctgcaaacaaaggtttattccattataaataaatgtgtgggctttcctttgtactggttgtgatattctccaaattgtcctgtgtacaatattaatggaatggaatctctttttctttttcttttcttgtttaacttatactttgaatgaatttttttttcttttttcttttttttggcactttatgttttagataatgtatctgatttgagggtacattggattggttcctagtttgcaactttgtatgattatctgtagagactagttagcaattctctggagattctagcatacatatactttgggatgattttgtttgtgtttataatttcttactttttttgccacaggagacagacattttctttctagaggacc

SEQ ID NO: 43942 - DNA, 637 bp, Manihot esculenta
  Intron number 1 from transcript cassava4.1_034388m (locus cassava4.1_034388m.g) derived from phytozome v7.0 (chr-ID scaffold06631; pos 707001 to 707637)
atactttggagaagatcatttgtcacaattcgactgtgagtttaagcagtttcctttttcctctctagtgcaacattctattgttttggcttccaagttgcaataacagtctgttgaagttgaaatgccagagaatcggataatgcattatggcttttattgtaaatgcaaacagaagcaattgaccggggcgttgggggggggggggggagaaagagcgaaagatttgtgttattgtagttatgctccgttgaagaagaggatattgtttgatagagctctaatggaaagtggggttcaattgtagcaaaccaaaactccgaatgtattgcttgttattgttgtgttactgcatgtggcatcaattgtggcgggcagttgtttaataagatctgaaggaggcaggtgtcacgattatacttaatgaaacacagtttgcgtgccattatttactgagcactcaaacgacatgcttttcttgctaattagattcttttttgatgttggtttttgctttctcggtcacgcttccttaaataatgttattttgttacgattgccttttgtttcattttattttcatgtgcaaattagtatttgatacttatcttttttttccttcttttctcaatttagg

SEQ ID NO: 43943 - DNA, 867 bp, Manihot esculenta
  Intron number 2 from transcript cassava4.1_009586m (locus cassava4.1_009586m.g) derived from phytozome v7.0 (chr-ID scaffold12146; pos 256851 to 257717 reverse strand)
tttgttcactcaactgggttttcttctgtcttgaggtactactatactactattcatctcctttctctctttattttatttttctaattctttaattttaaattttagtttattccaattttatttgataaacttagatgcaggaacagagggctataggatatgcaaatgaacctcttttttttttttttaatgttttttaactactgggatgtgggtgttaggtggatttggcggttggggtgtatgatttatgatgttaaagaaactgatcatccggagattatgtgttttgatggctattgtgtgttacagtagtagactagtattagtttcactttggagcttaggcaaatgaatattcatagagattcctttttttccccttcttttatgagtgtgttttgaatttagtaactttttagttgttgcttctttttggtttcaaattagattaaagatgtctggagatttgttatatgatttctttagtagaagaagtgtaggttcatagatcttgaaataaagcaagtccttggagtctgactgttaaaactcacagctcacggtcatgagtttcatattggtttcatttttttatgcctacttatttttgaattattcttccactccaattactacattgtgtatgttggtttattgacgaacacaaactgggtgtgctgtcttacttcagtttgaactttggactaattagacaacagtgctatataaagtatacagcggaaaaaaaaatacaactgctctctctctctctctctatctcttactctctctctctctatatatatacattgaagtttctctggttttatctgaagttggttaattttcaggaagaacccc

SEQ ID NO: 43944 - DNA, 573 bp, Manihot esculenta
  Intron number 1 from transcript cassava4.1_017450m (locus cassava4.1_017450m.g) derived from phytozome v7.0 (chr-ID scaffold06582; pos 186212 to 186784 reverse strand)
atacgattttccgtcaaaatttgccaaacaaagtatgtcaatctttctcttctagctgcgtgtacattgctattgttgtatcagtgtaacatggcttttacaattacggacagaagatttgaatttcgtttctgcaaggttgaaggggttttcttttcattttgtcattggcggatgttttacattatgttgattgccgtttgaagatcaattctgcgctatacttgcttagttattgtgtttaatgcctgtatcgtagatctaaacttgtttaatgtttctgtgattgatttctacatgtggaaagcagattatagtatttttgcaaattaatttcgctctttgaatattgagaatagctttatggtctcgaaaattcgatgcaatcggtattttgttaagaataatagcctttcgttttattttctgagtgatcgatgtatgtgatggaccaccttctgagcttcagttccgtgtcattttgaggataatgggttgtttgagatgttttaattctttaaatgcaatttggatgcaggagtcgtgcccttccgtaaaaaatatccttctttt

SEQ ID NO: 43945 - DNA, 624 bp, Manihot esculenta
  Intron number 1 from transcript cassava4.1_030785m (locus cassava4.1_030785m.g) derived from phytozome v7.0 (chr-ID scaffold08359; pos 1232981 to 1233604 reverse strand)
tgggattcggatctcaggtaaataaataaaaacaacaaaaacaaggctgatcaaaagaaatccctcaaaagcaccggatccatcagattcaaaaggaaagattatttaattttctagcaaattatttgagaaattgaacatgttgttctgaaaaaagcttaaaccactgggcaaacgtgtagatagcaatagcatggcatttttatctgcagcaaaattagcttcgggaaacacattcttgacttccattaatatctcctgtatcatgaggctgtgtatgacgttaacgacttcagagcatgtgtccctgaagtcgataatcgcaggtcctacaaacgtgtggaataatcatttaagaaattgcctgaaatgggtccataacttcatgttaagcacgatcgaagaagaggccatccacatagaatcctcaagaaacaaaccaccccaattgattaacaagctagactttgaaatccaagaagccaaccacctggacggcaccactgatgctttacaactcgtatctatatatactgctcagtttcccaccaacacttgtgctcaaaattatggctttattaaaaaccagatcgcctaagctctccatcagcaggtccgtggctc

SEQ ID NO: 43946 - DNA, 719 bp, Manihot esculenta
  Intron number 2 from transcript cassava4.1_009903m (locus cassava4.1_009903m.g) derived from phytozome v7.0 (chr-ID scaffold10504; pos 274266 to 274984)
gagcaggtgctttggttgaaacttttcaaggggatgtaagtctactgttgcaatgaaaattatcttcatcagtacataaatttcttcttttcttttttgtttttttcttggaaaaaatatactgttctttacatgttagttaggaaaatctttccactcatgctacttttagtacaatcaacttattgtctggatgaacaaccttttccttttaatctttttttttttccttccattggtttctataatccatagatgttatgcttttcaaatgtttttgcttgttaaaagaacaaaagggaaaaggttaaagatcagagatcaaggctttaatggtgaatatatttaaatgttagaaacctgtagagactattgacccaaaagcttgtgggtgatgtaagcttaagttgagacaggttttctttttattggccggatgtacctaacgttttgggtccactagttcttttggtcattgattagcaagcttgatttgtcaaaatcaatagggaaggaccccaggaaagaaaaaagaaaaaaacttgatgacatcctcctacttctttcttcacatttcaatcagacataaatttgttcatatttgggacaattcaaaagtgaaaaaaggggtaaaaaaacgacacaaacgtccatgtcatggttttgttttcttatttcttttaggtgattgatctaaaaacacagttgagctactacaa

SEQ ID NO: 43947 - DNA, 830 bp, Manihot esculenta
  Intron number 1 from transcript cassava4.1_001038m (locus cassava4.1_001038m.g) derived from phytozome v7.0 (chr-ID scaffold08686; pos 234453 to 235282 reverse strand)
cttttacgccttattggaatcctttccaccttcaggttggttattagttttcataggattttgtgaaacattcttttagggactttaataaaatcaagttggctattgagttgttctttctgttttatcttgttgcttgcaagtttgacaatgtttactacccttgcatattttcatttggcatacttattacctttttgttcaattgtgggtctgcaactatgcttggttaatgcatgtaatgtccactaagagaatatttttgtatttacataagaatggctgtatgttatttctttgtttcttgtcatgaaaatgttcttttctattttgatcctcacaatgatggtaactgaatgattttctaatgataggttttgattatgtaaattgtgggtaacactacaatctcactttataaagtattgagaaaaaaggctggacctactcgcctccaaaagctttaaggggggaagagggcccataactttgtaagggccacattacccaaacacttggagcgtgtaacacttatggattcccaatgttaaatgaagagactcccatactattttaagaaaatgggttgggtttaactgaatccaaaagctcttgcaatgggagtagagtgcccatgggtttataagaggtcccaattcccaaaccattgtggaagtataatgcaaagcttctttttattcattgttatcattctctgtggtcatgggagttttgttgtcctacaatgatgtttcttgctgtggatcattggcctttgatgggcagctctttgacaacttctattttacctttacaggttgcaaccaaat

SEQ ID NO: 43948 - DNA, 328 bp, Manihot esculenta
  Intron number 1 from transcript cassava4.1_022379m (locus cassava4.1_022379m.g) derived from phytozome v7.0 (chr-ID scaffold04851; pos 390541 to 390868)
agagtagaattgtatgtggagatgattcatcttcgaggagctttaccagcagtttcaaaccggagcttccccccaccttcagagtttttgttcctcatttttttccttcaaaaaattactttcatcctcatcaaaggaactcagttgactgcaatcaataattcccgattacaatcaacaaatcttacttaaataatttgggaatatgcactttgtctaatcatgatatctctggtttccaaataaatttatgggactcttttggaaaatgataatgaaaatccttttgattacctatattttttttttctatttgtttttcagcaag

SEQ ID NO: 43949 - DNA, 806 bp, Manihot esculenta
  Intron number 1 from transcript cassava4.1_015337m (locus cassava4.1_015337m.g) derived from phytozome v7.0 (chr-ID scaffold04165; pos 542854 to 543659)
aacttgaagctcaactgaaaaacgttccttccctttactcttctctctctctctctctctctctctctctctctcttgttgcacgggaatatagtttacaaacattattgcatcttttttttgccaattaaggaattcatatagaagctcatatagctttccttgtccactatggcactgccataattggtgttgccataggatacggcaaatttacacatcatattggtatgttacaacttccatggtgattatattgtgaaatatgtgatctgacttcacatttggatgggggaatttgaaaaaagagatttagatttgatattgcatttgtttcatcagttcatcaagttgactgtagattaaaatgcctataataaattgctatttctaatgcacctcgatcaagttctcatttccatttatgaatctaatttacagttaatttgatcaactaaagcatgtatatatcattcagagcatttgaactgaagattatatattccattccttgagttgaagtccttctatcaaaatgggacatgagagtttttccagaatcatgtgaatgattttgctataaaatacttccacatccttgtagttttagactttgtttggatttttgaactgggatgtcctttctttagttaaatcatctttaccatgaatagtcattttcttcttgtaagtctgaactcgatgtgctgtattctggaatttgcttatctacttatcgtatgttggtagcaaacaattaagattgatcaacatggtttaggttaatatatccttggctgctgcaa

SEQ ID NO: 43950 - DNA, 615 bp, Manihot esculenta
  Intron number 3 from transcript cassava4.1_009120m (locus cassava4.1_009120m.g) derived from phytozome v7.0 (chr-ID scaffold04716; pos 201409 to 202023)
cgttgctaacgagagtcttgacaagtttctcttcagtaagtaaaaacaaattttctgctgatttatgtttttgacccttataagttaatggggattgaagttcaatcacataacaggaagaactctaattaaacaatcatctaagttagggacggtactagatgcttgaaatcgatagcgtaaaggatcaacaattctttaattaaacaatttttcagtaggtatttggtctgttttaagttgtgaagaaaatgtatactaatgaaaatgcattctgcaaagctgtgttttgatgaaatagttgctacttctgccacaatttcttttttccaattttttgacacattttgtaagcccaagcactcatctgaccagtcctaagaaaactgtggatgctgagagtggatagagagctggaatgttcaacctccctctagttttcaacctgtctctaactacagtgttgataaactgaaaactaagaaatgatattatagtatcattccatttttagtttttgttaggattctaaatttctaatcatcccaacataaagatcacagagatgattttgatgcagaatccaacaggaaagagcagcttgattggaagcgg

SEQ ID NO: 43951 - DNA, 758 bp, Manihot esculenta
  Intron number 1 from transcript cassava4.1_009714m (locus cassava4.1_007161m.g) derived from phytozome v7.0 (chr-ID scaffold04251; pos 372649 to 373406 reverse strand)
atcgttcaggtatcgattattttgtaatttgtatattacttctttccaatgattttgttgatagcttatatatcaatgtatgggattctatggtttttttagcaagttttccaatgatctcttaggaattgttgtattattgttttctgtttggttgtcgagaaaatatgctggggaagaaatgaagagtcaaattgacgaggtagaattgtcgttttgcaatcatggacgatggtttattaatttacttgttaggctagtcttgttactatttgattgtttatttcttgttaggttagcctattgtttctttttttcaatatattaatctttattattttattcaattattacttatgaatttgactgaggggaacggaaaatacaattttttacttcgcaatctaaatttgttatattaaattgcgtcttttgaggagaaaagaaaatttttttgggttaagctatgctagtaatctagtacaatagtactagtctcttaaatatagagaaaaaaaaaagtataaactgtgatttattttttaatattgcaaaatataataggggaaaaaaaggagaatcaaaatggcaactttagtgagctaatcaaatataaccttagtttctgtgtattgaatgctgtaatgtcgttttttaccatgctaattacatatgatctggttggttagtaacatcatttccattttagcttaacgaatatctcttctttttatcgtttgcccttttgcagattaagc

SEQ ID NO: 43952 - DNA, 969 bp, Manihot esculenta
  Intron number 4 from transcript cassava4.1_019171m (locus cassava4.1_018915m.g) derived from phytozome v7.0 (chr-ID scaffold05875; pos 2059702 to 2060670 reverse strand)
agaaggtgaggtttctcgataccctattctgaaagtctatttctttcttttcctttttttggaagtttgattgtatgggcctcactgaacaagcaataaaaaacttaaacaactccttataagtacttcctagcaaggtgaatttgtgagagatatataggacttagaaaatggaaaaaggatgcttgaggaatatagtgatgaaatacctgtgtttatactggagtaattggtgaattctctaatctgaaaacacaaaatggaatgtacatgacaagggaagaaatatttgctttagtcaaactgatggcttctaaatatggtattagataaagaaagagctcaacttgacaacttgtttgtggtttcccatcttatttgggccataattctctgatgagccctcttattgcatatgccttttttttttcccttttccagtcttaatgtgatgtaattgtttcctcagaccaaaaaatttcttttaaagacttcggtcaggagataaatagaaagtgattagatgcatcttagatcttgtatggtttaaataacattgttcaatgtatattcggatccaatattttgttatagattagatggctcctcattgcaattgcttgatattttcaccttgccttggaaggactaaatcatgtgcaaggttgtattgcaaatgttttgttagattgatagctgtgtatttctataggtgggagttatgtaatggagtaaagcaggtatgactatgatcacaacctgcacatacatggactgtgtgaaatgttgactatgcatataaaaaaaggctgctgtagtgttacgcttgagcgtaagcatgttgacttgtgaaattaattggcgttaaggatgagactataaatttgttatccttccatgctctgccttctgctgcacgtcactgatggtaatattttgttcaagtttcaggaacattcgccttcaaaa

SEQ ID NO: 43953 - DNA, 576 bp, Manihot esculenta
  Intron number 1 from transcript cassava4.1_018461m (locus cassava4.1_018461m.g) derived from phytozome v7.0 (chr-ID scaffold00467; pos 161018 to 161593)
tcttctgttctgttcatctgtcaaactctagccaggtgagatactactctgatttcgccgttccttctttttttctttgatatttcaggggtattgaatatgctgctattgatctactggtggataattagggttttttatttggtttggatgttttgtggatatttgtaatctattaattagttgatcatcgatcgtgaaggtcttttaatttaatttatcccctttttgttaaacccttattttgagtttatgagatatgtaatttttatcattgtgactgaattagggtttgttcttgctgatatgtatgcatgttttgcaaattcttttcataatatcatgtaatccttagatcatttatattttttacagagaagatgtgaagattttgaaaaaagaaatgggattaggattattgtctatttatcataaacccaaaattgttgttcatgtatcgttttctccaattaattcatcattggggttgggtattaatattgattagaaagggttttaattgtacaatcatattaattttttttgtcatgaatctctttccagaagtgatttttt

SEQ ID NO: 43954 - DNA, 749 bp, Manihot esculenta
  Intron number 1 from transcript cassava4.1_007981m (locus cassava4.1_007981m.g) derived from phytozome v7.0 (chr-ID scaffold02477; pos 383322 to 384070 reverse strand)
cttctgtctttctgccctccctttgttattttgctgtaagatctcttcccttccaactcaaatctcatttcaagtttctctttctttgtagcccaacttcttcgcttataggaaaatggacatcgcgcccgtgaataagcctttcatatatgcaaaactggatgtgggtgttcagatcttgataaatctcacgattcatttttcttggggtgtttattgaatgctaaaatcattcaccctaaatctttaaaagatctcgggatttatatgtctccttgttcttagtttcctttgttttattcactctggattcaaattcttttattcatatttgttattctattcatgttcgtatgtgtgcatgtgcgctaatatattgaggatgctgttccaatgaaacagatgaagccacaatacaatgttgtgtttgatattatgaattgaaactgtattttcagaaaaagttcaaagattaaataacggatgaagacattcaattgaagacctgtctcagatacatattgacaggattcggggctaattattggaaatattgatgcgtcattccctaaagtggcttgaaagatagcaagcactgtgctccattggcagtgatattaatggttgacatatatgttttgtgtactattttggaacatgcagtgtcttttgattggtaatgattttttgcaattctttgaagtaaatttcaaaattaggatttttatttgtttcttttgctaatgtag

SEQ ID NO: 43955 - DNA, 1021 bp, Manihot esculenta
  Intron number 1 from transcript cassava4.1_010308m (locus cassava4.1_010308m.g) derived from phytozome v7.0 (chr-ID scaffold05884; pos 403991 to 405011 reverse strand)
caccttcattgtaacgatttcacgcttttaatttgcttcagtttgtttcttctcgttatcgcatttcgcgattggaatttaattgcgatttctccttcgattgatcgaattttcttccgtgtttggcgttttctagtttggcgtcttatcgattttctaattattttttaatcaatttgactgttttagaattgttccccttttttttactaaataagggttagggtttcgttgccctaatgatgggtttattctattttgaattttttgagctcactgcttaatttctgctgtagaagaagaaaaggaaataaaattgggattgataaattttgtctttgaattgattggagtgataaagttttcttctttttccttttcttggaaataaagatatggaccgctgtttatcttattctttgaagattgacattttattttcccctcattttggatttttgaaaatagatttgatctgtgaacagttttttttaacccaggaagattttgattgaccaatctctatcagacctaattgcttgttatgtgtaccaacctacactgttatgatgctaatttatattctctcagctttaatttataaatttcaattaaatagatttgaacattcttcgttagcgttgtgaagctctaattaatgcatttttttatttgagctgctaattaatgcatcagtttgatggtcaactctgtattatttattatgcatgcataccaattcaaagaaattttatattactagagacactaatactcctgtatgaaaggttttttttttcataaaaaaaaggaaatattcatttatttaagacacagttgcctcatttaataaaagttgtcgtctattgattattttcttatattcactaccacccttttcaagcatttgcaaagttttacttttcttatactcgtgatgtattgttgttgtgtcttgtctaataagactgtctccttcatttcaggaattatattctaattctattacttggacgattcc

SEQ ID NO: 43956 - DNA, 404 bp, Manihot esculenta
  Intron number 1 from transcript cassava4.1_005896m (locus cassava4.1_005882m.g) derived from phytozome v7.0 (chr-ID scaffold05875; pos 912852 to 913255)
attaatcttttattcatcaaacatgtacgatctctatctgtttggttgctggaaaaacatcgcctagtaaagtattttataattttcagctgctgtttttagaaagggaacatacactttgtattttatttctgttattggttaattgctgttttatttcttttacctcttttctgctagttctgtgtttgatttctgagaaaataatggaaaaggaggtttctcgagcttaaaatttttctcttttagaaaactggcttgtctttggccgtgtttactttacgaggaagtgtgaagagtttcggagtgatattaaatctcagatttgaactttactggctttagcttaaatatgtaaatcaaatttttttaatttgctttttttataaaaaaaaaatgcagag

SEQ ID NO: 43957 - DNA, 963 bp, Manihot esculenta
  Intron number 2 from transcript cassava4.1_005896m (locus cassava4.1_005882m.g) derived from phytozome v7.0 (chr-ID scaffold05875; pos 913356 to 914318)
cagtggtcacctctttgaatcctgcaaataaccaggttggttttcttttttgttttctgtatattattagtttagttttttttttttaatccgtatattattcatttctgaatttcatagaataattatccttttaagatgatatgtttatttatttttcatgtgtaaggttctccatcatttccgtgatcaaaagatagatgagtttttttttttgggatagtgtgatttgcaggatggtactaattactaattagtttcttatgttctttggacaatcaataacatttaccctctgtttggaataaaaaaaaattcccaagaattcaattaaattgatttctttttctaacaagttttttttttgtttggaatgaatgaatttcattctttttaactttaaaaactttcatttaaaacaagtaaaaatcttccatgattttgtaagaatacatttgaattcttttcatgcaaaacgaatcatcccaaacgaggggttaatacaatgtgttcaaattactttggctgtcgctattcaatgattgattatttggacatatattgctacagaaaggtatttcacgacttcaactggcttctctaagctccaagaattatttatcatataattgacttcctgtagtcaaagtgaacattttcattcatattgcatccttcttcttttccttttcaaatattgctagagttgctgctgtttaccatctaccagaattcaacttgttttgaggcattgtttcaaattgttgtttgggaatagaactttcttgcttctttacctgcatgtttgaatgcagtaacaatgtgaagttagttcccttgcatgatgaggctatgtggtgggttgatacttcctgacatgattgtattattgtattgcattatcaagttaatgatttaccctctctgctgactcaggcaatagctgaagttgtggaaggttcc

SEQ ID NO: 43958 - DNA, 466 bp, Manihot esculenta
  Intron number 1 from transcript cassava4.1_014088m (locus cassava4.1_014088m.g) derived from phytozome v7.0 (chr-ID scaffold07035; pos 64735 to 65200)
gatcaacttactcaccgtatgctctttcttgtttcgttcttttggtctttattttttgagcttttcagctctcagaggtaatgagtgctcgtgcttcattttccgaaagctgtttgagttgaagtttgcttttttctgtcttatttgcttgattttccttttaatccttccagccattttgtttaaatttgggtgttttctctctgtctacttttcatatattgggtttttccttgtattagtgtttgtttcgtgctctaatgctgtccgtacattttgtacttcagctaaatttatatttgaagatacctggatacatgggtttgctcaaattttttgggtttttcgctaaattgaaacgtactagaagtaaaaatattgtctttgttgtataacattgtgttatgagatcatgcttgcttccttttgtttagcttttagctattgccgtcataatttttggagt

SEQ ID NO: 43959 - DNA, 935 bp, Manihot esculenta
  Intron number 1 from transcript cassava4.1_026222m (locus cassava4.1_026222m.g) derived from phytozome v7.0 (chr-ID scaffold03542; pos 50177 to 51111 reverse strand)
tcgctgagactttgtacattgatttagaggtacatctctctctctctctctctctctgtcgctttctttttctgagaattctgatgctcgtttcctttttttttttaaattgagtagaatgttgaccacgcttggtctgcaatagtgggaaattaatgctggaacttttgatggtttctagaaggttgatgaattatatggcattgttgattgttaagtccgacacaaattgtaggagctattgttttagagctttttgaactcaatggtttgatgtttggtatagttttaccaataagcttgtatgcatctctctctgggagcgacttcttcacagctgtgctgatgtattgcagccatctgatagcatgtattacaattgctaccatgtaactgatatgaatgtgaagaatattggtagatggattttcacattatggacattattatcagattgcttttagatatacttcaagtgaacttctgctcctcgtcattcttgctatactaacacagcatctatttactgaatgttgcttatactttcacaacttttgctctgtgaattaattatattttgcttaagaaatgggatatgtggctcatggctgtgcgcattatgagtttgagtaattttgaccatagtgtgaaatagcacagcttaaagttaaaaaaaacttgttaacaatttgagctactgctacacagggtaattgctatttatgttgtagtgcaggggaaaaaatgaaaaaaagaagaagaagaagaagaaaatacaggtttttttgtttgtgtatgtatgtaaacaacatttggagaatgagtccattgcatatgtgtcgcattgtattttctcctgatcaagtgttggaatttttcaattgttttatgtttaaccgacctagttatttattacaggaattgtacacccatat

SEQ ID NO: 43960 - DNA, 480 bp, Manihot esculenta
  Intron number 2 from transcript cassava4.1_013840m (locus cassava4.1_013840m.g) derived from phytozome v7.0 (chr-ID scaffold02477; pos 185270 to 185749 reverse strand)
agttggatcgggccaaacatctttaggaattaaaggtaatttgtcgtgtttccatcgcttcattgtttttttcctaatcttaatatttccctgtaatggatatagttctttgtaaatttaaataggatttgaaactctctttgttatatacgataattcaagttgtttgagccgctgtctagtggaatttggattggtatcttgctcaatggtgaagcatttcttttaattgaggtaaaatttgtttgctggtggtggccagctccaaccccagtgcagttaggattaacagttgattggcatgagtgagttaggagtcgtactttatttcctaaaacaaagatggggtaattatttgattgataattattggttcttaactcttccaactgacttaaaagttttaattccaaattggttattattgtggcttttatttattgctagtgacatataatcatcttgtggatgcagctgcta

SEQ ID NO: 43961 - DNA, 746 bp, Manihot esculenta
  Intron number 2 from transcript cassava4.1_015582m (locus cassava4.1_015582m.g) derived from phytozome v7.0 (chr-ID scaffold12794; pos 1711423 to 1712168 reverse strand)
tagcagcagagattactgaaaaaaggtcagttattgaataatcttaattttgattttggagatcgttttggcgacattttttaatcggttttcacattgcattttgtcagcatatctcaattcttggaattgaaattgagggataacgaatagcaatatggactgaagtgtggttacagtttatagtaggggctctattgggaatattgttaacactgtagaaagaagatgggtgcattagtaaaaatcttaggctgcaatggtgaacattcaagtcttggagaaaaaaacccttagtagaaaagcgctgaaggcttggatcttttccaaattctttctcccaggatcttgccacagtgggttcagtactggtctcttacaggggctaaaacactcaaaaacatgttttgtgcttgttttgttatgtttaatcattatatgcgttttctgatacgttgcagctattgtttgttggccagttgtagatccgttgcctgcaaaatccaatttgcttatggtgctacacgtgatacatgcttatttggccctttagtttgtggcggaaattataattatatatgatgtatgagttcctgaatttaatgaaatatatcagatttaagtaaattttttgaataactcttaaaaaaggggactcaagttaatttggatgaactataatctggatgaaaatcaatattttaaattttgtttcttgatttaaatatatctatgcaggtgtttcc

SEQ ID NO: 43962 - DNA, 793 bp, Manihot esculenta
  Intron number 1 from transcript cassava4.1_007077m (locus cassava4.1_007077m.g) derived from phytozome v7.0 (chr-ID scaffold12525; pos 612766 to 613558)
aatcataacctcgtttggccttctctctcttgccggtacttgcttctcgcactggttcctagggtttctgttttcatttctctttctggtgcatttcctcattgttgtgttaacttattgttttgaatgcttgttttgcgaaatgcttgttatactcctttattttttgcaaaattcttttccatttgcattttttttgggataaataagcagcttgactgtgcaactgtactggatggtggatgatgaaaatcatgtaatctacttggttcttgtggtttatttttactgcattttagatcttactccatgcacctttgttattcttctaatgcttcatgacttaaacttgattgttttgttcttctagtgcatgtaattgcttttttttttccttagtgtcttggaaatgattgtaattacattcccttggttgagattaattttttaggcttaatttgacccactttttgatattgttaacactagttatctggtcatgggcaaaatttagagtttcattttttgtaggtgttaggagtttttgatatgtgcagaaatgtactttgattcgactctactagtcaacatgtaaaatgcatgtaggttaatgttcttgtatgtaatttgatttcatctgagatccgttttgacaagtacttatgtcaatgtgctttatcatattcttaatgcttcacatgccttagaagaaggacacatagtgatgcataagcatcttcagttactctgtacttgggatttgatcctctatttttaattttttaactaatag

SEQ ID NO: 43963 - DNA, 615 bp, Manihot esculenta
  Intron number 1 from transcript cassava4.1_015099m (locus cassava4.1_015068m.g) derived from phytozome v7.0 (chr-ID scaffold05363; pos 196942 to 197556 reverse strand)
ccaagtaagtccattaccaaaccttctaaacgagtttcaattgttttttgtttttcaactactgttttctcctaattttttcaattgattggtgggttctctctatctattttcattgattttgtgttgaaattcatcacaacagcaagaatttgagtgtgttgcttaagcttaatgctctttgatctctattatttgatctccaagaagacttgcaaagggaaaaagtattaaggatttgcggattatgggaataggagacattaagaaagaagggaaaattaccatttggaccctgtggtatgaagaatctgattaattagttcttttagttttaaaaaataaaaattactttaaaaaatctattgattaattccttccttaattttagccattgcaaaaagtctaaaatactcccatttgcaatggcttggcctagcagcaagttttggttaaaacattttataccttacccttagcaagtcccaatatttagttatgcaatctgaaccaaaaacttagattgaactctgaattttgcatctctgattattccatttctttcttatttgatgctcaggagaaggcagctttcattttctgtgttgaagacag

SEQ ID NO: 43964 - DNA, 389 bp, Manihot esculenta
  Intron number 1 from transcript cassava4.1_000389m (locus cassava4.1_000389m.g) derived from phytozome v7.0 (chr-ID scaffold01374; pos 48801 to 49189 reverse strand)
cgctctctctttctctagtttctttacaaaaccaggtaactcttttctctttagatatattgttttttaattgctttatcacatttactttgctttcatttcttgcaaaaaccctattggagagcctataaatgggctcttcagatctgggatttttagtttgattcttgtatatattgtgttggattagagatcgattgtctttgtttaaatttattctcaatgggatacgaaattctgttttagggattttggtttgaattcgttggctgattgagtatgtgattgattaaggtgattattggtgtttttgctgtgttaatctgttttgaattttttgttttgggtttttggtgaatgtagggttttgtggctgagacttattgaaa

SEQ ID NO: 43965 - DNA, 869 bp, Manihot esculenta
  Intron number 1 from transcript cassava4.1_010884m (locus cassava4.1_010884m.g) derived from phytozome v7.0 (chr-ID scaffold12088; pos 24660 to 25528)
tggtgcttcccggagaaattcaaagcgacccaaatgtgattttctcttttttactctcccttttcttgcgtttctctttttaattgagttttatgtatgcgggtttttcttgttttgcttttttactgtttttgtttataagataattttggaatacgattacttggttttatttttgaattctagttagtttagatacttcaactaggtgtgccatgaattctgctttagtaaggtaaatttgttagtaacaacttggatcgtgtttgctagagcacaaaataactatgaattaagcagcaaaatactttctttttctatataaatcataatcatgcagtgcaattttaatattttctattttatttctagccatctaaatccatgcctatttaagccatcatagtcatcaatctatgtgaaaattgaaagcagcatgtttcaattagtaggcatattgttaagtagattatcaagatcacccatttttccaaagctaaaccgattcctaaattggatgtgggagatttttgaaaatatattacacaatagacaatcctttcccagccctttaaggtggggagcaaagttaaatcctcattatgtttcctagggaaaatttctggtagctatgttcctttcttaggatgttcaggtaattatgttacgtgtttggatgatggtattgatataaaaacagaagaggatgataaattattgaaaagcattattttttttcatcgttcttggagcaattaggtcacaagtcctccgatttttttttttctctaaaaaattttttgaagtacataatgttattttctcttctttcagattcaaggtttacccaacaagaacttccagcttgt

SEQ ID NO: 43966 - DNA, 651 bp, Manihot esculenta
  Intron number 2 from transcript cassava4.1_015759m (locus cassava4.1_015745m.g) derived from phytozome v7.0 (chr-ID scaffold00621; pos 40163 to 40813 reverse strand)
aaaatcttcactcaagtccactcctgctaagggtgtgggaatctatctctctcccttttcttcttataatttgtttgtgttatttgattcttagaacattttttatgggtataataattaagtagtactgttcctcctttgagaagcaggtcttagtattcaacccatgatctccattgtgatttttattggtttgccaacaagaagcctgtttgtttctcatatcaaatttttcttcaccaaaaagaaaaaaaaaaaagaaaaagaaaagaaaagcattccaacccccccaaatcccacttccgagtttggtaaaatttcattagaatcttggagcttgatgttcatgctagttattacctgtatctttccctcttgcttgtgttgtgggcttgtgacaataaatattgattgtcactatcagtatgcttccaacccatatcttttcaaggagaagagttgcctccaaggacatccattagacatgtcctgcattattatggctgcattcttgtgctaattcttttatcaacttatcgtttttgcacacatgcatgtttgtatttcttcccctttcttgtttattggttttggatcaaaatatctcattgtttttaaagcagtatttgtatttctttgataaagggaagg

SEQ ID NO: 43967 - DNA, 939 bp, Manihot esculenta
  Intron number 1 from transcript cassava4.1_003964m (locus cassava4.1_003964m.g) derived from phytozome v7.0 (chr-ID scaffold02538; pos 354214 to 355152 reverse strand)
ttctttcattccagcaggtaattgtttattgtttcatactattaccttttaatatgattctttggttgtgaataaaatttcattgctctatatgcatgtctacaatctggatattaattggcaagaaattacttgcatttttgttctaacacatgattttcttggattcttttagggttttaaagcactctgtttttcttctgctttgttaacatcaataatattctcatcattgaacagacatatattattgcatcgcctttcttatgtcaattctctgcaccctacctggaattatcagttatgtgcatgtgctgtttatctggtattgctatgaactctaaatctctagtcttcgtctttttagggtattgttggccaattctttcaagttttttatttttggtttttatagttggccaaatattcaaatgctggggattgttagattgcatactattgtagtattgtttaaagactatgttgcttagactcggatataggtgttaaaaatgggtacatatccctatgtctgacttgtcaacttaattatagcctaaacagatgattaaatacaactaaatatatcatccaaaatacaatcaaataactatttttttctaaatacaagctctattaattatgcatgaatatgtcactcaagtgtccaattgcacaaatatgtgtcagacacatattccatgttgtatcccatcaagtgtcgtgtcgatacagatacggcatggcaaaatgaaaagtcagattatcagaggtttaagatactgtattgggctgtttgaagggagtttccccctcctatgatctgcatgcattatgtccctaaaagaactaatagtgatcaacatatatggaatgcctatcatgcttttggtatctttttcctccccttttttcttatctttccttcttgcctcgcag

SEQ ID NO: 43968 - DNA, 528 bp, Manihot esculenta
  Intron number 1 from transcript cassava4.1_029921m (locus cassava4.1_029921m.g) derived from phytozome v7.0 (chr-ID scaffold09702; pos 236602 to 237129 reverse strand)
gtaagtaagctttttcctcctagtgatttacttaattgtttctaattctatgtttttcttgtccttttccctatcttgttttgtttcccttctccattatgtagatgtccaattcttaatatcaccttgcatcggagacggcatgatgtccaatatatgacatcctatccaattctatcttttatgttattcatatttcataacccatttgctacttcacatcaaagacatgcttcacagaaaagaatcaatatatctttaaaatttcagtgtatccaatgtccataatactgagaattagataaataattaccacggtgaggaaggaaaacaagtttttaggtttttctgcaactgttttgggttttaccatatataagagcaggatggaagttttttctttttctgttaaaattgtaaagcacgattttggttgtcttgcaaggctttgctctctttcatagcattcattttactgttgttttaacctaatgacatctggatacagtatacaccagcaattgatat

SEQ ID NO: 43969 - DNA, 849 bp, Manihot esculenta
  Intron number 2 from transcript cassava4.1_005304m (locus cassava4.1_005304m.g) derived from phytozome v7.0 (chr-ID scaffold04251; pos 271652 to 272500)
ggaaaccaagttgcagtcatctgcaggtttaatttctttcttttttcccttccttgtatttgttctctgaggtaggggattactgtattgctcccaactgttaaattattaacaagtaccaaatacccagcaaagaacgtacatagctgagaatgtcatattgagtagaattgcgtcctagttctttgcagtaggggcgtcttagaagatataacattgcatgagtggctctctctttcaagtttatcaattttccagttgggaaattatgcaaaggttatcgattgataatcgtcataagtcttgtatagttttttggtcatccttccgtggtcgtcatcatcatcaaagtaaatacataacagcagactgcaaaattttcaaaggcatagataaattctacattctacgatagtacccggcatgtacattttttaagttttttttttgggtgggggtgggggtgggggcatcaaggtggtcaatttaattggctgctacctctctgtcttctaattctgttaagaacttttgcttaagtttagtccccattttgtttgctacatagtcagctcactctaataccagagagtttgattgatgaaattctcctcatgaataagttctactatcatccatgttgaaagtgccagtgttgtagaccaattggttgcaaaaaaaggtgttacctttttggtaattaagagggtgggaaattgccacattttccctttcctgtgtcaaagactctgtgttcttgtcttatttactacacattgctatttacatgtataattttctctgcatgatgcagacatcatttctaggtccattttcagctggaaggtt

SEQ ID NO: 43970 - DNA, 677 bp, Manihot esculenta
  Intron number 1 from transcript cassava4.1_004017m (locus cassava4.1_004017m.g) derived from phytozome v7.0 (chr-ID scaffold06407; pos 36495 to 37171)
gggagacgaaaggtaaaaaactagcaaggcattgtattttgagctaatgtctccattttcttaaaaaaaatttgttctttgcgccccttattagttgcatttatgcttcctgaccaaaatgatttgttagtacacgtttttctgtcatttaggtgaagagaaggagagaaaaaagagaaactggtttacaacaaaaaaaaaaaaaaaagaaagagaaatgacttttaataatctcttcgttggaaataaaaggaacttcttttcttggttagtttgctgttttttactatattagaatacagaagcttctaatctggggcgatattgttgttggttgattgtttaggccatgttttattcagttttaaaaaagaaaactttctactttagttgaaaatgtgctttcccagacaaaatttgtcccatgttcatgtatttctggcaaattaatcccgtcattgtttgacgttttcgcccaatttattagtttccctcattttggcagaattctgcagtcccattttctatcataggttaagcaaattaatttttttttttcctattcataaatggttttatgctgtgttcttcattgcatagtagattaatttttgtatttgttattccatatgttgaatgcagtgaattttctgatatatttgatttggagcatttca

SEQ ID NO: 43971 - DNA, 757 bp, Manihot esculenta
  Intron number 2 from transcript cassava4.1_004788m (locus cassava4.1_004788m.g) derived from phytozome v7.0 (chr-ID scaffold09880; pos 781533 to 782289 reverse strand)
aagacaagcttaaaaactacgaagccattgtgcatgtacgattcctaatatcaatccccacccttttgttttgcatcatcttctattttctatgtttttttttctgtagttctaagctttcttcaatagaggtcttatcttttacacttaaggattttaaagtaataatcacactttctcatgttaggatcagtttttgtcttttacaatgagcatcctttgtatctttttgttgtactgaaagtggcaatatctgccaggatggtctggcttgtgatgaacaagtggatggttgtgtaatgagtatgtaaccttgtctagatgggtgattgtatttgttgagttttgattggtcgcatctccatttggaacactttcaagtttgtttgtttgtcacgtactttgataatttccaataattcaacgagatttagtggcagaaccacatttaaggatttctcgtagttgagcttttgggtgggtgcaactgataaaatgcagtccttgttgtcctttgtttatgttgagagacaggcaagcttcttatgttgatggagaaacagtgctcatggttatttaataaaaaatgtgccatcaaacctgtggatttttactgggttcctttgtcactgaggctagtgattgcttagattacataaatattgaactgttagtgtcttctaatttcccttcattatagtattctagtcagtttgcgtgatgtagtctcaagcaaatttgaaattaccatacagga

SEQ ID NO: 43972 - DNA, 706 bp, Manihot esculenta
  Intron number 2 from transcript cassava4.1_030562m (locus cassava4.1_030562m.g) derived from phytozome v7.0 (chr-ID scaffold05745; pos 126334 to 127039 reverse strand)
caaaggttagtgaaatactggctttagataggcacattttggatctgtggatgttgttgaatgtacagcaagtgtgtttttctatgttgacatgatgcctatgtgatgtgtccaaattcaaaatgattataattaagagctgtgttcgtgccaaactatgattatttcaatggctaaatgttcaatttcacaccaatacttattgagaaattcaatttagcccgttttcaattttttttctccaaattaaccaagaagtttcaatttaagctcaatttagcttaaaaatgagacattttcagccaaatttcttgatttcttgatttaatccaaaaatgaagaagctcatttcttgattttcttttatcttttgagctaaattgaggttaaattgaaacttttgcattaaatttggaaaaaaaagttacaaatgagctaaactgaacttcccaatatgttcaggggtgaaattaagcattattccatactttcaacaattatccggtgtagcaattgaaattaacagcatgcttttgagaagttaagccctaatgaatattgaataacttgataatataatctcacatgagcctataatcaattatgtgtgataaattattgaggtgcatcaactgactgggattctccaccatataattttggtaaactcacaggttggcaataataatcatatattttgctgggc

SEQ ID NO: 43973 - DNA, 618 bp, Manihot esculenta
  Intron number 1 from transcript cassava4.1_005074m (locus cassava4.1_005074m.g) derived from phytozome v7.0 (chr-ID scaffold09880; pos 476328 to 476945)
ctcagtggctgtcacttccagataccatacgactggtatttttcttgtttctttgatttctctgaaacataattgacagttataaattgcttgtaagttatatccagttgatgctatgaatgagttattattaaagtgatgatcttaattagattgcattgttaattaatgtgtcaaacggttttgttgccggattaattagttgttttgaggaccacgatttatttagtggagaactacactttttttcccggttaattgttggtctccatttcaattacaacatgttatttttagctttgcctatcagcgtgtatgtatgtgtccgtctccccccgcaagcttactccccttaccaagtcctaataatcatattttcttaccgcccctgtgtgcatgcctcccacctcttatccaggtttggaactagcctaatgtgatattccttttgagctaacaactttaagatattttttggcttaaattgcaatttaatttcttccttattttttttgagattgtacttcattttaacttccatttcttcagatgtgcagtatatttgatttggtattgttataaactattatacttgagtgtaggtgaaatctttaattg

SEQ ID NO: 43974 - DNA, 713 bp, Manihot esculenta
  Intron number 1 from transcript cassava4.1_015207m (locus cassava4.1_015207m.g) derived from phytozome v7.0 (chr-ID scaffold07528; pos 369374 to 370086)
gattatgtaagtacatccatagttgaactcctcatatcttagctaacgcttgaattttttagcttcacttttgaagttaatcgttgttcatcctttctttgatgtttttctgctgtagtttagctgtatcactagttagcagcctattttcagcgattcttttttcttttttcctgttcgtatttgtagataaaggtggtagctcttgaattgaaccaatggtatgtcaatagttcatctttcatccaaacagcaatacattttttttctggcacttaagtggacttcactcacattgcttgttagtcaattactaataacgaatttttgctatgtgggttgcattttttaagtatatcacatgctttaatcaaagttctctcagtgttcatatatggtatacaaaggactttattcccttcttatgttagtggcaaatagatgattgagataattcttcttttgttagtttgaagagacctttataacttggaaagctgctttggccccagaattttatttttaattttattgattttttcttgtcagtttcttgtaataatatctctcagtatgatttgagcgttatttacgtgacttttatcctttcttggtcatttaaccttcaagtgttatttagatcatctcctttgcatacctgcctccatttgtaattgattttgtcttctgtgatccaaggagcaaggtgataa

SEQ ID NO: 43975 - DNA, 559 bp, Manihot esculenta
  Intron number 1 from transcript cassava4.1_010963m (locus cassava4.1_010963m.g) derived from phytozome v7.0 (chr-ID scaffold05434; pos 42665 to 43223)
gctttcagggcacccctttatccaatcgattgaaggtatgatttattttacattggttgattttccgagagaattcatgaagttgaataaagataatgctttctgttaggatttgaaggcttatggtgggcaattgatttagttgtttgcattatgtgaaattttagtctgtagtgtaggattttgttcttcagccacaaattgtgttcaactgggcatctgattgtgaataatggattttttccattggttctttatgatagtgttttttcagcattaatatagttgctaatgattcagttctatgcaaacagtgaaccgcattggaatgcttagaatattgcattctcacgacttctattgtcagctttgattgctgagttatatgattatttagcttttccttgttcttaaagcagatagtaatataaacattgcttcaatttatatagctttctgtggttagtatgctattcattttgaggactacccacaatttaacaatgaattaaaaccagtaacttatttttgatctggtttggccaggtcattcagggtg

SEQ ID NO: 43976 - DNA, 393 bp, Manihot esculenta
  Intron number 1 from transcript cassava4.1_012633m (locus cassava4.1_012633m.g) derived from phytozome v7.0 (chr-ID scaffold10424; pos 39076 to 39468)
gaggtttgctagtttattaatccatactccttgacctgtgatttcaaaatggtaaaggtattaaaaatgtacttaattgtcaatggaaatgatcactgtgtacaaacagctttcagcatcaccttcgtacgtgcatctatgcaggcatgtgaatgcttgtatgtccatcttataagaactcttgtgccctgtgaaaattttttggttcttgcctgatttgaaagttccctttggaacttgaaagtcttctggaaaagtttgaagggtttcctttgttttctttagtactcttgctatggtgtaaacgttgaacagcattgtgtgtttttgattgcataacaaattagcaaggatgcaattcttttctgctttcgcttttcacttgtaggttta

SEQ ID NO: 43977 - DNA, 831 bp, Manihot esculenta
  Intron number 1 from transcript cassava4.1_010694m (locus cassava4.1_010694m.g) derived from phytozome v7.0 (chr-ID scaffold05280; pos 924175 to 925005 reverse strand)
aagtctctaattgctggtggagttgctggaggagtgtaagttcttctgctgttttcttgttctctctgttttgatagatctgtctcttgttttaaaagtttttatttttttatgtcttcattagtttgttttccttcatgttatttggttagtgatttctactcttgctatgatcgtgcgtcattcaactcttttctaggtttttttttggttattaagttaacaatatatatattttttcaatttagttctaaaagtaatcgttacatgtaagaaatcaaggtgaattgttcaacttcaatattatatctgcttacttcggttgcttgttctatcaaggtgggttcttttgaatatttgataaccatttcgttgttttctgtatcccctgttttttcttcctgatgatcaagaagcttttactcgaatttaatcaaactttggttaaagtggaatctgcaacttcagttattaatggactatgcttgcagaatcttgtgaatgtatgagacacccctccccccccaacccccaaagggaaaaaaaagagtaaactgtaaattcaaggttgagtttgtgaactggcatccattttcttcccttgtattttcttgtactactattgtgggaatgcatggttatttggtggaaggttcttcctgttgtgtgtgtggtttagtaggaattactactgcctcattattaaatatgtaaacgtgtacttggctttggcctctgaattcgactgtctgcaatttctttattctaagtgcatgctatgtaatttacatttcaggtcacgtactgctgttgctccattggaaagattaa

SEQ ID NO: 43978 - DNA, 603 bp, Manihot esculenta
  Intron number 2 from transcript cassava4.1_016748m (locus cassava4.1_016748m.g) derived from phytozome v7.0 (chr-ID scaffold06918; pos 52950 to 53552 reverse strand)
ggacggacgagcctggtacttcatcagtccattttacatccatttcaatgaattgcttcaatttctcagcctttcacattgatgggttcttagcttagcacttgatattttgggcgcttatatatatatatatatatttgatgtataatgttgattgatatggtttggttaattggaaaatttatgatttttcatcaggtggaaaatatttgtatatgattgtagttttgtgtttgcaacagccaaggtccaatagctttcatttcagaagctggactattcttctcatggttttattttttattgtttaaattgattgatatttttatcaccagctaggctgttacataaaatttgccattctaccttcaaataactctctttatctctctctctttaattttttaatcttaacattatagatgattatagggatttaccaatagattgaatgctaattcctgttctgccatacattttcgctgtagattttacaaaatcatatagctgtttatgctcttcgttttcagtgaatcatttttaattgctattttgattttgcctgcaggaacttcagcctgtcccagaggcaaattttattgc

SEQ ID NO: 43979 - DNA, 706 bp, Manihot esculenta
  Intron number 5 from transcript cassava4.1_004727m (locus cassava4.1_004720m.g) derived from phytozome v7.0 (chr-ID scaffold07859; pos 169667 to 170372)
ctttggttgctgcagcaagggctgggaaatccaaggtaattatggttttgccacattttaatgcaatttattgtcttggtattgtgtcatctagatataagaacctagaatgcttgtctcaacatgataaccacataattttaattacgtcactttttctaaacttctcctctcaaattgttttgtctgtgtgatatgctaacgaaaggaagaactaacagttggcatgctttaaccaaatcgtttctcttataatttacactggaaaggcatgtattaaatgagcaagtgaaattggaatcatttggagtagagttaggatttgtgaattctgcatcaagactaggataattttgatctacactttaatcaaagcagaaaaaatagatccaaaattttaggagctgatgattccattagagttacactagcaataaaaggaagttttcctgttttcagcttataaatttggatggttaataaagtccctttggttgatttacttaagagtgaagctcagacttcatttggagtttagaataaaaattgattctgtgccatcagattatattatctactctcttttgcaggccaacagcaatgcacacagttgcatctgctgatgtgcaagcatgttaaatttcttccattcaagctcaatgtttcgattttctttgttttttcattgaacagttcataataggtg

SEQ ID NO: 43980 - DNA, 494 bp, Manihot esculenta
  Intron number 1 from transcript cassava4.1_023399m (locus cassava4.1_023399m.g) derived from phytozome v7.0 (chr-ID scaffold05865; pos 55177 to 55670 reverse strand)
tataaattgcaatagtttggtgagaaaattttccttttcattttatttgatatgagtttctacgaaaataaatgctccttttgtgccttgattagctagagctttacaggatggattgtcctgtgatcaactgtgattaaaagaacatttatagttttctgaaagtgaaattaatttaataaatcagttttgttgaagagatgaaaataaattttggtttggtgttaagagtagaaatgctatgtcttgaggatgtcttcgagcaaaatatgctgtattattcatgcgtttgaggctcaattcaagtgagtattatggtaaattgccatttttttgtaggaattgactaattagtccagcattatttctttctccgcatatgcttatgagcttaacatttactatgttggaaactgcatagtgcttgtcagtgcattattttcagcttgctggctattatcctaacttgctctcattctggtagggaccacaat

SEQ ID NO: 43981 - DNA, 992 bp, Manihot esculenta
  Intron number 2 from transcript cassava4.1_002015m (locus cassava4.1_002015m.g) derived from phytozome v7.0 (chr-ID scaffold11581; pos 987082 to 988073)
cttaccgcaaggtatcttcaacttcagcaattctctcacatttctagttcctactgtccacgatttcagcgtaattaaacgtcaattttaggagcttcctgctttcaatttaaaaatagatgcatgataggcaattgccggtttttaaatggtttagaactgcccttttgacattatccttgcagagcttagagtgcaatatgggaacttttgacaattgaaaatttttcagaaggatagaaaaaaaattccgtgcctgtctttaagggcctgtttggataatggtttcccatgatctcattaatgtatagtttccaaggtattatttccattgtatggttttataatgtattgtgttttacacgttcatggttatataaccaatacttgtttgttttaattgtgtagtattgatttgaataataataaaattacctaaatatctttattcatttttgtatacaatttgattactaattcttcacttttaataatttaatacacattttatatttattctaattcataaagagctgtccaatttttttaaaaaatatatttaataataatatgatattcacaagactatatattaatgagtgattattaggttggagaggttgatttggttagttaaaaataaataattattgtagtaataaattagtcatatataaaaatatatgagggcaaaagaagaaacaaatttttttataacaatgcaaaacagtggttaaagaactcttgagttctcgtggttctataaccatggaatttaaccactaaaaaccatacaatacataatacaatcttcccaaacatggttattatggaacaatatattatataaccatagaaaaacatcacccaaacaagccctaactaaaatagccttactaactggatatctggttgcagtagcgtcaaaagatgtgcaaataatattcttcagcgagctgttaaatgggtcacttatgcaggtacatttccag

SEQ ID NO: 43982 - DNA, 158 bp, Manihot esculenta
  Intron number 1 from transcript cassava4.1_011466m (locus cassava4.1_011466m.g) derived from phytozome v7.0 (chr-ID scaffold07859; pos 473656 to 473813)
gtcttttgctttgaacaggtttgtttttcttcattattaatctctctctttctctctcccattaaaaaaaagaaaggaatggatccttaattaattaaatttgaattaattatatgtgaacagtgtgctacataaaggaacaagcgagtttcaagaca

SEQ ID NO: 43983 - DNA, 1063 bp, Manihot esculenta
  Intron number 1 from transcript cassava4.1_012537m (locus cassava4.1_012537m.g) derived from phytozome v7.0 (chr-ID scaffold08359; pos 1623020 to 1624082)
ctccgtttttgcaactattttctctacaatatcaggtatacctagattctctctttgctttgtttgtttgatttcacttcttttctcaatttcttatcctcttataactcagatcaatcaactttggtttttttgctttcattgttttcatcgtagagtagtccaaattttctcttcttatttatgcttttgattgattttgcatctactttgacttttagatgcccttttgttaatactttcatgttgttggatccttttttctcttctacctctcactctctcttcttttgatcccttttactaaaacttcacggattcctgcgtgttatttctgtttggttggtcttgaaaattgacggtggaagattttccagcgtatgcttcctttctcctcgtttttttttttcttctaacaaacagaaattttaaatccgccagttttagtgaagtcctagtagatgaagaatttttggtatagtatctctgaaatagcgagatgactcttgtgtccttgttttttcccccctttttcttttttaatatgattgatgattgtgtttttggtttgctttgtctttttgttcctttttattctgttttttcaaattgtgccataatacctcaatagttcttctttttcaatctcaaccaagaaggggatgggggtatttcgctgctgatttattaacttttcactatttctttggttttcccgtgtaacttttcatacccttttgaagttcatccagctatttcaactattcctgttaatgatttttgttctgtgctagttttgttgttttatataagcttattttgcctatttatctatttatctccttgttcgtttggtttttccattcatggaattgtcttgttaatcctttacaaatttttatcaaaaccatgatgggaacttttatgtcccttaataaaacgctctggaaattctgtgtagttttattaagtcagagtaaattcaattctaacacagtctcacatgttcatttcttcaacttctgcaggaattttaactgattattaatcaattgcttgatca

SEQ ID NO: 43984 - DNA, 755 bp, Manihot esculenta
  Intron number 2 from transcript cassava4.1_012537m (locus cassava4.1_012537m.g) derived from phytozome v7.0 (chr-ID scaffold08359; pos 1624589 to 1625343)
atcttagtcgggtaagactttttttttttttaattacaaagtgtaaattaacttgaacatttaaactatgtaaaagggagagaaaaaaaagaatattcggaagtgatactttgaatttcacttggatattattacctaaacatatgcactttgctggtgttaggaaagctgtttcaaatggcatttgaaattctccgttatgcattttgttgaaatttgtaagaagcttgattctgtttcataccagatctttgctgtcagataatcaatccttgcgactcatagaatatgtgtatatgttatttttcattgaaatttttttgcctttttttttcaacccatggttataacttataagagatgctacaattggtttgaataaatttgatttacatggatgttgttgatttcaagcaaatcttattattgttgatcatggttgcctgcttgaagctgatcagtttcttaatatttatggagtttattctttatatgttgattatagatattgttgaactgatgacatgacatcagtgtaaaactcctttgttcctattagagtagtattcagccattccttgtttggcataggaatacttgccttctggctttgcaattctttgccatatatggatacatgttatttcttggtctttttttttcccagtctgctcatttatgaagtaaaagtaacatattcatggttgttttgattctgatttcagggagagaagcttctaggaagtcttgggggc

SEQ ID NO: 43985 - DNA, 610 bp, Manihot esculenta
  Intron number 1 from transcript cassava4.1_012656m (locus cassava4.1_012661m.g) derived from phytozome v7.0 (chr-ID scaffold09426; pos 28064 to 28673 reverse strand)
ccttcaatcgcaatttggggctttcaactttccaggttattactccgttgattgcttccctctttctaagatcctcgtttaattaggtctgattcattctattttctgtttcgattttttttgttttctgaattatttttcgtgttggtggattctgttttcagggtttttagcatatcctttaaaaagattgtttctttctcctagttgtttgatatcagtagttattttgatttgtaaaagctgctgctttaatttctcaattttcaagttcgatatgcagatctgttcgcttccctcgtgattactttagttgtctatttgcgcatatgttccttgaccttttctcttccgcacaagcttctgctattgatatcgtttgttatcacatggagctgaaattcgatatttatgactaggtttttgtacatgtttttcttggtggaaagtatgtcaaattgatcaccatattttaaatttgtttgtcatgttaatgtttattttgcattatatgatggttttgaagtcatttatactggttacaattactgctgaattgtttaattttccacacttgtaattgaaatgttctattctctgcagcttgaaa

SEQ ID NO: 43986 - DNA, 156 bp, Manihot esculenta
  Intron number 1 from transcript cassava4.1_015647m (locus cassava4.1_015647m.g) derived from phytozome v7.0 (chr-ID scaffold10780; pos 4780 to 4935)
aaaccatcttcccctggaaccaccttcatcccttggtattttcattagcattcaccctcatgtatttatcattatttgtttttatttttattaaattcaatttttaaaaatttccaaatctgttactgattttgatgtttttcttctctaggtacc

SEQ ID NO: 43987 - DNA, 427 bp, Manihot esculenta
  Intron number 2 from transcript cassava4.1_015647m (locus cassava4.1_015647m.g) derived from phytozome v7.0 (chr-ID scaffold10780; pos 4963 to 5389)
ctcctggtttgttctttcctccttttattttcttattttttcaatttcccccatatctgtgttgtatcttccatttgtaccttctcacaatctcacattaccattttctagtacgtttctgttcgactgatgcttgcttggattttatttccagagcttgttgctatgccttattctgcttaatcaaatgatattgcatccatattattgacccatttaccgtgagtttcagacccaatttcaagcatgcaaggatagacaggatctgttaggttgaaagttctatgctactattattaggcagtttaaaaggggttttaaattatgatcgaccttgtagaaatccgttttatcttgtggttcaattagatataacaaaattcccctctccacaaacaaataagcggcttacatccgttattgcagg

SEQ ID NO: 43988 - DNA, 385 bp, Manihot esculenta
  Intron number 1 from transcript cassava4.1_026615m (locus cassava4.1_026615m.g) derived from phytozome v7.0 (chr-ID scaffold06688; pos 366521 to 366905 reverse strand)
ctgtgcatcggtaagtgggactgttttccatttgatctgtttgtggtattagtagaactgtaatgcttgccaaataggtttcacattgggatgaaataatagctttagatatcttaaagataacagcataaaaaaacagtgcggaggcatcaatacttggtctcctatattcttttctatacatatgtttgatagactcaatctcaatgctgcaagaaactttaacaattaagtttgagtaagggcgtagaggagggagaaagtgaggggcagtattaattttctttaaggtgtcattttatgtgagataactatttggttttttgtacggtaaattggtgtctgaccctttatttgttctttatgttcttcagttattgcttac

SEQ ID NO: 43989 - DNA, 1008 bp, Manihot esculenta
  Intron number 1 from transcript cassava4.1_008872m (locus cassava4.1_008872m.g) derived from phytozome v7.0 (chr-ID scaffold06791; pos 123947 to 124954)
tctctcttatcttctccctctttaagcagccaccggtaccgtctctttctctatttattttttttatgctattcttctcttcttcctcttgctctttttctttaagaaatgttttattggatttggctatctggttcatcttaatagcgtaattaaaacccatcattccaaaaggccatacataaatttaatggttaatgatagaggtaggattttaagatgagaagcttttactcgagttggtgatttcacaagtgccacttcttactgttttccgcttggatttccactgaaatatgtaccataattgttcaaagagcaataaagggtttagggtttattatttctcggtattcagaaaattttaatgggtgcttaagattgaaagttggaaggaaaaaaggctatagaaaatggaatatgaccttcccacaactttgctctaatggcaacccatctctattaaaagagacaaatatgatcaaagtgaagggatcaaaccgtgagtaggagcatccactttttatagtgaatccaagatgacccatttagataatgttgctactactgaaagttaccctcattttatgtaatttttgtagataaagatactgggacaaatataattcatgatgggtttctgattctcttaggggcacttcggaggtttctttatgttctttctatgtaaagaaaatccttttgttgatagatcattatcttaagagaaaacgggtgtagggtagccctaagataaggaaattaacgtacttctttctttcctggacaggttttgcctgataagactagctcctaatgggtttctattgacttggagtgcaacattgtttagcttatacttctctttttacgtctaccttcgcttgtaaattaattagtgggtaattgaacatgctctagttttatgataggtttgcaaggttgtaaatccttttctttctcaacatttcaggattaatcaagcttttgttcacttgcattcaagtc

SEQ ID NO: 43990 - DNA, 937 bp, Manihot esculenta
  Intron number 2 from transcript cassava4.1_021771m (locus cassava4.1_021771m.g) derived from phytozome v7.0 (chr-ID scaffold07873; pos 126504 to 127440)
gttgcattagaaggttcgttgttaaacatcacattggttaaaatttatactgcagcttatttatttattaatttttaaaaaaattacttgtttgtttatttttttaaatcaaaccgagtgtatttatttataacattcaattgtgatggagcaaaaaataaggagataatcaatattggcaatagatcttcgcatatgtttgtgccgttttgctaaggcacttgatgaattataacaaatgatacatttttgtgatcatattttaatatgctattgaattagttgcttttatttaatcatcttgtgtagaaattgaccttattgaaccccagataaactgaatggcagtgagtggagaaggtcttgataacatttgtaactgttgtaatttaatactcattttcactcgggattaatcagagaagggatttattgagagaattggatctccaagtacttcaaaagaaacagtgggaaagagtgaggatgaccatgggctcattaacaccatatatagttagcaaggcacccgcaccaccgttgcttttttttttccctaatcccacttaaatatatacaaaacatttctttaataatttgcagtgatcacaatataatatttatctttctatgtgttccagcattagcatatacttatattaacatgctaacttattcattagctttcaattgcatattatccatgatataatctatatggctaactaaaagatctaaaaaaattctaaatgattagtttgttcctcagtggaggtatcactttctatattgatctttcttctctctctatatatagttatatacattcagcattccttgagtttcagtctgttgtctctatacaatctatgctgagtcctttgggggcaatatttttgtaggtgtgacttgcattcaggaactactgagacaattg

SEQ ID NO: 43991 - DNA, 350 bp, Manihot esculenta
  Intron number 1 from transcript cassava4.1_031250m (locus cassava4.1_031250m.g) derived from phytozome v7.0 (chr-ID scaffold04890; pos 148078 to 148427)
cggcaggtatttttattttctgccattaacctctttaggatgtcagttaatgccgttttgaaaaaaatctttttgtgatttggtgagaaatggtttatcattaatatatttatgaacgttgtactcttgttgaatatttgagcttggtttctctatctgaaaaactgggtgtgtgattttcttacggatttctattttgagaaactaatgtataaagtttttcaattcatcgaagaaaaactaaaagcttggtgcatgtgaaacattcatatacattatcaacagtaaagcaacaaattgacaacagcataagcatctcactaccagaactccattccgattgtctgcag

SEQ ID NO: 43992 - DNA, 615 bp, Manihot esculenta
  Intron number 2 from transcript cassava4.1_031250m (locus cassava4.1_031250m.g) derived from phytozome v7.0 (chr-ID scaffold04890; pos 148892 to 149506)
cttttcttctggtggtgcctcgactgaatcagttggtgagtatttcatcattttgatatatctccaattcattctaacttttcgcttctgttaatgtttgagttggctggccttctctacatgagtttgagtggtctgatgataatgccaaattcaaactcatcttttctccctatgaatgttatttaaattctccaatgggcaatggttttcaactcttttcagcttatgtatcctgaatatggctgcttgttacatagaattggatttcttgctagggctgagcataaattagttttaagtgaaaagctgaactgaaccgattgaattcagtttttttttgttaggtttttcagtgttatgatttggtttcaattttgttttttgaaaatattcgatttttcagttcaatttgtagggagggagagaagtctaatattaaaagaaacataatgcaggtgatggaaagttgctgaactgatcataagaaggaaagcaccctaatttaggctgctagactatttatgtaatgtatattgcgatagaagaaggtttcactagtaatataaagtatatctttccacattgctgcaggaacatccgacaactccattg

SEQ ID NO: 43993 - DNA, 455 bp, Manihot esculenta
  Intron number 1 from transcript cassava4.1_004898m (locus cassava4.1_004898m.g) derived from phytozome v7.0 (chr-ID scaffold03581; pos 1089208 to 1089662 reverse strand)
tgctaaaattttatctcaggtgattatttttcctatgtgattagacaatccttttgatattagcgccaaactaatggctacatgattaatgctagacttttcctccccttatgtactcttttttattttccatatttaaatatgcatgtgtgagatggtttattggtcattcattttcacaatttgtagttagattaatagctgtttgtgatttgaagtcctatgtaaggtgtttttatttctctctctctctctctctctctctctctctctctcttgaaaggggatttcatatcaatttctaatgttgattgctcaaatttaccttgtcattgttttatttgtggttttgtggcttaaatttttctcacttcttacatctttcctcttctgtttatctgttagtaatgtggctcatgtccttttcattgcagtttaacaggggcaccagtgca

SEQ ID NO: 43994 - DNA, 715 bp, Manihot esculenta
  Intron number 1 from transcript cassava4.1_026144m (locus cassava4.1_026144m.g) derived from phytozome v7.0 (chr-ID scaffold09136; pos 53466 to 54180 reverse strand)
ctggagagtatgcatttttttttttttatgattttatttttctcattaatcgaattattattattattttcagaattattttttgatattcaatatctgaattttattagaaagcaaaatcttgatgggattaaatcatttttatgtgttattatgtctaaggtaatacatattacaattaatgtaataagaatttaggaattttttgttttggaattatagattcattgaagaaatgatatttgcgagatagggttaatagaattttgatttctattatcttatgtgttttcacattctaatatattatcttgtgtgaaggaggaagaaaagaaagaaagaaagaaaaggaaattccaatttatttcgctttgctatgtatttctactttttcttattttttattcagaaaaagaacagctgatctttatgatctgtattgtgtaataataaaaaattgatctaatttacagaaaaagtaaaaaatataaaatcaagaaaatttatatatgtttttgtatgatatccaaaataaactaaataattacaatttaatcgtatagaattttgataagtacacttattcaatatttatttattttaaattttcttgaaaaaatttgtagttcttatattaatcctctattaagaaactgatatcttcaaattacaaatttgatatttttgaaatatgtttgtagatatcaatccagac

SEQ ID NO: 43995 - DNA, 293 bp, Manihot esculenta
  Intron number 1 from transcript cassava4.1_008069m (locus cassava4.1_008069m.g) derived from phytozome v7.0 (chr-ID scaffold12004; pos 651618 to 651910)
ggttctctgctgtgaagaaagctctcagtcccaaggtttgttggaaaattttgattttgtctctatatattttaccttttaactatttagatttgttgattatctaaaattaaaattgggtgcttctctatttaactagaaatccaaatcaaagaaacaagagaagaatctagatccagttgattctaaatatgaagaaactaccttacttgatgctcctgcccctccacctcctcttcctccccctatagaagatgtgaaattaattgaagctgagaatgaacagagcaagc

SEQ ID NO: 43996 - DNA, 564 bp, Manihot esculenta
  Intron number 1 from transcript cassava4.1_013363m (locus cassava4.1_013363m.g) derived from phytozome v7.0 (chr-ID scaffold08359; pos 320677 to 321240)
cccctgtgagtatctctttctacacagttagcgttgtatctttggtacaatggtagccacaacaaataataaacataatttgtacagcagaaataatatttggttgagtcacaaatggaatgctactcaaaggttgcgttttgatagagcattagaaaaccgatactttgaatttgagtttgttgctctgcttacatatatgaagatttgaacttgcataagggaagttaaaaacatgcttcgaccaaattcaagagggagctgtttcaaatccattcctatctagttttgatccgcatttatgaattttgttttcattaaccaccatatcaatctaactaaagaaaatctatgacgcttgaacctcattcaagtccataaccatacatccctttatttcaaatgcccacctattcgaacagatcctatatttttctttctaagctgttgtttgttgttctttactttcataattcataaatagaatttatgagttccatgataatatcttatctgcatgtattaacagggagatcctgtgtgggctatcagtaaggagactgt

SEQ ID NO: 43997 - DNA, 854 bp, Manihot esculenta
  Intron number 1 from transcript cassava4.1_006147m (locus cassava4.1_006147m.g) derived from phytozome v7.0 (chr-ID scaffold09434; pos 33283 to 34136 reverse strand)
ttctgggaattctggaattgctaaaggttcacagggtaatagcttcttcttctttttctcctcctcctcctcctccttatatctgaatttgttttaggtgggtttgttgggatattcctttttacctgtttctgggctatgcttttgtgattgatggatgtatgttttgtttgctagtcatcgagtaatgtaagagtactcgatagttgcatctatttttatttgtgatactcgaagcttatttgcactaagcattatgttttgccaatttctgaattataatttctgttagcatttctgaggcgtgcaagtagtttctatggatgctcgtttgtgtgcgttcagataagatggagggggtatttgagaatggttgaagctggagaacagaatttaaagttgtgtggtaccagtatgtggagtaaatatgaacttcctttttgaggcagttagcatttggccaaattttatggtttggaattagtcatttgggaatagaatgttaatttttgagtttttgacaatgtaccttgaaattcgtaagttactatagatgtcaattggatttgatgaatggtagaagtccttgaatgtctccaaatttcagattttttgcagacttttcggatttctgtgtttaatgtgcctattgttttcttacgtgatcacatcagtttgtatactcactgaagaacattcactgaaggacattgttttgggacctattaaatgcataatttatcttttattctgtttaatttccaagatgtgtatggaattaaaaccgttgcacgtgataattaattgatcttttgctgaatggtttgtttgaatttattggcagcgtgtcctgt

SEQ ID NO: 43998 - DNA, 244 bp, Manihot esculenta
  Intron number 1 from transcript cassava4.1_001646m (locus cassava4.1_001638m.g) derived from phytozome v7.0 (chr-ID scaffold04182; pos 169017 to 169260 reverse strand)
atttttgtagtatatctcagacaaggcaggttctttctctcaccctctctctctctctctctctctcctgtgcgaggggtgaagctatttcccagtagttttttgagttctattgtttctgtgtcgtccttcaagtttcatgtcttctctttgtgcgtgtgttttttttagctagaaaatgacgcctgatctttttatttattattattatttttgatatctgtatgaacttttcaggaagcta

SEQ ID NO: 43999 - DNA, 201 bp, Manihot esculenta
  Intron number 1 from transcript cassava4.1_008429m (locus cassava4.1_008429m.g) derived from phytozome v7.0 (chr-ID scaffold04324; pos 344358 to 344558 reverse strand)
gccaaaacagtggaggtatttcttttcttctcatatctatatatgaatgattgttagataaacagcaagctttaatttgggtgtcaccgttatatgattaagatttgtttgttatgggaaagaactcaaaggacttctcatttgattctcttttgttttcaattagcaaaaccggaggaaaaaccaattccagtaccagaa

SEQ ID NO: 44000 - DNA, 940 bp, Manihot esculenta
  Intron number 1 from transcript cassava4.1_030464m (locus cassava4.1_030464m.g) derived from phytozome v7.0 (chr-ID scaffold06548; pos 120845 to 121784)
ttgttgctgttcttgaaccatttgtgactttggtatgtgcgcaaatccatttctaagttgttgtccttttagctgtgatgattcatttgtacagaattgacaatttgcctaaggatggatcacttgatatatgattttgtggttgaatttagacaaccctgatcaaaatctgttaaaagggcagtaaaaaatgttgcatcaaacattatgaactcgtgtctgtctagatagattcgattttgtgttcattgatcttgatgtttcaaggttttaatcatgtcttgattattgtatgatgaatcgcagaaaagtgattcctatgacccagtccaactagtgtggaactaaggcttaattgttgttatttctgtgtatgataagccctttccttgttatacattgttaaagaaagctaataaacacgaaatttttgactcgtgagactcaaagtcacgtcctaaagaccgtgaaggttcgagagttgtttaggtaagcgtgttgtagtaagtacttataaaccttgtcttgtttggttcaaatagattatttttaagaggggaatttccagaaagtaacttaactaacttaggagaagtaagttacttccctatactagggaagaaatgctttcagcttgccaggaagtgaagcaaaaatgcaatcaaacagacacaattttaacactttttgggagcttgaagttttccagttgaattatcctcaatcaaataaggcctaagaacacagaattgctacccatctttacttctgtagctacagcttttcaagccgctttgcatcaacttcattatcttcagttcatgacataagcagaatgctggttcttctcttgatttgcttgtttgctacttgattttgaaactggatctgggttctatttgcagagtggcatagcagtagtccctgtggtgggaatact

SEQ ID NO: 44001 - DNA, 995 bp, Manihot esculenta
  Intron number 1 from transcript cassava4.1_031738m (locus cassava4.1_031738m.g) derived from phytozome v7.0 (chr-ID scaffold03581; pos 1438385 to 1439379)
ctcaactctatttcggtccttcctcctcattcaaggttttattctgcttcgtctttctttctgtttgttttctcagaaaatgcacgaaatctcaacaacaccaagctctaaaaatcttcatatttcactccacagagtcgcgcgattttctcatggttttgttgagttagctttccagattttagaaattcgaatagcgtgaaattaaattatcatcttctactttttctcggttttctgagctgccaaacatcgaccacaagcatgcattttgcttctcttgagattttgcagattttggacatgatttcaatcagtatgatcagattgtttgctggaaaataaggaaatttcatttatttctaacataagtttgtcattatagaatgtttcactctcatatcgctttaatagttcatagcttagttttctcccttcttaatttcaaaattgccagacataaaactgcttatccactatgattcttctcacctgtgtctttgtctcttgtgattttttaactaaggctgaatgctacctaatggtgcgaaaatattcagaatttcgagctttctaatcttacgagttcattatctatttctgctgaaactataaagaatttctatgggttttaatttattttattcagttttatcaatgtaattcatttttcttctccattatttccccttaaccgattaaaagaaatgagaattacgtatcagtttgttttggactattcttgtgtatgtgtatttgttgggatgtaaaattgtttaccgtctcccatgtgcctacactttggctcctttcatgccgtaggaagagagacaaacattttgaacttggaaactttgtaatttaggacctgagacttcagagaatgggtagagaaagttggcgttactttttgaattccttgtgctttgtcatttactctgttgtattaatgatataaaggagattgagtgctataccaagcggactacaaacat

SEQ ID NO: 44002 - DNA, 1057 bp, Manihot esculenta
  Intron number 4 from transcript cassava4.1_014061m (locus cassava4.1_014033m.g) derived from phytozome v7.0 (chr-ID scaffold09492; pos 87018 to 88074 reverse strand)
cctggtgatccagcttttctgctctgcttcatcaggtaatatattgattaatcctaataagttgaatgcctcttttaattggtgattagatgatgtttttctttctctggccttacattttctttctccttctctgggcactacagcatttccaggaaaatttagtataacatcttgttactatttgtttgattttagtttttttttttttttttttccgttggccttttgattatcatcatcagtgattgtttatggagggcatttttcagggtgatctctctctctcctttttttttaaaggaaatttaaggctacttcaactatgtgtttacatcaaatatgctttttccacctgggtctttttaggaacaaacccccaatgccataacctttaaacatttttctcaaatttcctattaaacaccatggaatttcaaaagggtaaaaaagaaaaataaagattttcaaaaccatagaatttcaatagagttaaaaaaaaaagatgtttcaaactttttttggttgcttttcagaactttgatttttcacatttcaaccattaagcaactctctttccattgaatattaagccaaactatcttaaattcctttatcaaagacatctaggcagggtttgctctgatgggtatcctcaattggccaggccgtctattatttagttcaaacaattatgttagcatgcattagtttctattctcgattgcagggctgtgaattttttgagcctttgatctacagaatttactaagcctgtcttcttcttaaaagctgtgtattactggtgcagaacctctgaatatatattgaccactggaaatattttgagcaatatgtagtatcaccataatcaagcattcattgtgggagtggattggtttggggaataattttccctccgaagtgcaggactgttgcaaatgaagtctacttagcttatttgtcatctccattttaattccaatccttttccatgttttacaccttgccatatcttgtaggggcagtcctccatccaaagcaaaaattgaagccc

SEQ ID NO: 44003 - DNA, 691 bp, Manihot esculenta
  Intron number 3 from transcript cassava4.1_015898m (locus cassava4.1_015898m.g) derived from phytozome v7.0 (chr-ID scaffold04182; pos 78951 to 79641 reverse strand)
cctagagaggtattttctcctcttactataatgttgtagggccttttccttttttttttttttcatataaaagttaaaaaataaaatttatttcctgcctcttaaatgtgtttttttttctttattttttttaaaaaattctatgattattttttaatctcatatggtggctatttacatgaatttctacctctcctttgttatctttaaaaatgggatttcatacttgtctcatttgaggctattcttgctctatttgagactttatttgtttttttttttattttatttttttccatgggcttgaatatttcttcaacttgtctatcaatccacttggtaccactgggtttttcaccattttgccccttttctaattatcttttcttcttttattttcttttaattttaatcttttaattgtcaaaaaaaagcattatatataaaattaaacatacatgattgtatattttccttgtattttccttttctttcttttctttttatgctttatgactttggttttggtcccaccaccactgctacaccatcattgcttctctgtggataactctcaaaattagtgtttttctttcgtggattttgtttttgtattgacttggattcttttttttttatttatttttgattttcagataaccggagaaacagtaggtgaagtgaagccagt

SEQ ID NO: 44004 - DNA, 642 bp, Manihot esculenta
  Intron number 1 from transcript cassava4.1_015898m (locus cassava4.1_015898m.g) derived from phytozome v7.0 (chr-ID scaffold04182; pos 79838 to 80479 reverse strand)
ctgctattgagcttggaaaagaattggtataatgtcttcttcttcttctctgtttttactttcctttgtgatttcaactttagaaatttctttcactttcccgttttttttttctttctttttttcagcttcttaaacttgtttttatctgttttgatttctgattcggactctgttttggttcccctgtttttgctctgtttctggttttgttttctagtgctttcttctatttaccttttcaattcttgattagaaaccacaataaaaagatttgttcatttcttcctttatgctttttcaagaatttcaagtaatgtttgatgaaataaatttgtcatcaattttgtctgctttggtttcatgtagcttactttgttttcaagctttgagccacattttacacagtagtcaatttgagataatttaaaaattctttacttaatcaatattgaaaaaataaataattactttattttcattaattatcatttgggttttattaaaatacaataactaaaatgtacttcaatgggtacttcatcaaagactggtttgattttttttttaatagtcttcttttgactttttgtttttttttttaaattctttaacaggtagccagaaatattgatctggttt

SEQ ID NO: 44005 - DNA, 671 bp, Manihot esculenta
  Intron number 1 from transcript cassava4.1_031309m (locus cassava4.1_031309m.g) derived from phytozome v7.0 (chr-ID scaffold07035; pos 729794 to 730464 reverse strand)
ctcgtctcggcaataggttgataatctctcaataatataacgtgttattgatttgttagtgaaacagatgatcatgcatacaaaaagcattattaaatttctagcattttgctgttttttattaattaataagcgtttggtgtggtggcttcgtcgtggacacgtcttctgccgccttatatttacataatacgtatagtttcttactgtaaaactaaacttttgttttctatggagaagaataatgcagttcagaagcgtttgacatggtgacaagtatgtacatacatagtctcgaggggaaggtgcacctaatattttgccaaggatttgattaattatgatcgtgatgatttatctgtatttcaacaataatattttaaaccattttcttgttatattgtttatattctgaactaactaacaagcaagcaagctatagaagtttgtcaacgagattaaaggaagttgtacaattaatgatcccatcttggtgtttagctttccaattattattttccatattatcctcagttttcttgagattcaattaacaaaaacatttgaggttcagcattttcttgaaattcttggtatctaattattcaatatttccacttccttttatttgcttaggtggtccaagattgctgctaggttgcctggaagga

SEQ ID NO: 44006 - DNA, 574 bp, Manihot esculenta
  Intron number 2 from transcript cassava4.1_005511m (locus cassava4.1_005511m.g) derived from phytozome v7.0 (chr-ID scaffold09231; pos 76852 to 77425)
caccaagctcaaccattcacaagcaagcatagagagtatccttctgatatggatagcctatttttctatttatatttctaatttgtgtctgataattttgttggattttttagtttttatttttaaaaatgattaagcatcccttttcaaattattttgttaataacatatgaaaactctcttcttatgatatctccaaatgaagaaaaggatgcactaacattgatcttagcaagcaacttgaaattctccttgcaacattcgctaagataaacactaagttttactggcttgtgggatcctctgcaactttacacttttaattgtgacacttgtatcatgttcttctcattggttcgaacaaagtcaaaatttttgtttggaaattttgcttagtggtttgtttttctcatttatatatggtcacagctttagcatgtggactgtatatgtattcaataccttttgtcgtagtaatcatctaaatcctgcaacctcaagagattgtgattattttatttctaatttgcaatccttgatgtgctaagctttatcacattggtgtatttttcat

SEQ ID NO: 44007 - DNA, 689 bp, Manihot esculenta
  Intron number 4 from transcript cassava4.1_019241m (locus cassava4.1_019241m.g) derived from phytozome v7.0 (chr-ID scaffold03410; pos 108170 to 108858 reverse strand)
aataaacgtaagaataaatgcgtcatctaacttcatgttgtctttaacgttgatacaaactatggctaattgaatgtgtacttgtaatggttttcttacgctatgtcactcgaaaggggtctctgcaaaattatattggtacttaacataaaacggagggaataaatgttaaattccaggaaatgccaaaaggttgggcaatagaaaggaagttgaacttacatttgaaactttaatccgcaaatcaagcgttttcacagctttccctgataattgaatctcacgagccaaaggtaccccttctcccaaactgttcacacagcctcttaccgagagagctgcagccgcattgaggatctgatactatatttcttgaattatcacgcgtacaaaacacacaagcaggaaggaagctctcaaatcaaaatgggttgaagaagcgcacaagtgcatcagcaatggatcctttctccctactcgttttggtatttctgcattgtaatctgggccgccacttcgcaagctgtctaaagtgcaacgaggaatgccaattccactgcattgtaaacgttctcagtttatcagtaccttaaatcatcattcatccacacttccgcaaagatgaacatactttagcaccagtgatgtattgcaaagtgttgaatctactcctttttatgtacttgcag

SEQ ID NO: 44008 - DNA, 935 bp, Manihot esculenta
  Intron number 1 from transcript cassava4.1_002156m (locus cassava4.1_002156m.g) derived from phytozome v7.0 (chr-ID scaffold02431; pos 251619 to 252553)
accagtctcactacctccggttctatatccgataggtacggttccttccatttttatctcttcttgtgctgtcgtgctgctgctttaagattctccttatcgtctttttgcttggtttttcatttaatctccattttcgtacctctcctgctgttttcttaactatgttgatcatgatattacgtgaatgatctaagactctgttttgttttctcggttttattaataaaaaaatttttaaaaaattgcataatctgtgttttcgcacgagatctggtgagtgtgctactcatctctgtttggttactcattcgtaaagcgcttgttctttagtgttttatcggataaccatttgttttttagcattttcagggatattggtttttgttttgatgcttgtttttgctttttgagttacagatccagtgtgttgtgcttttgagatttgtagatccggggttgaatctctctgttatttttttttaatatatctttttgattgtttgagatatagattcatgcatagaaattacgcaagctattttcaattgaggttgcttgatgattatcagatcatgctctgttttgtgtattagatctgtatttcttgtccataaaaaattcttatgtttgggttcatttcattgtttccacatcggaattctagatcttagttaattggatttgaatttgttgtgtagttcattcattatctcataacatgtttgttaacggttaaataatttttccttagtgttttaatacagtatgggtctgagtcttctccaaatagtttccttgacatgtccagcattttagtttttagcttgtgtcattataagggctgtggttgcatattacaaatccatttatgatttaaattttaacggagaaaactgaattttgatgttgttctgttgtaatgaaacagagca

SEQ ID NO: 44009 - DNA, 1022 bp, Manihot esculenta
  Intron number 1 from transcript cassava4.1_017970m (locus cassava4.1_017970m.g) derived from phytozome v7.0 (chr-ID scaffold00206; pos 113262 to 114283 reverse strand)
tagtcagtgttgaaattaagaagaaaaagggccaggtttggttccatatatcctgcactctatttgtttttctcatgtgatgatgccacttggagcaaatcctgtgcattaggttggctttctggttttgcctcagtgtcctcataacaaaactaggtgactgttatctgctaaatttatgtctgctctttgtgatgaagaaagggtcaggaatgagttcttgtttttttttgatgaatcgtctgcaaatccttattttcatttttttgtttaaatcacacatttattcctggaatttattaaagggattgaggtcatccatatgattctcctaatcgaatgtcactattaagtggctaacgtttggcaaatagatcgcagacttctttgatgatgtggcttccatttggttgttggtgtgcattgtttagattttgactccatttgtctacccacaaatatttccagcatttacttgtgttcggcatacactggaaaatgttttgggaccatattttcaaggaaaacaatttccatttcaagaggatttcttgtttcaaaaggacattgtgtctggtttggttccattatttaatattgtttttcttgcatatgggaagggcgcaaaacgaaactgcttcaaattccaggttctctatttaatttgtgcctgtcatttttgcgttaatttttagggtttgcatggcagtactacacggcattgttgttagcaagtaaaatccttacacctcatgaaattatgaaaagccaatgtgatgtggagagtaattgatggtcattcacattatcttcttctccaaaatagaaataaaaagacctgctatcctgaattcctgatgctttatttgcacattttttcctccatatctctgaaatatttcaacatcctagagctgcttgtgcatgcatctttaggaccctcttttttacctcacatgaaaatatttatagagatactccaatggatggcaatgtcctaatggtgtattctgctgtgcagt

SEQ ID NO: 44010 - DNA, 988 bp, Manihot esculenta; identical to SEQ ID NO: 43709
  Intron number 1 from transcript cassava4.1_008410m (locus cassava4.1_007892m.g) derived from phytozome v7.0 (chr-ID scaffold10305; pos 155148 to 156135 reverse strand)

SEQ ID NO: 44011 - DNA, 753 bp, Manihot esculenta
  Intron number 1 from transcript cassava4.1_025854m (locus cassava4.1_025854m.g) derived from phytozome v7.0 (chr-ID scaffold02431; pos 403161 to 403913 reverse strand)
atcattcttaggcttcataggttgctcggtaacaggtatatacacatgattaattggattatggattaggaactgtctgagctaattaattaattttgtttgtttatgtcaggctgcaagatctgctgttgttttactgatttgttataagttacagtattttcttctttttcttctcccctccttctgttgctttttagggtttcttctgtgcactctccctcaagacacttttgagcatcaatattacggatattcttagaattggatcagttattacattagggtttctgcctttttcctttttttttttcctctttgagatgggtcatcagtttgtcacttttctttccatatctcctcgagttttccctttaagatattataattttagattcttaagccttttcaaatcatctaaagttccaaaattagcttctgttgtagagtatcatttcggttcttcactgtctctctctttttctgagtaaaggtagatatattggtaggtaagagtttatggtagttcaagaatcccatggacatgatgagatatatttgcaatcgatcgagcttttgaatgtcaacttctgattactggttccaaaattttgaagtattaatcttctttttatcttgttttgtttttgaggtttttgagtcattaattgcataatcatttagaatttttctggttaatttttaattttcgcttcaggtggtccttgatagctgggaggattccaggacgca

SEQ ID NO: 44012 - DNA, 629 bp, Manihot esculenta
  Intron number 1 from transcript cassava4.1_016067m (locus cassava4.1_016067m.g) derived from phytozome v7.0 (chr-ID scaffold01045; pos 122214 to 122842 reverse strand)
gaggttatgatcttgcctttctctccattaaaattatttttcctcatgtctatttcagctaagaccttattaattgctaaatcacgtagtataatgctgaagtgctgtaaataatgatattatatgagtaaaatttctgttattagttagttcagttacaatgggatagttgctgttttaatctcatatcaagtattttccagatagagatatttggatttgattttgtacaacgactcccttgaatctcattgctgatatgttgagaatgtctgttcatataatttccactagtgccttgcaaatggaaccaatggtcattacttctaacatttagagttacaaaacatcaaaggtatagaagtagaattttgaaattctttgattttcactaaaccattataaattcatctacaagctactgcataagcttattttacaaagaattagttttaagctgtgggtgaataattaggagaatcagtttcattcgctacctttttagattctcattctttctgattccctatttatcctgttatttaattttagtggcttcttcacttaccattatcactgatgtatccttgacaggtttttatttgattatcaactgcgtgggttggtca

SEQ ID NO: 44013 - DNA, 797 bp, Manihot esculenta
  Intron number 2 from transcript cassava4.1_010605m (locus cassava4.1_010605m.g) derived from phytozome v7.0 (chr-ID scaffold06582; pos 492294 to 493090)
ccagaggcgttaccagtttttgtgcaactcaaactgtgagtgagggagcttctgttttgttcttatttttccctggcatatcctgtgttatgctatgtttcatttggcacagcatgatttatccatttttggttattaattgagatattcatccatggctatctaatttcaaacaaaggatgtatatcacaatcgagcagtttgattttttttttttaacattatttatttaagccaactaattgggattaaggcttacttgggttgaagagtattattgttattattttggttttctttctttctttttattttttcattttttaattttgggacagtaaggtagaaataaatgtgatttatctatataacatttgggaagaaatgagtgtttttttttatctatataacctaaactgccaaggggtttcaacagcgtgactagaagggaaagagcaagaaagtggaaatagaaaattatgatgtgtggacggggtagttgaagttttgaaatatttatttcttttctcattttttcttcccaggaatgcttgagcgttcttttattaatccactggaagaataatcatataatgcacttgattgtgcatattgcaaagtgttttggctttgacttctccacctaacatgtcatggtcaccacacaaaagttattataagcattcagttaactttgtttaatgaatccttcttcatgacagttttgattactatatactgaaattctcttgactgatccagggctcccttcaagaattaaaagataacggtgtgca

SEQ ID NO: 44014 - DNA, 492 bp, Manihot esculenta
  Intron number 1 from transcript cassava4.1_017440m (locus cassava4.1_015414m.g) derived from phytozome v7.0 (chr-ID scaffold09692; pos 337887 to 338378 reverse strand)
ccgagaccaacccaggaaagggtaccggctatcaggtcagttttccggtaaaatctttctttcccggaaaatattttctttttcatgcttcgtttaagtttattagatgtctagcaaaaatggggagaccttgtactaagagtagatgttgaaataacagagtataagtgattatgcttagaataattcattgactctaaggtttttccagttttgttctttaaatttgcaatttccagttttgatgtttgaaataataaagaaactgtgattatatttttacctttcagattgattggaatatgaatgaatttgatcttgaagtcccaacagcggtcaatgaattttttataagatttttttttctctgcaatttttaatcaatatttgtgtattgataagaataaatggtgaacaaaacagaacagaacagaacagaacagaaaagaatcatggaatcattcctctgttttcttggcatcacaggttata

SEQ ID NO: 44015 - DNA, 616 bp, Manihot esculenta
  Intron number 1 from transcript cassava4.1_022094m (locus cassava4.1_022094m.g) derived from phytozome v7.0 (chr-ID scaffold06825; pos 10814 to 11429 reverse strand)
gacattcccgattcttttctctgttgcatttgtctgtaagtttccctctcctcctcttccattcctttaattttcgctgctttcttgatttttcctcttaatttagaggatatatgtatattactcgataactaaggctgtgggtcgtggatctgagtttattcaaagcgttcacgagaccttttttgtccatggaaattgaattatagatttggacattattatctttttttttttggggaattttgcgcaagtgtttggataactctctaaatttgtatgaaatctgtgacaaatataaagtcctgggtaatgatataattgtaaatgaataatgaattcctcataatcgaaaaccgaaggtttttttttttatgttggctttgtgattagatcgattatgtgaattttcgtagctttatatatgtagctttaacgctatggcttgatgagggttgtggatgacttgtagtcttgattgtcctttctatttgttgttttatgatatgtatgatttatttattattatttctttaaattgatgctaaatttgatttttttttttcttttttggttttcagggatcttctatacaaacccatagtgctctgtaagt

SEQ ID NO: 44016 - DNA, 960 bp, Manihot esculenta
  Intron number 1 from transcript cassava4.1_032425m (locus cassava4.1_032425m.g) derived from phytozome v7.0 (chr-ID scaffold11287; pos 16276 to 17235)
acgagaacgaggtctacaaacaactgggtatgttttctttttgccttttgccttcctctgtatgcttgcatgtataaacacttgtttctttttgcctttttctgtttgaggagtagttattgccatattgggagtttgattttgatatgagtttatagttgtagcttaactgagatgggtttttaatttttggttaagatgccaactgttcgtcaatgattctcagttagtttctttgctgaccggttggttccttagaaagctaaaggtaactggaaagaaaattgttagaactttttcgtctaatttaagtccatctttgacttgctttttcactggagtacctttagaattgccttctctactgcaagttaactttgtaaattgaatgtctgaaaatacaagggaagtatgtgaaaaagcattaaaactagtctgtaaaaattgtcgcctttatttaattgtgtataagcaaaatagttgttgctctcgttaagcagattttttttgaatgattttagatagaatagtgcaggaggctaaagttttaatgtcttttcattagcataagcttgagcatgccatggaaatttggattgaactagcttcttatacatggtaccatagcctaaccatcaatatgtttctacacttctgaaaaatttcctcctttctgttgcaaatggtgcttttttatattagcataggagaaacacaaaagggaacttgaaagcatgctgttaaggcacatgttctactttagtatatcattgaccttaacagataattgtggctcattagtcatgtgaaatcttataacagtagattatgtaaggagcctgtattatgactctgcgacacctttgtacattctacagccctactttgcacttctaacttctagtcgagagttgtggtgaatttacttaggtttcttttcattgaaaaagaagattgaag

SEQ ID NO: 44017 - DNA, 873 bp, Manihot esculenta
  Intron number 2 from transcript cassava4.1_014830m (locus cassava4.1_014830m.g) derived from phytozome v7.0 (chr-ID scaffold05859; pos 636674 to 637546)
gcgagtgagtagtttcatacttaaaactttcttttaagttgccttctaagaaaattcatgcattagcatttcctttttcggatatgttttgccaatggtatatagtgattcaattatcagccttttgaaaactgttttgattcttatattcattttaactatctataattgaaggtcaatagtctatatagtagaagaatttatagggaaatgaattgcaaatgtgccttgtttagcttcaataatgaattcatagttaatttataattctacttattcacactggaagagaaaatatgtgctcctcttagctagcattaattcccatttatgcaacttgttcaactctaaactgtcttgatttttgttggcaacgtctgaggaatggaactttttgttgaagatattgctagtagactaaaatgctaaacctttgttattattacttctttgtgctaatctgtcatgaatatggaggaaaggaaaatagaaagtcaagcttatttcattaatcagatctaaacatatctacaatgatgttgtgggtgttcctttttcttttaatatatgacaaaatatttggggaggaaaagagttgtttaggtacttgttaagtgagctcatgtgtgcatgtgcacaagtgttgaatcatcaccattcttttcaatggcagaacacatttgattgtccatggaaataataatacaatggcataaacatcattattcagctagaatgcctcaactaagtttttgttattgtgaggttttttactttgaagatgctattgtcacgtgctagttgtgtgacatgagtgtagctattaaacgatgagtttataaatttcttttgcacaggcgatatttgagagat

SEQ ID NO: 44018 - DNA, 676 bp, Manihot esculenta
  Intron number 4 from transcript cassava4.1_032024m (locus cassava4.1_032024m.g) derived from phytozome v7.0 (chr-ID scaffold03115; pos 44040 to 44715)
ggaagcatacagtaagtctttgattatgtcaactggcttattctctgtctatctctgtagtataaagataaacattagtctagtacagtaatagtgcaataaaatggtgcaagtcttgtttaaattaacaattggcttatgctggctatacataagattttcccaatttacattttcttggggattagttttaaactttctaaataggaagatggtaaacttcttattagtaaaagtgcaaatgataacaagtactgtactatttcttatatattggagcatgtgcaccttatctttaggaacattcttgggtgattagttcttcaacaaacctattccctaggttttgttataaagggcttaaataagacaagttattggagggtgcatttttctgataagtgttacattctctctctctctctctctctctctctctcttcttttactcttttccatggtttttataacttggagttggagtgggaacattaagggtggtcaatggtcagctatcgtaagggaggaaatacaatcagttttcttttctaagcagcattcttgggaacttctttctggcttccagtttctctatgatactttttcttttacacagagttgagaaaatcctgtcactgcaggtcttcggagaggtggcagaagggcttgacacttt

SEQ ID NO: 44019 - DNA, 972 bp, Manihot esculenta
  Intron number 2 from transcript cassava4.1_003943m (locus cassava4.1_003943m.g) derived from phytozome v7.0 (chr-ID scaffold00560; pos 114545 to 115516)
gaggtcatctctctctaattgcaattgatgtaagtgtattgtttatatcattgttttctttacttatttcaagctaaagttaacactggtagtaccattgttctattcaattagatttcaggacttgttatcaatattgttcatagtggattggcttcttcttcttcttcttctcccccctcccttttatttagttctaaacagtactagaaaggagattccttattaggggaccacaatgcaaatgataaatacagcagttaagatactattttgccttacttgggcttctttttgcaataaatcagtagccttcacttcttgaattactcatacaaagaaaagctcttaccttggatattgcttttgtctttggaaaaaaaaaggtggaattagagggattcgtaagagaaattactagaagaatccaaaatattaaatcctcttttctcaggaagcaagtgaaaatccaaaaggcgagtggtgaagataattttgtaatctgcctctaaaatttttatagaaatgtaaattttatataaggtggtggtgtcaagtgtcatgggtcaaaaaatgtgaaacagaagcattatgcaaagcggagaggctataaagacatggaaagagatgggtaaaaatagtggtttgttcccaatcccatcgttgatagataacctaagatcttatacgcgattggcaagcttgttgttatcctcttaggtttaggcctgattgttggattacaattatgtgtttgattttgatctatttacatgattgaccctttccacatttgtgtaggacatgattttgttgagaacaactgtagttattttggagtactaactgatggaataaaatcaatgcttgacattttttttagttaatcgcaatattaaaattttgcaactgtttattttcttgaaatcttttgcaggaggctcattgctgtagtcagtggggtcacgactt

SEQ ID NO: 44020 - DNA, 718 bp, Manihot esculenta
  Intron number 1 from transcript cassava4.1_010966m (locus cassava4.1_010892m.g) derived from phytozome v7.0 (chr-ID scaffold05875; pos 106848 to 107565)
gcaaatacagctgtgctcaacagttctcagaaaaggtactccagctttttacttctttctctccctctgtctgtcgtgttttttctttttaataaaacttttgacaggatattcactcacatgttcaccttgctagatgatgtgtggtccatcatcattacattgtttgtttcttgtttttatgcttgtaatgtgttttctgcttcagtggtacttgttctgttcaaatcagtgcttgtggacgctcgttcaccacatcattttaaaaattttactacctttttttaactggttcttgatttctcttgagcttagtttggccatcaacagcttaccttttctttataattttttgcttttctagtaatcctttctgtccatgtctgctttccaaagtgatttatatcttatctccttcatcctgtttattatattggactttgtggtatacttcttaattgcttgagaaatgaatttttctatttttgtcttctaattcttgagacatggaactgcttgtggaacttgtgtagctgctatttccttgctatattcctacatgctttgttcttttctatttgttttcttttatagactatgtcctttacatcctatgtaacactaataatcttaagtatcacttagatttgttttttctgtctgatttaatcttcaatggcgtgtttaaaagcagaactgctcctggtccagttgtggg

SEQ ID NO: 44021 - DNA, 372 bp, Manihot esculenta
  Intron number 1 from transcript cassava4.1_025556m (locus cassava4.1_025556m.g) derived from phytozome v7.0 (chr-ID scaffold08359; pos 1661123 to 1661494)
ccaaccattaaaggtttctgcaaagaaacaaaaaacaacttctctgcttcaatctcttatttttctgatgaactgaataaaagccactttagaagagaatatattcatgaattttcttcacgctagctagctcatgtcatgtcaaaagttacagtgaaatcaccaagaaaaggaacgaaaaagtaaaagaaaacttttgtgtaactaattagttattggcagaagtagttcagttttcttttcagttcagttttcttttcagtttctttaatgatttctcttttttcttttcttggttttcaagtttatgttcgtttctgttttgttcaataattttgatgttctctgcatgttcaattctttcttgaagga

SEQ ID NO: 44022 - DNA, 512 bp, Manihot esculenta
  Intron number 4 from transcript cassava4.1_031822m (locus cassava4.1_031822m.g) derived from phytozome v7.0 (chr-ID scaffold08127; pos 92613 to 93124 reverse strand)
ctgtatgctcatttcacatcctaaacttctcaatgcaaatgtgttatcagctaaacttgcatcatctctgtttctaaaaggatactgtaatattttttctaacaacttatctgttgtccacatagttcttcactgattattattcatggctaggacatagatttggatgctcattgcttattggatactgacagggtagatttggtgttaggacctgctacagtcacaacccatcaggaatttacttctttgtttgtcttcacctctccaaattccaggaagggatgagacagacatcagagatgggcgaaatggtgtccattaaaaaaaataataactcaaccagcgcttgcctaaataattttaaatgaatatttgccgagtgtgatgtggagaattgctagcctttaatctatctctattttactttgagttcagaaccttcttcttttaggcttttaagttgaatatatacaggattctgacccagtgacttcgaccattgaataccg

SEQ ID NO: 44023 - DNA, 520 bp, Manihot esculenta
  Intron number 1 from transcript cassava4.1_000336m (locus cassava4.1_000336m.g) derived from phytozome v7.0 (chr-ID scaffold03942; pos 42824 to 43343)
ttaattcatcaaacatatttgagaggtatattctgtttatttttgtagatttcagattagtaataaaaatgatcaagggcattgtcttgatagtaattttgttttggggaaaattaccatttagttcctatgttataggaaaactcatttattagtctctcaatttcgaaaaatacattaaaatgtccctgaggtttattaaaagttaattttagccattaagtatcgcaaaaaagtctaaaatgccctcaatatagaaggattaattagtagattttttataaaactgaggaccaactagtaagttttttcaaattacagggactaaatagttaaatattaatggctaagattaatggaaggattagttagtagattttttaaaatctagagatattttaatgtatttttaaaatagggaatcaactaatgagttttcccataatatagagactaaatagtaaattcccctcttcttaattttgctgtcatttttttttgttatcttgattctttcaga

SEQ ID NO: 44024 - DNA, 786 bp, Manihot esculenta
  Intron number 3 from transcript cassava4.1_022023m (locus cassava4.1_022023m.g) derived from phytozome v7.0 (chr-ID scaffold12004; pos 749741 to 750526 reverse strand)
gccaggttattttctttcaactccatttctaaattagttttgtgattgcagttttctatgctaattgaccggttgaagccaatgagcgtgcataattttgattcatttaatattagatctaggtgctggtgtttcttattttgtttctataagcagatgattggcctatgttatggctgtttggatgtcagttgaattatgaaaaatatcaaggttctatttagatcttaagacactttttttgacattggtgatgaatattggactgactttgaagttgaatagttgcctatcaaaagaagatacaaataaaagaaatctcaatgattgtggagcatgttggattatcaagcccataaatcaggcagctgtctgctggaaattgcagttttctatcaagaaatttgaagttttcgggtgtttgtatggatgcacaaaaaactatcatcctgtgagttaaaaaaaaaaacaacaatgcatatcttagatggggtgattccggtgaaatgggatttgattgttgacttgaaagtttattggagtgagtgcaatcttctaaaattaaaaaatgaaccaagcttggtccttatgacactactccttccattttgacatgtatttatatattcattgtttgcctaaggccaacacttcataagtgtgcattgtgtgggagaagaacaaagcataaaaattgggcataaagaaatattttactagattatcaaatattctctgtttgaaatgcaataatttcaggtaacttgtggatcagagcttgctgtg

SEQ ID NO: 44025 - DNA, 676 bp, Manihot esculenta
  Intron number 1 from transcript cassava4.1_022023m (locus cassava4.1_022023m.g) derived from phytozome v7.0 (chr-ID scaffold12004; pos 750752 to 751427 reverse strand)
gattgagaagagccaatctacctcctgttcaagaggtgcatgaattacgaattgtctttctctgtttggtttctgagaaaatgaatcgatcctttactctcttttgttgccctgtttctccagactttcgtctatttgaattattttttccgctgtttgtgattctgggccctagtatattaataacattttctcagcaccccaacggaacctaatttataagaaatcaaaatttagaataaggttgttcttcttgttattcttcttgtgcactgtacggttgggattgggtagcctatgaagaaaataatttttttaagaatttgatatttttgattgcatattgttttcgttttattttaattttaaaagctagttaagctctcattttatttcaaaaaaaggctctcatttcttaattggaatccataaagttggattttaacgatttatgcaggtaggaaatgggctagcaatgcatctccaccatttgagcttttgataatataacaatgttctgattttcatgatcagataaaagaaaatgaaatgattttatgcatgtggtggattcatttccttagctgcaatgtaatggacaagatttcctgtaacaattttttagatttttttggatgttaattgcagaatattgacaagttggagaaagtaataa

SEQ ID NO: 44026 - DNA, 424 bp, Manihot esculenta
  Intron number 1 from transcript cassava4.1_009425m (locus cassava4.1_009401m.g) derived from phytozome v7.0 (chr-ID scaffold03299; pos 167327 to 167750 reverse strand)
tgcttcaatctttacgtcttggttctttatctcaggttggtttcttaatctttatactcaatattttcatgtgattttgtcatatagctaaaggggattgtttatggtgatatgggagtcaaattgaccatttatccttcttcacacagtaaccctgcttgttattttgatgggttcggctgtaaattttgctgatgatacatgttcatgtcgtcgtgtttgagttgttccgattatgtattaatatcatatatacctgttaatggagggcttggaggcaagggcaattcattagatcttgcagcgacttaaagaatgtcgctttgtttaggaccgtaggctttcatcttatctagattttaattttttttcttcctgcatgattgcagcgtggagcttgtatttgctactcgtcacaagctgc

SEQ ID NO: 44027 - DNA, 587 bp, Manihot esculenta
  Intron number 1 from transcript cassava4.1_030939m (locus cassava4.1_030939m.g) derived from phytozome v7.0 (chr-ID scaffold06698; pos 68107 to 68693)
ggcccctgaaacaacagacccatcttcttaaactggtgaatttctaatctttcttcattgaattcttccatattattttgattttcataattagtttcataaagcatggtttatagggttagattttttttttttttttggaaaatgaaaattttttgtctgattgccttgggaagtaattgaattaggctcaattaagctcatgtgcgttgtttcctgtattcctaagaataaaagattagaaatctactggttattaacttttctcttctattgtgaatgttttggcagtaagaatttatcggtcatgttggttcaaatcatttgaaatttgaattttagtttcaagttgttagatttagtttcattttcctctttcatctcctcagttgattcaattgtatggctttttgggcttctgctttccaggatgtttaaattgatcttcttcattttaagccttgtttaacttaaaaaaagtctccctcttttatagtacatctatatctggtttaatcaagtcagagaagttgtttccatatgattttttttttcatagtttgactggatttcttgtgctgatgaag

SEQ ID NO: 44028 - DNA, 600 bp, Manihot esculenta
  Intron number 1 from transcript cassava4.1_010769m (locus cassava4.1_010769m.g) derived from phytozome v7.0 (chr-ID scaffold09505; pos 127834 to 128433 reverse strand)
ccgctgcgtcagtcttctcttcttcttcttcttcttcttcttcttgtttgttcggttttggctttctttcttgtacttaataatgctgagttttgatttttttaaagggttttagttataatttgtgtgaattagattataattgttggaatgtaattgtgcaacaataagcttgaattgggtttacttccacgtttgatgcgcaaaatattgaaaaaggtcaattgtttgatttccattttgcttgaattggtcagtttgattattcttgctgttgcataaattgcgaattgtggttccgtagcctcaattggctcttgcttatatagtaatttgtgtatgttgcattgtaagaggtcgtgtgttctataaaactttcgttgtcattgatagagtagataattgtaaatgctgatacttgtgtttgtttatagttttagtaatttttcctgttatggtccttagttcaaacaccatctttatgctagtgtttgttaattgattctgtcaaggatgtagcttaaatttcatttgtaattcaactgataatcttatttataaacagtaataagaagaaaaagagaggtcagagagcagctg

SEQ ID NO: 44029 - DNA, 882 bp, Manihot esculenta
  Intron number 1 from transcript cassava4.1_007113m (locus cassava4.1_007113m.g) derived from phytozome v7.0 (chr-ID scaffold11297; pos 629696 to 630577 reverse strand)
cttcttcttgcttgctaattgtattgttgtttcaggtatttcattgattaccgctaattcacatttcttcattgccattgtttttaccttcttttttcttgcgagaatcaaaaggttgaatcatttgcttctcttctgggaatgtttcacctattatgctcttagctttcgccccttttcttgggatcttcaccttctgttgatacacagaaggaacatttccattatggttaacatttacaaaattgaaaaaataaagaaagctaagcgggtttgcggaatttggaactaaaatataaagtttggaaattgcgtgttgaagatatcaatatatcctttcttgtttttagttcgtagtttaacatccttgtctcaagctatagaatttcacttgatttctaggactatgaaaattctcaagcttgtaaataatagttgaaccgtgcttcttagaaatatttcaaatatacgtgtatgattctgatctcaggtcaaggatttaaattgaaacattgttagtgttatgctggtactgatggatttatttcttccgtatgagcttagttttctttacatttcctgttgcataaaacatttattgttgaagaaacccacataagaattcaggagagtttactggatccaaatctcttacatcttcgtatgtgcatcatatgaaatatggttatggtgagacagcttcatgcatctgtttctttccatggtctacttggctgggtggttttcattctttctttaatttagataattagaatctgatagacttaatgttatttacttgttggaaaagaagtattaagattttcttttctttttttgttaccagaaggctaacaaagcgatctttgggaagtttagcat

SEQ ID NO: 44030 - DNA, 726 bp, Manihot esculenta
  Intron number 1 from transcript cassava4.1_015678m (locus cassava4.1_015678m.g) derived from phytozome v7.0 (chr-ID scaffold05019; pos 48720 to 49445 reverse strand)
gtgtgctcttcaaatacggaccaaagcctatccaggtaggctatattagaatttggaatctctttgttttatcttacaatgatttctgattaattatctgctagaattacggacttgttgaatttttagcctaattttgaaattaatctttctaaatttgggcttcatctttatgtttcaactggacatagatagtgtgcttagtaggagatgccgcattagttgcgtggtttaagaggaattgagattagctccgttatcaacattgaaaagttttatgagtgtaatttgtttttctcaaattcaataattccttgcaattcacaaaatggtgttcagtgatatatttgcatttcttgttcttaattggaatagaatgcaaaaagaggaccgtgtcacattagctaaagcttttcatagtggaaagactgatctgtgagcactatggtcactcttcttgaagaattccactaagttgtttcttgtattgtaaccgttcttatttaaatctatggggttggactaatatcttaactgcatcatacctgtaaattcaagttatttccaatgttgtatttttttcccccttttttgtgaaagaaatgtttccatgttgctgaaattttgtatattgtcgaaggctatgcttttgaattggttatttgatatgatatttgaaaaatgactgcaggttgcatttaaaacaggtgatcataaacaacaact

SEQ ID NO: 44031 - DNA, 1027 bp, Manihot esculenta
  Intron number 1 from transcript cassava4.1_001578m (locus cassava4.1_001578m.g) derived from phytozome v7.0 (chr-ID scaffold04305; pos 22471 to 23497 reverse strand)
ccccgggttacccaggctccacacgctgcctgaaggtatggacatgtcggacttatcgccggagtaataaaactccgctagaattgacggctatcgtatttatatagattgattaatgtgtagtcaaatttattgagaaatttatttaggaatattttataactcaatcaggggaccagggccatgtcgaataactattcctgattgttagtttgtatatatatgtttgctgctggtagaacttattcttacgaaaggatctttatatgctgtgatgcctgtgacagtgggaaatcggagtttaggctgaaactatgttacttggtatttggatttctgcagtgagatataccaatttgtaggtcctgggttctcgaggttattcgaatttttctagctttcttgtttgattaaatgatgttgggacctcaattgatcttatttactgtgaattcatctggtgttcagtaaactcattgtcacttgtaccagttatgcaaaagagctgaacattgcaaatatcaccaactttcaaaattttctttctccattctgttgtgagaagaagatgatttttatgggtatgatgaaataatagatttcacaaagatttgagccaagtaattcttgtattatgaagttcttggggtagaactagccttctttgtctaacaaagaggatctttaggaacctaaatctagtgataaacaaatattgagaagatgatttctcccgactaacaaaatttaaggtaacttttttctttttttggcttcgttatggaccaaattacagagtgctccattaagagatggacttgattgcagttgttcacatctgtcaataaattcttaatatgcctcctatatccttgtcaccttggagaaggccattagctctagcttagtggcatgactggggatagtattttttccacattatttctttcttcttcttgtaaatttggaggttgcagtacttttgttgattaaatatatcatcctgtttcagtgaaggctgcaggac

SEQ ID NO: 44032 - DNA, 596 bp, Manihot esculenta
  Intron number 2 from transcript cassava4.1_011134m (locus cassava4.1_011134m.g) derived from phytozome v7.0 (chr-ID scaffold10954; pos 276127 to 276722)
taattttggcagtagcaattctgttcacaatctatgttagtcctgctgacttctccaagtatataattgtgtttttgttgcgtattgtttgaatctttgctttttataatgaatgaataactattagagagagcttatgctagatgtttttgttgcccatgcttttagttttactgatacatgaaacgttaagaagatgtttgaaacagaagaaaaactagatgtgcgatgagtgcatttattgaaaaaggaagatggaaattacagaatagttgtttaaatatctcttttacaactttctaaaactacaagagtctctcaacagatatttgagaattaaattgaataaaattactataaactattcgtaatgcttctattagtttgcctgatattgacccattttccgaacatctataaaagtaattgaaccgtgttgtcaagtattcttctttttatgtgtccatcatatgattccattgttcttttctccaactctattttctgccaacaatttgttgcaaaaaagttatccagttgtcacaattgttttcgatataggtattggtgcttcttcttcttacttcagcgcgtga

SEQ ID NO: 44033 - DNA, 582 bp, Manihot esculenta
  Intron number 2 from transcript cassava4.1_018520m (locus cassava4.1_018520m.g) derived from phytozome v7.0 (chr-ID scaffold05875; pos 266599 to 267180)
atcttagaattttgaaagaaaagcttgaacaagaggtaactaggctctttcattgttattttcagtttgttcttctttgaagtatcgacagatgctatacttgcaatatggcttcctcactgtttcctgtaatcgaaaatgttacgtgagtacacacattttatacccccctgatttatagtaatgtattccaaagaacttgcttttgatattgggatctgaggttattattttgagatgagtgaactattcttcagagtagcaaatgccatgcctcagggtttactgactcttagctggtgaatttttcttatgtaacggattattgaagctaagatgaatttgtttttgttgttaatgtatgcttggattaaagtgggtacacaactttagatattgtgtgcagttgtctggttatgcagattgtttgatgaaataacatgtttcacaggcatctgaaagtcttgtatggctgttagttggtaaaatacgctggcatacaagagtattgtgtgtatttgcctggtcatgaaaattatttgaccaattaataatgttttacaggcatctgaaaatcttggt

SEQ ID NO: 44034 - DNA, 571 bp, Manihot esculenta
  Intron number 1 from transcript cassava4.1_027656m (locus cassava4.1_027656m.g) derived from phytozome v7.0 (chr-ID scaffold02959; pos 220175 to 220745)
tcatattctgttctttctgtgagcagttcgggaaagtaagtttcctaactttctctaatgctgttgatatattgcacgtggacatacctttgcactgatttgtttgttatttcttgtttgtaatttgaaatatgaagtgcagacatcatcattaggtaagtagcaggcacctataaaagtggactgttagttctgaataacttctaatatggcatttaggttttcagctagttattcttgttcatgtttcggagatggatgaagttgcactgaattatttatttttctcctttttttttaatataacatggagtaaatctcctttactcaaatagtggtggctgctgcaaaggttattctacttatgttgtttttctgcatgtcttagctttttgcattgacgttttgaagctgggggtgcggggttttgctttgtcatcttctattcatctattagttgttttggcattcccattttggagctagaaatcctcgtggcagtgaagttactttctaaccacaaatgtcttttgcagatacctcgcaattgtgtggcctgatattccttact

SEQ ID NO: 44035 - DNA, 576 bp, Manihot esculenta
  Intron number 1 from transcript cassava4.1_000108m (locus cassava4.1_000108m.g) derived from phytozome v7.0 (chr-ID scaffold12794; pos 166077 to 166652 reverse strand)
gagaagagataaatcctcttggtgagtttctactctagtacattaaacgagagaactaactttgtagttttgtccccctgtttttaggtgtcttcatgttatgtccaatagaatttagttatatgcacggatattgtcaaaacgatcagttatgagaaatatttgattagtgtggtggatcgggtgatggtatggttctgaaaatggtgagcttgataatgctttgtgtaacaagtataacttagtaagatgggctactgaacagtgtaactaaataacagtgaagtcctgggattcacttttttgcaaaaggcgcttttctttggttggtactttcttgttgagactattgttgtgctattgtgtttgattgtccttctgggttaccttttttggaaacattgtcaatattggtttgtagaatgatattctgctgatttaactgaaaagaaacttagttttgggaagataatgattagttgacgtcatgcttagattcatctgaatcaactaatcattacttacatttgccttctatcagttacatttgcaattcttggtgagaagaccacagtt

SEQ ID NO: 44036 - DNA, 975 bp, Manihot esculenta
  Intron number 1 from transcript cassava4.1_006269m (locus cassava4.1_006269m.g) derived from phytozome v7.0 (chr-ID scaffold00206; pos 376933 to 377907)
catacagggcggtgatccaaccggcagtggcaccggtacttcccacttctttttcgtaatttttgcttctttagttatcattttggagtttccgttgaacattaatatctgttgcttggctattttacggtttcctaagttggggttctgttaatatttttattcttctatcgtgcttctgctagctgtatgtttctcttctgattgtgtttaggtctgattacaagttttaattatctatttcgatcgtttctttattgcaattgatgtttaagtgatggttattggatttggtactggctcatttgctcctcttgaagtgcgattactcctcgagaggtgaaattcacttagtaattcgcaatttatggaattttaaattgaatccagtgagttttttgcccatgaatattgaaattttactaatcttcagcaattatacaaaaccaccttgtcacttccatttctctggcattaacctgtttaatgttccagccctgctgttatcccaatattatctggatgaaagtaaactcaaaatcccgtgtctggaaaggtggtggtgggttacttgagaggggcaatatatgcttatttagaatgtaaaatactttttgggattgcatatgcaaaatcgataaggcattaaaataatcataaaaactatattacaaatatattaaatgaatttcaattaaaaatgctgtttaaatactttagtgctataaaataatattcaaatctgaaaattataaagattatagtaacataattattaaactttatatgactaggatttttcaattggttgaattaaattgtttgtattggaatgctaatattggttttccaaattgctgttaatccataatccagatgtatgatctggaagcaaattgctacaggtgtaacaatttctagtaatgtttaatgcatatcggggcttattaatatgtgcaggtggtgaaagcatat

SEQ ID NO: 44037 - DNA, 961 bp, Manihot esculenta
  Intron number 1 from transcript cassava4.1_012715m (locus cassava4.1_012715m.g) derived from phytozome v7.0 (chr-ID scaffold03542; pos 407878 to 408838)
gtggtcccaagaaatcaaagcaaggtaagtttttcatttttttgatagtgaaacctcagtgatattagtgtgagcaagagattcgaggctttatgtgcttttcctttgccttgtgaatgttgtcttgccttagtgtttggttaagtaattggtgaagtgtaagatgcaattattactctttaagtttgtttagttgctgaggaagtgtgataaaaaaagtgaaattgaagttctcgatcttattagattagctaattaatccttatgtaattgtttggattaatggagtttttctgtaatcttttatctaatataatggagagactattttattccaaaattattctctgcttgattgcaaggcatgcttttggattttttttccttcctgaatctgagttctcaaaatggaaatggagtggattttgaagtaactggtattttatgtatttgcttttcgtgttcttctcggtttgttgatctctttatcattataattgcacgggaagaggtaaaatttgtgaaaatgtaaaagaagcacaaaattttaaatttctgtatcttagtttttgaataatttcaatttgacccgggaagttactattaggttgtttctttttttggaaatcaaacgtataaaaagctgagttttgaaaactttccttttattcttctctaggtgaaacaaatccgtgtatttcttctctttgctgggcttcttgcgttaaacactattttagataacactatctatttgagcatttgggggtagttgactagttgtttatccatgtctgaaagttgtaaattttactgttcatatttcataaaaatatgagtaacattcactattcagagattgcaatatgacatcagatgattcagatcttattaaagatcaaagattaacaactcactcaaatcataactgagagaagttaactaattttctacaacagaa

SEQ ID NO: 44038 - DNA, 739 bp, Manihot esculenta
  Intron number 2 from transcript cassava4.1_006458m (locus cassava4.1_006458m.g) derived from phytozome v7.0 (chr-ID scaffold00510; pos 82190 to 82928)
gaagcagaggtatgctttttgcgctttttgctcgcgtttctcttttgctttttctggcaaacatcttaaccattattcgcttattcagcgttgttttttattcatttttgaattatattatattcactgcattttgatgcggtcatgtttcaattctgattcatttaatgaaagggaaggtgtagaaagatatgtactcaaccacttttctatttattggtagcttttattaatgcattcagtccttgagaaggtcgaggcactaagattaacaatacatgtacactggagtttggtcagttaggtgcgtcagtgaaggacggaagtatttcattgtcgggaaaagaaatgtttagctttctgtgaaaaagattcaggaataagtatcagctttatttgattactgttcaagataagtttcgggactatggaaagaacattttcatgtaagatacctcgttttaactaaacgctaaaccacccactttgatttatgaataaagtgtctacttgaaatgtttctgcatatcattttgcattatttattcaaaacttaaattttataatcatatctactgtggactggctttgttcagtatggtgtggattactgcttagatataagattcctttatgcaaatttcagacataatgtaggacctccatggtcctaatttttgtgttgccattgtggaactggacaggattatttctcaaagtggggtgacactggtgaagt

SEQ ID NO: 44039 - DNA, 644 bp, Manihot esculenta
  Intron number 1 from transcript cassava4.1_012539m (locus cassava4.1_012539m.g) derived from phytozome v7.0 (chr-ID scaffold12794; pos 2200323 to 2200966 reverse strand)
atctcagtcgggtatgacttctgttttccaagtctaaaataacttgagaagttaacatttacaaaaggaaaaagaagagcatactatagagaagtctcccatttcacttagattttcattcctaataacatgttgaaatttggtagaagcttgattctgttttgttacatcatttttcctttcagatgattgtcttgaattgccgaatatcttggtgtattaatcaactgatttacagatatgtttccattgataatttttttcgctttgatcaaatgtagatcaagttgatttacataaatgatgctgatggctagaaaatcccgttattgttgatcatatcctatgtctttctgtttaccccttgattgaaatctatcattcttaaatgtttatttagttgttctttttgtgtggattgttaatattgtcaaaggatggtaggacttgatggatgacattattgtagtgttctaccatttctcttgtggactaggaaatttcatttctggtggcttggtgatcatttgtcatctatggatatgttggtgttgtttctggctctctctaagaggaaaatattcatggttattttgattatgatttcagggagagaagcttctagggagtcttgggggcatttt

SEQ ID NO: 44040 - DNA, 367 bp, Manihot esculenta
  Intron number 2 from transcript cassava4.1_020170m (locus cassava4.1_020057m.g) derived from phytozome v7.0 (chr-ID scaffold04851; pos 422052 to 422418 reverse strand)
gttggacccctgaaggtaaattagatatggtgatacactcatgttttagtttatgctctgaatttcgagtggactagaattctttatccacaaaagatcaataattataattttaaattgaaagattaaaaccgaaatccgaaatgaattattgtgcttaaatgaaatttgggatgttctgtaatgtaaatcaaagatgaaggattgcatagttagttgagaggccgtctgttgctagtgattttcttttattgataaagcagctgccaactcttttcagattaatttagaagattatcttctgatcctttggaaacccttttttgtattaggtatctaggtaagtggggaacattgcacgcgtaga

SEQ ID NO: 44041 - DNA, 617 bp, Manihot esculenta
  Intron number 3 from transcript cassava4.1_019701m (locus cassava4.1_019701m.g) derived from phytozome v7.0 (chr-ID scaffold04616; pos 180897 to 181513)
tggaagctgagttccagaggaaggtcgcagaggtgagaatgctcatagaaaatctcattatgattttgtttgtggctttcaatgacagcagttcatgtccatttgcaatttcaagtaccagatgacttgcaacataatttcatgaaaatgcagatagttaaactgtgttgtagtgatcatgtttatgattattttctattttgatgcttggtggccttattctcttttcttctcgattaccatttagttgttgaaatatttagtttccatcaccctctccctcaactcccaaatagagagagagagatgcacacactccaaagccccttggcacataaccattatcagatatgtattatcagttaatccctttagtcgcagctatttttcttcatacacctccatttggctttcttttgcaatctaattttttagagttgcatttcaagagataggaggttgtgattataaatctgtaatcttttttcatgagttgcttatttacagcatatggcaaacttggatcatctgattactactttatctgcattgctatattattataaacgctgactcgaacatacccattaaacagagtagcggagattctggtgcta

SEQ ID NO: 44042 - DNA, 733 bp, Manihot esculenta
  Intron number 2 from transcript cassava4.1_017916m (locus cassava4.1_016194m.g) derived from phytozome v7.0 (chr-ID scaffold04137; pos 121660 to 122392)
ccactattttgtacaagctcaagcttggagaaattgtcaccaccatccctaccattggtgagcttccaatttcatcaaatcagttaaccttttacaatttatttgacgttttaggcttgtttgcttctagaatatctggtatttttttttttgtatgttttaaaaaatagactagataattcattaattgtttctgtttgtgtagctgatgcgataagattgctgcaattctctatagttccatgctggagttacaacacttctgttttggtgtgaagttaaaatattattgggtccttcacaagaaatggctaattaattttttttttcaaaagaatgaactcaaaagtgactactttaagttaaagtagaggcagtggttgaattcttatctttgcatttaatagatcaatatgatgaataatattgcttttttttttctctttttaattactgtaagttgttaagcttgggaacttatttcagactagcagttgaacttcatttaaatatatcacgctccaagttttttatttttattttttaaatttctgtgatagcttcttttctggatgtttatcatgcatcctactgagaattttaattttttttttttaaattacaaaagtcttcccacgagcttatttgattttacataattagatttgttttcttctttcaggatttaatgtggagacagtggaatacaagaacatcagcttcactgtttggg

SEQ ID NO: 44043 - DNA, 528 bp, Manihot esculenta
  Intron number 2 from transcript cassava4.1_006344m (locus cassava4.1_006344m.g) derived from phytozome v7.0 (chr-ID scaffold07035; pos 899062 to 899589 reverse strand)
acaattatcgcgttcctgagcccttccaagaccaagtatgtaccagattctactttttgttactcttgttcatttcgttgcagattgacgttgcagggtaaattttattgtctattggggtataaataatatttgtcttggtctttttctaacttgaatgaagctgattgctacatcatcataaataaaacagaaactgttgcatagtgaagccgcacccctatggctaaaaacaaaattgtcaggaaaatatgatttctttgtgattgaatgtcttcttatccatagttttgtgtagattacacccttttgtcaataaataaacagtgaaaaatcatagctattatcctcatcttattttttgtttatttttctatttagaagatatgttctatgtgcttatgctatattgttctgtttcttgtgataacctccttttttcttgggatttagttttatttttttcgcatttgcaatgtttccatgtgaataggtggtagttttgattgggggctctgcaagtgctgt

SEQ ID NO: 44044 - DNA, 577 bp, Manihot esculenta
  Intron number 1 from transcript cassava4.1_005365m (locus cassava4.1_005365m.g) derived from phytozome v7.0 (chr-ID scaffold00952; pos 208858 to 209434 reverse strand)
taatttgccttttaatccaatctcttctctcccaggtgagtctttgtttccacttgttccgagtcaactctagggttggaattcatctcgctggctatattttaattcatgagcttttgctttctcttgatctttttgattgcccctttttttaaattattataattaaaaaggtatttgttatatgtcgatggccttgctgaaaatgggaaaaaaaaaagagaagaaaaggataagaaagcttcaaaaataattggaaaagaggggcgggggagttcttccaaatgaagtattttgcctttagcttcactattcccctaattctttttcctttttttctgaattaatcggtatatataaaggatcatctattattgttatgttgtatagtgttaatgagtgaaattatggattcaagtgactagaagtgatgtttgctttcatttaaaaattatctgaattatttcaagtgtaattgtaaagaaataaacttctgttcttttatgttgattttcttggaaattggttcatgttgattgcagcttgagcttgtgaaggtgatttttgagattccctt

SEQ ID NO: 44045 - DNA, 568 bp, Manihot esculenta
  Intron number 1 from transcript cassava4.1_001183m (locus cassava4.1_001170m.g) derived from phytozome v7.0 (chr-ID scaffold00318; pos 52486 to 53053)
gatcccactcctgctgcgaggtaccagattactcgtctcccttctttcttgccccggtgcatatactcgctctctctctcttgatctcttattcctggctgtagctgttactgtttgaaatcacttcgcttctttgaaattagggttttctgattttgttgtttctacctctgcgtcgtttgggatacttggatgtttggtttttggaaagctgaggaaaaaatttggacaataattttcaagctttctggttttgctacattcaatttcattgagctcaaaataatggccgttgtgcttcgttttcgattgttgttgttcacttttttctcaggaccttgatagggtagtgactattgagataattgggattattataatttaatgttttatggaagactttggcagtgaaagataaaatgttctaatgaatcagttgcaattatgttatcgtttaagcatgccttttttttttcttttttggttctcatgaacatgaagtaagatgctttatgcgtgttgccttcctccagttctgctggggcatcctcgcctgctgtcccagcaa

SEQ ID NO: 44046 - DNA, 894 bp, Manihot esculenta
  Intron number 2 from transcript cassava4.1_001183m (locus cassava4.1_001170m.g) derived from phytozome v7.0 (chr-ID scaffold00318; pos 53207 to 54100)
cttttaagccgtcaaattggtttggaaagcctaaggtaaccccaaaattaatgaacagtagttgtatactgaagtcgggattccatgacatttaaaattctgtagcttgctaaaagagtaaatatctgaggcaattatgtggtctgagaattatttttcatcatgtagtttaattatctgatttacatggatgcttaccacccaaacgtgcttcagaagaaggaaatgggtaattgctgggtgctggttaaagaggaacaaaaatgtagttcctagagattctgggatcaaacgattttgtccattcacatttatttgatggaggcttaaaaaccacagttgcctttaatatgatagagaaattgcgagaatgataactctaagctttaagctaggcatccaataaatgtatgcgattcattgtagccttacaaaagtcatcttctcgttacatagaaagtgcttcaactctttcatgttatggtttgaactaactgaacctaaactagttttgagtcatggcagtagccaatttccaatggaaatgcactgtggaaaggggatgaaaagaattataactggaagacctgaaatggttatttagtggaagtgttcgtggtattctatacagcgatgataagttcctccagtctcaattttagaacactttcattggagttgtatgatcattgttcccaaagaagagattttgctatttcacagcacaattaaatatatatttcggatttaagtagttgtgagcttaaattattctggtttgaagcgtcagtttctctttttagtaatagacatggttaaattctggtcacgtgattatcctttttctaattttttacagattgctagttcgttggcttgtgctcaaagaggttg

SEQ ID NO: 44047 - DNA, 654 bp, Manihot esculenta
  Intron number 1 from transcript cassava4.1_025897m (locus cassava4.1_025897m.g) derived from phytozome v7.0 (chr-ID scaffold06890; pos 87661 to 88314)
gcctacaaaaagctcgggtatgaatttgtttcctgctatgttggtggatgtacattccttgtttgttttaactgatgcatggttgtccaagtacacagttctattagtagtggatgatggttggtttgttgctttgtattaatgcattcctgtatatcaaaattcacacacgttgtagacctatttgtttctcaaaattaacgagtccttatgcaaacttatcaagcattaaaaccatgatgtgcttttttagagatatgaaaactattattgtacctcacttaaagtttgaatctgggcactctcatcatataattttagcactagtatatctgtgtttgtccatgctctgagctcaagatgttttacatggagagtgtgtgtatgaattaagattattggaaccatgtaaaagcttgagcttttaggttgagtggtttcttgatatactctaaaaaatgatttgttatttgttttagcttgtacagttgttatgtcatgcttctcttgcagatggaatcacattaggttttcacaaatcttgctattcctcttgccttttctttcttccatttgcatgtgagagtaacaactgaaaagttctgtaacttattactggttgcatttctttgcttgcagaaagtagcggagtgt

SEQ ID NO: 44048 - DNA, 960 bp, Manihot esculenta
  Intron number 3 from transcript cassava4.1_016118m (locus cassava4.1_016118m.g) derived from phytozome v7.0 (chr-ID scaffold11581; pos 100971 to 101930)
agcttccaaggccaccagttatcaacagacgtgagattcatcaacacatcttattgacttatttagtttctcatttcattttagattattttctaattgctttcactttgctgtgctcatatattctcctgtagaataatcaagtcctccagttactatcagatgacatattcattgcgttttcctttcttttttctctcaagaatctccctcgtattgctttagatagaaacaatttctactgttggactttggagttgtcactatgcagatttcttaacgatccaaggaaaaatagtgggaaaagaatcaaaccatttgcctttttttgtgcagcggaaagaaccttagtcatcttaatttattagaagcataccctcttgtggctgccatatttcatcctccagttttaagagcgaagcccagatttagtaatcacttttcacatgtctattcacatttaataggcaaatctttaacagcagccctagtatctagaaatgagtactacagccaaggatttataacttgataaaaacggatcattcttttttgaacaaaaaaatacaataaacccttaattactaggtaataacacaaataaatcatcttcctttttatcttattaaagctgatgataaccctaatagtataaagcttaatctgcccttttgtttttaggcatattaatatgtgtagagagtatgcactcccccgcaactgtagatgatagagaatgattgtacatttccttctaaacgtagttaatgaagaatcttgaaggatgggtagggagagagagatagaaatgataaagagaagtgacagaagaaaaaagaaaaagatttcacaaatgcattaaaagctacctaagggatactaatgtgtctgtgtatgttgtgtctgtgtttctgttcatgtccagccccggagaagagacagagagtcccctcagcgtac

SEQ ID NO: 44049 - DNA, 431 bp, Manihot esculenta
  Intron number 1 from transcript cassava4.1_013148m (locus cassava4.1_012842m.g) derived from phytozome v7.0 (chr-ID scaffold04274; pos 146727 to 147157 reverse strand)
gatactgctcagtggccacaggtagatggatctactacctgcctcttcatctctttctttaggaagccttttttccttttgggttttcatggagagtgctggattatatggtttctggtttattggcttctctttttttcaaaagggatgattggtgttcatggctggtgcaagtccccactcatttggatttagtttcttcaccacatatcccactttatctttctcttttggttgagtgagaaagaaaaagaagagtgctatttttccttttttctttttaatggcctgatcaaatgttgaaaagtgtaaaagttgctaaattgtttttatttgtttgtctatcttttcttttaatctttgagttgtttgatctttaagccatggtgtttctttctttatgttctttgttttcttttttaaaggagata

SEQ ID NO: 44050 - DNA, 251 bp, Manihot esculenta
  Intron number 1 from transcript cassava4.1_009048m (locus cassava4.1_009048m.g) derived from phytozome v7.0 (chr-ID scaffold05144; pos 143173 to 143423 reverse strand)
ctttggtttcctctggctttgttgttcccaaagaggttccatactttcttttctttcttccttcagcttctttggttttcgctgaataccactcagaaatcttatcaaaattgtaaattttaactttgaattcaataattgcggttggtgctgtgataaaaatgaaaaaaaaacaccaagattggcttcgtacattaattagaaaagcttttggttttgattttgtcatcaatgcgtgcaggccaaatcca

SEQ ID NO: 44051 - DNA, 828 bp, Manihot esculenta
  Intron number 1 from transcript cassava4.1_006847m (locus cassava4.1_004459m.g) derived from phytozome v7.0 (chr-ID scaffold06948; pos 404805 to 405632 reverse strand)
ggagtggcgggtgttataaaacagtgcaggaggctgtaaatgcggcgccggataatcaagtgggcaaaaagtttgtcgtgtacataaaggcaggggtttatagcgagatcgttaggattccgttagagaagaagaatgttgtgtttgtgggagatgggatgggcaaaacggtcgtcacaggatcgttgactgtgggtcaacctggtatttctacttacaacacggccaccgttggtatgtcaaaatttcacattttcacttgatttttgtcccaattttattaatattatttgttattaaagtggaatttttaatgccactgtgatttatctaagttgtagattttcttgtgcacaaaattgatatgggaaagttttttttcttttttttttgaattcatccaatttataattaacttatggttaccccttattgcatatgctatcagttacagtttagggaattatctaattttggtagcacaacctgcatttttctaagaagacttggtatatcttttagtgatatgttcataatttattggtaggatatacccgttggtgtagactagtcttagttttattcaaaataaaaaaatgtacaatttgtttttttattggttaaatgtatataagctccagtataatttattggaaaaatttatagataaatttcatagcccgtgaattgtagtttgatatgttctgcaattgttttgcagcggttcttggtgatgggttcatggctagtggtataacattccaaaatgcagcaggacctcctacccaccaagcagtggcgtttagatcagacagtgatctgtcatat

SEQ ID NO: 44052 - DNA, 947 bp, Manihot esculenta
  Intron number 1 from transcript cassava4.1_001025m (locus cassava4.1_001025m.g) derived from phytozome v7.0 (chr-ID scaffold00480; pos 177741 to 178687)
agaaacctcctctggctgagtcaaagcctgagcctgtgagtatattgctctccatttggatgtgcgtaaaactgtttaaataagtttgaaattcatgttagtcatctaggtcttggatataaggttcgaagattggattaaatgttagcgtctgcatgtctatattttaatactagaaaaattagtgtaatatatcttttttggtttgagtacatccagaatacaagcaatgaaacagctttagtaggttaaaataaggcacggagttttcttaatttgaattcattgccctttttgtatctgttactgaaaaagggaaaaaacactttgatgttaagactattcttttacaactgaagtaagaagaataaggctttttgtgagagttcttgttaaaaggggcattcataattgatcattggattactttcaaatggatcagagtttggaatgcttgagcttgagtgatttgataccatctgctgtatgtaaactcatgttgcttagacaaacaactgcctttgctaagaataaaaagagcgaacatgatccaatatagaactccctttcttgctccctagtccctatgcatatgtagtataattatttaattttggaacaaattcagatgcaaagagaccaagaaaatgtccaagaaaataaactctctttcttggtccctatgcatatgtagtatgatttattcatgaaatagaggtgaaagagagaaagaaagaagggattggagaaaatatgagcttgattattcccctcaagctaattgggtatatatatttgtttacagaatacacgaaaggaaataaacaccattacagcacataattacagccctaatcatatctctataatcacaaccaatcagggatatgatttgggaagctatttacagtaatatatctcagcaattcattttggaacaaattcag

SEQ ID NO: 44053 - DNA, 106 bp, Manihot esculenta
  Intron number 1 from transcript cassava4.1_002577m (locus cassava4.1_002577m.g) derived from phytozome v7.0 (chr-ID scaffold04165; pos 159053 to 159158)
aggtaaatttcttttttttttctccttctgttttccattattattcatggtttctttcttctttaattaattttgatttcactttcaggacccagttagaagtgca

SEQ ID NO: 44054 - DNA, 833 bp, Manihot esculenta
  Intron number 3 from transcript cassava4.1_004524m (locus cassava4.1_004524m.g) derived from phytozome v7.0 (chr-ID scaffold12794; pos 1531301 to 1532133)
gaatctatttgataagtgctctaatagaattcgtaagatcgcaaagctactttacacttatgtttttgccttttatatcttataacatagattttcatttgtaatgaattcttctttctgtcatttaaacaagcaatttgtatcccctattattttctcaagaaatcaaaccaggaagggtcatctgatttcacagtagtcgccatggctggttattagcactacaagatggttttgttacagccattttgaggatactattaagtaaagacataaaacataggccaatgggaatgaccacaggaatatctataggctccttcgagaaagataagcaatagatatgtttaatgtgccaatcttaatgttcaataactgcatttaaggtagccccaccatcagtatcaatgcttaaactacagtttccgaaaaataagggcaaacaaagccagccaataagggacttataatttaataaattatgcaagattgtccaatcaaatttcaggaatctggtcagatcccactggctcaaatgaagattgacagtgagatatgtattctctctatcagttgcgtatggtcccctttcaaattaaaatagccttcagtcatactactgacaaattgatcaaacacaagacaacgtttaattcagccaaatcctttattgcctgttttcaagttgaacacaggccactcctggctgagtccatcaagcattaattggaagtttttttattgcaatttaagatcgtaacttctacatgccttgaccaattcttaccaatgaaacagggcttgttagtactcacactccaagctcgcttccc

SEQ ID NO: 44055 - DNA, 995 bp, Manihot esculenta
  Intron number 1 from transcript cassava4.1_003494m (locus cassava4.1_003494m.g) derived from phytozome v7.0 (chr-ID scaffold05875; pos 277804 to 278798 reverse strand)
gagacggcaactttggatactttcttaatctaaaggtacttgattttgttttattttaattttaaattctgggtattgcataataattaatgtctggggatgttgaagaataattgaaatttatgatgttatcggctctgggtatgtgaattttgcgctataaactatcttttcaagtaaatttcggaattttccgtgctcagttggctcttgggtcattgattggttgtcgaattttggtattcgattgagttttggggaccccttcttaactgtgtatttctgagggcggtgattaatgaatgggggaacaggttttggttattttatctgtgtttttttttttttgaaatggattaatatttctgaagttgtctggttgcttactaatgtttgatcaaattttctctgtgtgtaacgcgattattgctatttctttaattttaaatgagccagtaaaaagatattttttggtggtgaatcgcgaaacagaagcaaaattcagcagctagaatttactgggttttccattactatgatgcacgtacagaatgaaatttctatgcaatgaatttattttacggtttgttgattttgttgtttgtattgaattaaatcatgaattgtcatggtgtttattatatacaaacacacacatacaaagtcaaactacctcttaaacccgccccttcattatctgtttgcaaaagcaagctgcaagactccatgggattctcccgtcaggtgatgccatggcacaaccatggcctaacttggctagattgacaaatgtggaacccaaaaaaggcacatattgatatcattttacttcctcttttgtcagtgttattgtaatgtggatgatttctaatttttgtccttttccccttttgttgccttgtctcaccattttctcgtattaattttatattgatggaaattggttgattggggagtatgcattttatgtgataacagactctggaggatttata

SEQ ID NO: 44056 - DNA, 600 bp, Manihot esculenta
  Intron number 3 from transcript cassava4.1_013385m (locus cassava4.1_013385m.g) derived from phytozome v7.0 (chr-ID scaffold05297; pos 134589 to 135188 reverse strand)
ttcaacaagaaggtatgcatgagaaattttttgaaatcagccatatggcttggatgtttcaagcttgtttttggatgggctgatcatttctgactaattgctagcttgtgcatgagtgtttgtgctgcattaaatacatgaatgattacatgtatttaggtcattgctgcttcatttgttttttaccatttcaatactcttctttatgtttgtatacaagtttatctgttgtacctcttggcttttcacgaagctatcctgtttgttgatatatttaagtaaatatctgaatgattacatgtatttagttcagtactatagaggtgttcagacttcatgcatgaataatgcccttctctatacttgctctttgtctatgctgtgttctgactcctgatacaactggcttgcaatatcgtttcttctttatctgttattcccttcatttacacaatcaaatgaaccatgtgaccatgagaattgcaattccaaaagaaaaaaagattgggaaaatcatattgtgtattttatatcagttaatgtgcagaaccatattttatttcaggcgtatcaacaaataatacagaagcttcaccaaca

SEQ ID NO: 44057 - DNA, 552 bp, Manihot esculenta
  Intron number 2 from transcript cassava4.1_013385m (locus cassava4.1_013385m.g) derived from phytozome v7.0 (chr-ID scaffold05297; pos 135305 to 135856 reverse strand)
gacaaacaggttctcttcttgattcccatatatgattgttttacgtttcttgattgattgacttgttcatcaattgaaaattttgattgattgattgatatcttgatcatttggatattttgatcgaatgggtacagtgaagaacaatccaatcatcggaattttttttcaggaatattcttattaacccattttttcattttattatttgttgaatttgattcttgtttataatacatatatttgttaaatcttttatatatgcattatgatgttcgtgtttaaccacatattcccaatttattttgcgtagaagtatgtgatgttgtttccatttgttaattcagaagtgtccgacttattttgtttttctttttgctgtttgaggatttttctgatttattttgtttttccttttgctttttgaggattttgcaaagcaaattaagcttatctttgggattttggagtcggtaacttatatcattctattattaacaaggaaagttgttaattgtttgtgttgtagattcttgagagagcactcgaaga

SEQ ID NO: 44058 - DNA, 1027 bp, Manihot esculenta
  Intron number 1 from transcript cassava4.1_000838m (locus cassava4.1_000838m.g) derived from phytozome v7.0 (chr-ID scaffold07007; pos 88647 to 89673 reverse strand)
atcttcaggtacctcccttttctctctttctttcttctttttttctttttctttttatattttcctggattttctttatttcttttgattatcgttatgatcctcaaatgttaactaatctttgcttggagctttccatgttgcttaatttgatgtgggtttctttcactgttgctctcgtggttttcactgttagtttgtcttattttgttgggatttttctatataattctctagcagtttgcttctcagaaacgttttcaggtgataaagatattttttttatttgatttaattgattgattacctgaagcctttggcttgtgggcatattgagttgaacaattctcacttttggatttcgtataagacttctttcagctttctaaagtgtagatgatgatcatcttatgggtgagttgattctgttgtgtgctaaaaaaattacaaatttgattttttatgccaatcttcctgttaataaatttgaaatttattatttccttgatattctaatgcttgtggataatatgccctgccagttctttaaaaaaaaaaattgagtgtcggttatgggatgcttgatgttcttcatgttttaaaggaattcaaatgcttttaaggaaaaaactattctcttttagtaaagatatatgcttaggattctgtatgagtccctgttggtggttggtggttggtggttgctggtgagaattcttgttacttttctggcagtgaatctctctctctgtgtctctttctctattcttcttcttttttcctactgtagcaaatctctgtaagggatgcattgatgatatatgatgctattgaatgctatcaaaatcactcctatttcgttcccgtgattaattaactttgatgtgtactagaactactcactctttgatgtcttgttgtatacacgggttagattgcctctcgtttttattaaacatgttgaatcgccatttagtggttgatttacatttttctggcaggtcagataggttttccaacttgaatc

SEQ ID NO: 44059 - DNA, 721 bp, Manihot esculenta
  Intron number 3 from transcript cassava4.1_001699m (locus cassava4.1_001699m.g) derived from phytozome v7.0 (chr-ID scaffold02477; pos 123159 to 123879 reverse strand)
aagaagtgcaagaaactccacaagcatctgtgctggtattgtctgattggagttgccatgcattcttgttttctggcattagtatgaagtgtgctatttttctgagtcctgttggaaaactgtgcttttggaaatgaaatcaaaatgctctaaatgtaagatgtcattatagttaactagtcttatatagataaggacgaataatgttgttttacttgcaatgtttgccttatctttttctaggctgttatatagtcgtaacaagcacaaaaactatgtttagtttttctcctggttcttccgagcaaacattttacagtgctccattgcattttaatgtttgcttaattttattctaactcatacttgtgctctttcaaataaaaaatgctcgtccttaaacctcaaagcaattgcatttttggtttggcacctgtttccttcttcctcatgcaagacctattcaacattttgctggaatttttattcttttttcttgcacatgccaatggacgtaggatttatttttggctgtctgctgatttattttaactagttgcattttgtttgtctatgcattttgtttgatttgtattgtttttgttcattctttttagtagaccacagaaatctctgattcttttgttttgagaatctcataagacaccatgcactttattcgttaggccaaggtcaaaaaagatctcactgctgaagaaat

SEQ ID NO: 44060 - DNA, 559 bp, Manihot esculenta
  Intron number 1 from transcript cassava4.1_012661m (locus cassava4.1_012661m.g) derived from phytozome v7.0 (chr-ID scaffold09426; pos 28064 to 28622 reverse strand)
ttgcttccctctttctaagatcctcgtttaattaggtctgattcattctattttctgtttcgattttttttgttttctgaattatttttcgtgttggtggattctgttttcagggtttttagcatatcctttaaaaagattgtttctttctcctagttgtttgatatcagtagttattttgatttgtaaaagctgctgctttaatttctcaattttcaagttcgatatgcagatctgttcgcttccctcgtgattactttagttgtctatttgcgcatatgttccttgaccttttctcttccgcacaagcttctgctattgatatcgtttgttatcacatggagctgaaattcgatatttatgactaggtttttgtacatgtttttcttggtggaaagtatgtcaaattgatcaccatattttaaatttgtttgtcatgttaatgtttattttgcattatatgatggttttgaagtcatttatactggttacaattactgctgaattgtttaattttccacacttgtaattgaaatgttctattctctgcagcttgaaa

SEQ ID NO: 44061 - DNA, 812 bp, Manihot esculenta
  Intron number 1 from transcript cassava4.1_001622m (locus cassava4.1_001625m.g) derived from phytozome v7.0 (chr-ID scaffold06948; pos 844299 to 845110)
ccgtctccttgcgttcacttccatttcctatcaaggtactcacactcacctgatttgcctcggatctctctcttttcatttctatctgtatggtttttgtgcagatctattgtaatttttgttgtgttcctttctcatttcagtgttgaatgtaatttgacatgtatgtactgacaagctaatgagcttttgttgttgagcacaatggaagtgattgatggaagaggataatgttattttagtgatttcgtgcagatctaaaacaattagatttgggctaggtgattcgtcatttgtttacttgtggagttacttttgttttttcttcctacatttctttaaatgctaatcgtatattattttgcttattttcagctttaggttagtgtttttattaggtttgtcttttttttaaaaaaaacttttgttttctttctcctcttttgagttagttgctctaagttgagtcgcgatctggctattaatagttatttgtggcttcaaattgtaacaagggaagacttcaaacatctggataggtttctttcctattttgttagttattaatagttaattcgattaaggcaactgcttcccacaagtaaacttgtgctgacaatgacagtgtaagactcctcaagtcctgtgagctgtgaaactagagtggtgatttcttttcattagtgtcactgtgatgtagttgtaattttattggatatctcaaagttggctgttgctttgtacgatttatctaagttggtttgatctccaggttagattttcaagaattgattgaagaaagtaaaagaaga

SEQ ID NO: 44062 - DNA, 729 bp, Manihot esculenta
  Intron number 1 from transcript cassava4.1_007897m (locus cassava4.1_007833m.g) derived from phytozome v7.0 (chr-ID scaffold06407; pos 186816 to 187544 reverse strand)
ttggtaattactgcttatatagatatcctttctccctcctctttttgttgtggttgctattgtaggtggtatggtactttgttttttttgaagggattctccactgttggtaactctagttatcacttcataattagttgaacttagaatgaacatgtttgttcctgttttgatgccagaaatgcatgaaatcattctgaattattgtgtgctggtgtttttgtctgacattaatgattcttccattattcttttcatctcctctcctgtgaagcacgagttgacttgatggaatgactgcctaaatacctgtttccctgaaacagatggaagctcaacttttgaaccagttttagtagcttttgttgtccttttgctagatgtgtctatctcttacccaaagaaaaaaaaacctcttttttcagctttaaaccatttctccttcattcagtaagtgcaatcaaaggatcatttggacatgtctattatgaacttgaacgggcagatgaatagggcaaaacattcttgaatatttcttgtctgatgaatgcagcttataccttaagtaccaatcaacattggtggaaagaggtgttcaatgaaagatttggcatatgtggcacgcctgctacagagtaatttgaattccttgttcatgctcttggtattaatcagttttataagtgatgtgcagcaccaccttccccgagtgatcctacagtgaagaga

SEQ ID NO: 44063 - DNA, 817 bp, Manihot esculenta
  Intron number 2 from transcript cassava4.1_003829m (locus cassava4.1_003829m.g) derived from phytozome v7.0 (chr-ID scaffold05875; pos 472294 to 473110)
ggtttacgctctctcgtcctgtcaaggttcttccttttctctcttctttaattgggttttgatttttattttttttttttaacaaattctttgtgcgaaaacaactttttataggcaattgtcagtgggtgcaaaaacaaatgctaaaatatataagctctatttctatcatactcattttctttatttctagtttcttgctaagttttcactttgcatacatgatatcttagccactgtttgatccatccaccattgttagaatccgacttcagaagtagagtctcatattttcaaccagaaggaaaaaaaaaaaaaaaaaaatttcagagtgatccatccaccatgcataaaatcttcatggatcaggacttcctgcttcttcttcttcttcttctttgtcatgtcttcatatagcattttcttcccttctctggttcttcttcagcagttgcaagagaagcttgcaaccaacagaattttgatttattttttattttacagctcaggatgagtttgttagttgttaaaggcatttattttctcatttattttagctatctatataaatatatacagacaaatcatacaattttttttttcttttacaaatatatatagactaatgaatccatgataagaaaatattaatactattttagctggtaaaagaaaatttgtcaagtatttgataggttttcttaaaaaaaaaattatttggagtaaacaagaagcttgattaattaggttttaatatcattttatatattgtaataatgcagggaagcagaatttttacccatttggatacccattt

SEQ ID NO: 44064 - DNA, 936 bp, Manihot esculenta
  Intron number 1 from transcript cassava4.1_019422m (locus cassava4.1_018301m.g) derived from phytozome v7.0 (chr-ID scaffold12794; pos 1588466 to 1589401)
tcaaaaccctagctccacctgcctttctctcgctcgtctcatcaaattttgactggtttgcttcctttcctcctcatttattatcgtttgattcctattatctggtttttatgtgttttctagatctgcctagaaattacaaggatctgtttgcttgagctgaaaaagcataaaccctaactttttttctagattgtttggttgcttggaaatccgtggcctgaatttcgtaatgaattggtttcttgttccgtttaattattcatttgttttgttgaaatataactctgatttttttattggtacttaatcagaagtctctttcttctcggatgtaaggtcaattttatatttatgctagacgatttctaaaatgtattcgtattccagttaggcaaggaacaactaaattctgttttatctttgttgtttaaagtttaaatatggaacaaatacgtctaaattgccagacctatacataactgtgtatgttctaattaacatgaaattcggaaattgttattcaacgtgtggtaagtgaaaattttcatttgctggttcgggttgtacatggaattcgacgtgcactctctaataccaggtattcctgctttggcgattccaaaatactacttgttcctatcttagattaagaagtcctataggctccccatctatagactacaagtatggtataaatttattttttgtgcatttgcagtcagaaatgtgattgaaatagcaatttcttgttattgtttttggttcattcagcaacagttcgagagtgatatcagcttaactgaattttgctttatatagttcaaataatttacaaacatgactctaaattcttaatgggttgggatttgtaggttgcaacaatgtcaactcctgcaagaaagagattgatgagagattttaagaggttgcaga

SEQ ID NO: 44065 - DNA, 904 bp, Manihot esculenta
  Intron number 2 from transcript cassava4.1_012051m (locus cassava4.1_012051m.g) derived from phytozome v7.0 (chr-ID scaffold02538; pos 120504 to 121407 reverse strand)
ttgcagaaattcctcaggtttctcttcccttatttttttacctctctttctcctcccagccctccctactttctgtttatcaagaatgcacaaatagggtaactttaagaattcctcaatgaaaggattgaataagagttatacttgtacagttttggatcgttttcttcacatcttgggaaaatacatattggcacaaccgatgaatgaaaattcaccaaatgctaaccagtgatcttttaaaattggcaaatgttggtgtattttcacttaatatctagttatggatattacatggtagaacattggtagcaaaaacaaattgagctggttcctaatgactgagaataggagtttgggtgaaggttaatccttaatggtttaaatgcaaaatgaacatttcgggatctttggaaaatctggaaaaatgtcatctaattgcgactttgatttaactatcattcatccatttgcttttggtgtataaggtatataaagaataagagctttattaagcttggactttgtgctctcttgatgattctagatactaattgaactaatttaacagtgaacaagtatttggacatacttgaagtaggcaagttgaaaagaaaaatgatacatgtactgctactttcatatgtgctgcacaaatttaagcatgtagtctaaactttgaaataaaatattcctgtttaagcttgcaatgtggtttgtgtgtgtgtgtttttaatatatggttataagaacattaaattagtggaaatgccatgttttagtttagtactatattttttaagtttaattcattttagtttttgttcatgagtatagataatggtttcattagcattgttcttctacagctctccaatttggaagtctggttccagcgacccaa

SEQ ID NO: 44066 - DNA, 761 bp, Manihot esculenta
  Intron number 1 from transcript cassava4.1_012051m (locus cassava4.1_012051m.g) derived from phytozome v7.0 (chr-ID scaffold02538; pos 121416 to 122176 reverse strand)
gcttctgacactcttgatttgctcaaggtatgtgtttgatattatatatatatatatatatatttcgtttggtgaaaatgattgaaattggaatgaaaaaggttaatctcgagtcgaatgtttaatatccttttttgttattttggagttaagaaaactgctgaacatagttttacggtttagctgagttcgatttgttgtttgaatctcttgctgattatatttggctattctctaatcgttacataaggactctgctttagctttagtaagtttcttgaattaaaccaagtattcagctatttatgtgttcatatcgtgagaaatgatagaaaagataggacttaacaaatttgaaatttcttcctggatgaatttatttaaaactagtttccatttagttcctcggaagaaatgtgcttaaggatttgtttggttgctgagaaaattatttaattaaaacaaaagtggaaatcgaagcttcaatttcaaagactttatcatattaaggatctttcatttagttttcagtaggcttaagttgacaggttcagttttttgttttaatttgcgttggaagctaaaaacaatgtgaaacatgattctggttggttgcctagtaactgactaactcttaaataggaaaagaggatttattttgaatttgttactttctttcattttatgcctttttaattctgattcttttctgtactttctgtaaaggactgtcaactatccgtcaagcaggtcaatccacg

SEQ ID NO: 44067 - DNA, 707 bp, Manihot esculenta
  Intron number 1 from transcript cassava4.1_004920m (locus cassava4.1_004900m.g) derived from phytozome v7.0 (chr-ID scaffold00097; pos 159716 to 160422 reverse strand)
catttgctgccgcactcagggcacttcttctagtaggtcttttcttcagtaatttgtgtgatatttgcattgtttccattttgtctgtatttggaattgtttgctgcttctattaaatattcatgtgcttaaacttatgttccatgtggttgctgctagtgcattccattcccgtcaatatgactctgcaatttagccacaagataacaaaatcctatatatatatatgatagagagttacatgtaaaccaaagtaaaataaaaagaacgcctccatgtgagtcaaaataggacaagaacttgggattgaatttcatataggaaaacaaataaacctaggaggataaaagaccttggaattcttgttttcggtaagatctgaattcctgctgtaaacctttgtttaattcattgctgaaggtcatgaagcttcacgtgtcaaacacttatcaagtgcaagaccctcttgtgcaagtcataatgccttctgtaacaagtagttaaatgaaaacaattatatctggactttgtgtgcattcactctatgccactggctggtatgttctcttagcacaaaacatggaattccatggccatattgaaggactgttttggttcagttcaaagcttgcattctttgctttgtacatacgagtgtttctcctaactcaattgtcattgggacatttcgtcaggattaccaggcc

SEQ ID NO: 44068 - DNA, 824 bp, Manihot esculenta
  Intron number 1 from transcript cassava4.1_005639m (locus cassava4.1_005639m.g) derived from phytozome v7.0 (chr-ID scaffold05694; pos 133538 to 134361)
ttcagtttcagtttgatttggtatcaacaaaaactgtaagaaacttagcgcagttatcataatctctttcccaaatccatcttctatttctttgtgttctgttctttgatcatatatgagtttgttttgctttgaatcgtagctgtttcggcatgtttaacaagcaaatttttctgggctttgattataatctaaattagaatactatttaatcataagttgttgaatttatggtcttaaaagttttcaaatttaccaagatggttgtttattgaagcatcagattgaatttttttgggaaagtttttacttcttgaaattaaatgtccaacttactctgaatgattggcctcctaaactaaaatagaagattgttaaagttctttctttaattgccttatattgacatataggatataagtcttgcttgaaaaatcttaatgctagtttagatgggtcagtgatgaattctcttgtgcagttgctttcaatcttgagaagtgttctccattagttggtgatgttatctttggtcagactgtgggagtgatacttgcggtgtatgctttttgataacaatagaaaaaaacggttgtgtttcaaatttcatgaggtatacagtagctgcatttcacacattcttgttaggatgcttctatgttcaatttgttatcaagattaatttgttttagaagagtgagatacagggaataagtggatgaacttaaagaattgaagtccatgctgaatttcatatgttctatttgttaatatgcctgtttgttttcagttcaagagtaatgaatgagtttcaatgcatgcag

SEQ ID NO: 44069 - DNA, 936 bp, Manihot esculenta
  Intron number 1 from transcript cassava4.1_009976m (locus cassava4.1_009976m.g) derived from phytozome v7.0 (chr-ID scaffold12794; pos 1789987 to 1790922)
cctccgtggccgataaaccgattatcccattaaaggtgaacctgatctccaccattacttttagtaaaagaattgtctttgtaatttattttttgattttatcgttacctgaatattgagtaagctttcttatgttcaagtttcgttttgacatttatgtcactttggttcgtgtagaaattgtgtttgaaagctgatgattatgtggaatagtggctttaaaagtggaaaactaagatggtggtttaatttggttaagggtcatttgtgaatttatgaacaaaatgaaattgtaagactttgttctgggagttaatttatttgaaaataacattcaaggatgaaagcgggctttaaatctatgcacagatgaaattgggattagatgtaatcagaagtcttcttcttttgaaattagaataattgaagtctcaggctgtaagctcttggttttggctccctctgtaaccttgtgttaacttgtggtttgacctaatattcatgtggtttctcagagctctcttaccgtaaatgttggctgctaaattacatttcgatgaaatctagacggcagcatctatgaggacgctataatccatttcaagtagcaaaatttccatatgaatccattattagtttcagtttacttcctacaaatagtgaggaatttgtgcataatacgaagtatggtttcactctcatggggttgtttttaccccattattcaacaacgttaaattattcatttccaaatccttaatatgtgcagctatactgttttatgctaggtcaagaactgtgcagaaagttgtaatttccttatctaatcagattttttctctctcttccggcattgttcattgttatactagtaatggagtttagatacatgtgtcctcattatcagtagctttgctttcagtcaaataactggga

SEQ ID NO: 44070 - DNA, 663 bp, Manihot esculenta
  Intron number 2 from transcript cassava4.1_017858m (locus cassava4.1_017884m.g) derived from phytozome v7.0 (chr-ID scaffold02525; pos 29667 to 30329)
gtttgcctggaactagcgccaggattatagctttggttggtggtccatgcacagaagggcctggcactgtaatgctttcttgttccctatgttttagttgtttttacatttaatttgatctaaatcttccctttggtcctttctctgaagttttgtttcactagatcacataattataaattagtttcccatttataacataaattagtccatgcacagaagttttgcttgcttagtcctttagccatattatgggcctcctttaatgctccactctacctctatctttggattcctaattatggctaccatctaaggtatttggtgttttcaatttcttagtgctttaggcgacacccaatacttattagttttgagtccatgaacagcgtggtaaatgagtttagaggcagctgaagcttcctggccctactataaatgtcaccactaacaacaatgtcgtcatcaacgttagaaacaaattggacgagagtcttcttatgcattggtaggactagcactttattttctccattgcaatcttgccgccaatttttacttcaagtgtgaatattattagagatttactgttaatgtatattgatttccaagatttgaacttaatgggtctaataggtctggagttcaacagagaagaagttc

SEQ ID NO: 44071 - DNA, 399 bp, Manihot esculenta
  Intron number 1 from transcript cassava4.1_016724m (locus cassava4.1_016724m.g) derived from phytozome v7.0 (chr-ID scaffold12865; pos 616384 to 616782)
ttgaaaccagcttgcttttacaacatagagctaaggtccttttcaattctttaatcatatttcttgcagctgattttctgtaaggttttctctctatttaaggaaaatattctccatgactgatgttataagttcaaaatagagttaagagctgtatacccgatctactctagaattctagatgataaatgtgcttcataatttggttatattatttttccattaggattagtctccttcagtttttgtatattttttaatgcactctttctttagtggtagttgtcttcgtatgatgtcgtctattaattattatgagagtgcttaattaaatttaaattttggcgatactttcttctttgactttaataggaaattgtaccaaaacgcattgtgcaa

SEQ ID NO: 44072 - DNA, 642 bp, Manihot esculenta
  Intron number 3 from transcript cassava4.1_016724m (locus cassava4.1_016724m.g) derived from phytozome v7.0 (chr-ID scaffold12865; pos 617049 to 617690)
gaatcgttcagaaggtacacctcaggtttgtttactgttgagctcttatttctgcaggataaatcacaattttagaagagaaatcataaaaaaaaaggttagaaaggtttttgaaattcaaaagtacctgcagaaataatcattgatcaatgttcagctctaggtgataatttttgaaacttgaggcatgcattgatataatgataattatttgcaaattgccatttgaatttcaaaagatcaatggtggtcctctatgcagtatgacttgttaatttttaggtcatttttgaaacttagtgcctgtctatgatttcagcatgcctggaaatgagtctgcttcttacttaccgcaatttttgttctaactcttaatttctgctgtcgttaagatttccacttggcaaaggaacattgaacgttcaatctaatccctggttagattgagatctcttgatctgcccatcagtcataatctgattggacatgactgtttttgttttttagctagtctgactttatgaagtaaaatgaaatggattcttttcagtcacttataaactatctgcattccatgtgcgatgttgccgacttttagcgtagttgactaactgagaatttgacaggtggcttatacctttg

SEQ ID NO: 44073 - DNA, 940 bp, Manihot esculenta
  Intron number 1 from transcript cassava4.1_006429m (locus cassava4.1_006429m.g) derived from phytozome v7.0 (chr-ID scaffold08359; pos 2026402 to 2027341 reverse strand)
tggtgttttttcaaggagcgatatataggaaggatgtaagtttctctttattttcccttttattgcaaactgttgaaatgttcatcactttatgtgttaataatctaaaattgatccctccctcttaatatggacttgtgatacaccagaaacctggattttattaccaaaaatctaggttgaacaagagtacttaagtgctcaaattgttgcgatgcagttttttgatgggaactgttctgattttcttttttccctattgtctggttatttgcagaatatgattatctgtgacaaaatatttcaattatttggcatgtagaagagtctcccagatcaaaagctatggttatactattgactgaaaatgattctgaagattctttggacagttccttcaattgggccacaatatacacccatgtacatcaggaatatcataattaggttctgttcttgagttagaaatagcagttggggattatgcaattatgcagtatcctggaccatttgaaactattcataagattttatggtgtttaaaagcatgaacttgtgtcatgcaagatggtatattgatcaattatgaacaagaaatcaaaagttgaagtcaatcataaatattgaatcctagacacagcaagtgaataaccatatattttgtgtctgatatagtataaatgtcacagattttattgatatagttttgtatagccaaattattatttttatctttgctttcctaattaatattagatcattgctcgtttgttttacttatcttcctgtttcgtattttcttgaatttaatttcagaaagaactaattatttatctccgtagacaaggaagttgtttttagaaaaaggtcacatatttcattgtatgttcttctttttcttacagagaggagttattcgccaagaactgtattaccttct

SEQ ID NO: 44074 - DNA, 933 bp, Manihot esculenta
  Intron number 1 from transcript cassava4.1_010408m (locus cassava4.1_010408m.g) derived from phytozome v7.0 (chr-ID scaffold08359; pos 1289183 to 1290115 reverse strand)
actgctttgtaagtcaccccttgatccttctcactgtactgttttgttttgggattttatcatttccttttggtttttgtgtttttattacctcggctgattagtttgatccgggtcgtcttctggacgaaattctgaatttttcatatgggaattggtttatttgcgtgtgcgcttgaagatatgatgcaatttgggttatctgtttgtggttatgctcaatggggtttggccaattttgattttggtgggaattttgaattttaatttgatatggtatggtactactcccctttattctctctgttatttcttttatttggatctggttctgttataattttgtaattcctgcttatagttctgtgttccattttactcaaaagctacatgctttgatgatctggttttgcttggccaactccatgcggttccaacggtttgatctgttttggtatcttaataatccaattgaatttaaccagggaaaagttttcatgtgacattgtaatgtgtaatactccattctaaggcaatatgtttggagccttgacattgaactgcgtttggaataatcgaggatatggtttgaattgatgccttgatatcattattttggtgacaaattatcctctgttctgttggtacacttgcggtagtgaatgttagaggcaagtttggccgttgatatgtatttgagatatagatctgctatctaactcccattaagaaactggaattctcttgtttttgctatttgagtcaagccattgccatagatttagcaattttccgtttgtgtttatgtgcttcaaatggtaccattttatgcattcgtataaatttgcagagaatttgatttgggagtaatctgaagtggagcatctcttctgttattgcaggtagctaaagatccttctggcaaagatatta

SEQ ID NO: 44075 - DNA, 548 bp, Manihot esculenta
  Intron number 1 from transcript cassava4.1_007893m (locus cassava4.1_007893m.g) derived from phytozome v7.0 (chr-ID scaffold06407; pos 175565 to 176112 reverse strand)
agctggatttttctccaacctaggcgttgacaacggtattgttctttgtttttatgctttgtttgttttcccagaaagttggcaagaatagaaggaatgtgggtggaagttttcttttctttttcttttttttttaaagatatgtttgtttgagattcccttgaatttctgactgaaagctatggtggcatttgatttgtcaaattgaaaaattattaaaaaaagttaaaaattgaaaatacaggaaaatgctctgtagatttcctttactttttctgcaaccaaacattttgaattcttgtcccttgcttggcttggaggcatcaaaaagatttgttaagatttttttgtcaaccagaaaggctgaaggcacctctaaaggctttatgcaaagaaagttgactttttgaatttctccttcttcttgcattccaattggatttttagtttaactattatgactaaataattctttatagttcattgcttaaagattgatagcattgataataattctcaatggttaacaggcttcactgtgacaaagg

SEQ ID NO: 44076 - DNA, 814 bp, Manihot esculenta
  Intron number 1 from transcript cassava4.1_018888m (locus cassava4.1_018888m.g) derived from phytozome v7.0 (chr-ID scaffold00321; pos 77581 to 78394)
ttctgctgccgctgccgccttgctttctgtcttctgtaagagattgattatgtcttcttttgtttatgagtgttattgatttatgcttagataaatggaaccagtagagggaacactcggccactaggttgaaaggaacatttatgcttaagattgatttcttccactcgctggttccacaacactaatttattcagtctcattgattttcatacttgcttacagccttacacagttgcacaatatgatcatatatgtgtatatgaagttataaactgcattacgagttaggtcaagggaggaggaaaaaaaaaaaaataagcagagagcaccaattcatgcttaaagctttaagctgagccaatcaaatcgtctcgaaacaccttcgtttcattcacttctgcgagtttctcccttggtaactcagtcctacataacaatcgtactggtaagccactgcctcactcatccaagcataaacaattttggtcttgcgaagtggcaatgtatcgttggacaatgaaatgcggtactgggtttcatactattctttgattgaaaatccaagatgaattattcctaaaattctttattgttgcaattaattcatggattattgctggtgtttgagttttgttgttgaaatttggtatagtttgagttaaatttctgggttttgatcggtatttttttttatttttaattttttgtttaatttaaatatagtaaatgattttaatttttaggtttgtttggactttgactttttgccgtttaagtatatattcaggttataactaaactacaaacccaa

SEQ ID NO: 44077 - DNA, 730 bp, Manihot esculenta
  Intron number 1 from transcript cassava4.1_018381m (locus cassava4.1_018381m.g) derived from phytozome v7.0 (chr-ID scaffold04251; pos 643588 to 644317 reverse strand)
tatctccgtctcaatctcatatcctcgtagccgtatgcaagtctatctgtttcactcctttcccttaggtttcccaatgaatctgtgtttgctgttgttgatgatgcaattttaagaaactctaaattcattattttatacatgggttctttttaagatgcagaacttggtcgcttttttgtaatcagtaagcatattatcgttcggtttccattgtaagttcttattgtattttttatcacagcccattgtctcaccattatcttctatttcggaattgtttttactttttggtatctaagaacaaagtgtaggacttacgtcacaagaaatatatcctttcagaaacggcagaaattaaaaagttcagaattatgcctcttttcttatattttcagaggtttttgtgaactgaatttttttttttgagaactataatgtcgatcccttatatttcatttgtgatattaaattttgggatcaattattgcacatatgctcaccggagttcctcaaccagcagcaattttattgcacttcattcgttgctgtcggggccttgaataacttttaattgtgattttgattcaattttgaagttgttttacttatttggctaccttctaacgtatcattttagtggcaagtgtcctgattgtatctcatattttatgcttggcatgtgtactttatagtctaaaaagaagactagagagccaaaggaagaaaa

SEQ ID NO: 44078 - DNA, 710 bp, Manihot esculenta
  Intron number 1 from transcript cassava4.1_003907m (locus cassava4.1_003907m.g) derived from phytozome v7.0 (chr-ID scaffold06582; pos 786900 to 787609)
cgcctaccgccacctctgctgtctctcatttcttggtcagcctccttcaaaccatgaagcgcacattttgtttactgcaatatacttgtggttgtatgttgtatgtgttctggttgcatggttgtgtgaatttgaagcttgttgctttacatctcttatgttggtttatgtatatctatttttgttttcacgctcttacctcatggaattctgtgagaaattggtttgatttgctggtcttgttaatggatgattgaaatgagttgatgttgttggctttcttttcttcccagctcaacgtaaccttatccatctgtaattatgtgacactttgaacttttgtaatcttatataagagaattgatgtatgtgcagcagataatttaattcagagatcttgagcttcatttatttctgagtggataactagtcagttggtattagactaatatgagagtctacttgacagtcggtctattgaatcatcttcaattgtgcctcattaccacttcataatcacaacaaaatcagagctaaaattactgaaaataaattacatttcttggcctaaactagtatatcactgtttcttaatcatcaacatcattatctattttaaccaaggtttgttattattgggtttttacaactgatatcctcttctgatagctgaatttttaaatggttgtcgtcaggccatcagatagtaa

SEQ ID NO: 44079 - DNA, 1016 bp, Manihot esculenta
  Intron number 1 from transcript cassava4.1_003974m (locus cassava4.1_003974m.g) derived from phytozome v7.0 (chr-ID scaffold03542; pos 380575 to 381590)
gctcccaacgaggttgtcctaaaggttagcaagttagtaactcatgcagaagtcttttaatagttaatcttaatattggaaactactcaaatgaaaataaactaaaatttatcgagttagttaacactccccaatcaataggaccatagatatatgcatatatgttaagttatggtaggtaacgtccacatagtttgtttttgaattttgcttgacatgtccacttaacagtgactggctacataccccatataataaataagtttgtaggatacaatgaatcatctttaatctctctcccactagtaaatctcattgtggtgccaaatttttccccatttttgcaagtttttttaataaatcatacatgacataattggccaagtgcaactagctagccttattttcatgttatcaaaataatcaatacaatttctcacaaacatcaacgtatttgttagttctatgctaatatttgctcatttaatataattaaatggggaaaatttcttacctcagtacttaatgtattgctttccattaattgaatacccacctaatagataaaagaattttgagtttttgtttgtcttttttctggattcatgtgccgtaggtggtggggaatcttccagatatatgtgggtcattgaaagtgccttgtattttttataaactaaaataaatattaattatgtaaaaagacacaacgaaattgaattttctttttgtgtttatgattggaacccttgaacaacatgagaatgatttgattattattccaggccacaaaccttgctttataggtaaaattacaagtggtgtccaatttactacttgtcttatttggttagtcaaataatgcactctacttgttgctactgtgatcttatcattagtccaggtatatcatcacctttttttgtgatattgcaatcgagatatcactatcacattgattttaattaatattaattattataagcaggagagagaagaaaattttagtcctacag

SEQ ID NO: 44080 - DNA, 820 bp, Manihot esculenta
  Intron number 1 from transcript cassava4.1_026414m (locus cassava4.1_026414m.g) derived from phytozome v7.0 (chr-ID scaffold10305; pos 509030 to 509849)
taccattgtcttcttctacgtgataatttttcaaggtaacttcgtctttctctcttcttattgggttactaagatgagacattaagcctgaagaagctgaaaatcaagatgaatctggttatgtgtgcatttgctattcttttgtgatctattaaaattcctatggatgtttgttaggacttccagacgtgcgatgcaagtcttatgaatatgcttatattcatttttcaggtttcttgggttctcgtgcatgatgcctttagaagtgctcatctttaaattgcagtacacaggtactattttctttatatattctttcttgctttttctttcgttttttcaaactagtgttaggctattgcaaattttccatgtcagcaattcttctctgttctgggcatgttattttcttgtatttgacctgggaaatgcttcaagtaaaatcttaattttcttttgggtaaagtttatctcctctgttaaaaagcctggctgaaaattctacctggcggcatggaaaagtaagctgcattttttttatcatgatctccgtacatctcttgtagtaatcagttttgaagagattataacccttttttacgcgtatttgtttgccagttttatggacatgaatttcaggagatggcatccatggatcatggctctccaaggcagcaacaattgcaattctgtgggtggctcaacaacaaccgcaacaactaagccttaatcccaatccaagtacagtgctggtgcttttaaatatctctaacaatttacttttggagtaagattttgatgctttttcatgaagtttatt

SEQ ID NO: 44081 - DNA, 693 bp, Manihot esculenta
  Intron number 1 from transcript cassava4.1_016732m (locus cassava4.1_016732m.g) derived from phytozome v7.0 (chr-ID scaffold03834; pos 233028 to 233720)
gtgcacgtctctttttaccgcaactgtgagttgtattactctctttttattcttgatttaccatactatgaatttggctgcattttctttcatctgctctgcctttgattctgttggttttctgattgccttctctgtgttttctatttcttttatttttaatgagggtgccgttataaagtgttttcagttgcttgtggttttttttttttgagttggtctgtgaacttctgtctgtttgtctgattcgcaatttcgtatttgatttgattttcaaattatttagcgccaattttttctgcgtatatcactgcatgtttagatgcttcggtatgataaacattactaaagttagaagaaaaacattgcgggcaaaataataggaatattagcttagactcccagtacctgcccacatatgcagtatgacaaagtttgagatcacagcaatataagtggaggttttatttgttctctcaaatgttcataaatacttgtttccaaatcgaatgggcatattaacacagacgcacacgcacacgcacacacacacacacacacacagagagagacttgttttctaatagtgatacaatcattctagtttctatgctgttattcgggttgattgtaatacttactggggatcacaacttctgtcatttagttaaactactctgtgtttgtcaatag

SEQ ID NO: 44082 - DNA, 386 bp, Manihot esculenta
  Intron number 1 from transcript cassava4.1_018009m (locus cassava4.1_018009m.g) derived from phytozome v7.0 (chr-ID scaffold02912; pos 63861 to 64246)
acccccagtaatttccaggtgaagcttggtgttcctttcaatacaattctcatgctatttaatttgtaaaatttggtcaagtaaatgcataggaagtgaaaagttatgaactttacaatgattttctatatgaattgttgtttggatgtgcattaggtgatattaatagccgaggcatttctttttaatgtagttattgataaacacagaatcaactcctgtaatttcttgtgcaagtctaatttttttagcttaaattagattttcagtttgattattataccatgagcttatgatgatttggatggttttccattggattatcatgtagatacagtttaacagaagatttttgtgatagattgatagttgtgagaatagacgag

SEQ ID NO: 44083 - DNA, 1022 bp, Manihot esculenta
  Intron number 1 from transcript cassava4.1_013753m (locus cassava4.1_013515m.g) derived from phytozome v7.0 (chr-ID scaffold08028; pos 41931 to 42952 reverse strand)
cctctggtattttcttttttactatttttttcacgcgtatattttgtgtttttttggctttatatatatatttttcacgtataaatatatatttatttgttgggctaaacgatttttattcgtactgttattaggaactaataataattaaagcttttggtttggattataaagtggttaggagtaatagtgattgcttcaattcgaggctaattatgatactttttgagcgaacatgtaaagtgtgttaccttccatgattatcaatccacagaatctacctttctgaagtggcaaattttcaattaatgttgtactgggaagctttcttctccaactccgtttagatatttgcaagcttagctagatttcctaggaataaggttggcagaagtttttattgttagtttctgtggaaaatgagccaaaaaagaggttgaggtgaattaacaatttttggagtattattcatggtgaatataagttttcataaaattcaatgcatttataaagatgacagcagcacatctatttgtaaaatttttttatcctcccatcgactgtaaatttgtgaaatgtgctaagatttatattttttaaatctttgattgtaattgtccttcgctgttgcatttgcatactgtgtcagtaatctccaatctgctcagatgctgggtagagaaaaaattcttaccttgacattcctgcttatacttcataatgctctcttcctttgggctaccattggacaagcctgtcacctataaaagaaaattagttaggtacacagtaacttaatgtgagctgactgactgggcttggtaatgtagttggttagttatctactgaaagaaccatattgttttgtctgtgttggctacccttttcctatgtttgtattttcctttttatttcaatcttcatctttttctttctaacaccagcaattgatttttggctgttggttgatgtgaatgttctatatactgtagaggaatctgagacagacagtgaagagtccg

SEQ ID NO: 44084 - DNA, 546 bp, Manihot esculenta
  Intron number 2 from transcript cassava4.1_024962m (locus cassava4.1_024962m.g) derived from phytozome v7.0 (chr-ID scaffold08359; pos 319289 to 319834 reverse strand)
tttttgcagcgatcgtgctcaacttcgtgaacgaggtaagcttagttctttatggggattttgattgaatcttcgctttgaggtttttgtactcgtttttagctatcttgtgtgaatcttcgataaaattataaccatttatatgttataaaattcttttagtttgcttctgttttttggtaaaacggaaatattactcattttttaaattctaggtttctcacatatagggagctcaggaaataatttccatgaatttttctttaagagacacccaaagaaattgggaaaaatcgcaattagcaatttggtttccttttattttcttctttgagaaaataatctaggacgaaatcgtttgacttcaaattcttgtacgttaaagaggaaaagtttacctttaaatatgtttttgggtggaaacttttaaatacttttttaatatagcagcataacatttagagtatcttttatcctatcatttgctctttctcatttcttcaatatctctctttgtccagcaaaataggccactaaattctcaaa

SEQ ID NO: 44085 - DNA, 963 bp, Manihot esculenta
  Intron number 1 from transcript cassava4.1_027041m (locus cassava4.1_027041m.g) derived from phytozome v7.0 (chr-ID scaffold02986; pos 42282 to 43244)
atccagagaggtacaggaggttggttggaaagctgaactaccttatgataatgactcggccagatattgcttttgcagtaagtgttgtaagtcagttcatgtctgcacctacgatgtaacattgggccgctctagaacaaattctatattatctaaaagggactcctggacttggtatactctacagagatcatgggcatactgcactagagtgtttttctgatgctgactagacgggatccaaaagtgatagaaggtcgactacaggctattgtgtatttattggagaaaacctagtatcttgaaaaagtaagaagcaaaatgtggtatccagattcagtaccgagtcagaatatagggccatgactcaattgacttgtgaaattttgtggataaattatctagtgaaagaagttggtataatgttgcatcacccacgaaactttggcctgataatcagactgctcttcacattacttccaatccagtatgccatgaatgaactaagtatattgaagttgactgtcatttcatccgtgaaaagattcaagaaaatttaatctccacaccaattatgtgaaaacaggagagcaattgggtgatctattcaccaaaactttaaatgggtctcgaataaaatatttttttaacaagttgggtatgataaatatctatgattcaacttagggggagtgttactagttatacaggaagtaaatatgttaatatagaaaataaatattgatagatgggttagttacttaatctcagggattgtataatcatatgcttgattttcctttcagtttagttaccgtctctcatgtataaataggttagtaatctctattgtaaaatataacaaaatattatatttctacaagtcaaaacagcaatagtattatctcctttatgttttgaaacgactggttgtttatttagcaaaagttaacgattctgcag

SEQ ID NO: 44086 - DNA, 685 bp, Manihot esculenta
  Intron number 1 from transcript cassava4.1_014609m (locus cassava4.1_014609m.g) derived from phytozome v7.0 (chr-ID scaffold12794; pos 1029773 to 1030457 reverse strand)
tgcttcaaaggaagattcttgattcagtctctggggtgagttctatactgatttgcataacaaagaaagtaattgaatattttcaaatctcgatttgctagatctcagttgattgcatttcgattattccactaccaccttggtagtgaattttgatccaggttggttttggtttgaagatttgattggggttttgaatccattaaggcactaattgtgatgggtttgagtctcagttcgtgggattttgttatactggttcttctttaacttcaatgtcttccattgtgattcagtagctcagcttcattactttacttgtttcaggctttcagctaattttttctgaatttgcagctatatattttggttcttagcttgaggtttgttagagttagtttatatgattcctatgtgttgccatttttttttctatgcttatatgagtagcttctcctacatgttgttatatttttgtattgtacaagttgtattgtttctcatatatatgtaatccaaggcataccctaagtcattgaggttttcattattgtttatgctgaaccaaataacatcgcctaaatgttgcataataaaagtcaactgttactaatgtgggctcttcatttgtttgctatatcattcttcaggtgcccctttcgaggaggcagtgcttatttctggt

SEQ ID NO: 44087 - DNA, 583 bp, Manihot esculenta
  Intron number 3 from transcript cassava4.1_030933m (locus cassava4.1_030933m.g) derived from phytozome v7.0 (chr-ID scaffold10524; pos 84131 to 84713 reverse strand)
actgatcattctctatttcccagtaactaccaagatctttttttctttaatagaaattgtcaaaactggtcctgacatgtttctaccttgcaattctgatggtacagttactatatcttccatttttgtcacaattagctagtcaggaaaaaagcatcttcaatctgttgtattaagttagtccataatacacaaatacctcaattttgatctgcctgttctgtttattctcttttgaagctttgatgcttgaatcttgattagttgttatcattaagagaaaccacgtcctctttcatgttttgaggcaacattaggacacagtatgtgcatggtcctcactatattgcttacaactgaatgtaacttgcctggaatgacacttgaaaatcttcatcagcccctatctcatttaatgaacattttgagcaattaaatttgttaaatcaggtctaaagttcccataacttaattttttataagtgtattattttatttttttagcataatattgagaagtggtaatttattctgttttctcatcccaggtactgctaaagttggcccctgcatatctgttgag

SEQ ID NO: 44088 - DNA, 630 bp, Manihot esculenta
  Intron number 1 from transcript cassava4.1_012986m (locus cassava4.1_012986m.g) derived from phytozome v7.0 (chr-ID scaffold08100; pos 300278 to 300907 reverse strand)
gcccaggtacatattctttcttgtacaagatcatgtaggtactttttaatgtattttcttactgggtttttccgggatactgtgcatataatttcggaattttgaaagattatcttctgtcctaaggttttgaagatttttgtttcctgtgctttaatgtctccctcactttctgtagatatctcagccggtagactgcgatttttgtttttttgcgtggagggaggttaatcaattcatctattatactaatacttctccaattaagggtggtgtttcacagcttctagtttcgttctatatatatatttttaaaatttttacttttggaacagagaactgattgtttgtgcgtctagattggttgtactttatctctatatttgactctttttgttgtttccttgtgtaaaatctgggttctgtcttcagacgctggaaatatttaagttcatatatttttctatgtaatttgttctatatatggtgaatgacttattcttccttcacctgcctcttctggttaaataatttgggatttgaaaccaggtcaagcatatacaagtataaatttgttctgatgttatattattttgttattgtagatatatagaaagataggagagaagt

SEQ ID NO: 44089 - DNA, 324 bp, Manihot esculenta
  Intron number 1 from transcript cassava4.1_032768m (locus cassava4.1_032768m.g) derived from phytozome v7.0 (chr-ID scaffold05831; pos 66578 to 66901)
ttgaacaggttcttttttcttctcattttctaattgctatttgtttccttagtttgaagttagtttctttgcttagaaaaggacatgcatacttttaaaaaattcaaaagttaactgttttcaacatcaaaagcccattattcttattgacattatttttaatgattctatgaccattaccacccccctatgtgatgtgaccagcattcaaggtcttgttagaaactgcgacaaaatattgattgactaactttaacacatcctcatgtcatcacaaaatatttcccagattttcgagtcgcttcaggaggcaggaattaaggc

SEQ ID NO: 44090 - DNA, 519 bp, Manihot esculenta
  Intron number 1 from transcript cassava4.1_034441m (locus cassava4.1_034441m.g) derived from phytozome v7.0 (chr-ID scaffold03115; pos 153100 to 153618)
ggagaaggtatggatttcttcttcatcttcttttatttctctcgagcgcggacctttttgtatttgatactttcgaatttgtctcttcttgccctatattttttgagacaggtttttctttgcctatcatattcgtatatttcttattaggcgcgtctgataggcactgcagccacttcttgaaatggttaatatttatcaagtggttttagatacaaaatttcggtttttttggtataaataagaaattgctaaatggagaaaggcagagtctattgggaagaggataatgtactgatgaagtgtggctcctttttaacagaattttgatggcatgccttttccttagtttttcttttgcttccttttttaagaatgctccttttttttaataatgatgtgtggaaaattttcttgtaatcttgctatttttgttgtgtgtgtgtgtatatattcagctttctctagtctttttgatatactaaagtttaaataggtgtaatccctgattgtttcacc

SEQ ID NO: 44091 - DNA, 993 bp, Manihot esculenta
  Intron number 1 from transcript cassava4.1_002951m (locus cassava4.1_002951m.g) derived from phytozome v7.0 (chr-ID scaffold05875; pos 701586 to 702578 reverse strand)
ctttggggtggaactttcggagaagtatacaagaggtaagagatgattgtgctttttctgtgtttctaatgacttgttaattgcttttgtttttgtctcgtgcttttgtttgatgaattggagatgcaaatgtacttgttatgtatagaagctgtttaactaaccagcaaacttaaaaccctggagattagtttgcttttgtatattgatcagctattcagtagtgttgattacaatattataactgactttgcattgaggaatttttgttcctttgttgggaagctaatttatttttattgtttttctcggataagataagttgtaactgaaaaatttgcccttctattggttaatttgtttcttttttttccagatatatatatatgagttgttcattgttatagtgtataccagattagtggttgaaactggatatggcaaaggtcatcaaaatgtcaacagctctttactgagctcttttttttgagagattacagaggtctttttaattcataccaagacgtattgctttttatggtaacttaccatattcattaaattttggtcttctgatcagataaataatgttctgcttgtcaattaaagtataaactctgtacagcacgccaaaatgaatacagaaagcaattaacaataaagctcaaatttattaacatggcttatattcagcatctatgatttgattggacaagtcagtgcttcagttatggaaacttaccactgtttccatctccctcctctccttttgttaaattgaacagagtaatgctggcttaattgcaatagaaaaaatagaaaggaatttactattttttaaataaaaaatctgtgctctaaattcaaaggcggttaggaattgccgagtccaattagatatcattggcagcttcttgctatcagttgtggaatgctgctggtgattggctgagcacctttcaattgttctgttggatatttttgcagacctct

SEQ ID NO: 44092 - DNA, 538 bp, Manihot esculenta
  Intron number 2 from transcript cassava4.1_006157m (locus cassava4.1_006157m.g) derived from phytozome v7.0 (chr-ID scaffold10963; pos 302757 to 303294 reverse strand)
ctctctggtggacacagcgtttattggccaaataggtacttgttttctttgtatgttcattctggatccgcatctgctgtaaattctatttcttgtatttgcttctttttgggtctgattcagattgtatatatttgaattcttgattagccaaatgaggttttggattgtgctcatgcttaatgaaatgtgcatatactcttaatgaacactgctcaaatgactaagttagagtcccataattttatcagtattgtttaatcctactgcctgttgagccttttgtttgcttccgtctacatttactaacttaaatcaatgatatgagtgcctttgtgctatctggctggcccattctttgcattgcccttgttaatttctaccatatgtttttatttcactgtgctggagaagatttatatgtcagtgttctttcttttaatctttatttcttgtaaatggtaaaggggctaacctctaatgtatgtatatgattcattcaggtccagtagagctagctgctgttggagtttctatt

SEQ ID NO: 44093 - DNA, 900 bp, Manihot esculenta
  Intron number 2 from transcript cassava4.1_016062m (locus cassava4.1_016062m.g) derived from phytozome v7.0 (chr-ID scaffold05280; pos 475496 to 476395)
tctgagggtgcagattgctgcttttctttttggtggtgagtactcttgatctactgcttatttgcttttggaatgtagatctacctcttttagatatggctatttatttaccttaagttttctcgctcttgattgttgatttacatttttaaacaaaaagtcttttttgactttgcttgacatgcggttgactttgatagtgctcgtgaattctgataaagtaattctttgggaggaaaacgtttctttcttgcctctcatccttgggattttcggcttttgtttggaaatgaagaacatattgtgttcatattaattcaatttatatattgtatgcttttctttttattttcttttatctgggataaagctaatgctttttgtttttcttcttcatgagactgttgtgaactgaggaaggtatcctgatctatcaactagcaattacaaatatcatattattttctagtgattttatgtgttgttatgatataagatacttcttccgtcacaccataattgtcgttttagataattttttatcccatttcttctgtcactttgagagtttcaagtacattaatttttattttctatatgtacccttactagtttttaaatcatttaatactaatataaggaaaaaagtatgaccatttaaagagtattttagacaaattattgtaaacttttctaaaatgaaggctattaattattcttattggtttggatgaataaaccttttgtgggacggaggtagtattcaataaccgtaataattcacagtttatttatgccttttcatttgtactgttaaattaaatgaattttacttgttgattttaggtggtgtttttatcttaatacatctaattatctttgtatctgttttagtgggcc

SEQ ID NO: 44094 - DNA, 634 bp, Manihot esculenta
  Intron number 1 from transcript cassava4.1_017981m (locus cassava4.1_017981m.g) derived from phytozome v7.0 (chr-ID scaffold03116; pos 162655 to 163288)
attgtgccgtcaatacaagtcctggaacgagtgaggtacgcaaattattatgctattttttatacaagtcctgcacgacacgctcatgcagtacatttctgcacaaacaggactttattagaagattgtaaaaagtgcaccttctttcttgctactgtctttagccaatgcaaaaaaatatgctagtttgtaatgcttaaaactcttttgactttaaaacaacttccatctatcgagttgtctgtcaatgaatcatattagcttatgaacagattaaattcaattccagagttggaaatattgttgaggcatctaagccaaagtaattgctcttagctgatagctgaggtggacatgctcgtctgactggctttatcatctgtctgcatcattatcggtattttctttggttccatttctaaaaaatataaataatgaaggaaacatttctctcctaacagcatgttaatcggtcataatgaactcactatagaatgaaagtaaatagaaaattataacagcatgtttgtttcaaaatgctaaggtcagtgacagttacttagctttctttttaaaaaaagaaaaaaagtactgagcttttgttttatgttatttatacaacaggttattatat

SEQ ID NO: 44095 - DNA, 606 bp, Manihot esculenta
  Intron number 2 from transcript cassava4.1_016585m (locus cassava4.1_015007m.g) derived from phytozome v7.0 (chr-ID scaffold05219; pos 105617 to 106222 reverse strand)
ctgaaagtttgtcgtgtaagctcatcttacaattacttaaagaaagatgatgtgcatgttcatttaaagaaagattgtgctcggatatttattgtacttcattatcaggacaaatttatcgtgattggtgatgtttcttttatcatttggttgctaggtttatgcaaatgatttttggtaagcttaacttttgttaattaacaaccctcttggtttttacttgacagaaataaggggaaaactgaatcagggaaaagaaaaaaaaatgaactaaatacaagcaggtaaaaaagtagaaagtgaaaatacgtgcggaaaacttgtctgtagtataaagctaaaagatccttctgcattttctgttcataaatgtggtgatttaatttactagagaaaaggttaatcatatgggtttaattgaagtctttatcttttgctaagtttgatcaaattgatgcatttccttacataatgagaagtgcatgctttagttatgcgtgcttccaccttccagaagtatattgttaatcttcagttgttagggaacgacaaatgtgtgtttgatgatttctcggtccttttccccttctgttagttgcggtggca

SEQ ID NO: 44096 - DNA, 954 bp, Manihot esculenta
  Intron number 2 from transcript cassava4.1_032494m (locus cassava4.1_032494m.g) derived from phytozome v7.0 (chr-ID scaffold08686; pos 328507 to 329460 reverse strand)
ccttcggttataactacccttcggttgagcttcaggtgaccactttgcattgcaattttctgattgagaattagttttcagtcgtcactataaaatttcctgtggtggctgtctgaatcaaaatggcggttgacaagagattcccgagcgggtttggactgataattgaaatttatcagcatttcagcacataattggtcttttttcttggtttcaaatgatttcccccctttttctaactttgtttctgggctgtcaaaattgtattaaagcttcattagatgtcaaagtagcaattttttttttcaatcagtgttccattgattgaaacgccttattttgggttttctattcctcaatgttttataatgttgttcagtttggggtccagttttggtggctcatttttaatgaatgttgcaaagattctttaaactgtttgcttccatacaaaatagttggagttgattttcctgaaagaatttatttcttcaagcttcagttttattgacttatttagtgaaataacatttctttaataatgggacccttttccccgcaaaaataggatgcaagatgagatagatgttgtcattatgatttctgaagattcaattatcaagagataaagtgagagttgctcaaactgaatttctaaatatctgctgcctaatttgggcctaaatatccgactgcttgaatcaagcctgggaaaagttgctctatttcttaaaaattataagcaatcaatcactctaaacaaatgaagccaccgaggttttttcaggtgttatttttttttttccttttggttgtgcttttgctattatattctatacttcttttgactggaattctgaaagacagtgtttaagtgttttagctgcagtgttatttacttatttattatatttcacaggacggtttgcacaaagaattatctgttaagggtaa

SEQ ID NO: 44097 - DNA, 295 bp, Manihot esculenta
  Intron number 1 from transcript cassava4.1_032494m (locus cassava4.1_032494m.g) derived from phytozome v7.0 (chr-ID scaffold08686; pos 329516 to 329810 reverse strand)
cttgtctgattggcctctcagctcttcctacccaggtccccatctgaaactctctctgtgtttggttcctgagatagcaagaatttttttttgtcccgacctatttgagaataagtgatcattttctgctcagctaaggttaattttagtttgttgcagtttctggccaatcaaatgggagatttagttggtgaattgccatacttttgattttgttcttctatgcttagttttggatttgagttgttattgcattgcaggaagaaaccccaattcgaattccaagtctggttta

SEQ ID NO: 44098 - DNA, 961 bp, Manihot esculenta
  Intron number 2 from transcript cassava4.1_012139m (locus cassava4.1_011259m.g) derived from phytozome v7.0 (chr-ID scaffold04308; pos 77717 to 78677)
attggaaatacattcttgccggtctaatttgtcaggttgcctcttcttcttctgtgaaattcttattgctgtatattattttctgcgaatactccatttttttcagcccccctctttttcttgggcatgaattcaaccaaagataaataaaattttgattgtgctttatgctggacttctttggtctacttggatttcctcaatcacatgttaactcgattcaacttccagtgagcgatggaacttgctttaagttttaatcttaaagtgcaggatccggtagaaggttatagtcactgttccctacatgttctgatattgtgagaaaacttatgcttttagcataatataaagtccctatcatttcatgtgggtgtcctcaacgtaaagaggaaaattttcctggttgaatgtcattattttggtttgtttttacttccttttttttttttaaaaaaaattaatacttttgggatgaggggcctggttgggggaggatggtttaacttggtagattttacactaacatgttctgtgctaattttgagtgactgctacgtattagatgtatgaatttcataattcaggtcgtggatagtgttccaatgcttgtaattcataagtttgttcataatgagatgttcaaacttttttcctttttctttctttttggctctctgccattgcttgtaaattgtaataattaagaagttcaattctatgcatttacggagatcccaagtccttagatttgtccttatttatttatttattttgttttcaacaagatattccattacttgtattctttgaagtcattagtgcacattcactacttgcatggtttttgctttgatgtttcctccttttcctcctttaattttatacattgcttcccttttattcagttttttatgcatggctaatgtttccaatctatcttacttgttgcagtatatac

SEQ ID NO: 44099 - DNA, 930 bp, Manihot esculenta
  Intron number 1 from transcript cassava4.1_012241m (locus cassava4.1_006679m.g) derived from phytozome v7.0 (chr-ID scaffold03581; pos 237107 to 238036)
agcaaatttcagtccacaaatacaaacactcactggtacgccaagtctcacttatgattcctttatgttttgcctttgtgtgctcggaaagtttgtgtctttacactttgccctatacgatgcgttttttgtttcttattttccgatcgtacttcgagctcattgcatttcaatctgctcaatttgagtttttttttagggttttggttccgtatccttctatgattcttttattagtagttttatcaaactctattatagggtttgtattgattcatgtccgccctcacttctgctgtcattttgttcgcattaatcggggttcagatgggtttatgttaataggttcgtttattgtgtttcctttgaaaatttatggattattatttcacaccaatctgagacaacgatacctcctccttatgctatcttcttttttctagattagaagaaagggggggataatgaagacaaattgcaaaattcatcttaattcaaccatttatcactctggtaccaacgcaatctcagtggtagttttttttttttttttttttttttttttttatgtatatatatttttattattttcttttccaggattcattgtaatggaaagtttaggtttttatgttattttttcttgtttctactctgattcctccaccaatccgagcaactaaaatcagtttgtctgtcctcaaagtatgtgtcgctaattataactgctgctccttttagcagctaaaaattgtagcgggtagtttttcaaactctgcattatctaccagcctcatcttcctctttgctatgctccccacccacatcaattctcgtgccttaagcacatccttgcagtttaatgcattttccataatggttaatcaaacttgctgttaatgtggggaccatttaactgcagttatttgg

SEQ ID NO: 44100 - DNA, 542 bp, Manihot esculenta
  Intron number 4 from transcript cassava4.1_012241m (locus cassava4.1_006679m.g) derived from phytozome v7.0 (chr-ID scaffold03581; pos 239131 to 239672)
agggcacgcctgatcattctgctgctgctgcccaggtgaattattaaagcaattagaagaagctgattattcataattgaaattctcaaatgctttatatgtggatcctgtgtctagtaagtagccttaagaatgtttggattccttacgtcatttaatacattatagagttaccccttgtactaccttcagtaaatcactgtgttatctcttctatctttttagtgtataacatgttcataggaaattcacttggtttctttgccttaacttctcatatttggctggaatctcaatgtgcaattccttgcatacatatcaaaatatgttacactgctttaggatatttccaaactgcttatatttgtagtatgccaaaggagaaaattatagttttttgttttactagagtaaaatgattctaaaagatcatgtggaagagatgttgagccaaatttcttttgggtgcttgtcatattttcactgaagttcatttggtctttaaccccatatctgttttggatgccaggttaaggctttgt

SEQ ID NO: 44101 - DNA, 646 bp, Manihot esculenta
  Intron number 2 from transcript cassava4.1_009138m (locus cassava4.1_009138m.g) derived from phytozome v7.0 (chr-ID scaffold11581; pos 1543102 to 1543747)
ctctcttgggcaacaggttaactatatatgctccttccgtcagatctctttcttcaaaaatcattaattgatgtatagcatttagactgtgaaagaagatctgagggcttgcatctagctacctcaagtggacttgctcgtttgtcatgtctcttgtttattttctcggtttcaaagacaaaatcaaagttcgttgaccgtaacaagaaatctcctgttagtttgatatgttttcatgtgatagggttttcttaattaatacactcttccactcagtaatccattgcccatatactgaattttgaactatggcttttcagctgctccgtatatatttacgggtttctctgacatattcaatccaatttcatttatgaattatggttgtctttaaatgcaaaattttttgaaatttcagcaatatgacacagaaaatgattttttttttcccctctccattgttcatccagcatctgatatatacatttttttttttggtctttttagaagcatagaaaaatactagcttgggaactatggttgatagtttctagggtttttatcgttttttaggtcggtctccattatgtcttttttttttttttactcaggtggtcggccatagctactcacttgccaaaaagaa

SEQ ID NO: 44102 - DNA, 721 bp, Manihot esculenta
  Intron number 1 from transcript cassava4.1_017390m (locus cassava4.1_017390m.g) derived from phytozome v7.0 (chr-ID scaffold07873; pos 115832 to 116552)
aggaagagctttctaacatctctcaagacatcgctgtgagttccaattttcttgttctgtgcgttattttttgtcttattattgctttatgtatggttgttcttgttatagtttgtggtcgtaggtgtaatgtggcttgattcaactatacccacctcattattcttgtttggatctatgtgttttcctagaaaatgaataaattggaatgtgggtttttgaatcgagttgagggatttaactccaaaagtatgtgaagtgaaatcacatgatgggttttgttattggcttattttgtgacaaatttcacctgagggtttgatgatgttacccaattctcattcccatgttccatttttattttcattttggattattggtatcagatttgatttaacacctttgagaagttagttgctgggagaaaaggagaggaaattattaatcttactaatcagctggatagtgtttttctgagttgaatgctggaacccaattgtgttttcttttctgagacatcattgaacttgaaattaccaagtgggaagaaggttagactttcattcaggactagttgtcaaagaaaagttgtgtttttttttttttaaaaaaaaattaacttcattgagaaattgtttttccagtaggtaaattctactgtaatctaaaagatttactgtgatttgcagactttctcaagtactgttgaagagaaagcaaa

SEQ ID NO: 44103 - DNA, 857 bp, Manihot esculenta
  Intron number 2 from transcript cassava4.1_017390m (locus cassava4.1_017390m.g) derived from phytozome v7.0 (chr-ID scaffold07873; pos 116556 to 117412)
gattttcaacaagctgaaaggtaagaatatttgttactgtgcatgtcccagtcaaagcatctagcatacttgagtcattgagcaattgattatccaaaatactctatttatgcacttccattgtcaagcaaaacctctttctgtaacttgccataatgtagatctcacttcaatatctttgggactcacttccttgcctactttcctttgaatgttcacgttcaactgaactttcatatatccaaactactattacagtgcttctgtaattgggagccttggatggcatcatttgtcattgggagctccttgtgcttctgtagaagatcttacaagataattatgacatggcctcaatgggaccataattgggtatccatatatgacctattgcctttttataactaaatcagcattcattaaacaaggttggtgatgacacattgcccttagtgaaagtattcatcaaacaagtttttgtttcttttattttctagtgtgtgtatatttagcttcttattcaatgtgtttaccaacctttttttattccatgtttcatgtacatgattattattcaaaggaataaatttcatattaatcctaacctttgcttctggcagtattagcaacataatctgttagtgatccatttcttcagtcgagttgggaatgtttcagttctattattcaacaaggataagtttctgaaaaaatgcttccatcaaagtgttagcatttacagtaaagatcaattttccatattgcctttcttttgagcaaaatgttcatcataaagttgtgtttattgtattctttctgtaggaaagcctctcaaaagcttgccagatctgcttcga

SEQ ID NO: 44104 - DNA, 396 bp, Manihot esculenta
  Intron number 1 from transcript cassava4.1_021819m (locus cassava4.1_021819m.g) derived from phytozome v7.0 (chr-ID scaffold07579; pos 50685 to 51080)
cccctcctcccgtcaccaaccaccactacttagtaatattcttttcttataagctgtaccgagcgttacagtgatgacgttatcgtctttttcttccattgtttaacgagcttcgtgtataagtttggctcctttgaagtcattctcacgtttttatgttcttttttgctttttttgtgagattagtctaaaaaagcagtcacggctaactccattccggatacaacgacggcgtttcgtgttccggtaccgatatgaacttgataagatttgatacattttgttgtgactttgatattctgattttcgtttatataataacatttgaataatcgctctggatatagatttgtgttttttttaatttaattttttttggttgtgttcttcaggaaa

SEQ ID NO: 44105 - DNA, 540 bp, Manihot esculenta
  Intron number 2 from transcript cassava4.1_021819m (locus cassava4.1_021819m.g) derived from phytozome v7.0 (chr-ID scaffold07579; pos 51138 to 51677)
gttgcagtaacgccagcagtagctttcaaagtagagtatcgaaatctaatcttttgattttgaaaaatttgaatttgcttctgaaattatttcatattcagataaagtaacgttttagttgattattcaattcaattttctgtttttctgacattttatccgtagaaaatattattataaataataatgataataataataaacaagggagagagatgtttatttattgactggcagagtttgtctaattttagagacattcttctaatggtcttcaacacttgatcctcttttaagttccgttttcgatatgaagcccgagtattttttttattttagttactatttgggttctggtaataaatgcatggtggatttgttgaagtgcttttgtttcattcattcaatttcttggttttgcggcttttgctcctctttggtgagaaagagcagggggaaaattaattatattttattatagtcagaggaatagactcactttgacttgatgagatatgttgttgcgtgttatagctgctg

SEQ ID NO: 44106 - DNA, 375 bp, Manihot esculenta
  Intron number 1 from transcript cassava4.1_008016m (locus cassava4.1_007015m.g) derived from phytozome v7.0 (chr-ID scaffold02717; pos 54084 to 54458)
aacttggaaaggtgagttctcttccttccttatctaacaactttcctcccaggttctctcttcccccacctctatgtacggagctgcataatacagaatcaaacaacaaacaaccgagagaattataaataaataaatttttagttcccttgttctcgatatcctttaatggcttttagtatcgcctcttcctcttcttcttcttctccttctgcaatttctccaaccagttattcgcgctcctctgacctcaaaggtttcttttttttttttttctttcctgaattttgaatttgaatgttgagcttatcattttaaacatttcattaatgatgcgtttgtggcttttggttttcagctccacaaattggttca

SEQ ID NO: 44107 - DNA, 613 bp, Manihot esculenta
  Intron number 1 from transcript cassava4.1_014436m (locus cassava4.1_014436m.g) derived from phytozome v7.0 (chr-ID scaffold11581; pos 1083190 to 1083802)
caggtgaggtgctgggttttgattatttatctgctccacaattactctctattattgctcttcttctaaacaaaaaaaattattttgttgattgtgtttggatgatatgggtagaatttgagagtgcaatgatttgaaggaaggtaataatagctgaaaattttgatcccaaatggtatagtaaatcgaaattagatatcatcatttatgcttaatcgattgggggtgcaaattagcttgaacatttgggtttatattttggtgcagtaacatcagaattgaccactatcaattcgtggattgggaatgagagggaagggaataggatgagttcaaagtatgtttcgattagccaatagacacataacatgcaatttctatagtaactatcacattagacctaatttaggcagacatgtacttcgctgtacttttacttaaaaatcaacccacttgggtccaagcttgagcaaattatccaatttcaagcattgaatagggacatcattttttctgtttctttgatatggattttcttttactgctcctgattagacttgttggtttctcattaatttcgttaatgatcttttccagaggttaggaggagaaa

SEQ ID NO: 44108 - DNA, 554 bp, Manihot esculenta
  Intron number 1 from transcript cassava4.1_005860m (locus cassava4.1_005860m.g) derived from phytozome v7.0 (chr-ID scaffold05875; pos 1010817 to 1011370)
gtgattcttacattcggtaatcattaatctttctctctgtgattcacttgtcagtttatacatatctgtgtctggttctatattgattagatctcctggttttctgggtagaagttgccttcttctttcttggtttgaacaattttttgtttaggctctttggccatacatgatattacggcaatgttcatgagtagaacagagattggatttttctgagaatgagaattgtctcccccaaaattattattttgtttcaattaattcaatacaggtattttattttgggttaaatttgataattgaagttgataattcatttgatgtcaagtaattcgttttaaagattgacttgggttaattaatatgcatttttgaatttgtgaatggatttccctttgtatgtttgtcatcttgattccttaaatattattatcataggatcctgttaggtaggtagacttgtgtgttccagcttttttctattaactatttttttacatggtcatttgttatcagttttgaaaagattgtgttccggagaactgaggaat

SEQ ID NO: 44109 - DNA, 755 bp, Manihot esculenta
  Intron number 1 from transcript cassava4.1_033299m (locus cassava4.1_033299m.g) derived from phytozome v7.0 (chr-ID scaffold07035; pos 526796 to 527550)
gaagcttactagattgcttcgagattcatttgggggtaatatatttacatagaattttttttgaaagaaaaattggatgtttgttgagcccatgcatgaatttgtttttctgtatataaaatataagtatcgatgagtaacaaacttataaactgactaaaaagcacaaacagcaatagatatacacacatatctgaaacaaataagaaatataaaaattatataaaactatttaaccaataatataaaatttaacagaatcgtatactattaaatccgtaaaagattttgaaactcacctttgttatttttgtacgacttggactacaccatcatcaaaattattagatacgcataaaatcaggtttactgtggtgcagcattctttcttctttaaaataaatgcaagattttcaacttttggtattagtatcaattttaacaatcggttcatttgcatctaaaattacttgaatcaattgttttttttttttttaaaatgtttgagtcaattgtttaagctcattaaaatactttctaattaaaaatatcaaactcaataatatagtttaaattttttgccttaatcaacatgccatattaagcgattttatatattcttacctattaaataaattgattatgaactaggcagttatgaaaagcgaatattttataatagtgactttattaggtccctaacttgatgaaattttacagggacagcaagaacttcactggttattactattggt

SEQ ID NO: 44110 - DNA, 294 bp, Manihot esculenta
  Intron number 2 from transcript cassava4.1_012168m (locus cassava4.1_012168m.g) derived from phytozome v7.0 (chr-ID scaffold02080; pos 188658 to 188951 reverse strand)
tcagtctcagcatcctccctacataccatctccttgtaagtttttatttttgcctccccttttctttctctctgcctttgtttttgtctttccatttactagcttggaacccagagcctgtttaatagaggattctttgttaagtagttaagttatgacttgttccttagctaaaccaagctcaaacttccactttttgtttaacccttatgtttagctagctatggcattatcttaaatcattttaaataaattatttgtactcttttttctctgttcgtcttcttctagttc

SEQ ID NO: 44111 - DNA, 972 bp, Manihot esculenta
  Intron number 2 from transcript cassava4.1_010554m (locus cassava4.1_010566m.g) derived from phytozome v7.0 (chr-ID scaffold02415; pos 176821 to 177792)
aaggttggcgcttttgtcctctcctctatttgctgttgaaaatattcaagatcgatgtttggttgtgctttatttccgctttcctacttaggtttgtttggttaaagttcttttgtctgtattcttttgtgccttagttcctggatttgtactagaatgctctgctgttaaagttttacattttgatactcctctggataaatttcaaatgcttatttcctgcttttatccatttcttgtcccattttcaccatggatttaaagcttcataaacttaaatctcatgttgacaaatttggcgcttgcattttaggctaagatgtttgctgtgttgaaatggctaaattatcctttcaaaagcttgagcttaagcttaaagcaagtttggagaagatgtaataatttaatatcatagtccatccattcatttaaaaaaaatgtatacttttcgaataactgtttatatcaaattatttccgtctctttttaatttcattagaaataaaacatgattgtagtgatattccattagattcttcattaaatggtaatatcattcattttgttaattttgtaaaataatttgcagtagtggtggtcatttcattccagttcaatttttatatttagaacatgattgccccccataatgacccattatatagatattatatgcttacataaacgcacaatatttaacaccctttttagtgatagatggtgtgggagaggttaatatgggatagataacaactttggttcagaaggaaacatttgaggacagcacttatttttctgctgcaatatgcaataatatttcctttcttatcagcttacttgaattaaaatgcaagattttttgcagttactcaatgttaacttttcattttgtctcctttcttgatttttctcttgctgtactttttccactttttaggagcggtcatcaggtcgctcacgggggtttggata

SEQ ID NO: 44112 - DNA, 963 bp, Manihot esculenta
  Intron number 1 from transcript cassava4.1_006956m (locus cassava4.1_006762m.g) derived from phytozome v7.0 (chr-ID scaffold04251; pos 350366 to 351328)
tggcattgtcttcttttgctttgaagctcaggtatcgagagcgctaacggttttcagttgggtttatcagttttacatttacaataatacccctgtgctttcccaaatttaagatttttaaagacttaaaactttttattttctccttcaatttgtcaaaagtctctcatgattttttatgctcttcaattgagtagataacatgcttttaaatctcaaattcataattcgaggttaaaaccaaatttcaagctttccacattttaaattttatccattaaatttatatttgttatactatgaatatttaatatgattgtgttgttttttttctattaaattttcattgcattcaagtttataattttttgaaacaaccttcatatcatatcatagagcagctatatcaaagatttaagtattaacagtgtaaataatgcaatatctcattgtcatccatgggaggagggagacgtctactgctccaagactccacaattagttactagttagcgacccctcagtttagcaaaagccactatgatgcactttgttaagacatcattattaagatcaaacaatgagaaaattgatgctgaattttattggagataacttttcacatgctttgtgggggtagccatggctccacaagccatttcacattattcaagattccctagttgtgtttgcacagtttttcaccttcaatagacatattgacgttgctttactcttcactttgcacttccatatcaattagcttcttaccatgactagctgtacactttttaaatttgtaccttttcactttctctttatttgatgggtaactactttggcatgtttttgtgaaaaaaacaaacaaaaaaaaaatcattggcatctcaaaaatggagaaagcttagattttcatcttcttacaggccaatcaatgtgccatgtaggtggaactccaccaca

SEQ ID NO: 44113 - DNA, 1015 bp, Manihot esculenta
  Intron number 1 from transcript cassava4.1_008308m (locus cassava4.1_008308m.g) derived from phytozome v7.0 (chr-ID scaffold03834; pos 263146 to 264160 reverse strand)
attccaatcaagtcctttctcttcttatccaatccgtaagtccctgcccttcgttattattcacttctcttattttatttttttttcttcttattattcttctttctttcttttttttttttaatttttttttctcatgctttgtctctttctctctttctttctctcttcgtttcctatcctttatgtgtgactaatgaactgtaaacagatctaattcaatgcttttctgttctcttaagaaatgtttacttgctagatatttgaacttaaaaagagaaattttcctgttgcgtttcatttgcttttgagatctgggcgcttctgtacagaagtagtttaatcctgaattctcgttttttttttggagggaccttttttccaatttgtttttttggggggagggatcttgttcttgtttatcgggaatggtctaccatttccaaattgaaaattcgatttggaagtttggtttcttacgcttttattggatcgttcattcattggattcagatcgcttaacgtttctaattttcagctaaaagaaagcataggttcattctatttaagtgttcttcatttcgggtttctgggttcaatttctatcattgaaaccaaagaccggcatataacatttctacattttcatttctgtttctgcaaagaaaaaaaaaaatctttgctttaccctcttgaatttatatagcgaaaacttcataatttcttctttggctttcctgggtttcatttggtccacaaaatcggtcataaatacacacagaattttggatacatttttttttggttctgaaagagagcttagcaatcaatcctctttgaatacaaatctcttttacttctatatgaacacgtctgattctgtatattgactgctgcttttggggtcttcaggtgcttggatttctcgattttgattattgttttgtaaatgcaacggaaggattggggctgttgagtttgattttattgcttcaactggccaaattacagagac

SEQ ID NO: 44114 - DNA, 778 bp, Manihot esculenta
  Intron number 2 from transcript cassava4.1_029581m (locus cassava4.1_029581m.g) derived from phytozome v7.0 (chr-ID scaffold05593; pos 11159 to 11936 reverse strand)
ctcattattaatcttcataaagctgtaggtagcaggttggtttcttccggttcctgtcgtttttgtctccttccatttcttttttttttttcatattttttttagcaaccttctattcaaatcaaaataactaattcaaccaaattaatttgaatattaagtttaattttaaatttttattttattttattttattttatttttaaaaaaaattaattattttgatctgaccaattttaataaaaaattttaataaaattaaactcaacattctattcgaattttatacttttcaattcgattactttaattttagttaaaatttaattttatattatatataaaaaatataatataattaattaatcaatttaatttaattttatcaaatattttttattaaaattcaccacttacattaatcaccgattacaaagttaaaaatgtttaattaataggtattcttatgaattattctttaaaaatgctcccaaatatttttttagtaaattattattagatcttgcagtttatcaaaattaactacttaatccctatttattaactgagctatggttcatctgcagaagttgtagaagaacttgtcttaaaaattcccctcaaatagtaacaaacccaactaccaactgcacacatacaactatcttaacgactccatttggtgttttttctgttactaatgcacaaattttatgactcctcgttaactgtttgtgtcgcaggtggtctttaattgcaaggcagcttccaggaagaa

SEQ ID NO: 44115 - DNA, 598 bp, Manihot esculenta
  Intron number 1 from transcript cassava4.1_028600m (locus cassava4.1_028600m.g) derived from phytozome v7.0 (chr-ID scaffold05019; pos 105036 to 105633 reverse strand)
gttattgctctcctttctgagaggttggttttttggtgtttttcattttgatgccttcaagtttaatactttgatgggtttgcttttgtgggttctttctatgttgatcaagttcagattaatttcttatgatttttggctggacgtgcatctgaaaaatggaactttttttagctaatccagattatttgttaagctccaatgagcagggagtcaatcttctggcatttccattttccttttttacgaatggaagaaagggcgttgtcttttttttgtaggttatcgaacgcatatcagcattaggtcatgtagctttctccattgacgattgcgttgtttttcctgcttgtaaacttatattcagtttgacgcttgttcgtcttgtcaattctctatttctttatcctcacaagtcacaggaaaattggagggactgaaaaatgaagatgagattttggtctaatactttttattaatgttagttaccataagtcaaatcaagtaagtaatatcattaggcttacttcaactcaactaagtaatattatttctttccacagggttatagcacgtcggcattcccaaccggtggcat

SEQ ID NO: 44116 - DNA, 230 bp, Manihot esculenta
  Intron number 1 from transcript cassava4.1_029843m (locus cassava4.1_029843m.g) derived from phytozome v7.0 (chr-ID scaffold07035; pos 335055 to 335284)
ttcagcaggtgatttttttttcttttgttattgatttttgaagtggtttgattttcagtttgtttgttgagaaaatgaaggaaatgcaaggaaggttttatttatacgtattagttctctttctttaacctatagatttattttttcttcttttaataatttccaactgcatcgatttaaagatttgttgattttatctgtcttcctgaaacaggaagcactggaggctc

SEQ ID NO: 44117 - DNA, 677 bp, Manihot esculenta
  Intron number 3 from transcript cassava4.1_029843m (locus cassava4.1_029843m.g) derived from phytozome v7.0 (chr-ID scaffold07035; pos 335589 to 336265)
caaatttttgaggtttgttttcctaaatgaatttgttcttatttgggtagttgcttgtttgttttctggtagtaccagacttcaacatttgctgaaaaatggatttaaaacctcaataaagggagttaaaaacctgagacatgtaaactgaacattctttctgtggagtgatgctggtataactttggcatctcttctgaattctttggttcctggttgtattccatttctttaatgggatggactggactggactgaactgttgcagaaacttcctgttcctggttaaccttaccaaaattatgatgagttttacaaaaacctgtaccttacctgttgaaatgtgtaatttttgagggaaaaaggatgccaatggactaagaataagggcatatactcaacttggatgtttgtttttttggtacttggaccttcgttcctgatcacatgcctgtcttgttttcttcttatttaattcaatattcaaccatttgagattacttctgggtttgtttagaattgctcttctgtgaattttcctcaaagggattgtgttattcagtttctcaatgtgtatttgttttcctcttcatccttcaaatgtctgcaatacactcattttctctcttgtaaaacaagcagaaagaaggaaacactgacattgaaggcgttgactc

SEQ ID NO: 44118 - DNA, 519 bp, Manihot esculenta
  Intron number 3 from transcript cassava4.1_005581m (locus cassava4.1_005581m.g) derived from phytozome v7.0 (chr-ID scaffold08359; pos 1095932 to 1096450 reverse strand)
aaactaggtaatatagatgtcttttattgacaactgctattatatagatgtcttttattgacaactgctatttcaattctagtttctgcatctatcattattgccaattagaagcaccagtttttttccctgcaactattgtagagagtttgaatgtcatagattcttcagtattttcagcttattattgttgttttctttgatacatctgcattgtttgttcaatgaatcttgtacttggagaaagaaattattgaaggaagttttattcattcctccatttattaaaacatgttgtatatgaaggcgcttaacgtagccagcaaacttattctcacgcatcaagtggtgtatttgttcctttagtgtcttgtaaatttcttcctggactaacgacctgtttgactttcttaaatcatagtcctcaaatctggggttaagttttttggcattatagacatctttaatacaacatgtcagacttcagttttcactacaactggatattgcatcttgcag

SEQ ID NO: 44119 - DNA, 733 bp, Manihot esculenta
  Intron number 1 from transcript cassava4.1_005581m (locus cassava4.1_005581m.g) derived from phytozome v7.0 (chr-ID scaffold08359; pos 1097718 to 1098450 reverse strand)
tttggctaacaagaaaatttcccactgcgggcaaggtaagtcctttttttccttctttttctctcgatttaatatttgatttctctgttcttttatggaagttgggggagcattttttgcttaaaaccgaggctaattaatagaagatgatgatggaagaaaagcgagagagaaagagaaagagagagggagggaaagccatttgctgcttttcgctgggcattaattacacggtactgagagggcgatacagtgttaatagttgacctttttattgaggtttagattactacataattaccgctgtgtcacacacacacatctctctctctctctctcgctctctctacctgtctctgtttctgcatttattttcctgttcctcattttatctccactccatttacaaccttcaatgtggggttgggttaaaaccttctattacaaatcttcctagccatggaacgttgcgttctttactcctttgcaggttccccctcttctctctctctctgcttttacatcatcatgccattttatacataatccctctttgttctctgcagtgggaatttcggagtgggcttctctcttttttattttcaaccatttcttactgtttattttctaattccatagttcattcttctgtagattgatttgttgggtttgtgttttgctatttttgtcccctgtagggtgcctgccgattctgtatcagaaagcatatagg

SEQ ID NO: 44120 - DNA, 583 bp, Manihot esculenta
  Intron number 3 from transcript cassava4.1_015045m (locus cassava4.1_015045m.g) derived from phytozome v7.0 (chr-ID scaffold07035; pos 556069 to 556651 reverse strand)
gactgaggctcttcttttggggattttgattgaaggtagtgaccaattttgcgcatctcaagctttttgttttcttatttcaatttctattgaaagttgtatttgtattagttatttacattccaatttcatgtatttaatatttgatttctattgcagttcaatgctatattgtaacacatagctccctgtttctcctcatacaagtagcgagagaaagttataattcatttctgtgtgaaagcagtacaagtaatggacttgcaagcatttctattatcctacttgtcatgcttctaaatagttcacaatcacataactgaaaggaagggcttaaatatttcatataactgaaagaaagcctctaattgttcccatgtagcatagcaaactgttttcctttgaagccttgtgtttgtttgactgcctcttttttgatattacatcttttgggttacgtagaaagttagatgtttcagctcttctggaagggtaataatgtagtgattctcagtggtttatcattacataaaaattatcttttcttatggattgtagggactagtctagctgctaaatattt

SEQ ID NO: 44121 - DNA, 719 bp, Manihot esculenta
  Intron number 1 from transcript cassava4.1_010310m (locus cassava4.1_010310m.g) derived from phytozome v7.0 (chr-ID scaffold03942; pos 441605 to 442323 reverse strand)
tgttagttctgtttcacgttcttggcgagagtttggtgagtaattattgatgtatacatttctcctttcacacccatgctatattttaaatacctgcataaccctgttgcaaagaatttctttacatggtaaagttgctaatcataatcattgaatttcagtgattgaatttgtgcagtggtgtgtgtgattctaatgaattaaagaaaagctggtggctcttatttgtagtttggttgcaataaacaggaaccagtttcatgttcaatgttttggctgttaaactttctttcgccatgtgtactctatctacaaaattaattgatgccagtgatatttaatggtaaagttctggtactgataatgataacacatgcttacttgtgcaagagcacaccattgtgtgataaccccagttgatttatattatccttcaaccctgtgccgctgtctacatatttgactccatgggaatcttcttttcctttgttatcactatatggttttattattgtcacaagtatgagtcttagtttcctgtcatcctaataagaaaaactgtgacggcatttctgaagtgaagaaatttactgctatccttattttagttgaaatattagtgaccatcagaggttttatatagattaagcatcaggaatttttacaattttgattattttacaaaaggtattaattggtttttttttcagtgattgtga

SEQ ID NO: 44122 - DNA, 867 bp, Manihot esculenta
  Intron number 2 from transcript cassava4.1_008489m (locus cassava4.1_008489m.g) derived from phytozome v7.0 (chr-ID scaffold11361; pos 11892 to 12758)
caggttctggtggatcattacccgacgtggtaagccataagcccataaccaaatttaaattgttttcaattaaatgaatcaatttatggtcttacgccatgcttttatgctttctggcttttgatgtttctatctacatttggacttgaaattcctattaatgtgaattggtagttgtctttcatatgaaattctttgggcttttcctgttgatcttactaacttgtaccttctatctagtcattaactcaaggcgtccaagttggaaggcatttctaagtaagctgagatatgtcttcaatttttaacattcaggcattgctttcattgctcggacaccggcctggctgacggttccagtacaaggggactgtgaccagattgcaggattccacagtcctgcttcagtctggttttagtcaaatctaacagttcattcatgttttttttcaattttttttttctctttcttaaagggaaaaatgttttgacccagaattgcctatcctggccagttataatcaggctggttttgggttagaacagtcctgttttaggcaagaaccaactgtggtcagatatagttcgaaactagaattttttcctggctaataatggccaatgatggctatcactgtttgataaacggatattcaaatttttggtgttacacaacctgttgaaattgtcataaaaataatatttgaatctgcctgaagatacagtccaattcagttacacatgattgttttgtgttctgaactttgtgcttgctgtgctggttatattttgttgtagagcaagttgggatgatcatggacatgataaccagagttttgattggtgatttaatgtcctgcaggggtg

SEQ ID NO: 44123 - DNA, 471 bp, Manihot esculenta
  Intron number 2 from transcript cassava4.1_009220m (locus cassava4.1_009220m.g) derived from phytozome v7.0 (chr-ID scaffold03542; pos 368384 to 368854 reverse strand)
taagagagtgtctggactgccaattgatttgaaaggtacttccaatttttcttctttttcctctttttgttgtagaaattcttatgatgttaagaggttttatgcttaaactttcattttagtccctatatcctctcttgttaacaaaaaatgtagttgtaagaatttatattttaacaaagaatcccatatattttcttcattttgatatttttgttactcctcttccctctacgtatgagcccttttctagacaacattttatcaaacctctgtttacctagttgaatgtattagaatgattctctaaagtagttagcattaggattttcttttttctgaattattactaaaatataaaaacaaaccttccatccttttaatgcatccagcataggtatattatccgactatcagctaaaactataagtgactgtgtaggtaagcgggcttttattgctggtgtggctg

SEQ ID NO: 44124 - DNA, 353 bp, Manihot esculenta
  Intron number 1 from transcript cassava4.1_006901m (locus cassava4.1_006922m.g) derived from phytozome v7.0 (chr-ID scaffold03375; pos 40819 to 41171)
ggattcaatcaagagtacccgtttcataaatacttgtaaatatccaggctttgttttatttcttttgacgaggtatttttgttctccttgtttaatcggcattttgatattacgtgtctgattgcttttgtaaacacaatattgtatcgtgtcttccgaaatatctcatgcctatgaatattgggctgtccatattctgcttgcttccatttctgttgttgcaatttggatctggtgtttggttggtacactactagaaatggattatagtttgatcagatgtctggtttgatgtttctattccttttgtttttccttttttggggatttcttgatgggatttgtctgcagaa

SEQ ID NO: 44125 - DNA, 409 bp, Manihot esculenta
  Intron number 2 from transcript cassava4.1_033472m (locus cassava4.1_033472m.g) derived from phytozome v7.0 (chr-ID scaffold02401; pos 18478 to 18886 reverse strand)
atattggcatacaaggtacattgaaattctctctctctccagccttcccccattttcttataggaagaaccagtgaactttctgttacaaatcctatgcaaaatcattgttaatgaagttattaatggaattaatcattgtcgacatataattttcttttcatattctgtaatgcccaattttggaattagatttgcagtacttgagttagtttctagggctatgactataatatcaaaaaagggaagaaggtagagaacccattcaaatgcttctattaggactcttctgttcactgtcttcagtatttttatcagatgcaacttatgtttttttagattgtctaatttctaatttatgtttattttccttaggtttttggaatccctaccaaaatatatttagcctt

SEQ ID NO: 44126 - DNA, 567 bp, Manihot esculenta
  Intron number 2 from transcript cassava4.1_023839m (locus cassava4.1_023839m.g) derived from phytozome v7.0 (chr-ID scaffold02477; pos 175764 to 176330)
ggacaagaagtctcacaagcaccgctctgataaaggtttgatttattaggtctgcttttattgacaactgactactatcttttttgttttactctcattaacatttaagattaagatgatacttgaattggatgtgggtgtcaattcaaccacattgcaaattcatcccttatgtgtttttcccacctggttcttcaatttgtaaatttatctttgctttcttgttactgttacttccaagaaatgttcttcactaggattcccttttcgattctagaaagcaaaattttcactttttttgggggattctgtaatgttccaataaagttttttaggcaatagaattagaaggcaggaatataataccttttaagttgccattggcatgattcttgtttgaagtgcattatatttatctgtttacagactgtacttattaatacattccaatcactggtcattacttacccaaatagggacatggattttcatgaaatagttctatcattttgactcgctattgtcgcttcagataagaaatcaaaggataagcatagtggcaaacat

SEQ ID NO: 44127 - DNA, 706 bp, Manihot esculenta
  Intron number 2 from transcript cassava4.1_029647m (locus cassava4.1_029647m.g) derived from phytozome v7.0 (chr-ID scaffold02431; pos 495280 to 495985)
tgaaggtctggttgagttatggaaaaataaagaatttttttgggttgatttttctcttaattgctcgtttgagttccagtaatttaattttgacaatttgaatggataggagatgtgggtttattcatagctcatgtaatttcagcactttcgatttgatctcgccaatttattttacccctattgcaatggacattaatttgatccatgaatgtggctctggggccttaggttcattatgaatttagggttcttctgttatctctatttccccctaattttatttttaattagtttttgggaagcgggggcatgcttgttttattctctacgaattccttgtagttccttaagggttcagaaaatacacctttgacatcctgttcaatggtgtattttggaatcttgtatttcctcttttatcataaagttgtcatggaaaataggaaatttgtactaaccatggtatatagtttttatactcattatggtataggcacctgcatgaattatttagtgttcttcattcaaatgttttcttactccttttgaactcatgaaatccgtgattgtgctcacttgcatgtctcagtctctgctttccctttgtatctaaatgtaatttgaactcgtttctttcttgaattaaaatatgcaattcaaattaacaatgcactttttttatgctttaaggtgttgaagaacc

SEQ ID NO: 44128 - DNA, 1032 bp, Manihot esculenta
  Intron number 1 from transcript cassava4.1_022082m (locus cassava4.1_022082m.g) derived from phytozome v7.0 (chr-ID scaffold04953; pos 202676 to 203707)
ctgcaagcattgtggctctcacgtccttattaccggttcttcctctcaacctacctgcctattcatggattctgattaattgtatacattgtacattccactgttctttcccttttcatgttgagaaaattttgagcaattcatatcaattccaacgtggactttattattggcagcgaatctaccttaacttttttaaaaaattgttttaaagtaatgaacctaaataggtgctttcaaattgctcctcagctcaagggagtacagttagcttcctgatttcttttggtctgcgtatggtaactctgaaacctatgaatgaattttaatcgtgaatgcagggagaagtctgggacagtatacaatatacttaagcgcagaaaaaatccattctggtttattcaacatgtaaacactttctcatgttgtgcagtgatccataacacaaacctttgaatatctgatacggaacactttaaatgaatggaaaattaaagatttagtttattcaaaccagattatgtcataatttaagtaccctagcgcctgttttattgtttctgtttaacttgcatatgatttaagctggatgcttcgtatcttcaaagaacactgtaaatgtactcatattgagtttattaatgtgtatggacacatcacacatgtatcacacgctagcaggtgcactactccattattagggaaaattgagtccattaacgttgtaggagataagaaaagagtgtcaaccagggatgaaataaaatgaagcagtgaaaaatattagggggcttagatcttttagcaggtgtagtggaggaaaaggattcggacaagtgatcccattttcttaattgagtcgatttgagtttctgtttagttcatttcttatgaacaacagaggaaacaactgcatgtgccctaatttagttgctttgtggttctgtaaacttctctattgcatcttcagtcttcattatctcgctttttcatcctaaaatatgtttgttctaagatacccaattgcagaaa

SEQ ID NO: 44129 - DNA, 256 bp, Manihot esculenta
  Intron number 2 from transcript cassava4.1_026711m (locus cassava4.1_026711m.g) derived from phytozome v7.0 (chr-ID scaffold10963; pos 567767 to 568022 reverse strand)
cagctacatctacagctacacaggtatttgagaaagactaacttttaaaaccttgtgtcgtaataaaaatgaacaccatggaaaaaaaaaggtacacattttgcgtcttcttcttttagagattcattcttgaaatgaggacacttttctctttcttctgatctcttttatcaaattttgctttctttatttttcaagcttattcctttaatgggtttcgttggttcttttctttgaatgcagggtcttgaaagcc

SEQ ID NO: 44130 - DNA, 449 bp, Manihot esculenta
  Intron number 1 from transcript cassava4.1_016610m (locus cassava4.1_015083m.g) derived from phytozome v7.0 (chr-ID scaffold06407; pos 267907 to 268355)
ggattgggaaacatagcttgattaaggtaacttgtgctaagaataagttatatgctcattttgttaatgcaccaactcctgagtggaataaggatgaagagactttgaggcatctccatgattcatttaagactgttgggtccttttagggacaaagtagtttttttttcttgttgtaatgagatgagttgaagctttattgcttgttttgagtgttcttgatcatcaagtatatctatgtagaggaagatttctgtactaaatgaagcttttgatttagccttttcctcaattttgcttcccatttagttctggtttatatgattagattttgctttcttaaactcatcagcaggcttaagtttaagtatttcactttgccaattaatatatggtttatacctaatgatattaaggatcgggtatcaggtatagggcaccatactatc

SEQ ID NO: 44131 - DNA, 853 bp, Manihot esculenta
  Intron number 1 from transcript cassava4.1_006621m (locus cassava4.1_006621m.g) derived from phytozome v7.0 (chr-ID scaffold08359; pos 1746033 to 1746885)
tcgaaggtctcgacgttgtagcggactatatttgggtgggaattcttttgccttattttcttatctcagtttaaaactttttagcttgattgatttgctggttttcttcttttgagtgtaaatgctggaaaagaaggaaaactcgagttttttcaattatcagagctgaggaaataataattcttaattctactgcatatattttacagcaatgggtgaacttatatttgctgcttcttgtatttttttttttcagaaaccaaatggagcatggtggttatgttgttaaatttgttttgtttcatttgtcacttttattaaagagtttggtagctgcaaagaatttttgataaggcaacaattaatttatttctcttgccttgtagcttctcactggctgttgttctgctgataaagacgagggtgagattgtcaaaaaagaaagaagatacaattctctatttttcataatttactgttttacttgctacaaagcaaccaacaaaaattcaaaaggaattaaggaataaatatagtacttcatgttatccttttttagaaaaactttggtcaattaatagcataaaaaaaatccatacggctgcttatgttgctgcaagggatacagtgaaatgtgacagatgtatcttcctaatctatgcttggattggaaaagtgacaatgtttcctcaagtggatttgggcctttagtttttgctacattcacttgcaatttgagggataggattgaatcatctattctaggaaaccaatcgttttgtaattctctcaagagtgtaatgaattgagtttgcgcttctcaaatagcgaaaacttgataaattgcaggcaa

SEQ ID NO: 44132 - DNA, 696 bp, Manihot esculenta
  Intron number 3 from transcript cassava4.1_000424m (locus cassava4.1_000424m.g) derived from phytozome v7.0 (chr-ID scaffold02998; pos 156906 to 157601 reverse strand)
cagaagctgctagcgttgctgaacaggtttatgctttctcctgttattattatacctcaatgaatccacaaatcctgcttgctcctacaaacacaaaaggggccctagggctcataaaggaatgaaaggattatctatacattaattcatttaatatttaatagtattctctctctaaaagagatactcttgccttaaagatattaaggtctgtctcaaatgaatgtttcttcttcctatgatagtgttcttatttactgtttcatgaatttggtttaacttgctacatttctctttacaaaaaaaaaaaaaagaaccacaagagatgaccttacagaaaaaattaggtcttctagattaatgtgtttagtttagtcctaatgaattacagtagaggcatagatactaaaggcttgcttcaggtacaaagtacaaacgcttagagaaacctgccctagcacctcaagtgcagaaagttgggtgaggttcatgcctcaggtgatgtatatgcatttgattggtggcccattcattggaacctctacttgtcctggcttcatattgttggcatctgtttttgcaaattgcaatacattacaatttattcagtatgcatcttttttgtgaaatgagctatggaacaatttgttaatgatttctcaattgtgcaggcagtctcatacattaggaccttat

SEQ ID NO: 44133 - DNA, 665 bp, Manihot esculenta
  Intron number 1 from transcript cassava4.1_026110m (locus cassava4.1_026110m.g) derived from phytozome v7.0 (chr-ID scaffold08208; pos 165921 to 166585)
gagaaattgagaaccgctccactcatctttccgctgtaagtacgccactagacaacattaaagatttaaatttacgcaaattaaaattaatataattagatccgtttatttgcagaagatacatagtaaaatatttttcttaaaaaatattttgtggaaagttttgatgtaaaatatcttttagcaaaatatataatttattttccattacttggttacaattttcaaaataaaaaaaaaataaattaatattctcaaaatgcaaagaataagaatagaaattcattcttcttcgctttgattatatttaattagaaacatattttctgttaactaattcctttaatgatcccatcataaagtatataaaatatattatataaaatattttccatgaaacaaaatgaaatcaagataatttataatttttttaggttaattgtcttgtgggtgttccttcattctctaccagacttttcgctgaacatgtaaccttttagattgattgggtgtatagggaaggtatgataacaaaggattagttgaagtgtttgatgttaagtttttgctttttcttatataagaagtccttcatttttctggttaaaaagaaagaaaaagcttataatttttgtcgttctactgtgatggacagataaaatcag

SEQ ID NO: 44134 - DNA, 823 bp, Manihot esculenta
  Intron number 1 from transcript cassava4.1_011516m (locus cassava4.1_011516m.g) derived from phytozome v7.0 (chr-ID scaffold05090; pos 149961 to 150783 reverse strand)
tgtatgtttcatttcttcttcaattcatatgttcttttttttttcattttcatttctcctcgtttaatgattgaagttttgcaagttatgatttgaagtttggtgaaagaatttggatatgggttttgtttaattccttatttcatgggttgttgtgatatgggtatcgggtatggcaccggggaattgttttgcattgagtttatttttatttgaagttttatagtgtattggcttctgggtttgctgggaattgtgttctctactttgtttccaagactattgtcatgtggatttgggttaatttttttggacagatgcaaaggttagtcactgaataacatgttaaatttggagaaacatgttgtggatgtgtttttaaagtcatttatcttagagcttcctgaaaaaagaaaattgcagatgggtgtggcttgtagtgaactagaatggatattatgtgttgtttaatatgttcagcatatgcataatttaaaataacaatagcagtccatttatttcactcggttcaaacaacctgctttacttattttcaagggacttgtagcagtccatttatttcactcggttcaaacaacctgctttacttattttcaagggacttgcatttagtttcacttattttcataaggtgaactggctttcttgtgtttctgtgttttggttcaatttccttattaatgtgttgttttctagaatatcaatcacaaacagcatttgaatctttgaggattttgttactttttaatttacctaattcttaatttcgtatgttattcttctatacatatgtttgttcaga

SEQ ID NO: 44135 - DNA, 499 bp, Manihot esculenta
  Intron number 1 from transcript cassava4.1_003177m (locus cassava4.1_003177m.g) derived from phytozome v7.0 (chr-ID scaffold07035; pos 29196 to 29694 reverse strand)
aaggtatggattgtttcctcagttctcagatcttgctcctttatgtttttacagagctgtgtggttgctgataaaatacgggataatgttaaaaactaggattcttaatcttgctgttttggatttctttcaaggataaactcttctcaaacaagtttaacaagtgagactaggctaaattgactgttgctagatttagtgtgtaatcaaatgtcaagtctcaagatttaaatttacctcaattctagtcgttttccttccttgtccttggtgaatgaacatactcgataggggtgctgaagttttgtgatctgaattcaaatgttcaaagcaatgcgattgagctaggagttaccatttgggaaaattctacattttggtgtccagttgctgcctcgtcttgtttcttgttttcttcccccccccccccctctttactgaacatgctagtggaaattatgcagtttgggcactaataacgttcaaagaagctatattt

SEQ ID NO: 44136 - DNA, 759 bp, Manihot esculenta
  Intron number 2 from transcript cassava4.1_010590m (locus cassava4.1_010194m.g) derived from phytozome v7.0 (chr-ID scaffold12800; pos 36884 to 37642)
gctcccctccaagccggtacctccggctcaggctggtgagcggttcttgacttgcttccttctcttctgctgtttgcttcttggaaaatgactattctgagtttcattttgtttttttttttttccttcgtttgttgattgatggaagattgtttcgattaagttcgtctttccgtagtgtgtggaaagatttgagtttgttcgtcttgatgctagggattacttgcacatacaacgcacagcatacggccacttaattgtttagctgcttgaaagtttctgtccagcttactttctttttggaagaagaaaagttacttggccgctctaattgtttatattgttgagctaagttgttttgaaattgagtgcaatttagaacatttcaaaatatgtcaatttaagtgtgtgtttacactatctaagaaagcctgttcttggagaaattaagtcacgctggtacttccagcttcaattttctcccttccagagtgatactgtatgttttatgataattctatcattagcctgatttttggaagtggatgaagcgctggaagtggaatggatgcacttgacaatttattgcttgctttacgcctcccactggaatgaaagacgatcatattatgtaaaagcattttctcactactcctatacggctatacctgactaatttcacacctttgcatggctttgtacttatttcctatgcgcactaagttgttcctttcatttccaaagtgagggaggcaaaga

SEQ ID NO: 44137 - DNA, 713 bp, Manihot esculenta
  Intron number 2 from transcript cassava4.1_000301m (locus cassava4.1_000298m.g) derived from phytozome v7.0 (chr-ID scaffold01301; pos 6619 to 7331)
gcaatatcttggacattttgaagtgcatctgtaaggtaagtggctttttggcttttgcacacacatatatatgtgctgtaatttgtagtgaaccatttttttttttttttggtttttctccctattgttttcatgttgaactatgtttttttcattctgtttgtttgtggtgggtctataagtaaaatcaggtaataaaggcttatttattcttgatttctcatttcctttcctttttttccctggataaccaaatatccaaggaaaggaaatggtacttgactgtgatgctgcttgcatcctgtgagcatagacaattagtctcttcatccacatttttctttgtgttttcccccttccatttttccttgaagacatttcctgcagtcttccaatagaagcaattaatgttaagttagtgactcaccttggagatttctagtatgatactgctcaagtaacagtggtcaatgttcttgccaattactcacctattgtgctaatttttgtttcaaagattttcgttcaggatttccttacaatttttttagaaatctttgaatgagggtaactggtggtagggaaattgcactgtcaaatcaatagttgtggttgtcaacttgtcgccgcttttcatacttgatatattggttcttagtgcctttagtttctctgcagtcttgctctcatatacttttgggtgataagttata

SEQ ID NO: 44138 - DNA, 207 bp, Manihot esculenta
  Intron number 2 from transcript cassava4.1_027699m (locus cassava4.1_027699m.g) derived from phytozome v7.0 (chr-ID scaffold05144; pos 64462 to 64668)
gattctttgggcctgtgctattggaagtgcaatcagtatgtggtttagatcttattttctggctaattgtacttttttgtttgttcattaattgcccgttattaggcttttgctttgtgctattggaagaatcccatcaaaagcttcttttatcttttcctttgtctgcagagtttcttacagtttattgcttgttcaggcctgtat

SEQ ID NO: 44139 - DNA, 893 bp, Manihot esculenta
  Intron number 1 from transcript cassava4.1_013643m (locus cassava4.1_013643m.g) derived from phytozome v7.0 (chr-ID scaffold05875; pos 407609 to 408501 reverse strand)
accgatactgaatcatctctatcttccattcacaggtttcgattctcttgcctttttttttttcttcccattctaatggcaccgggttatctgtttcttttgtatttcctttactgacttcctcttttgctgttttttgttatctattcttcaaccggaactcgtgatacggtcaatttcatgcaaaatttagctcagtttaggtgcctttttttttatctatatatttaccagttcagattaagggggttttgcttttttatatttgggtatttttggtttgcttaggaatagaaatgggatatcataggtattgtattctaggtttttgttttatttttcaagttagtctggataatgaattacatacagttggattgagactcttgctaaatgattgggacctagtttgatttcttttgatggtctccaagtgatgagaatctattcatattttgatgctaggtgaaccatgtggtttggattgggtttttgattgaaactgaaagactgtgttcggtctagcatctacagagttaaagaagatgggaactatattattgttcctttgtgaaatctcaaaacatgatgtcatttatataagggtcttgtattaatgagttgtgctgattcttgtctgattcttggtacacctagaagtgaagttctacattcatgaaatgatgctgcagcaatttatgtggataaggatgtggcatgaacattaaatcttattaatgaaagatctggatgtctgtcatatataattttgcaaaattaaggttctatataggattcacaggggcagttagttaccatattcaacatgaaacatctttatatagtatattatcattttattgctttaccttttcttcgcagagctacttaaa

SEQ ID NO: 44140 - DNA, 1020 bp, Manihot esculenta
  Intron number 1 from transcript cassava4.1_010056m (locus cassava4.1_010056m.g) derived from phytozome v7.0 (chr-ID scaffold03803; pos 67063 to 68082)
attgctttgtaagttctacttctcctttttggttgtgatttactagatttgattcaatatttgaatttataatcttactgtagcttatggtgtgcttgactatactttttgttcttcggtgtagtgaatgatgaaatgtgtagcttgtagtgttatgaaggatgagaaattatggatcttcatggttatgtaggattcgtgattttgtgggcttgatctagtgaagaattatagatgccttaatgaagctgtcggtggtgttttaaaagttattgaaaatctagatcttgacatgacgtttttgtcggtgttctattttctgttcttttggttgtattgttctttaatgggtgttaagtggattcactctgttgctttcttagctgcatttgcagtttgatggaagtgtttcgtgatatttcctcaactatctactgataatggttctgttgcttctttgagaaaaaaaaaaaatttaatgcagctttgggggctaaaagacatgatatgtgacttagttctttaacaacatttagatcttcagataccattatgtctattgctttaaaaattgattagtctgctgtcccagttcaaaagttgcaatgttaatactttgacaatatcatcccaagatctggtaataaggtcctctgcagacaaaacttccgagttcttctgttcataaagtgaacctcggatggtgtctcctgcattgtatggtggaggatctgataacaaaccggcatctcagaaagccaatgcttttatcttccatcagctcttggctcgctatgatgcctacactactaacgctacctctctttgatctaggagttatgattctgagttaggcatttgcaaaatggattaaaaataaaagttagatgggtatatagaggccaaaagctgacatttatgagtgcatctagttctgttgctgaaacagttacataacttttgtttatcatctaatccgtattgtgcaggttgccaaagacccgtcaggcaaagagatca

SEQ ID NO: 44141 - DNA, 722 bp, Manihot esculenta
  Intron number 1 from transcript cassava4.1_022395m (locus cassava4.1_022395m.g) derived from phytozome v7.0 (chr-ID scaffold08359; pos 1579389 to 1580110 reverse strand)
cagtgagctttatagcaagcctcctaacacccttggtaattattttttatttcctccccctttatatcatcttcatttcttggagttctttctatttgatatttacatcatttctttttataaggtattctttctagttgattacagtgtcaatgcttttgatgatggacgcttattttctttcattttttaactagttctttttttagaatgatcgatggggaaaccatgaagaagaagggagaatccaaatctagaaggacaacatacaatccaaatctagaaggacaacacaataactgcaacaagagaaattcaaatatgttaaggaaatggagaaaaaagaaaagaaaattatttggaggttgacaataacaaagatggtggatgacatgaacttggaagcatgccaaaaaaaaaaaaagacatgaacttggaagggaaatatgaggaagaaatgaaagcaaactttagcatagccaaagtttcaaaagtgtctttacatgtacatcaatcaatgccaagcacttaataattctcttgaaaaaaaaactctaagaaatttattagagattaccatggttttcatatttgttttttgttattctattgatattcatatatttattttcatatcttttaatctggcaataaataatatagatactagcttattgaagtttttgttttgtaacagtgactctttcctgtggagaaagaga

SEQ ID NO: 44142 - DNA, 528 bp, Manihot esculenta
  Intron number 1 from transcript cassava4.1_002267m (locus cassava4.1_002267m.g) derived from phytozome v7.0 (chr-ID scaffold04182; pos 478060 to 478587 reverse strand)
ggagaactgagaagcaagtcaagaagcaattagaggtcattgttgattttgaattttgcttatgtttcattaaacttatagaaaaaggagctggtagtttatgatctctgttgattgatctttctaattactcagattacaataatgccaaataagcttaatgatttgacaaatttgagctgcttagattatatttatgtcattgtagattctgttacctggtttactttaggtggtgggagaggtgatacgcatgttgctgagctgattgatatttgctaataaccttgctattatttgtcaaatttatgaaaattctcctaaagagatgtgctaacaattgcatttcacacctgatttttacttgggttactggttcatcatttgatattattgcattacattttgtgagcctcatcctcttctgatttgagttgggttgttgtcttccgggctcatcttcctcttttatatgcttaattttgattggcagggaacaggagatctaggccttgttgctcaagcaag

SEQ ID NO: 44143 - DNA, 755 bp, Manihot esculenta
  Intron number 3 from transcript cassava4.1_017739m (locus cassava4.1_017739m.g) derived from phytozome v7.0 (chr-ID scaffold03342; pos 7488 to 8242 reverse strand)
cctgtgttcaagctaagaacagtaaagttcacttcctccatctttaacttttcacttcaaatctacagttttttttttttaatatttactaaaacccaactctaaagtttgattgatactgataacttctatggtctttttttttttttcaagaaagtatatatttaatttaattaatgatcttaaaaattttaataatctatttttcaattaaaaattttaataatctatctcttagaatatgaacctagtttttacatgtagatcggaaagaaaaaaaactctaatttatgagatttggtatttcagttgttaggaacttatagtgtgcaaaaccttgtaattttgaaaactattagaaaaaccaaattaaaaatagaataggaaaaaacaatgtagaagaacaaaaaatagagaatttacaaacaccattatgtataaatttatcatcatcttttatttttttaatgttaacaactaaacactgaaaaattagttaatggtaaaaaaaattacaataaaaagttatttttacaaatctttcataagtttagaaataataatattttttttaggacataataatatgtgagacactgacagctacaaaacagagttgggtaggaatatgagagagatttggatggattatgtgtgtggaaatgataattttattttattgaagtaattcatataatttacatgcgtgttaaagggggaaaaaaaaattgattattaaattgatgttggtgcag

SEQ ID NO: 44144 - DNA, 826 bp, Manihot esculenta
  Intron number 1 from transcript cassava4.1_001611m (locus cassava4.1_001611m.g) derived from phytozome v7.0 (chr-ID scaffold06327; pos 99063 to 99888 reverse strand)
tttggaagctcccagttctgtctgcctcctctcctgtgagtgacaattcatgctctatttattattattgtccttttactcttttttttttttcaaatttatgtattgatattgagctgctgaatgcatatagtggccgtttttttttcttctcttatgtgaaggattgttgaattgctgtaaatttgtcgattcgaatttcaaatggaagttttttgtttttcattttttacctcttctgtttattgttgaatttctgttttgagcttgggtgtgatggttgctgggtttggtttaggagtcagagacttgggcttgggcagttttggtctctgggatttatttgattctgttgctgtagcttgcttttttttaattaatggtgtacctttaacagtagaagaaccacgggcaaatacaggtgttctacacttgcattttaaacttctgtattggctgttcaattattaatgataggatcccccccccccaaaaaaaaaaaaaaaaaatcatgggagcacttcgttgaaatgattgctgttatggtatatatgaaagaaaggacatgatatggtatacagtttgagttagcaaggttttaaattctgaattatgctaattctatggtcaatgactcaattctattgcgctgtaagtttttatactaacgttggattcttcgtggtcaatgttgtttcagatataaacaaccagcaaagtacgtagtttatttgctttctttttcatgatttctggtttatctattatttaacatgctattgcttttgtaggtggagacaatactagacaaggaaaatttcacatt

SEQ ID NO: 44145 - DNA, 843 bp, Manihot esculenta
  Intron number 2 from transcript cassava4.1_013373m (locus cassava4.1_013373m.g) derived from phytozome v7.0 (chr-ID scaffold12455; pos 233947 to 234789)
ataagttctgctgttttggtgtttcctactctcaggtaaagatattaatttcttctttattatggaatttcaactgttaaaatgttactgaaacctaggctaggaatctgctttgggtttcaattggattctaggggataagtggttagtttaccgaggtactcgttcctatcaagttttgggtgtgatgggatgaatttaccctatcaagcttcttagacttgtgttatatggaatgtttcaatgatcttcactttgtggttagttattttgttgagggacgtaaagcctatggttcaaaaaataaaactgcttgctagaatatgcagggtccaggtattactttcatgctgtcatataaaaaaaaaaatattgaaggttatttgattttattaaggctttgtttggaataaatcaatgcaacagtataattccattactaatgataatgaaagggatgaggtattgtaatgtagccagagcatccaactttttgcttccaaacatgagaagtgaataaaaaaaaaaaagaaatcaaattgaattgagttcttgcataatctttctgtacggccactttacaaaaattcaaaatgaaacccacatacttatcttctccattactaatccaacatcttaaatgcctaatttccatggaattggaagtatatagtgttatctctccttataatcccattagtactgccttgtcttagtatttatggcttggaactcattgttgcttttttatatccctatgtgctcctgagctgtgtcaaacataaaattgaggttgttttctgcatagattgttggaggacgttcagcatcaagctctggtaa

SEQ ID NO: 44146 - DNA, 689 bp, Manihot esculenta
  Intron number 1 from transcript cassava4.1_014681m (locus cassava4.1_014681m.g) derived from phytozome v7.0 (chr-ID scaffold05019; pos 180187 to 180875)
cctccttctactcctctgcatcgtgcccttcatccgtacgtcaacaattcagatctcgtatttatcctaatttctttttctttatcatggaatcggccgctaggctatatagttttttcatatttttgttttgggggaatatattggtgttgaatttgatgatcgtggattcaattattggttgtctttgtgaaattgttaaattaaattactttcttatatggttttggtagaggtgatgaatgatagatggggtgaatctctgttgttttttggatgatgttttcttgtatttgaagagaattgaatgtctttcagttttttacctcttaacaatttgctcggttgtttttgcttgatggtttcttgtgtttgtaccctttatagcattgattatctattaggttttcgttaacagtttatgactatgataaaattggagattaaagttacttgtttctgctatccagatatctggtaacattagattaaacctgcagcttttgtcttttaaattttttgtttcctttctctttgatttaagtgtgtgcaatgactatcttccatttttcagaaattctaagacattatttctaaattaaatttgctgaaatttttgtgctttatcttaacaatgaacttgaaaaattgcagtgttgtggcccttgcacgtttatcaccagaagcac

SEQ ID NO: 44147 - DNA, 624 bp, Manihot esculenta
  Intron number 1 from transcript cassava4.1_031449m (locus cassava4.1_031449m.g) derived from phytozome v7.0 (chr-ID scaffold03604; pos 627701 to 628324)
ttatagccccgttatcagcaaacacacttggtaaggtaattaataagtagtacgaagctttgacagtttatctctcatccaagtggaatacattgtgtttgacccaattatcccaaggaggaatcctgttttactttctctccaggcaaatcctgtttatctatttgttcattgtgtctgcaaaataacgttgcagttatcacttaaaatttttttctcaacaaacttttacttgcaatattatatagatgaagttgtttagccttgtttgcagtcacataaatttttcttgtcaatttctttacattacttagggaattttaaggtgaaccagtccaccatgtatttaaaacactaaaatatggatcccatctaatttttttttaatttttttatggaaggactcacctgtattttggatttataatgtaccgagtctagacaagttttttcccacattacctggtttttacatattcaaataaataattgtgattcaaatatatctagttaaataatttgtgttccttttgtacgtgatactttattcaattgacagattggtatatttgttatataattaatatgcatctgttgtgtgtcaatgcagattgctgggggatt

SEQ ID NO: 44148 - DNA, 844 bp, Manihot esculenta
  Intron number 3 from transcript cassava4.1_010268m (locus cassava4.1_006024m.g) derived from phytozome v7.0 (chr-ID scaffold12794; pos 1185576 to 1186419)
gaacctattggtgttgttgcattgatcactccgtacttgctactttttgttaaattctttttcatttttgcatctttcctattttgttttcttgttcatatctgttgcaagatttgttgtgttagtgatgtcgaatgcttgtaaaattatcatccatatgctttgctattttcagttgcattgatatcaatggccatggtaacaatgtgcttgaatctcatcatatgggaatttggaagaatcagttgtgtggaaatggttattcatgtttatcactaaaatatctgcagattgagatttagctttagaattattcttttacaaaatagttcttttagaagtgcatgatccttaagtttcctagttatatgttgtaacctttccatgattttcgatgattttaatcacacaatccgaatttctttatcagttgtttcactgtcattaatctgagtgacaccttactagcagtgacatctatgacccataactttattcatttctgcataattttatccatttgtgccttcagtagtacttaggaatatcttgtttctttaatatctttatggaatttgtaaaatctataatttattcccatgggagccaactgaattttagtttattcatgttattgaaatggtgaatctcatttttattctggaggatttgaaatgttgaattcccaagcggattaaaattttgtgatgaattctgatctttgatattttctggcaaccagtttgtatcaaagcctctggtatttatttatctagaagaaacttgaagtttagcaatctaagattcatttacatttatgttttgaaggaattacccactattg

SEQ ID NO: 44149 - DNA, 562 bp, Manihot esculenta
  Intron number 1 from transcript cassava4.1_017567m (locus cassava4.1_017567m.g) derived from phytozome v7.0 (chr-ID scaffold08359; pos 1691960 to 1692521)
acctctctgtatgtctctcaactgcttcattttcatttttcatttctctaaaatctcggtttcttgattttcactagagatttggaaacgtacgagtaatgtctgcttttgcttatcacatttctttgatgtaaaaaactttaatggatgttcagacttcagatttctaaaagttcaatttgctaattagtatttatagtgtcttgatatttgatagaaacagatctgagtttcacaagagttgtgggcttttttgtactctgtttgatttaattgagcaaatagtttcatatcaagaataaggtctttttgttattcacagaacaatgagtaaagattggcttatgcctcttcttagcatccaagcataaaagttgaattaactaatttcatattattacatgtcatactaatattttgtgtgtgtttatattgaatcccttctgctacttttctgatagactgaataagacaaacccagaaagcacatgcttacaaaggaaatggttgcttcgattctttaacccttaattatgtgtaaaacgtttgcagaatttttcag

SEQ ID NO: 44150 - DNA, 956 bp, Manihot esculenta
  Intron number 1 from transcript cassava4.1_013953m (locus cassava4.1_009743m.g) derived from phytozome v7.0 (chr-ID scaffold10183; pos 220343 to 221298)
gatcctatacccaggtttggaaatgtgcttctcattaatgtgtgcaaaaacttactgttattatttgcttctcataggttgatggaaggtgcatttctgttgtactctctcatcctttttctctcttacatatgaatgccaatcaacatcctcccccccaatagaaagaaaaaaaatgaagaaagaagtgcagaggcaaaaaataaaagaagactagagtggctaatattgccaaatagtcattcaatcttttgataattaatatatctgctgcataaccaaaggaagcaaaggaattaaagatctaaagtatatcctgccatgcaatcttccagttaacatttttgcttgcagtattgtgatgttatcagtgcctatgtagttgcattttttatgttatgtttgagagaataacatcaccatttctctttttacactattgtatatatgtatgggtgggttattactatattggaccaaccttagcacttggatgtgttgagaaaactctctatttggaggtgatgattaaatccaatttccacattgattatttgggatgttatatttccctgtgttgccatggttgtggatgagctggtcttatctgattgagatgatatagatgctgtaaagaaccatttaacaaaagcttttgcattcaacaacaatatggcatctggtatgtatagggcatatgtaaaataagtttacaaaccattcgaggaacctgcctgtagttgtacatttttataaagtctctttcattgtggttgtatagtgcatattaagatactccaagtaaaatgaattgtcattcatttttaactttttcattcatttattacaaggaattgtctgttccagataataaagcagaatttgctgctttaaagaacttttttttgtttattttatttcacttcctctaagttcttagctgtcaatcaggtctg

SEQ ID NO: 44151 - DNA, 782 bp, Manihot esculenta
  Intron number 3 from transcript cassava4.1_015155m (locus cassava4.1_015155m.g) derived from phytozome v7.0 (chr-ID scaffold11581; pos 895186 to 895967 reverse strand)
cggcaggaaggagtgcaaaaggtgagctctaatttaattttatgttcaatttgatttttgtactctaaaacatgagtcatgctcgtcatccagatgctttttctgcaactaaaatatttgtatgaagttgttttgtgcatataaaccatgagtcaatcacggaattgatgaaaacttttatcagttagatgccctgtgttattttcccaataaatttaattttcaacacagatattagcatccacgtacattttgcagacatgtgaaattttagttttggaataaaggacaaaggttcataagcttagattagtgttgctggatagatatatttattaactgcatgataaatgatataccccaccttaatggaatgttgatttctgttgtctacctcaatgctagaggtaaagaattatttggtacagagtctatttcagctgaaacggcttagcttctgattaatgactttattcaatcagatgaggttcatttttaggtccattttgatatttctaagcttctgcaaattttagacatggattttattttattttttttaacattgggaaatcatcataaggttttttatattcttcaccctgaaaaaccttagaaggttctctaattagtgagaccgaagtcttctttccaactctgtagttttttataatgatggcttgaaacatcttagtttacaatttttcttttcattttgcttggacaatccggtaatgattgttcaatgttggcaacaggaacttagcagtaaagtttatttc

SEQ ID NO: 44152 - DNA, 282 bp, Manihot esculenta
  Intron number 2 from transcript cassava4.1_015155m (locus cassava4.1_015155m.g) derived from phytozome v7.0 (chr-ID scaffold11581; pos 895971 to 896252 reverse strand)
ttgccgttctgttcctctatcccatcactcagaaggtttgttttccttttctttcctttcgttttgcatttattttggcatttgaaaccatcatttttgttgtcttcaattacttgtaggacttctctttactcttttatttgtttcttaccttttaatgtgcctcaatttaaattaagtgtttgatgcaactcgatgagcttgtaagatttgcaattcaaattttattttccattgatttttatgaatatattaattcttttttagagtgaagaagaaagg

SEQ ID NO: 44153 - DNA, 665 bp, Manihot esculenta
  Intron number 1 from transcript cassava4.1_003695m (locus cassava4.1_003695m.g) derived from phytozome v7.0 (chr-ID scaffold05780; pos 257610 to 258274)
attcaacttcgagcaattcaagtgggcttaaggtatggtatattcttttatattagaagcgcgagttctttccattttttaggttgtattcaatataagttgaacttttgctttgaaacttcagtgttggaaaccagaacttaagagttgaatcaatcttttagtgctttagatgattacagctattgcatttggattagcccaatttctatcattcacagtttacagtttgtggtgcatctcctttggacgccaaatctgcatgttcaaactcttgaactccagctaagaaaatttctatctactagggaatgtttcaattcaacgtaattcaaaataaattttcatttttcctttttgtaaggaaatttctttactaaatgaattttctgcatataagtggactacatctttttctttctgtattagttaagtgagtatgttacagaaggcaccatttacttgaatgttccttttagctctatgcaagtgatatagcatgttgaatgtcagatttctgtttcttttagcaacaaatacataaattttcatcattatcatttagacattgaggcaaaagtgcaggacaagacaattaacgaatgtaatttgtattgcaagtatgcaaaggaggataagactgcttacattaaagaagaaaaacc

SEQ ID NO: 44154 - DNA, 667 bp, Manihot esculenta
  Intron number 1 from transcript cassava4.1_005105m (locus cassava4.1_005105m.g) derived from phytozome v7.0 (chr-ID scaffold11821; pos 289296 to 289962)
accttttcatatatttccaacccagcgacgttaaggcaaaattttttatctttatgtttcttgcattcaattgttttgttcttcatttttcttatttgtttctatggattgcttgtgttcctcattttatatttggttgcttagaaatgatatgaaggaaatgctaatcataattgcaattgttgcgtaatattcatattagatttatattgttatacacgactacagcgtaatggtgcatacgcgagtggaagttgtttcttcagtagttggagttagtttttgaaagtttgccatgtttttggttttagggctagtttgggtcaaagcaaaagttatttggaaaaaaaatgcataatctagttaagctgttcattgtggtaatcatgttaatttagggctaaccttccaacccaaaaaataaaaagtaaataactgcttaattgtagtgcaaattacggagattatattcacatacatgtaggtctctctataatccagatttaataggttcccataaattacttggcgtattaggcttcattttaaatctgacaggctataattcaaagtttttgatatctagatgtaagcttatcagagtcatatatgtttgcctttttattggttaggatcctgagattcgtccattggttgagcaagactc

SEQ ID NO: 44155 - DNA, 915 bp, Manihot esculenta
  Intron number 1 from transcript cassava4.1_009674m (locus cassava4.1_009674m.g) derived from phytozome v7.0 (chr-ID scaffold07402; pos 277336 to 278250 reverse strand)
tgccgctcgtggttgccggtcaccggtgaattgaagtaagttgtttattatttatttattattattattgagagaaacaagcctgttgtttcgtgtggtggtggattttttggtggcttgaccttatctcttttggcattatattcgattgttttcaggtcttgagatagcaagcttgcattcaattgaatttaatttgattttttttttggttaagttcgttgaattaacgcaaagcatgtaatccattttaagtcatgatcgtctcgcgttagcttgtggcattggattattgagcggaaaattcttttcattttcttagttctcgaaatttccctacttattggtttggttttgaggtaattagatatattactgcttacaggatacatcaatcttttaaatgaaatagaacaaattctctaatgttcggtctacgtttaatttcctaatggcgtttgctttaggagacgtgtaaactaaaagggtcgaatttttgtttcatttttaaaggtgattaatttgaatgaaacttcacttctttgttcttatcaatatcaatgattgaagaaaaacttttcagactcgtcaggtggagccttgtacacgtttttggttttatgatttttttccttaggcaattttacaacgaatgatctcttgtcctagtgttttttttttttcctttcctttaagtgtatgtatactgtacaacaccaatagctagagcattacagaaataaaaggattagagggatggtgctgcttggcttgatttttgtggttttccttgcatgtttatcatgtatagttttactttctgctgtgtgccctgttgttattgcttctcctaattcagtactgaggcctcggggcaaaccctttgtgatttcaggggcattttgatcattattc

SEQ ID NO: 44156 - DNA, 880 bp, Manihot esculenta
  Intron number 3 from transcript cassava4.1_015990m (locus cassava4.1_015990m.g) derived from phytozome v7.0 (chr-ID scaffold03002; pos 54800 to 55679 reverse strand)
cttggtatgctacctacattatccccttgtttggaataaaaaatttcataacaattcaatctaattcatttattttctatcaaatttttcgtttggaatgaaataattcatttcttttttaatttacaaaattttcattttcgaataaaatgaaatcatgcatgattttgttagaattcatttcaattcttttcttgcaaaatgaatcgtgccaaacgggagggtctaagttcaggttgagagtgtaatatttgttgcaactgatgtattatcatgacttggtattagcgctaattccttgtagatcatagaactgtgtgaagtaacaatattagatgatagctctagcatcaggttgatattttcagatgacacctattaattaatattaaaataattgtatattggaatatatttatgctgaataataaaaaattttgctgccgtgtcaaacatggagaatgctttacagagtgcttctgcttatagttctttctactttaacagaatatgcattattaaattaaagcaatgcttatagaaatgattattatcccaatatagttggcatcaagacttttcacaaaatttaaaataacaaattaagaaaaaggtttcttgggggtagcttgcaggaatcagggaactgatcttctattatgctactaattttggtcatcttattgttcatacaagcacgtcattgtgcgaggctgcattaatgctttgatgttgataatttggttcatggacatgctactgtctaaaatttccactgttatgtgccaatgaaaactgttgttggattatgtttgtaacatgttctgatatatgcatgaacatgcaaagaataatcagatgtctgctgttattgcagttt

SEQ ID NO: 44157 - DNA, 564 bp, Manihot esculenta
  Intron number 3 from transcript cassava4.1_006750m (locus cassava4.1_006756m.g) derived from phytozome v7.0 (chr-ID scaffold06107; pos 173994 to 174557)
caggtgagctccacactttacagcccacataaagtgcttgtgaatctgttttcttacttccttttcaaagtgctttctgctccatagcaatgaatataagtggattgttcaaggatttgggaattgggattgccaataagttacagaacttttttctgctattccagtttggaatgcaaacaaggaaaaatgccatagtcaaagtcttcttttattgggtttgagtactatgtttgaactctgaagaatttaacttaactaattgccatccgagaatggaatatttttttctcgtgaatgtttttttttccaattacttttaacagtaagtaagctcagattaggggatttcttgggatttttggttttttctgatatatttttgttattatattttcattatgttaggagtctaaaattccttacacaagtgcatgtcaattgcctgctggaagtagaggctactgaatgtgaattattgttgaatttgtggtgctgtagtgcatgtttgactatttatatgatgcaggccataaacgagaagatactatcacttggttgtgg

SEQ ID NO: 44158 - DNA, 872 bp, Manihot esculenta
  Intron number 2 from transcript cassava4.1_015644m (locus cassava4.1_015644m.g) derived from phytozome v7.0 (chr-ID scaffold06653; pos 79712 to 80583 reverse strand)
gacgactggggtaatttatttattttaaaattttgaaaaaccttttggattcagatgtaaatgtggcgtaattagggttttgtttgacccatttctttcttggaaaggatttacgtgttaggcttgtttcttgaaatttacttcctgggtattaaagataaagttttcaatgattgatttttggttgttaatgccattttagtgattcagataagttgttaagcagaggcactttgtgagggtaaagcttacttgtttcactcttgggctttacggtctactgccttagttactagattcaaatgattatcctgcgaatcttataactggtgacatgccccatatttctgctacctggttctgtcctctttttatgctttggaagattgctgatctttgggttttaggtgtttagcaagagaatgcatgaaagacatagttttattcttccatatggctttgatgtttagaggaaatgagatttttgctatctgctgaacatttttttatcataattctttgctgggtgaatccaatgcgtacccaaatttgacaaaattaaaagaaattactgtaaccatgtatttgtttttgatggtttaaccttttgcatttttctgaaaatagattatggatttttctttttgatgatttaacattttgcatttatcttgaaaaataagaaaagcaagagaaaggaaattcaagtatttgatgctaatatcctgaaagcttatggataggaaatgatttttttcccaccattacatttttacaatgttgcactgtgcatccattttttcttgatttttatcttgaaccttcattttttcaagttaatttggccaatatatattcttttctttcagagg

SEQ ID NO: 44159 - DNA, 528 bp, Manihot esculenta
  Intron number 1 from transcript cassava4.1_029387m (locus cassava4.1_029387m.g) derived from phytozome v7.0 (chr-ID scaffold09788; pos 41434 to 41961 reverse strand)
aagatcgtcgatcctctttaccaaattattagcaggttctctctttctctctctgatgttctcctgctgtgatccttttttttaaagatataattttcttcttagcttctctgcctgtttggatttgatatatagatatttcagctcctctttatttttttttttcgtttagtttaagcttaagttcgctgaaggaatttaaagctaaaaatcataagtttttttgcacattatggagtatctgtcactttctaatcttcctcagttaactcttcaatcaaatgtagtctttttggttgcttatattaacaatgtctggccagatggcaggaggataggttaggtttcaaatttttatctcaagtttttcttttagtattttttttttttttttttttttaattgttcaagttgatagctgttaattgggagttaatatgtttattttagtagttgcttattattatttgttgattttaattttttttttcaggggtacagagccgaagcaactggcattctctgcag

SEQ ID NO: 44160 - DNA, 977 bp, Manihot esculenta
  Intron number 1 from transcript cassava4.1_019695m (locus cassava4.1_019695m.g) derived from phytozome v7.0 (chr-ID scaffold06278; pos 640808 to 641784)
ttgcccgtatgtattgcttgtaaaatgacctaacatttctgatgttttgtttaataacttatcatacttttcttgttggttatactaattgatgtttccatgatatcatctctttttgttttttcatttatagaatctttcttcgttaatcagtcaaaatatgtgaatttgatcaaagtattgcttaggttttcaaatatgaggttgaagttttcaaacaattgcaaattgaattacacaatgaaaatgctatatatagcaagtctttgtgaaggataacttcaaaaatgattttccatatgggaaagaattgaaaattttatgtgaaaactggaagcaacaacagtattcatcgtgcttttagataattgtaacaaacatggactttgtgcctgcctgtcttgggttctcctgttctggttatgcttatgggatgatgttgattgcaggacctctctgcagaccttgacaaattattctttgtaataattatgaattcgttcttttttgcatattgcataatctttcaaattttaatgttcacaaagctgctatttctgtgtctttatcttggaatacactgtagaaagtcgctcactgcttaatgactcgcacaagtaatctgaacgccttaaaacagggatacttgatatgctaccagacatttgtgttgagacttgagagaacctccatattcagattaatgcctcagtatcaaaataattttgccaagagttgaacccaagactttggaattttgatactatgttagtttacttttgaccttaaaagttttgatgcatgtgctcttcttcactgtcttattgaatggttttgaaattgttgagttaccttttattttctgcactgctcatcacaatatgcttggcaatattatagaaggattttaactagtcaaatattccattttcactatgaaagttctcaagaaagaagaagaggaaagaagagccaaa

SEQ ID NO: 44161 - DNA, 932 bp, Manihot esculenta
  Intron number 1 from transcript cassava4.1_030093m (locus cassava4.1_030093m.g) derived from phytozome v7.0 (chr-ID scaffold04495; pos 91081 to 92012)
caacaagtgaacagagctttgaaagatcaagcaaggttggtatctctgttttggttttccatttgaaaaagggttgtaatgattgttctttgacatttttataaaagtataaatttagttgtagaactcatatggtgttatcttttggatcttttatgagttttttctttatgtcatcttttaggagtgcttttggctgatgttgacacgggctattttattagttttgttcttttgtcatacttctcttctttctttgacgggaggtcgtgttgttgtccaatttgtattgctcttctttcttcactaataatcttcttctatcgaatgaaaagtgatcgtttccgtgtaaatacatgcttatagttttgaatatctccattatgtttcgtgtttattaatatgtcttgagaaattattgtacaaggtttatggatattccttgcaacttggtactttggtggaaggttgcaaagcagattccctatggattgttaaaagcccatcagcaaatatttgtagagttagagctatgttctgtggcattatttaattttaatattaactatgtgcaaatgtttgcgactgtattgaaagctgcatactgccagttacctaggctagtaatatgttagttgatgttggagatatatgactattactggggctttcacctacaagcttaggtgaagtggttccttgacatggcattagagcctgtcagactaaaaaggtctacagttagaattctcactacctccatttattgatatagcataagataaagtgggcatgtgtttgttcacgcttcaagcccagtggcatttgcatgtgggggtgtgttggagacatatttaactggtagaaaatgacattttgcatctatatgctgattaggtttctgttggacttggacattgcggctccaaaaa

SEQ ID NO: 44162 - DNA, 666 bp, Manihot esculenta
  Intron number 2 from transcript cassava4.1_031387m (locus cassava4.1_031387m.g) derived from phytozome v7.0 (chr-ID scaffold12455; pos 454136 to 454801)
gcacaaatagattcatttttaacgctcaagtaagtgataagtgatagacaattatcttgattaatatcttgtttttcaatttctttttctttatataaattaataatttgtatggaactgcaagattcctcattggtccaagcacttgatgagcttaaatagttgtttaatcaaagaaaatgcagatttgtgtgctgatctttcttggtggatcattgactatttcttgtccaaattataaaaataaaaaaaaatattgcatgccttggtattttatatccctcaaattaaggcagaaaaagggtcattgttattttattattttcttttgggaaaatttcctttaagacgaagaaaagtgttgcttcaatatgcaggaaaatcatattgctgaaatgatgggaacatggagcctccctttacaccaaaaatatgaaagggacagataaggattaggagaagggaaaaaatatgagcataaatagaaaaagaatttcaatggttgcctaaatatacaaaatgattctactgtgatgtagccgtttctaattctttgctcttaagatttctgatttagaacttctctaccatgtcacttacatagcaagcatttttttttttttttggttaggtcacgttgcaagacttagctgacacatatcagcc

SEQ ID NO: 44163 - DNA, 1057 bp, Manihot esculenta
  Intron number 1 from transcript cassava4.1_010992m (locus cassava4.1_010992m.g) derived from phytozome v7.0 (chr-ID scaffold12794; pos 1207699 to 1208755 reverse strand)
attattcacagttgattccaggctttgaaaaagcaagtttgcttttaattttttcctcttctttttatttaactatgaacacatttactcacaattgaatatcatttgagtaccttctattcacttatggattattgtactttcgttgcccataatgttgtgtttggttatggacttagaactcgtgacagcaatcagatggttcaaggcagtccatggtaggtcacgggtcttggacagttagacctctcctttttcatatagataccattatcgattaatttatttagaatggtgaacgtgaagagagctaaattacctgtttaaattttattgttgagaatgctagactatgatttattactactggaagaccaactagacatgagcactgctgtgttgcaatattttgaattctaactggcagaagcttgtattgaattgccacgagaaatgaggtggaatgttgggactgttgaatgcatcaggtccgcctgcctttttctccgtatgacaaaaaaagcacattgttggacccgtaacaaaggcacccatgtattttgtgtctctttctcctattcatgttgtggagttaaatcatgagagttgacccacttccgggctgtgaatgcgttcatcattttttagcataaaaagggaaagaaaaaaccaacaacaactgagagttttgagcctgggaaggaatttgatgataagtttttgaaaggatccagcatgctgattctcaatggtaacaagtgtcttgcacatcatgggtgaagatacataaaagctgttgagcatatctgaaataatatgaacactgcttctttgctgtgcattaaaacggaactgaattttgtattccattgctttgtcagttcacttaaaatgtcaacataaggtatattgtgcatctcctaaatatgacttaagaatgagtatgtaaaaaaagaagcccaatctctctcttgctgtgtggttgctttgagttatggagcattgataaactggttttattgttgagcagacacccgctgaaagagtcaaagccagg

SEQ ID NO: 44164 - DNA, 859 bp, Manihot esculenta
  Intron number 2 from transcript cassava4.1_009615m (locus cassava4.1_009615m.g) derived from phytozome v7.0 (chr-ID scaffold04251; pos 647267 to 648125 reverse strand)
gctaggtttgatcaagaaaaacaaggaaggtttcggtaagtagctcttacatggctcctctatctctcttaatgatcaatttatgtatcaaatgtccttagtattatttagaacaacatattactgttgatgttagcacttagcacccactttgattcaagtataaatagaatgcacatctccaaattcttgtttttgcttttttttggaaaatttttcctggtagcttccttatgggtaatcagccaataatgtaatctaataactgaagttcttgctgataatgcaatacgtgatgcattgtgggaaatgagctttgcgacctgctaaatagatgatttatgtaactgcctttcttagaaagctttttttatagcaaaagttgtgcagggtatcaatagaataagactagtttatactgtagtttgcttttttggtagggaattcacttaccagaagaattgctgcgaattcctatttcagatattactgaatttgtggaggtttttaaggtagttattttgttagtacttgttattaggagttatcaatttgggtatgctattaaggccatccatttgttggcctatgtcagctgtgctgaaatgaggagcttcactctgaatgacttaccaaccatcttgcatctggtccattctcttttcttaatattgtgatgttgaaaaattgttataacaaaccaagttggacctatcttgttatgattcatgctcttgattcaaagtggcattttattgtttatttagtattgtttattctagaccactcagtttatgaattcaccataggtttttttttttgtgcagttcccatcacaattattgcttccttcaggaaa

SEQ ID NO: 44165 - DNA, 941 bp, Manihot esculenta
  Intron number 4 from transcript cassava4.1_015895m (locus cassava4.1_015792m.g) derived from phytozome v7.0 (chr-ID scaffold05875; pos 1068422 to 1069362 reverse strand)
gcaggaagtactcggtgttggtgaaaaactagaccgtaagatatgccccttctattttcaagatcacttgatttcggtgtcttatactgtttttcttttgctcaaatggatcccaaagaatacaattctcgataacataattaggatgtgaggaagatctaagcttgcattaagtatttgttcatacatattatgaaatgtacatgatgagttgataaatgtatacagatgacaacttggttagataggttaagaaaatatatggtaaaataattcaaagcttaagctttttgtgtttgttaatgcaaacaccttggctttctaaattcaaagttaatctacaattgttaattttgaatagggcattctctatgaattagatccttaaaattggccccttttagttatgttggattacaataatatctttgaaagaatagcatttgatgtactcacattccgttggtaaattctggaattgtttggtcttgctagggaattaaagctgagttatagtgtactacctactctgtttaaattctctcagtcttttctttcatgcatatgaatcaccattttagggtcaaggttgtgtaagctagaatgtgcatatatatcacttcttatgggaatttttatttgacatcctggttgtagtctgttctttaccaataagtttatagttaagctggcctaatattatgcttttttgctttgttatttgattttggtaatgtgtttctctttcctgagatttttgttagagcattagcagaaggcactttgttttattttattcctttactaattttatcagataatggtgtcagttatttttctctctttctgggtgaaatacctttgtacttcacatatttggtgaaatatactaaaaaaagaatgcactttgcatgtttgatgataatgcagaggtcagcgaa

SEQ ID NO: 44166 - DNA, 804 bp, Manihot esculenta
  Intron number 1 from transcript cassava4.1_015895m (locus cassava4.1_015792m.g) derived from phytozome v7.0 (chr-ID scaffold05875; pos 1070212 to 1071015 reverse strand)
ctattatcaggtacttctcgttgtaaccttctgtgattggataatttcgtgtttttgctgcacattgatttttaatgtggtatctcgcaaatttgcttgaacaagtggttaaatgatttcttcggttagtatttcatctatgcagatagatcataagtattgtgttttcttggtttgtttcctattgcattagtaatggttaaattcaataattttatcaaaaacaagaagtgggtctctctctccctctctctgggggttctttagagatcatttctcatatgtggagaactggacatcttggaatacattttaggtaaattacagaagattaaaatctctgtttctgtttttgatgattgaaagaaaaagaaggaactcggcttattgttattttgtagcaattttggctttacagctgggcctatttgttgagaaattggtgtcaatttcaaaataaccgtacggattttagtggtaggatattattgttagatttaaggagaccatatagtcagtgaggttctcaaaatttagccttttgcttcgtgcagccaaaatctagcctcctattgcaattaaatgtttttttctttaaaattttattttgccccactccaatgtgatcgttactgataaaaagttataaagtagcttaagcattaaccaagagcatcttgttcctgctatatcatcagcttgaaagagttcgtttggattatgatcaacttgttagctatctcatgtatctggttttgacgtaatgcagttattttgtacatctgaggaagatagaaagtcaaa

SEQ ID NO: 44167 - DNA, 388 bp, Manihot esculenta
  Intron number 1 from transcript cassava4.1_026678m (locus cassava4.1_026678m.g) derived from phytozome v7.0 (chr-ID scaffold11279; pos 137685 to 138072 reverse strand)
gacgcccttcctattcaggttggttgttttgttactctctattattttctgtgcaagtcaaatagtttatcacgagaggcatgtgatttgcttccattttttgtttttaaattttgtaactctgctatgtaagatgagataattagcgttttaaattaaaagttaccgttattctaactagagttcaaatgttgctagattcctgtgggtatggaagagaaattcaaatatttgatgtgaggttaactaacaatattggggcaatgaattttaattcataggtataggagttgtaaaaaaaataaaaaagaaaagtatagaactttagatgtctgaaatctttgaacaccctgttttaactaattttatttgaattttgatgggagca

SEQ ID NO: 44168 - DNA, 615 bp, Manihot esculenta
  Intron number 2 from transcript cassava4.1_005217m (locus cassava4.1_005217m.g) derived from phytozome v7.0 (chr-ID scaffold02855; pos 208389 to 209003)
acagagtgcttttgaaggtatatttttgtcctctcttataactttccaaaacaaattgcaatcaacaggttgcttcaggaaacacacacatacacacacacacactagtgggaatcgtgcattctagctatagttgccaactaaagtgggtaaaagttaaaattttctttctggaagagaagttgttctctttcaatatcagcaattttagttgttatgactctcttataggggacttaacatattgatcatttcacttcatctggggtctatcaacaaaacttttgaattttttccttgtttgaatattctttagtgaataatgccagaaactgaattcaataatcacatcaacatagtgtgcattccgcaatcaaagttggttaaaaatgaagtattttaaacttgatcatgcctcctccccccaaacccccccccccccccaaaaaaaaaaaaaacgaaagaaaagaaaaagggaaaaagggctgcgtagtttattatacatctttttagataaatacttcatttttagacaggttatgatttgtgttccttttgttcttttacctatatgtttcaggtcattcgttactcctctccaacatctgctggagc

SEQ ID NO: 44169 - DNA, 900 bp, Manihot esculenta
  Intron number 1 from transcript cassava4.1_023816m (locus cassava4.1_023816m.g) derived from phytozome v7.0 (chr-ID scaffold11581; pos 1138126 to 1139025 reverse strand)
tttttgtttcagtatactagacacctaaacttgaggtatgttaccatggcatattgtattggcaagggggtgggtggattgagcaatctcctgtctcatccctgcctatatatatgtgggtgtatatgtatatatatatacacacattcccacctgatgcagtattggaagagaataaaaaagttaggaatcttatttattgtaaaattaggaagtgtagagttctattatttagtaattctattattattaggtttagtattttgtttagggagtttattttaatttagtattcctaatcactaatcagaattgaattaggatttttctaatgtgattacgattgaaaaactctataaaaaaaggttgacaatttgtttctcttgaatttctctgttgtctttgagaatttgtttctcattgttcttggtttcttcttgttcttggtttcttcttgttcttggtttcttcttgttcttggtttcttcttggttctacatacacccccccaagtttttgcatgtgttcagaaaaagagcatggcccttcatttgtttccagacaatggtttttttttttattattattatttgctttcgtagctagtagcttctagttgggggaggggagatacatggattttttttttgggaggatacattcttcttgttaaatcaattcttaaaatctgtgatttgagtgcttttaaatggacttttaaatcctactgctccttgcagtgattggttggggcacaaggagagaaacaaccttctttgtggaattagttggagtgatcagtatttaattgctgcttggaaaagaaattgctctgattggtgcaactgatcttatatggttacaggaaaggaatcatctttttgcatagtttagcatcca

SEQ ID NO: 44170 - DNA, 633 bp, Manihot esculenta
  Intron number 1 from transcript cassava4.1_011069m (locus cassava4.1_011069m.g) derived from phytozome v7.0 (chr-ID scaffold01755; pos 118627 to 119259 reverse strand)
ttcgacgcaactgtcccttcgtcagtttctgtcaggttctctctctctctctctctcgctctatcctccatttttcttattttctttgcttcactttgccggtttttaagcatactttactgtatttttctggcccaaaatttgaagtttcttgatatttagcctggcaaacatggattacgaactgggttttacttttctacatggaaatagcacttgattttttgaattatatatcaaaaaattgaattccagaagttagtttcttgacctagttatccgcaaatggatgccaatattgattcccttatcacttctccttttaattttttaaagatctagaatgacgtattggtgaattaaacacaacccttttcgctttttgactattttgtttggaatattcagaaagtttgtttatttctcataagtttatgaagatgatttttcttaattttttatggtaatctaagtgtttgactaaagttctaaacaaattttatctcgttattttattgcattgtgagtaatatttgcagtaatcaacttgctctgattgttattgtcaagtaatgtgagaaattccccaactctaggactacttttgaagaacagtctcaattctttgtagag

SEQ ID NO: 44171 - DNA, 618 bp, Manihot esculenta
  Intron number 2 from transcript cassava4.1_028055m (locus cassava4.1_028055m.g) derived from phytozome v7.0 (chr-ID scaffold05434; pos 57572 to 58189 reverse strand)
agaagggaaacaccacttgtgaaatttgtctgcaggtatgaatttgcaggctctgatgaccttttcaggattctttaattttttccgtgttctatatcgtttcggatacttctgatcttattaaaagaaaagaaaaaaaaaattatggctctgtcctctgcgttatctgtatgcttttttcttgttctgtttcgaattgggtttattgtttgttttttattcaaactccgcaaagtgaaaaaaatcaactctgtctctgtctttggctttgaaatttgggtgtattctcttgtctttattaatcttttctttatgttaaagtcttaactctttctttctttctatctttcctttcaaataatattatcggcgatgtttcaatgatttcctgtagttcaggggaaacatatcaattaagcagtaactatgatagttgagcaactaaatatgaatacaactctttttcctcaggaaaatagaacttggtgaatatcttagtattttaccaattgaaggagatcttatgacatgggtattacttattgaaaattgaagatgagagaaactaaatggttagcttgagctgagcatgattttttttcgttttgtggcagaagt

SEQ ID NO: 44172 - DNA, 553 bp, Manihot esculenta
  Intron number 1 from transcript cassava4.1_004040m (locus cassava4.1_004040m.g) derived from phytozome v7.0 (chr-ID scaffold08127; pos 238382 to 238934)
cgccatacccttcttcctttatccttaatcttcaggtatgaatgtgataataagtgaatgtctgcatttttctgtgccactgtattccttttcttgatcactggttgttagtatatatttgagtttattagtgaaaaagatttacgtgtgtagtcgtattgtatctccttaagatgtttctgatatcttcttttgcaattggatgctaaaattttgggtttctaatttataatttggcattgcaattttctctttgggtagtgagttgcaaattatgctgattgtaatgtgtacttgaagttactagttccatcttttcaatgtgaagttaaaagatgaacaatttgaacctaaaatctttcatttgggtccccttcttaaaattgaaagcttgtggctttatgtctggacagttaaccaataatctgaaattgctgcatgagcatcatacaatttctatttacttagattcgaataggattatcttcacttcataacaaaatcaactgccactgcagggttcttcatcatctattgttggcaaattatccag

SEQ ID NO: 44173 - DNA, 755 bp, Manihot esculenta
  Intron number 2 from transcript cassava4.1_000836m (locus cassava4.1_000725m.g) derived from phytozome v7.0 (chr-ID scaffold08359; pos 626014 to 626768)
tggagaaacttgaaaggattcggatcctggctcaggttttatttaaatttcgatttcgtctcttgttttcttctcaagttgttattcacttcttctgtgagaaaagtcactttgccgatatgttaaaatcgtttttgatttttgggtttttgatgtgtttggctaaagtccatggatactgtcgtcactgttatttggctttgcatggttagtttcgttttcatcgttgagaaagcggaagcggtgggaaatcattgtgaaaataaatatgcgttttgagtttttgtaatacaaaatttttttatgttgagaatatatttcaattttaattgatgctggatattcatcaagtttgggcgcctttctttttggtgtgtgtatatgttgtctgtttggatactaagaaattagaagtaataataacaaaactacatacgtggaaaaaagtagctaaatggttaattggatttttgatgaatgtattctgagctttttctagtagattcagcatcttggattccctttaatttgcttttagtgtgctcagttagggactgaagaactttaatgttgaatttgtttagaacatggactgatattttttatcacaagatatgaaatctgtaaaacaactcatttttcttgcatttgatggacatttctgcatttccttgataggcaaaagggagtaaagtatattgatattggttgaaaatttacgtggggcttttcttattgtacagagtgcgtgtaat

SEQ ID NO: 44174 - DNA, 498 bp, Manihot esculenta
  Intron number 3 from transcript cassava4.1_000836m (locus cassava4.1_000725m.g) derived from phytozome v7.0 (chr-ID scaffold08359; pos 626898 to 627395)
ggaattgctgagacccatcacaggtaatttctgtttgctgttgtaatttttcccttagcatgcctatttaatcaattcatttattttatgtttcaatgtcatattggtaatttgctgtcctcaaattgtcaaaagattgaaggcttacttgaaaacagtaacttacatcactgtcaatgcattgtgcttctagtgttgctcagacaaaggaaagtagtgatgtttttttagtcttttattttttcttttgatattaagacataatgaactaatgctcttttacttcttagatggtaggaggaaagaaaagaaaattcccagaaacgatttgcattctactaaccactagggagttagtcacctgaatagcctttaatttccatttcttcctcttctctgttctagttcagttttaaatatggaaatgaaaacctttctagagaagttgatacattgcagaaaaattttgcattcttcagggttcgaaaggctcgaagt

SEQ ID NO: 44175 - DNA, 816 bp, Manihot esculenta
  Intron number 1 from transcript cassava4.1_005307m (locus cassava4.1_005307m.g) derived from phytozome v7.0 (chr-ID scaffold10305; pos 549871 to 550686)
cagccgccatcgaaaagcgggtacctttatttttattaaatttacgtagatatttttggttctcaattttatggatctctcatttgggttgttaaattgttccttgcaaaacgtgaaatttgtttttttgtcaagaaaatatgcccaggaacagtaggaattcccgtgaaatacttgcatcggaactcgattcagcattaagtaatttgcctcgttgtgatgtatcttttcaaatgttttcgggcatcatgtaagttatgacgaaaggtcaactagttgaggactttcgatttgtattttctctatgattggcgaaatgctgtgggatatggaagacgaggccattttgctgcctctctctgtgtagtttgtaggtttgatatatctgatcgcgtgttttttgcaaaaaaaaattatggatagtttcttttggtgatgaattttgatgtgtcagattattcaacgatctccaaccaaggaagtatagttttggtcatcacttgaacttgaagtggactagcttttaccttaggtagaggtgcctggttgttcctctcctttcttcacttcatgtcttcttctttgaatagcaaatatggtgaaagttgcaatactttgaaattaggaagagatgagactttttctttggctgcagctatttaggataccctgctttgccttttgatatttgtctcatggctactgcaatattaacgttttccttttggtgcggttctgttatttaacttcggatgtcatgtcctaatgttcggttccatttattttgttgtctaatagctggaaagtattcctttg

SEQ ID NO: 44176 - DNA, 651 bp, Manihot esculenta
  Intron number 1 from transcript cassava4.1_024385m (locus cassava4.1_024385m.g) derived from phytozome v7.0 (chr-ID scaffold12004; pos 94949 to 95599)
atctggaactaaagctcaggctgatcctcaatttggtatgtttgcaatttcatacgtttcttaggcttatgtaatttctgctttttatattgctagttagtaattcatgcaacatgattacctttgacttcgtgtttacttcattgaattttgttctgtttgttctttaagaaaatggtgaaataatttaccattattctcaaactgtagaagatgataggataccagcatagacttcgttgttctttctttttgggtacagagcataaagagaagaaaaagaaagcgttaggaacgaaaactcacagcacctgctctctaacaaataaagttctcatacctatctcatcttctgataaactaagctccagttcaagggaaggagaggacaggataaataaactatataaaaagtagtttgagatttttcttaataatatatgatatttgtaaagggtttttccagaatgctggggaggcattagggcactacttggtcccgaggatccaccaccgatgcaccagtcaccactaacgttttgggcctttatctcttcacagactattagggtatacttgtacataaacttatttgttcttaatcatgtatattatgtctgtgtatgtaattgatatctatagaggtgaacc

SEQ ID NO: 44177 - DNA, 613 bp, Manihot esculenta
  Intron number 1 from transcript cassava4.1_009254m (locus cassava4.1_009254m.g) derived from phytozome v7.0 (chr-ID scaffold10729; pos 103440 to 104052 reverse strand)
tgcgaaagcctttgaaacatctctgtgaggaactggtacttcgctctcattatatcttctgattttccttgtatactgctttctatgtgcaagtagggtaaataattttttgagaattgttttctgacagttcaacaaattgggatttcatttatcaattctggtttagaagtaggtttatttagctgaactcgtgattgcggtatctgaattcttcaagtgcttaaagatatttgctttctcgctgaatagaaaaacaaacctgaaataggagatgttacatatgtatccaagccccattagttgttagggattaagattttattctgatgaagaaggttagtggaattggaaatttgattaatacattatcaacctactagactcttatgattatgatgagattaacagaatttaaatattattaatgaccaagttggcattccataaataatcaatctactataatctcatgacatttctatgtcctgcaacttgtgtgcctaatcatcttatcgttctgctactcagttcctccatcatgttcccatcacgctaactgaactgatcctaaccagcgtgtttcaggcggtatcattctagcgcctgaggg

SEQ ID NO: 44178 - DNA, 844 bp, Manihot esculenta
  Intron number 1 from transcript cassava4.1_002982m (locus cassava4.1_002982m.g) derived from phytozome v7.0 (chr-ID scaffold07340; pos 32213 to 33056)
tccccataacacccacaagtcttactggtttccaggtaattttttattgcttgatttcttggacctttatccccttttttcaacaattcttcttattttattattctttctttttcatctctctccactcttccctgtctctctctgtgcctgtaggaggatgagatgaggatggtgattataagattctaaatttaacttatttttttaactgaaatatctattgggatttgtagatgatggttttgtcttgctttttgctttctgatagcttttgttttagatttttttttttttttattactgggcttcatacaaatgatagtttttgatggtgctttaagtgggatttaggttttggacttgttactgcagaattcttttgtgatatattgtgataaagatgctcttttgattgtattgtaactaaggatttgtcccttataattctcaagtcaatgtattttttcaaaatcctgaaacccaatgtatactatgtttgatgaagagattatttaaatacacggatcttatggtgtttgatgcttctttgtctatggttgaatatatcagtattgctccctgttgaccaatgtaaccatgaacatgtttgccacccagttaatggctttggcatctgcttatggtgtttattgattttggctttggtcatttcttgttttgcatattgttctggtgaattgcttttgcatgagggaatggaacttatcagtaaacacttaaacgatcaaattcaaattctggaattctttcttttggaattgaagcatgatagagctgttggtaatagaagctgtttccaatggctttttcagttccttgg

SEQ ID NO: 44179 - DNA, 884 bp, Manihot esculenta
  Intron number 1 from transcript cassava4.1_033215m (locus cassava4.1_033215m.g) derived from phytozome v7.0 (chr-ID scaffold10183; pos 193700 to 194583)
agattttggttgcacaaggattcagtagacttttggtatttgtgcctcttcattctcaagttcccaaatgttcatattcattctgctcccttatatatatgtataggagttctaattattcgaaccatatattattttatttctaatatatgattttcatcttttatatttacatacattattataaaataataaattctaataattaataaaaatctgttttagaaataaatatataaaattgaaaacactttaattttcaattggatgttaatttttttgaaagatatagatgttatcataatatagatttctgtatttttttttttttttgaaacaaagacgcaagtgaattttagaaaatatgatgttagttaattttttataaaattttataatgaattgtgagaagaaaaaaatacttaattaaatagaacttatgcaaataggactaataattaaatttacataaactctgaaattaatttattaaatgaaaacaatataattgtaaataatatatagaatcaaggatgtttttatccatttacaaattcgtcccctcatttgtacttatttatgtataagtataaccttgccccaatattttctttgaacaccttagctttatcaatttaactaaaatcctaaaacaataatttcgtttcctttttagttttattttctttactatctatgggtaaaaagcccttcatagtagaagtttatatgtttgcttttgaattgtttgaaccattctcctctatctctcaaattttattgttttatatacctcaccaccccttgagcactttccttttaattgctcgtgttcttatttgtttgcagttggcaggtatcctcttggatactggaaatctcac

SEQ ID NO: 44180 - DNA, 666 bp, Manihot esculenta
  Intron number 3 from transcript cassava4.1_028951m (locus cassava4.1_028951m.g) derived from phytozome v7.0 (chr-ID scaffold06906; pos 309499 to 310164 reverse strand)
aggagaactttcctgaaaacaaatctgtttctgttgtgagattcgagaattttgttgattgcttgttattttggattttaagttttgtctcgtgtgtttggttgacgagaaaattctgccaagtagaagaaaataaagctgtgaataatcgctgactataattatcctatggaaattcaattttcgcctgccttgttgacatttaagaattaaattgagatcaaataagttcaaatgcgaaataccttgcaatgctcatcgatcttctttgcaatgaaacagaaatataagttttcatgacatggcatagactcagatttctgaatgtacaggtagtgaaagctggtggtgcgaaatggaaatcaatgtctgattctgtaagatctccaatttcttctctcttattagcgcaacaaaaaacacacacacacacacacacacacacacacacacacacacacacacacacacatcagaatgatctattctcccttctagtatccttttgcatgtatcactatttcaaaatttcttcaataggaacaagtaaattggtttgttttttggagataagaatagaaaatgataataatgcatattttcatgattacttgaagaaccgcagcttacaacattctgtttctggaatctaggaaaaagctccat

SEQ ID NO: 44181 - DNA, 953 bp, Manihot esculenta
  Intron number 1 from transcript cassava4.1_029783m (locus cassava4.1_029783m.g) derived from phytozome v7.0 (chr-ID scaffold03299; pos 251463 to 252415 reverse strand)
agtttcttgcagccaaagctcgagggtttagctaggtaaatgaaatgaggacgatacatcaaaaatttttaaaaaaaggaactaaaattgttaagttccaaacggttcaaagggaataatactcgataatcgttccattctgtatctaattaccgctctcttgagtcatctgtgtccgcagatttgtttgctaaacggttttgcacattgtttgtttgatttttttccccttctgttttagattcttttggtgtcatgagactggaatattcttctgtccttttcgtttggctggcgagaaagtgaagtaaatcaatataaatctacataactgttcaaatgacttctccaactcataataagtcaaaagatttcgattatattttcaaatacacttgtcagtcatattctttataaatgagtgcaattacttctgtaacctgtgcttattgtatggagcatcataatctagctcccgattatctaccttagcaataactgtaaattaagttgtgcattatccgatcgtaaatagccagttatgttgttctgtctcagaattaactcatgaatcgttaacaaagtaatcgacagggttatttatatttatcagttattcagtttggttatgtagccaatgatttgttacccagggttaaatcttcagtttgaatatgactaagcatctttgaatgtagtgattgtgtgataaaattgctgcttgtgctggtttaatggtccatgagtagtggtttcagttcttctgtttctttaataatgtggagagcaaataatcttttttgttttggtttgcagaacttgaatttcttgtttgcagtaacttttgtgttcgtatctttctcattggttgtacttttctttgggttacttatgtgtaaaatcttggtctttgtgcaggaataaaggtatattatttgttgcaattgatcaaa

SEQ ID NO: 44182 - DNA, 891 bp, Manihot esculenta
  Intron number 3 from transcript cassava4.1_013803m (locus cassava4.1_013803m.g) derived from phytozome v7.0 (chr-ID scaffold11581; pos 1121630 to 1122520 reverse strand)
tattggctaaaagccctgatcctgaactgactgaagtaagctgtccaatttgtcattttctttatcttgcatgatgttttatttagtgaagaattcaattttaatattaattaattaataatttgtgccagaaaatcatattatggttattcttggatgaggatgtctaagggaaaagttatctggattctggaagcaacttgcttttgtccattactctgttcatacttcatagggataagtaaatgtttcatagtggacaatattactttaataataataataataatagtaataataataactacgtttattcacctacatgaatgatattaaaatcaattagttagtagtgaaacgcttcaatatataatggacaaaaatctgttttgtgcgataatgagcctaagaggaaaccatgatcttacctcaaagcaatccaatcttcataaaccctgacaaataagcttttctgataacttagttgtagaatgtagatgctaacggattcaagaatttgttagcatgactagaagctgcatcagaaatcaaatctcttgtctagtacttgtgatgcaaatagtgatgtgaatgaaggttatactttgctttgtcattttttaagcttgtgaaaggcatatagggatagatatctgttgaggaatcattaagcttgagtatccctgtttccgtactatgttgtttatacgccttgaagttgactactctcttagagattgagctggtaggctgggaaacattttcacttcaatatggtaataatttgctcatgatgatcatgattcataccaagtgcctctcaaaattgctatattatgttactttctaactcgtgacttttctcataggcatttattaatacagaattgt

SEQ ID NO: 44183 - DNA, 979 bp, Manihot esculenta
  Intron number 3 from transcript cassava4.1_017863m (locus cassava4.1_015397m.g) derived from phytozome v7.0 (chr-ID scaffold04305; pos 78412 to 79390)
ctcttctgtatcagatttgcgtctgttgagagtatgtgtttatcagatcagttctttatctcccgctgcttctaatttctaaatgttggtatcaatatctgctttcattttgtttttgaatgtattcaatcttcttgttctttttccttgtgcttatgatgtttgccaagagaactcttgggttttgtattatttgggtaggaaactttttattcgcctcgtttgccgagattactggaaatgattttgtatgtttggcaccaattggaaacagcacatttagctgttcgctaatgaaagtatcataacaaaattcggatctattacataggattagcgcacgcatgtttttcttgtcaagtatctacttagatgattaagtggttgtgttgatcctgtctatgtgcatacgtgtatgaaaaattagttttggttgaaagggaaggaaatttgttgctgcacattttgttgtttttcatcaaatttagtttcctgttagattggtttcagtgttattactattggcactatatacatacaaaatatattgttgcatgtgatggactatatctggtcttcgttttgcttgtattctagtttaatctattagatgccatatgtccgtctattgtgatatggaattaaatgagtcatgaaggattttatcattgtgaaactactgacaataacatgctagtaggaaaatcgttggctgctggctcatttgtggatgtaaaattccaaatgatagtagtctggaaggttgttatttgtggtagctgtttcaattttatgaatagttttccttaatttgtgtttgataatttctggtgtaactgtaatgagtgtttattaggtgtgtgtctaaatgagaaggttattcatctttctctctctctctcatagtgcaattggatttttgagtctctatttgtagtatgatgactgatttcatatcctattagattgcaaaaccttc

SEQ ID NO: 44184 - DNA, 493 bp, Manihot esculenta
  Intron number 1 from transcript cassava4.1_007555m (locus cassava4.1_007555m.g) derived from phytozome v7.0 (chr-ID scaffold03299; pos 237140 to 237632 reverse strand)
ttcagaaacaccggcgaccggaatcaaagatctaggttagtattgatgcttcaattcagggttttattttcttattgccgctagctgcttttggggtttaactgattcttcttgtttgattctggctcttttttattatgtacgattccaggtatctgaatgcatgtgactagttgttaatttgaatttgcacaagagggtaaagctaatgcgagaaatgtgattcaagttgtttagctttactctttataaaaaaaaaaaaagagattcaaaagttaaaggcgctagatcgtgttcctaattgaaaccgtgaaatctttttgcgaatattagattaatgcgttcacaactgacaccaatttcgtctaagttagatactaatctcttttcagtttcttggtttattttggaaagtttgttctttgcttgctaattagtctagttcctttgatttacaggtcattgcaatccgagccaagcagctctagaagct

SEQ ID NO: 44185 - DNA, 611 bp, Manihot esculenta
  Intron number 1 from transcript cassava4.1_015370m (locus cassava4.1_015370m.g) derived from phytozome v7.0 (chr-ID scaffold06485; pos 74235 to 74845)
cttgctgccgagggtatttctcttttgatcaattgattttccttttctattcttctgtagtttatcttgttgtctcaaattcgaatttggcaatgttgttttcatgtatcagtttaatttggtttcccctttctgatagagtgatcatgaggagaaaagcctttttctttttttagggtcaatttttacctgggccaaaggattactgctacccttgaaaattctgtaattttgattgcgtgcctagtcatggatttgtgaattggaatggtgttttcgataattccataatttagcacttcaaagccttctctgtagaacgttctattgcttaatcaggatcctgacaacagtaatttgataaatttagacctcaattgctattcttggttttaaaataatgcatgtttatactcttcctcttttgtttccttgtatgcacttcagtaattctaatccatttgttcctatatggtatggcatgcacatctttggattattattgttattattatttttaagttgatcatttaactagttggagttatagttttttttttctattgcaaacctggaattaatatttctattgtttttgtttcccagttcaa

SEQ ID NO: 44186 - DNA, 805 bp, Manihot esculenta
  Intron number 1 from transcript cassava4.1_016131m (locus cassava4.1_016143m.g) derived from phytozome v7.0 (chr-ID scaffold02259; pos 59333 to 60137)
attcttcactctgggaagtaagtttttgcaaattgattaaattctatcatacccttctaaaaatcaaactgaattatgctttcttagtgtgttgtcaatcagttgtatttaattttttgctttctccttaatcgccaagtcttattttgctattcattcgaatgctcaaatctggtactgttattgaatttcgatattatgcgtccccacttgcatttattgttgaaatatttgttttatccaaatccattactagcttcattactgtctctgtagatactatgcttcccgtattcaattccaaataggagtaaaaaagctttgctgattggtttcactgcgatactaaacggaagtacaaattgcatggttgttctttttgtttgcttactattgatgggtttacaatcaaatttggtcagtttgcttttcattaatttttttccccacttgtagtcatttgatggttattatttataaaattgaagatgtggaagccaaaagcataagctgctttgtatgtatccctactttggtggttcatgtttcagtcaaatccaaatctctggcatctctgtttgtggcactatatatctataatcttctcatcatgctaaaatatgggaaaaaacaattgtcaatttcaagtttagcatatttgtgattgttatccttgaggtgattggttttagcatgtgtatgtgtgtgcagatgtatgttcctgtgtgaatgattttgtgatatacttctttgttttttggttccaagttatcatcttatccacgtgagatttgttactgcagat

SEQ ID NO: 44187 - DNA, 603 bp, Manihot esculenta
  Intron number 1 from transcript cassava4.1_002176m (locus cassava4.1_002176m.g) derived from phytozome v7.0 (chr-ID scaffold06556; pos 62681 to 63283 reverse strand)
caggtctatattattaatttcttaattatgatccaacttttcattattatacatatgtattactcacaaatttttgttttctcctccatcaaaactaaaaatctatatataattaatgagttactattgatttcaaccttttcttcttggtttacaaagatgataattatcaagttatattaatttgacccaaataagattattcagttgaaattgttaaaaacttgcttgtttatgatatattgaaaaaattaacaagaaaaaaaaaacaaagaagagggggcattcatatcacgcggaaaggaaggtaagagtacaaaagtggcagccgtagtagttggaagttaggtgcacaagtaattccatattaatcaatggtacaaaataacatttctttctacttcttaaaacggaatcatgattttggagaagatttcattttagccaatcaattaatttttatttaattattttttaatcttcaattatatatacatatacaaaacgcagcattccacctcaaaaattctcttaatatctatctatctatcatcaattattattacagttcctgagggagaaaaacttcaaaccccaaatacc

SEQ ID NO: 44188 - DNA, 433 bp, Manihot esculenta
  Intron number 1 from transcript cassava4.1_005439m (locus cassava4.1_005439m.g) derived from phytozome v7.0 (chr-ID scaffold09683; pos 197805 to 198237 reverse strand)
aaagctcctttcgatcgtcttcaatctttcttcaggtatgcactaacttcttgctcttgctaggttttagtttcactttctaatttatggtgtgatcttgcttttgaatctgtattatatttctgtttgtgtagcatgttcatttttcactcattctgtttagctcttgggaaaatgagagaaaaaatgggagatactaccaaaaactctagttattgagcaattctggcgattactattgtatcattattgttatatactcttcccctaaactaactgattggcttgttgcttagatggtatagatagtcgttgtgaaagcttagggttatttttcgcacttcattcgttctgattaggtctgtttcgttgggctaattttttgtcctgctaattttcagattctaactttgagcatctttactcgagtgca

SEQ ID NO: 44189 - DNA, 341 bp, Manihot esculenta
  Intron number 1 from transcript cassava4.1_021766m (locus cassava4.1_021766m.g) derived from phytozome v7.0 (chr-ID scaffold05859; pos 393797 to 394137 reverse strand)
gaattttaaggaacctatttctctgtaagtttgcatttccattgtgtttgtttaattcattggacaatttagtttgttaatggtatccggtagagttgttatgcaaaatatacttcaaacatgattgcttaaccttgacattaggggcatctacttttcatgttaccttgttagttagactgatacatatgatgttatgaaattattctttctatgaatgaaaggaagaaaataactttaattacagctaaaatcgccggtctttgattttcactataaggtcttataaacggacactaatgagtaattaattcctgaatatattgtaggtttgcaaatca

SEQ ID NO: 44190 - DNA, 980 bp, Manihot esculenta
  Intron number 1 from transcript cassava4.1_029619m (locus cassava4.1_029619m.g) derived from phytozome v7.0 (chr-ID scaffold11581; pos 1426535 to 1427514)
ctagggtttattggttttcctatacaactaggcgaaccagttacgccctactgtgcatttttttagcacttaccacaccaattttagatgatgaaaaatgtactgagataggtaagtaaaaacaggaattatataataaaaattaaaattatagtacttaaattaaaattttacaatttattaattataattttttaaaattaaatttttacattaacaaattatttaaaattacagtacttaaattaattataatatttattgttatttaataaaaattatatacttcaataaaaaataattacaatttaaaattttattttaattattatatattagataataaatttatattttcataattattttaaaaatataataaattgatgtacatatttattaattattttatatactaacagtaattattaaatataatttattaaatatttaaattatatcaactaaaattaaatatcagctaaaccaaataagagtttaaagtggattcatataaaactaaaaccatgtgggcaatataattttttcaggtagtttgagtccatataaaacatgtccatcgaagaatttcccaatccaatatggctagggagaatcttctgagaatgacgtggcaaaggcaaagtgaagtcgtcaaatagatttccatatgggaaaaggaaaacgaaattgcttatcccatcaattttcctgtatctgtatatatacccttctgtctcctacacgtcaaagaccctatcgttcatcttctctttgtctctacatcaagctgtagcctttagccacgaatagctacgaaacaagcctagatcaaactatttccgatatgccctatctgagtttccttgccatatccgaggaagcggcggatcaaggagaacagccattagaaaacatccatgaagtcgttgtctttgatggtgttacccactccttctctttcagccaggtccccaccg

SEQ ID NO: 44191 - DNA, 776 bp, Manihot esculenta
  Intron number 2 from transcript cassava4.1_005510m (locus cassava4.1_005510m.g) derived from phytozome v7.0 (chr-ID scaffold07859; pos 720820 to 721595 reverse strand)
tctcctcttcatcaaaaaggcctcttcttcacaaggtaatatgatcacaaacaccattctatatatacttggcctatgactatcactaatttagccactgtggttaaagggtttttatagtcattcaattattaaaacaatttgaattagtcatttaagtcgcaagtgttttgagatttgcgtcagttggatatgttacatcagtattaaagtcacttgaataagaaaattgggagaaacccccccatggcacaagagttctggaagtcaaacccacattgggatttgcttttaacgggcttgggcagtgtgaatttgaattaattggatggtatataaaaggaaaaaaagccacttgagtcggaaaaattgtgaaaaacccctaatccaactaattaaccaagctagacattttgagctagttggacctagcttgttactattgcacaagctaaagtcaatcatctaattttagtatataacaatgcttatcatttttctaaatatatgtaatcttaaatattttataagattattaaatatttaaaatgtagtaatccattcctctggttaaattttagtttatttacttcttattcattttggtgtaggactaaattggtgagaatttaatatagtagagggtttaacctgttaaaaatttatctctgcatgtaccagttagccaatcccagttgatatgttaatagcctattaatgaatatgaagaaatgatcagaactcgattgtgcaatttgaaatttcagggatacaag

SEQ ID NO: 44192 - DNA, 938 bp, Manihot esculenta
  Intron number 1 from transcript cassava4.1_000796m (locus cassava4.1_000796m.g) derived from phytozome v7.0 (chr-ID scaffold06028; pos 140269 to 141206)
gcatttctccggtttctcggccgctagtttcagaggtaaaagaaacagaggggaatggtgtggtttgatgtttgctatgtggagtggaggtttactgcaactgtgttggttttggttcattttttatgggctgcattatatcatttctgctggttcattaccaaaatttgggattttatgcttaaatttttcgttagcttagtcaggatctagtgaaatcggattgcttgttactaagaaacttgctgcacttttctttttctttttatgggatgaattctactcggattgttaaaatgagctctgaaagtattgtttcttttagctgtttgatctcattttcagtagattttctcttctgttctgctttacagttgtgttttaaggagcttatatgtcatttctttagcactttttcttttgtattactgtttgaaagcttactcggtagctttctgcttggttactgggtactatcctatgatttttgctgcattctagaatgtgaaggcatttaattacttcgattgccttttcctttttggatagaaattctgctgtttagactgattacttttaggtgtggattttatctttaatgaatcgataatgttggcttatactttttcagaataggggctacgcgtttcagctgtttggttgctgacaaaatgctaggttagggaagatgaacgaagtttttagtgtttttttatccttgcactttgaatgaaataagcaaacagttgtgcagagcttagtttgaagtattgtcatttgaagttctggatatttttcttcgcaacattttccagtaatctaatggagtaacattttgtggttttgccttgcatctgttagattattagttatgattcaatttttctatagtggattttcatgcacgtgaattttgcttgtggactgcaggaattttg

SEQ ID NO: 44193 - DNA, 1065 bp, Manihot esculenta
  Intron number 1 from transcript cassava4.1_010793m (locus cassava4.1_010793m.g) derived from phytozome v7.0 (chr-ID scaffold04413; pos 53785 to 54849 reverse strand)
ctctgctaccgagtacggtccttaccttcaaaacggtgcgtttttctgttctctgatcgatttcgtttctattgaattggtgcttttttggtttctgggaaaattagggacatttgagcatgtgagactttggatctcatggctgttggttgatcatgtgatttgatgctatgggagctttagagaaatgtgatgattttgtgtcaggaatgcgaattatgcgcgcctaaatgaaattcagttgaatatctgctcaattctaatttgccatttggttattgatttatcggtttggcggattatttctttattaaaaattgaaaactattttgcgacttatttattgattctgataatatgaaaagtgagatcagcacaaagaaacttggttttgactggaattcttttggtaactatcaaactcttcctttctggaactcttttaaaaacgatggatagacagatattgagaatcttatatgctaggattttgcaaagtgagatgatataccatatttctggtactttatatagttgcctgaggaagttttgaattttcagcaaagggtttagaatagatttcagcagaggcagttggttggtcttgttcaaacactgatctctcaccattaaggaatgaactatattaggcacttttcctaagaatttctgaagcactgataatgcaagatttagtgttgggaaattagcaaaagaatgaaagaaagcctacttcttattaaaaattcttttcatgagtaggagacccttcaagcaaaagtgggtttaaataaagaaaagaagatgaatggttatggtcaaagcaaattttattgaattctcaattattggcattgattttctttattcaccctgcggtgactggtttttgggtcatgtggggttgccaacttgtcatattacttattcagtactctgttctggtttctattttaagaacataggtgaatgagctaatttcaattataactttataattgtactttctgatttcataacatgcttgcagagccttctccattgcataccactacaattgtggag

SEQ ID NO: 44194 - DNA, 488 bp, Manihot esculenta
  Intron number 2 from transcript cassava4.1_019805m (locus cassava4.1_018937m.g) derived from phytozome v7.0 (chr-ID scaffold05705; pos 21445 to 21932 reverse strand)
ggtgaaagtggataattgggataatcttacagcgagtatgtactttctttttgttttctttttgacatgcagtatgtactttcttgtaatagatgcacttaaccttcttttgctttagtttgtatgctttaagcggtgaaaattgtgcgagcagtcattttcttcctcttattggtgttgatatttactttgaataaattatacttttctgttcgtttttcatgtactcccaaaacggtaaactgatgatgggctattcacctagagaatttatttgtttccatgttaacgagaggtttaattctggatgtttattgcagtatttttattaaaaccattttgttttttgtcaatagacattttgtctaatttccatgttaatgacatgctgcaatatgattctagatgtttattgcagcgattaattatctttgtttttatttatatttttttgtcaatagataagcaagaggctcgagcatattcaa

SEQ ID NO: 44195 - DNA, 743 bp, Manihot esculenta
  Intron number 1 from transcript cassava4.1_019805m (locus cassava4.1_018937m.g) derived from phytozome v7.0 (chr-ID scaffold05705; pos 21956 to 22698 reverse strand)
caagattacactcttcaaaaggtatttttcagtttggatttggtttctcacttcatatttgaggcagggcatgtttcaaaaatttttgctttgccactgtttcttttgacaatcctgatgaggtgttttgtggggtttctatgaatgaagtgttaagaaaaataaacatgggagggggagtgagcaaaaagtatttgtgggataggagtcctcactgccaatgtggcagtgagagagtaacaggcgacaacaatttttttttcattttttattaaaaataatagtttattgctggtcaaatcaactgcaggctactcgtctgatagagattctctgctaaacgaaatgggcgcctgcttgtggagcaagatgtcatctggtagagattctctgttagacgagactgcccatcatggtaaagattctttgccatgacgagacttctcatctagcagaggatatttgccagacaagtaacctaccgctgaccagcggcaagctatttttttttaattaaaaatgaaaaaaaaaaagttgttgccacacttctgaagtgtggaggtcactttctcactgttaacatggcagtgagaacccctatcctacaaatactttttgtgcaccaccccctcacaattgttttttcttaacacttaattcataaaaaccctgataaaagtagacatattctgtagaaatttttgtgacattgttatcaatatgcaacttatttttttctgcag

SEQ ID NO: 44196 - DNA, 235 bp, Manihot esculenta
  Intron number 1 from transcript cassava4.1_021869m (locus cassava4.1_021869m.g) derived from phytozome v7.0 (chr-ID scaffold06149; pos 46012 to 46246 reverse strand)
gtgttgaggtattctcatttttcttcaatctctatgttgtttttccccttaatttttgtttagaattttatctgggtagtttttttatttgatttgagatgctttctagactcgataaatctgcctagacttcatttaattatatgggtccagccaaaatatttctgttttatgcttttaagggctgatcaataacttttgaaattttattaggtggctgacatcaaaaggttga

SEQ ID NO: 44197 - DNA, 451 bp, Manihot esculenta
  Intron number 3 from transcript cassava4.1_014769m (locus cassava4.1_014769m.g) derived from phytozome v7.0 (chr-ID scaffold09426; pos 109457 to 109907)
tgcagatattcaagtgataagatcctcactgtcatgtgagttccactaaattattgtgattatttttccaaccaagtatttcttagccatttctagattaggagttccaccatatttgtgtggccctaactagaaataagatgaataatctatttcacatgttgtgaaataattgttgtgttttttgttcttagcaagcatctgcatctccaagtttgtgttagcatccaaaattgttatggagtcaaatgggtataaatagaacaccaaggaaatggaaaagaagaagaatgagaataccaaaggaaatggaaaaagaaaaggaaagaaaaggacccattctttgtttggtttaggcgtttaatttttatttccttcttagaactctaatttcatttctatcatgtattactgaaaaaaatagatgattcttagttgattgtataggtgc

SEQ ID NO: 44198 - DNA, 666 bp, Manihot esculenta
  Intron number 2 from transcript cassava4.1_018298m (locus cassava4.1_016194m.g) derived from phytozome v7.0 (chr-ID scaffold04137; pos 121682 to 122347)
gcttggagaaattgtcaccaccatccctaccattggtgagcttccaatttcatcaaatcagttaaccttttacaatttatttgacgttttaggcttgtttgcttctagaatatctggtatttttttttttgtatgttttaaaaaatagactagataattcattaattgtttctgtttgtgtagctgatgcgataagattgctgcaattctctatagttccatgctggagttacaacacttctgttttggtgtgaagttaaaatattattgggtccttcacaagaaatggctaattaattttttttttcaaaagaatgaactcaaaagtgactactttaagttaaagtagaggcagtggttgaattcttatctttgcatttaatagatcaatatgatgaataatattgcttttttttttctctttttaattactgtaagttgttaagcttgggaacttatttcagactagcagttgaacttcatttaaatatatcacgctccaagttttttatttttattttttaaatttctgtgatagcttcttttctggatgtttatcatgcatcctactgagaattttaattttttttttttaaattacaaaagtcttcccacgagcttatttgattttacataattagatttgttttcttctttcaggattta

SEQ ID NO: 44199 - DNA, 948 bp, Manihot esculenta
  Intron number 2 from transcript cassava4.1_020742m (locus cassava4.1_020737m.g) derived from phytozome v7.0 (chr-ID scaffold06278; pos 200876 to 201823)
agaatctgttgcaatagaggcccgtctgctaatttgtaagcttcgtttgcctcaattatgtgttttctgttagtttaattattgaattcgttgtcattaatttaatggatgttccatttgttactaagggaatgtgtgcataaacttttgcttctttacattgtttttttttttttttgcttttgccttctcggagattttaatgagaggtagtgtctctagttttatactttcgcgaattgagtagatggatagagatgcaatttttttcagcataaattcctgtaaaagatggatggatcagatcagaacaattgaatttgacttgggacacatttcatctgacttttagcgcatcagaacttgatatgtcttctcttcccacccccgcttccctgcctattcttcttctttttttggtgggttggtgtgctgattatcagattggatacttgcatttaaattgtgtgttatttgattgttgatattctgtaatttcactagtttcactagatgtgaaccatacttttctggtttatggatatttcttcatgtgctttttgtagagaatgtaatttttcttcatgtgtatgcttacccttttggcattgtaacattacgtacatgtgctgcatgatctgtaacctagtgtaaatctttttttgcggtgtgtgtgcttaccagtgtgcacggtttatctgcctagtgatagattatgtgatgcatatgcactcactggatgctcttattttgcacgttagttgtcagattcttgtgtttatgtggttgctttaataagcaaatgctgatattaggcagatgctttaggctttattttttgatttcctcttcatgattactttactatcttttattcttgtgcaatatgtcttacctgggcattttggtgcaggttccatttgacattggttataacagcaacggtct

SEQ ID NO: 44200 - DNA, 610 bp, Manihot esculenta
  Intron number 3 from transcript cassava4.1_021436m (locus cassava4.1_021436m.g) derived from phytozome v7.0 (chr-ID scaffold02717; pos 168536 to 169145)
atacaaggtatgttgcattaaatttatcctcatcatccattaattaaccccatgaactcaagactttacagatttagatatggttaaaggcaaagatgaatgaaatgaattaattaaccccatatacctgtgtgtgtgtatacggtgtaacaactcaaactggttgacaatattgtaacactgacacaagaaactgtcaccatgtgaattattccttcttaattattaaatttttaattaatttacaaagtaatttcttttgtacatatatacacaatacatgtatgtcagaaacttatcatataaaaggagaatcaaatcgaaggctgcaacaggagtacttacacaagagtatattaaggaaatattgtcattgtaggacccatgagtcttcagattttcagttgcaccactaatgtttagtgtagtttatctgcacaaaagtttgagtatgtatgtggaagtttgcttctggacttttatgtgtattcgactcattgatttgcaggataatcatatcacattttgtgtctttttctttctctttatctctatttttatgtatgagattctcccttgtgtgcagaagcggctttggcagctaagaaga

SEQ ID NO: 44201 - DNA, 747 bp, Manihot esculenta
  Intron number 1 from transcript cassava4.1_009970m (locus cassava4.1_009970m.g) derived from phytozome v7.0 (chr-ID scaffold12794; pos 268304 to 269050 reverse strand)
gggtaacttcagtttcacttagccgtgtcttcaatttcgaaattgtatattcagatgctatgttgttgaaattggctagtgtgtgattcgccgttgagagagtaggtaatttgaattgcttttgtgaaagagctgtactgcagattatgaattacttgatgaaaattataaattttggatagatttaaatgttttttatcgatcaagcattggtttgatttctttaaatgggacggagtctgtttaagatcaagtggttgttgtgtgcctggtttagtgttcttgctgatagattaactgaattaaggaagtggagttttcttccagcagatctaatgtcaaattcactggatttcctatgattctttcgttaagaaataactgctttgatttggggaatggaatatcttatggattttcatatttggaattggcatatctgtctaattaagtaatatcagcaacatgttgggcaaaaaggatattgagggtaatttttttgcctagacatgaaaatagtttgtgcagaagggataattgaagagggtgtcgctttttcggtaagtaatatattttgtccacggtttctggttaatggggaagtaaaaataatacaacggggaccagaagattcctatatcttctcgtcaattaggaacctgctctttaataaggtggatatattatcagttaagtattagatacagggtaagtgtttaaatacctttttgtgcaatttatgcaggt

SEQ ID NO: 44202 - DNA, 532 bp, Manihot esculenta
  Intron number 1 from transcript cassava4.1_013769m (locus cassava4.1_013797m.g) derived from phytozome v7.0 (chr-ID scaffold11821; pos 128100 to 128631 reverse strand)
cttaacaggaatcatccatcttcttctcatctttggtacgctcattttcacttgcttttctgtttgtttcaattagtcttcattctgggatcctttcaaattatttgtggtttttttatttttttgcctcttcttctgagcacatcagctaattttttttctagggtttcgatttttaagtctatgttgattatcttttatggtatatttctcgattctgttctctctttctgcttcctccataactttaatttcattgagctattctcgtaattcctagatttttaattcactgtttttcagggtgagtttctttgtcgatgctgataattagttagtgtttagtttttgtgggtttaatcagttgctttgtttttatttctttgaattcacatctgggttgtggttgaattgttagaaattttatggtgttctatcagtgcgtttaaggttttcattgagttattttcacttattcaaaatcccctttttgtcagcttgtaagcactgtacgtacacttcagtatagttg

SEQ ID NO: 44203 - DNA, 295 bp, Manihot esculenta
  Intron number 3 from transcript cassava4.1_019772m (locus cassava4.1_019772m.g) derived from phytozome v7.0 (chr-ID scaffold11581; pos 1369981 to 1370275)
gaccagggagtcttaagagctaccgtaagcacctacattcttgtttttttctgctgaatctctcttattttcttttcttttcctccaaacaaccaaagtttacacggaaagccccacagagttcacacacttccgagatctagacgagggctaattcaccccaagtcaaacaagtgactttcgactgcggtcattttcttgaaattaacccttccttttacctagaaaatgagtttgggaagctggaaacgaagcattaaagataatgattttgtttgttttgtgaatgaccaga

SEQ ID NO: 44204 - DNA, 581 bp, Manihot esculenta
  Intron number 1 from transcript cassava4.1_023867m (locus cassava4.1_023867m.g) derived from phytozome v7.0 (chr-ID scaffold05831; pos 113259 to 113839 reverse strand)
tcaagcgaagcacaagccggtgagaaataaagccaacaaaaagcaatcacaacaaaacaactaaaaatagaagaaaagtcaacatgcaagaacgaaggccctgagaataatcatcaaaactccaatcaaaataccagctagagagattcacgatagaccttagcccaaaacaacctagtaaatgcatcggtgcgtactaagttgccaacaagatgcgatcaagagccttccaccaaattgccaaataaaagattagaataccttcccggtccagcaaagaaactcccttctaaatacacatatctctttctcgttaagcggaggacacgtgtgaggttccaaaccttgtcctgacgctgaccagtccagtcctctttggcctcatcgaagaaccggattggaatttgagtttctagactcaaacgaaagtcgccccttttgattttcgataatagtagtgacaacagcctctaacccgtctacgcacacttctgcttcattggttgttgggagtctttcttttccttcttctcctccactttttagtgtttctgaacaagcaaactgctgcttcgttacct

SEQ ID NO: 44205 - DNA, 758 bp, Manihot esculenta
  Intron number 1 from transcript cassava4.1_005827m (locus cassava4.1_005827m.g) derived from phytozome v7.0 (chr-ID scaffold12794; pos 2220335 to 2221092 reverse strand)
ttcagaggtagattctccgacttctgaagttccaggtgagaggaggtcatttagtctaataatctgctagggatatgtatagactttctttcgcatatcatggatggatgccccctttgtcaatcatcacaaactgatttctgatttgttttcaacattttgctattagactgacattctcagtcattactaccttgggctataattttgtggtgtgtttgaaatatttagcaatatatcacatatcaagatgatctgataaggtaatctttcccatgtatttttcacataattccaattgatattttcatttagtagagcaacatggaagaaatgttagcttttaagtatgaacctgagccttcacatgcaaaatttgcatgatgccaagacaacggtttgtttaattttaggagtgattgtaatatgtttactttttatgttatattttcacagtttcaagtgttgaccactacctcaatcccttatttagtttctttttctgacttccctcctttgggtggcttattgatgcgtgactgtgcgatttagaagcttccgtttttagttcttttttgtatggactttcatctctaactacttctgactattaaagattgatttttgatccttggccatgataatcttgtcaaatgctgaaacagtttggacagaatattttccttgtttattttgtaacagccctgataggttaatttattaattatttgatgaaggtgagtgtggactcactgaaa

SEQ ID NO: 44206 - DNA, 775 bp, Manihot esculenta
  Intron number 2 from transcript cassava4.1_000195m (locus cassava4.1_000195m.g) derived from phytozome v7.0 (chr-ID scaffold05875; pos 2307675 to 2308449)
aggaatttctggagagggttattcgactgaaggaggtttgagttttttttttttttttggtagtggccgctgtttgaaaatcttaaatcttctctaagaaatgtgatttgaaaaattgacactttacatcgtgtcctcttcttacccccacctcctctttctcttcacttgccaccacattttacttcgtcacacctttgttgtagttatctcaaatttttaaacttcacaatatcgtcccttgatgtatgaaaaagaaaatttgaactggactgtatttaatatggatgtatgtgcctaacaaagtaacgcttgttcctcaagtctaaactacacggaatatattataactgccagtttcagcctgcagtaagatttaaaatcacgtgtaaatatatcggactgtaactgattgactgaaaagcattggtgtgcatatggattatttgtgctgaaagattaaagttctgctgatttttctgcttgccttggggtaaccattttaattttagttaatgtttgttgatggcgtgcttacttctcgatttctcacaaaaaccatctgagaaagtgtttttgaattttattgattaaaaaatacagtctagatgttctttttttcccctcaaaaaatgttttacaaacccatttgacatatgtttctgttgtaatttatatgaccatatgtactttggcaaagccttatagtttgagtgatcatattcttaatttgtctgcaggggagagagttgagtatagcagagaagacaaatta

SEQ ID NO: 44207 - DNA, 506 bp, Manihot esculenta
  Intron number 3 from transcript cassava4.1_012350m (locus cassava4.1_012350m.g) derived from phytozome v7.0 (chr-ID scaffold06028; pos 65243 to 65748 reverse strand)
cttcgtgagtagtatgattataccatcttttgtcattgaaattgtgctctggcacacaattccactggatgcttaatagctataacttggtcaaatcatatgtataaatttcttcctcatgatcactgtctgtcctttggtcttattctataaaattggacttctttcttttgctattaattcaattttcctatgttagcaatacgaggggaaaaatctttcgcctagttttgatatattatggtgttggtttcatatccataaagatggagttgaagggcctccttcaaataatttaggataagttttgcacagcatcgatgggatactgtttctagataaaacatgaagtagtttatttagtgtttttttttttcaaagctgaatgaagataaaggatccatatagctgatcccaactagtttgagctttaattttgttattggttaatgtcgtactttttcatggcaggattcgccgtggccatcaagtttaccaggaagtgt

SEQ ID NO: 44208 - DNA, 422 bp, Manihot esculenta
  Intron number 2 from transcript cassava4.1_001882m (locus cassava4.1_001882m.g) derived from phytozome v7.0 (chr-ID scaffold09492; pos 536915 to 537336 reverse strand)
agaggttccttccctagcaaaggtatgtttatccacattcattcaccaattctattaattatttgagctgtatttcatcctagaattcaagttttgtactattgcatgatgcataactaggcaactttgaaatatgtattgtaataacataaaagctgtatggtgcaacaggttttgaaagattagaggtgttggacttaggttatagtagcttcagtagtagtaacttatcaacattgggcactactctttcatctcttaagcaattgattcttagtgggaattatatggaaggttccttccctatacaaggtaggtatgtttgattctgggaatattggttttctttcatggatttctttttattgttttcttctcttggttcagaatttagtaagctcaagaacttggaagtcttggat

SEQ ID NO: 44209 - DNA, 260 bp, Manihot esculenta
  Intron number 1 from transcript cassava4.1_001882m (locus cassava4.1_001882m.g) derived from phytozome v7.0 (chr-ID scaffold09492; pos 537456 to 537715 reverse strand)
caatttcaccactggtcacgtggttgatctctccttcaacaatttaagacaatacgaggaaaatatttggtttctaaatctttccatgtttgagtcatttaaggagttaagaagtcttaatttatcctatagtggaatgggtggtttgattaatgagaaaggtatatatgctatggtcttctacctattttttttttttcgttaatggatgtacctgaatttcatgtaactaataacacaagccgtatgtacaggttctg

SEQ ID NO: 44210 - DNA, 481 bp, Manihot esculenta
  Intron number 1 from transcript cassava4.1_030546m (locus cassava4.1_030546m.g) derived from phytozome v7.0 (chr-ID scaffold05280; pos 617142 to 617622 reverse strand)
cctctgatgtaagtcctggactttgaattcttccttttatttcatacttcctgttatggcttctccgagaactcatcaataagagatgcttaaacaaacgatgaaaagaaaagggttttccgattccaattcgtttctcctcttttgaaaattgtttagcattcgaaaaaaggttgaaaattttagatttttacgtggtaaagttgacggattaattttttgtattattattggagctgaattttttttttctcttggtttattatgttggtcggatggtagttttaaaaagactgttggttggatgctgagaatcagcgcaaaaaaagggagaggaataaagaaactaaaacttgaacaatctccataaaaaacttgtattatgcccattcatggatagcgttttaagtttttcagtgtgaactatttgaacctggtggctgtaggctctggacaagatcagattcgagagcttgacaga

SEQ ID NO: 44211 - DNA, 432 bp, Manihot esculenta
  Intron number 3 from transcript cassava4.1_024501m (locus cassava4.1_024501m.g) derived from phytozome v7.0 (chr-ID scaffold03942; pos 3985 to 4416 reverse strand)
agaaggtttgtcttcctgttacgtgccgatctcaaaattatcaaaatttggaaattgacaccgcaaatgtttagggtatgattgttaataacgttggagagctgtcgttgagatatcagaacagtaaaaatattagttagacggcattaaaattaaagttaatatttttaataataaaaatttaaaactctaacataattactcaattttctttttccaattgttcttttcaaccacatctgaaatggacaagaaacacttttattctccaaatatgaacccaaatgttgctttaatcattgtatgttctggtatattttttcatagaccattatggaattgggaattgtggttccaacatattttatctgactgatttactgtatatcaaatgtagagcaatcgtttgaagcaagtagagtgtcatttgga

SEQ ID NO: 44212 - DNA, 1004 bp, Manihot esculenta
  Intron number 1 from transcript cassava4.1_012129m (locus cassava4.1_012129m.g) derived from phytozome v7.0 (chr-ID scaffold05875; pos 2134816 to 2135819)
aagaactccatcgtgaagctcttagttcagttctctgtctctttttccttcttcgttgcaactgccttctattatctttttcctttttccaaaaaaaaaaaaaaaaggaaatctttgttcgcttgggcttcctaattaatgtgaatttgttcctggattcttccaatagttgttttttccccttttccctacattacctctagatttgcatattttctgttgtatttgggacttccttgctgctgacaaacacacgggagatttagttctagcagttaacctaagcctgaaaccctaatttactttagttaatatatgtcacatccatgtaagcatcttgcatgaaatggatagctaattgcaaattggcacctaatatttggagacctatccatacatacattttatcatttcagatatgctatatactatataatttctttccttttgtagttatgtttcgattattcgtagttcttaatgcaaatgataaaatgggttcgcatttccttgttggaagtttgtgaacaaagcaacattgtctgaagttaataataaaggacgagttttgggcatgtgtaattttatggctggcaaaaagctctaacatatctaattttaattcgtgcaagggatcaccagtttattgtttgcaaaagtggctgcagcttagttgacataagcattgccacaagtgaaaaaaaaaagttgttttctctctaatttgggatgctatgtacttttattagtatgtgctgctggctagtagatgtctgttgctaatatgttatatgaatgactaattgtatgtgatgaaagttccaaatttggtgataatattcattcttttggatcaggatatcttaataaaagctttaagagaaagccatatgctttaatggaagtgtaatagaagtttggagctgaaaagttagccatttcaaattgttgaattttttgatacttcttttgcagtgtctttaaagccagagctttttgagggg

SEQ ID NO: 44213 - DNA, 944 bp, Manihot esculenta
  Intron number 2 from transcript cassava4.1_015533m (locus cassava4.1_015533m.g) derived from phytozome v7.0 (chr-ID scaffold08359; pos 1532256 to 1533199 reverse strand)
caggaatcattattggtgttgatatactctttaaggtgccatattcttttgccttttccatgacacttaagctggatatgattaaacttttagacatggcatctcccgattgtaaagtcactgccagtgccaaagtgctagagattattgtatgggcatagctatacgttctttaaattattggagcatgttacgacctggaataggtattgggtaacctgttaaaacaggaactgtcacatcattattatttatgtacctgttgtcaatacaacatcggacatgggttttttagtgataaattttgaacaagaaattttagttcaggcatgttcattcattagaagaaattaaagaaagaaaaaagagggggggggggggggtacatgtactatgtagtcacacatgctatcaattgtcattctgtcttcttaagattcaataatctgctctgggttagcgtcaaattttgcattttggttgccatctctgtttctaaggtttatctgtgagttaatccataaagaattagctccatgtagtcgctatttgatttagaaggagagataattgggagtccaacataaagtaagagttagtgtccatatttgcttattggatacactaagatatatctcatggagattttggttgctaactcgattgaattaatttgagcttgtgtaccttttaagttttaagataaattgagaactgataggtcgattactaggaggctttagaattgcaccttaatagtactttgatcttgcagtcaaggagaggataatttgatagcatcctggggcccttctaattagagctcaatttgtttgtatattcatcatattgtgcaatgctttccagtcaaatcaacagccatctttaactattgaatccagcctaactgcattcgacctttcttttttttccacagggaattt

SEQ ID NO: 44214 - DNA, 631 bp, Manihot esculenta
  Intron number 1 from transcript cassava4.1_015533m (locus cassava4.1_015533m.g) derived from phytozome v7.0 (chr-ID scaffold08359; pos 1533322 to 1533952 reverse strand)
ctagctctcttaatcttgcttggtgctgtcttcaggtcctttctcttctaatttttcttatggttttccgttaaatgaagaaaattgaagatattgagtttctgtgtggattttgagcatagtggagttgtaagtgaatttaggggaaaagtgtatagaaagaattacaaaagttggaggattgggatttttgatgttttaagttggtcatttttgttgttgagacctgtaaagaattgcttctgagactgttattattgttcagtattgctgtgagttctgttacttctgtgtacggattgaagtaacgtagaagctgtaatttcctttcctttattatgcccaagatgaaatttcctccatttcatggaattaacagttgatgtatcctttcctgtaacttcatcaaggggaccactgatttatccttggtgggaataatgtatatcacagacatgggatttagaaaaataatataagttttgtcacccccttttctgaatttttctcgtagcttagtgatgtgatgaactgatttttgtaattttttcttttgcatttagtatttaccttctgtacttctccttgatgaacaggcttggcagtgttctcctgggaaggagatttcttg

SEQ ID NO: 44215 - DNA, 692 bp, Manihot esculenta
  Intron number 1 from transcript cassava4.1_008005m (locus cassava4.1_008005m.g) derived from phytozome v7.0 (chr-ID scaffold05875; pos 2180768 to 2181459)
caattcaatttgcattcctctcttccctttcccaggtcagtgatctcttttaccctaccatttttcatttctttacgaattaaacatcatttatctcttctccttcctttctgtaatccaaagacaacatcttttgttggaatttttttttcttttgattttcttttcttctcatcaacttcccttgtgtaatcccgagtcgactcgtttggaaatatggccctggccagaagggcataaaagtacttcggcttgctggggtcattattgtagtcgtaattttagtggttctagattccagttatatacctcgtgtttggtacttgccggtaatcgtgttggttaattcagttttttccaattatgcccctccttacttttggaagttattgagctccgttttccttccaaatttcaattagactgtttggttgggacactaggaaggagggattcaaatttgcaaggagacgtttcctcctcccttatatgcgtttcctttgatcgcgtgattgctttctttatcatgtttttgagctcctaaacggcgggaattgattattgattttattaattagaagctgtctatcaccatcacacttataaaacgcggaagcggagttcaagattaacattttcaacttgttctgtttgtagggacgcgtttggggaaaggggtctttttgaccaca

SEQ ID NO: 44216 - DNA, 819 bp, Manihot esculenta
  Intron number 1 from transcript cassava4.1_003155m (locus cassava4.1_003155m.g) derived from phytozome v7.0 (chr-ID scaffold12865; pos 934781 to 935599)
ttcggaatttcattcttcacacacttcagttgcaggtaacttagtggttaattatgccaacttttttctattgtttgaaatagtgatttccatatcttgcatgtctcttcatattattaacttgcatttgctgatcccatgtgtaactgattgtgaatattgctgttttatttttgtttctgttgtggttaacttttccaagagagtccttactaataacaactgttttctataccacatggttgatcactaatgtttaaggctcatggtggaacattcaatgaaatgtttgtttccaaaattactaattatctctggtagaaatagtggatttgttctgcatgtgagagagtgccttgcaccctaaacaagaggaaacaattgctacagttaatgctgtgtatttctgcaaaattgctggcatgtgattaattgtctttgtgaaaattcaaagaagtaattaaaaattgacactaaccataatgtgaacacaaggatgctattccttttatggttgcttgtttaaagaataacaagaaagttatagtggattttgtgattgcttctgtaggtgttgtgaaactaaaatatggtacggttttcatatatttgttcatatcagaggattagtggctgcatatctggatcaatgctaaaataacaataattttttttaaaaattttcctgtggagtgtatagttgattgtgtgtctcgctgcagggatagtgatgcttttcatttttctttaatatttttttttttctggagttatcttttattgtatatgactcttatattgcagagctgggagaaaaca

SEQ ID NO: 44217 - DNA, 449 bp, Manihot esculenta
  Intron number 2 from transcript cassava4.1_000238m (locus cassava4.1_000238m.g) derived from phytozome v7.0 (chr-ID scaffold12513; pos 178556 to 179004)
ctactctgcttaacgctactctaaatacaatagaggtgccacttttttttgtctctttaattatattttccgtttgatttctaattttgtgtgaccttttatatttttttggtaattaaaataatagaattgatgaactgaaagctggaagaaaaaggcaaaatattgaactttaggtttgtcagaatttttaaccttttaaagtatatagctgtcttttttttaatactttttttaatgatttttttccaaaatctaacttcgatcctttttttttaatttctccaataggatgtattttattcttttctagttaacatattgatttgagataaaatttaatcatttgaaaaattattgagtatgagcgataattaattctgtttatctattttgatttcttatgtacaatagaacattcttgggctgattcggcttgctccctcaaa

SEQ ID NO: 44218 - DNA, 715 bp, Manihot esculenta
  Intron number 2 from transcript cassava4.1_032976m (locus cassava4.1_032976m.g) derived from phytozome v7.0 (chr-ID scaffold04182; pos 416500 to 417214)
cccgagttgttgaccaggtgatttttagtgttatgtatggtttatgtccctttgttgtttcttatgcacaacactaggagcacacaactctcaagacaataatagaaaaaatttcgactgtgacatctacggccaaaggcaaatagagataaagtttcatcacaattgaaaaagaatgacacaatctctctcagctcttaaaattgattcaatgtatgttccgaaatctcaagtaatctagggcagaaaaaaaaatacaagtatttataacccttcatactcctctgagtactgattccatttttttatcccatttgagtcgcagccaaattttttagtcggatcacaattgggcgaaagtacaagccacataaataacatattctttagttcttcctattcatgttgtctctttatttttctctacagtttttgtaattaacttagtgttatcattcatcaacttgagaagtttacttgattaactgagtcgttgtcaatgtgatttttggtgtttggattgtttgatggtttgttttgtttatcatggtttcctggacgctactgccattcattgaataaggttttttcaaattcttgttctgcatttaagtttcttggaacgtccggcaggttctgttaattttagtcttgctgtgacttcatataagaaatttagggagcattatgattattttaaaaagttatggcaggt

SEQ ID NO: 44219 - DNA, 769 bp, Manihot esculenta
  Intron number 1 from transcript cassava4.1_015399m (locus cassava4.1_015399m.g) derived from phytozome v7.0 (chr-ID scaffold03299; pos 156747 to 157515 reverse strand)
catcttctctccttactccaactccaaaatttcaggtgccatttacggttcttctgtcggattacgtttcaactacaattaattcggttcaatttcagcaacaaatttcaaaagcttagaatgtcacttcttgttagctcagctaatccgtagtcagcttgctgctttggatatatgaatcaataaagatacttcctttatggttatgttctaaactgcatggtaaaaatcgaaacatagcaaaatatcggtggttagtggtgaagtaggttcatatattactttataatctacagtgctagtcctacgaggcgttgtgaattagttttcatgatttcatcatcactttttgagctattgtgttatgtttttgttgttattatccttatttctgagttgggttttttgaactttcggtgaaaatggcgataatttgtaattgtaatttctgttgaattttgcttcctgcaatgccctgtaattttttttcccatcaattagatacacaaataacacttgccaccttaatttcatgcatcaaacaccaaaaggtaatcctttgtccgctgatttcatttccttgagtctttctttttcgttctcagatttgtccaatatagattcaaatggtgaccttgtggtctcttgaattgaattgcttattcatcagctgaatcaaatggcccaatctcaagaaaatatgttcatgacattatcttttgccctttatacagattaaccggttcaaaaaccaacctagtcaactcca

SEQ ID NO: 44220 - DNA, 629 bp, Manihot esculenta
  Intron number 2 from transcript cassava4.1_026876m (locus cassava4.1_026876m.g) derived from phytozome v7.0 (chr-ID scaffold03850; pos 123188 to 123816 reverse strand)
aatttgcctaccactatctctcccggagctctaaggtgtagtagtgatcctcgtgttttacccttcactgttgtttattacagaatccagtaaccctatgtcatcactagggttgtttcagagcagcagggaagacaattagctatgtttttatagctagctgacggtgatgatgcaagagtagtgtgcttccagcttcccttacagctagaaccaaaaactaattattaaaagcatttataggttcttggtagttatgatttacagtttcagcccaattaatgatccatatgctgttctcatttaaaaggctgaaatggcaggcttttgtttttgttatggctttcttgttttgtagaaaatattaaacattagtccttgcggtgatctttccgctttcacccgtcgaaaggctagacgcaactttgaattaatgaactgggtactcttgagattctaattttcagagaccaaagtgtctctatagtctgtttcttaaaccctagttctatgttgtaatatcaatccttttgttgccttacgtatactgtagcatatggttttggattatgtttgggtttatgtgtttgttatctgcaatttctgacttgtttcggatgataactagg

SEQ ID NO: 44221 - DNA, 826 bp, Manihot esculenta
  Intron number 1 from transcript cassava4.1_011068m (locus cassava4.1_011068m.g) derived from phytozome v7.0 (chr-ID scaffold02538; pos 112046 to 112871 reverse strand)
attgaagaaagctggtgcctctggtattagggcaggtatttactttgtcgtataatcacaggtcatttgtcaattatggaaaattttgatgtattgagttacttgttttatatggatctctgtccatttgataatgatatcattagttttggatctatgttgctgttatctgttgatggaaaatgtgaaaattcttttcatttggaggttggttttcaatagatccttgaaattttgggttgagtgaccaatataaactatgttcttgctttattgttggtatgattatgctatgcttaaaagaatgtaatgcaaaagtgggaattttgactttgcttcactttagtcaggtgaggttaggtttctgatctaggaagatccacatctaatcttagtaataggtgtttagagagtactcatgtttgtttaaggtattctactttctaatgctggcactttcatgatgattttagtttcctgataaacgaggttaagtataaaaatttgtgtccacatcacatcaatagcagctaaaaatctcttagctactggatttatcaaattcaaatgtagttttttgcagtgttgctatacaaatacaagtctttttattatttcctttctcggagaagttgaacaggtttttgcatgtttgaatttgttgttatccatagaagctaaggggacaagttagccaccgtttacatttattgtttgcttactattgtcttttcttaacattatttgactatgatttacgggaatttcactgaaatttagttttgttcaaaacaatttgcagggagtggaggttattcttacttgt

SEQ ID NO: 44222 - DNA, 734 bp, Manihot esculenta
  Intron number 1 from transcript cassava4.1_008730m (locus cassava4.1_008730m.g) derived from phytozome v7.0 (chr-ID scaffold05875; pos 2132697 to 2133430 reverse strand)
atcaaggtacaacttttcccacccctctctacatataagcatttgcaagcttcttctgcttgtttagctgttcagctttgtgtttttgctccatttgcataggtgttattgtttctttcttattttttgggttacgggaatttttcttcttttcatttctttctttcctccacttgttttttttttttttttttttttttttgggtttggggaggaatgaatttgctgctcagatgttattgtggtgttgccgcttctagggaaagatggctttcggtgattactaatgttaatggtatgcatttgtcatttcacgtgcgtgctgtggaaatctgagacttatagaaggattattgattcaatagaaggattgctagcaaggtttttacagtggcatctaaagtaagagctgggatgtaaatacaaacagcaaaggatattgaagtctactacttttgatttttgtgtctattatttgggtttgcttttctcttcttgcctcttttcaattgtggattttgcaatgcatgtttttagcagttaggaaaggttgatcgctttttgtgtgatttgctgtggattaactaattgaaatcttttagcttttgaccattgggaaattgctttattcatgatttcttctggtttgctgcaatatcctgcttactaacttggaatatttaactttgatatacacaggatcgtgtacgaacggagacttacaggactgcaat

SEQ ID NO: 44223 - DNA, 326 bp, Manihot esculenta
  Intron number 1 from transcript cassava4.1_004170m (locus cassava4.1_004170m.g) derived from phytozome v7.0 (chr-ID scaffold07402; pos 229367 to 229692 reverse strand)
cagtttgccactccttggactgtttctgttgccaggttaaatgggttcatttttcttcttattgtgttctttgagattattaccaatttttatgatttgctgtcctaattttgtttagcctttggtgttataaaatttctgccttttgatctgggaaatgccaccagaattatgaatgtttctgctagtttcttgaagtcacaagagagttcttcatctttattatttcacttttgattcatatctctgagatttgcatgatttgaatgtttttttttgttctgtgtacagtgggtatactttgttgcgggatccacactacaaca

SEQ ID NO: 44224 - DNA, 457 bp, Manihot esculenta
  Intron number 1 from transcript cassava4.1_017951m (locus cassava4.1_017951m.g) derived from phytozome v7.0 (chr-ID scaffold05875; pos 924757 to 925213 reverse strand)
gtactcatcaagtttatatttttctgcttctgctggtaatcctcgtcaagattaatttcattttctttttcttgtttttgaacatgttttagattgatgttttcgtttcttgattcgtgcttgtgcttgattgaaattgcaggggatttatgaagagttttcttttaaccttttgaaagtttcgattttcaaaacgatgagctgtttttagaaaatatttctggtatccagctggttttgcaaattgctttatgagcctaaacgcttaatcatcaagttctctctgtatattaatgtatataaacccaattttgaaacagaacggaacagtctttctattcaagaaaacatctttatcaaaaacccatgtttccttctatttttttgagttctaaatcatatttaaaaatgggttaataatagttttgatgggttgtttacagggaagattttgcaa

SEQ ID NO: 44225 - DNA, 696 bp, Manihot esculenta
  Intron number 1 from transcript cassava4.1_030113m (locus cassava4.1_030113m.g) derived from phytozome v7.0 (chr-ID scaffold04716; pos 111627 to 112322 reverse strand)
tcatcatcacctcgggacgccaggcatcctcctacttttcttttcttttcttctacgtttatattttgccagatttttaccagcgttatatgccattcaatcatttcatcttcatttcctttggctgatttaagataatacaaatgttttgagcctttgaatcatgtttccctctgcgtggcctttcttttcagaagaaatttgccatcatttacctattttctgtagtcatttatttaattaccgattgggagaaattgtttttggcgattgactgagaagtgaaaacaatctctattatgtttttaaattttaaaatcctacaatgtccgagtctgaaaatctacatattcttgatttttgctgatttaatgtttgttggttcgaatttgaaaaggttgcagtttattagttagttgtatatcttaattttccttatatgatcttgttcttctacgaaaaaacaaatttacaggagctgcactcatttgaaaaagagggaaatgggtctctgtttcatctttaatgtgaatgcatgaagctgattcataattaaaaattgtaatatgatagattaagtattggctctgcagcctgttgttttgctaattagctgtttttcttcgtattttattttctgatgtactgtgaattgatgcagaaactgaagactagagtggtgaaaagaaactgtaa

SEQ ID NO: 44226 - DNA, 928 bp, Manihot esculenta
  Intron number 4 from transcript cassava4.1_007744m (locus cassava4.1_007744m.g) derived from phytozome v7.0 (chr-ID scaffold02080; pos 168031 to 168958 reverse strand)
ttataatttcagcttcccaggatcgaacttgtaaggttggtgtcctctttgtttgaagatttgtatgtatataattcatctagtttatagttttgactttatttccacggtggtaattcattcaccttatgtaatgacaaccacagtatgcatgttagaaatatatcatatggagtttgcaaaccttaaatttggaaagagctcttctctttatacatgttagaaatatatcatgttatgtcatacaacttgagagcctaattacagagcaatggatattctgtgatattaagactaatgatcgtgagatatccctgggtagtttttcttgtacactaagttctatatttcacaatgggattttaagactgatgatcatgagatatctctctgtagttttgcttgtgcaccaagttttatcttttacagcgggattgcaggggatattgatcctagaatagagatgagataaaggcataccaaaaaggaagtgcttgcattattgatgcacttgaaataaaatagagataaattatgtgctaacttgaaaaatcacactgcaacagcccggggcaattaaataacaaaaaacaattgtagtgagatttagggtccctaaagttttcaattaacttgcaagtagttcattccagcatcttgtctatttgctttgttatctaaattctttcttaacatttgttcttcctttttttctctatgtattaaaagaataggttcccccttttaggctcttaaatacattatgtagaattgatatccgtttgagtaacacacatttataggaagtaatttcagtacttataatctgcttacaaatatatatttgtcctatgaaaatttgtattaatttattatgacgcatcttgtctcaggtgtggagcttatctaaggggatattattaagaaa

SEQ ID NO: 44227 - DNA, 584 bp, Manihot esculenta
  Intron number 3 from transcript cassava4.1_002053m (locus cassava4.1_002053m.g) derived from phytozome v7.0 (chr-ID scaffold07236; pos 45059 to 45642 reverse strand)
gaccgctgtatgaatcctcctatctcatacttatttactattttttcatgttatcttttcgatttgactggtctatgttccaagtatgatgatccttttgttagaggctagtcagtcatggttggcttgctactttagcctgaaaaattacccatgttaagtttacaacacgaacgtgaattttatcctttatcacttcaagtggttgagaaaatcaattaagattttggaatacctgagtctcatgtccatgtgtatgtattcttaatactaacttccaaaatatgtgtatttgattcaatcaataaccttgagtgcaattcaaattttcctttttgaagcattgttctgggatatccagtttcagtatgacttcttttagtgtgcaagtggaagagttttagaagatggaatgattattttaaatagtcatttgacaaatcttttgctggtgctcgtcatctgtacgtgtcatgttttccatggaaaatttaaatttgtatgtgaaaacttttttgattcaatttgtgggctgtttctgattgcatatgctaaatgtgcagaaaaaggttgtggttcaacac

SEQ ID NO: 44228 - DNA, 508 bp, Manihot esculenta
  Intron number 2 from transcript cassava4.1_025986m (locus cassava4.1_025986m.g) derived from phytozome v7.0 (chr-ID scaffold04165; pos 272796 to 273303)
gagattctggtatttacaggttctttatgtaaatcgagagatacactcatttagagaattttgaggaacggaaggggatgaattaagttgttatttcaagtctaattttaataaatatggtagtttgtcaccaattgagaacttaccttgactattctaatctatactctgagctaaagtttagcagtctttgttgtttgaggtcctaaacaaaaggatgcgataatttgatcttccgaatgtctattttttttattaaatttctgtgaaaatgttgtggcagatagaaggattaatattgaattcggataattaagatgaaatttgtatatcggtagaaaaggaacttcatcctggtgtatggcttctttttttcccttccagttcattgtgggtaattagagataacctctaactatgtgccttgttccggtttgttccatcttaatttaatgattacttcatctttacagggtctttgaaggttccctttttgttcttgacaaat

SEQ ID NO: 44229 - DNA, 635 bp, Manihot esculenta
  Intron number 1 from transcript cassava4.1_013487m (locus cassava4.1_013487m.g) derived from phytozome v7.0 (chr-ID scaffold12794; pos 1362926 to 1363560 reverse strand)
gtttctacttccagcagtggcaacgaattggttggttctttacaaaatttattgtctttagcatggttttcctccctctctcattctgtatagttgataagaaaatggaagaatagtgatattattttttgggtgacggttgtcttttgttggtttgtatttggaattaagggtggctcgaattgacagaattgttatttttctggtcccaattgatagatattcaaaattttgtgcgaaagtgaaggtcttttctatgaaaaaaagggagagaaagtaaagagtttttgggttttaaaataaatttaaaatttgtattttcgtgctatattttctcagcaatttgactatttggttggttatgagtttttgagacgtttactccacctgtgaccttcgatctgtaaaatttctctgaactcttttcaaatgaaaatggattttataactgttatactattatatgtgtgatatatccatctttgtataattaaatcttgagaggctagattggagtggtttctaaacctgatattgttatttatgtattttcattttgtgacaatttatcacttacaaaagaaatcctacaaccattcgtcttatacttttgagtttgtaacagaacgattcaa

SEQ ID NO: 44230 - DNA, 894 bp, Manihot esculenta
  Intron number 2 from transcript cassava4.1_006121m (locus cassava4.1_006121m.g) derived from phytozome v7.0 (chr-ID scaffold05019; pos 72606 to 73499)
gaggtaatttcttgaacttcctttgattgtgtggttattatagtcatgtaaatggcaattttgaacatttttcagtattataatgaattcaataatttttcttttgaaagaaaaaaggaattgtgagtttgaaatgtgaatggctaacaattgatgcgtgaagcaaaagattgaagaaatgcaacgcgagtgagaggttatggtgtttggcattcaaaccagaaagcgtaaaactaatgagcttaatgataatggaaaactccacaacaacctgccattgtcgtgtttcattcattgtcaccactagtattgccatatacgctagggctgtttgtctctcctgctcagtaatgtaatttctgttgatgtggttatgttagcccacaaattggggtgtcaagaagcagaaatttggtgaaatttcatatgaacttatttggtggtagctttctcctccaagaagtttatctacaaggttggatgagtaagcatttcaagtactattattcataatttgttatttgtttacttaaatatgcagatgggttgaagaaatagctttagtactaagtttgagtgtccaacccaaaaccttgtgcttatagcttcaacaatggactaagtgaaggaatatagcctgagtgcagtgaaaagaaaagaaaagatgaaatctgaaattaagattatccaattatttaagcaagaatttactaaaaacatatttatggaactgtggcgcataaatattagtaagaaaattatactacaaatatgagtgtttctacattctgttacaagattgcacacaatttacttaacttttaatcacatttgttgactttgttatttcaatttacaggcacttcccttatacctggataaacttttcaatca

SEQ ID NO: 44231 - DNA, 331 bp, Manihot esculenta
  Intron number 3 from transcript cassava4.1_021050m (locus cassava4.1_021050m.g) derived from phytozome v7.0 (chr-ID scaffold08359; pos 1209370 to 1209700 reverse strand)
atacttgcctcagaattggagaagagcttattactgttgaagaggtaaatcagctctcttaattcatagatttccacgtaaatttgaaatcaaaagtaagaacatcagcaataatcatgtgtttcttattgatatccattggaagaaaagtcgggcaatttcaatgtttcagtcttggagcagaaatttgtatcattgtatagaaatttacaaggcttgatgatctcttttttctagactaataatatccggtgttaatccagttatcaatattaatctccatataaaagcagacttgtaatttttttttttttggctccttgtcggtagg

SEQ ID NO: 44232 - DNA, 607 bp, Manihot esculenta
  Intron number 1 from transcript cassava4.1_007873m (locus cassava4.1_007873m.g) derived from phytozome v7.0 (chr-ID scaffold06028; pos 194344 to 194950)
aggtacgtccattacttccagaacccgattaaaggaaacttgagttcagtttgcttaatctaagaccttatttgctttaacacgacaattgattgggtcttcctctcttcttcttcgcctattgtctatattttcttctcagttattgttcaatttttgtctaccattgatgggtctcctagagattttgctttctttaccaaatttttatttgatttcttctcggtctcttaggtgatcaatttagtatatggttttaggggtttaattactgcctcaatagtctatcttcactcagaatgaatttaattaagcattcaagtgtacatcttgtgctagaatttggatactgatcctgcccatctagcttttgggaggtttcttccaccttctctgacgtcattgtctgtggattattggaattgcttttctgcttccatcattctagatcaaagtgcatcaacatctttagtacttcgctgttttttgatttgcaatttgtttctgcaatgggtattatttatgaaataggaaattttcatttctttttaaactgacatttaacagcttttaaattatcaatttttattgcagactttgaagactt

SEQ ID NO: 44233 - DNA, 1013 bp, Manihot esculenta
  Intron number 1 from transcript cassava4.1_014006m (locus cassava4.1_014006m.g) derived from phytozome v7.0 (chr-ID scaffold06948; pos 833996 to 835008 reverse strand)
cagcttgaggatgtcagttctgcttgttcctctgttttgagtttaaagcatgctctgtttctgtatgctaattcgcattatactgttgctgagatgatcccatgaaaagcaagcaaattatcttcttttttttcctgaaccattttttcccttaatgtgttgtgggttttgttcattgctgaggaacacatttgtcgtaatttttttgttgcttgtagatgaggagataaaacttcactgagctaactagttgtgcatgggttccttgagtgtggcaactggttttcactcttttttttttctctccattttcagattcataaatggcaaaacgtttcgacatgattttttttcttaattttcttaaaatttcatcagttaagggaatatctctagttgaaatggctttgttttattgctgtgtatccttggacttgcttgagaggtactatttctttttcgaacctcaattttggcttgtgtatatttcagctttgtagcttttttattcttttaattctatttttttgggtatgaacctgagcttcagtgagctctattatgcccttgaagtcattggtttaaaccctaggaatagccaccttgctatccaaggagaaggttgcttacatccaaccctccttgtcatctgtaatctgtgaggccttgcacactaattaaaattttaactttatatttggttgattgattatgcgtccaatgattttttgctgcaagcctgcaccagtggaatgctaaaatggaaaagaagaatatacttcttcagagaagatgcagctgtattttttttttgtggaaagttcttgtcaattttcctccttcctttatttatagtgatatcattagtttgagctggtttaacatttaatcatgaaaaggtttctgtattctgatagttgtgtcaggattgacatcctagtaatacttcatttttatttttattaatctaatatgcagagggatagcattggaattgggggctcctggtctga

SEQ ID NO: 44234 - DNA, 292 bp, Manihot esculenta
  Intron number 1 from transcript cassava4.1_025914m (locus cassava4.1_025914m.g) derived from phytozome v7.0 (chr-ID scaffold03410; pos 185365 to 185656 reverse strand)
ccaggtttctacctcacattactttctttccataattttaatactacactgatcatgcgtctttgtggacctccgttaattcatatccaatcacaaatttaacaaccccctttttaacagtattgctcttttaaattatcgtggttcttggcatgttgtggaattgtgattcctgatcttcttatattatttttctgtgctttagttgtgttttttttttccccgtaattatttggtttaggttcattttgatttttgtttctttcgatattctgcagcagcggattttacc

SEQ ID NO: 44235 - DNA, 917 bp, Manihot esculenta
  Intron number 1 from transcript cassava4.1_016272m (locus cassava4.1_016272m.g) derived from phytozome v7.0 (chr-ID scaffold08836; pos 9385 to 10301)
gcaggtacagtggaacacaactcagcattctgcaagtgagaaatctcgtccttttttccttttaatccgtgcaattttaagtttaatccatgctccattttatctaattgtcatagatatttgtctggtttctcttttatatcataatgaaagcgtgaacctttgttgaatatttctacaccatttaccaaattgggtgcttgttttatgtggcaagcaatgatcagttcttaattccctgtttttctgctgatgattgacatgggtatttcatagaattaggcaattgatagttctttccatgatttcattttcttgcttgataatttctattcatttcagttatagaacaatcattgagtactgggggatctctttcttaacatggaaccagacatcctcaaaatcttccatgaaagaggaaaggaaggaggaagtaatgtcctgaaaatggaatcacataaaagtgcatgattttatatgctattttcaacttattgataatgtatgcagtttctggtttcatctttctttcttatacacaaggcactaaccctaaaaattgaaaatttattgctgatatcattatttctcaataaaactttttcttttttttttcgctttttgtccattagctttaagaaagaaaaacttttgctttttgactagagacgtttggaactatcttattttgtttgctagtctagcttcaaaaattaaatttggacacagattgctcatatcctccagattctaactgtatttaattataatgacatagctctaaactgaaagagagtttcatcagcttcttctttatgctgtaaatcattctcttttgtaagttaatcaacagcatactttattctttctttgcttatttggttctgatgctgtctgcagatttggaaggattg

SEQ ID NO: 44236 - DNA, 529 bp, Manihot esculenta
  Intron number 2 from transcript cassava4.1_016272m (locus cassava4.1_016272m.g) derived from phytozome v7.0 (chr-ID scaffold08836; pos 10325 to 10853)
tctccgaattcacagagaatagcaaacaaacagaggtcatatttctttctacattatgaaacatttttctatttagattccactgtttattcattgcatcttatctcctttgaaaagctggcaactccaatgagctttgcttctctgttgatgattatagaatgcaatgataaatgcctttaacatgggaatctttactgatcacgggagggattctacattagactgctgtcaattgctgccattcataatttgctttatcttctgaacttgaatcatcctttgccctcaattgatatcaccacattgcatttgattcagaaagagtagttgaattgcagaagttaaggtactaaaacaattttttttttaaggaaaaaagaagaacaagcgaaattcagacactatttaaagtgcattaaatatgaaatacaaaagtatgaaagctaaggccaacactatgcttataagttgtttgttagatgtctcccttaagatcttatttaacacttgcttctttcatcagata

SEQ ID NO: 44237 - DNA, 532 bp, Manihot esculenta
  Intron number 1 from transcript cassava4.1_009369m (locus cassava4.1_009369m.g) derived from phytozome v7.0 (chr-ID scaffold07035; pos 155817 to 156348 reverse strand)
gaaccaggtatgcttgcgagacagaattgttctattatggaaaattgataatctattgaatcatttgttgcgcttgaaaaactgattccacgtctttaataagtgtattgtttgttgtgttgtcatagatgcactgatttattaaatggttaataaattttgaggaagataccgcaattttctaaactaatattcagatcatcgagggttcttagttacctgtatcgtgagtgcaggaaatttttgatatttgagcgtgagttaactggaggcttacagatgcatcaaacaaaatttggcataaatgcatgatttttttgtgttgatcatcattttttttgcttgtgattccttattttgatgtacttattttccccttagtccttttctttaaaagatttttttgaattaggataacattgtattcatgtgatatttttcatctaaggtttgtggcatatgattttttgttaaccatttctatcttaactgtcatgacagtgttgcaaagcatctggaatctgcaaacact

SEQ ID NO: 44238 - DNA, 1028 bp, Manihot esculenta
  Intron number 1 from transcript cassava4.1_014950m (locus cassava4.1_014950m.g) derived from phytozome v7.0 (chr-ID scaffold00206; pos 393810 to 394837 reverse strand)
ctatagatacggatacggtgctctcgcagatacaggtactcttcatctctagcactcttccctaaccctagaattcacaattctcctatatttcttgctttgagtactcaaattgtttttcattcaagaaaattcgacaaggatatggtaattttaactaaacgacctaatttgataattgaaacggatgatagtttactttttgacaatttgattgttttatgattaaacacattttttataattggggaaacagtgaatcaccatacatatgagctgtagcgtatttgggattcagtttgagttcagaaagatcgtttccatgggacattcatactttaaaaacttcaatattggttattaatgcacggtaaattgaatggtatacctttaactatttcttaattatataatcatatatgatttaagattaagcacagtatataatgtagcagtataagtatactatatattacataccttttagctatttcataagtatgtatagttttaactagaagatacatatataattaaggattaagcacatatatgcaatatagggcacttataattaacgattacaagttgatttaatatatttataactataattacttgaaaaaatgtagacggcaatactatatgtttatgataattgtattacatttattataattttagtggcatataagtatataattataattatagaaaaacatatatataaaaattggttctaagttcagtatgtagttatgtatcttgtatggttcaaactagaactgaataaaaaacgttaaaataagtttagtttggtaatggtaattcactttggttggacaccttcaagaaccgtgcactcccctttttacaaggccatccatgcaaatgcagtctgttcttttcttttctttttttggggcaccatattcagtttaaattaaagtttttcatatgtgcttctgatgcctggttgctttgtttttctttccttgtttgctgtttcacatttggttgtttcacag

SEQ ID NO: 44239 - DNA, 908 bp, Manihot esculenta
  Intron number 3 from transcript cassava4.1_021793m (locus cassava4.1_021793m.g) derived from phytozome v7.0 (chr-ID scaffold12004; pos 861069 to 861976 reverse strand)
gtagcttggctcaaaattttcttggtaattctctaattttctttctttgattattctaccataattatgacaataagaatgcaagttccatttatagattctctcggagtctactctcctgcaaccagaggtggatctaccataagaaatgggtcaaattaccctttttttcaaaagatttactcatatatttatatagttacttaaattaatccctaaaaaatttaaatatttaccatttttctaattgaggatgtactttttaattaataggaagtccagtaatgaccatagaaaattgcattgatggtcattgcaaaattcttgtgatatgatggctatcttcttatatgttctaagcgtaatctgttatattgtttagccttgctctgattgatctctctgctttgctgtttataggcctttttctctgcagcttttttcacttatcatgttctattttagatctaggggtattgaggaaggtccattgattggattttagttggatattaattgccaagatttttctaaatatattaataaaatatttttacttatcgaaaaaaattttattactaaaattataaaatttgctgctataaaattatgtcagtttattaataatataaaatattgtattataattttatatgtatgttattttttaaatgcaataacaattttatgacagaataaatatcataaaatttttattactaattctaatatttgtagtatgtggctgaaattcattccttaattttgggaatgtgcaatcactttctaattgcttgatgagttagacccatatgatatgactgttggtttcattctttagcatgcgcttatatttgttgtatgaaatgcaaggtgggagcaaaaataaaagtaaattcaattggaaa

SEQ ID NO: 44240 - DNA, 714 bp, Manihot esculenta
  Intron number 1 from transcript cassava4.1_026226m (locus cassava4.1_026226m.g) derived from phytozome v7.0 (chr-ID scaffold05865; pos 305799 to 306512)
tggtcccttttccaccacctctgatcttgcctcaggtttgttttacgtcttcttccctcttcttgaaattttctatttttttaggttttgtttatgtttttcttttacatttgtttgatctttccatttttacgagtttgaagtgtgttttgatcgtcatctagttaaatggaagccctttttctaactcaatggttcatctttatggaggaatgcacttcctttattcccctccttttcttgtttctctaggtaattttgatttttccttcaacatgggcggtgcttttgattgtttcctggttatgtagaaagattctataaagtagtggagctggtatcttttgttatgggttagttttagtgaggtcagtaatggggttggtagcttttgtaggtcttgattgctctctattcttttgttttattaacttattcgtcctaatgggcaagctcaattggcaatggcttgccgctgtccaaggcttcttcttcttcttctttttcttcatcctctacaataatttgcttcagttgatgggttttgctaatgtggtgttctatggtttctttagattatattgttaaaaagccatctttagatattgctagcttgtgctttctagtttggaattctatccatagacattgaagtttgatttctcattatttttaatagaaaggcaggctggaaatcatcttgagggaattccg

SEQ ID NO: 44241 - DNA, 774 bp, Manihot esculenta
  Intron number 1 from transcript cassava4.1_005485m (locus cassava4.1_005485m.g) derived from phytozome v7.0 (chr-ID scaffold07894; pos 241523 to 242296 reverse strand)
tccccttctggtaaatattgtcgttgctatgctatttccaaaattgagctcctctgtttatctgtttacatgtgttgtcggattactgattgtgtggtgtggattaattgaaagtctgttattttgacggcttgtttgatcgctggatatttgttattttagctcaattacttgtctatgtttgttttcgaggtccttgattactgggtatttgtaatggaaagctaagtctttaatatgtttttttatgtgctattttatttgttttcctttatgcaatgcattgctaaactgcatatctgtgcttgttcggctgcttctgtgttgcttgaattctgttttaaccttttctaattcctacgctgagctctgtctgcttttatgttattttgaatccaaggtagttgtcatttgtgtttattgcggacatttcgaaagggcagaactgcatagaaggatcatctagttcactcaactaaatgcggctgttcagttttgtttgttctagtaaaagttcagctgtcccattcaagctcaattttttgaattaagaatctatttgggactaatggccattttttcttcagccacatattgtctgtctgtggaacttatatgggccctgaattttttcatgttcataagtatttgtatctatgttagtctttctctctctctctctctctctctgtgtgtgtgtctgttttttctttttggattgtaaaactcatatggtttatgaattttaatattgtaggtgtgcagaaagaaaga

SEQ ID NO: 44242 - DNA, 637 bp, Manihot esculenta
  Intron number 1 from transcript cassava4.1_012741m (locus cassava4.1_012181m.g) derived from phytozome v7.0 (chr-ID scaffold12794; pos 1717400 to 1718036 reverse strand)
taattcatcttcccttggttacacttctactataggtattctacctgtcctggtgttctttcttcttttagttctcgctataatttacttcctggaaactttgattctggagcgttgaaatacggttgcgggagacttaatctaacatataaatgactaattatgagatctttccatgctctatgcttaagcttctatggttatggtcttgagccttttagattaggccctcacgttagatgagcaggcgtagaaggaattaattgcatgtattttatgtatgatttgatgattattgaactcataaagtatttttcctaaccggagtaactaactttttgtttcgtttcgtttctgcaacggaattttgaagatggaggatttagttctgcaagttttcggcaaattttcttagaattttacaaattattattcgtttattaccttctcttatcaatgttaatgaaatatgaaattaattctccatttttttttcttcttagctcgagttttgttggaatcaaatttggggtgtgaatttctagatactcactgatgtatgcgagaacagtggaattgtacgaactagcaactactaactttgggaatacttgtatcagattctcctgtttccaat

SEQ ID NO: 44243 - DNA, 793 bp, Manihot esculenta
  Intron number 1 from transcript cassava4.1_002929m (locus cassava4.1_002929m.g) derived from phytozome v7.0 (chr-ID scaffold00069; pos 274874 to 275666)
cagctataaaggtcagttgattctcttttgttttgttccatctgtttatttcattcaatttcgttttttcctttggtttgtgaattggtgaattgtgggtttgaacttttctcttgtttctgtgcttacctctgctgcgtgcgtttctcaattttgaaatgaatagtatcgtttttcttcgttgatcctttttgatctttgaagatgaagaccttgaccctcaactgtaatttgagtaatttattttttgaattgggaaagataagaaccttgatccttaattgtaatttgaggaagtgttatttattaactttggaactttcataattttttttaacctttttccttttttgagattaggtactctccattttttatgggtgatttgttactgaaatcgctgatcaaggaatcatttgttctattaggagtttttgaaggatgtgtaggaaccaagatcatgggcgaaacattaaaatagggaatcagactgtgaactcatgtctcccacttattgcgtgtgggattctgaggagtgcggacatgtttcgctgcctgaatttataaaatctgacagttcaacacaagtcacattgattttgcctaatttctacattaaccttgttaaatttaaagatgacatatattcatctagatttgctttctatatctataatagattcaacagtagactatgcgcacaagctaaattttgtctgaaatttaatttataggaggctatatttcaaactgaacatgttcatttttctctttgtagttgtggctgttcctg

SEQ ID NO: 44244 - DNA, 833 bp, Manihot esculenta
  Intron number 4 from transcript cassava4.1_004963m (locus cassava4.1_004963m.g) derived from phytozome v7.0 (chr-ID scaffold12794; pos 2190861 to 2191693)
tgggacgagctgaatcatttattcagtagaacagggtaagtttttaggacatgaaccctttatttccactttctttatgttcccaattaaaaacaatgcaatcatcaggtcagatcattatgtatgtactatttactcatattttcttaaacaaactgttgatgctaatatgctgaagtacttaacttattcttttaaagcactagtgtttgattaagaaacagctttatctattcaattttttttaatctaacataatatgtgagcagaaggtacttatgattgtaaaagacatgatattgctatattattaagcttaatggtatttaagtaattgaaatttttggattgaaacttcatcatgaattttgatatcttgaagtcctgtaagtgaaaaatattcctcttttggatgtgcaagtgccttcgtccaagcaaataaactgtatttggccacagtgatgtatattttcattctttaattctctctttaagttaagcatttcagtccttttttgttcaggttgttcactaaattttcccaccatctagattgctttcagacacttgagcatttatcctgctcattcacactagttatgtcatattctcaagtttcttcttttttccttttctgtttgaggcatccggaggaattcccatgtctttacttctagtgtccttttgaggtttaacatttttaagtttcatcaacatgtatctcgttccaaaagaaagtgggcctttggaattggggaagggtttcaggtgcttacttgtgaattaaccttgcatctgcagggccattgtgacattcagcttaaacgccctcc

SEQ ID NO: 44245 - DNA, 803 bp, Manihot esculenta
  Intron number 1 from transcript cassava4.1_007136m (locus cassava4.1_007136m.g) derived from phytozome v7.0 (chr-ID scaffold00318; pos 46610 to 47412)
atcggtcaggtatcaattaattgtattctgtatcttgttttttgaatggtttttgttcttagcttacccattaatttcgttggatcctatgatttttgccttttcttttggacgattgtctatttggagctgttgtttattggctgctgacttgctgtttggttatcgagaaaatgagttagggaagaggataaaaaaaaagaaagaaaagaaaagaaaaaggggcaaagtcgacttgacgaggtagaatcgtcggtttgcaatcatggagggtagtttattaatttagaagactagtcttttgttactgttttatttatttatttatttcctgttaggtaaacggtaagcttgatgtttctgcattattttttgtattattttattcaattattatttctcaactccaccgaaggaaaaggaaacttaaaaatttaagtttgaatttgtcctcttttttgacagtctaaatttgtcccatcaatttgcttcgtcagaggacaaataattttttttggtaactattttggttaagctacctagtacagtagtactgtgacatcaaatactcagaaaaaggaaataactgctgtatcttttttgatactgtaaaatacagtagagagtaaaaaaagatcaacttcagcttgttaaccaaatgaaaatatttctgggtgttgatggttacacatcatactaatgatatctcatatgtttggcgattagcttaactgctgttttagctaatgtcagattttttttttcttgttttctctttgcagattaaacgtgaaatttcgacc

SEQ ID NO: 44246 - DNA, 834 bp, Manihot esculenta
  Intron number 4 from transcript cassava4.1_012234m (locus cassava4.1_012234m.g) derived from phytozome v7.0 (chr-ID scaffold11297; pos 735119 to 735952)
gaaagaagattgatttcacagaccaggttttcatgtctgaacttttttaacttgccatattttagtagggttgagtactctgtattgctgttttacaattggctatgtttttaaagcaatataaggtttatcttttattttacgcaataaagaagatgacatgcacagtgacaatgagcagctcttgcctgaaagtagattaattatcatttttgaacttctacagcagtcaacaagaagttaagagaattttattccaatagacgacttaattaatggagctgaagtgctgaactagaagtaggcacaacttttttttttgtattttatttttatagagaaatctacttttatttccctcattacagccctgaaacatctccattttcttgatgcctagttctcacaaaaaagatgctaaataaatatttcagaaggcttcttgaaagttttgatataatattgctgataatttggtgaagagagttgattatgtgatgttcttcaatacataccatccattcatttatgcaggtaagtatttatgagtatgcttatctgccttatttgccctagttttatcattcttttgtctttgccaaaaaaaaattgattcttttgtagactgttttgtatattttgtgtgcaccatgaatatatgtcaaacaggatcaagatgtccagttatatctagctgtattcgtatttgcattatgttctaatttcatttactattaaaaaccttctcaatcttaatcaagtttgctagtctgttaatggttgaagtttttcattctaggttgaagtatttcggcaacagcttcaacttgctaa

SEQ ID NO: 44247 - DNA, 771 bp, Manihot esculenta
  Intron number 1 from transcript cassava4.1_015770m (locus cassava4.1_015770m.g) derived from phytozome v7.0 (chr-ID scaffold11373; pos 29253 to 30023 reverse strand)
tcaggggaaagaattatctaaaggataattctaaggtttgtttacttcctaaaatatgattgtttctgtatcacgtagctctaagttatatttctctcaaaaacatttgtttatggtacaatgcatatcttatggcaatatcaaataaaaatatcttgcacctattttgttatggtccaccaaaaaatatactgcaattgcactgattaacctttgctcttttattccaagtttactaatttttctttcctcaaatactttgtaatttcacaaggagatgaaataaataggtagatagtatcttgtatttctaccccttatattctgtatattttcctatgctgatttattataatttcctttcgcattttgtatattacatattatcaaaaagttcaaatttaattatccttcttagatggtggtcttatgaattgtggatacatttcataggagggtggcagattagttcaaagttcataggttgcttgattgcattgcatgatttgcctccaagctccattcttcatattttattatttggtaggtttacaattgtgacatatggtcaaacacaaaatgacgctttgatttatttaagattctaaaatgtgaataagcggtgttcgtttacaagtaaaatttttatggatagaattttttcattgaactaaataaatagaaactcagtagtctttaagtttttgatgcatgataaggctgccctttttccttattgatgggtactttattattgacgtccttcaggta

SEQ ID NO: 44248 - DNA, 469 bp, Manihot esculenta
  Intron number 4 from transcript cassava4.1_005533m (locus cassava4.1_005533m.g) derived from phytozome v7.0 (chr-ID scaffold06707; pos 18106 to 18574 reverse strand)
aggtatctaattatgcttttcagtcaattggtatatgctaattcttattgtctagattaaaagggaacattttttttaaaaaatttgatagtgggatggcctgctaggttctttctttagattgatcatcttagcacaatttaaaaccctgcttctttactgctgttaaaagacataaaacattacactctcacacttcactttaattggccttttccccctattattgctgccacctcaccttgtattagttgaatgattggaaacctcaaagacttgtttttatgttttctttgtttgtctataaaccaaacagcaggaaggaagagaaaataacattttcctctctcccccttgacataaatccatgtttgaagttataattcattaatttacagcaaaaaagattctttatgtggaaaaacaattgttttcttttggttattctggactttgtgttgacttcaga

SEQ ID NO: 44249 - DNA, 352 bp, Manihot esculenta
  Intron number 1 from transcript cassava4.1_015552m (locus cassava4.1_015552m.g) derived from phytozome v7.0 (chr-ID scaffold05875; pos 303384 to 303735 reverse strand)
tgacggcggcggcagtggcggtggcagtggaggtggtgagagctatttgcaaagtggtgattgggggaatagcaatggatggcctgatcttgctatttacactccaggttcaagtttccaataggcagaatacaaaggagaaattaattattttgattaatcctcctagcaatattgctcttttttttaaaaaaaaaaaaaatctgggtgtctttttgtgtggcttttgcttgaatgggttcacatataaagaagaaaaaaaaaaagacaagaattagcaatgtttattttttgtgggttttgtttatatcataaccattattatcttatcttgattagtggtaatgcaggg

SEQ ID NO: 44250 - DNA, 318 bp, Manihot esculenta
  Intron number 3 from transcript cassava4.1_004403m (locus cassava4.1_004403m.g) derived from phytozome v7.0 (chr-ID scaffold08359; pos 578211 to 578528 reverse strand)
gggaaactataacttcaggtaagcttgattagattatatttctcgagtgttttggtggctctctctttatttaaattgatgtgaagtagcaaatttgtttgatgaattaattcttatggatcgtaatggaagtgtattaaattgaagttgagagctgcctctttattcttttcattctttttttttccccctaatctgcatcacaattggtggatgttaatcaaatctctttggaactttttgtttctgtttcttgaatatttttgtttttcttgtaattcagtgtctgaacagaggcttcaacgagttaaattatca

SEQ ID NO: 44251 - DNA, 1057 bp, Manihot esculenta
  Intron number 1 from transcript cassava4.1_008663m (locus cassava4.1_008663m.g) derived from phytozome v7.0 (chr-ID scaffold03410; pos 57915 to 58971 reverse strand)
ttttcaatatatatttcaatatctacaacaagcaggttcgtttattttgttccctttacttttttgggcggtggttgggtgggggagacatgtggatattctgatgcttctaagttctacgctttattttcatgttgcttcgtgtagcgtggtaatatgaacgccaattgtgtattttattgagttgcaaatgttagatcgctttgtaaatggtgcagatttacgattggcggttttgaattatttgctagaagcacttcacctgttaagtcagaaagtgtttcgccttttaaaagctagattggcgttatagttatattgtttgtttcaatagaaaaatatatgcagaatagcttccttgaaaacataaatatagtttgcaaggactgtaattgaatttgtggtcgttgaatttggcttgcttgttatggattggtattagtgaacacacgagttccgtagaatttgtatccagttctcattgaaaaatggacagtcttagattctcagcaatcattggaccgatccattgacttggtaggtcaatagctattttaggaaatggttttactcatagtcttttaacaaaggcaatgactaactgaagcttcttattctacttgttaatttattaaatattattatctaataagttaaaggttataactccgcaaccataaatccttatatatttttaatataacttgtgtaattaatttggaaaataatcatacaatgataataaaagtatgtatgtttctatattctttcaaatggtagtaataaatattaaaacaaaaaaagaatttgtggcaaaatagacccattactaagggaagattgccgagatttaagttaacttttgtatattgaatctggcttattaacaaagaaaccaaaagaacttgtaaaactggttaaccaagttaggctaatgaattgagctcatccctgcattgatgtatttaatgcaattcctaatgatggaaatgaatcataatttccaatgcttcttgtcacaggttttgaaggtctttccatacccagtaactgttac

SEQ ID NO: 44252 - DNA, 616 bp, Manihot esculenta
  Intron number 1 from transcript cassava4.1_025647m (locus cassava4.1_025647m.g) derived from phytozome v7.0 (chr-ID scaffold10780; pos 36055 to 36670)
actgtttgggaggtaataacatccatcattcccatcagcttttcaatttcccatatatttttctgtttatgggagttaatttataagtttcctggccctgatcaattcattttttcatggcaatttattcatggatcatattcatttccattttttcccctttatatatcctgcataacttctgcgaagcccttttttttaaaatgcatttactatccctcaaggccttgttcttctcctgttgtttgctcaattttttcttatgttggtattggtttttttcttggatgttaacattaattgttgatatgcttgaaattgttttctgggttatcaaggaaaattccaatttttcatgttttcactgttatattttgaagtgcttgtgaactcatcccatttgttactaattggtgatctaattaaaatccatggctttgatgatttgatcggttaatatatatatattaaaagaaaaaaatctatgtcaaggtaataattatcacgttcagcattgagggttaagaatttgagaaactttaagcaatgccttattgttgtgataaaggtgaggcttattttgaatttgatgcaggattttgttgggaataaagat

SEQ ID NO: 44253 - DNA, 442 bp, Manihot esculenta
  Intron number 1 from transcript cassava4.1_032632m (locus cassava4.1_032632m.g) derived from phytozome v7.0 (chr-ID scaffold09183; pos 5645 to 6086 reverse strand)
aaacgcgaccactctcaggtactttgtcttcttatcttcactgttgttttaatttatttaattgtaggaaaatttaattaatagtttcgggattttgtggcaagattcaatccattctgcgtaacccattaagcgaaacatatttatccagctccaggttagacatgagatttccttttgttacattccttttcggggtttgggatgaggattggcaaacagaaagtaactgctttagtttgttaagctaccgtaagttgttgcttgtaatgttgcaattgaatgaaaatttatgtaatgtaatccaatgaagtaaaattttatatcttgcagaatttttatttgattacattgacttacatcctataaaacatgcactaagtgcttggttgtgatggtttttgcaggtcaggtatctcacacttctcataattgatcaact

SEQ ID NO: 44254 - DNA, 519 bp, Manihot esculenta
  Intron number 2 from transcript cassava4.1_000277m (locus cassava4.1_000277m.g) derived from phytozome v7.0 (chr-ID scaffold08359; pos 869938 to 870456)
cttcaggaactgcagtgtcaaatctccttcctgctgtaagttctgcacaatatgtacggtactgaggatttcatttatcagtgttgaaaaggcattctgcaaactaatggctttttaggattatttatgtttttcacattcacgcctaaaggatatatgcattgtgtttaatcttctaggctagttctgtctaacaagtttatggttgtggcatataacttaagctaccaaaggctattgacggagaatttctctctctctcttcccccatctttatttgtgcatgtacttgcatattccctcttatgatttaaaaaaatgaattttgtatgcacgagcaacttttttctcattgttgtaattttattttcgttttcaggttatttgattgttatttttggtatgcagacacctggaatgttttatgaactttttagatgatgtatgaaattatttttaggtactgatttttgtcaatccacaggttgtggaagccagtcaagattttgtgccacttct

SEQ ID NO: 44255 - DNA, 1022 bp, Manihot esculenta
  Intron number 1 from transcript cassava4.1_027524m (locus cassava4.1_027524m.g) derived from phytozome v7.0 (chr-ID scaffold10136; pos 151961 to 152982 reverse strand)
agttgttgtaagatttcattcttttgcttgctaatagagggtgatgacttgaagttttgaagcatttgaggaaaaagcttaattttcatataatgcatattggtgaaggaaagttgttcttgatcataccagcaaaacaaaatccgtttaaataaaataataataacaattatggaaatggatgctttggttttattacatgcaatcatgagatgcaatagggttgtgttattaaacaatatcaattacacattctacagaatattgctaaaacgataataaaatgtcaatttagatcttagcaaatgctgcagaatatgaattattgctacatttaaagaattcttgatttattcatccaataaataaaaatttgacatgttacaaattcctcattgattttcttctctgatttaattaggacaaaagtaatttattatattcttgatttattttcattatattttttcaaatataagatattttaatttatccatttgtaaaatataatggctcatttataaataattataatatttaatgatcattttgtaaaaatataaaatttaaagcaaagtgattattttattattaaaacaaaattttcaggactaaattcaaaaacataccataagtttcattaaacaaatttttttttaatcttctaataagaacaataatctaaagtcttaaacaacagcagatgcacaagtagagttttaataaataacattaaattcagaacttataagcaagagataacattaaattcgcttatagtccccctatcagttgttatgaaagacactataatccaaattaaaaaagttgcgagttaataaatatcagatctgccaagaagaaattgtttaaaagttgtagaagaaaggggaaaaaaatgagaaacaaaagtttcatacttcattgttatgtctttcctcttctcaatattgatttttttttttttaattatcgtgcttgatccaggtgatctttggtctggtggtgagggaggtgttatt

SEQ ID NO: 44256 - DNA, 838 bp, Manihot esculenta
  Intron number 2 from transcript cassava4.1_001390m (locus cassava4.1_001239m.g) derived from phytozome v7.0 (chr-ID scaffold11279; pos 25536 to 26373)
acaaagatcagggtcaactggtagaggcggctgaggtatgcttctaacaattaatccatgcctatttgtggaaaagatataggcagttaatatggtgttgtttagtaaaactacaaattagttagcactttgtacagaagtttttccattggtgaatcctttaatgtttattgtatattgtaccttcctcatgtatatacttggtgtccctgtctccgaattagttctatatacaggttgccggcctatttttttgatgtcaaaattgttttctcatagcaaatgtgtatagggttcttttgacccccttttttaaaaaattttttctattttttatgacacaacttaagagaattgatcgagtttaggatgaccttcaacctactgcaactcttctcctttacttggaacttgggattggctatgctttgtgaatttcacataataacaatgagagacgatggtcatgtctaacatagaacattgaatgtcttagtatagaagtgtgataagctagtggtggaagaggtgagaaagaattgggcagacctaaaatgacactgaatgaaagtagtatccaaagatttacaatttctgataccgatgtgtaactggtttcaaatctgttgcattgtgtgaaaaaggatccacaattctagtacatgacttgtgcattctttttctattttaattgtgctgtttgttgcatgcaaggtaaggttgttcctttgcacaatgatatgccctaggaattttcattggtgagagtcgatcttaagaattaatcaattgtacttgtgcagtcatatcagaaggctttgagagcagatccttcata

SEQ ID NO: 44257 - DNA, 303 bp, Manihot esculenta
  Intron number 2 from transcript cassava4.1_007217m (locus cassava4.1_007217m.g) derived from phytozome v7.0 (chr-ID scaffold06607; pos 40289 to 40591)
gtcaagccactgacccacatagcatagctgaaagggtaagcttctaactccaaaatttgattggtaattgttgcttaactggttcggcttttaagcataagctagagttgtaggttttctttaattaaaatctctttccttcctttgtactttgtttccctgtttgtttgtttgtttgttctctctcgcgttttccgggcagccaaacagaccagtgggttccattttgattcctttattaatttcttctttttttttttttgttcctttggacagttacgcagggagagaattgcagagaga

SEQ ID NO: 44258 - DNA, 416 bp, Manihot esculenta
  Intron number 2 from transcript cassava4.1_016846m (locus cassava4.1_016846m.g) derived from phytozome v7.0 (chr-ID scaffold11297; pos 339136 to 339551 reverse strand)
tattggagaagttttatctactgtcccaacaattggtaggttactttgcttataaattactttgtctttgagtatagttgtatctggatcataagttgtgcaatcttcttctttacttctggttattgtctagttcaaaggatcctatcttccaacattcaaatttattgaaaacaataggtgttgtcaagtgctggtatggtgcttgtgggtttcttccttagcttttttaatagattcatttgttctctcccgatatattacctctgaaattattgtgttttgttcatttatttgtttagtcatttgtacattgtaatctatacagatttaaaatggtgcgtcctagctcttaacgaggacccatttattgatcttccgactgtataaattctccttatctgctgtagggttca

SEQ ID NO: 44259 - DNA, 556 bp, Manihot esculenta
  Intron number 2 from transcript cassava4.1_001885m (locus cassava4.1_001885m.g) derived from phytozome v7.0 (chr-ID scaffold08301; pos 91314 to 91869)
agcctgtgagaggacaggttgcatatgagttcttatgtttgttataaaatttgatgttctgcttattctaatttgttgtctgtaaagttggaaatgcacaatctactgatttcgtgttgttgatgttattcttaaaaagaatttggttggataatcttttgattcataatggtatgcaaggaggaaagatggccataattcattgatgagttgtggtttcaaggcatattggtgttagcatttccttatgacattggtaatctgtaatcattggtgttgttttcctttcttttgatcgatagctatgggaaaaagaaaattattgcgattatctttggcttaatcaatgttatttgataaaacacaatgggtaagcatgtcgtgtgattactgagtcaactatcaatatcttcccatattgacaatgtcaggtcaaggaaaattaagtgcattattgtctatattaccatagttttctgttgatggttctggctgaccttcttattttttgcaatttgtagtactattttgaaggcaggtttgacctggtgaagtt

SEQ ID NO: 44260 - DNA, 890 bp, Manihot esculenta
  Intron number 1 from transcript cassava4.1_011477m (locus cassava4.1_011477m.g) derived from phytozome v7.0 (chr-ID scaffold10632; pos 66537 to 67426 reverse strand)
tgatcctttgggtcacctctgcagaggttacccaggtcagctctctctctctctctctctctcatgatggctttatgcttatatttgcttgatctgtttgagttgcagactcagtttcaccattgatgttgtttgatttttttttcttggtgaaagatagccttcttcattcttcaaatctgaactacagatgaaattatactatactggcattagggtttagcttttatcattacttttttaataaattacaagttaattttgaatattatcattattaatctgtgcttcttccttcctcctatttaattgttagtctcaaaataaaaacattccaatgttgtttgaatatgacccaaatcctctggaaaaaaaaattttaattttaataaatgaattaataaataataaaatatctaattattactaaatcataactttgctttatctttccttttcttttttaaattgaaattattgttcttctagtgttaatgcttagtgacatactaaaagcataagggtttttattaagtgcactaaaaagctcactttttctttcttttggacctttattaacttttccctattgatttcttgtgtggtggtggcttaggttgtttttttctcttttcttttttggttgattctacttttcggtttaatatttttacacattcgatcccattaaattttattaatatataggcaaattgattaaaaaaatttataattttataaattttcatatttattattaaaatttttaattttaaataaaaaaattttaccacccacaatgatttatgtggaaaaacaactggagatttcacctgactgataattgttcaacagggtgtattcacagattataatcacccatttgcggt

SEQ ID NO: 44261 - DNA, 749 bp, Manihot esculenta
  Intron number 2 from transcript cassava4.1_034046m (locus cassava4.1_034046m.g) derived from phytozome v7.0 (chr-ID scaffold02477; pos 260240 to 260988)
gtttcactggtcgatcatcagagcaagagagattggtaactgtttctctatgcccactttttttaaaaaagtaattatatgataattagttaattattcaaccttttatcatagaataaatcgttgatgaaaaagccaataaagagaaattgaggttatatatatatgcaactttatatttaatagaataaattcaaaatttgaaaagttataaatacaaagaatataaatatattaactattatttatgctattacaattattatgcagtttagattgtaatttgtttgtatattatttttgaacaattgttattgtcataataaatatgagtttttcatagttattatatttaaaaacataaaagaatctagaaatggtgttaaaataaataaataatgatggttttgataaattaaaaggaaatgtttaaacttttaaatttcaaaaatataaaagcatattgatttcttctagatttcactacttgacaatgtgattttatctcaattttatttgattccaattttctggacatgttgactcatttagacggttataacttgtaaaaacgtacgagttaactcacaattttaacaattataacttgaagaatattggttaaatttaacttccatcttccattttttccttttgaatttaatattaagtgttttatattgattgtcattctcagactatagaattttgacgggaagctgaaattctttcaaagcttcaccatccaa

SEQ ID NO: 44262 - DNA, 902 bp, Manihot esculenta
  Intron number 2 from transcript cassava4.1_005600m (locus cassava4.1_005600m.g) derived from phytozome v7.0 (chr-ID scaffold11328; pos 60346 to 61247 reverse strand)
tgggatactattgctgggggtgattctgaggttttgagctttcctttccttctctttctgtttgggactttaataataaggcttagttctaagtggatgaattgtttgtattgattattttatctgctgaatatgctgtatatatgtgttgatgatattgataactagaaaaataaatcaaatgaagttggcgttagtttgtggagagaatattttcttctttgactaggattcctggtaccgattttgttgctctgttgaatcttggtggtggaatattcatgtcttctgttgaatcttggtggtggaatattcatgtcttctgttgaaggtgttggtcaattacatgtatcggtaaatcagtgaacattgcgtgtctggtttatgtttctgtaatgtgtaaatgtacattggttcttgaggggatttgtgagtttttttttttttcaaaaatagtagttgagtttatgactgttggttctagcaagttgagcgtgcaactattacttctttcacgagagaaaatgagaaacaggtctggaagatagagttcaaatctatatttgtaccattagttctgttttaattgcttatcatgtctatcttcctctcttgacaagatttagtatttccattttgttttattctattgatttgcactttgacaagcttggatacaagttttttgatgcaaggcgctagagttgattgtatcacaagtttgatcttcagtcctgtttctctatactgattatttttcaatcactatgcctaagcctggatttcagaatgataaccacctttgccacccttcatattatggctgtgagagatcttaatcagtaaaatgtgttttgatttagcattggagatttgtcttactataacattcttggaatagg

SEQ ID NO: 44263 - DNA, 293 bp, Manihot esculenta
  Intron number 1 from transcript cassava4.1_005600m (locus cassava4.1_005600m.g) derived from phytozome v7.0 (chr-ID scaffold11328; pos 61730 to 62022 reverse strand)
ggttacgaagacgatccgtaagggcctctctctctttcctctatgtcaacttttgaggctgcttgaattctgttcttcaatttcgttttcgtagctttaatgtttctctatctgtagttctctataattgtaatctagggttactgtttgatatttgtttttcgattgcaattcttctaattcgcttttttgcgaggatagggttttcccccctgttttaaatctctaagttacaggaattaaggtttcgataatcttatactctacctcctgctccatgtccagttaccgcg

SEQ ID NO: 44264 - DNA, 713 bp, Manihot esculenta
  Intron number 1 from transcript cassava4.1_015986m (locus cassava4.1_015986m.g) derived from phytozome v7.0 (chr-ID scaffold11297; pos 378981 to 379693)
aaatcttgtgctggtattacaatttactcttttttttgcttttctgcttttgccatttcagggactcggagattatccaatatggaaatatccccacatcttttttgttcatgacttggtccctgtttgctgcttaattattgctctctttttgggtttgggaggttgtggttgcagcatctgccaatgctgcatttttttttccttcttcttctttgaagtgcttcgatagaatacaaatactccctttttttcttctgtttataattccaacttcccttttccatgttagcactttaattttttttaatcgtccattgaacttcaaacaatcatcgctttaatttgttttacttgacgcagcaagtttttgccattctctggaagtagatttttctttttacttgtcctgtgactaaaagtctcatctcagaattttagttaagtgacatggcaatcaacttactgtttgtcttttcatattttccttgagagatcattttgattttacatagaacttgcgttttgtttttctcttttgattcttgcccagttgttcaattaaagattattgtcataagtgtgtgtttcttactccttgttttcctatatcatgggcaatgcataaagttataaattgtttttgaaccttgcttgagccctttgctacttgcaaattttgtcaggaatttcactgaaaactcaagaactgt

SEQ ID NO: 44265 - DNA, 398 bp, Manihot esculenta
  Intron number 1 from transcript cassava4.1_019812m (locus cassava4.1_019812m.g) derived from phytozome v7.0 (chr-ID scaffold04274; pos 107883 to 108280)
tctcagtgggcaggtttgtttgtttcttaatacattccacatcacaactctttttaatcgatctcattattacgataaatctgtacatgtcttttgtatctaaagatctttacgttcattgatgagatgatcgctatattatccaattcataatttttcagcagagttccataaaagttcattcttttggtatatgattaaagtgcctctctttagagaagtagtcttagtttctgggtttgatatgtttcttagtcctgatcacgtgtcatttccaattgggtgtttttgttttggctctcttcttatttttactgcttttgtacattgattatttcgtaaactcaaattttgatctttcgtcttctttcgctgctctgttttatctctgggtgcag

SEQ ID NO: 44266 - DNA, 760 bp, Manihot esculenta
  Intron number 2 from transcript cassava4.1_018123m (locus cassava4.1_018123m.g) derived from phytozome v7.0 (chr-ID scaffold09880; pos 242745 to 243504)
agcttcacgaggagcttcgaaacattgaaaaacaggttctcttactttattctttgttttttttttttttttttttttttttaaatatctattcgggcttttctgtatgttatgttatttttaagttcaatatgttcatggctttcgattacgtttctgaggttataaatttattggtcactgggaactagattattcactgaggtgttggctcacctttgactaaactttctgttctttaagcaataaatagaaaatgatgctcatattttatttgggttttcttcttaaactcgaattatcaatgtggaaatgtaatttaatctcagaaatgcagctaagaataaagttttacctttgctggcgatttaggatacctgaggatgaggtatatgctcaatatcgtaatcttttttttactattcctttcaagaagaaacaatttgtgtgccttagtgtattgattgtttcatcttggatttcttgctaattgactggaactttagtgtatctattcctggaattaggggttcttgccagcaaatgaatataagggacaaagagctactagttctgctctcatctgtttgatatacgatgagtgattctttatatttgagaaattcttcctattgactaagttaatctctaaagtattctacttcttttttgtgtagttgtaaccacagcatgctccatccacctccattctctccctcactccagaagtggttttctttttcttcttaattccaggtct

SEQ ID NO: 44267 - DNA, 403 bp, Manihot esculenta
  Intron number 1 from transcript cassava4.1_030247m (locus cassava4.1_030247m.g) derived from phytozome v7.0 (chr-ID scaffold03581; pos 1485432 to 1485834 reverse strand)
tcgagctgaacgcattcggcacacaaaccttgttggtagtgtttttcttcctgcttctagctatgaactatctgcagtgttatgttttctgatagttctgcatctcaatttctccctggaagtagctagagtttcctttcgctgaaatatatgtgtgtgattgtgtgttgtttcagtttttaactccttacagctaattgatattttcagttgatcatttggttataggaacaccagcctactatgtcgtcacacaatgtggaaataaagtacataaaagcaaagtatcattaggtttgcttcctgtctttcatctttgaattttttttacgaataactcctgtagcatacttactagattgttgaagcatcctagtgcttgcatttcgtcatgcaggaaaag

SEQ ID NO: 44268 - DNA, 672 bp, Manihot esculenta
  Intron number 1 from transcript cassava4.1_008926m (locus cassava4.1_008926m.g) derived from phytozome v7.0 (chr-ID scaffold07035; pos 707295 to 707966 reverse strand)
acttcaagtctcaagttcctctccacaagatccctgttagtgtttttcaatctattttatcccccctcccatttttttttcgatttttgcttttttagcattaatttctttgtgggttttgtcttaacatttatttgtttgctgggttttagttatagtttcctgtgtcagttttctgcattgggtttttctcaatttcgacgtttattgatctgggtgtgttcaattatagcttgttaatttactctgcttactcctttttcaattcctttagttataatgtattgtatcaagacattgatgaaattcatggtatgtatgtatcccatcggtagggtaagtttcaattttcaatctgaaagatgaaatatttgctgcgagatgcttaaactgtaattttcggttgtttttctttgtattcttatgaccttgaacttgaacattttattagcgttcggtctgttcagtattaacgttgaatttcaatccgtagcttcattttactatacaactggctttgtttgtaaccttagactctttgttctatgtcaattgtttggacgcaaatgaagaatactattgttcttttgatatttttgtttgctgcatctcaatttgtaattccaccttattctttttccttatagattggcacgaagcagtggcgttact

SEQ ID NO: 44269 - DNA, 546 bp, Manihot esculenta
  Intron number 3 from transcript cassava4.1_005550m (locus cassava4.1_004350m.g) derived from phytozome v7.0 (chr-ID scaffold03175; pos 160643 to 161188)
cagcactgagttctctccaggttcgtgtttaaaatcaaccgaaatcaaatgcttttctgaattattttctgcaatgtaaattgaatagattcaataaattcagcaaaccactcaaaatttcctttcctgaatcttgatcaacctcctcgggaaaaaattattgcagtctgtttctctctcttttgtttttgtttattttatcatattcactaatacaatgcatcattacaaagttagttcagttgttctttttatttttgaatttggtctgagactcccttccacaagcgtgccatccattatacagtgatgagttaccattgtggagagtttcaaatttgagtgctcacagttttctgcctattattaatgtaaatgtgattgcacctctttcctctacatttatatctttatattttggaacgttgatgtatggactttattgttagttcttcctttctgtgtgaattttcagaagctaaaatgaactctaatgcatattttcttttaggtgctgaaaaagctagagtaccttgacctctgggg

SEQ ID NO: 44270 - DNA, 652 bp, Manihot esculenta
  Intron number 1 from transcript cassava4.1_019517m (locus cassava4.1_019517m.g) derived from phytozome v7.0 (chr-ID scaffold06607; pos 21378 to 22029 reverse strand)
gagaagttccactattgtataattgtcggagataggtcagtcttacttgctttcgtcattatttatttctctactacattgcttgaatttgagtttctatattggaacctttacaattggaggatctatatcacatttgatgattttcttttgttccttttcaatttgattataccctgattatatatttacttttagtttatgtggttagatttaagtttggtgtgaataaattcgtatatctgttcttggtattttattttgagaaactatattgaaatgtgtagtagtttgctcatttatagatgcctctgcaatgcacatgcccatatctgagaaatggtttcacatatctatatgaattccaaagcatagcgctttcacgtttccagttcatatgttcttcttctatttgtatttatagcttaaccagttctccaaatctgcagatggatgggtttgttgtactctttcttttctttttctaatattgcgtttttgcttgtcaatgctaatgggattgtgcatcaatatgcattagatatggcttttcttttgtttttacatgtatttttgttctttgcatgatgtgtgaagtaattttgttgtgttttcagccatcggtctctatacccactaaggatatctagga

SEQ ID NO: 44271 - DNA, 1006 bp, Manihot esculenta
  Intron number 5 from transcript cassava4.1_005887m (locus cassava4.1_005887m.g) derived from phytozome v7.0 (chr-ID scaffold04851; pos 247545 to 248550)
cttgaagaagaaatactacttcagtgcattggtaagggagttatttcaattgtacttttaacagtcatctaattattgtttatttattttccagacacaacttaagatagtatgctggaatcctgaatttctttatcttattttttgttttaaaatagagaactctcatgtctcggatatttatcagaagaagaaattttttgagtgtagtagggagccttaaatttacaattctttcaagttcttccttcagaatggaaacctcaactcagcattgcaatctcatacactttttacgatttgtgtcattctccagcaatgatttgataatggtgcatgtttctgcataactagaaaccatcttgggctaaacttggatgactagtttctgaaggaatattttgaggtgtgatgtcatgggcctagtaatttcaatcaaacattcaatgacattgttgatgtctcatcgcagagtggtgttgcctcacaattacatcttccttgtctagattcaattcatttacttttatgaatgtgcatttagtttttttttactctaaagtgataaaacgttctctctctctctctctctctctctcttccttttcctttttcttgcttgaggctcaagtgggtacatagttattgcctcattcctttcaattacttcaataactttgaagtcttcgtctttatgggtagttaaatgtgggttataaacttaaaagaatcctaatagaagaattggttgagaaattatttggagtaacttgaatggaaaagcttgcaatttttagtatagcatcctgttatgcagtcattcaaatttgcaaaaaattgtaccattgctttctggaaatgccaacaaaatatcaccctaaaaggtttatgctacaaaacttgacattgctaatggtcttttgttttgtggaacttatcatctctctctttttttttctttattttaatagcttggggcctttgcagttttcattcgacaaacaaa

SEQ ID NO: 44272 - DNA, 856 bp, Manihot esculenta
  Intron number 1 from transcript cassava4.1_034091m (locus cassava4.1_034091m.g) derived from phytozome v7.0 (chr-ID scaffold08359; pos 1067011 to 1067866 reverse strand)
aagcagttgtggtatttgttttaggtgagctttctataacattcttttacatatgttacttgttcctatagcttttatacggctaacagtattttgtgattgaatcatgatgatagtttgtacctttgctctattaccaagtgttctccgaaactctagtcagaagtgaaagccatctttatttttccccgttcatttttttcactttgggggaaaattacgttacctggattcacaagttaaactgttatatggttgggatcttttcattaatgaggttcgtttttgcactgctgctgtgatcatggtagttatactcgtctttgtgatcaaagtagtgttttatatggttattggctattctgccaatatgatgccttccatttatagcttatacgtgcttcaccattgataataatggtctgtttcttgtaaaatctaatgataaaatcttaaccaacttgcaaatgggattaaattgtaactaaaccaaattctgctatggtagattgcttacatagttctgcaatctgcgtcagtagaagatattgttacatattatgccttgctatttttccctttcaatgctctctttttatttacaaataagttactggctaattttttatgttcttaatttagtggttgcacaagcgaaaaatgacgtccctgatagcataggtggttcaatcttgtgacttctgtccatacctgtgttctgtgttcttgtgcacgtttgaattaatgtctaaagcagattatggttttatatccatatatgattttgtgaagcttaattttttgtttgaaatgattcttgacatgcaggtggtccaggcagtggaaagggtactca

SEQ ID NO: 44273 - DNA, 518 bp, Manihot esculenta
  Intron number 1 from transcript cassava4.1_008974m (locus cassava4.1_008974m.g) derived from phytozome v7.0 (chr-ID scaffold03542; pos 342772 to 343289 reverse strand)
tcatcctcagcttctttctgggattttctcttcaggtgatcctctcttcttcttctcttcatcttttcattttgatcttgtttcttttctgatgcttcactattactaattggacgcttcaatttcaattagcttcttcattcttttgtttatatagttctttggccaatctcttgttggtttactcagtactctcatactatactgatttctcttcctcttcttattgttgttgtttctgatctaagtttccgttagctcacttgtatcatttctcaagatatctgtgttcccacatgagaaaataacaagctatcattagttgtaatttttctttttcttaatgaatttgcgaatttgtgggcatcagttgaaacttcccagatcaattgtacccaaaatttttattgtgcttatctgtttatttgtatgcttcaagactttgcacctaagatatatgtatttctggctctgatgattcaggttacctggtcctggaagttgttcatttaatcatt

SEQ ID NO: 44274 - DNA, 654 bp, Manihot esculenta
  Intron number 1 from transcript cassava4.1_010410m (locus cassava4.1_010410m.g) derived from phytozome v7.0 (chr-ID scaffold10509; pos 166135 to 166788)
gaggttagctaatctcttcatcttgtaataattttttttatcactttctattttttttttcctattctacacaaattcataaggcatattgtcacatataaatcatcaatttctatttccgcactttgaaaaaaagtaaaattcaacttatcattaagcattggaatatgtattaattgtttatttttcaatattctcaaatagaataaaagaaataagaaaagattttccctgaatttccaactgaatttaaaaatgcaattatcacatctatcaatagctatttcgctttttgtttttttttgcaaaatttctccttgggcttgtgaaggacaggaattggggcccatgataaaattatagaatggaagaaggtgcatctaaaagtaaagagtgggtcagcagtgttttgctttgtctttgttgtgatgcgtgtgtgactaatgatatatggtcaatgagcgtaacccattaccatttgtgtctgtttgaaagaatcgaaagcaatttttgaaaattgaaaaaattcacattcactttttcttgtcttttttttttaattttccaccaacagtatctctccatataaataatttcaaagtggtccctctctaccactattatgaacatgttacttgttttgtcaggacctgg

SEQ ID NO: 44275 - DNA, 326 bp, Manihot esculenta
  Intron number 2 from transcript cassava4.1_015681m (locus cassava4.1_014651m.g) derived from phytozome v7.0 (chr-ID scaffold05875; pos 1108606 to 1108931 reverse strand)
acagaattttcaggcaatacaacaagcatactctggtaatttctctcaaaacctttttcttatctttttttcccttttttcttttactctataatattctcccatttggtttggatggctttccttcaagtcttccataaaaaaaataaaaataaaaataaaaaacttgccaagttgcattattagccagaaactatgaaaggaaaaacaaatttattatgttatataatttaatatgattgaacaacagaaaaatttttgatctccattgtgtcctggttttgtatacagttctctctgactccaacaagaggtttctgtacgat

SEQ ID NO: 44276 - DNA, 878 bp, Manihot esculenta
  Intron number 1 from transcript cassava4.1_004466m (locus cassava4.1_004466m.g) derived from phytozome v7.0 (chr-ID scaffold12865; pos 418224 to 419101)
aatagactttggtttatcaattttcttcaagccaggtatattctgatgtttatattttttgtagttgctattctcggaattatgttaatttgccattcgttttgctgataagttgctgactacttagcatgattgtattctatggttaattaaagtgtgctgcattctcttaaacatccaaagcaaaagctttttcccctgaacacctagctatgtgcttgatgttctcaattatactaaactgcattgtttttatttattaagatcaattcaatattgtggcttatttatgtaatttgcggcaatttgtggatgtgatttaaatcttttggactttttgtcatctaaattcctagcagaactatatattgaaagataaacacttttaattctgaaatggcatatctattcaataggctcttagcatttttgactttcacatttttgaactgattaaatcattattaccttgtattctaatgtctaatattgcaactcaattccattatatcatctgcgaagttactaaattccccataaattgactttttgtatttgcatttcttattcactcactgctgactgcaagtgcatactatgaagatgcaaagtgattcgtaaccatgtataggaaatgaacaaagttattgatgctgagaatatttgtttgccagtcagtagaagtggtttagattggattatgaagagtttctatgagatgaccataaactaactcataaaactatgagttactgttgtcattattagcatgcagttaattttgattatgtgacctgtcatgtacctaaaagccatagatttgacttggattactaaatttttttttttttaaacctttgcaggagaaaaatttagtg

SEQ ID NO: 44277 - DNA, 845 bp, Manihot esculenta
  Intron number 1 from transcript cassava4.1_006567m (locus cassava4.1_006567m.g) derived from phytozome v7.0 (chr-ID scaffold06688; pos 257216 to 258060)
agtctctgattttgctggaaagttttggctatcaggtttgaaccctaaattatattttaattttattaaactttctttctcgattacagaacttggtgctgtgagtttgctcccttatttttgtaatgtaggcttagggaatgtatagtagtagggttttctgtgcttttgtttttcgattttgttttcatatcgagttttcttcagctaaatgtgttctgttttatttagatattgagttttgtgatgggtggaatttgcgaagttgtatgtttaattgagttacgttttagaataataagaaaaataagaaatagcatcacgatgactcctctcgcctttcgtcttgttatttttatttttgaatcttatttactgggttttgcctgcttcatggggttcaaatgcaattggtgctgtgagttaaacattttattgatactaagaacgagaatttgataaatccacaattttgaaatttgtacttcttatttcgtcaaatttaatctttaaaaggaatggttattaaggcaaccagtagtgcagtctgaagatcaattggacatcttaaatgtgttaacaagcaagaaagatacatttatggaatgatttttttcataaagcatttcaggaaaacaatatgatccttgtgtcttgttttattagaatgaaataatttccgtgacaactattcttttgaattagctgaatctgctgctttttatttccttgaagattgacatgatatggtagatacttttagctagttttccaccatagttcatacgtactgactttttactgctggtattgcccttttaggaatctaggtatcactgccttaa

SEQ ID NO: 44278 - DNA, 244 bp, Manihot esculenta
  Intron number 2 from transcript cassava4.1_006567m (locus cassava4.1_006567m.g) derived from phytozome v7.0 (chr-ID scaffold06688; pos 258455 to 258698)
tctttgagcatttagctgcttacagtctgcctgaggtttgtttgtaattttcttcacttcttatatttggagtttcctttcgcattaagttttggttctacaatttatatttgatttggcttgacctgctagttagaggttacttttatctttttattttatttaataattttccttggaaattgatagcaatgagtctgatttttgatttcaggagcaaaagtttcttattggactcatcctg

SEQ ID NO: 44279 - DNA, 785 bp, Manihot esculenta
  Intron number 2 from transcript cassava4.1_007539m (locus cassava4.1_007539m.g) derived from phytozome v7.0 (chr-ID scaffold06327; pos 230808 to 231592)
gtaaacttgttctgggctacctcaattctttggtggtatggttccgcctggttccttctaattgtttctgtgttatattcttgattgtctgtttggtaatttggttatggttttggctgtcaaaattgtacaatttcaattgggatgttaatgcttttgttaaatcctttgagcattatgactgtcataaactggctgccattgtactttaaaggcttaggctaactttcattaaagttttgaaaattttcatatgagaaagtggaaaaaggttttccctggctcattgagattgattagtaattattctagcttcttcatcccaaaaaaaaaaaaacgaaaacgttctttcttaaaattcaataaaactaatgttcctcttcttagcttaagcattctaatagttgcccattaattgcttattggctttgaaatgagctgatcagcatggctgtgcttgtttgttttaagataactcactggatctgtcaaatatttggaggttcaatgtgtgttagcttaacgctgaaaattatctatcatgctcctgcctattaatttaaaacatatcctcttactttgaggtctgtatatgatgtgacaatggaaaagcctgtttaattgttgatgttttggtctttagatggctatagagacagcatcctttactttaattctccaattcgtttaatttattgatccagtttaactatatatccttcttagacttaatttgtccatttgatacagggtcctgaaagtgaagagcttgctgctgcatccag

SEQ ID NO: 44280 - DNA, 731 bp, Manihot esculenta
  Intron number 1 from transcript cassava4.1_003256m (locus cassava4.1_003256m.g) derived from phytozome v7.0 (chr-ID scaffold08359; pos 1060120 to 1060850 reverse strand)
ctctccgtgggattctctcagatcttgcattcttggtgagttttttgctgccattttacttcttaatggttttttttctcaggttgtaatagtatggttctatttgaggttttaaaggtcggttagattaatgttttctagtttataaccatacgtagttttgacttgtgaaacattctttttcttttcaaggtagtatcatgattcttccttttctgtgttatttgttttttttttttttttcgtgtgttcatggtgtgtactgtaggctagtgttcaatgcatatgctcagattttgagaggggttgagaggactagcttctgggttttcttttacctctaggtttagcagcctcttgttacttttatagattcaatcaagttttgcttcttgcaaccccctcaccaacaaaagccacctccaatctctgatcatggacttctcttaaatcggttgatgctgatgcgttaatgcttaggaaatcttaataaaagaagccgatagtggatatgcaaccatttgcctggaagcatttttttttaaaaaagaaaatggatctccgatcttgagttaaatttatctactgctttgtagtccttatacgtgctgtttagtatttactttgtaagatatttctatgagctaattgtcatttttttctacctctgatattggtaccttctccccctctctctcatccagatacttttattatcaagtgttgtagaa

SEQ ID NO: 44281 - DNA, 388 bp, Manihot esculenta
  Intron number 1 from transcript cassava4.1_026219m (locus cassava4.1_026219m.g) derived from phytozome v7.0 (chr-ID scaffold05875; pos 879853 to 880240 reverse strand)
gagtcaagggatttacacaggtatgattatttttaatttacgtttgattttagttaatattctttttttggtattgaaaagaaatttataaaatcaagacttgaagattttaaaaacaggatgatcattttattatctatacttcttacagacaatgttgttaatgttattaaagcctgctcatagataatgacgttaacgtaagaaattaatcaagtagtgataatagtcatggtccagcaggccacaatttcaaactatgacatcataacacgaactgaactactacgccaatggattgaatactaatataaataaaacgaaagatggtgtttattgacaagcgttaatttagtattgacctaatatttttcttactccttaggat

SEQ ID NO: 44282 - DNA, 916 bp, Manihot esculenta
  Intron number 1 from transcript cassava4.1_013892m (locus cassava4.1_013918m.g) derived from phytozome v7.0 (chr-ID scaffold10963; pos 240119 to 241034)
ggggctccaccaagacactaggaaatttcgttaaggtctgtttatattcattttttgttttcgttttcgttttcatatactgtgaactaattgtttatattgattatgtggagacgtgacctacagaagagcaattctccattttaataatttattttgtttactcaatttttctgatattgttgacattctaaattttctaattgagtcatagattattgaaatgagattagcttaattagttattactttctttatatcgctacaagtaccagttttttctcctggatttaggaaggtgttgtactttgtcctgttcttctacaggcttatgttaatatttttatatccataatttctaactattctgaaattaatagtgcttgttcgaaacgacggaattttgaaaattttcattatttctaaagtaaattagggtctattaagtactttgtgattaatttgaatgttctttgttaactttacctttttggttagaaagccccgcgttcaacctgattttgtatggcctttttcaaatttgttttatttatggtgcaatttttttccccttttgctataacccagtgtatgctagtacctatgtgagtttgttaagtaggatttgtactcttatagagacaattgtgttccttgctggatatctgcattgtaaataactgcacgcacacctttttgtggaagcactaaaataatattcttgtcttgctgatgtaaaaaatgctctttttttttgtgtgtgatgtattaggtattgttttcatagtgataaatgatgtgatgcttcttcttttttttggttaattacatcggttatgctgttgttacttgttggtttaattcatctaaatgctctgtcaaatgcaggccacttttgattgtctcctgaaaacct

SEQ ID NO: 44283 - DNA, 709 bp, Manihot esculenta
  Intron number 2 from transcript cassava4.1_012629m (locus cassava4.1_012629m.g) derived from phytozome v7.0 (chr-ID scaffold06688; pos 168993 to 169701 reverse strand)
tatttgtcttccccaggtatggagtaatcatctttaatattggaacttctaaacggctgcttgaattgagattatgaagtataaatgcttcagaaacatgcagtataaatttaaatctttcacctatatttatttggagataaatgacttggctaagattcaatttcttgaggtatgaaatgattcttgatcggaaaagttattatttggtgttgttttataacatggttgaatgaaaacacatgttgtggttggcttcttttgtcactcatgataactatcctttttctattattttctttggatttacattttctttttcgagttttatttagtaaaatgagaaagattttgatcacagaaaatattttaagttcaagtttttagtgattctccagcagcacaactgcatttgctttagattttccttctaaaaataagcctaagcaaaagaagggaagaagacgaagaacagggagtgaacttttgttagatggtgacagggagttagatggtttcctagttatttttcattctcatgtttgaatgagaatgcacaacaaattgataactaatgaactttttgcagccgagttttttctcctgcatatgattttacacaagctttgctatttttttctttctacttgatgcatatgtgccttcttttgctttattgcagtggtgcaggagctcacttgtttagatc

SEQ ID NO: 44284 - DNA, 572 bp, Manihot esculenta
  Intron number 1 from transcript cassava4.1_002032m (locus cassava4.1_002032m.g) derived from phytozome v7.0 (chr-ID scaffold05875; pos 481588 to 482159 reverse strand)
tgcttcgtcagttcttggatctgcaggtaatggattttgatgttttagtgacttgagttggttttttctttgaattatacatgattcgtagttttgattgacgaatactacttgtcaattttgaattttgattgatttgagaatctgggttgtatagtatacctgtttctatcatcaacaggaaaagaatcacgcttaacgcctttacttttgaatttctgatattgaattttcataatcgggtaggtagtacagagcagagttctttctttttattttcctctcatgatccatgcatctcatgtaactctttctttttattttcctctaatggagcttagatcataatggctgctttatgctgcttgaaataagcactcataggaagttctttatccctctggtatctaaatctatattttttgggattgcttgccaaacagttgaaaacattattgtgctacttgattaagaagcatgtgaattcttgtatatctctttaattaactgttggtcttttaatataacttgccacagaacctgctgcctctccaagagaagctcctccaagt

SEQ ID NO: 44285 - DNA, 809 bp, Manihot esculenta
  Intron number 2 from transcript cassava4.1_018714m (locus cassava4.1_018714m.g) derived from phytozome v7.0 (chr-ID scaffold09492; pos 44089 to 44897 reverse strand)
ggttggagtgagtatctgtccattttgattttctttcttgaaatcgtttcaaatacgctaaattgaaatctgcactgggtgttattttatttttatgcattgaatctgaaatttgttctaatggtagaacttattatgaggtagctagaatcttaaagtaatgtgttgattagtttgtttatcaaacatttagtttactaatataagcacatgatgaaaaaatatgttgcatatggtttcgtgaagattgatattttattttattcattttttagtcttgtattttgaaaatatattagtgggttgaaagatctctgaagaagaacagaaaattcagtaaatacttagcatctcggttcaatcggtgcaacatttgactgtaacagtatatctatgggttaataaccaaaaccataaacatatgttgcttagtctcaaagattctatgttgctaaatgtatagctgtgagatgcatggatataagcataagatggaagtcaattggatgctggatgcaactaatgtattccaggggtttctttttatatctcaaaaagaactattaccgggagatgtttatattattcagctatctatttttttttcttccaaatcatgcgctttctctaagttatgaattgtttgttcttgttgatgtttctatgttgttgcagtacacttcccttgaattttctttattttctcaatctagttaggctttgtacattattcttaaacaccatccattgacatttcttgggtcgatatttcagttgtgcaagattgatcccgagggcaaggccaggaa

SEQ ID NO: 44286 - DNA, 772 bp, Manihot esculenta
  Intron number 1 from transcript cassava4.1_016762m (locus cassava4.1_016762m.g) derived from phytozome v7.0 (chr-ID scaffold05865; pos 170977 to 171748)
ttgaaccaacttgaggtaaattatgtctttttctttttgggtgggagtggtagtggtcgtggtgtgggcttggtgattattcctaattctggctacaaatgatgaaacatgatgaggtattattgctaaatggtgaaatgatcaactcattattacggtaaccaatgcaaatatgttttggacttagattagtgggattaaactaaatgcaaagctagtccaacttgaaatgttatgcatgtatatgttgctacaccgtgtctcttttttgtctttattgtttctactcttcttcttcgttcctcaattcatatactttgctcacatcataaatgtttttctccattccatttggtaaatatcagagttgataagagtgacaatgtccccattttgtgcaacaatcaaaaagtttcacggacaattatatgacaatttccttgcttgaagttagtcggctgttttatcaagttgttttgctacgtacgccacacatttgacataaagaaatctcttcaaaatggatattttactctggtcagatctgttgttatcccatttgagctgcctttaacccataccatgcttactagcaaactgatggcttgagaagccctgcatctcgagacagggatttatttgtagaattgcattctcagtaacttaagtttgtaaatctgagttgatgccgttacttctttttggattatcctaatgtgatgtttttctgtctacagtttgattcttttgagtctcctgaaaatcttcctga

SEQ ID NO: 44287 - DNA, 363 bp, Manihot esculenta
  Intron number 3 from transcript cassava4.1_006360m (locus cassava4.1_005409m.g) derived from phytozome v7.0 (chr-ID scaffold03081; pos 26323 to 26685)
tgtttcctcttaccagaagggcagcaacaccagctgtaagaaattgtgtccaatcttctttagtctattgtgctataaccaatgaacttttatatgatggatacagaatctgaaaggtttggatgtgtattatttttcagatgttggtcggtttgattaaggttgcactgagggttattaaaattgaaaaagaagaaaaagaaattggcttttgaataatggaattcccaaatagtctgaactcgaatggactatctattcaaattgttgatggatctagtttctattgaagtatgtgaattatgtttgtgaagtttgaagttcattatgcaactcatgttctatgcaggtgccagtgggagg

SEQ ID NO: 44288 - DNA, 559 bp, Manihot esculenta
  Intron number 1 from transcript cassava4.1_023741m (locus cassava4.1_023741m.g) derived from phytozome v7.0 (chr-ID scaffold03030; pos 17039 to 17597)
acattgtttttatgccttcatctttcccctttctttctctttttaattatttttaaaatgtaggcaagaagaaataaacatcactctttgagaaaaaaatggctttcgaacttccagaggctcacattttcgaggaagaacaaaatagaccagttattgttgcatttattggaatgcctgttaagtcttttagaggtgattaatttgttctatttaattaacagttcacttgaaaatatcaactaaccttttgcttttttatttagatgaagtgaatcttaacagtacaatgtttaccaaactttacattaatccaaaaatacctgaagttgttagtttcatacggaggtaattactaattaattatgtattgtacatattaatatatataaagcttatattactgtatttatttgtagtcttctagataatataaaaaaaaaaaagttagaaaagcaagaagcaagtgaggagccaccaatagatctggaagtggaaaaggcctccgataggaaaataattagtgaattactatcattggatattcacactgagaaag

SEQ ID NO: 44289 - DNA, 534 bp, Manihot esculenta
  Intron number 1 from transcript cassava4.1_008510m (locus cassava4.1_008510m.g) derived from phytozome v7.0 (chr-ID scaffold12601; pos 104583 to 105116 reverse strand)
aaaaccatcctgacaagggtggcgatcctgagaaggtaatttttttgttaatttaaaagctcgtttggattttttttttcgtcctttgtctcattcttgtcgatttttactgaaatttattttttgggtatatcatctacgaatggtgatcattgtgttttatgcaattgcaagtattgatttagctctttatgtttttatttgttgatagctgaaaaaattgacggggagagaattaacgggcgaaatgatggaatattggtgaattttatagtatgaggtttctttgataaaattgtctttgaatttttttggaactgtgtagaatctctgttttcttaatttcaatgattttcatgatctcaaattagcaattttctttattcaaaggggaaagatattaacatgaattgttaggttttcagttattggttcatggttatgatgattggttgatattacagtgttgtttgatatggttatgtgaagctgttgttgggattttattgcagttcaaagagctggcccaggctt

SEQ ID NO: 44290 - DNA, 357 bp, Manihot esculenta
  Intron number 1 from transcript cassava4.1_010795m (locus cassava4.1_010795m.g) derived from phytozome v7.0 (chr-ID scaffold04137; pos 309173 to 309529)
agggaaagtaagtcaaacttttggggttctttgttttcttttctgtttgctattctggagctttgatttactttatccagacttcatcagatttatatacttgagacccagttttatttctggacattttctctttttcttgctcaatttagaaaaaccattgcttgaattttaatctttttttcatttaagaaaaagggtatgcctacttatcaaatcatttgatggaattttgtggttctgttctaatgatggattgagcaaatctgataattttcggattactttgttcagttatctctaccagtaatttataggtttctttttgtccccctttcaataggtataagaatcaaa

SEQ ID NO: 44291 - DNA, 451 bp, Manihot esculenta
  Intron number 3 from transcript cassava4.1_023977m (locus cassava4.1_023977m.g) derived from phytozome v7.0 (chr-ID scaffold00876; pos 36395 to 36845)
ttactaagcgtcttgccaaaacacataattggacggtatgtttctgatcatttcaatttttcaaaaatcctcttcacttctataaagaaacaagtcaaaatcacttggttgacatataatgaatacagcatttttcatataggagaattcttttgaacatcgagtccaagactagaaatatttgtctttattttctataattaatgtctgtttcttgcatgtttaaatcatagcagttaatgggtttgagcttaacttcaccttggtcattaaaaacatcttctaatttcactactaaacatttattttgtctacaacggtgaaaaataatcaaactattattttcttaatttcttatttccttatgttaaaattttcctcctttagcttgagtcatttttattatttatatacaggttgcattgaagacattaattgtaatacatcgtgc

SEQ ID NO: 44292 - DNA, 919 bp, Manihot esculenta
  Intron number 2 from transcript cassava4.1_016119m (locus cassava4.1_016119m.g) derived from phytozome v7.0 (chr-ID scaffold08393; pos 19637 to 20555 reverse strand)
catcaacagattcttcatcggatttagacacagaggtcagtagatttcataaattttctgtaagtttttatgattttggtacctacattctcattaatcattacccttttaatcttttgagtttcaattgaggattttagtacccaataatacatatatgacattattagattgtacattgtttttgtttcttctggtttgtttggttcatgccatggtgattctgggattttaacttgaaattgaatgtgggtcttcttgagcttaatgaaataatcgggcattaaatcaaattttttttttcttaatgggtttataatgaaccccacaattcatgaagtataatggctttgacattgttgatcttttttgtttgctaatgcacccacaattatttagtgcctttatcaattcaatgcacaagcacttcagaacttgggtctgatgaactgctccttgatttttggcttcaaagaaaaaaacatcctagttttgctttatattgataattccaagtatacattagtacataattgtctgaatgatgtgggcctaaacaactcattcaaacagtagttgattcagattgtactgttctgcatattaaccattcattttaagctcacaagttttgttaatagtagaaatgaagcataggaggtcttagaaaacatgtaatgcataaatggatttctcatacaaaaggaaactacaatgaatgtgttgaaggtcagaagctgcccaaaagagagaaatgaagctaaaacataagactctattaacagcacttaagaaacctcattttatagaacttgagaattctccaaccttaccatttcttggatgtcttagcatattaaaatttgattgttttctttttctttctttcttttttttcagtcaacgggatctttcttcc

SEQ ID NO: 44293 - DNA, 259 bp, Manihot esculenta
  Intron number 1 from transcript cassava4.1_016119m (locus cassava4.1_016119m.g) derived from phytozome v7.0 (chr-ID scaffold08393; pos 20670 to 20928 reverse strand)
gctcaacaggtatttattttgtcttctttttttctattttgtattatccctcatgggttgtcccttagatttttttttattttccttttcttttagcttttttcagtgagtttctgaaatgggtatgtgttcttttgctataattttcccttgtcacatcgttatcgtttcagattgatagtacaataatcttctgtatttttaatttttctgttcatgatgttgaagggttttgattatttgctgatttgattgtagg

SEQ ID NO: 44294 - DNA, 681 bp, Manihot esculenta
  Intron number 2 from transcript cassava4.1_014853m (locus cassava4.1_014853m.g) derived from phytozome v7.0 (chr-ID scaffold06825; pos 72718 to 73398 reverse strand)
tccaaggtccgccactccggctcctcctcaacaaggtatgcatatatacttagaaaattatgaaatacttgtgaatatttgctcttttcagcatttcacttgcataaatttaatatattatatatatatatatttacaatatatatatatacatcgttcattctgtttttccttttttaaacatattttctcaatttaaagtcaactgtcttcaatttatattttattgatcatgtaaaagaaaatatttctagtatataaatagaaattttatcaataggctccataaattagtaactatatataacagtgattaataataataaaaaacctgctccatagcattttacatttaaaaaaattgtaattgatttaacattttatatattatattgtatgaattagtggttatagtatataatttaattacttatataaatatatttaaactttatagcattcatttattaatgtaaaaaattaaaaatatttatgattctccttctcttcaaaaaattgtagtatgaagtgaaaaaagggtttctattgctataaattatcatatcgtcatcaatccccacgaaataatgatgatatttttatgaatattaggagctaatcaaatttttttaatcatgaattgaagcatccaacgttgggcagaaatccacatcaccagca

SEQ ID NO: 44295 - DNA, 525 bp, Manihot esculenta
  Intron number 2 from transcript cassava4.1_005793m (locus cassava4.1_005100m.g) derived from phytozome v7.0 (chr-ID scaffold00621; pos 24733 to 25257)
aggtaacaaaccttctctgtgcttttgcacagtataaggtggcttggcaagtttctgatgatcctcttcttatacttctttatttcagtttcttttttttttcttgattaattttaatttgtttcttctttcgatatttgtggatcaataaaagattccaatttttttccctttaaaaaaaaaaagaaagagagacagatttatcagagaagttttgggcctcatatctgtgtttcttcagctgttctttcctccattcttgtatctttccatcttgggtttggtcctccatagaaagaaaaatctataattaatgaaataccttttgtgcctctgctacttgcgctaaacattttaatataataccttctatggcaatatctgctaatcatgtataccttatatatttttttaatttatttattttaattttaatttagaaataattttgatcattagaatcttttcctcaccagttgtttcatcttcaaattttcttaggaaacgcattacctgatttctttc

SEQ ID NO: 44296 - DNA, 531 bp, Manihot esculenta
  Intron number 5 from transcript cassava4.1_012462m (locus cassava4.1_012462m.g) derived from phytozome v7.0 (chr-ID scaffold12004; pos 567328 to 567858 reverse strand)
ctgaggcacaacataaggggtcactatgtaagctcttatcttccttctcacttttaatataatcgaggggaaggtaaatcacaatacaaattaaaccacaatacaaattaaacatggatttagcagtataggaggtcttttagttgttgaaatatttgcatatttacctctggtcctgaaatttatacatatatattgtgatttgttgtaaagatgtacaattttgagacttactcatatttggcaaacttctcagtgattcccccaaagaaaaaaatttagggctattctttgttttcctagctttagctatcattggttttcctcataattcttttgaccttttcaaatgagaaaaaaaacacaattgtcagtgggggatcgtttaaagttcttcctagaaagagtgaattgaaaatattctactgtattgcacttaatgagctcataatataggtttggctattttttaatctgatctcaatctgtttacatcaagctcattctgctttttttcatgcttagccgtgg

SEQ ID NO: 44297 - DNA, 352 bp, Manihot esculenta
  Intron number 1 from transcript cassava4.1_026006m (locus cassava4.1_026006m.g) derived from phytozome v7.0 (chr-ID scaffold05280; pos 775947 to 776298 reverse strand)
tttttctttcgtaaccaatctcttattttctccaggtatctctcttttttgtttcttgtttttttagtaataacttctcctttgcttctgcaagaaatattaattcttttctgtttcttttttgctttggatgaatggtttctttttggcttttgcatctaattttcaactgtttgtcaagtatgaatcaaagttggtaatgcagttttggagtggaacccatgggataattagttgcggtagtttttatttgaaatgaatagtagaacatgaaatgctgagtattattgaattcgcatttttctatttgagtttgctataaccaaaatttcatgcgtaggtatccaaaaaa

SEQ ID NO: 44298 - DNA, 614 bp, Manihot esculenta
  Intron number 1 from transcript cassava4.1_016425m (locus cassava4.1_016425m.g) derived from phytozome v7.0 (chr-ID scaffold05875; pos 255748 to 256361)
cctgaatagtatgatctcgatctctcattctttaacatatatacaacaaaacacacattattacacaattttgttattttgatatctgggttttttctttttcttttttctggtgatgttttattgattcagcttttttgtgttgagatagacgatattaaatgatcatcaacggattatgtttgtttcttttcatttttgttttaatatggatggaattttttgtgcgagtgaaatcaaggcactttataagatcaatgcccatgtagaagtggcgtgtcttcattcatattacccatgtttgtgtggtttccaattctaaatagatataatttcttagatgttgctgggagagaatgtgtgtacctcgttgataaaacatattgctttgcgtgtagaagggagatgacgttctcttatatttaaagcacactcgcttgtgattttgcacaatatatgtcttaagcagtagaaataagatgggtaaatctatggaaagtacagagattaataatttcctagcatatccctgagggattcctgaatcctgatctttttaagggttcaatgattttgcagtgattacctgttcaagctattgctcattggagatt

SEQ ID NO: 44299 - DNA, 405 bp, Manihot esculenta
  Intron number 1 from transcript cassava4.1_008670m (locus cassava4.1_008670m.g) derived from phytozome v7.0 (chr-ID scaffold09505; pos 74107 to 74511)
catactcttctttggccttaatatcgttaaaggaggtaagttcaacatggtcctggatttttcttcttgctgctcttctgatggtctctcgaactgtacaaaaaattgaaagaaatttgagagctttctcagctctgttgtctctatgttcccctcttctgctccatttctccccctctcccaaattttctcggcaatcattggtaaaaaactaagctttctgccttatttcacgcttgtactttccaaatttgttgaagaattggtgggtttggtgaaacaagcgatgggtaattctattttcgtttattagttaaaatttgtgtataaagctgtgggattgtggtctcacttttatttttttgtgtttggggtttttttgatatggtgaagatttatctacgg

SEQ ID NO: 44300 - DNA, 763 bp, Manihot esculenta
  Intron number 2 from transcript cassava4.1_008555m (locus cassava4.1_008577m.g) derived from phytozome v7.0 (chr-ID scaffold11297; pos 232970 to 233732)
tctctggttttctgaagccatcttctccagaggaagtgagtttaattctttgttttgctgctggattgttttgtcacaatataccatttactttataataatttctctgttgcacaactgcttttagtataaggcaaatagaggggaatagcttgagtatataagagttgtaagttgtaactcaaaggttggccatgcatgtcagggctcgactgcttcatctagaatatgtgcaatgcttcttcaattaatagtgataagtaattgttaaatgtttcctcttaaattaattttaatgtgtgtgtattactcaagcaacatagacaaatcacaagcaggtctggcctttaactttaaccattgtttttgaacgtgaagtggatgatgaaggcttccaaagacataactctgaataattttctcccatatttattaaagaacaccagaggtgcaaggagcatcacgcaattcaggccatacagccagtatcctctgtgtttccccattttaagttctagttataacttgctcatttctgatctctctcaaaaagaaaatggatttcttcctcagaatgtgggagttgtgactctcaagtgtcaacctcaaagaaatatagatgaagtatctgctgaatgcaattgggtttatgagctctaacggagaaactttggctggtttcataagttcatataactgacttcctctctattccttcaattttacaggccctggttgctcctctgcttgctaggtccaactt

SEQ ID NO: 44301 - DNA, 746 bp, Manihot esculenta
  Intron number 1 from transcript cassava4.1_004674m (locus cassava4.1_004674m.g) derived from phytozome v7.0 (chr-ID scaffold01497; pos 32800 to 33545 reverse strand)
aagaaaatacaaacggaatctgctgggtacattttggttgtattttaaattaatatattgaatttttcttttttctttaatttttttttctctatactcttgctgttctactgttgtttttccctcattttttcaagttaaatatcatttcttagatctctggatactttctgtttctctttttctgggcttgttttggttgtcttgttttctcagttactgtcaagttctttggtccgtatgcttgctagttggctggcaactttttgttagggtttgaaaaaatcgaaatactacggtttctactaatgcttagatcgaaactactttctctttcgctactggcttctaatgaactttgctctactttttcttctttactagacttcttagcttctttctctgattcaagctagccttggtttctatattcgtgtgtgtcggtgagtgtggactttgtttttattcttttgaagaaggtgaaggctgcttttctaatgatgagtattttaagtttattactggttttaattatggatggctttgatttttttaattttacttttgtttgctaagaggaatttatttgaaattgtgtgttttggctatgcgctttaatgctactaattgatgtttattagttgtattttaggctgataagctacattgtggtgtttcagtgttattgacattctcttttgttacaatcatgcagctttatatatttagatttctggggtattgga

SEQ ID NO: 44302 - DNA, 918 bp, Manihot esculenta
  Intron number 1 from transcript cassava4.1_030014m (locus cassava4.1_030014m.g) derived from phytozome v7.0 (chr-ID scaffold03436; pos 100270 to 101187 reverse strand)
cgattgctgctaccgtttgcgctaacatccttgaggtgatccccagttttgttttttttttggttatggcgcccgattgttgtttgaattgattgtaaagtgcaattattctatagatccaaaaggagaaaaatggtgatcttgtaattacagattaatgacaacttcttatgatacaactttttgcctttttttctaatgtgttatgagaattatcttaagctttaacatggtgtaaagacccggaaaccggcaagcctactatgcatccaacctcttaaaaacatacataaacccttaagcatgcacaaaggagcttaaacaagcataaactccaacaaagaacatcataaaacatatgtaaatagcttattacccacataagctaaaaccattaaaacaactcatattctcacttgctctctcccaatcatgcatacattctctcacatgcaaaaaggagcataaactaacataaactcctaacacaaccatcacataaacatacattaggcataaaacccacataaaccctaacatgcatatctacccatactcaaccatcaaacatctttcaacttacttaaaacttcattaaaacacaaggaaagtaaggatttacacttacttcttgaagatcgaggggtggtgcgatccctaactcggaggtgtggaggatccaagctccaaaagcctccaagctcccaaaacttctatttaagcttcaaaactttaaaacaagggtagaactcatgaacacttgaaggatgggtagagaaagcatgaaaacgaccaaaggaggacaaaaactcacctgagctcgagaatggggagaaaactcacccatttccgatctgagggccctttataggtggcctggtcaacgaccttcggtagcctaacgtgccccctaaactc

SEQ ID NO: 44303 - DNA, 508 bp, Manihot esculenta
  Intron number 1 from transcript cassava4.1_002860m (locus cassava4.1_002860m.g) derived from phytozome v7.0 (chr-ID scaffold06582; pos 862817 to 863324)
aaggtacagtccgatcgtccattcgattttgaatattatttctcttcctgctcaagttaggaattatatcagcatcattcacaaaactcaaactttcgtcttccagtctctttatcagataattttgatgttcttaaacctactgaagaagatacacttcacgcacacgcattcacgtgactgtaagcatatatatagttcattaaaactagtttacttaaaaataaataatataatcatcaattagtaaaaaattaaaagtactgcatgaataattaaaagcctaaaacattatctataaaaatgattatttctgtttcctggacataacagaaaacttttcccggcctacagaaacaaagaagggaaataaatagcagaaaacagagcaaaaattcaatatatgcatacatttttatttatatatttattagagaagaagtctagaagcatatagtagctattaattataactatttgtggtaattgttacgtgattttgcagtat

SEQ ID NO: 44304 - DNA, 919 bp, Manihot esculenta
  Intron number 1 from transcript cassava4.1_001291m (locus cassava4.1_001291m.g) derived from phytozome v7.0 (chr-ID scaffold11279; pos 63971 to 64889)
gttaagttgcagcatcacaacttcatatcttcaaggtcctctattctatatcctctattatatttatggttgcaggattgttagggttcctggagtcaattgctatttcttttttcttcctcttcttctttggatgctatgaaacgggagggtatgagaaggaaaattaatacttcaaggatttttttttctatcgccgatattttgctttcggttctcggtgcatgtcaactgctaaacaaaataacatttcatgaatacgtttactagttgtagctatcttgcttggaatatattaaccaacgagaatcaacactaagttgctggaattgttaatttcttctgcgattgtcgcgatgatttttcttgtgtgtgtgttgttttgtaccatttggaaattctgaaatttggtttcgttatcttcatgtggaattttgaaattctaaaatcatacatttttttcccttttttaagtttctgttttatctaatatgttttgtttggagggtaatttgttaatttctatgagagcatgtctaaatttgagcacttgggatcaggcaactgcccatctttcacgattagtgattacaaatatactattccatcctcattgcttttgcattgaggttttagtgtgtttgctgctggttcttctttacatatgaggatttgcttgttagcttctggggtaaaaattggaagtaagaaaatcaattaggaaatgtaaaaggaacaaatgaatggtgctgcaatttatcatctggaaattggggtttgttacccttgttagactttgctgcagcattgtgtgacagctctttggctcacaacttctgtggaatgtcatgatttttccaattcagtttttagagtttatatttgattttgtatttgcaaattgcagatctttgaatcc

SEQ ID NO: 44305 - DNA, 675 bp, Manihot esculenta
  Intron number 3 from transcript cassava4.1_026902m (locus cassava4.1_026902m.g) derived from phytozome v7.0 (chr-ID scaffold02022; pos 11820 to 12494)
tggaagctgaatttaaggttagagagttggcttagtcatttatactgtctggttgattggttcattcgtttattttggttctgtggttttttctttgcgaatttaatgctttcgctgtttgaaatatgtttgcttgaatttgagagaagtttttatatgtatggcacttattctacatttatttagtctttgcataaaaaaaattgtttgttagatggaatttaagaattgatgcgtcagaggatgcttggtgacagtgttctgctcttaggagctattttcttctagaatagttatgactggctgcatatagaaaaaaaaaagctgcaaaattttgatttggttgaaatgatctcaagtacatgctactgaacttcgagatgttaatgaatagggaaaaaaaaatcagcaataataaaaaaattgagagctgaagaagttgaattggggaaaaaattgatatatataaccctgcaattattattatatatattattttaaaaaaaattgtttgattttcactgcttcagctttcattagcccaaatgaaaatgcaatcatctcatatggtaaagtgagaaatagaaaagaaaaaaaaaaaagaaaaaggaattctttgaggcccggcctagttgcttcttatactttgactgtcctatttcagaaagccataac

SEQ ID NO: 44306 - DNA, 927 bp, Manihot esculenta
  Intron number 1 from transcript cassava4.1_027383m (locus cassava4.1_027383m.g) derived from phytozome v7.0 (chr-ID scaffold03581; pos 954396 to 955322 reverse strand)
tggtcgaccctcctactaactcacttgatcaggtttattcttcgtcgaaggcatttattgagtgggaatttttggggttaatggggttcagaatttcttgaattttttggagattttttgccattatatttttgtcagtgccaattttaattgttcgtctgtgttgatcttcgtctgtaccttcctttcttttagtttatttttgagctgattaattgtcaaagcagaaacattcttagcttttctgaatgcttgcttttagtctttcttgttggctctgcaattctcatacttactgctcaaaaaacaacaattaatgggtcttgttgccgtaagaataatttatttggctttggaactgcatagcttgatcgttataatttttttttcctttctgattttagggctttgtatggttatcacttccacatcatcaacatttcagattaatcttaatttccctgttatgcaacttaagcttgtgtaccttgggggtttattcattgttgaacttatatgaaattgattttgcatatgatggaagaacatttattgtcatgtttctttaattttaggtatagtttccataaagttttgatcctttactctgatattgccagccagcaagtgcaagtccctcaaggagacatgttgctcaatcatttttgcaacaccatcgttcagttgatagaaattgctgtgatccacggccgctatcttctgcaagttgtgctagctcaatggaggtagtaaggttttctcgtggcttatattcctcaccttcttctgcttattcctcagcattgcatctctgtttctatatgtttcctaaagtagttcttgtggtacagagctgttttctcctgtaatttaattgccattttcttctcaggtagcgccttataaacctttgcggtcttcccctag

SEQ ID NO: 44307 - DNA, 995 bp, Manihot esculenta
  Intron number 1 from transcript cassava4.1_027895m (locus cassava4.1_027895m.g) derived from phytozome v7.0 (chr-ID scaffold00480; pos 232950 to 233944)
tcccaggtgatctcttgcttgtttctccaatgtgttgaatagcaacatgaaaagttgattcatatttacaagcatttgggaatagcatgcatggatatggatatgatcttaagcatggggatgagaagttgaacaaattgctaaatatgaaggagccttctctccttgttaaattgtttacttgtgaaaacactcagatccagctatttgcttgcttgcatttatgtaaaagaatcacgattgctgattgctgaatgcatgtcccagtcttttagcatcaaaagccaacatatattttggttgaagttggtagtactaactactgatgagaacaattattgaatgcctgctggtactattggtaatgcttgtttgactgtgcaagttggagtatgtcaacaaatatgttgctgcatgtgtccaacaaaagccattaaacatcatcccaggcatatatatttttctgatgaagatgaacaaaaaaataacaacattgaaggaaatactttcctttgttccgaaatatcaatattgtgtagtaaatgggataaaaggatcattatttggtaaaaaatccacatgattgcacaatccttatttagcttcagggttcagtttcacatggaaatcattgcattttctttcatggagctctttaacatggaagcatcaatggtgtctgtaagtttatcttcttcatgtgttgcttctgcaaaataatattttttaagcttgtagaaattcagtcattgtgatatatgcttgaattatagctacacatatctgcataagatggttgccaaaacacttccaagaactcagattctctgaaagttagattattggagttttgcagttgtttcctattatttaaggttacggtatccctcaaatattaaaaaacaactacgtatgagaggatatagttcatagtagactacttatgctttagttttgcaggtgcttgacgtaaagcagaaattcgacaaaaatct

SEQ ID NO: 44308 - DNA, 940 bp, Manihot esculenta
  Intron number 2 from transcript cassava4.1_019026m (locus cassava4.1_018428m.g) derived from phytozome v7.0 (chr-ID scaffold05280; pos 869355 to 870294 reverse strand)
tctccagaaggatcctcctacctcttgcagcgcaggtattttctgcttcaatatggagatctgcgcctttttctatgttcttttctttttttttttggttgatctcgttaatttcatgattctactgcggtgttctgataatttttgtgtttgaatatgtaggattgaatattttcgggttttaatgtttctcgtggtgcgggtatattaattagagagtagttttgcatgttaattaagtgtgaatgtttgattttgcaggatagttgtagacttatttaagtgctgtgattcacacatgagtagaaagaagtgaagctttagctgtagttatttgagctttaattcaaataataagattcaaaatttcttttaaggatgaaagttttatttagatagttggattattaaggggcgtatttgaaatatattggaaaggtcggatatattttgagcatataatctctagactgagtcctgatgaaattcacttaatatggatgattggtgatggtgaggccattctgtgaggcttgtcactaagaagataataagtaggacactatactaatgatctaagattaaagtaatttattcaaacattgtgttatctgagatgactaactgactgctgcgcatagtgcacttcttgtttgaaaggaaatcgaccagttgcaatactgtgggactctctctggaagtgaaagcttgtgctttgagttgacagtctaatacggacactctttttccttctaggttttcaagtttgaagtatgcttgttaatagtttatgaaaacaatgccattatctgtatcctttctctattatttctttcatgaaggttacatggattggttttttagtttactttttgcagcaatttctttgatctgattctcactttgttgatttgcatattcaggccctgttgccgaagac

SEQ ID NO: 44309 - DNA, 357 bp, Manihot esculenta
  Intron number 2 from transcript cassava4.1_008877m (locus cassava4.1_008877m.g) derived from phytozome v7.0 (chr-ID scaffold10963; pos 517069 to 517425)
tggacgtagaaagtatattgtttttcttttctgtatcgataagtttcatcgtttctttttgagtttcctattatacttttcaaataatttatttgaattacccaattaaggaatgctttatttttttcctcaacaacttgtgttgcaaattgatgcttgaagtattaaattatgtttaaattccttgtatctttcttgataaccaatcatgagaacaatcaagttgaggttaaaaaactattatggtatataataggccaagttgtttgattttatggttgtaaatgccaataagatggcaatgaactttccagttatttcctgttcagaatctcaagttttgtcaattggtaggct

SEQ ID NO: 44310 - DNA, 773 bp, Manihot esculenta
  Intron number 1 from transcript cassava4.1_000169m (locus cassava4.1_000169m.g) derived from phytozome v7.0 (chr-ID scaffold05434; pos 27333 to 28105)
tctcttccattgagttataataaattggtggataggtacacatgctctttattattattgttgttattattattattatttttttattatttttagattaggttatttagttttcttatcatatattgtttccttgtatcacaaaatttgttatcttgtcattgtagcctcttattattgcataaaaactataccttggagcattctgatgttcaaaattgtcacttgaaagttgaacgatgacagtggtttaagaagtttagctgccttcaaaggatctttttccattaatttaatttttaaaataatgctgctcaggtaccaattattaaataatagaattttagactactttcctgggtaattttgaaaaatgattaaaaggagatatatattctaactgaatctaagcattgaaatttttctgttggagctcatgttaaggatggtcatgcatttctcaatcaaggggatgcttgataatctgtgatgaggaaattattgctatcaagacttaagaaagtatcaagtaaaagggaaggctgcatctattaagggaaagtttgaactttgaattaagatccttctattcataagctggaagaatctgtttgtaaaagaccagaatgtttcttgctttatgcttgtttgtatactttgttgtggttgctgtcttcttttatttacttgtaacgctaataagacatctatggatttgccatttgcataatttatcaggtatcctcatattgagaaggatcatttggtgaagc

SEQ ID NO: 44311 - DNA, 435 bp, Manihot esculenta
  Intron number 1 from transcript cassava4.1_019035m (locus cassava4.1_019035m.g) derived from phytozome v7.0 (chr-ID scaffold05875; pos 143567 to 144001 reverse strand)
gcagcgtgtgggcccagagctccagcttccctcaggtcccttctttctctcatcctacaattctattttgtcctgatctatttgtttggaatattagtttttgtttgttaattgcgttaacttgtctagattttgattggatctggggttactatatacaaatactataaccttcacattattaatctaattcctgacagtggatcctttttttgggtttttcttcactgtgatttggcatgaaaattgtcaattgtataatgcatgttgggttttgcaagttcttgcaatgccttatgattggacattgtatttttgtgatgtcaatgagtttccatttctccattattcttttttcctccgtctccctttttctgaaatgttagccttcactggccataagattctgttgttggtttttgcagtttaagccaa

SEQ ID NO: 44312 - DNA, 748 bp, Manihot esculenta
  Intron number 4 from transcript cassava4.1_010925m (locus cassava4.1_010925m.g) derived from phytozome v7.0 (chr-ID scaffold12455; pos 464243 to 464990)
cgacccagttgtcaggtttcatctgacattcctgcttttaattttgcatttttaagttccttactacttgaagtgttcaagaatgtttggcttgtagcaatagtcctctttatccatgctgtaaaaggaagggacttttaaatgtctagtacacgattttgacttagattgcatggagtgtagtagctgttactcttttaactcatgttaagtactgtttcttttccactgtcttcacttttctcagctagctgacagatcctccaacaatctcctcttggttttcttaataccctaaccattcaacagcttctatcacgaccaaattctagagacattgacctcatgttttcaagtataattattgcacaaacatagccaaaataaggtcactttctgtcatcatgtatttgtttctttgaattttaatttattacagagccataaattttttacatggacacaactacaagatcattatggtttttgagtaatttgcatgcatctacaacatttggttcctttttttcaaaaatggggtataattttctacattacttaaagcaagataactttttgtcagtgaccaccaactctctcaagtaggacacgttttattattcaataaaaattgttccctttggtggaaccaattctagtctctaattttgctcagctttcaattcataactcataaattcattttggtacagaacacaaaatccacaaaaggacagattaggtactt

SEQ ID NO: 44313 - DNA, 650 bp, Manihot esculenta
  Intron number 1 from transcript cassava4.1_014516m (locus cassava4.1_014516m.g) derived from phytozome v7.0 (chr-ID scaffold03581; pos 1269749 to 1270398 reverse strand)
caatctcttgagcaccgtcgttgccgatactccttgtattcatccttttctattaatatatatattttaattaattcactttatgtttatgttctgtggttgagtgagtcatcagcttcgtttctataactccatccataatactgagttgaatgaaaattttgattttgatctgtgaatgagattgtttaatgttgaagaaaaaaaatataggaagagaatggtttcactaaatcgagagtttctgttagaattcatttgcggtcaaattttggtttacctttaatttcattaagccaattgtgtagtttctactggtgaatcttttttcttcgaaaagctaccggtgaatcttgattggctggtgcataaacaaatacatgtagctgaaatttctattttcaaaatataggcaaacgaaatagctggaaatttgaaataagtcacattttgaaacttctcaaatgagcattatgacatctttgtaaggttgagaaatagattttagcattgcttctttgttttctcagtggccaaacaggaaattaactccctgattttgtcattactttttttgagttcctctgattttttactttttttgggaatttgcagattgttgtttcgcactgctttggtaacttctttcg

SEQ ID NO: 44314 - DNA, 363 bp, Manihot esculenta
  Intron number 2 from transcript cassava4.1_008127m (locus cassava4.1_008104m.g) derived from phytozome v7.0 (chr-ID scaffold11297; pos 827751 to 828113 reverse strand)
atataaccctgcaccaggtactcccattttttatgctctgctcacttccatatgttaagctttgatgaaaattattacttgaggaagaataaagtaggttactacatgttggcatttgcaatgacatttgatttattttgttaatttaatttgaaaaacttcaggtgataagatgcctacttgcaattggtttttttaggaagtgaacaagttctgatatcatatgtgcatgtaataatagataaactgttaaaatatttatagatttggctcagttgtttgtagatttgtcctccaccaatttaatggctgcctacacatctgatagggttcttaagctggccgagtacatagctcttgatc

SEQ ID NO: 44315 - DNA, 610 bp, Manihot esculenta
  Intron number 3 from transcript cassava4.1_024768m (locus cassava4.1_024768m.g) derived from phytozome v7.0 (chr-ID scaffold05859; pos 117858 to 118467 reverse strand)
cagtcaagtgcagtggttgccaaggtatggtggtcaagaagctcccatttttaactacctttccttcaattccttaatgttttattttaaatcaagttctattggaacgtcagataaatttttgctaatctattttggtagttataaatgaagcacatctttattacggtataggattaatgatctgtgattttgtttctccaatccttctaacattatatatttcttttctttgtgaaatttacaattaaatgtaactgcttaaattgattcttggaaattcaccattgcatgtcccccttttcatttgagaaaaaagtttttgattcctaagacaagctgtggttttaagaacagaatttcttgtattgcctaagataatttacaaactgacaaataggtgattgtgttcacagaacttatgggtacgtttcacaaatgcaccttttctgtatcttggctagttaagctgttgacaatttgaattccttgaatggttctgctaattttattttgtgcaattgtgctatgatatggttgcactaatgggtttctttcatgccattctctgccaggttattgtcataaagactgtactgtaagttcaaca

SEQ ID NO: 44316 - DNA, 866 bp, Manihot esculenta
  Intron number 1 from transcript cassava4.1_020607m (locus cassava4.1_020607m.g) derived from phytozome v7.0 (chr-ID scaffold09492; pos 379786 to 380651 reverse strand)
taatgtaggtatatataaaattcaaattcataataaatatttttttaaaatttgaattcgtcctaaatttaattattactgtctaaattcattttattagtattttggttagttggatttaaaattgaaaacaattaaaaaattaaaaattaaattttaaataatattaaaatcaaatcaaatcaaatcaaatcaaatcgaattaaatcaattcgattcaattcaaaaattcagttttcacttctcatttcatcaacacccaaataagcaatccaaataataatgaaaaaagaaaagaaatctcagtaacataagaaggaattttattagtaacacaacaattttaaactctcatctttatggatctaaatatatatatcttttcattatgaaaatggaaaatttcactttattttctctaattttttaattttcacttcaactctcaccttaactcatgcgaaaaatatacatattaataacttcatttactaagcaaaatctatttactctcacggaaaactttcaatatcaatccatgtatcaccatcctgtttaggattatcaaatagtaactgtgttagctttgaattttaaacttttaaaatatttgaaactcaggaaaatgattttcattatatatatattgaaagtctcaagagatcacgaacacctttacaatcaagcatgagaaacctagaattattatgatgtgagggagctcatgcttcaggttaaaggagattggtactcacaaatttaatctggtgataaatacatttgagtaaatctgagagatctcaaattctactctccaatttctaatttctaattctcagttaaaagaaaaaaggttgatcggctga

SEQ ID NO: 44317 - DNA, 692 bp, Manihot esculenta
  Intron number 1 from transcript cassava4.1_034399m (locus cassava4.1_034399m.g) derived from phytozome v7.0 (chr-ID scaffold08359; pos 1647732 to 1648423)
ctgcagaatcccactacccaccttggtgtccccatgtatgcactaaaactactacttgcgtttttttcttttctctctttaattattctttttcaacttcctttttttgcttttgatcttcgctttctcagtcgacagaatccctctttgtagttcttttttctttctttttatgatgtcgtttctttagctaaactgcggttagcagaagaacccacatagctttcttgctactttttccatatattacttgctatgcgtatcttatctcagttgctgctgctgctgctgaacttggtttttcttcattattggcagcagcttatttcatcaacagatgggtttttcttccaggttatattattaaaacatctttttcttttcctttctcaataagtttaatcaaaatttctcagttcacaagatctttcttataacattttctccctttacaacttaatgggtttccttctttgtgcttccttgtttaagtgtaaaagtatagtttcatgaccatttaatgcctaccatatgttgttaggaagtaccattttcttgattttgattcaagaattgttttattctcttacatattttcagcaagaattatgtaaagcaagaaaataaagatatggtgactagagttgaattcatatcttcaggtccaattattacgaggtggcagagctaac

SEQ ID NO: 44318 - DNA, 956 bp, Manihot esculenta
  Intron number 2 from transcript cassava4.1_019010m (locus cassava4.1_019010m.g) derived from phytozome v7.0 (chr-ID scaffold06825; pos 248804 to 249759)
cagctgttctctggtttgcttcaagaaacacaaaggtcccatctttcaattttattttcatctttctgtttcatttatacttatcagtaaaacttggtagaaattgaaggtgatcaagagatttccaaaaaactggaaaagagtggggaaggagaaaagaaaaatatgaatttttaggtttctcaattcagaacttttgcctctttgctagttcgttagtgaatttgcatttgaatttttgagtttcttgattgtagttacacaacgagagagagactgtatgtgtgtgtgtcattgtgcttgagagagatgaatttccgtgcttgttttgctgcttgtactcttaatggattatgtgaaacataatttgaagtagggtattttgctattgccaagcttcatactggagttatatatttggacttgtaaatttcatactttactttcatagaaaaatgtatttattgcacaataaattgggggttcttgctcaagggctcaaattatgctatcttacggaatagagcaaagtgatgataatgaagttataatttctgtggctagatggtgattattgcttagtaatcatgatattctaaacataaaggatgatgatgagacaagaagaattaaacttgctgttttgataaattagaatccagacgtcgtggtgtgtgtgtgtgtgtgtgtgtgtgtgtgtgtgtgtgtgtgtgtctgtgttctttgagtgaaagttcaagtccagtctgttttctatgtaaagttctctagatttcgtggaatcaaagagtaagcataatagctaagttcagtatagaaatctaggattattttgtaatttgcactataaatacattatcatcaatgacagcaacttgttattagaaataaggactgattcagtgtaaatgaatcatgcagaaatcccttgtgctaagccagtgtctaaagaggaa

SEQ ID NO: 44319 - DNA, 607 bp, Manihot esculenta
  Intron number 4 from transcript cassava4.1_008754m (locus cassava4.1_008754m.g) derived from phytozome v7.0 (chr-ID scaffold09683; pos 154173 to 154779)
gaagagaaataattttgcaggtaaactgtgaagggggggaaaaaacttgactatttttggtgcagatgaagatttttagcagctactttggagaagttattctatacaacccttatatacagagaataaaatttgaattgatgatggatcactctataatactataataaaaatgttgtatatacaatggctttattttaaaattctagtcatttagattttccagcaaaaaactggtgcggattcaaccttggtttcacttataatatgtaaatgtcctatgtgctcaccttccagctctaagcctagtccctgctgatgtctctttttttggggcaatattttcatctatacatggaatcctctaacctgcagcattattatatggtaacatttatctggaagtggatttaccatttgaatcttattgcaactgtcatctatttgaaatggtaaattaataaaaataaaagctgggtatagttaacagaactttgccgagtttcatattttgaatgccaaaatctgagaagttgtgtctttgtatatctgactgaaagttggaaactttgattaaagcaggcttttaattgggaatctcacaagc

SEQ ID NO: 44320 - DNA, 800 bp, Manihot esculenta
  Intron number 2 from transcript cassava4.1_010863m (locus cassava4.1_010863m.g) derived from phytozome v7.0 (chr-ID scaffold03404; pos 121236 to 122035 reverse strand)
tgacgtccccctctcctactacaccggacttcttggtaatcatgcctctttcttcactccatgtttgaattaacttggtttttttttctagtaaatttcgtccgtgagcaagatctctgatccttctataactcgatcggtgatggttctaaaagtgtaataagtgaaaaaaaaaaagtgaataataagatagatttacatacctggaatttacccatatttatatctgttaaaagttcaatacttgacaagatttgagatcgtgatagagtttggttggacaagaacttcatatttgacttcgtttggatctcctgttttgtagtaattatatttgaattacgactcaactcatggttttgggtgggatgtctctatgaatattttgttcattttggatttcgattttttggatttcgatgagaatattaatatgagttagtatttcacccaatcaggaaggttagtcgaatcaagctatgcttggcctatctaatttttattaggccagttttctttaattgtttagttctagttgaattatagacatgtgtcctaatcgtaaagagtcttataatctgtatgttatcaatgggttatccggatcaattactaagttttttagttaaggatgatgtatcgtaattgggtgtatatatggaatttattaatataattatgtttaataaaaaaaaaaaaagaaaattgttaatactgacaggcatgccatgatttaaaaattatgagaaatcttatttgaagtaatttgcttaaactcgttttttcttggttttacaggc

SEQ ID NO: 44321 - DNA, 301 bp, Manihot esculenta
  Intron number 1 from transcript cassava4.1_020745m (locus cassava4.1_020745m.g) derived from phytozome v7.0 (chr-ID scaffold03100; pos 440 to 740 reverse strand)
ttcttgcgtaagcagattatcaatctcccaataatttggaatcttgtcttgaaatcattacttcttcttgtattctgtttctgtttggatctttttctttcttcgcagtgaaggaatcctcattttcccctttatgagcattaacgattaagcacttgactttactgattttatcttccaatttttttccccattttgcaaaatttcccctaattttgattttaggttttgctttccattttctctgattggttctgttcttgcaggcccctctttgctctggtctatcccttgtaagtct

SEQ ID NO: 44322 - DNA, 364 bp, Manihot esculenta
  Intron number 1 from transcript cassava4.1_009114m (locus cassava4.1_009114m.g) derived from phytozome v7.0 (chr-ID scaffold05859; pos 473622 to 473985)
cttcaaagtttcttctttaccaacaatctgtgcaggtatgacccataaaaaaaatgaaattgtgattatcctgtttggttgttgagaaagtcttcttgtatttgattattttgctagccattagccaattctgcttcttgattttgcatttggttgttaatgaaatgtgggtatacgggattgaatttggaagtggatattccatcttaattggctctactacacattaaaaaaaagaaaaagtgtaattagtgggtttattttattcttgtccaaagtttttaattttatgattgtaatggatttcgtggatattcgatggattgcagtcacccaaaggagacattagctatttgcagaagtt

SEQ ID NO: 44323 - DNA, 355 bp, Manihot esculenta
  Intron number 2 from transcript cassava4.1_018291m (locus cassava4.1_018291m.g) derived from phytozome v7.0 (chr-ID scaffold02431; pos 211022 to 211376 reverse strand)
atacgccttgggacggaggtgggtaattatgattcttcctaattttgtttttctttatttgattatgcttgaaagttaatcaattcttgtgggtatttctcattcttgcaaatcaaaaggcttttcttatagttatgttgatatatacttttattattttacataatgtgctgagactatggatgaattctttttatttcttcaaaggtgaggagcatttaacattcaattacttctgggatttgcttggtctacaatggtgttttgaatttgattattgttttgatacgctgatattaccatcggttcatctttttcaggtacgtttaagttgactctgcaattcagtgaggat

SEQ ID NO: 44324 - DNA, 970 bp, Manihot esculenta
  Intron number 1 from transcript cassava4.1_017226m (locus cassava4.1_016934m.g) derived from phytozome v7.0 (chr-ID scaffold10963; pos 285472 to 286441 reverse strand)
ctcaacattcgtgtcgcgaaatccgataatcggtggtgagtactttcaccttccttgtaaaggtttgagtctccctctctactcatccttctttccattttctaatattacgaggataactgatgttctcgggttgaattataggaatccatctggctgattatttgtgctgctttggagctccattagggattatgttgtgcaaatgaaattgcttatctctatttttgcttaattattttccattaaaatacttgaatagagatgtctcggtattctggcgttatgaagtctcggaatttgatgattcttcccatggtttaaagattcaaatgggaatttaaggacatttatgttacacttgaaagtcttaacataattatttttcaacaattgagtattaggaaagaagagaggcaaaaaaaggttggacatttcaaatgttataaacaacaatggggttattcgcccttttgtttctggtattcaggaagaaaattcaagtactcatcatttttgctaagcagtagtcagtagcacttgaaattcggcaatatagtcagtgcccccattaatgttacataaatgacggtctgaaaattttgatatgctattcagtgttcagcatgattggttttcttgcttagttattctcaattgttgtttttgcatcatgtgtcttatcataaagctgaagaacttggatgtaaatgaaagcttttccttatggtgaagatacgttaaagaaagtcaatatattgcaaattaagacaacatattggtgactaaaccttttaatttctgatcttctcgttttaagttggcattggaaaagtatagttcacaacgtttttaaggtttggttctcgcatgaactgttcatttttcattttgactcattgggtttcattttattcattggaaaacatgattagggggccagtcgttgttggggggtcttggcaacaac

SEQ ID NO: 44325 - DNA, 994 bp, Manihot esculenta
  Intron number 3 from transcript cassava4.1_014290m (locus cassava4.1_014290m.g) derived from phytozome v7.0 (chr-ID scaffold03363; pos 640262 to 641255)
gtgagcctaagaaagctcgcatcctcgcagaccgggtatagcttcttttactttcttttcctttttctcttctttttttaaaaaaaggggggccgaggttggtaaggggtgttgataattggttttctacggagcatgtgcttatactatgaagttactgtgtttgagaattgcctgaatgttgaacttattatgctcgtaaagatataatgggtttttggtaaagattttatatggttgaaatcagcagccgtctacagtctccacattaactcatcttgtatatgctaatgttctagtgtcctttctcaactagtccaagcagtattccattacaaagtcccaaatttgccctagctaaataccaaaatttcatttttcagtccaaatttacacctgaactagtgttaaaatgcaaaataagaccatcacttgtgagtattttaaaatgtaagttgcacccttatccgcctatttggtcttatttggtctttcaaggataattcaggaacaaatttgatctgaaagatgaaatttgataatttttagccctgctgtatagttaagtggtaaatttggccccttttttttcggatttgctttgtatatttcaactatttaagtggtatcatagggatctcgttagttcttattgaaaagaaatgttttgtggttcatattttacctttctgcttcttgctttgagttgcttttggatttgtttgttaatttagtttgctttgccagtttttctgctaaagctgaaattgtggccatctttctcaagacttgagattcttagctttctttcaataacatatatcatcagagtccataattttttcttggcagcgtggggattcaaagctcctgttctagtttgggaccatgtcttgttttgcatatttttcttcttttactattgtattgcttatgatttggctgactagattttaattggttatgtatgaattatgatcagctgccattcccg

SEQ ID NO: 44326 - DNA, 739 bp, Manihot esculenta
  Intron number 1 from transcript cassava4.1_013552m (locus cassava4.1_010005m.g) derived from phytozome v7.0 (chr-ID scaffold03581; pos 1234427 to 1235165)
gtattgtttggtaagattcttatcgacttccttgttatcctttttcgcccctcttatccaagatcatgtggtttattagcttgttttcttgctcttcagctgttcggttcgttgtttaagtttgtttgcttagtgttctgttgggtttgtttaggattcgattgtttttggagtgttgcatgcatacataatattcttaccaaattagcttagttttcaactgcaatttggatgatctgtatcgtaaatatatagttgacttcaatttcatgatttgattaggtatgtattgccctacttttcttctaaaaaatcttccattattgttttaatgctttcatagctgtctatttccaaccaaataatcattttatttttgttgtgaaacttcaattagcatcattttaatcttattgttggtttttccagttgttgcaagtcggaaattagtagtttcacttataatcagtgcataatgcgttttctactgtgaagaaacggatttaatgttcaattaggtttaaactctcaactgtgttgtgacatgtatgccttgcttgctattcagcagcttgctcgaggattatctccattttattccataaatctttctggaagagacttctttgaaatctgttttgttactgtccggagaactatttttctggtgaactaaaaatggttatattttctttacatttgactcgattgttttgtcttaccaacattgtgaaggaag

SEQ ID NO: 44327 - DNA, 279 bp, Manihot esculenta
  Intron number 1 from transcript cassava4.1_001350m (locus cassava4.1_001350m.g) derived from phytozome v7.0 (chr-ID scaffold05019; pos 254174 to 254452)
gatttgattcgttaagtttgatatagagaaaaaaggtaaaaaaatccttttcttgtcttcatttaatgtcgacatgaaatttctgtttcttgatgttttgaattatattcattatgcaaagatgagctaaggagctgggtttaatattgattttttaaagtttgtgttactttatttcattttgatgcatcaaattagtgttactttgaggattgacacatgaatgatcaatgagtttaacaattgaatttaaaggtattaaccttttgcagctcaaaa

SEQ ID NO: 44328 - DNA, 690 bp, Manihot esculenta
  Intron number 1 from transcript cassava4.1_004129m (locus cassava4.1_004102m.g) derived from phytozome v7.0 (chr-ID scaffold10305; pos 444202 to 444891 reverse strand)
caggtattttgaattcctgtgcagtttctggttttgcgttttggggtgtggttgtttttaagagaaaatgaaggaaaacagaagtgtgtttgtgtgtatttagttttcgcaattatgggtaaattaatggtctttgcgggctttacgtaattggatgttccatgattatttagcttatttgttgtttctcttttaactgaaaaaaaaataagaagattgttttctgtttcgttgctgagaaaggtaaagaaaatttgactgttaaagacttatttttatacactatacattttgagtgtagctggggtggttggttagtttttggagccccaaaaacttctacgtttttttttttttttttgggggggggggtaggtgtttggggggttaagattgagagaggcgacaggaaaatgtcacctactctatccaattgaaaaaaagaaggttttttcaattggtccaaaataaataaattttgagccttgcacattttccggagatggatttgcatggatgcatagagtcgatgcacaaagtgggtgttgtatgaatgcatacatgagcggtaacatgtgaataattttctgataattctgtgtggcaactaagttacatttcggttatgatttttgttgttcttgttctgatacaggttcaacaacttaaattcaaggtgctcaattacaa

SEQ ID NO: 44329 - DNA, 706 bp, Manihot esculenta
  Intron number 1 from transcript cassava4.1_003770m (locus cassava4.1_003765m.g) derived from phytozome v7.0 (chr-ID scaffold03834; pos 125893 to 126598)
cgattggtaattttttttttcttaattttgttttcccccctttcttttttcaatttgaattaggcttgcttttcaaaatgttattttctgattatatttcaacttcactaaaactctctctttttatttttttgttagtttaaattagtgtgttgaattatggtctcttttttcttttttgatgctctgaggttttgggatgggatcggatttggatccagtgtgagcttaagtttgctgtttaaagttgacgtttttcttaagaaaaattgggcccctttttatttggtaaacaaagatttaactgaggattaacgaagttaccaaatgcgtatcttatctgttctttgtaggagtacttgcagatttattctattcataatagctaggattttagcattgattttactctttggttcttagatcttgtatgtaaagaggataaaaatgagatgccttctaattttttggtttatgtgtaattttatgtttggtgaatcgtttgccttctctttgtatagatcttttagagattgcactatacacgacatagcgtgtgtggttggaagaaatatttcttgtttaagaatgacatcttagcttttatatgcatttatatatccgtggatctagtagccttgggtttggttttttgtttcttagtgagttgatactgaatccatctgctaatggtttcaggggtaca

SEQ ID NO: 44330 - DNA, 576 bp, Manihot esculenta
  Intron number 1 from transcript cassava4.1_004145m (locus cassava4.1_004145m.g) derived from phytozome v7.0 (chr-ID scaffold10963; pos 552428 to 553003)
agttttctgctcaagattaccctgttttcactcctgtaagtttcagcgtctttttgcaaatgcatatcttcgttgctgcatatctcttctctttttcctttctttcttttcttccttgaaaaaatatggtttcttggtttttgctcttttgcccatgttttgtttccagatgagaaagaagggttccaagttcatgatggaacagataaagcaatgaaatttaatttcgcctatttttgtagttgatgtgattacgacatgtgtgtttacggagtcgttatctgcattaattatttttgtatttaatgatttgcttaataaattctggctactctctgtcatggaatattttgtgttctttgtagcttttccattttacagacttgaatgttgtgaatgttggtttttgtaaatcaattaaatctttattccttcataaatctgttctgattatcagcaagaatttcttcgactctgcctccttttcaatggagtattcttttcaactttactcattacataaaaccttttttaattagaaattttttgtttttttttctaatccccaacagagtt

SEQ ID NO: 44331 - DNA, 830 bp, Manihot esculenta
  Intron number 2 from transcript cassava4.1_015806m (locus cassava4.1_015806m.g) derived from phytozome v7.0 (chr-ID scaffold07528; pos 22638 to 23467 reverse strand)
ggtggcaagaagaaggcttggaggaagaagagaaagtatgtttctttctttcctctcttcgtttgtggatttaagaattacgttgcaaatgctagttttaggtttttgtgtgcagtctataaatgttttggtgtctgagtgtctagtgtaaaatgactgaagaatcatatggatctcatcttttatgattattagggtagcaaaaattttcctgcgtcatagagaaatagatgtgggtatcattgcctggtgactttcagctatataaagctggaatggtactttttcatgaaatattgtattttgtttcttgacttatcttgttagcatttgaagctgtctcatcatttcaatttgatttttcaattagaaaaatctgaattttggtttttaatatagctgaatggcggtaaagtatcctcgcagttgactccaactgttttgtggtcaaagctgccttgttattgttgttattgttcttgctgtcttcagctgtgtacttccttgttatcatgtaatagttatataatattctgctgaaattaattgccttaattaaaagttgtgattccgctgtactgattttgagtcagttgattaagaagttgaagttatctttggcccatcatcttaggtgaaatatacttgaagaatgtaactgaaatttatggatcaatgaaatattatatgctttgactaggttgcttgtttgattattcagttgcccaattattctgttattatagtatgtgtgatgtgatgagatgtggtttgtaaattagttagaattgattggactcttttttttttctggtctgatgtgttaaggt

SEQ ID NO: 44332 - DNA, 932 bp, Manihot esculenta
  Intron number 1 from transcript cassava4.1_019480m (locus cassava4.1_019480m.g) derived from phytozome v7.0 (chr-ID scaffold12455; pos 538108 to 539039)
gccaaaaggttaaacatcttcttatctactgtattgacttgtatgaatctttaattattatgtatgttgactctttcaggttactgctcaatatcttcatagttttagattcattgcttcaaagtctgcatacttgccttaagctttttgtttttgttcttgttctttaatttttgtgaatgaggattaattaaggtgttaggtaggaatttgaagtttttcttgttctgttctgccttggaggtaactgtttatctgacttgcagtgtaccttttattctttttcattttcaattaattatacgtgttaattccaaatcattccataaatttgtaggtggtgttcttctttgaccttttttgtgcttaaaccaatcaattgaatctggttctacaagctctttgttagatgaaatcctgcaagtacatttagaaaaaatttgcatgctaacattgattgaacttcaagggagtggttattatctttaatagtactttttttgctaattaattgtttatgtctagatgaatactgtcactgtaattgttactcactgtgccttgtccaagctacttgttgctgaaaagaggatcccctgctcagaatgagaatgctacagtgctgagttttgaaatttgaattagtaatttggcgttacccattattgatttatcaattttgcttttctgtatcctgatgtgcatgagctcttattctgcaattcggacttctaattctgaagcgtctgttagatggtgaaatggcaatagcgtgcttcaatgcccacacacacaacaaaaagaaaaagaacagaaggaagcccctttgtcctgaaatgctgtatagtttagtgattacaaactatattttggtgtctaacaattttacatctgctaacaaattatcattttttacatggcagataaagaaa

SEQ ID NO: 44333 - DNA, 559 bp, Manihot esculenta
  Intron number 1 from transcript cassava4.1_012122m (locus cassava4.1_012122m.g) derived from phytozome v7.0 (chr-ID scaffold10780; pos 173801 to 174359)
ctgggtgcacgaattgccttggcgccctccaaaaggttagtttcgaggtatttcgtgcatttatgatgtcggtgttgcattcaacattgagaaaaggaattgcatttattagattggcgatgaatatcatgtctgaattaattctgattttatttagttaactactcatcatatataaccctatacttaaaccaagaaaaggctagctgggtttctgggaatatcagtcttgagctaactttagtggagactgaagagaaataattcaaaagatgaagtttattatcagagaataatgcgtgaaagtgaaagtccgcttgattggagttgtttttcttctgcagtgttttctgaagtgaaccaaaatcaccatttgcaaaatagaaactgacccctgcttatctctctcttcctgcctattcctttagcatatgatttacttctactttttacctttactcttttgttgcatacacaatatttccggggactacagtaccctcaatcttgtttcctaattgcagctaaaagccagcaataagaacaaaagagaggaaga

SEQ ID NO: 44334 - DNA, 366 bp, Manihot esculenta
  Intron number 3 from transcript cassava4.1_006319m (locus cassava4.1_006319m.g) derived from phytozome v7.0 (chr-ID scaffold05859; pos 570218 to 570583 reverse strand)
gccattaagattccaacaaacaccaagagtagtagtttcttggcttgctttctccgtgtttgactatgtcttttgtcttttgatatgggtactggattatatgaacaaagcttcaaagttgaaagttcaagagcttctccacttctcactcaatttttctttttcactcgaaatttctttatttcctctattggaaagtcatttttctcatggttctttggtgcccatttgctgaacttagtttactaaggtgattaattattgttttgaaaaatttgctcatttgaatatttctggtggggtttgcttctgtttttcttaattaaaccagggaagttcaaagtcaggaggtgagagtagtgactc

SEQ ID NO: 44335 - DNA, 388 bp, Manihot esculenta
  Intron number 2 from transcript cassava4.1_006319m (locus cassava4.1_006319m.g) derived from phytozome v7.0 (chr-ID scaffold05859; pos 570598 to 570985 reverse strand)
aagctaaagcacgtaagcttccctctcttctccttttgtgacgtttgataagtataacaatctcttcgaaaagcagagagagagagagagagagagagagagagagactttgaatatgtctattgaggggtacagtagatgggttactatttccaacgcaataatcattctggggcaagagacttgaatggtgtgaggctacaaacatagtaatctgacctcctttgcatgattttctgaccctcttcatataactgcaaagaaataggggattaggtggcaaattttgaaaaatgtctaatggagttctttatttttgtggtgatcctctgagattttgcttttgatgattcttgcagctttattcagacctgcagctactctggaa

SEQ ID NO: 44336 - DNA, 830 bp, Manihot esculenta
  Intron number 1 from transcript cassava4.1_012404m (locus cassava4.1_012404m.g) derived from phytozome v7.0 (chr-ID scaffold06582; pos 507952 to 508781 reverse strand)
caggttctctttgtcactttttgttgttagattgattaatggctgcttggcctgatactgtgtttctaatttgcctgaaacttttgttctgtgctggagagtattttgatccatgtagtggactcagatatatatttgagttcctactcgagtttgaactcgtaacctcggcatgtcttagttcatttccagatttctgtttgtttaaatttatctatgatgtgtatttcccttgcattagccagctataagcttcttacgctctctgtttggaaagacacagaggaaagtaaggtttttaagggacagtgggaaggtttttcatgatttttaaatcttaataattttttattatttgagaatatctgaagatttttttttaaggtttttgaaagttgaaagttgaagatcttgtaaacccaccaatttgctagatttaaattgaaggtttttagaggttatgaaaaacttccaaaaaccttattttaaaaattttcaccctcttctaaacacagattcaaggttttcaaatcttgaaaaattttcccttactttaaaaaacccctacaaacaaagtgtttaatctaatttcatatctctcttgagtagtcctcacctgtgatgggttttgtcaattcattaaattaacaatgatcagaattaattgttttcctgaagatcttttgaagcggatatttccatataattattgttcatcatatacttgtttccttgtaagtaattcggtcaaattttgcagctgttcataaaatctctgtttcttttttactctaggtcaatccaatcaagtataacagtattttgactgg

SEQ ID NO: 44337 - DNA, 431 bp, Manihot esculenta
  Intron number 1 from transcript cassava4.1_022616m (locus cassava4.1_022616m.g) derived from phytozome v7.0 (chr-ID scaffold01796; pos 10003 to 10433)
tcactgtgaggagccaggtcttctatcttttttccttttgctttctgttgcattttcatttgttacaaatggctgagaaaaggtagagaccttcgtcctcttcctccgttccctgttcagtttctgtgttttttttaatgggtgtgtttgattttccattttttcttttccccaaaagaaaactcggacgcatgtttgtgcccacaacaattgtttgtttgttatcaatgtttggcagaacaacattagaaaaatgtaagagaaccttggacctttcccatgttctagaactagatctaatatggacccaagatacaaatgctgttcaaggtttagaagttcatccaagctgatcacaagataattagattttcatctgaaattttgttcactgtgctgtgttattaactaatgttttatttatatgtagg

SEQ ID NO: 44338 - DNA, 459 bp, Manihot esculenta
  Intron number 2 from transcript cassava4.1_009564m (locus cassava4.1_009564m.g) derived from phytozome v7.0 (chr-ID scaffold10305; pos 805200 to 805658 reverse strand)
gttcaggagccaatagttggctcattcaattggaggtttgtttgtcttccgttactgaatcgagagcattgcattattcttgatctctggttgttttgttatatttaatctcatagtaacacttaaacaggtgtatgttcttatacggtatgataaaatgccttgctgagtatttgtttccatttgcagcaaaaattgaaaaaagaaaagaaaagaagtttcaggatataaattattttgttgtggcattagttagattgaagggtctgttttagatatggtaataaagaattttctccttaggatttactgtcttgaagccttgtaccagcacaatttttttttttgatgttatttttctgcttaataaggtgcttatacaagttcaaggatacattaagttagtaatgtgcttgactgaaaactaaactttgttaaaaatcctatgtagggaggagg

SEQ ID NO: 44339 - DNA, 932 bp, Manihot esculenta
  Intron number 1 from transcript cassava4.1_018220m (locus cassava4.1_018220m.g) derived from phytozome v7.0 (chr-ID scaffold11821; pos 93195 to 94126)
gcagttccaagctcaagaaacgcaagcaattgcaggtatgtgatactagcttgctgctactctttatgttttgttaaaattcgaatctcctgaatgtttgtttaatagttgatcaaaacttgctgagatgagatcgattataccatggtagaggcttttgttttgatttttgccgccttctctcgaaatttttgatgcatttcttatgaaattcccgatcttaatttttaatcagatttcccttactctgcacttcttcagatttcaattttgtttgcgtattataatcatttggaatttgaaaatttttaatgtaatactgcacttttttatttgaattttgtgagtttcttcacttgtctcgctgtcttacagagtgaaattgcttgttttatctaacgatctccctcatttcttaacttttcatgtaaatttagcaaatgaaaattcaaataacgtttaataattttgaaaaaaaaaatatagacttcctttgaaaaacaaagatcacttgctaaaacttcctaatcttaatttttgaaatttaatattgaaaaattcaaatcttcgtatttgtttttttttcttttttaagaaaaaaaaaatcatgcaaggaattacagaagggaatgatcctcatcgaacgagaatgaaacctagaaaagaaagaaaaagacaaaaacgcttatactgaattgtgctctcaaaagtgatcgtcgcactacccaataatgcaagggcattatggtcatataaattttccaaaaacgacaattcattgaaatctattgtgtctgttcgtgtatatctgtcttccaattccagaaaagtcccatgtacacgcgctggattctgatttactgattctgtatcttttgtcatgattaatatgatcagacggtggagatcaaggttcgaatagattgcgaagg

SEQ ID NO: 44340 - DNA, 329 bp, Manihot esculenta
  Intron number 1 from transcript cassava4.1_002137m (locus cassava4.1_002137m.g) derived from phytozome v7.0 (chr-ID scaffold12865; pos 1001357 to 1001685)
gaattcgttttctacaggtatattttttattcgtttacagctgctactttgttgatctggtgatttttacgctatgtacaaatatagatttttataaaccttataaaagattaaaatttttattttgttttggtttccaagtatgagatctatagttcttttctcctaaatactataaatttgagatcatttgaagtttgtttatgcagcttttgattagatattacttgtggggctcttttctgagtaatgtcattgttcgatgtatttattcttcctaaattttcatctcaggatacaactgccaatagaactggaatttgcaagat

SEQ ID NO: 44341 - DNA, 512 bp, Manihot esculenta
  Intron number 1 from transcript cassava4.1_007560m (locus cassava4.1_007560m.g) derived from phytozome v7.0 (chr-ID scaffold06582; pos 901777 to 902288)
cccaggttaaatacccttttcttttctttaaattttttttcctttttatttttagcgtttaatgcttaagtatggtgtataattggttgtcgaagttgtaagatcaagaagtcttatctgttctatttgtattctgtctgtttattttcttaatattggttcctgtaattttgggatctgctgtctatgtgattttttgttcttcccctctccttcattggtttatatgttttctttgggcatttgagccttaaagtggaattctgattggatcttgaatttttctaacaattagtgccttaatgtttaggtttgttccccctcttgtctaatgaaattttatcctgtaagttttagggttgattctactgagaaatacaagtcatgttttctgactattgattcgattgattcgtgtttctttccttttctttccccttttgattgtgctttgtgttgggtgcttatgaatctaaatgtcttgtgcagtgacacttcagtgggtgttgcac

SEQ ID NO: 44342 - DNA, 992 bp, Manihot esculenta
  Intron number 1 from transcript cassava4.1_010656m (locus cassava4.1_010656m.g) derived from phytozome v7.0 (chr-ID scaffold03581; pos 838814 to 839805)
aagtctctcgttgccggaggtgtcgctggtggagtgtgagttttctttttccctttactcggtattttgtttgcttccagggataataaatcatggtttttctggaaattaattttctattgtggtttgcctcatattacgttttcacgagatagaagtctagaaatgataaaattatatagaaataaaatttgagttttttcccccgatcaacagtatttttttagttaggcttcaaaattcagattcttttaatgcatttggacctaaaaacatctaaactggggagtagggctctaggagttaatgttagtttattgtttctttggaaatattatgacattggtcaatttggttctcacgaaaggtcgaagaatatagcttatctaaaatttgaacctgatgttacccatccaatctgggttttaagaacatgctaagcaaatctaaaatatacaataatatcaaatttaacggtcacttctttacttccataaaaattgtagtagctcacaataggaaatttggtactgttaaggctttcaaaacactgcaagcagtaaccctggttgtcataagaactttggttcctttgttttacttctgaggtaatgagcaggaaaaaaagaagagtgtttggtttagaattttgtgcttggattcagattcaatattctgtttgcaataataagattttatctcacgttttatatatcctacttgtttgccttgtccggatgcttgcttgtttcaatcttttatatacattattcttttttttttcctttaatttgtttactgttgcatatattgcataaagttccaaagatatttccaaacccctcccccacccccggaggactgcccttaattattattgtggctggcaggtgttctgcatctttatgatatagccacgcttgaatttcacttactgaaacagtcaaatgtgtccaggtcacgaacggctgttgctccattggaaaggttga

SEQ ID NO: 44343 - DNA, 502 bp, Manihot esculenta
  Intron number 1 from transcript cassava4.1_029525m (locus cassava4.1_029525m.g) derived from phytozome v7.0 (chr-ID scaffold09788; pos 370778 to 371279)
gagtacaggaaaatcaaggacgaggtctgcttcccatttgctagttttctcttcaattcctttgcactctgaatccacttatcttagtatcaaatcggtatttggttcactctgatttatcttctgctttatttaaatcgattgatcctcatttgcttagcattatgtcaagtttgctctcttgttgttctacactacattctctaatttggcacggtttggacaaatggctagttctttagagggtcattttgctcctaaagttcttttatttatttatttaattgggtttattaaactatacttgtcgaattcatttgatttaagagtactactgatgtgtgttaactagtgaaaagtaaaccgtttgctcttaatatttcaatttgtttagtgaaacttatgcattctgatgctgttgggatttttcttttctgagtggatcagtagtttgataatttgaataatatgtttgtattgtaggataaagacaagggtgtcc

SEQ ID NO: 44344 - DNA, 892 bp, Manihot esculenta
  Intron number 1 from transcript cassava4.1_006735m (locus cassava4.1_006735m.g) derived from phytozome v7.0 (chr-ID scaffold06890; pos 278601 to 279492)
actttggagttgaacagcttgcattgcttactcaggtctcttaactctttcttcttaatcatcatttccattttctttctttctttctttctttctttctttctttttcttctctttctctctctcttaaccagtcttgattagtgtgtggagtagtcttactgttttgtgggtatgaagtcactactgggtttttgtttttgggaagtgcgaagggattttttgaagtgggttctaaattctttatttttcttttcttttcttttttttttttttttatgggtttttgtttttgggaattctcatgatctcacggtggagtggctgagtaatttcatgtctcctctctctttctctctctgtggtgatcttcagtccatcatttttttcaattacttcttgagttttcttgttcatttgagctccttttttgtaactttcgcttctgtagtattcatctaatactatctattttagcagtgaatcaaattattgtttttcaaatacactgttctttcttctccttcttcttgacttctgttcatgcttctccttctgctgttgatgtgataaaatatactattttcatgtataagagttgtaaacatcttgatttcatgtatttcctaacttgggattttcaatcttaatcttgcaaatccaagactttctaaatatagctcttgatctccagtcttgtcttccacattatgcttattgaaactataccaaatgtaaaactttcctcatttgagctcatgattgtaaagcaaaatggaacatataattaaactgaatttatcccaattaaattcatacatatgtaaggttatgatctacagctaatccattttcattatttctttctttaccacagaagcaattggctacc

SEQ ID NO: 44345 - DNA, 832 bp, Manihot esculenta
  Intron number 2 from transcript cassava4.1_010079m (locus cassava4.1_010079m.g) derived from phytozome v7.0 (chr-ID scaffold05875; pos 1831283 to 1832114 reverse strand)
ttgtggttgatcctcttccagcaggtttggatcgggtaaggtttctgcatttttgttggttggaatgctaccatttagcaaaaacatatcttcaatagccagttgaggggtctggtgattgggtttgcttttgagaagaggtgttaatgtggttaagtggagaacacgttgagcaaacagtttttttcatctgaaaggtttgcatctttaagtcaaatgcgccttatcatttggatagaatccagatttttgacattagctattggttgtattaataattgaaaaggaacaagaaataattatttattttgtatcaggattttctgggtcttgttgttgcatcccgaagtaagtatcagtatagtcattaatatgcactgtcgtacaaaaagaagatgaatgcaggaaattttgattgtttgtttcaattgatgatcacatctaagagagcatgggttatgaatgcaccaacagttttcttagctcttgagatctagaagtgaaagcaacagatagtaattaccacatgaagcttataccttaaatatcttatttgaggacataattctaacctctataaaaattcaatgtcatggatttcgttcactgaaagttgaataaaggtataagttaaatggttttctagttgggtgacttgtgaatctttattgaatgcctttttttttttaaatgtttgtcttcatcccatttgtcttaaatggatttttcacttgattcatcatatgaatctatttcattgatacttggtgttttgtggttttcaattttaataccagggttatattgtgctaaacagaccttgggcttttgt

SEQ ID NO: 44346 - DNA, 853 bp, Manihot esculenta
  Intron number 1 from transcript cassava4.1_010079m (locus cassava4.1_010079m.g) derived from phytozome v7.0 (chr-ID scaffold05875; pos 1832669 to 1833521 reverse strand)
ggtgattctctggctatttctttaagcttttcatgcttttttcattaacacgattcatatattggttcttatttttgtatttattaccctttttcttcaaagcgaatctcactttaattttcttttcttattttttaaataaattttcgcacttttctatgttattcgtgtaattttcagtttttttaggtacccatttggtttatttaggcgattctagtattttctgccaaaattcaccatttattttgttcatttgtgaatttgctgattgaaattcatgattttctcatgaatttattgtgtttgttcaactaatgtaagtgtcgaagatggctctctttcagttttgcatgttgtgcatttatagtagtttgatcggtttgtctctcttttgtgcttcctgaatattttgccttgatttaacactgtggctctgattccacattggtattgacacttgagaactggaattttggcgggtttggcttaaatattcctggaaatttctatatgttatgtgctgaaactgttcaattgaagatttagctcaattaagtcaatggtatctttcccttctatctattgtaaagttcatggcaaattaattattattgtggtgtctatggcattactttttataaaaaaattgcttctaaattgtgttgtcaactaaactggaaagggctttaaaagttttggatatatttggtctgatgtgtgaaaattatgcatagttttagtttcttatttattggatctgaaccttgcatattttgatttctgatgagttaatttttgtcttaattcttacgcaggcgcagattactggctggagcttcaattgtctgga

SEQ ID NO: 44347 - DNA, 300 bp, Manihot esculenta
  Intron number 2 from transcript cassava4.1_008648m (locus cassava4.1_008646m.g) derived from phytozome v7.0 (chr-ID scaffold10397; pos 2910 to 3209)
gagaagctaccctgtaagtttttttttcccccaattgtagatcattaagaagggattgcattgaattcaattgtttgtgactttgtgtgtgtgtgtgatgcttgttataatttttcttcaagcttactgctttaattttgatgccagtcctgaaaaaagatgattgatcacaatgagttgaagtcaaattagtcaatgagctgctgcacacaagtttcagatagttttaactgattattctaatttcgttttaatatgaattcagggatcaatcacttccataagacacccgatagggaa

SEQ ID NO: 44348 - DNA, 983 bp, Manihot esculenta
  Intron number 3 from transcript cassava4.1_010235m (locus cassava4.1_010272m.g) derived from phytozome v7.0 (chr-ID scaffold03581; pos 700227 to 701209 reverse strand)
aagaccttacaggtttgtatgcccctgcctgtgtgcatatgatgctcctcacaggctcttgacaaatttattacttcctctattccataagttttattagacaattaaatcattattaataatatatggtttgaattaaatactcatagatggtttaaattttcatttgaaaaaaataaataattaatgagagattgtattgaaaatataataaaattaatagggtcataatagtcaatttatatgttcactataatataaaaaggaaagtggagggagtattttatatttgcattctcttgttggtttcctggtactcatttttattgtctgggaaaatattgaggtatcaacttttctatgtgcctttctaaatcccttccctctctagtcttccccttttatttttctccacaacacacgcccacaccttgcttttgaaaaatatcactgattctatttgtttccttgtgaattgatccccatacttaaccttttggacatttaccttacatttcccacagttgccttcgtttctttttgctcttttatgtttcctttgccactatgaatgagtgaatgctacttactgttatattctaagtttctattaagcattagaaagttatgtgatgcctccagcttttgctgtttaaattgttgattaacaccagaatactgaccgagtaaccagtctcatgacactttttgcaggatttattaatttttttatcagtgaatagtttcaataggtgaccgggacttttagatccaaagtttatgttgcctggcatgcaacattgcttccctgtttatgttcagttctgaagacatggatttatttgcctattagtttttttttgttgctttttcaatgtcaaaaactatcacttgtaagttctgccacttcctagtgaattgaagagaaatatttttattggattacagagcactcaagaaatacagtcttcaacacaagtttc

SEQ ID NO: 44349 - DNA, 693 bp, Manihot esculenta
  Intron number 2 from transcript cassava4.1_026548m (locus cassava4.1_026548m.g) derived from phytozome v7.0 (chr-ID scaffold08359; pos 2267194 to 2267886)
ctccagttttcacttcagggattatacgtctccaggtaagttgcctgccgatggggattgggtatccattccttatccatatagtagatgctagggaagttatgaattggccgacagatgggtcagtgccacgtggttggttggcattgaatgttgtgtgtaacatcatctctccccttatcctggagcctattgctctctgtatagacttcatttcaatttccaagtagtgtagactaaataggcgaatacgggtttgctgtatcaaagcagacttttttttttctttttataataaatgaagttgatttgtttgtgaatataattttggaatttatttggttgtaaaatactcctttatcccataaaaataagtttgctttttttttttatctcaaattaataattgattttctattataccagtggaggataattaagaaaaataatataatatttattattttatttatatatttttttaaatatatctaataaatttaataacttaagtaaatttatgggatggaccgaataggaaaaagaagaaattatatcctttcatttcccgcgaaaatagcattaaattttaaaaacctttacccaacatttgaatcaattcctaaaactaactattcatatcgactgtgatggaaaggtacctattcaacagaggattgaagcgattgattg

SEQ ID NO: 44350 - DNA, 348 bp, Manihot esculenta
  Intron number 1 from transcript cassava4.1_013254m (locus cassava4.1_013254m.g) derived from phytozome v7.0 (chr-ID scaffold12865; pos 105895 to 106242)
attcgccttgaaaatcaagtcgttttgtcaagaaggttagcctgtgtaatcgtttcttctgaaattggtattttccttttatgctgcgatcggattgttatagtttaatttgatttctttttgtgaaaatgtcaccaataagctttctgtttgattcttgatttggagagatggagaaaagtgacagcagtatgtttactgtttcggtttttaggttgttcattagctaaatgaaaactgaaaagcatagtcttctcactctcgctatcttctttttcttttcttttcttttgtttaaataatctattttctcatctctgatttaattgctatgcaggcacgttttct

SEQ ID NO: 44351 - DNA, 780 bp, Manihot esculenta
  Intron number 2 from transcript cassava4.1_013254m (locus cassava4.1_013254m.g) derived from phytozome v7.0 (chr-ID scaffold12865; pos 106267 to 107046)
ctgcaagctcaattccattggtcagttacatttcttttatgttcaagtctttttatgacccattgtatctccgttaaattatttgggattagtctgtttatttatgttctgtaataatattttctttttaaagtttgtaaattgcaaaagtattcacaccataattaatttttggttttgagatcggttaactgattggatttaattacccaaggcccaagtttaactactggaaaggtcagtttcttctatctgttggagtgtttggattaattttgatggaccaaaagggcttccagttgtaagtattagtaagtaaccttgacggcgacctattgtgagcttcatcaaatactgctaatggagtaattagacctttctgattggagcagagcagtgcaaacatttattcatttattgttaatttcctgtcctactacgctgtcctgttgatgcctttggtccttttgatgatctcatgaccatgtttgagaaattattaatgaatcctgctttttctctttttcctccaaataattcattgttttacaagttgtccatataagtagcgctgttgaaactttttcaatttgggtgtggaacccatgttacccgttgctttctcaactgaaataactaaacagttagcttctgtttttacattcatttcaatattggtgtagatagttagtttcacatttgaactggaatatatatatatatattctggtctttatgtgaaatttatattataatggcacttgcagaagtcagcacagg

SEQ ID NO: 44352 - DNA, 213 bp, Manihot esculenta
  Intron number 1 from transcript cassava4.1_014027m (locus cassava4.1_014027m.g) derived from phytozome v7.0 (chr-ID scaffold11882; pos 176702 to 176914 reverse strand)
tggactcatcggccctgtccaagaaagaaagaaaggtatgtttttctctcttttatctgatgatttgatcacaacggctagctttagtcgaaaataataacataaagctgcaagtttgaattcaaatgtttttaaattttattttttttaaaaaataattataatttgataaattattataatttatcttctgtggatgattataggaactcc

SEQ ID NO: 44353 - DNA, 559 bp, Manihot esculenta
  Intron number 1 from transcript cassava4.1_004903m (locus cassava4.1_004903m.g) derived from phytozome v7.0 (chr-ID scaffold12794; pos 1418022 to 1418580 reverse strand)
aaagtaaggtggcgttacacgttgtttgttctttgatctcatacttcttttatttttgtttgttttcattagttcttgtccttttgcttaatccttggagctttgctttgattatttgtgaactcaagaatttttgggaattgggtttgtttggttaaataattgaggatgaaaactattaggcgagtggaatttgcaacgttgcttctgtatagcacttccagtgcttccaaatgaatgcttgcagaaacatataattttaaacccatttgcagattttataggatttgtttggcattattgttgaaatacaaacttaattatgctaattaaatgccaaaacttttttttttcgagttaaaattggcatgttctgtaatggggattctaaaacaattaaacaatttctttccttaacatcttttcaaaaagcatgtttgaatttctgtctatgatatgtttgtctatgctccttctcgaagtatgtcatttgtgtatagagttgtgaaaattgccattttgtgttattgttcagggctttcttgggttgagtggagca

SEQ ID NO: 44354 - DNA, 725 bp, Manihot esculenta
  Intron number 2 from transcript cassava4.1_015531m (locus cassava4.1_015531m.g) derived from phytozome v7.0 (chr-ID scaffold06327; pos 377401 to 378125)
agatcgaaagaattatcttgcttacaagcacctgtgtaatctctctttctatcaaaaattttccctgtcaagcataaaattttaattttttttggtgaatgttatgcaatattgatataggatgtgcattggaagttgggaactcttgcaaacttgttaagctgcttttgagtatgtttcttatcataattttaatgctctatcagaaacagattgcaagacgtaatagctgaagtaaaatttaggatttttttgtgtctttagtaatgaattattctgatgatttcagctgttgaggtccaaattgtaggggattcatgcaattgtttgttccgaagggattctgaatagttcatgctatttgtttcttttattattttatcctttgatttgatccgttgaaggaaattttgctatagaagagctaccattgtgtggagtctcccttgtgtaaagataggaacccgtatccagcttgaaaattctaagatgttttgattgtcaacatatagtgggatcaagccattcaactgaccaatgaatcattttatgtttggatttagatccttagtaactgtgtgccatttttgtgcgaccatagaatgattatactacgcagtgggaatagtattctcttattaattgagatggtattgagatgctctctttttggcttgtttccggtttcagcaacagctgttagtgagcagaggagatttgatttt

SEQ ID NO: 44355 - DNA, 930 bp, Manihot esculenta
  Intron number 2 from transcript cassava4.1_005585m (locus cassava4.1_005585m.g) derived from phytozome v7.0 (chr-ID scaffold11581; pos 20825 to 21754)
ctggtgttcctaaggtgcgtatgtttgtattcatgtatgctagctagcttccactatataatagcaaagtcattgtttctgtaatagtatcgctcagtattttttatttatataatattaatttgtgggtaggattgattatttagtatttatcatgtctcctatgttaaccattgattggttggctatcttctttgatgatgattgacagtatatgatggtaaaataaatggactttattaggaaccagacattttcataattgttgttgatagtgatatttaatctataattaatttaaatttgaaactttggatacttaaagacaaatggtggtcagataattaataagaacgttatttcaattgattggtttaagcaagatatcctttatcatcaaagaatattataactgttaatacatattttaatctacagttgaaaagatgatacctttgttgcaaatatttttgtaaaaaaaaaaaaaatctatttattggatttttctataaaaaatgtctttcatactttagcttggattttatgatttggcacactttgtttgtatcaaaataattagcagggagacatggttgttgaatgctttgctggtatcaaagtattttaatcaagtgcctgaatatggttagccaagcaggatccattcctttgatgttagattttggaatgacaactgtgcaataattgtacatgatctattgattattttgaccttctaattggacttctttttcttcaaacaaaaaagagatggacatgatggctggtgaacttgattgaattaatttcatgggatctttcctatgcatttgcatctaatttcagattaattaatcattatttgatgatcatagattcacttgattttcaatttctttttcatatctttgcaggattatacaggggaga

SEQ ID NO: 44356 - DNA, 347 bp, Manihot esculenta
  Intron number 4 from transcript cassava4.1_001110m (locus cassava4.1_001110m.g) derived from phytozome v7.0 (chr-ID scaffold05875; pos 1316170 to 1316516 reverse strand)
gctcatttggctcccaaaacaaaggtgtgtatctttaattggtattctcaatcattataatcatatccatctttggctaaattgattgttcaagctctttcctgaatatccattaaactgagaatgttaatcaacttgtaagaagattatttaaaaacagaatgttctgagtatgcagaaccttattacagatacctttgagatctaaaaagcaaagctgattttgttctgtttaatactagtcgttttctgatgaggactcccaagttccaaattaattgaatatattgcctatttgttttgattagtttccagtactcaccatctccttatgcaggtcctcagag

SEQ ID NO: 44357 - DNA, 1013 bp, Manihot esculenta
  Intron number 1 from transcript cassava4.1_011724m (locus cassava4.1_011724m.g) derived from phytozome v7.0 (chr-ID scaffold11297; pos 532893 to 533905 reverse strand)
gtccatttctcatagattttttcaccatcccaccggtgagcaagttctctaattgtttgaacattgtgtgtttgtcaactgtctctattgccttggtcatctgatttttcggtttcttgattgaaaattttcagtccagtggtgcttgatttgatttgggaatctttctgtgtatccatctctttttctcacttctttttggaatcaaaccttggggtctgttcataataactgtgattttttttttctcgaacaaatctatcttgttcttccgaaaacttttgctttgtgtgtttcctgtttctgtgttgttgttttcgattggctagatgtagaacaagtttgaaagaaaatagtactttttcttggattttattcttcaactcttctcttgcttttttattctttattttatttttttgaaagagaatagataagcgagagctgttatattcattgattttcaatgtcggaagatatatggagaacacccttttgccccataaatttgttgacttaaatcactgttgggatcatggtttaggaaacacttgatcaatataaatcagcttttagggacaaagactggagattttgacacttttgcattaatttctgcaagaaaaagttcagtgtcaaagtattattgtttcaacacaaacttttcttgctaagaccattgcttggttgtcttctttattcccagaatttgacaattatattcacctcccactttgggttttactaatttttaacatcatgctttaagctgattctcgtagttgtctatgtgatattgttaatgactagatgatgagatgcagtgtacttcttctataattagttgatagtgatataatattatgacaccgattattaagcttatagtgttctaagcagaatgaattatcatgtcctcattctcctgattcttctcaccataaatgttgaattgtttgttttatatagtatcacttttaagcataattttgcagtgggatattgctcctttt

SEQ ID NO: 44358 - DNA, 204 bp, Manihot esculenta
  Intron number 1 from transcript cassava4.1_013520m (locus cassava4.1_013520m.g) derived from phytozome v7.0 (chr-ID scaffold05694; pos 91352 to 91555)
ctggaaattctgctggaactgtcactgcttactatgtgagttcgtctttaattaataaatttttgtataacacatggatcaaatggttttttttttcttcattaattagatagtaattgatcccttgttaattataagttaagtatgtaactaatgaattatttggtttttgaatggttcagctatcttccttagggtcagccc

SEQ ID NO: 44359 - DNA, 1030 bp, Manihot esculenta
  Intron number 1 from transcript cassava4.1_019570m (locus cassava4.1_019570m.g) derived from phytozome v7.0 (chr-ID scaffold12525; pos 259046 to 260075)
ggtaagacttagttttccacctctctctctctcttgcttggcttcctttgttgcttttctggtttgtcgtgtgttgtcagttcgtggattgtgttttaatttccacggcagaatcacaattttgtgcttgaggaaatgtgaagatttctaacatagaagtcttttgagtaaatgagaaggtgttaaatttcagcttctaacatagaagtcttccctttggtttatttttcacaaaggtattgcttgttgctttatgtttctgttctagaaagctgcatctgcttatccaaagaatttgcttttgttttccctctttgagaaacaaatatggatctttctctgcagctaattattgtactgattataccaatttgattcatcttcttttgctttcaaaatttattttgacctgttatttttgttgttttcttgtggcaagaaccttttttcccttatgttctatgattgacctgactggttttgggggtatttcagatttcatgttattccccactaaactctttaacttggggcttttttttttttttgtaaaaggttcctttctaagtgaaaagagatatattcttcttcttcttcctttaaatgtcataaaacaatctgtattctctctctctctttctgcttagtacattgttcttgaccctctatatgtttgttgagaaactggatgaaaaacaccctcccaaagtttatctagtggattagactggctaaaaattctggttttggatgctatcgtccaaagaaaatgaatgttttaggtttgaactgttaatttctctgcctctattttctttcttgctaatattggccaagtgattccctgtctttttgagtcacatttttttcattgtaaaagcacaaagagataagataaaataatggggacccttggaagttcaaattaattaaagtttgccttttttgttctccggttttcttatttggtacatcacccaattattcttttgcaggaaaagggttgggtttagtttattaaagtgaagct

SEQ ID NO: 44360 - DNA, 667 bp, Manihot esculenta
  Intron number 2 from transcript cassava4.1_022721m (locus cassava4.1_022721m.g) derived from phytozome v7.0 (chr-ID scaffold10504; pos 25787 to 26453 reverse strand)
ctcgacgaatctgctcagttaacggagaaagcaatgtaagtgaaatgttgtagttaaattcaaatttagccactttttgacaatttacaaaacccccattgacgtagccaaaatggttggtttcatttagggaaattgaagagaaattagggaggagagatggagagaaaagcaaataatataaatttaatttacttttatattatttttggatagattattagaatagggagatatttctgtttttaacgaaaacatgagaaattactatgatattcttacaagttaagaaagagatacttcagaaaaacgagggcattcaaatatttcaatataaataatactcattttcttcatttctcaccaatttggggagaaagttttttggtttgaacgcaaggagtttagacatgtaatttctcttcgtttctcattttttgcctttattttcttttctattatctctatttccctcaatccaaaccaaccgttagtttagctgaagattaacttgataatcataggcagtgatgattgaccgtgctattagtttatgagtatgcttctttaccagttgcttttgatattaagttgtgttccaaacatgcttatgttttgtatttggtattaaggccaggcttatagttcagatcctgacatctccact

SEQ ID NO: 44361 - DNA, 349 bp, Manihot esculenta
  Intron number 1 from transcript cassava4.1_012200m (locus cassava4.1_012200m.g) derived from phytozome v7.0 (chr-ID scaffold05875; pos 2337537 to 2337885 reverse strand)
cagaaggtctcagaaaagctgttgaaggttgattatgcatatcctccatctcttttattgttcatactaatcatgcatgttactgttttgactttttttttcccctgtaaatatgaacctctttcagcgcttagatgtttattggaattgatttttgatctctgatacatattactgcctatttcctatcttttgcttgatcaatttctttattttttccctaactcatcttattcccttttgcatttatgggttaaaatcctcctatcaaacaagagatgatcgagggaaaaagaaaagaaaaaaactgatattgggtattttctttttgctgttaaaacttgatagg

SEQ ID NO: 44362 - DNA, 738 bp, Manihot esculenta
  Intron number 1 from transcript cassava4.1_033045m (locus cassava4.1_033045m.g) derived from phytozome v7.0 (chr-ID scaffold00363; pos 15593 to 16330 reverse strand)
gctgtgtaacccgtagtcgtgatcttgttgctgtggttagttttggtgtcataaggaagaaaaggatgcccagacagaggagaccatcttcttctattaatcaccttttctctcttcctaccgctttcaccaccaccaccacttcgcacgcgtcttcctcctcttcgcatcacctttccacttcccctgcacgtgtgagaatttattttaattttaattctcatagctcttatttctattacatgttatttttgttgggttctttcattttttttttataatgacaattcatgggcaactgttgttttactcagagctttttaattaatttcatacattaaacaatttattttttttcctactcatctttgttgtctattatttttgtctttaaagcttaattttccagttaaaaaaaaaattctttacattttgacttcattgatatttatagatgtttatggaaggattcatgaattttggaagaatttaagtcagaaaaatttccaaaatcattacaggcatgtttaaaaaatatccgcaccttcaattaggaatttgaaattagaattaatgcaaagatttactatctgtttgtggattcataataacaattttagaaaataaaatacaattttatacctattttataaaaatcttcatgatgatgactcccaagtgaaagtgatcctattctacacaggttattgatcaaaggagattgagtttcctctttca

SEQ ID NO: 44363 - DNA, 779 bp, Manihot esculenta
  Intron number 1 from transcript cassava4.1_001388m (locus cassava4.1_001379m.g) derived from phytozome v7.0 (chr-ID scaffold03806; pos 25140 to 25918 reverse strand)
acgaccgcgacgacgaaggtatggtatcagttttttgtttgcttcacttgagattcgatctcgttttgtaatcaatttcatatcttgatttgatttcatatattcattttggagcttaatttcctaatttttggtttaccagctttagatcagtcgttagcttctagatctgggtcatttctccaatattttagacgtttgcttgtgtattccatgacaataggtcaattttttgagttcatgctcttcttttagttgattttatgtagttttggttgatctgatccctgttcttatatgtaaacattaaagttggtggatggttttcaaatccctaaatcccagtgtgcattgtttcttctatttaactctgtttaaacaagttgatccaatgtggattgtctaggggcttgtatttttttttatttcttaatcgatttggggctgtattgttcttttatcgatagtgtttgttagcaagtgtcatttgtaatcaggtaagtttaaatgtttagtagtttagattctcatttccagtgatctccttatttgctgatctgcactacatctcaatttagattctttgtatgcacatggtatattgatttatttaatcagtcaatgtagattgtttagtaatctggatctcctagattaaggtgttatttcaatcataattcagtttgtagcaagaagccataaaatgcataattctgtactttttatttatttattttctgacagcggagtattctccatttttggggatcgagaaggga

SEQ ID NO: 44364 - DNA, 468 bp, Manihot esculenta
  Intron number 2 from transcript cassava4.1_024050m (locus cassava4.1_024050m.g) derived from phytozome v7.0 (chr-ID scaffold06582; pos 104780 to 105247 reverse strand)
accccaagaacagtgataaaacctgtactattgtggtatttgttatagattcggcaaattttcttccttctctttggatataattttctttcatgggttttactttttttttttttttctttttggtgttaatgcttgatattttgctttttattattgtgtatggttgtttgcttaatgggttttatttattgtactttacttgctagtgtttgatatttggcttccatttgtgtcatttttattttatggatggtagagattgtgcttcatgtggtttgtgtttgatattatccttctcttgttatcttttgactatttattggatgtattactggatataatgctgctgcttcttttctttttggctttgcttcaaaatttttgtttttggtttttgaaatgtagattgatattgctttctctattttaggttcctaaggggcatatttggatagagggagataa

SEQ ID NO: 44365 - DNA, 467 bp, Manihot esculenta
  Intron number 1 from transcript cassava4.1_031137m (locus cassava4.1_031137m.g) derived from phytozome v7.0 (chr-ID scaffold04324; pos 87311 to 87777 reverse strand)
agcttgggttttggttctttcagttccctttgaaggtaattatcaagcttcttcttcttttctttaaggactttttttcaaaaaaagaaaagttttcgtttattttaatattattattattattattttcctttgaaggtactcctatgaactttgtctaaaacaatagttgaaaaaaggaatgtatatttcatttaggattaatattttttaaaatttatattatatataatcaaatttcaagacattatatatttttgaaatgaaattactatttaatcccttgaatgttgtaattatttataattatatcctcaattttgttattaattaattataattgcatccattatatccacttcacatgaaagttaaatattgaaagctttgatttctagattatattataattcttgcttttatctcatgtctttttttaatatgtgattcctaattagcaggcaaaa

SEQ ID NO: 44366 - DNA, 1046 bp, Manihot esculenta
  Intron number 1 from transcript cassava4.1_003883m (locus cassava4.1_003883m.g) derived from phytozome v7.0 (chr-ID scaffold05161; pos 374122 to 375167 reverse strand)
aaaaccctaatccatctctgccttctcacttaccggtcagctcctgaaaccctgtaaccctcctttttgtaccctagtgtgcttagtgggtgtatcaatgtcgcatgtgtttttgttttatggttgatgggatataaattaatggtttttttagcttgggaacttcatttgttaatccatcaagtgaaacgaattcgattgaagcttgttactttacagctcttctttgggttgtttatatttggggaaatgggtacaatgtaatttattttgtttttatacttctactttgtgaagtttcgtctgaaattgagttgttttgctggtcttgttaatggatgcttgtaatgagttgtttatatagggttcgttcctccatttctcaattgagttttatgcctttttagttatttgaattgagctttataacgttggaaggaaattgctctgtgtactgtagcatagagtttaatttgaaatcttgataagtcaattggttactagaccaatttgaaaatccagttattggtgactaaactccatgcgttggtacttgaacttattgataattaatcagttgaatcctcttgaaatgattcttgtattgtttgtactcaatcaaaccttcagccatttctttaaggcttaatagggaataaattatatacaagaacagaaatgaattagattatcatacagtgatgctattttgggcttgatttctgtttcttttaaaatgaactttttaaatgttaaaataattggattctttcacttataatgtttatcttcccaaatatgagaacttgacccggaaaaaaaagaaaattgaattgaatcgaattcttgcaaatttgtagtttcgaaaaaggcagtgggaaaatttcacttctgtttgatctagactttcttttgaggttccttgattatcaccctctcatatcttttatgtaatcacgcttgttattattgtgttttgagaacttttgtcctcttctgccaaagttgaagcttttaattggttgttctcagatatcaaacagtaa

SEQ ID NO: 44367 - DNA, 998 bp, Manihot esculenta
  Intron number 3 from transcript cassava4.1_007236m (locus cassava4.1_007236m.g) derived from phytozome v7.0 (chr-ID scaffold03221; pos 216708 to 217705 reverse strand)
ggagctctcaattacactaagtcgggtatttccctatgcgtgctggttttccataaacttagttatagctcacttattttccatcaatttgtttttgaatcactaaaatgatcaatttaattaattaattaatttatttaaattttcccttgaaattagcataaacatatctacaaatttcttttccagcaaggagcttcgttattctttcattattgaaatttttgttctagcctaaagaattgcgatattatttagcagcttggtgaatgcaactgagaagagctttctttgtgtttaagggtaaattcttgtggggtttttacttgagactataattcatgtcttttctagtgcacttgggaaccttttctagagcctatcacaagcaatattaactggagggaagaaaaagcaaaatatcttcagcaagagaaagtggtcttttaaactcatttaacaaatattttcaattatttagatgttgtgatgtcagttgtatgaaaattgaaaatataattttttaatctttattttgggattcatcttgatgaacttttcagtcaccttcaccttttttccttttcctatattgcttgtggaaagcaataagaaatttatttgtaggtcaaggagattcttgaaattgaatagcaagtagtcccatatattttttttatttcttttattgggaatgtaattttcttatgccgtccatgcgtgaattatcatttggttttgtacattattgtatcatattgttgagaaatgaatttgatttcgctcgcagatgataagttacttgagaatatatggaaattaacttggatggttggaaactataactggattggtacatgtagtttttttgtttgttgtataaaggttaaccaaacctttactacctttttcccagttgtaatattatagcttgacaaagaatggttaattaatctttttccttattttgtgttttaggtaatattgcaaactatctg

SEQ ID NO: 44368 - DNA, 662 bp, Manihot esculenta
  Intron number 1 from transcript cassava4.1_004504m (locus cassava4.1_003648m.g) derived from phytozome v7.0 (chr-ID scaffold04251; pos 455816 to 456477 reverse strand)
tttgcttagggtttttctatcgtcgtctttctccggtacgaactttatctcatcgccaacttcttcaatccttctttttctcttcagattatgttgttgtttttatgttttcttgtttagggtttccttctactgtttcactgctaactcgttttcttttccatttgtggtttttatttgcctatatattttcccgcgaatttaacaaggaattgaagggtttatgcagtattttgcccaaagttagctgaaatgagcaagttgaatttttatttcgctcagtttggttttattcataaattcattgtaatcatggttcgatatcgtcttcagtttttcttttagaattgttgtataattgtatataatctgatttctgcatctgtataatttctcacagaaatttaattataaaattcttgtaatttgaggccaattaaatagaattacctatttatataagatattaatatttattggaaacttttttaatactcgctgcatgaacattacaaaatcaaggataatttggaaaactaattcgatgttaagtagcataagtgttttaactgtttgcctttgtttatttttatttatttatttatttttgtttccatcaagacttgttttttgtcctcagctggccattgatatttggaaaa

SEQ ID NO: 44369 - DNA, 587 bp, Manihot esculenta
  Intron number 1 from transcript cassava4.1_025833m (locus cassava4.1_025833m.g) derived from phytozome v7.0 (chr-ID scaffold06278; pos 585048 to 585634 reverse strand)
aagaggtataaaaaaaaattgctcataaatgggttaaattgcactgatctgacaaggaagaagagtaaaaacgtgaagcgtgaaacagagaaagagagagggtatagagtagggaagggaagtgtccagctcagcggagatcactgagtaatttctaattggtccagacttcaatactactctgttcctctatctctctaaatctatatctatttggtttctctttctatgtgtgtctcttctctctgtgtcgggagatttgagataataactgtcgggtcaactgtcaaaaactaccttctttccaacagaatctgcttacttctccccacctttctctcactacccacctctctctctctctttctatacctattgtctttcactctattctacgtatgttgtctgctttctttacatgtctctgtctctgtctctgtctctgtctctgtctctgtctgtcagcgtcttgtttccccccaatcgtacattttgcgtgcttcatgaatatgtttattcgtgtttaaggttgttcctttttgattttgacaggaaagggaaagaaaagttgataccaaaaggcagga

SEQ ID NO: 44370 - DNA, 341 bp, Manihot esculenta
  Intron number 3 from transcript cassava4.1_000892m (locus cassava4.1_000892m.g) derived from phytozome v7.0 (chr-ID scaffold05875; pos 285987 to 286327 reverse strand)
agcttgaaggtatgtgatggaaatagttaaaattctgattatttgtttcattattagctgctgcctaattttttattttcatttttattcttttttttttctataataacttgtatctcatttctgtgggctccttcaaaatctcttggagcataggccttggagaaagctgttggggacaaaattccaaactctgctaagaagatagaacctattattaaaaaagtatgtgatcgaactcctagctgctattagtcctagaatagtacatggccttattttgtttaatttgactttgaatatcagattgcaactttccaagctccaggaagatatttctt

SEQ ID NO: 44371 - DNA, 791 bp, Manihot esculenta
  Intron number 4 from transcript cassava4.1_028261m (locus cassava4.1_028261m.g) derived from phytozome v7.0 (chr-ID scaffold12865; pos 551696 to 552486)
gtgttgttgaactctttcaatttctggaggtaatctcctctttcaatgacaactcaagtgttctggaaaatcttatgagctatttttattatttcttaatgacacttttaaaatttggtggccatggtaatattaggacatcaatgggcaagtttgatatgttacttttttttaataattgtgttgtagttctattctaaattatatatatttttaaaatcacagaacaatgccttcaaccatatacatcttgagctcttttgaaggtttaaaaacctcttaaattctctccttagttatcctttccctttagatatacatactaagcgaggaaaaaaaacgctttccaagatacctcatcgatgcactcacccttcagccctcccttcaccagttaccatttccttccaagccagccaacagctcatctattacttgaagaattattcatccagtacccaaatattaacttatccactaatagttttgaggatattgacccacagtctccctctgaaagtggagtacctgtttatggtctataataagtcagaacttcaaatttctttttcctgtataatccaaacatgtcacatcattcaattgaacactaaagaatgtgaagaagaacatccataatgtctggtcccaatccagctgggcatattaatcctcaaaaagatactgtttctcttggaacacagttttaattaaaatccatagcattacttgctttttgcctctgtgaatttgcaggaaagggacattccagttcttatattttcagcagg

SEQ ID NO: 44372 - DNA, 744 bp, Manihot esculenta
  Intron number 3 from transcript cassava4.1_013751m (locus cassava4.1_013751m.g) derived from phytozome v7.0 (chr-ID scaffold08359; pos 2299636 to 2300379 reverse strand)
ctaatcaaaggtataatgcttccacttctttaaagtccttcacttgccccttggtctctttttaacaagatattattagattatatatatacatatagtgctttatccatccttttgcaagttttatcttccacacatccccgttcatttttcttttctctgcttggagagaaggttctattctgaaactaaataattttcaattgtatgaacaagtatatgtacatactttgatgtccttctgatggatgtttctgttcattgtgtaaaatgaactacatttgtattggtgaaattgaatgaaactacccctcttaaccctgaaggatgaatctgacaattttttttatgggcatgtgctttatcataatatgcttctgtatcaaattcgattgtcaaagcaatggcaaactatacttagccatcttatattggtggatggcaagaaaatttgactgataaagttcagttgatttaatggtaaaagatgggaaggggttgcagtttttttattgatgttttttcctttctccagaatgctgcacgttcgactatccaagttctatatctttaagcatattgtaattcttttttccatggaccaattgtggatagtcttttgttccaaaagttctttcttgatttcttcttctttgataattatgttgattgtggcctatgagttcataacccatgggttttttcatagttatcctgcaattagagccaacaaagcaaatccac

SEQ ID NO: 44373 - DNA, 916 bp, Manihot esculenta
  Intron number 1 from transcript cassava4.1_004496m (locus cassava4.1_004496m.g) derived from phytozome v7.0 (chr-ID scaffold05875; pos 2029397 to 2030312 reverse strand)
cgtttccactctctctttttccactctgtctttcggtaatgctttctggtttgaaatcttgattgccatgttgtctcttgattatactcttttgctttgctttccaatttattggtttctctttcttttctttttttctttcttatttttctctccctcttttttctggctatagattttgttttgatcactgtaatccataacagacatttattttttctttttttctttttttttttttggaattgaatttgtctgccttaattttcttttaagcaatagtattactagtatttcaattacttttcaggaaaacgggtttgttattgggttatctgtttctttactattgttttcattgagtcagctttttttcagcagcagactttgattaaggagaaatttttaattttttgccttagttttattctaatctgtaaagattgaaccacattgttgttggtaggagtttgtaactttgattgtcatgctgcctttttcctcaaatgtgcccttattgtgttgacaaacagtctctggcagcagctccctctctgcttttcttttctaagttcttccggaaatattgcctcaattgttgttggtgaagatatcttgttctcgaaggacaaaaccccgatgttttacatctttagcttttatgtggttatgttggcagtcttcatgaccattcttttttggggatgacttagttcaatgatcaattgaaggccttttcatttctcattttcactactcggattctactttatttctaccttataaattcttaacttccggttgtcttgcgcatggatatttatatcttctattgttgttttgtttgggatgcttataagatggaaggtttttttttcccctcacagttggttcccatttcccttgtagagtatat

SEQ ID NO: 44374 - DNA, 594 bp, Manihot esculenta
  Intron number 3 from transcript cassava4.1_013378m (locus cassava4.1_013378m.g) derived from phytozome v7.0 (chr-ID scaffold04716; pos 17334 to 17927)
cgagagcgccgagaagatctcttttttcttcgaaggtattgaaattctacttcttgaagttaatttctgctttgctagggcggtgctccttctatgatttcttttacccttttctttcccttggttagtggtagaactctttacttttcctagtgcaaggaataaatagttgcagctgttcattagttgttatatgtggactgtttaaacagtggcattaaagcacagtgtcgtgttgtaatctcgtttgcaattggccttttcaaattcaactagggtttcctacttgtaatgataataaactccttattccccactcctttaaaaagcatttctaatttgggttggggtttagttgagtaataatattattactaataatcaaatgaaggtttatgtttaagcgttactggtgagaggagataatgtttaatttttttttcttcctgatctggaggacctatttactttgttacatgacattttaattttctagtgtctttagttaattcttgattcttttgggagatgatggtttcttgtaagctgacaactggcaataataatatttggcagagaaagcatttggagagg

SEQ ID NO: 44375 - DNA, 684 bp, Manihot esculenta
  Intron number 2 from transcript cassava4.1_018022m (locus cassava4.1_018022m.g) derived from phytozome v7.0 (chr-ID scaffold03581; pos 775654 to 776337)
ctacctcaccaacttcaccagctacgccatcaacggtgctcactctctcggcctctttagtattattttttactttgcctgtttgcttgctgagaaaatgcttgaaagggaagtgactacctctctaaaagatcattatttgtatgtatatgtgtctttttgcttcataatttgaaagaaaaaaatagaaaaaaatcgaatgagttacactaaattagttatgaaaagctctagaaataaaaatttatagatttgcaattgtttattttctttctccctttgcatttttgtttttatgcacatactttcaattatcttcgttttccatggtagaaggaatagtcctccatttggtttttgacaaaccagaataagcgaaatttcgaattgtgaaattcttttaacggttatacgcttgcttagttaaatgaacgtctcaatttcctttaattctggatgaagctagaagtttttgatctaaatgttgacaagcttcttctgcctacatattttcagcaattcaacagagtcttgagcttttctcagttattgatctatatcatgtcttattctatttcttaaacttaaattataatttctattttattttaggttgttgtttgatactatctgtttcttgtttttacagagtaggtccccaggttcaaggacaagaacaacaca

SEQ ID NO: 44376 - DNA, 672 bp, Manihot esculenta
  Intron number 1 from transcript cassava4.1_022513m (locus cassava4.1_022513m.g) derived from phytozome v7.0 (chr-ID scaffold10963; pos 131206 to 131877 reverse strand)
aattttcagttgcggcaagagagtgatacccaaaggtatctttgggatttcattttcctttttttttcaaaaaattactcgcctttcagcatttttgttaggttgtcagcaattgaaatcgataaagaatccctaggaatgctctccatccagagtccagtgtgctatatatttcacattttgtttttaacatgcatttgctgagttaatttgtgaatatagtcatttgagttttagacttaagtttggtttggtatttgatttttaattgtggagcgatcaatcttattattaagttggtattatggtctcagcgtttcattttagagtttagagtacttgtttaccttttaccttcatattagctcttggttatattattgacgttaatttaaattggcggttttggccatggatttgatgcgtggaagattttttttctttcccccccttttttctggctttgaggctttcattttgtgctggttgttgatgttattggacgtataccatagtaaagggatgatatacaagttatgattgtgatcgatgtatgtttctctagaaaaattcaaaggcgtttactttttagtttttgcttcattttgcttttttttttccccctttcttgatcagctaatactatattttgggggtttgatccatttcaga

SEQ ID NO: 44377 - DNA, 919 bp, Manihot esculenta
  Intron number 3 from transcript cassava4.1_010546m (locus cassava4.1_010546m.g) derived from phytozome v7.0 (chr-ID scaffold06932; pos 46251 to 47169 reverse strand)
caggtagtctttaattcttgcagtgagaggacttatttagagttatatgtgggccatttgaagtagatgtttagggattcagatgaatctgttctcttctccttcattctgcatgtcattatgttaatttttatttatactctatattttttgggatgcttttcaatctgaatctcatgatgttgtgatgcttactcattgatcatggtagataaggatcacaggatagaagcttctagtttccttttattaatcagaggtttaactttgaattttgtgcagaccatgtatattctaaagcaaaaaggttgtgcctttctaagaaattatatcacattgcatttattttttgtttaccaaagaacctgagttgctttctcaaaccactctttgagtggaagcaccttcatctcctaagtcagaactctgaaattgcatctttgaggccactgtatcataacccttgatgaagaaactagaccataacaggatagatcaacttgtgggcattattttgtctgcaattgaactcttgcaaagagacttattggtttagatcttcttttattgaccagtttctttttttgcttcaatatataaggcctttgtgattctttgaatgctttattctcttttcttatttataaagattctaactatttgtgcttgcaacataggagattgtttgcagagagaaggattgcatgcatgattattgtctttttaaatccattgctgtcctttcaattattacgatgccattttcaattaatgtgcatgagtcatggagtgaatgttaacttcgattgccagtctaatagttgtttagtgtagtgaactttgtttgttttaatgttctatctaaaacatttctgttatctcagactacattttggatcagctgaagcatcagctgggc

SEQ ID NO: 44378 - DNA, 770 bp, Manihot esculenta
  Intron number 4 from transcript cassava4.1_005072m (locus cassava4.1_005078m.g) derived from phytozome v7.0 (chr-ID scaffold08359; pos 1635522 to 1636291 reverse strand)
attttttcagtaaaactgggtaagattttagtatgcggttttttctttgtgttcccaatttttttaaaaaaatgcaattatctggtcagatcttagtatgcactaatattttctaagtcaatctgttgatgcaaatatgtcactagtgtttaattaacagacctcattttctgttcaatttttgcctacattaatattttaactgataagtatttaaacttgtacaatatatgatattgttattatgaagcttaattgaattttttttggatttgatggcttcaccatgagttttgatttcttggagtcttccaagcatgttgctttgttaatgttcttgagcaaaatatctctatttcggacatgcaggtgccttcctgcaagcaaataatatgtatttggtagaaatgatgtgtctgttcattctctcggtaaattaatcactcgcagtcctttttcaggtcatggcatgtgccaaaattttctaccatctagactgttttcagacatctccatacttatctcactcattcacaatagttatatcacatattccaatttgagacctcccaaaagaaatcccaagtctttattgctatcttccttttgcggtcttgcacttttaagtttcatcaatgcatatgatatatctcatgccaaaatagtgggcctttggaagatattgaggggaggagggattcaggtgcttgcttatggagttatcaccttagaaccttgtatctgcagggccattgtgacatttagcttaa

SEQ ID NO: 44379 - DNA, 554 bp, Manihot esculenta
  Intron number 1 from transcript cassava4.1_000093m (locus cassava4.1_000093m.g) derived from phytozome v7.0 (chr-ID scaffold00435; pos 118419 to 118972)
agctcttcattagaggaaacaagtaacttttaccgatactattagctgggttgtttatttaaacttaatttttagtaattattttaaattgaaatcttacttctggacagtgaaaatgggttggttcagctccatttagtagtcttacaagctaaattgtaccgttgaaaatgaccaaacaatctgtatggaactgtaccaacatgaagtatagtgaaatccaattgaattctgtattttagaattcatatgcattctacatttatagttgtgattttaaccaaacactatgcaactgttaaaggctgtattgatggatatttatcgatctctattccctcagcctcggttagaaaagagaaacaaaaaattgaaaaattttaaagtcatttttatctacagtaacggtatttcttgtaaagtttgtcacaataatattattttttgaatttgatagctggtaaccttttttttgtctccaaatctggctctactttcttgactacttgcctggatttctcataattttctcttctcatgtataacaggattat

SEQ ID NO: 44380 - DNA, 820 bp, Manihot esculenta
  Intron number 2 from transcript cassava4.1_013881m (locus cassava4.1_013881m.g) derived from phytozome v7.0 (chr-ID scaffold05363; pos 190825 to 191644)
tacagagcaatgtaagtagcatcctgaggctatgatttaaagcaccattttgtttgagctcttgtgtaagctgaatgctataactgcaggttaaaagcaaaaacatatagtttgtgcatgaaattcttcattattctcatatagcaaggaaacatcctcaaatattgctactcacatttccaatgagatttgttatctcagttaatgttcttttttatttttatttttatttttatttttatttttatttttatttttattttttttttggggggggggatgggttgcatgagcagcttggcaaatccttttctcccataatcataaagctatattaggcattgactgattgaaaaatgatgtgctgaagcttgacactgcctgtatttcaattttatttgactcaatttaatggattagttaacgtagggaactggagtttgaagataatggtacttgcaattggcatggtattatttctcaaaaggttgatgtgaagagtcaacatagcctaggaaactttgaaatgagtttctttccagaaaataaaattaatttaatctaaatgcttattaagaatgagagatacatactaattggcaattgctgcttacaacttgccagacaatatctattattatgttgaagtttgataggcattggatttggtgccttcgtgctgttgttttttcctgctttatggatgtgcaatgtgttctcttcagtattataattcaaggtatttcactttagtttttcccttttgttttccccaaaataaacagataagtagatacttctccgatccccaatattattt

SEQ ID NO: 44381 - DNA, 533 bp, Manihot esculenta
  Intron number 2 from transcript cassava4.1_010811m (locus cassava4.1_010811m.g) derived from phytozome v7.0 (chr-ID scaffold04616; pos 35071 to 35603)
tattttactcttcattcattgggaaattaacttaggtatgcttcgaaattcccttcatcaactctatttttctttctccaagctttaatttcctatttgcaatccatctctcgccctgatttccatccattttgtagttgagtagcttcaattttgagcttccttaagaaaaaagaaaaagaaaaagaaaaaagagaaatcgtgaacttaatctttataaaaaggtaaattataatcattcgctggttggctcttcccctttttgacctttcccaattactttaatggccagtgagcttgagctacagaacccacctctaattcatttgaaatgcgattttcctttttgttttcgggaattttacacagtttcccagtaaccaaacaaaatttacaatgaaactgcagcggcccacccacagaattgaaaaaaccccttttcaataccactcctaatacttgcactcataaatttcctttttttccgaaattttccaggaaaataaagaaaggaagaaacaatcattctaaag

SEQ ID NO: 44382 - DNA, 639 bp, Manihot esculenta
  Intron number 1 from transcript cassava4.1_029480m (locus cassava4.1_029480m.g) derived from phytozome v7.0 (chr-ID scaffold11784; pos 229189 to 229827 reverse strand)
aaggctcagatttgggataccgccggccaagaaaggtttcattacctttttactttcatttcctttgcattcttatatctcctcattgtgtacaatgacatctttttagatctcgatccaattttctttcttttttggaattaaattgatttccttttgcttttgatcattttggtgtggcctagtattttttataatttgtataaattccaggcaattcatttatagcaagatgattgtagttaatgttcaaaatccattacaaccaaaaatgtgaaagtactgaattagagccaagacaataaagcaatgaattcaaatcgcagacatgtctatggtgaacataattaccgaggctgagaattgaaatggctgtagggaaaaattaaaggtgattaggattaaggttttaagatcagaattgaattgggagagatgattatcctgtcattattttttaagctgatttcttgaattaaacacatttgcttaatctgcttaattttttttttaaattatttgtttgtatttctttcttcattctggttgttgggatgatgatgattaataatcacccttgtttcaatttgttcttttggcaaagatatcgagccatcacaagcgcatactatagaggtg

SEQ ID NO: 44383 - DNA, 701 bp, Manihot esculenta
  Intron number 1 from transcript cassava4.1_009750m (locus cassava4.1_009750m.g) derived from phytozome v7.0 (chr-ID scaffold00206; pos 270131 to 270831)
acttctccagcttcattcgccagcttaacacttatgtaagttctgcaattgatcaaagacatcaatttttctgctatttctgttctttgtttttaagtacctcatctgggttacttctgtttcgattttttttttgaatagttttcttttgagattgcaaaattgggttgaactgttatcttttagggttctactgtgaagtaagtttctctttagcggctgattcttctactaagatcttattcaaagtgggttttagatatcttgtgatgggatttcaatgggcacttttgtggctgtagatgctgtgtttgtgaaaagttcagtgtgtgctgtaggcctgtagtataggattccccctccccaccccaccccccccaccccacccccccccggagatatgatcacataccaagcgccatcgatttttgggccagtgactcttaatattcggtattactgagttcttctttcctactctgctcattgcttccaaaattattaattttggctgtggatttcgattactgaaacagttgtgaacaatatgggtcgatttctgttgaatgggatcccaattcccagttgacgagtgagctctttgtttggcctttcacatttgatatattggatttcaatgtataataatcactttcctgattctgcatgatgtagggattcagaaaagttgatcctgatcg

SEQ ID NO: 44384 - DNA, 450 bp, Manihot esculenta
  Intron number 1 from transcript cassava4.1_025219m (locus cassava4.1_025219m.g) derived from phytozome v7.0 (chr-ID scaffold06825; pos 192265 to 192714 reverse strand)
atcttttacgtatgctcatttttgccttagctattcgtctcttttacatggactcttctcaaataacgttcttgttgggtttaaaagagatttggtttatagatggttaatcatctttggatttaaagatcgaaaagtgtttaaaggttaaaaatataataaaaaaactaaagaagagagtagaaaagatgggtagagatgaacataatagctgcatattattattattgaattgtaaaaaattaactacccaataccatttaatgaaaatggttacggccataaaattttaacaatttatcatatgattttttggaaataaagataactttcaaattttaaaaatatttgaattcaaacttgcagctgcatattattattttcaactattctcttatcatctggttaattgcagaagctggaaaaccagtgttgaactgggctaagcgg

SEQ ID NO: 44385 - DNA, 526 bp, Manihot esculenta
  Intron number 2 from transcript cassava4.1_012794m (locus cassava4.1_012794m.g) derived from phytozome v7.0 (chr-ID scaffold05161; pos 12919 to 13444 reverse strand)
tgctaaaggaggaaggtttcggtgccttctataaagtatgcctcttctagttaagtgaattttgaacgttgatgttatcaacttttgatgctcttgaatgatcaaatttagatgttgtcattgtgagatctacttgttacaagcctccttttgtgtttgtgtttgtttcgtgtgaacgtcgaggtggccaattgtaacgctttagaattggcataatttgggtagttaatggcagaaattgaatgttttgcatagaccaggtataattttcgtagttcaaacctcgtctatatgttgatctaatgtgggcttctatataatcgtcagtttataatagatatgcaaattgctggtcttggagtaggtaagatggaactgaatcaatgaaaattttgtggcttttgatttttagatgtgacctattgttctaactgagaattttagagttgcattactcctgtatcgtatctaaatgacaatatttcgatcaggggctgtcggctggactactcaggcaagctacata

SEQ ID NO: 44386 - DNA, 331 bp, Manihot esculenta
  Intron number 2 from transcript cassava4.1_013907m (locus cassava4.1_013907m.g) derived from phytozome v7.0 (chr-ID scaffold09365; pos 171314 to 171644 reverse strand)
cctttccttgtcgccattgtcacaacgaggctgcggtattattttcactgatttcccatctgcttttcctcatttagctcaaagccttttcctttttaccttatcttgatgtgggtgatctttaatttccttttatcttcttcattggagcatgttgagtttcgtttcttatgttctgcttaatctgttgttcggaagcacttatcgatggatgcttaaactgatcttggtttttgttacattgttattcctttaccttaattgctagataatgccaggcaatattccctcgttttatacctgatacatctttcctttgattcattagagc

SEQ ID NO: 44387 - DNA, 899 bp, Manihot esculenta
  Intron number 1 from transcript cassava4.1_026740m (locus cassava4.1_026740m.g) derived from phytozome v7.0 (chr-ID scaffold08359; pos 521011 to 521909 reverse strand)
ttcaaactcgaccgtgcagtgtcttactcgtggtggtatgtttattttcttgcttggttatttctttctcttttcctattttttattgtttgctgagaaactgaattggttttcttttcccattattttaatggagaaagttataaactttgttctgttctatggcattttgtgagaattcttaaagacctatttcttgatatttcaaatattatgtttaaaatcactttatagaaggagctttcggttggagagcgatttgaaacaaacacttgcattgattgagagtaaaaaatttgttggtgtcgcttaaaatcttaagggattttctttgtttctctcttcagataacgtacgcttgattacaattattcattgtgagacagttctgctttctgaattgtagttatttctactattagtttttattatttttgttactttgaagacaaggatcattattttacgttggtttgttggaaacaatatactcatgattccattaccatggaaaccgtcctctcatttaaaaatttagctctccaacccttcaaagacctcgtggatgctggtgctctccaacccttcaaagacctcgtggatgctggtacaactgtcgactatatatatatatatatgacgtgaaactttaatttgctgcagaataggaaagtaactagaatttttcacctccctttttctcaaaaattattttactaccaatgtctttgtggctagctgcgtgacaaacaagaaaatgtagcatcttcttgtaaaatattttctgttgtaatcatatagaaggttgagaatacccttgtctcaagtgaatggaaactaatagtttggagaattattttgatcatgcaggatcatttttgcgcctctgtggctatttc

SEQ ID NO: 44388 - DNA, 903 bp, Manihot esculenta
  Intron number 2 from transcript cassava4.1_008252m (locus cassava4.1_008253m.g) derived from phytozome v7.0 (chr-ID scaffold03604; pos 445636 to 446538 reverse strand)
atttctctattacttatcggtgcctgcttacttatgtgagtacccttgtcagtaagcaagttctgttgtttgtctcttaattgttgtcagatgaccatcttttctacatacaatcaattaagacttgctatattggatggcaaattatggatatttgcttttttaaatttttattgctcagttagaataatttttctccttgtaatgattttcctatggaatatttggtcttcatgaatgtttttattaacctccagttatttattggggcacttgattatattttctttaaagcagttattagactaactaataaacttttccccttattagagagaggccaatacatatagtaatttatctaattataattctagggttttgtgtttatctgagagtgtatgtttcttattattatttttttcttttaaaattgtttccgcatggttttgattttctgttatctttctgtttggatgtagcagtttttagttttcatatgatggtgtcattgtagaatctgaacgtaaaattttgtacttactcctttgttattactagcaaggacaatatgcaccgcaaatgatgccatatcgtcgacacaaagctcataatccttgtattaatgttttgtcttctttcatttgacatcaagtgaacaaatatctgatatctgcttgtagatgctccaaatattgtacactggcttcttgaaatgcttttacctccctaatctcaacttgtgtgtgatcttgcttgatgtattgaaaattgttaaaatgcttgtttgatggttggatgttgtctgtatgggggatatagtagatactaaaattctttaataaattttcattaattgtgtttccagttgggcaagtggagtcctggatcctgaaagcagtg

SEQ ID NO: 44389 - DNA, 935 bp, Manihot esculenta
  Intron number 1 from transcript cassava4.1_032654m (locus cassava4.1_032654m.g) derived from phytozome v7.0 (chr-ID scaffold05831; pos 72962 to 73896)
atatatacaaatttgtaaggtaactgttttttcattttcttgaatctagtgtgcaatttaccaatgagaagatttccatattgcctttttgtttctcttttccctcatttatattatgttattgaagaaccataatctagaagcctaagctattaggaagggccaagataggttttgatctcttcccaagcagctattgaaagttcatcagacttgcaagtgttggctagcgctagaacactatcatttgtactgaactgttattgctaggaagtagaagctcacgctgaaatataattatgaaagcatctcatgatttgaaggatgagcctgtgagaaactgatgctgggttaccatattaaaatcactcagcctgaaagtttaagctaatactaaagacccaagaggatgttttcatctatattttgcatcataagcaattagttgggatttgggaaatgtcatttgtaagttctccatgatgactgatccaatcatgttcctttatgcgtagtgttggtaagaaaggagaacaatttcttagcactgccaggcctgattatcaaccaccactagttttgccattgactagtgaaatggttgatggtgacgaacatcaaagtgcaacaggcagagttggagaattcaagaattttttgactttggaatctgaaggtttttcagaggttggtaacgaaagtgttatttttatacatctttcttctattccacctgaaatcatttagcagagttcagtgaaccactgctaaataattcaacttgaaacaatctaactgatgcatgagaaagcaggttgcattttgtttcacaagtcctttttggttctccaaccggggattctctctttcactactttatatctttccctttgtgcatttttctattgtttaaggctgaggtacaactctatcac

SEQ ID NO: 44390 - DNA, 922 bp, Manihot esculenta
  Intron number 2 from transcript cassava4.1_012046m (locus cassava4.1_012046m.g) derived from phytozome v7.0 (chr-ID scaffold05161; pos 283135 to 284056)
actcgggaaccattcaggttggcctttcacttgcatttgctaatgtctccaatgatttgtgatttgataccactttagtttaatgcatcattcttctttactaaatgcgtggtttatattcatatcaatggtgtttaacagaaaaactaatttgaagtctaatttttgggttattttgctcttctgattttctactcatgtacattttgtttttccatttatgttttgagtaatttttaattggtctcatacttggtcataacatattttacttctacttttaaatagtttatattaatgaagatgaagcccaaagtcatttgggcttatttttaagatgccttcttttgtgctgctgcatgtcatagtctgatagtcaagactatcatcttactagaaaagcttgagaaagctatttgacttggcaaatattatcatcttcatgtggagctcctttttccattaatcacttaagcagcttcatgatgaagtagttggttttgtttagtagctgatgctgtgttatctactgttgctaaatatattaacatgatgtgcatagtcagtttagatgatgcatggaagtgaaggctattttcatgaacctggacatggtgattattagttgcctgttggttatacttttttactgctgagtttcattgtttcttttggcccatgtcttattcttgtttctaatgacttcagagaattgccagttacttttaattaatgtatcagtatgaaattcttatttgatggtttgagcttactattgtttgatctttccatgcttttccttcttagtctgatgagataagttgtagttggattcccaaattccttttcaccaaacggtgatgttcttcttagtttagctttcttttcttgtagctttactgtgagaaggaaaggctcttaa

SEQ ID NO: 44391 - DNA, 765 bp, Manihot esculenta
  Intron number 1 from transcript cassava4.1_006316m (locus cassava4.1_006316m.g) derived from phytozome v7.0 (chr-ID scaffold08100; pos 454886 to 455650 reverse strand)
ttaggctctcctcagtattaacttcttcaaaatctgtaagttctcttctatgcatattcatgcattactttggtctagagttcacacatgccttttacgtttatgtagaatatacaagaagatatagacatggatttattcactctttggtaataaaaattaaaaaaataaaataaaatgggtggctgggaatatctcagcagatgacatgtaaagactccttatccacttctctcttacttccttaaaagcagattgaaatctactagcagaaaaaatggcatgcagccctgaaatttataacttgaatgttagcaaacattgatgaaagagtagatatctgcaaataatatgaaaaatcacttgttttcatgggacttttcaaggattgaaataatgaaatagattctagaatccatcactatcaggatctggatcatcatcatccttagaagaaataaattcttgacacttcagctgtgggatttatatgcaagacttctattgaaatcttgtgctagttcaagattcagtatgctattaatatgttctgggtttgtaatgctctgagaataatctccatggctgcattgatcagattacttttattaggtaaaaattcacaagtgataagctgcagacttgattttcaaagaattatcattaataaaatagtaggagcagagctatttgtttgaattcttcaatatcagttcttgttaacctgcagagctatttgccttcactgaccaaattagttggaac

SEQ ID NO: 44392 - DNA, 1019 bp, Manihot esculenta
  Intron number 1 from transcript cassava4.1_010148m (locus cassava4.1_010148m.g) derived from phytozome v7.0 (chr-ID scaffold04251; pos 474162 to 475180)
ttttcttcttctcctattggtagagtttggccaaggtctgttctctcctctctgcttcactctggtttcacttctctttctttttgcatatttttctcacttcaccctcgctttctgggattttctcgttatactgtttagtttcgtttgtggaattttattgtcatttggttctgatagtttggtttttgtaatcttcattcctcgtgtgaaaatgggtttgaattctttgtttgagtcgcatgttattgcttgttatctattgatggtttcttggaagggggaatccatcagactggtttttttagtttctgccttttctcccctatctgttttgtcatttgtaggatttgattgcatgtagttgtgaatttgtggtattttgtcgataagatttgaacataattcacaagcttataacattgttttcatgaggtgtaacctgtgaagtgaagccatgaactcaaccaggctactatttattattcgagtcgaattagatttttaattgaacataatctattaagcgtccactcaattaagaaacaggagaatagttgttggagaattctcgaatctttcatttgccacctttattcctcttcaaatgacagctaaagcagcttctcgtgttcaattaccggggacttttgagtttttaccttctgggtgttagtaatcattcctgttgctggaatgacaaaaacaatttttaattttttgaatctcatgcatgttttattttcttatatagcgccagttgtattattattactatcctttttcttctcaactctcttcatggctatgatcttttattcgaagtttatttttctttttctcttcctttttctttttcttcccatcttgcagtgcaactgagaattgaaatttcaccattcacaaatgctctgtttgttgatatttttgagaaatccattatgtgtgagaaacctaataatctcatgctgaaccttttcagaatattattttaaggtacaaataatcaatccagaaag

SEQ ID NO: 44393 - DNA, 943 bp, Manihot esculenta
  Intron number 3 from transcript cassava4.1_010148m (locus cassava4.1_010148m.g) derived from phytozome v7.0 (chr-ID scaffold04251; pos 475620 to 476562)
gctcaccctgaaggtaaatgtccctttcttctttacatgaaactgattgaattttcacttctggctgagcaaataaaaatatgtataaatgcatatttatgaccttatttctttatgtatgtttactcttgtgtgtctacatagatacttgaagttgcagactttatgcagacatcagtggatgttagcatgacctagaaaggtcattgatcataggatatgccttagaacagtcctaattgccacatggagcagtgaaacccactacgcttctttctatgtgatcctgacaccagtacaaggcatcaatatggtgatatataattcaatagtttgtgcatagagagataatggactcttttgcacgagagatcacaaagtctgtcacatgctgtggaagagcttttctgaaactttcatttgcgttatcactattccttaaaggaaggttcccgagaggacagttcttatcattctattcaccctttctcattttttcccctttttattatttttttaattaccaaggtgctgatcattgaacaactttccactcgtacaagtatataattaggaagtaatcttgccttggccacaactgtaatattttgaaggaaagtggagctactgtaaatatcttatgctccatgttagctactctaggtaattctacttatcagttgaagtcattgctttgccactaagtttgtctatatacctatgcatacagctcttgtaccagaattttcaagggattacttcagcattaaaatgttcttgcaaacacttcatttcagatgtcctattgttgcttgtttgaaaataagttgctttgagctatgtttcctttcttttttctactgttatgcaactcacttctgatactggagatggaaaaaaaggattgcttataactggaagtcacattccaatgcaggagagt

SEQ ID NO: 44394 - DNA, 814 bp, Manihot esculenta
  Intron number 1 from transcript cassava4.1_007340m (locus cassava4.1_007340m.g) derived from phytozome v7.0 (chr-ID scaffold05875; pos 2239378 to 2240191 reverse strand)
ggaagtttgatttcgaggccaatttaaggcctaaggcatgtttttctctctctccctctatcttcttcttttgcttgctctttctgcttctggctttatagtcaatcttgcaagtgcctgcatgttgacttttctgttttgggattgatctgcttctagattttgctaaatagttttatggaatttaattcgtatgcatcgcattaactgcttggaatctgttattttttgttttggctctaagacattcagaacttggttcaactttgttttgcgaaagatttatcaaaccagactaagaatttgagtgaactctgtgaagtttgatttgaagctgaacgtaataattaaacttgtttgattcttgagacacatttgctttgctctggaaatgtaagtaggatgttacaaaatacatattttataactgtttcatattttaacaacttgaatttagctgaaattgaaataaaattttagtgtagtctccaaattactattaaattatactttattatctaaaaaatgaattataatgttattcttggattaggatgtctagatggtgaacgtttccattttcatttccatggcaaaccaaaccttccctggagttgtgggattcaaattttcttttacttttatgttagtacttattggtttctgcgtttttctccttcttcattgaattcctggggctgttgctgtgttttggaatttatggccatttaataaattgaatttaccattcatctgcttgttttaacttaattgtttcctgagccagtgccgcaatgctattccttgtgcagat

SEQ ID NO: 44395 - DNA, 331 bp, Manihot esculenta
  Intron number 2 from transcript cassava4.1_016879m (locus cassava4.1_016879m.g) derived from phytozome v7.0 (chr-ID scaffold05157; pos 138351 to 138681 reverse strand)
cgtttcgtgcacgaaggatttatttcagcaacgaggtttgccttaatttcctccgccaaaagaaagctgctgaaaggtttattttgttgcagttgtttattaaggcccgatgtgggcttttggctgttgtaatgttgtcccaaacttgatccaagctgacattttgattgagtcagtaaaagcttggaaaatttggtttctgatctacgaagacctaaaatttatttgattaaagtgccatcttattcagctgctttctttcgaatattggtttctagcttatccggcagctaacgtgtttaacggtttaatcttggatgttgctaggaaa

SEQ ID NO: 44396 - DNA, 645 bp, Manihot esculenta
  Intron number 1 from transcript cassava4.1_031525m (locus cassava4.1_031525m.g) derived from phytozome v7.0 (chr-ID scaffold01574; pos 8257 to 8901 reverse strand)
gtctccagcgaccttaagtcgatctgaaccctagtgccggtagcggtctggtttctgggtcgttacaaaattattaatatgggcatataaaatctgttgggtattttttgtttctctttttataaatacataccgtttgttttgggatcttataatttttttgttgtttgtttttgttttacaaatattttttttttcaaattatgaagcaatcaaaacttggtctattttgggtttattttttttattatgggtatgatactatgataaatatttcactattttgtgatattgtgttgcttatgggttggcatttttttgtttgttattgtttctttttgtttatatcatttgcctctctagctgttgtctatttaaaaataggtagaaaacaaatagcccgtagacacccatatcttagaggtcaatcgagtaggcaagccgagcctcctaggtccccctcctcagaccctcctgtatcttcaccttttgagtaccccatagtcagagaggaggatcctgcctttcagccattttctctcagattcatcctgggagaatcgttcatgctaacagtgttcagttatttcattctcatggttttctacagccatttattgtccaaggttgggagcatctcctgat

SEQ ID NO: 44397 - DNA, 620 bp, Manihot esculenta
  Intron number 1 from transcript cassava4.1_024141m (locus cassava4.1_024141m.g) derived from phytozome v7.0 (chr-ID scaffold05875; pos 713845 to 714464)
ggactaagcaggccatcaaggccattactgctcaggtgtttacatatttttttggaactccttgagctctagtatctgtttgtttactgagaaaatcaagtcaaaaggacaaggaaaagagtttttgagttttggttattttctgaaggagcttaataaactaacaaataaaaagagaagagttgaatagcaatgactttttttttttaacatccttgctcaaatggtttgggttttttcatttttgggtggaaacaaaaacccataattgctctttttctatttgtcctttttcttggcaaacaaagggagggcaaggacgtgatttcaaagtttggatgcaaaagcaacatccccaaaccaccaaatggctatcaagccgaggggctaccttctgttccattgatagtttatggaaacgaaaatattcgaatagcaattgaaccattggaacatgggttctattcttctgtatgacttatctgttttcacttaagtttttcaatatatggagcaaaacaatgcaagatgtcttttctaaattcagtttcaagatttttgaagcctttttagccatttcaagattgattgattgttattattatttgcagataaaggac

SEQ ID NO: 44398 - DNA, 805 bp, Manihot esculenta
  Intron number 2 from transcript cassava4.1_018844m (locus cassava4.1_018844m.g) derived from phytozome v7.0 (chr-ID scaffold04653; pos 182325 to 183129)
aagaagttagcgtaagtgcacgctttctactctatgcttcccctcccttcccccgcccgcgggcggcgaattgggaaaatttaattaattgggataatatttaaagatattaaatgcgatactgattgagctggcctgctaaagataaagagagcataaaatttgtcttgttagcctgtattaccggtagctacatacacataaaatttgagtctcaccaaggtgaattgagtccacattagaagttcttctattactgcatctttgtttccagattttgttggatgatccactccactgctgcattttccagcctttacttgtcattatttttttttcccataacttgtcattattttttttttttccataacttgtcattattatgttcgagagaattactccttttccttttctgttgtacttttgacttgatggattcctttgcaccttctaatgccctaaaaactctgctgtgatagtggttcatttctatcttcttttcaattcagactcatttgtatgcattaactttattgtttctgtactagaagaggattatttctcatagttgcatagttcctcttatctttgcttttctctccatctctttctgctcttttcaatgtgaacctctagaaatttattcttcccccttttcaatgaggcaataacatccttgatagcttaggagacctctgcatatctatatatttcagttgctattgtcattgggaaatgttgggatatgtttcttatgtattaaaccttctttctggactccagcctgctaaaaagattagag

SEQ ID NO: 44399 - DNA, 425 bp, Manihot esculenta
  Intron number 2 from transcript cassava4.1_018847m (locus cassava4.1_018847m.g) derived from phytozome v7.0 (chr-ID scaffold09667; pos 33990 to 34414)
caggagaactggaaaaacgttcagcgttagcatatgtaaatagtataaatgcaattcaagcagacaacctttatagctgtcccatttatgctgaaactgtcctgatagtctagcagcattgtaaatcctggattcttcattatgaatatacatgcttcacaaactcatgggttacctaatacgtttgatcgctagattccttttagcatactgcgattccaaaaaacactggtagtaaaacaagagtgccaagtttagaactatttgtgggtgaaagtctgcttggagaatctttgttgacacttattattttctttttgccttttgtatttttccttgtacttctttgtgattacttttacaattatatgcattcaaataatattttttgcttttgtaattttcagtagaacctgaagaagttg

SEQ ID NO: 44400 - DNA, 568 bp, Manihot esculenta
  Intron number 2 from transcript cassava4.1_033827m (locus cassava4.1_033827m.g) derived from phytozome v7.0 (chr-ID scaffold02998; pos 100111 to 100678)
gagagtcaatcattgcggaagcgaccattgaggtaaaaagtttgttttggagtttcagttcatgggtttgttttgcttcatttgctattgatttggttatttgatggatgctacatttcttttgctaaatagcaccactttcagcccttcattttctcggaggatcaactcttcgatttctctagattattccctttaactcccttatgtgggtatttatggttactaaagtttgagatattattcttagtccctcacgtacaagcttgtggttttacattgagtagttccataacatagttttaggacctctctggacaaaaagggccgagtgctaatttcccctcttatgattaaatttcaacacatactaaaaaggaaaaaattgacttccttcatgatccaaatttaatgtggcgttatttcttaagttcagttattaatctatgaaatcaaatgtgtgtatgtaaccatgcatttcactctagtatttttttttttggtcatttaaccttctttacaggcaaatgacattcatattccctctttttgcaggcaaatactgtct

SEQ ID NO: 44401 - DNA, 1012 bp, Manihot esculenta
  Intron number 2 from transcript cassava4.1_016126m (locus cassava4.1_016126m.g) derived from phytozome v7.0 (chr-ID scaffold07005; pos 130979 to 131990)
ctactagaggtattgtctatttttaacttatttaatttttagcattgtaattggaaatttggaattgcaaaagcaaaaccgttggtcactctctttttctgtagggtttacatgcttacattgagatcatctgatgatgattgccgtcataagttatgttattcgtttttttttcccttcctatgttgtagttaacattaacatccaggaacctcaagatttgaacttctattcaagttttaggatgatcgcagggtttatattgatgtagcacttaatgacatgattcttccttgatctgaggaaaatcaaacgcgtttccaatgacaaaaggatcacctagagtggctagatttgaggactatgaaattacatttactgtgattgtgaaacgtgcaaaatgggtttgtcactgaacttaaaacaatggaattaagagctggatcacatgataaaactgtttccttgaaagttactcactgaaagcgagtaaagttgagatgatgtttcatggatctgaccccaagaagcctctgtaagggcaagaatgtgattaatagtgcttcaaaatggagctatatactgaggataaattttatattttcaggggcagatgcagatatagcttctgataattcagctactatgttagtatgcttgaacaggcattctttttctgtttccatctaagaaacttagacttcagtaaagcatcaaaggtagggttaagtcaggcttgtcaaactttacacacaaatggcgagaatttcacttctacattcagctttccacctttatattggtgtaatttaggatttgcagctgttgattctccttgtagcttgagtgacaagctctcctcttgattctgggctcttccagaaccacttaatgctatgggttacattaggatcctttttcattgtttatgttaaactaaaagaaaatgttcttagctggctttcctcttgattcaggtatagagaaggaaattgcagctctccaatcagag

SEQ ID NO: 44402 - DNA, 525 bp, Manihot esculenta
  Intron number 1 from transcript cassava4.1_011262m (locus cassava4.1_009151m.g) derived from phytozome v7.0 (chr-ID scaffold06948; pos 512201 to 512725)
aatccttcctgctctcaggcgtatcgcctcattaggtacgatctttctagggtttgtttgtctttatgattccttaatctggatttttttcagttcttgcctggtttttactatttttctttttttcttgggggacaagaatttaggtttgattttaatctatttgttcctctttttcttttttccatttgatttcgttcgatcatatttcaatggtttttttatccattaggtacaaattctacgttctcctgcggtttctttgtgtgaaatttaaaatttcaattaccgtggtcaaattctttatctttggatttttgtccgatgttatcttgacgacgtatctttgtttatatttgacgatcctgatagtttcgtgttggtttcagtttgtttcatttgtcggattctttcctttatgttctgttttagagtataatctatataggattcttgcactgtttatgtcttgcaactgatttcgcttagtgataatgtttaaaacaggtacgtattgcgcatcaa

SEQ ID NO: 44403 - DNA, 699 bp, Manihot esculenta
  Intron number 2 from transcript cassava4.1_018204m (locus cassava4.1_018204m.g) derived from phytozome v7.0 (chr-ID scaffold00435; pos 13701 to 14399)
gcaaagttgtcgaattgtatgtgtcttttctctctgctgaaaaattttggccttttattttcgttttcttttctgttctgattctggaaaatttaagggaaaagttttgaggctcgagatgcatttttttaataaaatttgtaatttctgaagctaatcatgcgaatcaacgtaaccttttggttttagatggcaagtttaaagtctgttctagctattattttgcagttttgagaagtcatgcgttggtttccagtttacttttttcgatgactctatcagatcaaagtaactctattactataatttatgctgcttgatctattgattacatgttctgttaattgcccttttggctgcagcctgctgcattgttagaacgtttttcaaaacgatatcacatcaggtgctgctgtgcctgggaaccttttgggttccctggtgatatgtaaactttgcaacttgaatcagaatccttaaattgtactttggtttcgaagttttgtttattttgattagaacttaatggatatcagctcaggttgagtaaaatttgaaaagaaaatcagtgttactctctttgtagttaatggttattttaaacgtgatactacttgctgataagcactctattttattctaaagaaaaatatgtaatattcaggaacttgaaagatctttatcttggaggaacactag

SEQ ID NO: 44404 - DNA, 775 bp, Manihot esculenta
  Intron number 1 from transcript cassava4.1_023353m (locus cassava4.1_023353m.g) derived from phytozome v7.0 (chr-ID scaffold12155; pos 26648 to 27422 reverse strand)
ccaaattgcaagtgggtagggacaggaaagtgttttctaaaggtattttccatattatatgtccaactgatcttgttttatcttcttgctttattgcttagctttatgtggattatcagatcccactgtcataatttgaacttttaaattattcctttgcaaatatttattacattatgaccatgaaataataagtgaataaaaggaggtatgaatgaagaaatgttgctagttaataatagtggtatgcaatttgttgttttgtttccaaacccacccaatttggaaataaaaaaattgacatcaaaattatagagaacttgatcaaatcatagtaaagggactaacaaaatcaatcaaaatatttaagaacttataaccgaaaccaaaaattgaaccaaaataagtgagtaggttcaattaagtattttggttataactgaaaactgctcacccttgttaatagtgtatttataggtatacgtagttgtataagtagacaatttacatgcatcatcttgttttgattatttaatccactccctttcactgtttggtttggctctattaaatgaagttcatatgattagttcggaattaggaatcctccaaggaatctaatgttatgagcttctgtgaaaacctcttgcattgttttggagctggatttatatctgctgcattttgataatttagaagcattctgttaatttagaaatattcatttatgtcattatttttttttaaggtttctttttatctctttttatgcagg

SEQ ID NO: 44405 - DNA, 851 bp, Manihot esculenta
  Intron number 1 from transcript cassava4.1_018293m (locus cassava4.1_018293m.g) derived from phytozome v7.0 (chr-ID scaffold08359; pos 2215000 to 2215850 reverse strand)
cgtctctctctctcgcgtcgcatctgctttaacaggtttgtgatttatatgcctcagttctttttatttgctttttcttcgacctgattttcgtgtgttgtttagatctgcatagaaactagaacgatctctgttatatgtttggttgagctgaaaattgcaaacctagctttttctgtattgtttgattgctgctttatttgatatccatggcttgaattgtgtaccaggaatccaggcgataactagcttattgatgcgtatttatgcattttctctgtggaaatagaactctgattttgatttaattggaagtttctctttccgttttggatcttaactctcttctgtgcttacggtgatttttagaatgtgtgcattagctaagtagacatggaacaagtaaaattctgtttatttttattttttaaaaaatcctaattactaggttaattttcgtgtgtgctaactgatctaaaattctgaaagcattattcagtgcatggtaggtgaatttttattagataatagctagttctagttatataggtgactgaatagttatcctctaaatactaggcctttgccttcttgctttggcgactccaaaaatctctggattgccatcctctatgctccaggcacaccagctatagactttaaagcagggtataattgtgggtgtgcagatagacatgtgcctcgagattgccatctcctactattgctttcattatattcgctgacagttcaagagtgatatcaacttattagattttgcttcatctagtccaaataatttataaacatgactctaaaggttcaatggattggatttgtaggtagtggca

SEQ ID NO: 44406 - DNA, 1011 bp, Manihot esculenta
  Intron number 5 from transcript cassava4.1_012611m (locus cassava4.1_012589m.g) derived from phytozome v7.0 (chr-ID scaffold09557; pos 115605 to 116615 reverse strand)
ctgactttacatttgaggatttttttgcggtaacctattttgtgcacttctttattctgtacttgtatttttttttttcgttagtttttgagttacggaaattcttcctttatgctgtggtgtacttgtatctaatatgcttaaccattcctctcaaagagacttatgatcatcgtttaggataatgtcattgctgattcttgtctttggttttactgtataactataagatgtttctacctcaacaatggaggtttgaagttctgctaatttgatggatgggtataatagtatcattgctgaccttttcagtatgcttctctaagggaatggtaggcctgtgtacttcacttgaactcaagttgtacatgggtttaaatgtctaatgaatggtgaagttgatactgagggtttatctgattaataatggggaaaaagaaaaagagaaggaacgggaaaattttctgcaatgcaaattacaaaatacagttgaatttagcttaatgtcaatcttttattcttcattttaaaatgaaaaaagttatattcaattgcctgttatattatttatataggaagatctaattcctctagcaattttcaaataatttttgttaaagactaatgaaggctttccttataccagcatttgctaattcttgtcttaaaatgtttgctgtagttacttgctatagctgcagtgttatggtgattgtaaattgaattaacaaatatagcaagtgaaaaaggtattaagaatatgactacaaaaaatgaacgaacaaaatttttagaaaaaggcataaattatagaactgaatataccaaatacacaaagtgaatgctttttatggaaattttgtaataagaagctacttactacaaccctgtagttctaatcgctgtacctgccagcattcctttttatttatcttggtaacatacgtaaaaaactgaatgataaaaaattttccagctattcctggagcagttggactgtgtccttcaggg

SEQ ID NO: 44407 - DNA, 412 bp, Manihot esculenta
  Intron number 2 from transcript cassava4.1_016442m (locus cassava4.1_016442m.g) derived from phytozome v7.0 (chr-ID scaffold03581; pos 1365331 to 1365742)
gaaaacggtaaaaacaaaattgaggtaagctcattatatttataacttcaaagtaaagtgtttgtaagttttttgactgctgattgctacaatttaatcgttcccaacttcagtggttgatcatttgctaaattgaatgcgttagtgatgtccacatcaaacaagaatcccatttccatgaaagacactggaactgtatatatgtatatatattttaaagaagaactcaatttactgaatattttgtttttcatccatatcttggcactgaagcctgctttgcattcttgttcagtgttattagtttgatatccaattatttgagaatctgatttcatgttcttctagcatctcacatttccatcttcttttactagttgaaggagttcatattaaaccaaccagaggctta

SEQ ID NO: 44408 - DNA, 642 bp, Manihot esculenta
  Intron number 1 from transcript cassava4.1_030598m (locus cassava4.1_030598m.g) derived from phytozome v7.0 (chr-ID scaffold05875; pos 989215 to 989856)
ttcttccttctcgtctctttgcatttccctacgaggtaaacatctcagctagggtttttggtttttcattttattattatgcaaatattattgtgtaaaggtttataagttttgcaatttattaattgtaacttcttgatattcatcgaatttagttttctaaccatttgatcatgttatgcataaatttataataaacttctttgcgtttatggacctttgatgttaaattatagaagtcgctcaatttgccatttcttgtaactagtatttttcttaatgtcctatgctgagattagttacttaatatctaatcagtaataagagccgcatgaatttcatggttggtgcgactaactctagcactctagtataatctttaaatgttgttactctcattaccatattttgtaattgagaagcgtagttggtgaatgatttatttgatgtggcgtttgccaaaaatttgcattttagtatacttgaagggtgtatgcttattgcgagcgagttggagtgtcatagtatcttgtaattgcaaatttatccttggagacctttcaagtccttttatatcagtatccgaattgtatttcgtgtcttgttatcttatatgctttatggaatccaggtcttcaagca

SEQ ID NO: 44409 - DNA, 743 bp, Manihot esculenta
  Intron number 2 from transcript cassava4.1_030598m (locus cassava4.1_030598m.g) derived from phytozome v7.0 (chr-ID scaffold05875; pos 990066 to 990808)
acaaggtaacttcatttgcaagttattcttttggactaattcaactgaatttgaacttataatataggcctttcacttgatttctattgtttcttagctttgttaatgcctaattattttaccctgttattttttttaaacaactggtgcagataaggcagcaagcaacttgtagctgtgattttgaatttatttactaattctttttgtggtttatgaaccaatttatttacataaatgattagcaaaaaaaacagaaacacatacttattttcttcttatattagttaattcactggtgtgattgcaaattcacctgaaccatgcagaactgggtttcctattataattagaaatctttagtactcttatttcctagtttcagtcgtcctttctctcttctctcctttttacccttagttgtcattcaggagaagaatggaagcttacattataatagttagcttcgtccattgtggttaggcatacctggcaatggaattctctgttctcacttagaatagttattatatgagatcacatcagcgaatccttatctggattagtatgcagctcttatcatattaaggtttggctgtgctcatgattctgtgtgtcggttacttggtttggcttctatagcatcatcacgttctttatgatataaaagtgaaaaactgctcattttggtttgctctgttttatgttgatacatagcttttatcagtggtccagtgttggtt

SEQ ID NO: 44410 - DNA, 399 bp, Manihot esculenta
  Intron number 1 from transcript cassava4.1_009258m (locus cassava4.1_009258m.g) derived from phytozome v7.0 (chr-ID scaffold03408; pos 64002 to 64400 reverse strand)
agtatcttcattccttagaggtacaagttaataaatttctgctgttattggtaatttggttttggatggtattcattgtttgattcgtaagaaactgaaaaaagcaaagggaagttttttcgataattttcttttccgacttgcttacctatcagagaaattgggacatactgttttcctttcaaaatggatctttttctggcctttgtttgcttttgaatatgtcgattttatctgctttctaattgtacatctaggttggttatacacacctacacatttatgaatgtgtgtccaatatatttgattgattcagagcatttcaatataaaaattgaaagatacattaaactgtaatgtggaattctcatggactgtaaatgatggttgattatttag

SEQ ID NO: 44411 - DNA, 930 bp, Manihot esculenta
  Intron number 4 from transcript cassava4.1_027859m (locus cassava4.1_027859m.g) derived from phytozome v7.0 (chr-ID scaffold05875; pos 416521 to 417450)
cagtttataacagagcatcttcactggaaacattagtcagtgcttttctaccttggttgtctcataatcagtgatcttgaaacacaaatttggttgaatataggagccatttttttaatataaatggcaatgctgaaagaaaaacgatcaatatgcatagtgggcttctgttcattagattatgatttttatccttatgataaaggttattgttttcaacaaaaaagcaacttcaaatttcaattatttagaccttcttcaacccctaaatgtttctatagtgtaggggttatttggcattgagtttgggaggtcaaaaagtgtttctttttttttttttttttttaaaagcatcattttagatgctgttgcaaaaaagcagtttgggaaaagttgttttgttattttggtgttctcatgattaaattatatcaaaaataattttaaattattttttaatatttctaaatattagttttaagaaagtggttttctcatgggctactccaacagcaatggcaaacagatccttagtattttaacatattcatataaactatgattttcttaaataacccttctttaataatttattttataaatagctagatctactagattatatggtattcagttatataggtttaatgttgatttgaacctttttgttaattctttttttttttttgaaaaaaacaaaaggattcagtagaggtgtatcatccactccgattctgcaacacctcaatcattcccgttatctgaaaatttgagttatgcagtgttggtgtgatttgcttaatcaattggctatcagattttgccttgatgtctttagaaatgtcattatccatgatttggaagtgagtttttggcaggattctaacttaaagcaatacattttgtagatcggttacctgtacctgacaa

SEQ ID NO: 44412 - DNA, 935 bp, Manihot esculenta
  Intron number 1 from transcript cassava4.1_018275m (locus cassava4.1_018275m.g) derived from phytozome v7.0 (chr-ID scaffold04851; pos 418056 to 418990)
atcaaggtctaatcctaattcttctctaattatatctatcatttgcacatctttaggtgatgtatgtacatcgtactggtttctgttgtgatgattggtgttctgtttgaattttggtgggtcgtggcgatcttttatttttaatgctaaattcggcgattcttatggcagattcgggtgggttggttaattgatttagtttcttgtttctttttttttctttcttccttatcttccttgagaacataatgaaggtgaatagtttatagcgtttatttcacgttacaagaatctacgcctagtttaattttggtgttagttcttagtacagagggagagggagttcaatctgagacatctggagctttttttttatggccctaaatggctttacggttcttaagacaattctagtaatacctatcaaagttcattggtggacatctagataatgttaataatgaaagaatggcttatttaagaacttcaatttctcctttcaagcaaggtagtgaatgagttttttaaacacagtggtgcaagcttacgtccctgtttcacactctctcgacctctctaattaagtttataagctccacgcacatacactgtacaatgtgatggttaagacttatgaatggcttcaaacttgattgcatgtgctcatgatgccttttcctggcatatggagtttttaggtgaagcggagtaaggaagaaataattacatttagttaatctgtttcctgcactgatgaattgatttgtcattttggtttcattctttcccttgtattataaccttttttttgcccaataatttacgagctatgataatccatttacgttgccaatactgcatcagcatgtcaatgaaatatattggtcactggtgagttgttgttaatgatacctacatgtggtgcagttgacttg

SEQ ID NO: 44413 - DNA, 899 bp, Manihot esculenta
  Intron number 1 from transcript cassava4.1_031304m (locus cassava4.1_031304m.g) derived from phytozome v7.0 (chr-ID scaffold11581; pos 1148845 to 1149743 reverse strand)
aaagcagtggggacagttgtagtggaatcctccaggtaccgactcaaatctgtaacaaaacggaaacgtggcacaacagcttaaaccttttttcgtacaatttctgttttttcttcctggagataagttagtgatcatccggattaaccattgcaatcctgagcctaaagcacacagatttgattattatataatcataaaatttagaaattaatatccataaaaagatgttattatttcaacacgttaataaaaatagttaatttaatataaaatatatatttcataataatatttttaaaatttttaatatgttttatttaaaaattaaattttaaataattaaattttaaaaaattaaacttattaataaaaatatatttttatataatttattaattaaaatatataaattaaacagatttaagtactcttttataataattatattattggatttgaaattaaatttaagtagtttataaaattaatgggttggatttgagtataatgattttcaaatgagaactgtgtatttattgtcataagaaacgacatggcgttgtgaaaaaagagtgaaaattaccaaattagtttgggggtgggtgtcaacagaccatgacaaatcaaatgggctcaaattgacaatctacaaatcaattggcaagtggagtttaacggggcccatcgattcagggaagtgaaaaaccctaggggtttatcacagaagtttgaatcaaacgtcttttattcttgcattgaaggggagggaacgacgatctgccattctatcgtcatttcagtggagatgagtgcaattgagagcagttcaatggactctttaatctcttctctgtcaaacagcttcaaacaagtccctttggctgctatccctgcaa

SEQ ID NO: 44414 - DNA, 432 bp, Manihot esculenta
  Intron number 3 from transcript cassava4.1_017272m (locus cassava4.1_017272m.g) derived from phytozome v7.0 (chr-ID scaffold08359; pos 91100 to 91531)
caggaactgatcttttggaaataatcctgacaaaggtaaagttgttatcttttcttttctccgttttgttcttctttagtttttggtttcatttttgcgcgtatggtagtcgataatttaattttatgtaatgaattattctggtatataaacaatctggaagtggtccctgtgactaccgatatttccacaaaaaaaagaaaaatttctatcacatcttggtaccatccataaatttgaggttgattaattctgtgagcttgaagaaagagatttgaattacttgtaaaatagatctgcttccctttcaacagtacatgttattatagattattagcttcttaatagcttatttattccagcttaattaacttgttatgggggtaaatatttgcagggtggttgtggtgtggaacaatcctatacacaagt

SEQ ID NO: 44415 - DNA, 942 bp, Manihot esculenta
  Intron number 1 from transcript cassava4.1_023140m (locus cassava4.1_023140m.g) derived from phytozome v7.0 (chr-ID scaffold12696; pos 1165 to 2106 reverse strand)
gtggctctgctgcacacaacaaggtaattctttctgaataaggttgaatttaaaatttttagatattacacaatgcaactgggattagagatatttgcttgtagtatgtttgccagtaggtctattgcctttgttctgtttgatgaatttgatgtatttgatttctccaagattataaacttgtggctgtggctgttgctctttagtgaataacatagaagtgtagaattttagaaacagcaaagaaattgtgcgtggtagtttttaataagtatattttaaagtgatgcaaaagctcaattaggcgtaaagatgtatattaacaagcgattgttgtagggttattcaagtcttcagcatgttcatactgtgtgaaacaaatgagtatgatctatcaaccatgccaactggtggtgttattaggtttgaaatttaatttaacaaaagtaacttcgcatgcagtcatctatttggttgtgccgaggaaagaacaaagagtttaattttgatgtctgaacctgtccatcagtgatgaagtaagcaagctgagtgagttaagacaaattatttagtataggaaacaatttagatactaatattattagttaatcattttaaaagtagaaaaattatatgcttttcctatctttattcttaaaataatttatttaccactccttgggacagctgtagtttggaactttacttctaacatttgaaccccttcttataggcttaaataaactactttttcattagagtgaaatccagttgatattgggttacaatttgccctttggcatatcggaggagactcatttgttcttttcccgtctagatgctttgatttctctagactagaattcgttggttcccgtttgtcactgttttgaagtgatgttaacagatattttcagaaaggagaggccagtggaaagctgc

SEQ ID NO: 44416 - DNA, 705 bp, Manihot esculenta
  Intron number 1 from transcript cassava4.1_003307m (locus cassava4.1_003307m.g) derived from phytozome v7.0 (chr-ID scaffold04137; pos 246750 to 247454)
cttcttctgcattgtcttctctcttgtttaatcaggtacttgctcttttactttctttctttactgggtatcttctatttttgctttgcttttcagtttagttgcttcggaagttgattcaactatcttactgcttaagcttcaacatttggtttcttttttcaattttcatttttttttattttattattcatttgagcaattgggttgtcgagcagaccgcttatgatgctttgtgattgggtaaagcaatgcaaatttttggattttttttggattttagaatcctagtcttttcgatgcttcaatgggtggattttgacattcatttgattgtgtatgacgcgacggtttttatcttgatctccccggagatatcgtatcttgttatctccgttatgcttggagttttctagtatttgcatgagttggtttgctaactgcggattctacaaattaaatttgttcttgttagaatataaaatctgggttgtccgtgtctttatctctaattgcctagtttttgtaacagttccttgattttttttttcttttggtatttacagttccttgattttagatataaacaaagtttgatttgaagattctgccattaatggcttggttgtcattccttgcttcgtgtctaaagattgttgtgcttgattggattttggtgtcatagaactgctgtgaagttgcttc

SEQ ID NO: 44417 - DNA, 367 bp, Manihot esculenta
  Intron number 3 from transcript cassava4.1_005776m (locus cassava4.1_005776m.g) derived from phytozome v7.0 (chr-ID scaffold02996; pos 64803 to 65169 reverse strand)
tttactgctgctactaaggtatttccttttttcttttctgaccttcctcttatcgaatgattttatccttggtttgagtcattgagcaaaactactgccccccaaatttgaacttttgatttcatttgctgttttctttccgggcaacagaataacacacgttgggtacaaaccaatcattacaacattgtcttaatttttatctttaaatcatgtccgtgctttacaaaagccgccctcttctctagttcagtgattgtgcttccgaggtgcagttgaatttagattctggttaaggttctcacttagtttcttctctctcattttgttcaatttaatcagtcctacgggcgggccattgagttgg

SEQ ID NO: 44418 - DNA, 569 bp, Manihot esculenta
  Intron number 2 from transcript cassava4.1_010091m (locus cassava4.1_010091m.g) derived from phytozome v7.0 (chr-ID scaffold07902; pos 138895 to 139463 reverse strand)
gggtgaggattgatgggtttctcttttttcctatgtaatgtgtaattggatcctttaattgcagcaattggattgatgggtctctctctcttctttttcactgtttccgtatgcatgtgtagctacagtggtgaatataggtgattaggttgactctaatttcgtcaatttgatggggaattttattcaacggtaaaaggaaagaaaaaaaaattgtaactactaatgtgtttctgcatttcatttaattatgagttttcctattgtgtgaatttttcttcttgtctcatttaatcaagcaagctgaacatgatttttcatattgttgtttgataatcgctgcatttctaagaaaagattcctttatcatttccaggtattcaactgattggattttttgtgtttaccctggatcatatctgttttttaatttagatgatgggatgtgatgattaaaaatatagtggaatataatttgttattgctgaattatctttttggtttgaggtttgattcttaggttttgatgttgaatttaccttgaatatttaatgggcctatgtaggcac

SEQ ID NO: 44419 - DNA, 657 bp, Manihot esculenta
  Intron number 1 from transcript cassava4.1_006062m (locus cassava4.1_006062m.g) derived from phytozome v7.0 (chr-ID scaffold06791; pos 14426 to 15082 reverse strand)
tcgtcctctcgattcgtcgatacttttcccaaaaggtactctttgaagatctccttccagttttctttgtttaggtctctgtagattttctttcttttcaataatttttttcttttttggaggggggtggttgaaaattataataattataaggtagctgagatatctgttggatttgatggctttgattcagtgttttccacctgtgtttggcggattccgggagattcttggtttggggttagatatagtggttctttagcgttttagaagtctctctgtctctctccttaggtagagattgcagagtagtttttctttttatttttttgtttgggtaattttttttatacttcatagttatttaccggctaaaatatattttcttgttttgctggtttttttaatatagttaataaattaaagttggggtattgaatttgttctttgattttgttatttttaattgtgggtgtatggggattaagttgtgtgattgataaatctagggttttgatggaggggagatattgtggggattgataaatttgtgaaggtgtttgtgaggttcttctcttgaattggtttcaatttgggtgtgaatatatattcaaccgcacagcagcgacgaaatccaccaagaaaatgagctgaagt

SEQ ID NO: 44420 - DNA, 549 bp, Manihot esculenta
  Intron number 1 from transcript cassava4.1_015854m (locus cassava4.1_015854m.g) derived from phytozome v7.0 (chr-ID scaffold06342; pos 1784 to 2332 reverse strand)
aggctaggttctgggctgatttcgttgataagaaggtatatacgaactttgtcttttctttctcttgggtttttcgtcgaacaaataaatggaaaaagatagttggggaaaagaagagatattgactgggatttttcttcttagtggatattttcttttcctggcatgatctttgcttataggatgaatcattaagcaaaaacttgtttcttttttttgatatacttgtatggatcggttttgtttgggcaattgggcttgccccttttcatttcagccttccaaattactatattttggtatgttttgtttggttgaggaatggcaactttgcaggtttccacgtttctgttcctgacaagcttgttttttctgggcttgagagggaaaaaaattagtcacatatcttcgaaaatataataaatgaagtatacatatatagtcatcaatcatctttaatttgtagttgaaaattaatttatatgattttgaagggtttctttatcaaagaagatagttaattaactgatgatctgcacttgcagatat

SEQ ID NO: 44421 - DNA, 599 bp, Manihot esculenta
  Intron number 1 from transcript cassava4.1_004864m (locus cassava4.1_004864m.g) derived from phytozome v7.0 (chr-ID scaffold05875; pos 594737 to 595335)
catctcatataatcaatcactcgaaaaaggtaacataagaggatcaattaacttttaacagctctctacttcaaatttgtgtttttggtttgttctccctttcgatttttttttgatgggtatctctctctctctctcttctttttttttaattgctttcatgggatgttcattcccttatagcttctggtgtggacttagattagatcatcttttcaggcctaatagattaatagatcgttggtgattatttttttgagctgttttcagtttcgtttcagcatatatgtgtatgctacttacagatgtatgtttctgtctgaagattttacttttttgaattgtacttgaaggacttctgtttccaacatagatatgtatttaggaattggaagtcttattggactgtttagattagtgggtcatttcaagaataaatgcctgcgtctcattattcagtttaaatctgtcgattttttttctcttctgaatggattataattcaagagctgagttgatggtttttaattagtggcagcttataatgtttttgttttcaattttaattctgtgatgttcatactttttccagttaagaa

SEQ ID NO: 44422 - DNA, 584 bp, Manihot esculenta
  Intron number 2 from transcript cassava4.1_004864m (locus cassava4.1_004864m.g) derived from phytozome v7.0 (chr-ID scaffold05875; pos 595391 to 595974)
gagcgatactcgtttctctatcagtaagaagagtaagtacatgatatggtggccagttttctcatttgctggtaaagtttctgttactgtgtttttagcagtcctttccaagcatgcatgtaatatagacctcagataattggatggtctctgaaatctatattgaaatgctctctggtagcagttgctgcaccttttgtacatatttgagtggtaatgagtgacagatatgaaaatgttttgtttgttttctgatccctttagttaattgaaaattttaacttacagtaatcatctgcttcttgttatcttcttgtttgttggattctatattttttatttctgtgtctgccagatgatatatttacctaaaacatcacagaatgtatctctttgattattcttctgattgatctagcttggggtttatcttacttcatggttctcatgtaagaattaagatgtgtgtaagaattaagatgtgtggtattctgatacacattattgcctcgcttccataaatttttatttctattgctataagataattttgctatttccagatactgggaaggttcatcatc

SEQ ID NO: 44423 - DNA, 909 bp, Manihot esculenta
  Intron number 2 from transcript cassava4.1_028884m (locus cassava4.1_028884m.g) derived from phytozome v7.0 (chr-ID scaffold01508; pos 418713 to 419621)
ggataccttcactcagagacatccaggtctctttctctcttgatcttttctataattttctttttttgataagcaatcttatttgtaagtattattgaatattgtattgatctggtttaattatggttcaagtttttgtttgtcacaagcaaggctgttctcacctacttcagtgactaacataaactaatgccgacatttctgatgtaaaaaaatggaagaaaattaatgttaacaaaaactcaaagattgagatagccccacctaagggcctatctcaagatgatgcatcactgtatacttgttgatgagcttaaagtgtttggggaaatgccttacccagcagtatctaaggtttccagttctacttgggtttgattcctattttgctgctctactgtatgctggtaattccttgggttggttgttttggaatttgcattttcagtctccttttctactgctgtgcttggttcatatgagttgtttatcttttaataattgccacagaattgaatttctagtcatatgtttcatattttgctaattgctcagcttctctagccgtgcagtatccttatcagttgtgataaactcattttaggttttgatttggtttgcttgtagtctatttcatctggttttttctgttattttgtttgttttgtcctaaaatgtattgctcctttagcttttataactgtgcattccaggggctcatattgcatctgcttttgggcttcaattttctgtttttcttggtttggcttgttccctgttttgcttccatggatttttttaataaattaatcattttgcttattttaaaaaaaaagatagacttcattttgtgaagaacttgggtgtggtgcagacaagatcgaggaccacagtagtggaaagattgcg

SEQ ID NO: 44424 - DNA, 955 bp, Manihot esculenta
  Intron number 1 from transcript cassava4.1_019137m (locus cassava4.1_019137m.g) derived from phytozome v7.0 (chr-ID scaffold05875; pos 1004834 to 1005788)
ttacctttctacttctcttgctagctatctcgatagtaagttctccccttgattaaattctttgtgttccttggattgtatgtcctgtgctcgccgttaacgtgttaaaaaattttcactgttcaatagaactcgcctcagaatttgatattgtttagaagttgctgtttgtattatttaatttaagtaaaaagatggagaaatggtatctttcgtatatgttttggaatcctttaagcgataatatgcttttctgaggttgctgttattccatgctaaaacttttgccttacaccattaattgagttgaaaagacttgcttgtctaggactaatttttatcgacacttctttctttctctttatttggtgtcatgcatagttttatttgttcatctagaattaatttcaagatcgtgtttataattatcgtacttggtgtttattggcattttatgattcttcatctagtgaagatatgaaagatccatctgataggcactttttttataactgataaccaatggtgtcttgagaattaattgatgatgcattttatcctttttaactgcaagaaaatttagttatcctactttacagctcaaatttgatggttgtagaatcaaaactgattttgtggcatccaaatgttgcttacaaagatctttttagtattggcattggacaggatttttgaaatgaaataaaatgtagtcatcgtgttgtatgcatttttctttttctattgcaaggttttcttcattcttttagacgttattttactataattggtcagttacacttaaagagggaggtataggtgatgtttataatatagcagatgatgcttgcatgctgttcagatacaaattattgaatgtggattgctttgttcttaatttttctgtcctgctgttttgcttttgcctcagagaagctacttgtgcttctgcgag

SEQ ID NO: 44425 - DNA, 663 bp, Manihot esculenta
  Intron number 1 from transcript cassava4.1_005753m (locus cassava4.1_005753m.g) derived from phytozome v7.0 (chr-ID scaffold08359; pos 1150084 to 1150746 reverse strand)
tctcactgtgcctgctcgagtgctgccaccgaagagtaagtctaatgatgttactgttcttcaatttaattgtatgattagtgtgattacaaatctgacaaaaaaaaaagtactcatagaaatttcatcatttgcttcttgatatttgtgggaatatggggatgattttttttagatgtatttattgcttgcttctttgcttttgttgtttgtttttttttttttttttttttttttccgggaggggtagcttgtttttagcacaaaaacgcacaagatggttgcttttggagctagaagcttgtcgttagaaatgaggcattctagaaagcttatgaaattgacggcatgttttgcatgttcggcatataatgaagttctgatggtgcaagttatccctttacgagaatatttgcaaactagttagacctttttccggtggaccctcatgaaaagaatttgttttgctcctaatatctttttagtaactccaggagcttgactcgttttttattgttgctctttttatgttttgaatgcttgattgaattgtaaatttgttattaagtgctcttttagcatgtttctccacaagtattggtgattttcaatgtaacttctaaatttgtattcttttgttgcccttaggggtttacaagaata

SEQ ID NO: 44426 - DNA, 515 bp, Manihot esculenta
  Intron number 1 from transcript cassava4.1_010542m (locus cassava4.1_010542m.g) derived from phytozome v7.0 (chr-ID scaffold06948; pos 169320 to 169834)
tctggtatcctttctcccctccatttctctcgaaggtctctctctctctctctctctctttcctttttgctacaagtcttttgtttggttgtgtttctctttttttggcattttccctttctcgttatggattggaaaagaaatctcctggttgatggggcttttattttattttttaaaatcgcttctctttcactttcactgtgtttttatttatttttttggatgatgaacatggcgctgtctacaattatctttagtattgtttgctaaatagatgccattttaaccttagatcgatatattaccatgtcagtaaaacacattctccttaattcaaattttaaatgtgaatataattataacaaaaattataattttaaataattttactaatttttatagttttggattaaatctcaaaataataaaaaaatttaaatttttcctgaaaatagcatttttaattaaactaaaacaatattgaagtttttcttgtaattttggcagggaaa

SEQ ID NO: 44427 - DNA, 562 bp, Manihot esculenta
  Intron number 2 from transcript cassava4.1_010542m (locus cassava4.1_010542m.g) derived from phytozome v7.0 (chr-ID scaffold06948; pos 169936 to 170497)
gttccagggtatgttttttttgttttaatctcaaatttatttgtttatatcactgtctgctctataattcctcagatctttagcttttgattttacttgttgaccacaggaggatgctacttttatataatttatgatataatatcagttttcaaaatatttaaaccattacactgtatatggccttctataagatgctaagcactatgagaattctaaaagcatactgatccttgaattgctttcctacaaaacaaagataaaagctgaaaatttcttcactttttcataaaataagttgaactgctaagctgttgtgttttgttgaatgaatccttatatgcatgaagcactggcgttgacaccactctgttactagatcttatgtctttgttatttggatacgtgttagtactctttggcctttatcggcaactacgtaccattgaagatcaaagaatagtattcccatcaagtattgaataaaaattatttttgtctctttcatttatttggtgcctagtaaaatgtgctagatgatagtgactgcttttatgcaggc

SEQ ID NO: 44428 - DNA, 699 bp, Manihot esculenta
  Intron number 2 from transcript cassava4.1_030602m (locus cassava4.1_030602m.g) derived from phytozome v7.0 (chr-ID scaffold12120; pos 93854 to 94552 reverse strand)
agctttttctcaattccagcactcaggcaagtggcatctttttaaatctttttattggatttcagattgcacctgggacatttatatcagtttatagtaaaatttgttaatatactaagtagctactagctaacaatatgttgtgattggtagcctaacagaaatctcaacctttcccccttttttcatggagacaaataattaaacaaaggagaacaaccaacaggaaggcagtataccggaaaaaaaaaaaaagaaggagaagccattaaaggaaaatttcagtaaaatcataaaaaggaagaaggggcttctttcctcagtcttatcagtaactgagaagagtaggattaaatttcttatccggggaaaagttgagaaggataagaacttccttatttttttttccacgtgatatagccgatattgaagctataacctcatgcgaataattgtttcattcataagcctcttccaaattccactgatatttcagtatgcttaacttatgcattccacatgctttaatgaatatgaattgttttctcccctagcaataatttggctagaaggtttatcatgtggtgctgctggtgcatcaattctgcaacttaaaacttgcatttggccagtgtagatttgtattttgttacgcagctcatgcaatcaaactgatggctgatctatcaattgcagtgc

SEQ ID NO: 44429 - DNA, 947 bp, Manihot esculenta
  Intron number 2 from transcript cassava4.1_005669m (locus cassava4.1_005640m.g) derived from phytozome v7.0 (chr-ID scaffold11297; pos 869936 to 870882 reverse strand)
ccactgagtcccagattggttactgtgcgaagaaggtactaaattaccgtttgatgctgttgttattgcaattttttaatttagcacaagtttaatgatgtcttctgcagttgttcgaagaaagttgccgacaggcaaactaatcattttattaacagtatttgcattcaaaagaaaaaaggaggggcaaaacaatgatccttccagacttcagtcatacatttgtggattatgctgtttaattttaaccatataagcctaatatcctagtcttatcatcattcaattgaataattttggtagattgcagttgtaatactatcctaatcttatcgtcattcaattgaataattttggttcatttcagttgtgatactttccatcatattcctttttctgactattaccatttttggttggtaggataatggtaatgactgacatcttttcgtttgttggattggattttctcaatgagattataaaataaatgatatgttcgcaaaaaaagaagacaaccatttattcaatgcattcttgaactacctcattgagttcctaacaggtctaatctaaccttgttgaaaacatttttaataatcttgttaatgtcggttgcatttaatacataatagctctattgtgacttgtgatatcacttcgcatatttccaatttagaaatttgatcccttcttccacttctaaaaataaaagatgaagaatatgagaatggaaaagaaaggaaaatgatcagttgcttttttcacattattctgcaacattggtgatggaacactggttttggagttaatgctctgttgatgttttgaatttctgtagctgcacaaataaatttgaattatgcacttctataattctttctgcttttgcccctatttcttcagggtaaggtgccattgttatctatagaagcactacaccatct

SEQ ID NO: 44430 - DNA, 818 bp, Manihot esculenta
  Intron number 2 from transcript cassava4.1_007396m (locus cassava4.1_007396m.g) derived from phytozome v7.0 (chr-ID scaffold12004; pos 203581 to 204398)
ggattccgtcgagttcttcagagatatagttacaggtaaaacagatcttgtgcttacgtagatgagctgctgattaccgatgttgactatttttacttcgtgtggggaagaattacctacggaagcgtacaccttacacacaggacatacctacgtcagcgagggggcattgggaatttgagatattaaaaaaaattagtattatatttgtttttattccttatttattttacgaaaacgtttttaacatttgattattaaaaaataattcatatttaaattattcttgcaaataaattatgacttcatcagattttgataagagattgacctcgtaaattaataataataatgaaatataaatcttcatccataaaaaaaaaaaagaattctatgtgtttttaaatcaatggtttgtttgatctcttagtatttaatacattttttttaatatcgtaattgattatttattcgatattatttaaaatttaacaaaaattacaatttaatctattttttagaaaaaatataatttaatttttgaatttttttattaataaaataattctattaaatttacgaggttttaaaaattttatcaatattaaaattactgcaaatactaaaactaccgaaattaaattgttataaaaaataaatatgaagcactaaattaatttcagtgcattggtgtattgttatggaagttttggtacactaaaaatttttgagttgatgataatctgatattagcttcaccatcaatatcttacgtttgtgaaggtccctttgagaagttcatacgagtatctacgatc

SEQ ID NO: 44431 - DNA, 400 bp, Manihot esculenta
  Intron number 1 from transcript cassava4.1_004634m (locus cassava4.1_003744m.g) derived from phytozome v7.0 (chr-ID scaffold12794; pos 61254 to 61653)
acattgacgccattctggtagctaattaattccttagcttttgatgcttagtttttctatttaattgagctttttcatgtgcgatgaattgattttcatcacctagctcggttccccttgctaaatattggattatctatctggtttagtgaagaatttccgcctttattcgtataaagattacatcatggtggaatatcaacgtattgacagttataagtgaaagttgtatatatgagtttctaactgacgttataatcaaattgagcttttcttttttgtgaaattaatatgcaattttagttagtaaagcaaaagttagcgctttactttgattttttccctctcatattttgcttccacagttgagcatacaaaaggaggaagccaagaagaagga

SEQ ID NO: 44432 - DNA, 371 bp, Manihot esculenta
  Intron number 2 from transcript cassava4.1_016380m (locus cassava4.1_016422m.g) derived from phytozome v7.0 (chr-ID scaffold10305; pos 333448 to 333818)
tcagattgaagatcatcaatcagctcaaagctaatgtatttctctctctgtcgctgttgctcttcttatttttctcattttttttttgtggtctgtttgtttccatggaaagttgaattttgtgtgtgtgtgtgtgtttcccctccttaaaatactccttcttgtgccttttgatttaccaatgaaacctttgagctctgggttctaaatgtgtggattgattaaatatgtttgtgtaaagaaacaaattagtattttgttttcgtttttacttttgctttagggaggttgaagcatgagtatggtgtacatggaaacgatggctaaatttatttctgttgtaggaagagctaaagaataccactattaaa

SEQ ID NO: 44433 - DNA, 377 bp, Manihot esculenta
  Intron number 2 from transcript cassava4.1_013267m (locus cassava4.1_013267m.g) derived from phytozome v7.0 (chr-ID scaffold06327; pos 216972 to 217348)
ttcctgtaagtatctgactctctcatcactacatcaaattaagcttttagtgacagaaattttagagaagtgataaaatttcactactaaaattttattttgttgggatatgggtcattttcttgctgacttggctggtttttctcatctcaaaatcttgatttctgggatctttgcttgctccacactactgctattacatttttctaatacgaattttgttaggtttttgatttggacagcaagcacaagtcactattttcttttcttttttttaaaaaaaaaacccatcatttatgaagtgcatattaattttatatttttttttccaatatatttaaggtattggcacctctccccattggatttgctgtgtt

SEQ ID NO: 44434 - DNA, 627 bp, Manihot esculenta
  Intron number 1 from transcript cassava4.1_015894m (locus cassava4.1_015894m.g) derived from phytozome v7.0 (chr-ID scaffold04246; pos 113763 to 114389)
agggtaaaattctggacaaaataattatgaattagtcaattttccatttctataacatcattatgttctgcaacttaataacatcattatactaattatgtaaattgattccttgtggaattccacgtttgacttcaaacaaccaaaaaaaaaacctactgacatctgtttggaatccagaatttcgcaagaattcaattcaattgatttcttttctaacaattttttttttggtttgaaatgaaagaattcaattctttttaacttagaaaaaaaatttcattttgaaaaaagttaaaattttgcatgattttctaaatattaattattttcttgcaaaatgaatgatgccaaacgaggggtatgtgaacattattgatgttgaacaacatttgtgatggcatatctatgattgctgttagttctcatttatcagacttgaatgaaaataaatgcatcagttttccactgctttattgtgtacatttatttttatcaaatcttagaaacatccatcttgagactgcctagaataatgtgcactataaaaacgacatcaaggacagtttgtcaaaccttgtccatgctgatatttgtttttccttgcattcttttaatgcctgtcag

SEQ ID NO: 44435 - DNA, 573 bp, Manihot esculenta
  Intron number 1 from transcript cassava4.1_018997m (locus cassava4.1_016979m.g) derived from phytozome v7.0 (chr-ID scaffold03581; pos 754626 to 755198)
ctctcgtcaagcacatcaaagctcctgttcatcttgtaagcttttgctcctttgggatctatctatctatcaagtgatttttctgtactattttcgtttttttttttcaaaacttttggagagcggaggagggaggattttgaccgtgacttatttattattattattatttttctgtgtcaatctgatgaatccagatccatctcggttgattttacttcatttctgttaattttaaactctcaccttcatttctccgccttctttgttttgttttttcgagtctggtttgtttttattttattttattttattttttgtgtaagctgtgattattgagcaactagcttttggatttatcaaagttcttctttcatcgattcttcttagataagattttttttccttaataatttgcaatttatttttcctgctgtgtttcctgttccatgtgaggaaaggtacaaccacatacaaacgggaatctgtttcctattttaatgccttgtttttggtttttgtgaattttttggatcaggtttggtcactggtgaggcgattcgatcagccgca

SEQ ID NO: 44436 - DNA, 588 bp, Manihot esculenta
  Intron number 2 from transcript cassava4.1_011202m (locus cassava4.1_011202m.g) derived from phytozome v7.0 (chr-ID scaffold06582; pos 615885 to 616472 reverse strand)
tgttgttgccttggaatccactattatttcccgtaattccagttcactgcattttgtgtttttatgtactctgattgctttgtatcctttgaactttaatttgtgaagcatatcttgatagttccttactttcattgttctgtcaaagatcggagactaaagttaacttgagttttggttcagctctgttttgtccttgtaattttatgatcctgaactttttaggagtttgaaaatttcttggcatcaatttcattatcaaaaaaaattttgtttagtgaacaccatgagacctttaagagaatgcttgagaacacaggtaaaagagttggtacattgtttaaaacattattaataaaccaccagtttctttacttccaaaatactctctgaatttattcaaactcttggtacttgattttgaagaacattattagagcttcattgtcatacttgttaatcataattttcatatttatacaaaatgaagaagggtgagttcataaattgcaatattgttttcatttgcagtttatgtctctggatgtggcaaaatgtagctcatgtctttttgactcatgtttaggg

SEQ ID NO: 44437 - DNA, 1023 bp, Manihot esculenta
  Intron number 3 from transcript cassava4.1_015868m (locus cassava4.1_015868m.g) derived from phytozome v7.0 (chr-ID scaffold10217; pos 338387 to 339409 reverse strand)
gatcacctaaattttgtaaaggtctatgttgaacttgacttgcaaattttattgtttttaagtacatttttgcatgagccaaaatgtggcagccattttttacttccatgtggtagatatatgcttgaataccacttcttgaaatggaaaaatggcaaaggaaaagttgatgctcaggttatgatttctgcatgttctttgtctgcaaggctggacaaataaattcgctaaatttattaatccggcagattcacttatcaacttggctttagtacatggtttcagaaatgtccatcccatatattatctggattgcaacaaatttacctcgggcaatatggcatccactaaagtaggatccagttgtgttgatgcctattgacgatattggatgtatcacccaatacgtagcaagatacacagtaatgtttcaggcaccttatggaaacagttaaaatatctcacttgttttaggatttaggttgctgacaatgagaagatccatatcatttcatgcaaaatggcttttgtatttctggagatctctacatcacttcaaatttggttaactgggttgactttttaagctgaaagtaatgacattttgacttcgagagtctatgtttattggttttgaaggacttctttgaaattcttcatctatatatgtgtgtgtttggttgttgcagtgtaatggttttagtctttaagatagtgtattggaatgcactgcaccatgaattaatttttagtaaaaatttttctttaggtgacttgtaaaccaaaacttaattagataatgcttagcagtaaatcaaaattgaactcaatcaagcatgatccgtggttcaggagatgctcttggatattagtgtttcacaaagagatgagataataatacttttatatttagactttgtgtttggtttctttccatagttgagagaatattaaatgccaagttattttctctttaaagtttaaacaggtcaaggttcgtacagtgtgccaatcaagaagcat

SEQ ID NO: 44438 - DNA, 411 bp, Manihot esculenta
  Intron number 1 from transcript cassava4.1_015868m (locus cassava4.1_015868m.g) derived from phytozome v7.0 (chr-ID scaffold10217; pos 339612 to 340022 reverse strand)
aatatttttcaccccttcgatcctgttgcatataggtttgctttctcctattaaagataaaattgttgaactctcctactttcttgttttatgcatgagatagttggcatcgtgtggccttggtgaatggtgggcaaagagcttgggatgaacttctaatttgatatctgttccaatctggaagaagcataaaatgtaactctcggctctgccattttgccatacacaaatcaaccaaccttcttctactcatcttatgctttttaataatgttttggatggaagtatatgtgtttttctctcttggtgtgtgtgtatattattatgtcttcaatttggaacacatcaaggatgctagttatggatttttatacagagtagaaccacttgtttgtaaagaatacatcacca

SEQ ID NO: 44439 - DNA, 576 bp, Manihot esculenta
  Intron number 3 from transcript cassava4.1_013811m (locus cassava4.1_013811m.g) derived from phytozome v7.0 (chr-ID scaffold05859; pos 25296 to 25871)
gtggcaaggtaaggtatctatagatagtctcttttcttttttatttattttgatttggttatattgttataacagactataactagtttcatttcttgaattttttttacaatgctaaattcacattcatttattgttttgcttgtatggtcggctgttgataatcatgattatgtgactataagattttaggagattgaagataataggatattacagtttgttagataattttcggcattctagggaaattattgttgggccttatacttctacctgctatgctatatcttggtttaacgagattttgcatgagcatgagtagctttttaatgatcctggatgtttagtattgttggtatatggtttagaatgtgaatcaagggtgtgaaatgaagctgatctctggtataaataatttgtatacttgaaattatacctgaaaatttattaaagtagccctgctcatgcgtctgtggcataatttacttggtaacttactgaacattatgttagattaagtccattctttagaagggaccttttattttgtgactgatgcttatgcagattgga

SEQ ID NO: 44440 - DNA, 499 bp, Manihot esculenta
  Intron number 3 from transcript cassava4.1_013107m (locus cassava4.1_013107m.g) derived from phytozome v7.0 (chr-ID scaffold06748; pos 179264 to 179762 reverse strand)
caggtaccatggaactttaaaaaaaacttacttagaccacatctatccgaagttatgatgtaaaataatagtgggactcatatgacaataggcaaaaatttctcaaaacttgcaatcagtcaattctctgtagcattactgtcacatattggttgaatttaaatcccactcattatctctctctctcttttccttttggggataatgacaaaaagttctttaatcattttcttcaattctacatgtataccaattttatgatgggttaacagttataccagttttaagtaatacatccatgtgtataagtaggccatatggacttgtaattggggtaaaaatgtcattttctactgtatcatttgaattttctaataatacttgtggaattgattagttttaaatttgaagataatgttaaaagtttatgattttgtttttgcttgtcttgttcaatcttgaaggaaagaagagttcaaaagtacattgaaactctgga

SEQ ID NO: 44441 - DNA, 489 bp, Manihot esculenta
  Intron number 4 from transcript cassava4.1_008087m (locus cassava4.1_008087m.g) derived from phytozome v7.0 (chr-ID scaffold09365; pos 133495 to 133983)
caggtgttgaggtttttctttccttttttttttttttaatcttttcttttaggcctcttcaacccccctttcctcttctttcaaatttgtcttcattttatggcaacaagtattgaactgttgatgaggtttatgataattatttatcaacaattataattttaggatgagttcacttttctgtctccttcagaaaagaatgtgtcaacaagaaatatatatatatatatatatataaatatatatattttggtctggagtagaaacccatgtaagtatcgttggtgttgcctaattggttatgcaattttggaccttgtaggcatgcatatatgttttttgggttgccaacattcatgtactggcctatatgtaaattaattgcctagttttactagcgcttcaagttcagtggtgctagtactgctctgagttttgctttttttttccccagaactttgtaggtccttaaattctacagaagaaacc

SEQ ID NO: 44442 - DNA, 413 bp, Manihot esculenta
  Intron number 1 from transcript cassava4.1_013442m (locus cassava4.1_013442m.g) derived from phytozome v7.0 (chr-ID scaffold03175; pos 206755 to 207167)
tctctctgcttctaagacctcccgcttctgctctggtattttcttctcgatctcttttttttagcatttcttttcatctttggtgattgatttgtttttgtttaatatttgatgagacttttgaggttcctgagctaagaaactctatgcatttcaatcattttttcccttttgctttcctatttgagagtttgatactttatgattatatttattttattttattttattttattttatttttaaaatcaatgttcttttgggtcaatgatatcattagctctttaacatctgtttctttgggttttaatcgttgaatttaatattgcagaactttcttcttgaatcatgatctaataatgagtatcttctttgtagaaggaagaactgtagctgcagcagcggcagttgca

SEQ ID NO: 44443 - DNA, 608 bp, Manihot esculenta
  Intron number 2 from transcript cassava4.1_013442m (locus cassava4.1_013442m.g) derived from phytozome v7.0 (chr-ID scaffold03175; pos 207239 to 207846)
gatttctggagccctggcaattcctgcagcaggtttggatttctttttattattttacaaaaactgataattttttctgcttccaagtcgattttgtgcacttttgttcaacgtagtctctttggcctttgggaatggaaaacgaagaggagccttgtcctctgcccaagtttttggcaatgcggcttccgggacctcttctataataatcacactgtgcttaagcatggtaatgggttaaagtttggacatgggaaagaatttggatttgtttgcttcccaatatctgtctccgacaatgcatctgaattcccaaacatcttgtgaattttctggccgattatagtattgttctagatgtattgtgtttgtttgaattacttcaaagcgatataaagaattttattccaagttggccggttcagatttacattgtctagatctcttgaatagaatgaaacagaagaggaaggactagagactaaatattataatagtataaacctattaattcttttgtttgcttgatataataatggaaatttatttcctgttcttagtttctgatcttgatttcttttttcctacaatatattgttgtagtttac

SEQ ID NO: 44444 - DNA, 828 bp, Manihot esculenta
  Intron number 1 from transcript cassava4.1_002888m (locus cassava4.1_002888m.g) derived from phytozome v7.0 (chr-ID scaffold06327; pos 467667 to 468494)
gcttccgctttcgctctattctctattatctccaggtatagacttcacatgaacacaagtctatgttgatttgtatctgtataatcttgtagcttgacttgacaatgtagggcctccctttggagttgttagcttgtgaatgttaattagggtttaagggggtttagctttgatcttttcttattttatttacacttttttctttatttgttttgtttgtttgctaaagaacactaggagatttactggatgattatcatcatctgtgtctctttctggttttttttaaccttccctgtggaggttgatatgataaactagggttagtacttcagttagagctgtagaatatttagggatttcactatgcattttggttggtttcaattgtatattgttttcacggtacaatttaagaatttgattgcaagtgggaaacaaaactaatggaatagtttgtctatagtctcatgttatgatgattgataagtttgcaccatcgactaagattgtcagacctacatgctatttgatgtttgtacaattcgtctccctcctcccccctcccttgaagttttgctgtgtacttgcatttacaaaaaggtagaaaagttttttctaataggtaaaatcaaaagaaaagaaaaaaattggcctgttagttcctacggagagaacaacttgagtccataatatggcggtcatttatcttgaaagaattctcaacaccaagtatatgctctgtggctgcggtaacctggtaaggttggtttagtagaatctaatgtgactgacattatcatttgtcttcacaatgatgaagggaaa

SEQ ID NO: 44445 - DNA, 923 bp, Manihot esculenta
  Intron number 1 from transcript cassava4.1_003477m (locus cassava4.1_003477m.g) derived from phytozome v7.0 (chr-ID scaffold05875; pos 799251 to 800173)
ctggggcagccgctcagttgaacttgttggcctcggtatgaaattggattgccgatttgagtcctaattaaataaatttactgtttatttctttaaaaaagtgcagatttgttttgttattatttttgggtcaaaatccaatctgaatttttgaattagttttataatttcagaatgatatgaattctatttgtgtttaggtgctcacatgtctataaaaaaaaggtcttacatgtgaagtgataagattacttctgtagccattggtctttgatagtgagagacaagtaaccacagtttgccggattcactttacaatttttttggctaggtttaaacaaattcttttacatggggactaatgattgaattatctattagcgctattaggtgcattttttgcttttggacttgaaaattggagtatttctgttattatcgttgactggtgataagagtttgaaaagtggctagccttagcctagttgatcgcatgcttatatatgctcttttgctattattgttaattggttaaagtttcgaagtcgttggaatagatgtgaactaagtttatatactcattgaagattttattgcaaaagcagtggttattttgcaactataatttaacttgtgcgaaatattacccaaatactacacttgcttggtatttcctgcttgataatttttttgctagattttgtttgtatggttagaattttttttatgagagatatcataatacatttatgatttgagatagtaaaattattgtgttctattgctttatgatgaaaacaactacattttcttaatacacttgtgagattttctttatgatgaaaacaactacattttcttaatacacttgtgagattttgcatgcagccaaggcaaaaggctgggttagcccaaggatctca

SEQ ID NO: 44446 - DNA, 898 bp, Manihot esculenta
  Intron number 1 from transcript cassava4.1_000620m (locus cassava4.1_000620m.g) derived from phytozome v7.0 (chr-ID scaffold04890; pos 18085 to 18982)
gttgggatcttgcgccaattaggcgatctcgctgagtatgatcctttttacttgttttaatgtttgagattggatgttgcatgattaatggagctaatgtttttcaaatcagattggaagttctgcaacgattttggttatgatttagtggaagaatgcgattttatgtgaataatatctcttcttcttctataactatacgaaaacgtctattttattagttatcaaaattacaaaccttataaatagatagatgcagagtgaaatagagaaacgaaggaaggaggaaccgttacttagtttttggattcagtagaataagatgcttttcttatttcagttgaatggtgagttaggcatacgagggataagaagtagagaatttcaccagataggagatatataggtattggatctgactggctttattgtgccgctgaacgtgttcgggtgaaaacagtttaggtaataacgttgaaggacaaatatctcctgaagctaattcatcttaaaacaataacctctctttggagtgtgattttttatgctgctgggagctccttgaacaggatgaactgatgataagttattctgtaacacatcttattctatgcgtttagacaggcatcagactggtagagaaaaaaaaaaaaactatccttggaacctataaattcattaatgaaaattatatttttcttgaatgtaaatcattaatgaagcatgatatggtttactaaaacttttgcttttctgtttaaaaaattaaactagtcaatacacttggacacctggagagaatttagcttccaacatatttttttgaatgtgtatctaccagtaatttaactaacatagcatatttcatttgtttgtagatttgcagcagaggtttttc

SEQ ID NO: 44447 - DNA, 986 bp, Manihot esculenta
  Intron number 3 from transcript cassava4.1_030964m (locus cassava4.1_030964m.g) derived from phytozome v7.0 (chr-ID scaffold10632; pos 55744 to 56729)
cctttttgtgcatcctgaatctcagaaggaagcaggtgaaattaattcatatctttgtgatattgttacatttagagaacatattttaagctatgtctctccaatctttttagacaaccataaattctttattctgcaaatttctttactgtgtttttaaacttttcaagccttgttttagataaagcatcaaattgtgtaggtttttatttttgtgtgtgttgcatgcatgcacattataaaaataattgcattaaccatctggagttaccgagaactcagagaataatcacttttgtggtttcactgcttgggtaccatcaaacatttatcaacttgagctttcaaacaactactttaaactgattttttgtgtattactctttcttattcttagtagaggaattgtaaattcagttttctcatccattccgtcatttacctttacagaacattgtggcctttctgatcttagttgcttatgaacggtccatatgttggtaaacagtttatgttattgacattctgacttacttctcaagacataacagtttttgtctttgcccttccataacattgttatctgcttagcataatctttgttagttcttgccctaattgaggtgggtctccttaacactggccttattaaattactaaaatctacttagctatggattctgggaccaaaatatgatgagtaaatataataaaatattattgcccatggtagactctagtatttgtaatagataattttctatataggccattactctgaatggtataaatgaccaatcaaggtccttggttttggttctttttgaagctagttgacattctgcattccatgtttcgagtcaactatatgagaccagaagttaggtttgcttttcctggactaaaattcttatggttatttcttcttgagttcttacttcttacatgcagaactgttcagagattacctgaagcagataagggaa

SEQ ID NO: 44448 - DNA, 677 bp, Manihot esculenta
  Intron number 1 from transcript cassava4.1_012900m (locus cassava4.1_012900m.g) derived from phytozome v7.0 (chr-ID scaffold08359; pos 719495 to 720171)
tcgtgtatttcttgagcaattctctctcaattgaggttttctttttaaattttattttatccattaaactcaattactaagtgggcttttgttggttgtacgcattattattgttggttactgcttttttgtttaattcggttggttgatttgattatgattcgtgcggttgatcttcagtttaatctcaaagttctgaaacttctggattgtgatgtttattattttttgctagacagattatagcaatatttttggtgtgtgtatacacatatataaaaataaaatctgcatatatatggtagacaacagtatgtacatgtaagataattatgaaccatatcaaagtaacccactcaaataagtgggaataaataaataaattcataaacctataattaactgggaacaaaacatgggacctccaagttcctagagatcatctttgccactaggctaaagcctcattggcgtaaaggtatccttgttattttttgctctttttggattctttgtttgttcttttatgctatagtccattcataggaaataatcacaaggaaaaacaacttttaaatttgtggtaaggatctatttgttaggttccctattctatagtttgtatactgccctatccgtgtctcagtggtattttcttttgtacagaattacttcgg

SEQ ID NO: 44449 - DNA, 136 bp, Manihot esculenta
  Intron number 1 from transcript cassava4.1_014533m (locus cassava4.1_014533m.g) derived from phytozome v7.0 (chr-ID scaffold07859; pos 511201 to 511336)
attaaagctctcactactggtatattttttgttttttttttgagactcggaagttccgtttttagtttgtaggagtttggacattccaagtttcttttgaattattgaaatgtaattttcttttcctctgctgcag

SEQ ID NO: 44450 - DNA, 1000 bp, Manihot esculenta
  Intron number 1 from transcript cassava4.1_009722m (locus cassava4.1_009722m.g) derived from phytozome v7.0 (chr-ID scaffold05875; pos 2033414 to 2034413 reverse strand)
cctcagaatactgctcaggccattgcaagctgggggtacttcaaactcttgagtacctttttctttaacgaaatcaactttctatgcactaataatatgttttttgcatgcgcaatctcctataagtatcatcttttggtttttggtttttggctcttaatgtaatcggggctatcatgaagcttccttcccccaaaatcctcatttttaattgcttcaacctatttaagaccattccattagattcttgttatactgcccgttacctgtcaattgccagagttttttgaaacgaggtcttattattatcattttcgagatggttgtaccaaaagaaattctgcgtttgcatcctctaagaattgggtgctaggtggaaatttccaactgaaagctatttatcaggtcttaatgtgataacgattctcacctctttatcatgagacgcgtgcaaagtagttttccttttttcttcctcccccttcctgatttagggatgggattaatatggaacttgaaaatttaggagatttttatcatttcagttgagtgattgtcatcgtagtgcttgaaggatctccttctttaaatataaaattaaatctaaatctcctccttttttgggattagtagagagtattcgttggagaaccctgtttcttacttgggtctcactgagaggcgggggaggagtctaagcgggagtagctactctttcaaaacagaaattcttttaatcaataatggaaaatctcttccataagttctgtttcgttgcgaaattgtcttaattaaaaagggaggaagaaatctatttttttcacctctctttggcagtgctttggcttccttctcctggtcaatcctagtcctaagtggtttcaccagctactgcatctttcttgtacctctaagcatatcaagtccttatttatgttacatctatgtgttctcaatttttgtagtgtggactatattgttctaacaagtgtagatcgtg

SEQ ID NO: 44451 - DNA, 942 bp, Manihot esculenta; identical to SEQ ID NO: 43775
  Intron number 1 from transcript cassava4.1_010679m (locus cassava4.1_008198m.g) derived from phytozome v7.0 (chr-ID scaffold09880; pos 643655 to 644596 reverse strand)

SEQ ID NO: 44452 - DNA, 1014 bp, Manihot esculenta
  Intron number 2 from transcript cassava4.1_009968m (locus cassava4.1_009968m.g) derived from phytozome v7.0 (chr-ID scaffold11010; pos 281367 to 282380)
ttaaatctcatttacaggtaaaagaaccatcttctcaagtaatctctcacctgggttttccatttcatgtgttgaattttcttctttaattaaggaaaattctgtgttttgtttctagattatgtcaaaatcattgttgtacagtgtaaaaatatgcagctttaatggcattgttaagctgaaatggcgatttaatagcctacattactggaaggttttaatacataaattacaaattccaatgtttccctgcagagggtctctcaaatccttagcacttgtttttcttctggatctgacggtgctgctagctaataaacaactttttgcttggaagaacgaaccagaccaagtaaaaatcaataacacacacacagagagagagagagagagatgtaagacaaagcccgaggaattcaaaatgaatcatagagccaagccaagacaagcttacactcaatccaattatttttatttaaaaacaatttttttctcttacacagaaggtgaaatttattattatttttagaaaaagaaaaagtacagaacaccatcatttctcaatgatatctttctcagatgggtttattaaccatacattcttaaccatggttaatcatatacatgtataattgcatataaaaacaaatatatatatctatttatttgtacataaatgcttctgttcgcagttacatgcatcactcactttttacgcttcgtactgtcactgctcagaccacctatgtagtatatcactgctgctgtttctagttacactcttcactcattttccttctttttatcataattatgattcgtatttttcagaaaaatattcttcttttttgtatttttgacatttaagatattagagaaaatttataaatataaaatattttctaataaaatttctatatataaattattaatattataaaaaattatgcatttttttatactaacaacgtagttaattagaatgtgattgtgtttcttgaaatgttattgcag

SEQ ID NO: 44453 - DNA, 308 bp, Manihot esculenta
  Intron number 1 from transcript cassava4.1_029079m (locus cassava4.1_029079m.g) derived from phytozome v7.0 (chr-ID scaffold02996; pos 22841 to 23148)
cgccaaccaaagtgcccctcaggtttctctagtttgattattttgcgatgataagtttcttttgtttactctctacttttatgtcctttttcttcattaaccatgtttgtgttgttcgctattaaaagcgcatatcccgtagaaatgattgctctgattagaatccttgtagagtgatttaagagtttctttatttattttttgtgtgtataaaaacgcaagcttgattaatgtagcatccgttgcttcttgccctctacttcatggatgctcttaatgtgactctgcttctatgcagccaatctgga

SEQ ID NO: 44454 - DNA, 503 bp, Manihot esculenta
  Intron number 1 from transcript cassava4.1_002527m (locus cassava4.1_002527m.g) derived from phytozome v7.0 (chr-ID scaffold03542; pos 455390 to 455892)
cgtgtgcactcagggatacccatacccatgattatatttttcagcacaagtagtatgcaggtaggagagattgcaaccacgtggtttgttttttcatatactgtattttgcttctatgtgaaaaatcattttagttgtcaaacttaatgtagctacttgtggacaagtccttgtatgttgctgatctttttttttttttaacaaaaaaaaaaaaagaaaaaattcttcattcctaagctttaataattgacatgggttctgtacaggaatagccaagttgctgaacatgtgacttttttcttttctagagaattgaattttccctattattaaaccatttcatctcattctttattgtttaattggcagacactgtcctgttgcctgaatatgtcatccatctttgaaacatatttttttaatcattttgatgtttctcattttattatcttgccattgcttgtgcaggtcatttatcgaatcaaacttccaggaccagcaat

SEQ ID NO: 44455 - DNA, 505 bp, Manihot esculenta
  Intron number 4 from transcript cassava4.1_004955m (locus cassava4.1_004955m.g) derived from phytozome v7.0 (chr-ID scaffold07859; pos 754542 to 755046)
tagaagaaattgtccattatcttcgagatccaaaggtagatttccttatgccattctttccattaatcatctctgtatacaacgcggtgatgtcttccctttaggttgaacagatgatagagttattaagttctcaaaaatgaatgttatgagcttgtaaaaattacacctctcatggttttctcaacattctcattgcatgttttgaatcttcaataattggtttcacagtccgcctgctttatgcctaaactagttgatgttattaattagtatcaattgtagtatcttctatgatcattaagagtgaaattttcctagttgtctgtctttatgcttctagatggtttcaactatactttcctaagcaccaaaatgcttttttttatttcatatattaatcatgtaaatttgatatcactaaaagattgatttttccctttgaatgattgttttttccctggtaaaagcgcttcactcgtttaggtggtaagctcccaaaagg

SEQ ID NO: 44456 - DNA, 980 bp, Manihot esculenta
  Intron number 1 from transcript cassava4.1_011152m (locus cassava4.1_011152m.g) derived from phytozome v7.0 (chr-ID scaffold09880; pos 95304 to 96283)
tggcctggtatgttcctctctaattcacgtgtttattatgcgtagcttgtgctctgttggattcgtgggtgtctttcgattgtatttgtggaaacacagagcaccccttgtttgttttgtgggtagttagcttttcaattgattttctcttttttttttttttcctgtgtatgaatagttccgctaaagaaaaccatacttagcaaaatgagccagaacccagtattgggttgctaatgatgatgatgattaattgatagtaaagagttcgagtgccttctgttcatgagccaacttgtggatcttatattgcattctttttaatgcaaaaactgaattccagattgtattatgtcgataacaagttttgtgcaattccagtgaccttggaataaatatttgaaccgtttaactgctttgtctccacagtgaatgctccttaaaactttgcttggcaaattagattactagatctgtttaaaattgaccaactttcttttagttatttgggttagtgcctcttttgttcttgcattccttctcttcattctattcacaaaccttgttacatatagttgctgtctgttcaattgtactgtttcagagctactgcataacttaattaattatttgtgtaatatcagacttctcgatttcttttctgagggagttgaatttttgatattgtgtcagtcatagcattttctcacgtgttgtgatgttactgggaacataatgcttcatgttttttcttgggtgcagtccttgtgccattgacttcatatggtttaatttatctgttatattggctaatggtggatcttaggcggccatcacaattgaagctttcgcttttaaatttttgcccccgttatattccaccttttaaatgcaattatacgggtgcttttctttattgtaaaatattcattatgaaatctacaggagaggcacactccttaaaagtggagaagatctta

SEQ ID NO: 44457 - DNA, 711 bp, Manihot esculenta
  Intron number 1 from transcript cassava4.1_000082m (locus cassava4.1_000082m.g) derived from phytozome v7.0 (chr-ID scaffold03542; pos 178856 to 179566)
catccaaattcaagagcctcgagtggcttatctttgtaagccgtttcactgaatttattcgttgcttttatttcttcgtccgagtgagtttgtttactttccgttgcttgtttgacttttttggaatttagtttgattggacgctgaaagttgaataaattgatattgttaaacagagcttcatttaattatgattttctgttcagtttcgatttcttccttttctcgtttcttatcttctgttattggcgcggaggcaatagttgtgaggttgggaagtcacttttggatgctgaaaaacaaaggaaatgattgtcttttaatttgcacaatttttattttatataatttggttatcaatataatgcagattcctcattcatagattagaaaatgatcaactgcttcaatttctgatcctttaacttaatttatttccagaaattgtacattctgttgtcgataggaagatagtccataacaaatagtacatatgagttaaaactcattggttttacttgaacgttatatatttgcttaagtgacaatcttgaatgttctcacttttccctgaatcctatataattgcaatgttgttggtataattttctttcagcaaattctgatgtaaaattgtatacatgctatgtgcatttatttatgtttgtttctagagcaggccgatttcaagcttttgaaatagcacataac

SEQ ID NO: 44458 - DNA, 702 bp, Manihot esculenta
  Intron number 3 from transcript cassava4.1_013088m (locus cassava4.1_013088m.g) derived from phytozome v7.0 (chr-ID scaffold10729; pos 130682 to 131383)
ctagtctacttgagtgagtttacttttgacattttattattggcatatattgaattgcagttgcttgatgctggtccaactaaatgaaatatgtaagtgtatccagtcaggtagctatattttgaaacttatttcacccattgtatgctttaattttttttcttgttctgtaatttcccccttttactcggcattttaagttgtattcttctttttctctttgggtagagatttagatcttgttttggatcttatatattgcaatttagagtgcttactacattatacatcaattgatttttcttaaacaataattataatgacatcctgtttttcaagtaatttcccttttgcttttggtgtgtgggtgaatttaaatgcatatgtcctgtttacttatggaaaacttttccagaaaggtaattcagtttttcgtgagtgaacaatcctcttgcttttcagatggacaacttgcagttctatcgtgtcttccaattcacttgtcactgattttaagtggttgtaggatattgttcattcttttatttgttatttctcatttacagctcctttgatccacaattccattatttagcatgtggcgcttgtattattgtacttcaaatggatttctctttcgcactcttttcatgttcccttcatttcctttttgtctgtgatgaagatatatatatcttgcag

SEQ ID NO: 44459 - DNA, 589 bp, Manihot esculenta
  Intron number 2 from transcript cassava4.1_004162m (locus cassava4.1_004162m.g) derived from phytozome v7.0 (chr-ID scaffold02538; pos 270759 to 271347)
ttcctgtcaatcctgaagctttaggaatacctgtaagtggaaatacttgttgtttgggatgcttgatgacattatgttttatggtccttatagcataatactttagtaccttttttcccttgtccatcactttgcaagctttgtgtttgaatattatatttcattgccaagatcagtaaagctttgcaattaatttggcattgacctttacttgtctttgagtgtatgtatcataaattcttaggactctcatttatgcttgctggcttattattattctctgcatttctctctatgtaaggaccaccctcatgtaaaacataggaatctcatctgtcttcttcattgtcatgtcaatctccacctctatataacaagagaaaaaatatccatctttgaacattcagtatttctttatgctgactgaacagaaaatgtggtagtactagtttttttttttccgttctttttctgataatagtcctatattttatgccagactgcttgagatgtttatttcttcacatagaataattttttttttgttggtacatttaaccaggattattttgacatcattgatacacca

SEQ ID NO: 44460 - DNA, 547 bp, Manihot esculenta
  Intron number 2 from transcript cassava4.1_016496m (locus cassava4.1_016027m.g) derived from phytozome v7.0 (chr-ID scaffold09703; pos 85777 to 86323 reverse strand)
gatttgggaggagcaccctttgggtaagttgtgtcttttttttttttttaacaaaatttcttatacattttcttttgaaattttgttgtggagctcgtcctcatactttgttaatatacactttagatgctgctttctaagtttgacaatcaaactaatagaaacagaggcttagttcttggcaaagattcggaatgctgtaaattttttaatgttagttaattttttcaagctctattctatttggaatagaatctttttgtcccgtgatcttgcttgttcctactggtaatctcgtgccacattgaaatgactcaagatttgccatgtatgacctagttttcaaagtaaggagctgcaatttattcttagcctgaactagtagtcttaggacctcaaaatcacctgagaaccgcgctttaaagtccaaagctccgagtcaacatttgggtatccactccattttgtgttcatatctctagactttagtttcttgaattgaccattgccattctcacatcattttctgttgttttgaactgcagga

SEQ ID NO: 44461 - DNA, 202 bp, Manihot esculenta
  Intron number 1 from transcript cassava4.1_029880m (locus cassava4.1_029880m.g) derived from phytozome v7.0 (chr-ID scaffold04355; pos 80088 to 80289)
aggagaaaaagaggcatttacctattacagaggtgcgatttgattagttttttatttacccctttcggtcttagaagaaagaaagacaattcgggatagaaaaaaaaaaaaagattattgaaaaaatctacgcttgttgaaggtgaagtttatagataaaaccattccttctgtcgtgtatccccgattaatgcagcctcag

SEQ ID NO: 44462 - DNA, 554 bp, Manihot esculenta
  Intron number 1 from transcript cassava4.1_021792m (locus cassava4.1_021792m.g) derived from phytozome v7.0 (chr-ID scaffold08686; pos 142491 to 143044 reverse strand)
attgagtaagtttcccttgtaattggtttacattaattatttcactattttaattagtgctaatatttcattgatttacttggtcttttgggaatcatatttgtatctcattgttttagctattgatggttccaatttacatggtttttgggatcatgtttttatctattgtttttgctcttgatggttcccttctatgtgttgcagttacagtgttagcagtgatattagcatatcaaggccgtaccatctgccaataacctttaaatgttaaactgtgtgaatcatgattccaggaaaaaacgtgttcaattagtgctaaaactttggtttgttgattttccatgtttaagagagggaagatagtctagaatgcttttctttattttttcctttttccttcattttttaattgttttatatggaaattctgccttgctttgtctgtggcatgctttgatttggcataatcagttatgcactggaatattaaatttcttctgctcttattttgctcaaacagcccggaaggaattgaggctttgtgttcagac

SEQ ID NO: 44463 - DNA, 918 bp, Manihot esculenta
  Intron number 1 from transcript cassava4.1_010668m (locus cassava4.1_010668m.g) derived from phytozome v7.0 (chr-ID scaffold08359; pos 534978 to 535895 reverse strand)
ctaagctacgcagcttactccccagcacaaccaaggtaattaagaaccgcaaaagtcatccaaaattttttgacaattacctacaaaattatgaaattgttgaaattaaatatcaaccctctctactcgccatgtttacaaacatgcatgtgcatatattaatgttttaggtgtcatatctttttgttttgcattagaacgagcccctttcttttttcattcgaaagatctctgtcgatcttgctaaagattctagttagatggctgttctgatttcatttcattgaaacctaccctttagatttgaaaggcagtcacgtttctctctttttgttttcatctttttaatactaatattgtttttgcttttggtttattccttctctggaacttgtggtagttccgaggagcaaaaaaactaaaaggaataagcgttaatgtcgcttagatgatatgataaagaggaaccaaagagcagttgaaaagcttccacggaaatttcttgccggacatcagtcaaactaattagagataatggaaaaaagatataaagtcagacaaaactagcattcttgtcagtcatatggccatgccctaatcctcctttacaacttcatgccattaggaacctagctactttcatggctgaattatttaagtagactataaacttcttatctcatctattcttttcacacatcaaaagctttctttatactatatatttataattagaaagaaaattccatttgggtcatttcttgtgaatctacgttccttattttgtttcttgtttagttcgataactcatagtacatatggatatcaactttaacatggcattgattttgtcctcttgtttggacttttgcctgttgtgtagacggataaagcttcattactagcagaggtcatcca

SEQ ID NO: 44464 - DNA, 1020 bp, Manihot esculenta
  Intron number 1 from transcript cassava4.1_008993m (locus cassava4.1_009009m.g) derived from phytozome v7.0 (chr-ID scaffold04360; pos 155409 to 156428)
ttcaccagttgaaggttttcgggtcttgcctcttcgtaagtttgggtttctgatttaattgtttgattacttcattctttttgctttgttttattatttctgtttgctttaatggggagtgtttactgcagttgtatgtgagacattaaccctccttttggaataagaattttacaaaaatgttcaagggtgtgttccgttgttgtaaaaggagttgaacccaattgtgtttctgctcttgcgagtgattccttgtgtcattactatcgctgtcataagcattgatttataactcatctgtttctttgtgaattttgagattttactttatattttcatattatcttataaaattaggatagcaagatgtaggtgttttccaaagtgagcgcagagaagtcaaagaattgcctccatgttttaatttgaacatatatgaaatggaatttgttaataatataatataatatgttagtaattaatttaatttatccttttgtgtaataggagcatcacttgagttaatcatggctgtcttaaaatactgcaatatcaatcttctccctatactgattcgatagcattgtaaaaacttgattagatagatttgatgagtgtcaaagttgttactgttaattggtattgtctgtagtggaaacgttgttgggtttaattgcttagaacaaaattctgtattgatgaattgagatcttcaatggtttctttcttggtgttgagcaacttgaaaactcaatataattattagcaggatgggaattgcaatctacagtatggttattcaatccccgggaaacattaatcgatgttgaattgtattctgtttttaatggtaatgtgaacaaccaaaagaaattcatgaaaagacgaaatgattcaactaaccttaatctatcatttatcaatctttacttcccaaatctatctcaacagtgaaactctattttcttcatattttttcttgcagatttctgtctagcacaaacagggatcaattgcttg

SEQ ID NO: 44465 - DNA, 425 bp, Manihot esculenta
  Intron number 1 from transcript cassava4.1_022631m (locus cassava4.1_022631m.g) derived from phytozome v7.0 (chr-ID scaffold03803; pos 78086 to 78510)
acgtccgctgcaacttctgcaacacagttcttgcggtaatttaacatctgtgcatatattcttattaccatcttcaagatcttgtttcatacattggaagcaaacatgttttttgtttataactccatgtcttctcatgtttccctatcatatttttttgtttatgtggtacacttacatttactaaccctattatagaaaatggacagcaaacactgatgggtctataatatgcttatctctctctctctctctctctctctctcttctctccattgtttctacttaagctttacatgttcacagttgcttcaagcttgtatagggatgaccttattacgctctaagatctgaaaaatcaaaggaagaaaataaattatttgttatgaagagtttgatatattgtttgtgaaggttgggattcc

SEQ ID NO: 44466 - DNA, 901 bp, Manihot esculenta
  Intron number 2 from transcript cassava4.1_014669m (locus cassava4.1_014669m.g) derived from phytozome v7.0 (chr-ID scaffold06918; pos 27596 to 28496 reverse strand)
ggttatcttcagtcacatttgaggtaattttcttctttgtttttttttttttttggctttcaaaacataaaaaaaaaaaaacaataataattgattggctgcagtgcatgcacgtcttgtcgtttttaattcactctctctgtctctgtagcttttgatcagaaagtaaagtttttcccccattttgcccactcgcaatctctttcttcctctaattttagttgagtttctagtttgaaattatgaagttttagagtcagacttccttgattggactatgggaaggttagagtttaaactctgacaactttaattttccataaaagaagaaattcaaacatgacaaaggaaaaaaaaagaaaaatttaaaattatttcattttagagtaatgattacaccaaaatcttctcctctaatttgcataaagcaagtttgaattagcaatggttagcctttcaaattcacctttaaaactatataattaactaaaataatgactaactaaaaatgtttgattttattattaaaaaaatatatttttttaatgtaattgagcacttttcaaaaggaccacttttgacatgctttaattgaaacatcttctttgcttctacgccaattttctttctagtaacatacaaacgcaccaaattgacaaattatagataagataatgagtgtcaagtaaagagataatcgataattaatttatttgttatgtcattttccaaatttctggaacagcatacatagattaggacagctaattttagcaatcccttttaatattgtcatgttctaggaatacagacaaagttaaaggatagagccgtagagatggaaagacttgaatctaatatattttaataaaagaaatccttaaaacttttgagcaggaat

SEQ ID NO: 44467 - DNA, 564 bp, Manihot esculenta
  Intron number 4 from transcript cassava4.1_007433m (locus cassava4.1_007459m.g) derived from phytozome v7.0 (chr-ID scaffold02295; pos 17300 to 17863 reverse strand)
tctctataggcaagcaggggttaatccattagcaggtaactaaatggtttcctgaagttatctttgttttccatatttgaaatttgattaattaaattttgttgcagattgatcaagaacttatatacattggtatctaaagtttgtccccttgcttttaactccctgtaaattattcttcatataaaaggcagttggttttgaaatagtggttaaatgaataaatgacaaagtgtttattctttttatatcaatcttgttcattagattacattaacatcatcgttattatgcttttactttttgctgtactggcatttagtatttgtttttcttcattcttatctcaggagatcttgcttctgtcattttctttatttcttaatttatttttatactacagttatcttatcccatatggcatgtcaaatctactaagttatacaatatttctatcttcagttttgtcaatatttagaattgtgcattgggcttaatggtggaaatgcttaataacatttcactccaggttgttttccaactttggctacgataccagtctgg

SEQ ID NO: 44468 - DNA, 836 bp, Manihot esculenta
  Intron number 1 from transcript cassava4.1_008939m (locus cassava4.1_008939m.g) derived from phytozome v7.0 (chr-ID scaffold02590; pos 94192 to 95027)
tttgaagcagtggagtcctctctttctctttctgggtaatgctttattggtttttttttttttttctcttttgctctgtggaaattttctcgtgttttcttagtcccttcagatctttttctgttttctctgagaaatttgcagtttttgttcgtctttataaggtgggttgttagcagtctacacgttcttgctttctttttcttttcctggtttcttggtattctcggtggagagcttggaagtggtagggagaaaggaggaatttgttctcttgaatctttttccctaagatattaacgttcctttgtagtcttttgtctgtattctatgattttgatgtttttaaaagaaaataataaacatcgtccattcaattggttgtgttttatctccactaaaccaactatttggctagaactgaagctttgagttgttcttgtatgttattctcattatttagtttttttttttttttttttttttttcatatgatctttttagttttgattatactttacagtttaaattgttgagaatgatctgttctgcattcattttggtggttgtgaaaactaacagtttgtacttgtatagttattttgtacttgtatgtgtactgaagttactaaaatcagctttggatcttcatggaatttgattgcaaaaaaccaggaagaaattagattaaatttgataacaaaaattacagccagaatcaataggttctttttctgtttatctaatctttaccaattggttaattaaattttaaggaaatttgtccagctttgctaataaattttgggtgaaaattgctataggttgacaaaaag

SEQ ID NO: 44469 - DNA, 970 bp, Manihot esculenta
  Intron number 2 from transcript cassava4.1_027020m (locus cassava4.1_027020m.g) derived from phytozome v7.0 (chr-ID scaffold06960; pos 145804 to 146773 reverse strand)
acagagacgtgagacaggtaaaaaggaccattgaacaaagtgatttctttctttcaagtgtatatcattgttatcctgtcctgtctccccagtttgaggatgaacacgtgcatgtgtgctcatgcatgaacacatacacaggaatgctttcaagtaaatgatttgcatttatggttgaacaaataaaattggaaattgaaaaatctgacattgataaaaagtttatattgcaaaagttggttctatatatgatttgattgtgatttattagatatagtatgtttaataaataaacatgctttttcaattttcaaccttaagtcctatgtgtttgtagttttattgtttaatatgctttacaattaatttaggaaattacaacaaattgctaccaaaatgtatatgttcatatttacttcaaaataatgactattgaaaatatgcaatttttgcaagaaaaataacattaaagattgtgaatttgaagttcaaattaattgatataaatagatcggctcattactagagttgaccagtgaactgaattggaccatcaaagatgacaattttttattcagaagaaggccttatggtttgccatgcccgccagtctcttgaaagtcgtctttaatttccttgtccctttttgcaaaaattcccctctcttgatttctatttatccgtctttttcttccatgcatagtttgatcgttgacatcattatcttatatttgattgggcgtgttctgaataatcctaaatttcctgctaataaagatatgcagatttgttcatatttgttgattagttggtgtattacatgtctcccctaatcaaattctctcattatatgtgctagaacttaaaaaagaagaggggaaaaataaacttttgtggtttaagtttttgcgtatactaggattgattgggtttcctctcgttctgcaggttttgaaaattgttcggaagg

SEQ ID NO: 44470 - DNA, 810 bp, Manihot esculenta
  Intron number 1 from transcript cassava4.1_011119m (locus cassava4.1_011119m.g) derived from phytozome v7.0 (chr-ID scaffold02477; pos 31359 to 32168 reverse strand)
ttcgcttactagctggattcatcaacgagcaaaaggtaagtttcccgtttctttattattgttttcttctacctcatttatttctttcttttttttcctcttcaactctttgaatcaatcgatgtgaaaatcgtagcttcacctttaccaagtgcaatgtgaacttgtctaggcttctcatattatatgatctattgtctaagaaactttgctttacttgttaatcgaagatttagcatattcttgcatgcatttgacatattccagcttacccttttcttcttgttagtgtttctttgtgcaagatattaatcagatttatgaactttaaactagaactaaagcgttatgggctattttaactttcataggtaagaaattgtctatgttaatccttgtcgaatttgggatgtctcttggaaattgtattgtcagtggtgaatttttctgctactttaatccacaagtccgttagctacaagaaacccattgaaattatggggatttcttatcatgggatgggaatacatcaatgggaaagaattatcgtgactgctttgatgattaacaagatggaggatatctctagggcaggatacatgaaataaaaagaaaagggtaagaaggatacctagtgagaactttaacccttttttcttctcccttttctttaaagaactatgaagtaattcttagatgcaaacaatgatctctgaattatgttaaaggtgctgctcttgaaatgatttttttgttacatttattttggcaattttttctagatttcaaattttcattatttctaatcag

SEQ ID NO: 44471 - DNA, 722 bp, Manihot esculenta
  Intron number 1 from transcript cassava4.1_003968m (locus cassava4.1_003968m.g) derived from phytozome v7.0 (chr-ID scaffold10632; pos 20843 to 21564 reverse strand)
ggtgctgcattggcatctgcttctaaagctgaaaggtatgggcgaaagtaactttattttgtattttgatatgggttgtatattttttctcattttgctattttatttaggtgaatcttttttttagttctagattcccatttcagctttaggagtagtttccatcttaaattgaaataacaaaaagaagaaattaagtgctgatttataatcatttgtaattgtgatagttacgcatgctaattatgtgatatgggaaataattatgtaaatttaggatttcatattatcgatgtttgatcagttggggtgggtcaggttattgaattgggaagatcctgaaatggaatggaggaaagatgtccaaaacttaacattcgcttgtgtaatgcactaaatattaggaaaagtaagagctgaggatttattttacctcctttaacttgcaaataagaacttgggtctatgattctactaaaatgtaaaatctgggtaaagtatcaattctttctcttgggtctggggggaaattgtaaaaggtgtttggaatcggtgctctgtgcacaaacaaaattgggattgtatttgtgggtgtcacatggtcatgctaactactgcctgtttcatgatgttggggtttaaaatatgctatatgatcctaagtaatgatttatttgctaaacttacctggaaccccagatctcagatagctgctcaaccgt

SEQ ID NO: 44472 - DNA, 1002 bp, Manihot esculenta
  Intron number 1 from transcript cassava4.1_002633m (locus cassava4.1_002633m.g) derived from phytozome v7.0 (chr-ID scaffold09365; pos 299580 to 300581)
gtgaaggtaataattaatctttttaattgtttatatatatatatatatttatttttatatttgttgagtagctatatatatcttattttaaatttgaacccatctgccaatttcaatcaaaatcgctctttaaaatctaaaaataatcaaaatctgtaaaatccgattccatcaaattaacttgatggagccgtaaaactcatggtatgatccattggattttctttttctttttacaattttagaattcttttaggcacttaaattcatacaaggtaacttttgaatatatatattttcatgtgatttctaaattcatctaaataatttttaaaattatttataggatggttttaaatattaaacttaaattatttaggttcttagctaactattataaactctatataatttctttatcccacctatattaccacatacgagattttatcatattttaaataaaataaattataatttcttgtaatatgacaattttcactaaaacaactatattccattttttaagaaaaataattatattttatttgtggatgtccttacaaatttctctaaaaaataatttcaaaaatgacataaatttattattagtgtgtttggatagtcaattagagaattttatgatgggagtgtataatacatttttttttttttgaaatgggattggggatcggaggagtagaatatgagacttctcagatttactcttttgcaaatacacttaagagattaaatttgtgagttctataatacatttttaaaggttgtgttagacattgataattgaaaatgataattaataatatcttatgatggagtacattaattgcaaattgtgcatttctaattaaaattgcaagcatttgattttcgaaattaacacccatatgcatgtatataattcaaagatggtgagaaacttatcagagattttcttgttgtccatggcgtaggaggaactttcgcaatatattctctcat

SEQ ID NO: 44473 - DNA, 875 bp, Manihot esculenta
  Intron number 3 from transcript cassava4.1_016437m (locus cassava4.1_016437m.g) derived from phytozome v7.0 (chr-ID scaffold04351; pos 45723 to 46597)
ggtgtatgttctttcttatcaggctttaattcttgtttcatgctatggcattttagcaaaatatattccattcaatctcccttttgtctgtttaagctgtactcgcttgttgcaccatggaatggaataattcatagaacggttatgtaaaagccaaatggaataattcaattctgatgggcactctaaagttaatgcagtggcgttatggaacttgcatgatgaatctgcatattgttgcttatatgttgggggttcagatttagagaagaaaaagcttgcggactcgtaatttggtgttatttttatggatatttgaggttttaaaaaagtggttatttggtggctggagaattggatccaatcacaggatttattgggccagcatttaaatctaggatttatatgactgattttgactattggaggaggaactagaaacacttttagaaattgagtttatgttggaataatgatggatgagtttagattaagagtgaggaaaaggttgaatacttgaatttgatagttgttatttgctgcaataggaacttgcttcgcagcagcaagcagtctttgagagaaagagaattggagaaaaaggaaaaagctagagagggaagaggggagaaatcaatctgtgctgtgtatacacggtacaccaatagcttaccaaaaaaaaaaccaggacagtattttgttcttgtgtttattgtaggtttctgttattatctgatcatatttacaatcgttttgagtatactacaagaatgtattttcctttatattacaaattgcaactctttttattatccatagttacttattttcatcttccagatgaccgttctgttatctttttgcaataggcaagc

SEQ ID NO: 44474 - DNA, 875 bp, Manihot esculenta
  Intron number 1 from transcript cassava4.1_009019m (locus cassava4.1_009019m.g) derived from phytozome v7.0 (chr-ID scaffold09692; pos 62853 to 63727)
gctttcctgtttaacaaatttcaagaggtataaacagaaatctctctggtttagcataatttgtctgtcttgttttgtttttcaatttcatagtaactaaatgaaatagaacataatcgattattttggtttcttttttgtgcaactgaattgttttttttgttcaaatgagtatcacgttggtgagaaggaaaaattttgtaaatttgtaaagaaatcttaatagatgtaagggatattgaattaataagaagatagaaggaatgtgtgagtggaagaggcagaatggcagaagatagattctaaattcattgagtgtttaattggcttgtcatgcttcaagtgaccgaaataaactattttttttgtttcttgtggtgttggtctagcatagttatttagaattgtccgaaaagagaattgggattggattacaatcgtacctataaagggtggaatagtttactatctattgtgtaaccttgcaatagacattcaaaagaacaacagaaaatgaaggcagttctaaaagcattttaatttttgttttgtgcaagagttatatgatgccatgtttttaacatggaaaaagatgtttcttcatgtgataattctttagagctgggttaggaaaggcttgagcttgtattaactctagttctcaaccattaaattcaaaggaaaaagagcatttaaattgatgatgaatcacttgtacaaggattttaccaagtgtttaatctaacagctaaaaggttggagagccaatttgagctccagccctttttagaacttccctcttcttaatggttatttttggtttctcctttataattccaggctgtgaaagttcttgcaaaaagttgtacttttgc

SEQ ID NO: 44475 - DNA, 470 bp, Manihot esculenta
  Intron number 2 from transcript cassava4.1_004105m (locus cassava4.1_004105m.g) derived from phytozome v7.0 (chr-ID scaffold04182; pos 106592 to 107061 reverse strand)
aaggtttccatctgagttctttttccttttttccccccttgcactgcaatatgcttttaaccttattattcctcgaacagaatctcaaagacatgatgaaattttgattcttggaaattgcactcttgatccttggaactgcttaaaatatattagtgcagtttaatgatgggatattacttcctgctcattttccagtttaaaatgtcacacatgctttttctgggtgccaaggaatgactttattatctaatttttctttttgacataattcagtctctcttttttctgccagtattgaactgatgtttgctccttgataaacttttatttttctaaaatccactggataattgtgttgcacgaggtttttttaactgttaatatattgaactaatagaagatgtttgtttcaaattagagtatggaattgactggcaatttttgttttgtggctagtgttgaaataa

SEQ ID NO: 44476 - DNA, 690 bp, Manihot esculenta
  Intron number 1 from transcript cassava4.1_009241m (locus cassava4.1_009241m.g) derived from phytozome v7.0 (chr-ID scaffold05884; pos 57509 to 58198 reverse strand)
caagctgtttttgctggaacagcctcttcaggtactatataacacactacactttccagctcttcgttatatttctcctatgattcaacaaatgaggaagcatgagaatattgtagcagagaaagaggacatttaaaagttgaaaaaatgatgtggaatgatttttttttcttgatcttgtaagtgcatataaaggcaccattgatttagtttgagttttcgttgaaaaaaataataataaataatttttttttaaaaaaaaccctactcttagaatttcaggaagaatggcatctaaagggactgtttttgcctaaaagggcaggaggttaaagatgtcctgctagaagtgataaaggtgctaaccttcagtgtctctcatatggatcagaataaggcattcatttcctgcagtcgcaacttttcatctttgtgatatttgtcctcagcatagcatgtttcctacatttccacggaaagactagttgtcaatgaatccattagaactgaaactaacagccattttaaagcattctttgaagtaataatttcggcactgaagccactataagcagtttctgccatacaggtttaaattttaattatgcaagtctcatccttggttcccctggctaaatccattgccttgctgcaggggttcttgtctccctcttgaggattataacaaag

SEQ ID NO: 44477 - DNA, 989 bp, Manihot esculenta
  Intron number 1 from transcript cassava4.1_018993m (locus cassava4.1_018993m.g) derived from phytozome v7.0 (chr-ID scaffold01508; pos 297270 to 298258)
tccgattccaggtgcttgttctccgcttcaattaggttgtcatgcgtactattgatgctacccatgtccacccagtttccaatatttgtttattgctgtgggtctcacttggttaagtagaaagtcactttctttagtcatcaatggtggtgaacatgaatctgggtgtgtgctgctgtgtttcaattttcatggaataggtgcttttttaacagtcgtaggtttatattcaacagagtaaagggaaaatcattgcctgccattcatttacgggcaatcttacactgatattgtttgttgattaatctgtgagagcaccctgattggtccttgtttcctcagctatgaacgcatttctgtatcaacacattgtcatactagataatttaagttagcaacaagttatgatttgttaataagatcgtgtggttctcagaaactgactgttaacagaagatgttgatgcctaatggtgtattttcatgaattgtgtttgttggactgcatttgacaattgaattggtacatgtttctagattgaggcatagatggattggcatgtctgtagctatttaggatttgaacatcaaaggccaagatgactacttatccatgatgtgcatcactgcattgtgatggttttgatttctagaatcttatacctttgctttggtggaatataaatcagattttttttttttataattccaagtaatttaaagaccttacttcttatcattataagtttatattaaggtatgtgaaataaacatcagtggacctgaccaagcctaaagttgcaatttcagatacaaattcttcttttgttgagctagttggacgccattttgtggtagacagttagaacttgagagtatttctaccagtttggcctaacaaattctgataattcaatggtgttaaataatgataattgagtttctctttgtcaatggttttaaatcatatttcttcattcaggttcaaga

SEQ ID NO: 44478 - DNA, 510 bp, Manihot esculenta
  Intron number 1 from transcript cassava4.1_012585m (locus cassava4.1_012585m.g) derived from phytozome v7.0 (chr-ID scaffold08301; pos 102167 to 102676)
cggtttgcaagatagcagaggtgagattttctgagattcttttttgggttcttagtagctactaatttagtcagatcacgacaatgagggatttgtttgtcctgagaattactttaaattgatttctatattgatgggttttacttggaagtggtggtggtttactatttgaagttattgttttgatcattccaagttgcctgaacctgattgaatattattcgaggaatgagtagtaactttttgatcctcggggtattcaactgaagatgctctagctgctgtcaagtaattgcctcaggcttctattttagcataataactactaatttagtcaattcacgatcaccaagattttttttttctttcctgaaaattggttgctttctttatgggttttacttggtgtaacgtatttgaagttgtttcgataaattcgcagttgtctgcctgatttttgtcgttggatataatgataacattttattcttcaggagtatttaactgaag

SEQ ID NO: 44479 - DNA, 598 bp, Manihot esculenta
  Intron number 1 from transcript cassava4.1_013549m (locus cassava4.1_013549m.g) derived from phytozome v7.0 (chr-ID scaffold05875; pos 1995579 to 1996176)
caggtagctgggtgggccgtcgacgcttcaagcaggtgcctcaatgtcgccttttcttccatggaaatttgcctctaattaatttgaatacttgagctgctgcaattttgatttgtatccctttctacaaattgatcactggagatggaagaaattagtattgagaaatttataggctgaaatttttgctagatccatgtcagatgatgttttattgagtttcaattatccaacctttgcttcgcagtgaatcgattaatttttcattatttttgtttaaattgtatttttaaaaaattgttttctgcaatttgcatgtttttgccttggcccaatttttgtaggttttttttttttttttttaggttctcttcttctattttcttgcaggtcatattaaaaagttatttttaatggtgttaagtgttcttagttaatgctgctgctttgcacaattcttgaacctcacagtttctcccccaaaatagtagtaaatctgtctccatgtggggtttagattcattttattgcctctgatagagatctcatggtatgatttataggtgggagcatcaaactgagattgcatcaacaaaga

SEQ ID NO: 44480 - DNA, 893 bp, Manihot esculenta
  Intron number 1 from transcript cassava4.1_009807m (locus cassava4.1_009807m.g) derived from phytozome v7.0 (chr-ID scaffold06948; pos 229198 to 230090 reverse strand)
tctttctttttcacttcgatccttcaatttctaaggtaagatttgatctgaaaagtctacttaatttcctttttcgcttatgctctgcgtagatcggtttcctctgatttcattatgtcgtttgctattttggaaaactttttagtccttgttcagcttgttgtgaatgagtgtgagagttggtggtgaatcggtgagcttttgttgctatttctttttatttatttttggatttatgttgccgatctaaggaattggtgattgttttgtgtctgtttttgttactgaatgtgagatctggagctaggtatagcgcgtgaatatcaatgcttcttagtttctgttttcgcatgattaagtgtctgatctggtgttctcatatctggatctgtaattattcgatttgatctgtttcttcattttgtttttgtttttcttccgatttctagcaagatctagctatgaactggttttttccctcctttttttttaaacactgggaaaataattatgttgaatcctcttgacatttcatattctggatcagaaattataaaaagtttcaaccctcagaaatagagatttttctttctgtttagtaaaaatttatgctggttttatcataatcttggagcctgcttgtatggtagtaggcgagacagatgttttgaacctaatgcctgcttgtggtgtacataattcaatattgctgagttataggtagattatgacatgttgttattaaattaagtgaaacttagttcaggacttgaaatgtaaggaactcttgacaacagaaaccaagttggaagggatcttatgtttctgggtatgtttatttttttctaactattgcagcaatttctgtatatgttcgtgcaggtttttaaaaa

SEQ ID NO: 44481 - DNA, 483 bp, Manihot esculenta
  Intron number 1 from transcript cassava4.1_001288m (locus cassava4.1_001288m.g) derived from phytozome v7.0 (chr-ID scaffold06906; pos 299898 to 300380 reverse strand)
tgcaaagtgcaatatcttcttgggttccattggaggtagccttcaaattcccttgatttttgacatttttgcaagtataactaagatactttggaagaaggagagctgattggagctttgagggtttagatttcatctgtttgtaattctctcaatatatagtcttgttctcatgtgttaaaaattgccatgtgttttttcttaatcatgttatcttgtatggttaattttgtctggttgagggtaggatctttcagttttaattttgaattgaaacttcctcgtttttagctaatttttcaagtttggctcattggttttagccactgatgattagttcttagtgcttgaaagttcttaattatgaattctgtttcaaaaattggtattggatttctgaactcagaattgaagtccttgtacattacattatcctgattgcagctctcccttctctaccagcttttcaggtacttgagaaac

SEQ ID NO: 44482 - DNA, 988 bp, Manihot esculenta
  Intron number 1 from transcript cassava4.1_009621m (locus cassava4.1_006951m.g) derived from phytozome v7.0 (chr-ID scaffold04489; pos 133068 to 134055 reverse strand)
ttggccagagagagaatctgattgcgcttaacgaggtagccttcagttccgtctctctttttctctgggttggttgaatcggttgattgtttgcgtttttgtttgtcaaaatatcgttgtttaactgggttgatcctaaatttattgattgaattagcgtgggtctgggttagtttgttttgctttcctatggattgggtacttcctgatttctagatttgcttgtttttttgtttgttaattttgtaatttagatctggaatttgagtttttgattgatcaagttctgaacttttgacctaaaggtagtgcctgcttgatgttttcagaactaaaattctcttttttttttccctcccggttgttgtcctgcttgatccttttcgggtagtaaataaaattgcttatatatgactctatctgctggtaacgtaataaaaaaaagttgtctttgttatgaaactgcttttgaatgtcatttgaagcagcaaggtgatcaaaattcaaaaatttccgtaagtagggttccctaagtttttgttttacctgaagcgggccaaattgaacaaataattagatgtttaatgattccactagattttgtgcaatattatacatgattcctgctattaaggtatatcgttcatcaatattattgagagctttaggttgggttttgggttggacctgtgcctgaccatataacatagtattattgctgttattgcttatatcttaattactttgattgattaaggagctggcttctcccattaatatttagtccacataggactgggatcttcatttgcaatggctctatgttattctatttgtacgagaaaatagtatatttggccatgctgtgtctgatttcatgtattttaggtctagttcattatttctattaattcatgattttttatgcttttttttgttttgaatttctccctgcgtactaaaataatttaaatatattttggcaggg

SEQ ID NO: 44483 - DNA, 946 bp, Manihot esculenta
  Intron number 1 from transcript cassava4.1_007687m (locus cassava4.1_007687m.g) derived from phytozome v7.0 (chr-ID scaffold06825; pos 229052 to 229997)
cataacaaggtattgggttctttcttggcctctgggttatttttttgagtaattttttctactatatatactgagaagtcgaatgatttattaattagaagtttttggatgtgttaaatgagggaaatggttttgttggcttcgaatataaattctgtggagattgataaagtggtatatctgattgatcgattgctcacatagcgggataatattgatattttttctttctaacttatacaatattgggattttgcttgatagagtggtgtgtatctgatgtaactagttacttcaattccttgtgcagcttaattggaacttaatttatgtttggaatgctaatttatgcattctagtatgaggagctagatttgtgtttgctgccactcaagtttttggagtatatatttcctgttctatgtattgaatagaaggttatggaggagaacgaagtacttttaacttaatatgttgtcttatcatttatgttctgttgtacactatagtgttgcgtaatgtgatggtcaaggttgtctctccatacagaagggattttagccaattatttgatgcccaccaacatatgttttgctgtttccccacacttagtttatccttctttctagtatatttatctttgttcaaaactgtagaagtttctgcaatgtgcatatgggcatttaaatggacttgtggagtcctcaatgataggctagatgcaaccttgctatgcaaggatctactagtagactattttcacaccattcatattcccttagaattgttggcgaatttgttgtctttcataatttttgtattagtttattttctttgttatcttggtaaatgagcttttctctctccctctctttctcgatctctctgtttgatcacttgcttgtggctccttgtcaggtcctatctgttgtggggcttcttcagg

SEQ ID NO: 44484 - DNA, 377 bp, Manihot esculenta
  Intron number 1 from transcript cassava4.1_029420m (locus cassava4.1_029420m.g) derived from phytozome v7.0 (chr-ID scaffold06407; pos 15562 to 15938)
acttcatttttgggacatctacttctgcctatcaggtaacatgcaagcttatccagaaaacaaaaaacataaaatatgcaattttgtaaaacttcaagttttcaggtgaaaatcacaaaaatagttatacatctctaacatatatctgtaagaagatcttgtctattaggcgtaaagcacaaaataattcattttatcttgtagtgaaattgttcaattagtaaatagaaatatgcatgtttatcgatagatatttatttaatgtgataaactcggatatcatatcaaaaatttgaatgctataataataattttatctctctaacatcactaactattcagatcgaaggtgaagcaaactataagaatagaggacc

SEQ ID NO: 44485 - DNA, 772 bp, Manihot esculenta
  Intron number 1 from transcript cassava4.1_009895m (locus cassava4.1_009860m.g) derived from phytozome v7.0 (chr-ID scaffold02477; pos 199049 to 199820)
ctcccaaaacccaaatctttacctctctctttaatgtgagtgcttcgaaactccatttttcgtcatatttatctctgtttttctcgagtattcgattcgatatctgggttttccccctttttatcttttttcctcttgaacatgttactttggattttccacttgttgtttaaatggttgtgcttgtcggttttgattctgattattccgtcctcaagtatctttgtgttggttgatgaagtttgaatcgagcgatcacggtcggaaaattgataactttatgttgctatcaactttgaattacttgtgttgatttgataggtgccgcaagtttattgcttttgactgtgagcgctttcagtttcttttccttttttttttttttaaaaaaaaaagtgatctttcatggacttaagctaattgatgtatgtgtggggttcagtagttacaatctttattgtttccaaattactgtagtgtgtaacgtagctggatgatttgccctctctgatgcgcatggtatactgcatttacaactattgttgctttcgcactcttactgaattctgaataaataaatacctgttattgtgaaagtagttcaatttgtttagcagttttgttttctgttttttgatgctaggaaaaagtaattagcttgatagtttcaaatgttagttatttcaagcttgcttctgatcctagtatgtttgtgtgtattatgtttctctcagaagaaaccctttcgcttacaagctgatcctgtctatac

SEQ ID NO: 44486 - DNA, 776 bp, Manihot esculenta
  Intron number 2 from transcript cassava4.1_014227m (locus cassava4.1_014244m.g) derived from phytozome v7.0 (chr-ID scaffold04278; pos 27545 to 28320)
aagaggtcttttctggcttttcatttttctagcgtttggtttaattccatgaaccaaaattttggtgcaattcgattgaattcagatgcagcttatttgaaatgaattttacatttaaatttcaattaaatttcataggctcgtatttgatttaatttcatattgaaattcatttgcctttgtttcctaaactatcttaggcttaaaattaaatatatatatatatatatatatatatatatatgcgttacaaatttataacaaatagcaaatgtataaatgcatgaataatatattaataaatacaaaataaattttcatgtcttctaatataggagatctatgtaataacgttaatagtgtgatataaatatctcttgtataaagtagaaagtaagtatagaaaagctgaagtaatagcaggttgataacattttttaactaattagtagcacttgataagttatttaattaataaatataagaagatagatgattgagaaaattccctttttcatatgggttgttatccaaaatatatttttatgtaaattttgtggaattcatttcaattttcattaaattagttaggaatatgttttacttatagcccatttcagggaattttcctataactaaattctaatttttattcaaataaaaaatataaaatatggaattcaattgaatattaagaaattcttaggcatggaattgaaccaaacgagctcttgtttatatttaaaagacttagttgtttgtgtaggcgctctcaa

SEQ ID NO: 44487 - DNA, 717 bp, Manihot esculenta
  Intron number 1 from transcript cassava4.1_008343m (locus cassava4.1_008343m.g) derived from phytozome v7.0 (chr-ID scaffold01508; pos 395871 to 396587)
ataatatcctcttatctggtacaaacttcaaacttgttattttgagcttttttgtattcgaaaattttgttttgctgtattgtgtccgaatttttaatggcttgttttgataatggtctgttgttaactacttatactgggtttttgctgtcctgggttcgatttgaatgccttataggaatgtacttcgtgctcttctctagcttttaggtgatgattattcttctctctctctctctctctctctctctctctctctctcttttataatattatgtgtgaatatgggcaattgccacctgctcgcacttggtcttcgtatttatttaattaatttttctcattccgtgtttaacgttgtaaactctgtctaatatttgcaatcttaagtgtttatgtgttgggtttaaattcccttctcactcacttgtttataactgaatgccattttgatgatttaggagatttcaggttgataataattagcttaagaacctctttttttttttttgggtcctttttgtggaaagagtataggttgctgggttttaacagaaattttctgggaagattattttttgttaagattggagtttcttaaagccctttgtgtgcggtttatgatttatattgtgcttcacaaagttttgcttacggctcaatgccatttgcaatgtttggtaaacctggaaaacagattataatttgcttgaggaa

SEQ ID NO: 44488 - DNA, 781 bp, Manihot esculenta
  Intron number 1 from transcript cassava4.1_014380m (locus cassava4.1_014380m.g) derived from phytozome v7.0 (chr-ID scaffold02477; pos 393253 to 394033)
aagatcctcaattttggtaaacatcaggtcagtcctttcattatttcttttgcagttttttcttccttttttgcttgggattttctccttttatatatatataaatacctacataatttgccattttttattgccaattaggccatagattatgcagcttaagcaaaatgcttgtttctgtttttctttctcttcctaatttgtgcttttcgaattttctccttcatgcctgaaaatggagcaacagttgacctgcttaaaacgggaaacagatgctctctttatgtaattaaatggcatccttaccgatatctaaccacttagttgtttgaaaattgaagttttttgatatgggaaatgattaatagctcaagctcattgccccattttcctttcaacgtgttacctattttagataaagaacaaggaagcaagcttatgaattatgagtagagaagcttcttatctttgcttttagctatccctcgaatcatccatgaacgatctgtgctatgaagtgcgtgtcatgtagaaatcatcaatatttgatatgtagaaccctaactgaggacattggtcaaaactctcaagtataaaagatcaaacttcattctggataatggaaatatgcaattgaagcgttatgtgaccagcctagtgcttggatttagaatttatggatgagcaaggatttgttgaagctcatattgtgtcctgtttattgtttatcttaacctgtctatttttcacttgttttgcaggttgcctgatttctattgaa

SEQ ID NO: 44489 - DNA, 949 bp, Manihot esculenta
  Intron number 1 from transcript cassava4.1_016201m (locus cassava4.1_014863m.g) derived from phytozome v7.0 (chr-ID scaffold05780; pos 362498 to 363446)
aaagttctctcccttcggcttcaggttgcgactctttcttcttgcctctgctttctctctttctgattcttctacttatcagtttcatcgtcgtacccatcgaagctccctatccctccttggtacttctttttttttttttttctttctctcaatgtatgtgtacgtgtatgtacatgtgtaatatatgtgtgattttaatatgggcaatggaagatttgaattttgatttcctggtgttgggtttaatttatggtatgagtaattggtcaaatgaaattactagttctcctcgtcatctgattttcgcataattttctgatgtgctaccaaagaaactggaggtgtatacacgcgtgtatcagtgtatgttgtgttgtgtatgaatttgatctggacaattgaaggtttgagttgctggggttgatttcagtgtattgtttgattagttgcctgtatgggttgctacttttccccttctgggtatctgatatttaacttcatttttgatgtattgccaataaatctaagctaaagatacacgaaatgcaaactggggatttattctttgagtaatttccacggtagttttccttttaaagcagacaagttaattggcaggttcgttgcattgttgcaccatcttggactctgggtttcttgggaatcaatcagaatacttggaagtaaaacagggaaagctgtggcatggattcttttctcgtgaaaaggaagaaaagcaagaatattatcgtttgttataggtgtcctcttgcgtattttctttttattttaatttcttaatctctacatattggtcttctaggtggtgcgaactatttattattatttttttttgaaattgggattgattaattgccgtgcatctatatcattgtccttttggcttatgtaggactgcattttggaattgttgcagagaagggga

SEQ ID NO: 44490 - DNA, 537 bp, Manihot esculenta
  Intron number 2 from transcript cassava4.1_006384m (locus cassava4.1_006384m.g) derived from phytozome v7.0 (chr-ID scaffold09365; pos 243972 to 244508 reverse strand)
aggccatttgcagtataacacccggttttcaccaggtgggtttgatttaatgtgattgtgataattgggaattattaagattatcgttatcgtgatcattttaatttgtatttatatatatgcaccgtttagtttgtctacctatcttttgatatattgatttctcctccgtgtaagtgctgtgatgtagtgtgagaatgaagtggagggaagaaaatcactaacttagattggagggagttcatggtactgaacttctccaacaatacgttaaagagacatacttgatcactttcatgtaatatatgttgagatggatagcttttatctcaaaatacatgtgcaacctttgatcagtgctgcagatcataattttgaagtatttggagggtcttggattcatcaagcctcataaaagcatagtctgcagtccagtgacttatgtcattaatccatagagtgtatggatatttcatgtcagtcatattgataaaccaagatatttttgatgcagtacaaatttttggttgacggaga

SEQ ID NO: 44491 - DNA, 949 bp, Manihot esculenta
  Intron number 2 from transcript cassava4.1_007959m (locus cassava4.1_007959m.g) derived from phytozome v7.0 (chr-ID scaffold10136; pos 67222 to 68170 reverse strand)
gaacagtctctggtggtaagaatttttccaattcatgcagtttgtgatgtgtatattttgtccattaaacaatttaagtccctttccttaactctttcttttgctctgtctggtggaagagtcaatcataagcatagcatgcttttttattgacatgtcatattctattgatgcataacttttaagagtcttttaattggacattaatgtggaggagtacaaaacgtatcacaacaacagtgtacaagttttatgctgtttggcaataataaatttgagctttctgttatttatatttatattttagaagatgtccttcatgaattgcatttccctgtataacttattttacctcagaaaaaatatagaattaaagtctggtggtggatgttataagaggatcttgtttgatgatagacaatcaatggcacaatggaactttttactgtgcatttgacattcattcatggaatctagtcattgaaagattcatatctcatgtcttagaatatctagaaagatagagcatttttcaatttcattttgcctgagtttttagtccatggcattcttcctgaagttgtactccttatatttcttgttattcagatccaaggtaccatatgcctgtactgtaagaacataatagacaggctgttagcccctattcgcccagtgtattctctatctttgccttgctgtttcctattcgtaattttttggcaactgactactgcttgtagggggtagctatatattcaaaacactttttattttgatatatatcttatgctttgtgtttatgttcctcggacattaagttgccattttcaatacttccctttttttttcttgcatttttattcaccagtaagttttttctccctcttttatgaatgtttgttgcttcacagagagagtagaggagaagaaaaaagagttcgagaaa

SEQ ID NO: 44492 - DNA, 940 bp, Manihot esculenta
  Intron number 2 from transcript cassava4.1_000341m (locus cassava4.1_000341m.g) derived from phytozome v7.0 (chr-ID scaffold12865; pos 496613 to 497552)
agcagaaggaaacaattcctaaagtaagtatgaacagttttgtgtttcctcttatcttaatctagcttctgtcatgcatgacaatttagaatgtggtattattaattaattgctttattgttcattgtgatggattgattaaattatggttaagaagaaaggttagctgaggaaaaagttgacacatttctttggtggaattgaaggatggttggctttggcatatgggtgagcccatacaccatggcgcaggcattagcttctccttttaggaatagttaatttttgtttcctatgcacataagttcttagtaatgactttggggacctactgcagaatgctgtgctatttttaatttgtctttgaactgatgaaaatgactctcttgattatcatttttagaggtttaatattcagaattgaatttctcttttcatggattaaatgacttgagatgatttcctatggacctagtttatgaaaatttatctgctctattatttggtttgataatgcaaagcattatgttgtcttgggcagctaaaaagtaatctgacatacaaggttaaatcctttttggcaatctcaagtgaaaactgtagtcgttgaacctgtctttgtgttttgatatgaaaattggcactgaatgtaagcttttatatcccaagtctaacaatactctcgttttgactgatagaaatacttttattgtatttttcaagtccttgtggtgcacttgacctttctcttcactgttacaacttgcatccttcttctatctttttacttctatagaattttctagttgtttcttacctttgaatttgttgtcttgtgaatttacttaattgttatgctgcatgaatttaactgagatgtttgtgctgtttgcatatttgtttttaaaggatccacctggaatacgtggatcagctacca

SEQ ID NO: 44493 - DNA, 647 bp, Manihot esculenta
  Intron number 2 from transcript cassava4.1_002349m (locus cassava4.1_002349m.g) derived from phytozome v7.0 (chr-ID scaffold07005; pos 98879 to 99525 reverse strand)
tcaaaatcttctccttgtacgtcttcttctccagggtaatgattattttatttgtggattgtggttttagatctcaaataatcattactcataagttgaaaaagtaaggtaccgttcggccacatagtatttataggtcaaggaagattaccgaattagcttagaatagcatgttactgtttttgttttctactttttaaaattgccagagtctcaaaatcagactcaaattttgataatagaatatcagatataggaatttaaagagtagagatttctgacactttcaactaccacgtatttatttcttctgtgtaaatgccatctacacaattcttttgggaaagatgctttctcctaaaaaataaggctttagtggaaatttgaccacatctctttagtgcattgacagagaagccatacatgccatgtgggtaaaatcatttacttgatttttatgtttcttttaagtatagaagtttctttcgtactgagtaaggttggcttctcaatttcattcttaaaatccataaaaagaagtatatatatatagaaactaccagtagagaaaaattctaattcaaggatacatgaaagatagtgagatttaccattttttttttcaactctccatctgtcacagactg

SEQ ID NO: 44494 - DNA, 286 bp, Manihot esculenta
  Intron number 1 from transcript cassava4.1_002349m (locus cassava4.1_002349m.g) derived from phytozome v7.0 (chr-ID scaffold07005; pos 99729 to 100014 reverse strand)
gagcttctgggtctgagccgccaatccctgacgaggtcaatcttgcatttaatctggcactctttttcaattacaatataaaaggcttgtgttcttaatttttatggttaaattttcttctctctctttttctccccatttgattggcgcttcttcattcacagtatgcaaaaatttctgtgtttttcttttaggatgtagttgttatcattatttattttcttctcacaatggaaattaatggaaaacaggtagcagagttactggtcactacaggtctaaaaga

SEQ ID NO: 44495 - DNA, 442 bp, Manihot esculenta
  Intron number 2 from transcript cassava4.1_009172m (locus cassava4.1_009172m.g) derived from phytozome v7.0 (chr-ID scaffold06825; pos 579459 to 579900)
gttcgcaagggtactggtggaagatcatcggttaggtaaaactgtatttcttcatttctccgtagtccctgttttgtggaatagaaactgaaggaaatcacttttctttcacttttcaagaaaatgcaaggaaatgaacccattctgctgaaataaaatcgtaaaattttgtttcatttgattattgtattgctttatgttgaatgtggtcagtgaaagtgctttatggcttagtaggtttggggatttcattttaaatggtgaaaagcttagcaaacagaaagcagatttttctttcctttttttggtattatttctttgttcctccgggactaaatgctagcttccgtatttaatttgtaaaacatttaaattaatttctcttttatttcttttttttttttcagtggcatcattgctacagtttttggagctacagggt

SEQ ID NO: 44496 - DNA, 421 bp, Manihot esculenta
  Intron number 3 from transcript cassava4.1_006531m (locus cassava4.1_003852m.g) derived from phytozome v7.0 (chr-ID scaffold04489; pos 82958 to 83378)
tctcttttgctctatttactggtggatttttaaatgtattctcttaccctggtttggcatgaatgattttgcaggacaaattattcatgatttcatttctatacataataaaaatctttcaagttaaagaattttgaattcttctattccaaataagaattttgcaagaaacaagattcttgattccaaacggggggttaaagttctttttacctacaatttgttcttctatttccttgtatttccttgtgtttttatatgaatcttaatttatacagttatttttgttgagtggctcctaacacaatttgcatattcatgtgaaaagagaatgcacctgaatcatctttaatattttgactctgttctttttattggtgtaatagccaaagttggtggcggtgtcaaatacagttgcctt

SEQ ID NO: 44497 - DNA, 622 bp, Manihot esculenta
  Intron number 1 from transcript cassava4.1_023892m (locus cassava4.1_023892m.g) derived from phytozome v7.0 (chr-ID scaffold03116; pos 158076 to 158697)
gactgtgtacgtattgaagttgtataattaattttaagtcaaactgcaattaaattttcagtagcaaatactatgtgccacgatttcctttctatgacaaaccaagttgatatgagtactgatcattgctgtccccatctggctaaagggcttctgttaaatttggatcaaatttatctcacccaaaattcaccccaaaaaattagcttaagggcaggaatgtcaggataaggataaggggcacgtcaccccaagctcacccctcacgcctagaattatactagagcgtaagatatttatgggaggtccaacatcggtgggaggctctataccatattaaatttgggccaagctttaacttcctcagaagttagctcaagggagagacacgttacccttatctcaaaccgatgtgggattcaacagcttcaatgtatataaccttatgattgtttatgattttttttcatatcacatttctgtttgttttattttattatgttcttatccatatttaatgcacaacattgcaattgtaaaaggtggaatttagatgaaaacagagcttagatttagccttacattttcatatgtcagattggttcatccccaggttttgagg

SEQ ID NO: 44498 - DNA, 636 bp, Manihot esculenta
  Intron number 1 from transcript cassava4.1_010823m (locus cassava4.1_010823m.g) derived from phytozome v7.0 (chr-ID scaffold10305; pos 694954 to 695589 reverse strand)
tctgcacataacaaggtgacgtctctctctctctctctctctctctctctctctccgtctctcttttggcttggacatttctgctaataaaaagctgtttggttttgctgaggagcttgttttatgcgttttcttggtggtgaggttgccatgtagagctgaaacggctgcgatttcggttggatttgccttttaagctcccttttgcaggcccttttgagttttgagtgtatttttctgtatagtgattttaaattttttctcttccatgaatcttatgcttttggtgtttcttatggaaatttaaaaacttcttctctgaaaatttttcttctgcaggttgaagtttgattttttttttcctcctaaagcagacccatggattattgaatgtttctctctaaaactaatagtatttctctccctatattcgtctcatttattcattggttgaaaatgacagaccctttgcgtgtcaccctttctctctctctctctttataatgcttgaggttgagggaaggtgcgttttgtgccatataaaataattgtagttttttcttcggattaaattttccatgaatttttttttcaatgacagattgcttaaaaattgacttggattcgaatccctca

SEQ ID NO: 44499 - DNA, 360 bp, Manihot esculenta
  Intron number 1 from transcript cassava4.1_021199m (locus cassava4.1_021199m.g) derived from phytozome v7.0 (chr-ID scaffold12004; pos 734388 to 734747 reverse strand)
tctttggagccagtaacatcatcaagttcttgcaggtatatataattaacttgtaatttattcctttactatgatctcattggcttccttcaaaggttgaccagaaaaaaaatattgattttttaaaaaaaaacaaaaatctctgtcaaatgggagaaagggtaatttgttttcatgtaactttctccaaataaatcaaattccaccagctttattagaaaatagccagaattgggtttcatcactttttcttgtcatgattcagaaattaaggcaaaattaattattcctttaaatttgattcaaagaattaattatttaaattatattttcaggaactcccagaatctcagagagcag

SEQ ID NO: 44500 - DNA, 560 bp, Manihot esculenta
  Intron number 1 from transcript cassava4.1_015659m (locus cassava4.1_015659m.g) derived from phytozome v7.0 (chr-ID scaffold07528; pos 413723 to 414282 reverse strand)
ctaattgatttggtttgcgtggtcttagattgaaggttcgattctctccttccaagtttttttttttatctctaaattgtcatatctgtttcaattaatcagcggattggccttttgatctgcatttttttgccaattttctttaattttctatttagattggttttcttgtaattattattggtgtttgccttgattacgtctcagtgggtatttttttttataaatggaaatcattgttgattaatagcgtgatttatgaatactggggtttggtatttgaatttctgcagaaaagaaaggaaaatttgttggtcatgaaattgaaattttaaatttcggaagcacaaaacattaaaggtaggaactaactatctgactgtatttctgtaccattaatcttttttggcatttactttaaccgacttaggattttcattttgttgaaaagaaaaggaaactacctggtgaatgcatttgttaaaagccttgactcttcccttttatttggattgttttttcaaggttttgaaggctgcaaatttttatagcaagattat

SEQ ID NO: 44501 - DNA, 638 bp, Manihot esculenta
  Intron number 2 from transcript cassava4.1_020026m (locus cassava4.1_020026m.g) derived from phytozome v7.0 (chr-ID scaffold00318; pos 427978 to 428615)
gcggtacccaagttaagcttgacgacaaagagtgcgtactctcttattttactctctttagctaatttcaattgtttttgggcaagccagaatttatttattattatttttttgaaaaaaaaaaaaaacttagttgtatttacatccaatcatggacctaagggtgcttaagtttttcttcttcttttttttttttaataaattaccctgttaaatatttttgcgaaaatttaaaagctttagcccctcaaatgtcaatggggtctgtcactgtttacactgaatatttttatgtagatttaaagtcaattcgctagtgtataaatttcttttaaatatttgatttggtcctaagtttttggaggtactttaattgcccttatttgggaggatgatttttttgagcaaaggtaatttccagagtttaaaacctgtaaaaaccaaatcggtgaattaaggtattatcctcttttattcactgctttcagatacactggtagaggaattttgtatgagattaagtttgtagtggctctattttttttttgtttttcatttgttttacacttgtgaaatttttatttattatgtattgaatatttttggttatgtgtcgtgcaggttttatttatacaggg

SEQ ID NO: 44502 - DNA, 512 bp, Manihot esculenta
  Intron number 1 from transcript cassava4.1_008840m (locus cassava4.1_008840m.g) derived from phytozome v7.0 (chr-ID scaffold05694; pos 337329 to 337840)
gcggacgactgtcatcagcggaattttggggtgaggattattgggtctctcttattttattcattaaatggataattggatccgttaattggagcattttcattggtgttattaatcatgagtaacggcagagatgaataataggtcattgggttgattctaacttgcgttaactatgggaataattctagttatgttgtggatttgattgtcggagagtcctgttatttgatcaaacaagctgaatatgattttacgttgtgatgcttgctgcatttaaaggaaaagaagttatcatttccaggattttaactaatgggatcatttgtgtttattctctcatgcccattaccagtactacctgtgctatatttaaatgattggatgtgattaaaactcccttggattctacttttgcatatcgctgaattgtctttttgatttggtgatgcaattattagattttttatattgaatttaccttgaatacattgagggtatattgtaggcac

SEQ ID NO: 44503 - DNA, 714 bp, Manihot esculenta
  Intron number 2 from transcript cassava4.1_009595m (locus cassava4.1_009595m.g) derived from phytozome v7.0 (chr-ID scaffold06357; pos 34031 to 34744 reverse strand)
ttttggaggcagccaaaaaggtattttgtcttttttttttttaagttttttctagcaattcaagctatgattttttgatcttgacgtcccctatgtggtaaaaacttatgctttgcctagtattgtgattgtttgctagatgtcctgtccctttttgtcaaacagaaactctgccctagcctgaacaatgctcttaattgtgtatctggagttcatttttcttcattggctaatttaagtggcatgttttgattaacattattcatatatatgctattttgtttcagtcaacttgtatgtcatcattaaacaatttgcattattggctatgccttcgagttttttaacatattttgctagatggaaaactgtgttatctatcctagttttatcatgatttttatttttaagttataatttcatgaacttgctcgatctctgcatttcaagtgtagttcattaaacagggtagaaggggaaaagttgtgttttaaaaataacatttgagattgctgatataatgtacaattcagcaatctgatagaatgctgctattagatgactagcagccaaagttgttacattcttctggaaacagatatgaatgtttcagatggtagtgaagttgtatctgatattgctatgttgcatgtaaagtagcttcgcaattatatgatttggcaggcaaaagaagctggtagcacacgtttttgt

SEQ ID NO: 44504 - DNA, 320 bp, Manihot esculenta
  Intron number 2 from transcript cassava4.1_022455m (locus cassava4.1_022455m.g) derived from phytozome v7.0 (chr-ID scaffold05859; pos 530751 to 531070 reverse strand)
ccaagtgatccgtatctgagggagcacttgcattggtagagtatacaatagaaaagccttcatttttacaattcaaagttttggattttggaagaaaataattaaagaaggagaatgtagtacaaatatagcaaaaatagaaaaaaataagtgatttcatcatttccagtttctcacaaaactcaaagtacaagtatagggaaactaagaaacatcaaaacacatacatatatagatataaatataaaaatgtaatgtaatgtactcatggattcaaacttgatttgacagggtagtgacagacatcccaggaacaacag

SEQ ID NO: 44505 - DNA, 527 bp, Manihot esculenta
  Intron number 2 from transcript cassava4.1_009749m (locus cassava4.1_009749m.g) derived from phytozome v7.0 (chr-ID scaffold12794; pos 956116 to 956642 reverse strand)
ctggccacaagtgtgtatccttttctccttttagcatttagggttttttgcttcgttggtttataaactgatttagagcattcaacttctttttcttttttagcgtatgttaatgtttttagtgtgaattacgttttcagtaactcttttggattctttatttggttcgcattctgtatgctttgcaattgcaacccttattttgatttcagttccagtcttaatctgtctgtactgacttctctttgttgctgaagaattataagtttgccacattattattgtttttccccctccttttggcatttctagtaaaggaaaacaagatcgtaaattgaatatgtaaacgttaaaaccattctgcatggactaggctgtgtgatctttttcattttctgaaattcacttatctttgagcattgcattttgatcagtctaatacaactgaaaagttaatgtctttgggtgcatttcctttacaatctttcatagaatcattgttgcaatcaattggaaacgatatcatc

SEQ ID NO: 44506 - DNA, 392 bp, Manihot esculenta
  Intron number 2 from transcript cassava4.1_024077m (locus cassava4.1_024077m.g) derived from phytozome v7.0 (chr-ID scaffold11287; pos 28499 to 28890)
tatcttaaggtaacattaacattcttgtgctttgcaaaggaaatataagctaggggcaataatattttgttctgtactgtaaagtgatggttctttactttttacaatattttgattacctgtttcctttttctgttggttgaattattatgcttgattagttttatttattattattgtgtatgggattcaagtgctccttttgttttgaacatctactatggacctgtttcttggtcatatcaggggaaaatgcttttaaaagtttcttattggtaatacccagcagctaggcaaattatttaactttgttgttctgttgtcttgaatgaaattgactgatttgtttcttcacagatactcaacttggaagagcatatacctgagctcaa

SEQ ID NO: 44507 - DNA, 473 bp, Manihot esculenta
  Intron number 3 from transcript cassava4.1_024077m (locus cassava4.1_024077m.g) derived from phytozome v7.0 (chr-ID scaffold11287; pos 28902 to 29374)
ttgctggaacaaaagggaaggtacagtcccagtttaaaatgtgttcttaataaattgaccagattgtagacaatagtttccatcctgctggcattgtcatttgaatcttactgtaaagtgtggaacagatcaaatttcttttttgttttttagcgtgtcccatatagttacgtttctaaaatattttttgatgtcacatgagatgctgttggaaataggtgcagttccacttcattaattggatgctgtacacacatgaggaaaaagagcagaaaacatgaatataagtttcactgcttttacccatgtttatgctatcagattttgatctgaggcttatatattgttaaatgtgtattaaaaattaaaaatgtaatgatatttggtagcactcattctttaatatagtttgttcttcttttgatggttttatttcagggttcaacgtgtgcattctgtgaagctattttacg

SEQ ID NO: 44508 - DNA, 421 bp, Manihot esculenta
  Intron number 1 from transcript cassava4.1_017928m (locus cassava4.1_017955m.g) derived from phytozome v7.0 (chr-ID scaffold11279; pos 96980 to 97400)
agcgacgcaaattgacttggcacgagcgctttctagtataatgacttctttcttttcttttccttaaactatcttttaatttatttgcagaagctttagtagctgtggattaagttataaatttgatgtctttttagtgttttatttgtgggatattgatgggcatttgagatttttagctttgtcaaataattttcttaggattttgcttcacagtggtggtggttagttaggtgaagctttttgaattgagcacatttcatatatttgttgcatgaagttatttgttattgaagctgtaaaagtttcccaactagagtaaaatggagaaactaagatgataaggtttttgtttaatgatacaagtagtaagtgcgttttctgtttgtgcttcaggtgttgaagaaagcctcaagacttt

SEQ ID NO: 44509 - DNA, 595 bp, Manihot esculenta
  Intron number 1 from transcript cassava4.1_018671m (locus cassava4.1_018671m.g) derived from phytozome v7.0 (chr-ID scaffold12004; pos 779564 to 780158)
gggttagattatcacctaatttttcttctgagcattattttgaatgtgtattttcaatggttttaattgattttagcttctgatactggtgttttattgaattctcccgaatcttctttgtgttggttgttttgaatactgtacttcgtttggtttctgagaaagcagcgtaaaagatagaaaactctgttgcaaataacctacaatatcattaatttgaactgcgttaatgatttcttttatttgataagtatttgtgttaaattctttattcttagctgccactatattaatgttggtgcgttttttagtgaataatcctacttagggtgtcattttcctccatagattttgaatactcagtaagtagactccatagatttcgaatgcttaaaagtagccttggatgatcagccatatgtagtaagacttggtgtatggccaagtatgttcgtctgaatttgtttttcccatatttaagctttttagcttactcttctattagctttgtggttacttttatcagtctcttcatctgtactataggcaagtagaaccttatgatatgtgaatttattgcaggaaaacacgtgga

SEQ ID NO: 44510 - DNA, 1063 bp, Manihot esculenta
  Intron number 4 from transcript cassava4.1_014144m (locus cassava4.1_014033m.g) derived from phytozome v7.0 (chr-ID scaffold09492; pos 87012 to 88074 reverse strand)
cctggtgatccagcttttctgctctgcttcatcaggtaatatattgattaatcctaataagttgaatgcctcttttaattggtgattagatgatgtttttctttctctggccttacattttctttctccttctctgggcactacagcatttccaggaaaatttagtataacatcttgttactatttgtttgattttagtttttttttttttttttttccgttggccttttgattatcatcatcagtgattgtttatggagggcatttttcagggtgatctctctctctcctttttttttaaaggaaatttaaggctacttcaactatgtgtttacatcaaatatgctttttccacctgggtctttttaggaacaaacccccaatgccataacctttaaacatttttctcaaatttcctattaaacaccatggaatttcaaaagggtaaaaaagaaaaataaagattttcaaaaccatagaatttcaatagagttaaaaaaaaaagatgtttcaaactttttttggttgcttttcagaactttgatttttcacatttcaaccattaagcaactctctttccattgaatattaagccaaactatcttaaattcctttatcaaagacatctaggcagggtttgctctgatgggtatcctcaattggccaggccgtctattatttagttcaaacaattatgttagcatgcattagtttctattctcgattgcagggctgtgaattttttgagcctttgatctacagaatttactaagcctgtcttcttcttaaaagctgtgtattactggtgcagaacctctgaatatatattgaccactggaaatattttgagcaatatgtagtatcaccataatcaagcattcattgtgggagtggattggtttggggaataattttccctccgaagtgcaggactgttgcaaatgaagtctacttagcttatttgtcatctccattttaattccaatccttttccatgttttacaccttgccatatcttgtaggggcagtcctccatccaaagcaaaaattgaagcccttgaga

SEQ ID NO: 44511 - DNA, 400 bp, Manihot esculenta
  Intron number 1 from transcript cassava4.1_021263m (locus cassava4.1_021263m.g) derived from phytozome v7.0 (chr-ID scaffold11279; pos 102934 to 103333 reverse strand)
caggtataattttatttttttataataatttttaaatgggattttgatcattggatacgagcattaaagtgcgtgagaaacaccttccaattagtttggaagaatgtggttggattctgcttattttcagaagcttgtcttcactgtttattatttaatctccatgaccatactgtttagcgcgtgatacaccatcagctcttcttttctattcattacaaatctcataattctctgaaactcattaatgaattgcattgtcgttttgaagcaaagcatgtctcgtttcaaagtatggaagtttgctaaatcaaaagttaattaaaatcttaattaattatctgtcgtgataaaaattttctcagggtctggtgtgcagaacacaaagagactgaggcta

SEQ ID NO: 44512 - DNA, 805 bp, Manihot esculenta
  Intron number 2 from transcript cassava4.1_027299m (locus cassava4.1_027299m.g) derived from phytozome v7.0 (chr-ID scaffold04246; pos 101093 to 101897)
ggatctaattatattggtaaggaattcaattgacttttcattttgattttataacagttgatagcaagtagattaagatattaagctatcttttacacagattttggtactacagatgactctatgaaattgtttcttgagattcatcatcattagaatggcaatggttgtattaaaagattgtatgaagagttataaaatgcttactcctttgaatatatgaaaataagtcatcaatgctgccctgtttacggaattttgttactggcttactgcatttggcttaatttgcatttcaatattctttttaatttaaagaccataatgtaatttttaatctacaatttctatatggtataacttttcatcagtgaatttattggtcattagttgttcaatcattctgaactacttttgcacagataatgcagttaagttgcagaaaggtgaaaggcgattagaacttcctttttctttaccttattaacttcaattggcatcttgatcttgcattgatgcaccttatatggttttatgaatcgatcgtaatttggctgttataattccagtttgaagtttaaacaaaacagaatttagtaaaagtgcatataaaaagtaatttgacttggaaccaaatattaagttcttgtcgatatttaaaatctcaaactttatatgataaatcactgccaatgtcaaaagatctgaatttgtttactgtgttttatcatcttatttgatgcaagtaaaattatcaggtcttaaatagatgttgttgagtgtaacactacacaaatctccagat

SEQ ID NO: 44513 - DNA, 1060 bp, Manihot esculenta
  Intron number 1 from transcript cassava4.1_028338m (locus cassava4.1_028338m.g) derived from phytozome v7.0 (chr-ID scaffold10387; pos 45441 to 46500)
tgtcgacttttgcgttcccagcactccttcttggcgtactctcttcctctctctctctctctctctctttctctctctctctctctctccctctgttatcattctctgtctaggcttactgctgttgtttggcttgattcttgctgtaggaatctggaaagttagctaaaatttcttccacttggattctcgtttctcaaattctttgatcactgttgatggatttcccgcgcctttttttttcattatttttttatgctttattttctgtcacaaatgtataaatcgatacaattccgattgcttggcgattaatgattttttttttcaaatgtttcaaaaaagttgaaaaatatcgatgaatgctgatcgatgaaatgatggaaaggttagggaagcaaaatgacagaataaacggaaaagatttgaatcttcaatttgatgtttccctttctttcttataaatgtatattttgcatttttaattaaatgaagaaacttatccaattttatgtctgaaaatgttaaaaaaaaaaagagattctagtagatttcttggggattaagcaatctaatttcaattttatgcttcgatggttttctcgttgttttcctgtattttcctactatccaaacagggctttctaagtaaaatatcacgtcgtttcgttttcttcatcttaaaaaaattgtctagtgtgtgtatatatatgtatatatatgcaactggaaatttaattttgcccactgactagtttcgattattttgctgacaaataaatgttcttaatagtacacttgaattaacggtttcaaattctagactaatcaaaatgtgatttatggaaatggctcaaacttttatgatatagaaaattaccaatttgacttaatattcttgctttcgagaacattattcctttgaggtattggttgagtattaatggtgaattataatggtcaaattaataataagttcctctgcacaaattaatttttgctaaaacttgtcccactgattgcagctcaggccatatttttaggatttcagcactaccta

SEQ ID NO: 44514 - DNA, 982 bp, Manihot esculenta
  Intron number 2 from transcript cassava4.1_008851m (locus cassava4.1_008851m.g) derived from phytozome v7.0 (chr-ID scaffold03604; pos 836819 to 837800)
gagattaaaactgcttacaggaaactagctctcaagtaagttccatgtcaattgcatcctttttatctctatcatttcttttttaactttttggaattttttgcgtggactacagggatattgcgggttgtgagcaatttttgagctaataggtgttgatatagtcttactgtcttagattgcggaatttgagaattaagtttagttacaggctcaaatacagctcaatgaggttttaatgtgatgtggattaagtatgtcacccaagttagaaagatggattcttttgctcatttatgtagatatgttttgatgctagcatggtgtttcttttgcttatttatgtagatagatttcatgttagcacgatgatattttacttattcatgtagatatattttgattttatcactttaactgtgctactgaagttcaatgtgacatggctgaatactttctttggctgttaatgcattgttttttttgggggggggatcttctgggaagttgtctttgttagaggaaatccttatggtaattatgataaatttggacttgaaaacattggcaactgattcatgaatgctccatttgttagttgtgtcacctttacacttttggggaaagttgtcacatcaatgactggaatttcatttaagcctgtcagtaactcaaatggcatatggatgactggattcattttgctaattgcaagttgctttttgttgatggcttcacttgtgttttgcgtgtaaagtctgaggtgatggataagttcaattattgttatcctacttcctttggatgaatataaactacttatgtaatttgcaatatatccttttcacatatgttaaattttcattgtttgacatcctgagacaatcaacttttctatgtgaatgttgcttgtgttactttgtatgcctatatttgatcttgtagccaatataaatcatgtgcagatatcacccagacaaaa

SEQ ID NO: 44515 - DNA, 250 bp, Manihot esculenta
  Intron number 3 from transcript cassava4.1_024408m (locus cassava4.1_024408m.g) derived from phytozome v7.0 (chr-ID scaffold05780; pos 248063 to 248312 reverse strand)
cccagtattgggaatttgagtcacttgagaactatgtaagtggctctctctttgtatgcatttctacttgacttgatcgcttcccatatttgtttcctttcttttctttatggacttaaagagttctctttcatatgctaattttttgaattaatttctagtttgtggagatttgagtttgtttctgttgcatccttgttggtatttacttgcaggcaattgcagaacaatcagttaactggttccatcc

SEQ ID NO: 44516 - DNA, 922 bp, Manihot esculenta
  Intron number 2 from transcript cassava4.1_020022m (locus cassava4.1_020022m.g) derived from phytozome v7.0 (chr-ID scaffold12794; pos 1101841 to 1102762 reverse strand)
cattccacgtcgaacctcagcctcgcgagaaagctgtgagtttctcctctctctatctcagctactgctacctatcttgatagtttcttagggttttaaaactttttcttttcccttttgagtggaaagatatttttatcctttcgttattttctgagatatgagaagcttcaacaaggtcagcgtgacagggtctatccgctgttatggtcttatagatatcgagattttgacttttaagtgaatcgcttgcgacacttcaatcatgttttcgttcttagatgaggaatgattgccgtttatatgctcgtgtatgtgtgttagagactagtttaatatacaatcttatacagttaatgaagttgttgaatttcgattgcatcggattgattgttggtccagcatctaactccccaacttggtccagtggcatactttggtatcatttggttgacattcatgttcaaggacctttgttttagttaagtgaccaaatagtagcgatcaaaagcatggctgtgatggtggagaaggtatcctggagcttttttagttcatctatgacattccacgctttgatgaaatgctatagcattgctctgttttcattttgagacatgtttctgtttctccctctattctccaaaaagtcatctacttgggattttttcctgcatgaagtcaaagctaactacgcaatgcctgtctgaagacttcaagcaatgtgcctctctgtttaactaatatcgtaaacttttgtcttgaaacttttcacattttatgttgtgcaaattagtggataactgaacttgaaatttaacttaagtgctttttttttcagaaaaagattttttgagccttgctgttctaagttatttgcattacagctcttggcagaagacccagctcttaagcgattcaa

SEQ ID NO: 44517 - DNA, 594 bp, Manihot esculenta
  Intron number 1 from transcript cassava4.1_023019m (locus cassava4.1_023019m.g) derived from phytozome v7.0 (chr-ID scaffold02912; pos 216839 to 217432)
atattggaatttcaggtatttcttccaactcaaaataattcaattccttttgtttttatactatagaaattaaaatgttctgaacatatttttactaagaatttttctgttcatcgatgttgcatactacgactacatgacttttcattctgtatattgaaatattagtttgttactgtgaattttcttgtattattagtaatattaggggaaaataaaaaatatcctggacgttcaatttgatttattctaaataaataaatagaccattcaaattttatactccacttgttacagcaccacatcctttacactcttctttatgataaaattttctaaatatatttggaggttttaaaaaaaaaatttgcaagtttttacaaattttcaaaaatctccaacaaccttattttaaaaaactgtttcccaaaaggttggccctggcacgtatacagatatgaaatatgcatggcacatcgaaaattcttaaaagttcgtattaggttattttcctgggttatgttctgctctgaaatagttcctaccctaatctagtatggtgattttgtgtgggtgtcaggtggagtgacagcc

SEQ ID NO: 44518 - DNA, 909 bp, Manihot esculenta
  Intron number 1 from transcript cassava4.1_008910m (locus cassava4.1_008910m.g) derived from phytozome v7.0 (chr-ID scaffold08302; pos 643 to 1551)
ggataccttcactcggagatatccaggtctctttctctcttgatcttttctataattttctttttttgataagcaatcttatttgtacgtattattgaatattggattgatctggtttaattatggttcaagtttttgtttgtcacaagcaaggctgttctcacctacttcagtgactaacataaactaatgccgacatttctgatgtaaaaaaatggaagaaaattaatgttaataaaaactcaaagattgagatagcaccacctaagggtctatctcaagatgatgcatcactgtatacttgatgagcttaaagtgtttggggaaatgccttacaacccagcagtatctaaggtttccagttctacttgggtttgattcctattttgctgctctactgcatgctggtaattccttgggttggttgttttggaatttgcattttcagtctccttttctactgctgtgcttggttcatatgagttgtttatcttttaataattgccacagaattgaatttctagtcatatgtttcatattttgctaattgctcagcttctctagccgtgcagtatccttatcagttgtgataaactcattttaggttttgatttggtttgcttgtagtctatttcgtctggttttttctgttattttgtttgttttgtcctaaaatgcattgctcctttagcttttattactgtgcattccaggggctcatattctatctgcttttgggcttcaattttctgtttttcttggtttggcttgtgccctgttttgcttccatggatttttttaataaattaatcattttgcttatttaaaaaaaaaagatagacttcattttgtgaagaacttgggtgtggtgcaggggcgatcaaggacaacagtagtggaaagattgca

SEQ ID NO: 44519 - DNA, 213 bp, Manihot esculenta
  Intron number 5 from transcript cassava4.1_008910m (locus cassava4.1_008910m.g) derived from phytozome v7.0 (chr-ID scaffold08302; pos 2113 to 2325)
atagttttttaagccccaaaattgtgtaagtactaatgacaatgtcaaagtttatttgcagtctttgtaaggtcttgatatcgagtcttaacaaagtcaaaatactttttctttttttttgcagtttctcaattatgtatacatatcttcaatatttaatcaagttatttgatcatttctgcacagcaaagactttagagactacgcagaatt

SEQ ID NO: 44520 - DNA, 466 bp, Manihot esculenta
  Intron number 2 from transcript cassava4.1_015850m (locus cassava4.1_015850m.g) derived from phytozome v7.0 (chr-ID scaffold06278; pos 141771 to 142236)
ggtggcaagaagaaggcttggaggaagaagagaaagtaagcttttcattttttatttgatttttttttatatatatctgctttgttgctgagaagctccaaagatggacaaaagtaggtcgaatagtctcttgatattgctgcagctcgataaacatttgtgtatatatcaattttttttttcaattggtccctttagaagcttcaaacgggtcaattcattttgagctgagttttgattccacttgttgcttttatctatgggtttaccgtttaatttaaatctctttaacctgattatgtatatctgtttctattgaagaaaagtcatttaaagttcagctcacgttgtatgctgcctgagtttagtggtgttattttgcaatgtttgtaatttcatcagctcagattttattctgtccccctaattaatgaataattcccttttcaccttctcatttgaaggt

SEQ ID NO: 44521 - DNA, 866 bp, Manihot esculenta
  Intron number 1 from transcript cassava4.1_005530m (locus cassava4.1_005530m.g) derived from phytozome v7.0 (chr-ID scaffold07528; pos 276954 to 277819)
attctcgggaagacattatcaagggcactgcagtatgttttaaatttccaacttttttatttgtgtaattgaataattaaaatcatgcataattttttcaagaattcgtttaaatatttttcttgtaaaataaatcattataaacggaagatggtatgtaagtattcctacatttaattatagatcccacctataattatatattaataaattttggtgctgagttagaattttcgatgatcataatgcacatggagaaaaattggagtttgactagttcaaatgaagaaaagaatcttgtatcttcaatgtttattacttgaaaggtacttgtatggtgaggaattatcactctgaattatattatttggacataaaataaatccaattatcagtcaactcctattacatattcatctttcaatataatagagatacaaaaatactaaatctgtgattaattggaagtaatttaactaaaaaactccaagttttcagaaatgctaaaactctgtaagtgagatttatggttcgattttcatgggtaaaacaaatacttgttaagattacgtttagctttgatatatggagatcaaaattggatttgtgctgttgagtatgtgctttgattttggttttctttatgtgtttgtattaagatttttcaggatttttgcttagtatgcacacgcttaggttaagttttattcaggatatgagttttagtggtgtgtctgctaaatctttcctggtctttaataaattttttccttttttttaaaaaaaagagcactttagcccttagtactgatgctctgtattttgttgcagacccttatcatagctggtgctgatacaacatctat

SEQ ID NO: 44522 - DNA, 635 bp, Manihot esculenta
  Intron number 1 from transcript cassava4.1_006699m (locus cassava4.1_006699m.g) derived from phytozome v7.0 (chr-ID scaffold00318; pos 63952 to 64586 reverse strand)
ttgcattgtcttcttttgcttcgaagctcaggtatgcagaaaactaacggtttctcagtttagatttatcatattgacatttatgccctcttgtggctagatagaaattaagtgtacaaaaggtattaaagattaatggccaaacgggctgtgctccaagattccacagttggctagttagccaccgatccttcgttttagcaaagccaccatcatggactttgttaagacatcattgttatgatgctttaagcaatgggcaagttgatactaaattttcttggagatgattcttcacatgctttgtggggtagacgtggctccacaagccatttcactttacttcagattccttaattgggtagtcgacagtttttcaccttcaacaaacatttaccattccaactcttcggaaattctaggaacagttactttgatgttttattctttcacttttcacctccgtattagttagcttcataccaagagtaagtatacgcctttttaatttatatttttttccagttaatctcttttctttggtggataactagtatggcttgttttgtggaaaaaataattggcatcaaaaaggtggagagagcttagatgttcatcttcttgcaggcctatca

SEQ ID NO: 44523 - DNA, 455 bp, Manihot esculenta
  Intron number 1 from transcript cassava4.1_015358m (locus cassava4.1_015358m.g) derived from phytozome v7.0 (chr-ID scaffold06407; pos 112164 to 112618)
cttaataagcgcaagcccaaacctgccaagctcaggtctttactgtgaattcttatctctctttgatctttatgtgttcatttcttcggtttgattctgttgttatttattagcgttcagtcttagcattttattgattttttaagcgtaaaaatatgtgcattttgggatgattttggatttatttcttaattcttttatgattttgtagatttattgtattgatatgaatctctgttctctgttgtatttgattgagcatatgtttgggtatatcaagaaagtgctggtaaagtgggagataatggtttcagttcagcgcctttgttatttgttttagatagtgttgtttctccctcataatatggattgaggctaatgattgacgtctgattgtcttttttatggtttttcctgcagagctagcatcacagcaggaactgttttgatcattc

SEQ ID NO: 44524 - DNA, 730 bp, Manihot esculenta
  Intron number 1 from transcript cassava4.1_024611m (locus cassava4.1_024611m.g) derived from phytozome v7.0 (chr-ID scaffold03404; pos 132674 to 133403 reverse strand)
gagggtcaactgtggacttccttctgcagacacaggttctctttcttccacacaacccattaatctgtttcacatttgaaaaaaattactatttcgttctatgatataaaaaaatctatcaagttaatttcttgaaaaattactatcaggttattaaattttttaaaaattaattagttaattcctactttaaaatcacttaattaaaatatcctttttttagtcattctatacaaaattcatcttttaactgtgattggagaaaatatataatataaatatttaaaattatttgaactaaataatacatataattaatattataaaatctaaatagtataaataattcaaataaattaatatttttttattaagggattaaagaattaaattttataaaatattaagaatattttaattaaatatttttaaataaagatgaactagttaatttttttataaatttgaatgattaaataatgagttttttcatatcacacaaacttcatagcaaaacaattaatggttaaaattaatgggatgaataattagtaaatttttttaaattttaaaaatattttaatatattttttaagatcaagaacaactaataaagttttttattacatataaatagtaaatttttcttaaaattttatttacacaaagttcaacattaatctagcaaatccatccacagatttctagctcagaaaagtacgtaaccagg

SEQ ID NO: 44525 - DNA, 818 bp, Manihot esculenta
  Intron number 1 from transcript cassava4.1_023011m (locus cassava4.1_023011m.g) derived from phytozome v7.0 (chr-ID scaffold12455; pos 601367 to 602184)
tccgagaatcccctgctcggcccctctccttctacgttagtgtttatctcttttctattgtgtatctagattgaattttgatctaattggttggatatatgcatgaatctgtgtgggttcgaagctttgttagaaatgagatgttgattcttggtctcaagtgatttcttttattagaaacaatacttctccttgacttcagggataatatgaggagaagcaaagacaagtatattgttgtttcttgaatgctatgggagttgaatcagtgatatttgcagtttggtcgctgagaaatgtgggatgaagaggagtggttattgtcatacatggactaaggtcttagtgccttcaattttgacatccatgttgttgattctcctttgataattgaaaaatcttaagtttagctttgcttcctctatgtttaagtgaattgtctgagttctgcatgtgttgctatatacgaaaatacccttgcagaaagactaattgatcaattgtatttggattctgggcctagtttttctacgtttgttgaatgatagacctgtttgttagaagcaaaacatgactggggagaaaaatgaacatagtttcaaataccaatgagcacatctcattagatgcatggttgatttattgtcatgtaattgaaattaaccataataaccttgcttgtatggtgccactgccatatatatttaactaggctgtttctttaatgtcatttgttcaagtaccttgaagatgaaacaccatgtcaatgtgtggttttatggattgctgaaattctcctcaatggcagcctagataaa

SEQ ID NO: 44526 - DNA, 823 bp, Manihot esculenta
  Intron number 1 from transcript cassava4.1_004094m (locus cassava4.1_004094m.g) derived from phytozome v7.0 (chr-ID scaffold02476; pos 34740 to 35562 reverse strand)
tcaccagccagtcgcttcccgctctcattaacaaggttctccttcaaattttatatgatttttaatgtcttagttagctgataaagaatttgggcatttcatgtatggccttcttgttgttgttttttttttctttttctttatttttcataacaattttatatgctgttactttgctggataattagcgagtaaatgatttcataatgtcgaaatgagaaaaataattgctggattcgtgggaaactacagtaaattcaaaagctttattagcagcggatttgcttccgcataactttccattaaccaactcttcaaatgtaccttggaactggcatcacgatgttggaagcgactccaagagaattcctttttagcaaagaatatcattacaaatcgtggcttatttgattaacaaaaatagctaatccaaacaaataccgcatgcctttgtagttattttcagcatcctactgcaggaggaacatgttgttccactataatgtttgtaatttatatgctctgagtttagatttataactgtttctgctctttctttattattattacactttgtatcttctggatctttttgatagatgttctagttaaaaagatatttactgaagaatatgtggacaaagaatcaaaaatatgatttagaactgaatttagttgtattgaactgtaggtccactttttttccagcttttgagaaatgtaaaaaaattatgacatagtctggagcaaccaaatgctacttagtttatatttattgtctggaattgtcgcttatgctacatttggcttttaggttgagcat

SEQ ID NO: 44527 - DNA, 840 bp, Manihot esculenta
  Intron number 2 from transcript cassava4.1_013528m (locus cassava4.1_013448m.g) derived from phytozome v7.0 (chr-ID scaffold05875; pos 383187 to 384026 reverse strand)
accaatcggcaattgcagctttgcactccttaaatgtgagaattgagcatttgttatttcttatagtacttgtcctgtttactttagtcctaaaataattagggttttgttttcttgtatataggcatttacagcctaatatctgcttaggtttttgtttctagcaagtagcaactgcagtatttggctagtcagttctcaagctatgttcaaaactttattgtgagagtttttcctttcttttgtcctgaggaacttaaggctttgatggaaaatcggttatcctcccagctgatttagttctttggatcccgttactttcccttgaaaatggatgtcactttgatattccattcaaattcatcttcagagttgaatacagattaacagtaattttgaaaattatgctcataacgtcaaaattagaatttacttccacgtcaatgaatgttaaacacaaacctatgattaaaatttgtattgctttttagttttcccctttagaactttgccttttctggaaatctaagcatgcctcattatcaaactattaactgcatcaaaatgaaaactcaaatggctcatttcttttttccctgactgttaagtagtttagttacagcattagactaaaaaatttagcaaatgagaggggatgaaaacttatatattaagttctgataaactaatatatttagtggataatagtgtaaaagtttgaactgagaacatttatacctatttggaaacgctagcagtgaactttacctttctgaaaggattctgctttgttcatcacatttagggagtaaaatttgatcctcaaactggatctactct

SEQ ID NO: 44528 - DNA, 518 bp, Manihot esculenta
  Intron number 1 from transcript cassava4.1_012472m (locus cassava4.1_012472m.g) derived from phytozome v7.0 (chr-ID scaffold07329; pos 8336 to 8853)
gagcttgctaaattttcagccattgctgattcctggtcagttatctagtttcgtttcttcgttcctcattttttttttgctgtttgctacttaaatcttctagtatatttgttctctcctttgattcaatcgaatttaggttttttctttgattcgataattttctgtcttaatttgaccttcatgaactgaaataaacatccaatggaattgcattgttttgcttttattaatacagagtttgcccctatattactaaaatttgtggctcttacttaatttaaatctccagtgtgaagttggcattttttttttgggacagtgcatgtgtttttataactttttgggaaaattatgggggaatgaagttgcttttattactcttcagagcaattttaggatgtttatatgattaccattaaatatccagtttaaataatgcattttgacaacaggctatattttgtgttctactattgcaatcaggtgggattctgaaggaccatttaaaccgttgc

SEQ ID NO: 44529 - DNA, 336 bp, Manihot esculenta
  Intron number 3 from transcript cassava4.1_021430m (locus cassava4.1_021430m.g) derived from phytozome v7.0 (chr-ID scaffold10305; pos 69003 to 69338)
tggcaaagggggctatctctctactatctcgataggtgctcattcttgcttatttttctctgatgccgagttatttttttcctgagataattagggagaggaaaaaaaaatcattgaattactcataagttggaaatttgatttttgggaaagctgacgcaactagctggctgtttgtgttgaaggaaaatgtgcgacgttactttcttttcttttctttttctacatcttcaatttttttctgcgaccaaattgtttatttctttgagcattttgagtgtattcagtattcccctatcaatagatttgaagaaggggcagagcagtttcgattag

SEQ ID NO: 44530 - DNA, 745 bp, Manihot esculenta
  Intron number 1 from transcript cassava4.1_009417m (locus cassava4.1_009417m.g) derived from phytozome v7.0 (chr-ID scaffold03942; pos 321288 to 322032 reverse strand)
tcaaaggaatagaaccaagaagcaaattaacctcggtttgatttttatccctgttatggattattcctactgaaatcaccacttctctttttagtgatagttaagatgttcgactggttacttacagttgtgtttgtttgagttgtatggttttgtttctttgatcattgatgatacgagtatgtggaatttaactgtgttgaaattcttatagggttccctttggcgtcagttatttggagacatgtattcttccttttttttttttaaattggatttattagtacttttaaaaacactccccaagcttttgttaatcaattttttcttcttttctttcactagccaatcattttttttaatacaagttgaatactcattctagttcctagattttaaatactctgccaaagattatgcatatacaaagaagttttcttgtccagagcagacaattactgaagtaagtatgagaatttcatcttccttgtgctcttctttgttaatttgtgcttattatttattggttcctgcaaatcattgatctaaatttatcctctttactttatggttgaagatatttcatatctattagatagcatcaccttgcccccttgtgctaaactccaattcaaaaagttccacttcgaaaagtacagtagatccagtgaaattgtctcctgctttttgttttctgcttttgacattttatggctttatgtcatgctaatttttgtagggagag

SEQ ID NO: 44531 - DNA, 952 bp, Manihot esculenta
  Intron number 1 from transcript cassava4.1_013091m (locus cassava4.1_013091m.g) derived from phytozome v7.0 (chr-ID scaffold02401; pos 22237 to 23188)
ctacgtgcaaggataacaaggaagcgattgcgcaggttatttcagtgttttcttgggtcctaggaatatttaattctgtgcactaaaaaaaaaaaaatcagttttgcttatttcagttaattttgaagtcatggctttaactctaacgtttcaattttatttacttgctttaaatgaattttcaaagattattatgcggttattatagttagactgagggctaggcttagaaaatgatagaaactttgattctgtgtttggtcaaaactggaataatcttgtgatattgtgtctaattcattgattttgagtaggtaattaattgaattttgtattgtgtttaatgtttggatttatttgtgaggctaacatgctagttaagctggtaaagttgctgtgtcactatgcctaatcaactttgaatatattgtgctaatagttagaaccgtctatctagtttgttttgttgaatgattcatggagttctattgtagtggattagtggggaattgaaattccagcttcaactagtcactacgtatgagttcctttgtcagatttaatgtgccactgacttatgattttatattgtttattgaatattgaacgggtcttctatggaatttaatgtgtcattggattgatgtgtgttgttatctggtggcatggagcttatgaaatgaaaaaaatccgtaagttataagaaaattgtccattttaccgtcttatggtcaatgcttgtgcttatatcacccaactgagtatggttatgcatgccataaaaatagtgttgattcaagatgtcccttttagtgatagtttcactgaagttgtgtttttctattttcattagcatttattgtctcaggagaaagttaacaataataataatatttcgattgatttttatttctaatcaatattatagtttcggtttaggttgaggctgcat

SEQ ID NO: 44532 - DNA, 551 bp, Manihot esculenta
  Intron number 1 from transcript cassava4.1_028421m (locus cassava4.1_028421m.g) derived from phytozome v7.0 (chr-ID scaffold04324; pos 285217 to 285767 reverse strand)
gaagtgggaagaaggtcgctgggttaaaattagaggtactaattgttcttggctgaaactgtttaatgtttctttctcatctaactaatcgatctgagtcatgttgctttttatatgctcaataagcacagatccgaatgaatctagctcatcttctcagaacaatcgaattcatgtatctgtattccacaattatcagagtattttacacacaacatgcatttatgatttagtaataaaattttttttaaatcaatatcttgtagacgaaccctctaattgaaagggttttgaatggagattatgtggattttgtagattctagattgcaattctttgattatgaagagatgtatggaatgattttttatgttaatatttgaataaattattataaaaagtgatatttttttaaaaatgctatcaattatcaaaacagtcgattggataataaatttttttctctaaatttattttttcatcgactatcttttgtggatgctgggctattttcatactaaatgctgcatatgttatggtctgtttagaca

SEQ ID NO: 44533 - DNA, 605 bp, Manihot esculenta
  Intron number 1 from transcript cassava4.1_003859m (locus cassava4.1_003859m.g) derived from phytozome v7.0 (chr-ID scaffold12647; pos 61071 to 61675 reverse strand)
actccttgcccgctatcgccgttgtcggtggccaggtcacctttcgatctctttgcacttcaaatcttttttttttttgaattatattaaaattagtttcatgatatcaagcttgtttttgaaagttataggataactgtaggatcccaactggtggctccgttttatggttgtcttaggtcttagtctttctgtttaagttgtaatttcgaacttaggaattgaaagagtatggcatgacttcgacgtcaagtgagtttgaattagcattgactaaagctgcttatgcttgattatacgagtaatagattcactgaggcttaatgagtaaatatgaaattgagtgcaaggataatggtagatatgattgtcaagaggtttggcaatttagtcatgagatatatgagagacatgtcttccttctcttcaatcaaaggcagctctgaattatctgctgggtgtatgaagctgtcatttagttgccaaagctcattttagctgatatttttctttttctttttatttttttcctgaaattgttgtgcttatgtttttttaattatcttacagagttcgggaaagtcttctgtgttggaaagcattgt

SEQ ID NO: 44534 - DNA, 959 bp, Manihot esculenta
  Intron number 2 from transcript cassava4.1_028355m (locus cassava4.1_028355m.g) derived from phytozome v7.0 (chr-ID scaffold07894; pos 93528 to 94486 reverse strand)
gaaagtctcgtctctgtgcactgatcttaactcaggtccattgtttggataacttattttagaattataaccaataatttgactcgataataatcaatttattaatgtcatttggtctatccatgggattaaatttgtttcttcattagaaactggaataaagatcgatttctattatggatgctagtgtgttacttcttttcagagatgatgaaaagcagccttgagagccattaccaattcagaggatgagttagctacattctgcgcagtgcagaatattgtcagagagttggtttttattattatgtactcactgattttattgtacttcaagaattaagggaacaaatgatcaaaagagcatcaaagaacttgctctatttgactacctagtgctgaacttcgtttcaacttcttgggcttccaagttcaccaggaccatcctttgtaatataaatccttggttcctatttaaacttggtttcagataaacatgactagtcgaactgttttaaattgtattaacataatgtccaaaggtgttgcattactctgtaggtcacaaattgcagatgtactaaaaccaacgctagattcagactctgatctataattcttaatcatgatgatttcagctctaagattttgtgtgtcaacagtcaacctccttcaagttgattgtgatccactgcattgatttcttttatttttctcttgatagcgttttcatttcaatgcaggttgtcattcaattgataagactctgatctataattcttaatcatgatgatttcagctctaagattttgtgtgtcaacagtcaacctccttcaagttgattgtgatccactgcattgatttcttttatttttctcttgatagggttttcatttcaatgcaggttgtcattcaattgataggactgctatatattgttttataaataccaaaggaga

SEQ ID NO: 44535 - DNA, 713 bp, Manihot esculenta
  Intron number 3 from transcript cassava4.1_018366m (locus cassava4.1_017909m.g) derived from phytozome v7.0 (chr-ID scaffold00185; pos 73119 to 73831)
aaggattggactacatttacgaagaccgtggagaggtagctttactatttttttgctggatgtataatttgacccctcataatttcactaaatttcatattatccttttaactttatcttttattctatttcgcccttcaatttcaaaagtgctgaataatttggctatctttcactattaaagttcaaggactaattatgacgaaaataaaaagttgagtgagtaaaatgatttttatgtaaaaaagataagaggctaaattatgtatttggctatctttctttttcagaaaaaataatcatataaaacataatgacagaatctggttgatcctttccctcttcattttttctgactctgctgtctctcaggtcttggatttaagaatatttgagacaggggagcatgcacttgtaagtagtaccacccttttttcttctttttttttttgccaaataagtagtaccaattttacttcagctctttagacaattttgatcaatattgaaacatgagatattgtcttaatttgagagtagaacaacatatcctgattccatttcaccaatgctgtatctgaaatatgttatagcatattcaatctcaaaaagtttccagaactgttgcataaaatgaatataggtgaattaaggacaaaatgccgttagatgcaaaataatctgagtgtttatttatgtttctcgcaggttgc

SEQ ID NO: 44536 - DNA, 790 bp, Manihot esculenta
  Intron number 1 from transcript cassava4.1_000899m (locus cassava4.1_000899m.g) derived from phytozome v7.0 (chr-ID scaffold03115; pos 251715 to 252504 reverse strand)
gaacaggtgggagcgttggaaggtaatcttattttcttttaatcccttctctgacattgtaggaaaacaaaatggaaaaaaaatttcttctttatatttctcttttcatgtatttgcgcaatagggatttggttaattaagctaagttgtattggcttaggttaccttatttgagcggatatagcaacttctgtaggtttcatgcaatgcatattctattataaatgtttctatttgtgagcctcacaaactaaacgaaacaactcttgaattataagtcagtcagtggttttatgttgcttttctttttttggcattgtcttttcttctttgcaagatattgaatttgaagcataacctgaaaaggagtaggttgcttcaaatgcattaaggtattcctcttggggatggctagaatttgatcttaaatgcatggtttctaccactttatgccaaaatcagtagaggagagttctgctagatgatctatgcaagcaattataaataacaaaaataaaatattcacttggcaagatcttaaaaaaattatatcatgcagaaacttggaactaaaacttttttgctctttttcaaattttctttggaataaaattctgttagtttggttattgtgtacaggaaaccctgtaaataggttgggcatattttgatttttttctttttttttgggttgtcattgcattagatactttcattgcatatctaaacaataatacagttattcttgtcctcaggacctaaagaattgggagcctaaacgagttggtgt

SEQ ID NO: 44537 - DNA, 978 bp, Manihot esculenta
  Intron number 2 from transcript cassava4.1_034101m (locus cassava4.1_034101m.g) derived from phytozome v7.0 (chr-ID scaffold00435; pos 139385 to 140362 reverse strand)
attactcaacttatagctttgtcttcaaaattgaggtacctttctctattactttatgttttagcatttgatgattcatgcaaccaatccaagaaagaagaaaagagggggaaagtaggagaaattcaaccattattagacttatcattccattatttgcaggttttctcctggctcataataataatagagtaatagttaaatcatcctattgaaccaattagggattatttatctgaataatgcaaaatggaagtgggtctaagatggtaaatttattatttggtccttatgatttagtgaaattatttaattatttaatttctataattttaatattacaattatgcggttcctacgagtttaaaataataacaatttagacccagtagttcactagagactgcataattaagggtttgaaaagacaaattaattaatggtttttaaaaaataaaaaaaatcaaatagtttcgattaaactacaagggctacatagtaagtttcttctactatctatatgctgaaattaatgtgagaagtatttaatattttagggacatttgctatttattacttatattataaaaaaactaattaattgatttttcagtttgaaaaatacactaaaatatccattacattttaaaaacctacttaattcgtgtatctattaattttagctattaaatattttattatttaatttttatgatttaaaaagattcattaattaattttttaatttggtaaaaattttactaattaatctcactttattgagagtatttttttataatatttaatcgttagaattaacgaaaaattcatgaataaaaattttaaaatatcaaaaaaaatttaatataatttttaaaatcaaaaaattaaaaaataaattttcgtgtaggactaaatagtaaaacttttcaatattttattaactcgtatatgagagtgcgtttaaacaggagtata

SEQ ID NO: 44538 - DNA, 1022 bp, Manihot esculenta
  Intron number 1 from transcript cassava4.1_029302m (locus cassava4.1_029302m.g) derived from phytozome v7.0 (chr-ID scaffold06278; pos 385293 to 386314)
gctctcgctcagttccttaagcttttcaccacctggttatggtttctctgtttttctttcctgtaaattttcgtttgctttgttttaatggattctatgattagtggagtacttgataaaattatgctattgggtttgggtgtttatgttatggttgatttcaatgggcccgtgtgggtaatgtaatgttaggaaattctgtacccatttatgttttagctagtataaggatataatcttcttcttgattagcattaatgggataaagtaggtgaatgaatttgaagtttgaaggcttgtgcattgtctatataaaaaaatctttaaaatgtaaactatatttatgcgagtagttacaaattgttactatttttgttttgttgcacttcaaattaaaccagacatttaggtatcccagtgatgaagagtgactgcaaacaagtagagcggatagaaagtgaaaaagatacaccataggagacctggggttgaaattattagcaaggatttgatttctcaataacatctttctaagtatgagtctagagagagcagatgggaaggaaagaatttatgtagatgacctcaggtaatatgggactaaattgaactgttccgagccttttgtacaaataaagtaaatagctttagtaaagaagctagatggtgcgcaatttttcattacctatgtgaggttaagctatgttgggaaagtggaaactgaacattctgtgtatctagtttttattcttcttgcttccaggtactggtaaatcataattatatacatgtggactactttatgataagtttctttgtttgtttgattgagtataataactgatgttattgattcaaagtaatgtggattgtggcctgtatgtgcactcatttgtatgattggagaaacatggaattttagtgaaagaaaaatcttgtttaataagcattccctattgccgctatttcctttggtgtttttccaatatatcatcctagatgtgcaggttcaaagagaagag

SEQ ID NO: 44539 - DNA, 698 bp, Manihot esculenta
  Intron number 1 from transcript cassava4.1_004252m (locus cassava4.1_004252m.g) derived from phytozome v7.0 (chr-ID scaffold08359; pos 2202847 to 2203544 reverse strand)
agccttccaaatctcattctgcaaaagggaaggaggtactgtttcctcttccgccttttcttttagtgagtatttggtggtaaaatagtgacagttgtctagttgttgctattatcacatcagacacctgaaacgcttttgatataagtattgattgttctatttgtaactttggatctctaaaactgtagcttcacagtaagtctcgtgccttttttttccccctttttttgttcctgtcttgatcttgatgaagccgtattctcaaccctgtgccagtcttaccattgagggaagaccttatggataatagtaatgcgcctcaagctacctgtctaggctatggcttttaagattatttattctggagttataactggaaatttaactttttaagttttggcggtaattaaaaagttgaaattatatcttttatgactattttcctcttacaattagcaaacttattagattttctttttgttttttttattatcttttttcttccccatttgtggactcactgatttgtatccatttaatttggagctactggtttgataaataccagtttgatttaactgttgactttctcccttgtgtatcaatattattagtgggtgcagatttttttttttatgtaacttttctcgttatatgcagagaactacgaaagagaaagcactgttgtctgcaaa

SEQ ID NO: 44540 - DNA, 395 bp, Manihot esculenta
  Intron number 3 from transcript cassava4.1_008921m (locus cassava4.1_008921m.g) derived from phytozome v7.0 (chr-ID scaffold08301; pos 141148 to 141542 reverse strand)
tggaatcaaagttgtacccatttgacacattaaaggtaattgtagaactaccattcaaattgccaaattattaatgttattattattattattattattattattattattattattgattttgaaacttacgggatacagcctgggttctttctagaacacacacacacacacacagagagagagagagagagagagagagagagagagaggagggggagagggaggtaggaaaatgggctacaacctcacttcttcatatctgttgaattttacgaatgcatgaatttttagaatttaattgtttgatttcccatgactgaatgtgcttgagtttgtcattattttaaggtgtttctgttattctaatttaggaatcagctttagcttcggga

SEQ ID NO: 44541 - DNA, 509 bp, Manihot esculenta
  Intron number 2 from transcript cassava4.1_008921m (locus cassava4.1_008921m.g) derived from phytozome v7.0 (chr-ID scaffold08301; pos 141544 to 142052 reverse strand)
atagaaccacaatttatcaatatcagcatacacaggtataggtccctttgcatttctaaatagtgcaacttaaaatggacaaaatggcacacaaaatcttcttctgattgacttctagtcaatttatagattatttttactcagtttatttttgtattgtacttttatgtagtaaagcagtgctgttgatggtatttgattgattggtttaagtaattttcaaattggaatataaatactgagatcctgttcctactgttttcatgtcacttttaagtttgagttagattattcatcttgtaatataatcatcagttaatagttcataataacatctccactgatggatttatttttatgaaaacttagagcagcttccgctggtagtatttttcaaaattggtttagctctttgtactgaatgatgcttccattaaccttgtttgtctttgttcttgtttcctggtggaagtttgctcattttttttctattctttttctgttctcag

SEQ ID NO: 44542 - DNA, 529 bp, Manihot esculenta
  Intron number 1 from transcript cassava4.1_001997m (locus cassava4.1_001997m.g) derived from phytozome v7.0 (chr-ID scaffold07776; pos 77603 to 78131 reverse strand)
gcctggaactagaaatagttggtagagctctagaggtttgttatttttctcctttcctttttcccgttctattcttatatatggacaaattttgaatttatgggccttcctattcttttcaagacattcttggaatttatcctgaaaatattccttgcgttcaaacatatacttcacattcatactaatgcttgatatacataatgaattgcaatctcataatgatttgtttcttggagcaaatttcataatgataatagatttatttcatttcgggttaatttttgtttagcaagtgccatgaaaattctctgtgtaatctgcacgttgttgaatgcatttttttcattgatgttttagttttaaataaatatggaactatcaaaggcaacggcaattatggattccttaatttatagtagaactcaactttaccgtgagctatgataagaacttcttgttattctaatataactaaagctactgatttgcaggctgttgatctaaagagttcacaagacttcttccc

SEQ ID NO: 44543 - DNA, 754 bp, Manihot esculenta
  Intron number 1 from transcript cassava4.1_019069m (locus cassava4.1_019069m.g) derived from phytozome v7.0 (chr-ID scaffold10156; pos 133554 to 134307)
ggtaactgtgtctgtgcttcaggagtctccttatacattccttcctctctcaagaaaattccagtgacttaccatccattaagttgactcaggtttcccttagaccaagaacacattttccattaaccagttcttctatgcacagaacagcaggaaatgtgaaatatattctccatgaaaaatattttcaagaaacaaatggaaactcaactctcaaaacagttgtgggtaagggcagggttagaacttggaacctcaaagtagcattactgtactaggcaaaaaattaaaacaggtgatagtttctaagttaggatcaccaactcctgcctagctttgatacttcttaaccttcacaaacttgcaccgtttgaaactgatttaatcatatcatgcttccccccaaacatcaaaagacacggttggcaattactagtgcctacatgtactaaaaatactcactcaggtcgctactttgaagttataaccatcagaatctagtttgatgagcatgatataaagcttcttaaaaggtttttttttttttttttttgggggggggaagcagctccttaataacctaacatttctcttagtaccaaagcagaacaaacataaagggagagaactcgagaagggttccccttatcacaatgaaaaggaaagagaatataatataacaagaaagcaccagaatacaaaagagctactaatgctagttagctctctttaaaatcagaaacacactcctgaa

SEQ ID NO: 44544 - DNA, 331 bp, Manihot esculenta
  Intron number 1 from transcript cassava4.1_014215m (locus cassava4.1_012746m.g) derived from phytozome v7.0 (chr-ID scaffold03410; pos 70876 to 71206)
agcagtcgccagattctccaccccctacatcgggggtaattccgtcacttcgtatcccgtgaatatagatccactctaaaaatgcctaaatacactcgcaatcattgttattaacatttattttctgcttcgcttcaaactcacgtttccgattctccaatcaaatttttttctctgctaagccaacgacaatgcagtttctgcccactattaaagtttttacggacggcaccgccggcgccaggacattcttgcctgtccggagctccaatttcgggggaagaaactggctcaattttggggattctgctaggaattgtaggcttgtagc

SEQ ID NO: 44545 - DNA, 364 bp, Manihot esculenta
  Intron number 3 from transcript cassava4.1_014215m (locus cassava4.1_012746m.g) derived from phytozome v7.0 (chr-ID scaffold03410; pos 71561 to 71924)
aggagcggtttgaggtacagattgcatatacttttctggctttctgttactagaatctaacgtttgagtaatccatttcaagaatctaatttgaactaaaagggtggctatagaagatacgaaagctggtcattccattgcactatctttgaatcacatttacaataatgtttacttctgctttttcttttttaaaaaaggttgtctctcatgtcatcaatcatcgtccatatgtagcttcaacttcttgatactttgactgttcaacaaaatcgtttatagaatgtgactattgtttcttaagctggtcctttttagcttttttcctgacaatcttttatccgtttggtaattgttggccagg

SEQ ID NO: 44546 - DNA, 1034 bp, Manihot esculenta
  Intron number 1 from transcript cassava4.1_030739m (locus cassava4.1_030739m.g) derived from phytozome v7.0 (chr-ID scaffold08036; pos 1014 to 2047 reverse strand)
tccgctctgaacgtgagctccgcggcaagctccatgtatgtctttctttctttacatgtgcgattgtggttctttatgagtctttatggtttgctttggtgttcactgacgagaagcccagatacagaattaatggtttttccggcaccataacggacgttcatgatatattttagttgtccttctttgctggtgagctgctgctggtctaggttttgcttgttttaggttttagtatgtacatatcttaatttggtttctcaagtagttttatgggtcgctaaaattttaaattatcgacttctgtttcattacgaattgagaaatttttgtcttcggcttgtaaatcaatagtatgatgctatttgccgaaatgggattaaatgacttgggggaagggcggggggttagtttaggttttgtttttcgctaagtattagtaatttttccataattttatcctcctttatgatatataggtctcctggctgcaacagattcttgaaaatgttttaatatgcaattggagataaggagaattgtgggtgaatttgtttttccccgttcctgtacttttagttttctttggggtcgttgtgctgaatatgcttgacacaaatggacgtgtagacttgggacttggtggatttgttggcttaattgcttcttactatagctatggacatgctattttgatttacagcttaagttatttttgtcaactttgcatataacacgattctcttccattacactctatgctgcaaattaatggagtagcgtttcacatttgtatatatatcatttaaatcacatcaatttatcagaggacaaagtggccaagtacttatcagcatggatggtttatatttctcttacatgttgctgaatattatatttaagaaaaaaaatgaagaaaggtttttctttcacttgtaaatataatatatattatttgcatagctgctatgcagtgtatttctcaatggaaattcctagatttcatgtttgggttgcaaatttgtttcaggcat

SEQ ID NO: 44547 - DNA, 308 bp, Manihot esculenta
  Intron number 1 from transcript cassava4.1_004415m (locus cassava4.1_004415m.g) derived from phytozome v7.0 (chr-ID scaffold11581; pos 436226 to 436533)
gaggtaatggtgattcaataacgacggaagaaactctaattttgaaaatgatattgatttagtgatttgaataaagttcatctttccctcttttctttccctcagtttcaactttttatgtagtatgtattttctaagcatgtaaatcaatgtaagctggatggtgtttatttggtggaatttctagttattagatgaacagagaaatgaatggacggtttgatgcttttatttttgaagtatttttggcttacattatgtagctccttaaactgtatggtaattatctgatatatgcattcaggtta

SEQ ID NO: 44548 - DNA, 859 bp, Manihot esculenta
  Intron number 3 from transcript cassava4.1_020303m (locus cassava4.1_020303m.g) derived from phytozome v7.0 (chr-ID scaffold10397; pos 55724 to 56582)
caccgatacacataaattctatagagagatctttggtatataagcttagttgttcatatcatgcaattctagatcattgctatgtgataaaatttgctagtgcaaaaaatgagtgagatttctttttaagaaatatgacaggattactattgttatttatagaatagcaatttactaatgataaagagatcacatgcatatgttgtagttagctttaagtaggaagggctacaaggagagagtatattgcctgacatatcactagttttctcataggttttgtttcttcatatgattgtaaaggcagtggtgctcttgaaattttttagtctactctatgaattactctataatttgcacaaattgaaattgctttgttagttactgagttgtgtaatggaaaattaaatttagtctctatttgtagaaaataatttatatttgaaaaatattttttatttcatatgaaaaatatttaatttctagcaaaaaatttattttccatttcttgattgtaattttaaaagtaaaatatattaataaacttttacatagtagtgttaataagattctcaaaagacagaaaataatttaatttaaaaaatttttaaaaatactttattttccgtctcgttaaaaaaatatttttcattaaccaactttaattgagtattaaaatattaaaaaatatgaaaaatattttcccttgaaatacacgcagccttaattccatttttatgttgttaattcctaagtggagccagtggattgattattacatgaaaatttccaacaaagttgcatttgattttgatgctaatgattttttatgtgaaatttttgcagctagaagcatctc

SEQ ID NO: 44549 - DNA, 1032 bp, Manihot esculenta
  Intron number 2 from transcript cassava4.1_001161m (locus cassava4.1_001161m.g) derived from phytozome v7.0 (chr-ID scaffold02525; pos 62515 to 63546 reverse strand)
aaagaaggcaacttctactatatcgtttccaccaggtatttttttttctgcccgatctctcttcattctcctgatttccttgtaaaatcttatcgtggatttgattttcattatatttgattctgggatgcttgctctaataaaaaattttagaatccctgtgttacgaactgatttttcatttgcattgaaaatcttttttcttcttccgaatcatagcttaaccgacttggaaatggagcaattaggcagccggcaccttattgttacacattgtattccgactttttaagcacatcgttacagataagcttctgtggtttttttaataaaaatttcataacatatttgttttaccagttattagaatctgggctgttactgcattatgatttccttaatacaattttaattttgcttggatgttgttccatatattttgaatcaaatttttttttttttcaaaaagtacatttttatagatatctcatgagccgtggttggttgggtaagcattgctagacgaccgttttacatattattttgttccataagcattactggttgggtaagcatttttatagtgtgtgcgtgcatgcttagtttcttatgtatttatacatatgacgatctctttagaaactctagtccccaaactttcgtttatgggttagccatacactacattttacatatttttagtgattacatggcattatcaaatgatataagtcttgtataagaatctacatcgctttagaactatatatgtatgtatgcatgtatacatgtgtgtgtatgtgtgtgttctacagttgttggtatgtccatttaaaattgggccgctaaggcaaagcaaaatgtaatgcatacagttgtgcgtgtgtgtgtatacagttgttgttaagtattgggcagctgagaaaaacaaaatgtgatgcatgccttgtgttgttgatgagagggacttgcattcatcataattttactgactcttgttataatctgctgtttgttcaggtggtttgcaag

SEQ ID NO: 44550 - DNA, 733 bp, Manihot esculenta
  Intron number 1 from transcript cassava4.1_000296m (locus cassava4.1_000296m.g) derived from phytozome v7.0 (chr-ID scaffold04165; pos 465090 to 465822 reverse strand)
tcttctctctctgaattaggttctttcctgatcgggtaatttctttctgttttccgattttgattgatttttgttccgattttagtttcccattttggtcgactttttctagttgtttctggaattgtgttttttttttcttctaaatttttaattttaatttgcttttggggttgtttgcaatccgatataatcagatgatcggagtttcttctctgaagaaggagctttaagaaattttgttttctattagtttggttaaatgtttaaaatcttttggtttttttgagattattgggtttttcagttgttgagtgaaaattctgattttagggctttggaaactgccgaagcttattctggttgttgtatctttggttgttttcattaattataatatgtcgttgatcattgctttggctttacttcattcactgccagctttgtcttcccgcacttgatttttggtgttctagatctatttggacttgccccttgtcaggggcaatcgtttgtttgttcagaattagattgagaaattgttactggataccataaattgggtttgctttatctgatagtaaatcagaactctccctgtctttatatgcttttctcttgcctgtttgacttgcagtttacatcttgaatggactgagaagagcctagatcttttttctttccctttttttggttgcctgcagggtgatcgatcactgatagactgtcagat

SEQ ID NO: 44551 - DNA, 708 bp, Manihot esculenta
  Intron number 1 from transcript cassava4.1_011303m (locus cassava4.1_011303m.g) derived from phytozome v7.0 (chr-ID scaffold01256; pos 223165 to 223872 reverse strand)
ttgttgctgtaaagtacatagagagggggaaaaaggtaaagattttccatttaattcttatttgaatgtaaaattatttaagtttatttaaattgtgaattttttcttcaattgttttgatggtttgagttgactgtgttcaattcttgatgttcacgattttccacctttccaatttgtgttctcattgcggttttagattatggatgctctttattgctcctttctggttaggctttttatgtttttgggaacaaaaaggagagtggatctcgccatacttcatttttctcccatcccaaaagaataaccttattcatctatccaaattacaagccaagctattttcttttttacttgataatttatttaatatacactgaaaaagttaaaaattatttgttttaagaataatttgggtggagcttatattagaaaataagatataaaatttttttttggttcctattattatgattaccatagcttggctttaaaatttttggaaagggtgatgggctaaatctaatgctacatttgtattacatattcattatgattggctgtttgaaagtatcatgattctgaacttggatggggtattcattcacttatcaatttcgtttctaatatttttttttatcaatattataaatataaatattaattttgtttagtttatgggtgtattgtgtttgaggcagattg

SEQ ID NO: 44552 - DNA, 559 bp, Manihot esculenta
  Intron number 1 from transcript cassava4.1_005580m (locus cassava4.1_005580m.g) derived from phytozome v7.0 (chr-ID scaffold08359; pos 1281873 to 1282431)
cagcaggtatatgttttcctcttgagaattcactttagttgctggcgaaagatcaaaactttagatgtgaataggaaaccttaattcttgaaatagccaacccaacgtatctgataagtcaagttttcagttcctttttcaattgtcttatcaaatgtggaagctaggaaattcaagttgaactctttcatgtgtatccttttctttttccctagaatttttaattttcctgaaagaggatcctcttaccttctttgcgatcatttcgcttcattttcccttctttgtttttatcctaatcttttatgaaacatgtttatctgtttatttggatgttttttcttagtataaagaaatccaaatatgcctaaggtgaatctatttagcttttgcttgttggagtctctatttgagatttaggaaaagctgaaattcgagtttgctcttgttcatgttttggttaatattggccctacagctgtgcatgagttgagccttgttgctgctataatgtgtattagcttttgactgcccaggtttcatttgctagctgaatttg

SEQ ID NO: 44553 - DNA, 594 bp, Manihot esculenta
  Intron number 1 from transcript cassava4.1_016932m (locus cassava4.1_016932m.g) derived from phytozome v7.0 (chr-ID scaffold04653; pos 117197 to 117790 reverse strand)
ctctctctctctacggggctctgcttcatttgtaggtatgtgcctcgggtcggtgctgcctgatcatgtgcttatttccctagaaaattgatgattcttttctgaaaattgagaattgtgtaggatgttttactacttaaggtattaccgtaagatttgagctacaattgtgccttcctcaaaataagtagtgtatttgatcgcctaatatggaaattttttatccatgcttctgggatactgtcttgaaaattaaaaaaagaaaaagaaacagattctgagagcattggtttctcttcgatcatgctaaaccctttctctaagtagttggcatttaattttgtttacctattctctagatgatgagttaatgaagcatatgaatttgtacttgcaactctgagtttaatgttataaatctcaagactttgacgctaaaaaattcactaataattgaaaatattttgttatgtctgtaaattgattccacattgttgagatgcatgtcaaatgatttgttccagtgttatattcagtggcaaatgcactcttctttttggtttattctattttatctgttccagttttgcgaag

SEQ ID NO: 44554 - DNA, 973 bp, Manihot esculenta
  Intron number 1 from transcript cassava4.1_001849m (locus cassava4.1_001849m.g) derived from phytozome v7.0 (chr-ID scaffold05875; pos 1147689 to 1148661 reverse strand)
acttgcagaaattccgactatacgaaactcgttcggtataatcttatattctcgctgtgttactgtttttggtttcggatttgttagttttgattgctgagttttggaacgttgtataaattttcttttgaattattacgtgttttcttgcataagataacgaactcgtagcttcagcattgataggcagatcactgatcagaggaaggaatattctaattgatgtagttgctgtttttgtgtgtgtaattgataaatagtgtactgggctgattagatttgaggaattatttattcttttgctttattaattcatctattcaaatatataccgtagaatttatgttatgaagtgaaatttttgagcttatgtttctggactttcgctattgtttttccttttctttgatcttgtatttcttttcctttctttgtaaagtatgagaaagggaaggattcttcctctactgcaactgttgattcccttgtgggttatctcagtgatttgtagatgacttatctctttgacaatattcttctttttccataactttcacaaaaaacagttctttacgtaattgtcatctaattagattttagttggaaaatgtttgagaaattgacctacattgtttgcctttattgttatgatattcatttttattttagttactctttcccctgcatcagtctgaaagtgatatcttgatatctattgtgatttcttctcaagtactgctatttttctgtatgacaccttccatggttttactgtttatttacctttgctacactcaaatattgaggtgtaaaaagcaagaaattatggtgcctcttctttcacatttgattcactaaatacattatatttttcgtttttatttgtgcaaaatgcctgggattacagagtcatatattctgatccaatgttgatccgacattcatttcatttcctgtgcaacagaatttttat

SEQ ID NO: 44555 - DNA, 583 bp, Manihot esculenta
  Intron number 1 from transcript cassava4.1_024843m (locus cassava4.1_024843m.g) derived from phytozome v7.0 (chr-ID scaffold03175; pos 282907 to 283489)
aaggtctgattttctatcccttgatctactgttcaatctatcatgtagactgtagtttttgtttcctgtctattacctattttcttgttttgggttttctagcaaaccccatttcttcttcttgctatagatctctgttttggttgcccaaaaagctcgaggaaatgaaaatgttctcaataaaaaagataaaaaaaggaaataagaagaagccattaatttcgctgcagtttagcagctgaattaagcactgattatatttggacaattatttgttccatcactaggtgaaccaaatggtgaaattgcatgggatttgattgaaaggatgcttattgatattcttcccctcatgtaatgatgccttttaaaaatcatgaaaggctacattacttcaattaccaattatatcttttttcacattattttaggttatcttttaaggagctgaaggtacaagcatcaatcttatgtgattgttgaatcaaattgtttcatttatcttatgcatattggaattaaaagggttatatgttttattttttcagggaatttgactcttgttaacagaagcatatctggt

SEQ ID NO: 44556 - DNA, 794 bp, Manihot esculenta
  Intron number 1 from transcript cassava4.1_008588m (locus cassava4.1_008588m.g) derived from phytozome v7.0 (chr-ID scaffold08886; pos 94025 to 94818 reverse strand)
tcacaggcagtaggtgtttcatttcctcaggtgagtttcattaaatttgtactgttgatgttgatcttttgatatatcgaagatatatacatctaaaaattattgtttgaatttgaaaatttttcaatggttagatttgaagatattgatttttgaatacctactattggtttgaaatataaattttctggcgctgctgtaatttgaaaattttgcatagatgacttttaacaaaaagctgttaaatgtatttatgaatgcaatagaatttacaagactcctgtttgtttggcattttttttttttttttatgagcaagtaaattaatttttgaaatgggagaatattataatgtctctgactttcatttttattttaaaattagtaaattaattttttttttattttataaaattaaactttttaatttttttattagtaataaatttattttatttttaatcagagagattaaataatattaatatttaaaattataaaaattaaataatatatataattaaaattataaaaattaaatagtataaataatgatattttaataagggtaatgtgttaaattttataaaatattaaaatattttaaattaattttataaaaactcatagagtttatagttttctttttagagttttatagtaatttaaactttaaaaatgatcccaaaagcaaaacaaacaaccagtgacttgaaaaaagatggtatcaactgaaaagggctattttttttttctcaggttaagaaaatcaccgacggaaaagaaagagagtg

SEQ ID NO: 44557 - DNA, 681 bp, Manihot esculenta
  Intron number 1 from transcript cassava4.1_004916m (locus cassava4.1_004916m.g) derived from phytozome v7.0 (chr-ID scaffold06688; pos 439950 to 440630 reverse strand)
ctcacttcaatcgcttgccttctaggtttttcttcttcttttaactttgatttttgtgcataaatgcgtgcttgcatgtctttatttatactctctggatttggactgggaagataatcgagttttttgaggatttgttttgctaactctgttcgaatcggttatagttgcatatatagggaactggaatgtgcatgtctgagtggttagttttgttttggactgttttttttttttcttttagtttatggcatttccattttttattttctttgtattgaatataagcattagcttggagttgctaaagctgatgtaggattcccaattttttgctgaaacgagactgtggtgtttaaagttttcgttgggaacttaagtatatgaacgtgttgtggagtattttcgtgcacgctagtagttgccgaaaccataagtgtttccttatttgggtttaatcgaggactgataattattcagcagaggaaaatgaaatcgcgagtacaaattatgacccgaaaattttcatgcctttatctacctctaattttcgtctaattgctttttttgttgatctttgcgcttacatcaagcttttttatatacatgggtggaatgaccatctttattctctcgtgggcttgatggaattactttcaactttcttatttcatatcagtt

SEQ ID NO: 44558 - DNA, 497 bp, Manihot esculenta
  Intron number 1 from transcript cassava4.1_000902m (locus cassava4.1_000902m.g) derived from phytozome v7.0 (chr-ID scaffold05875; pos 1693637 to 1694133)
cagtagcttctaaagctggcaggtacaaaaattaagaggtctgaatatttaaagttaagaaaatgcttttcttcacttattgtaagtataaaattcatatctgtatttatctttctaatatgtgtatttttaattgtaccaagatgagtgtggaatcatcagaatttctggtgtgtttttatttttggctgaagttttacagacacaaatatcacataatctagaaggaataaaaaaagcaataattgaatgagtagaccgtattactctcacctattctcatctaactctctgttactctcacctactcaaagtttcactgtgatttgtgacaacaaattaataccgtattatctaaagttggtaatcaaatctttttcagattagttttgtttttaatgtccttgaatattatttttatcagattattcttgtttagctactttccaattcaaattccaggtgtgtacgagaatatcaatcttcattaacagatc

SEQ ID NO: 44559 - DNA, 808 bp, Manihot esculenta
  Intron number 2 from transcript cassava4.1_011798m (locus cassava4.1_011798m.g) derived from phytozome v7.0 (chr-ID scaffold11581; pos 903729 to 904536 reverse strand)
ttcccaaagtgttttgtgcaggagctgatcttaaggtattgcattcataaattttttgttgtgctattaaattgtttcaattgcatcactgtttcaaaagctagaaataggctgcagaaaatagaggatgctttgttttttatagtatctaacctcgacctaaacgtttgtttgggttgttagattctctgtgttctatacttattacttcattcagtatttagtcagcctaagtaacttgttttcagtttagattaggaagcacgcattagatctttcttttggggtctgtctcttgtgtaattttgttgtttcttgtatctttttttatttactgccacaatagcattgattatgccaattaagttgttgagttttgtactcatctcaatttgctttggtctgcattctagagctataggttctcgtaagtagtgatagtacaattgttgatttcataaaaatttcgctatatttgcttcagtttgtgttagaggctgagattaaaggtcgagaggcgtaaatgtttaagtttgactgtcagagggtcaagagatctaaatgttaaagtttgagtaagcttctggttcagttgaaaatgcagtcattattaggagtgaaaataaagaaacactctcatttgagggcttcattaatttttatgttaaggcttttcatattttcttccactatctgcagacatttattttgtgcttgtcaatctatgttggtttttatagtttagttgatcttggatgcatatgcttcacatctctacctttgattggattggcaggagcggaagaca

SEQ ID NO: 44560 - DNA, 743 bp, Manihot esculenta
  Intron number 1 from transcript cassava4.1_009217m (locus cassava4.1_009217m.g) derived from phytozome v7.0 (chr-ID scaffold03604; pos 481695 to 482437 reverse strand)
ccagttcttacaaggacgagcttgttcaaaccgctgttagtttctatccatccctctctttcttttaacctcatgtgttttattattttgctggctaaaggaatcgaatttgagtttatgctctcttagctgattgaattgttcgttttccatcttataatatataattggatttcgcattaatcttttttttttttttcatttcccttggtatgcttagcattttgtttcaagtttatatatatttctggtttctccatcagttgatgattttagcttttcagccttaacgaaatcatggcagctgataatggggttcgttacctttttaaaacgaagatttgagcgtcgcgaaatagggtctttaggattacaccgcaatttcaattccacatctctgataacgtgtttgtatacaaagagctgatttaatgaaaagttcagaagggggagaaaaacgcttccccttatcctcgttcagtcgatttgttgggctcgtaattcattccaattcatctctgtttctattatgaggcactttgagtctgtggttcaacttttcttagaatagctgacttagaaagaattttcttttgccaggattttctattttttatgatgtttcattcttttttttttatgagaattcctggtgtctttattagttcattgagcttaactgcctttggcttgttcttgatggtgcagaaatccattgcatcacctggtcgtggcatcctcgc

SEQ ID NO: 44561 - DNA, 892 bp, Manihot esculenta
  Intron number 2 from transcript cassava4.1_033533m (locus cassava4.1_033533m.g) derived from phytozome v7.0 (chr-ID scaffold03542; pos 479798 to 480689)
tgcttgattttctgcagtttgtttttgggtttcaggtttgtttttttttttttgttttccttttattttttattttaaaaatttttaagacaatgatttatagggtttatgattatctttactggtttcaaatgatttggagtataaatcaaattgaactctgatgacatacattttcatccttccatcttatctgtgaaacagtggaatagataaataggacatcttcttccactgactgaaataaatttaacctgaaattaaatgaaggtaatggttcatattgaaatggaaaacatttacataacatgacataattggacttgtctctagagatttaactcatttgcttgtgtctgcacagagagaagtaagtgatatgtgtaatgaatttgaagtagattacaatgtttagatgtctaagagatcatgtatctagtcttcacaagtttgctttatattagttcttttcagaatctgtatagagatgctagtgatgccggttcctactttttattctactgtcttgtttcctccacacttatgagtgtgaacagctttaagcactcacatactccttccatcttctgatcactcaaaggataattatccagtagagaagcaattccctataattttgtatagttgatttgtatctacttgctagaggattcagattgttctcttcatcctagtgttatttttcagtaagaatttgctcttatgtggaagaatgcttgtgctttctattagttttgtaatttatgattttcttgttgcttcattttttcccactttcctggattttttgtaattcgttttactatttcatcctttggacttgcaacttccttgtgtgtaattcataaactctgtggctaccagaaagaca

SEQ ID NO: 44562 - DNA, 452 bp, Manihot esculenta
  Intron number 1 from transcript cassava4.1_002033m (locus cassava4.1_002033m.g) derived from phytozome v7.0 (chr-ID scaffold05280; pos 744234 to 744685 reverse strand)
gtaggtttatgactctccaatttctcaccagtaactttccctttcgatttccatttctaaatcactgacaaaaccctaacttttcttttttcaatttaaatccttccacttactcacatttttccgattttgattcgttccaattcagtttcaatgcagattactaagtgtgattgtgattaaccaaatgatgttatgttttaatgcacaatcaagagtaggattaataagatcatgttattgcctgccattggattattttagatgtctcccagcaagcacactaaattataagaatttgtttattgaatggatattatatgtttttttctcgaagaatggatattatatgttacttgcgcatattctaggcttggacaccttttacaagtttgattgggcctaaagttgttttctacttgagcaggttgaaatcaaaactccccgaaaac

SEQ ID NO: 44563 - DNA, 836 bp, Manihot esculenta
  Intron number 1 from transcript cassava4.1_025122m (locus cassava4.1_025122m.g) derived from phytozome v7.0 (chr-ID scaffold11784; pos 308009 to 308844 reverse strand)
tgccagtattgcactgagcccttgaggtcgtctattttaccatctacaagccatgatttttttttctaaaaagaaatctctccagatatttcttcatttatcttcttgtgagttggacattatggatccatctgtttcctgaaggtctgatgtgatgaccaatttgagtcagtggcttgactttcttttgcatgtttctgacaaactagggttttccagtcggggtttttttcttcctcgctcaactttgctatggtctgtaaattattttagttccaaatttagctccagatctctactttacaacagcttttgtactaatccgtattttcattttgaggggtgcttaatgccatgatcaagatttggtatctcaattcaagtttcttttttttattttttacttgggatttatgaagtttttaatttataatttctattgttcttactctctctatatatatataaagttctgctgattatggagtttagcctagctagggcatatctatacatgaatggcccgagctgaccagatgttatatatatagatatatacatagattcaatagataacatggtatattttgcatccacatccaaaaacaaattaatcacgtattattgaagattttttccctcgttttcttgtaaactttctccttttggtgttggatgcaccgagacagaaaatgggatttttaattttcagtcaatgatctctgaacgaaaaagaaattacacttcaattggtgttgattaagattttcacacatatgcatcaagtataagcaattataagaatataagacaatgatatacatggtcttttcagg

SEQ ID NO: 44564 - DNA, 277 bp, Manihot esculenta
  Intron number 2 from transcript cassava4.1_005448m (locus cassava4.1_005449m.g) derived from phytozome v7.0 (chr-ID scaffold12865; pos 656911 to 657187)
agtcttggactcagtttcacgctactggtacatttcatccttttcttttttgggttggtaatgaggacaaaagttaaatgaaaccgaagaaaaataaacccagttgttaattaatgggaattttaaactataaagtgaggtttagtgttggaagcatttttcgattggaaatcagaatgagattttttattgacgctattgtattcggaaaatatgttgtttgattttattcgtgttggcagcggaagcaaaaaggcaacttctttctgctggtttt

SEQ ID NO: 44565 - DNA, 443 bp, Manihot esculenta
  Intron number 1 from transcript cassava4.1_025585m (locus cassava4.1_025585m.g) derived from phytozome v7.0 (chr-ID scaffold00480; pos 210608 to 211050)
ctcagccgcctctgcatcgaccatcctccgtctccgtaagtggtttcaagaagtgtgcatttttaattttgcaaaaatttataagcatatttttagttcgtgttttaatgtgtttctcaatttttttttggttgattgttgaaagcttgaatgcttcgtcaattttcaaaatcccagttgaagataaaattcagccatttctggaaagtgaaggtttctttgatttttacgtaaatttgtgttaattttgcaagacgatgctgtctgtgacccaaattttacattttttgtggttaaattggcaactgaggtggttttacttctttagcagaaggggtatgtcagtgtagtgtgtactgcatctcttaagtcatatacatgatattccccccctttttattcttttcggtctcaggaggcaagtttagtgagattagcgttga

SEQ ID NO: 44566 - DNA, 724 bp, Manihot esculenta
  Intron number 1 from transcript cassava4.1_008167m (locus cassava4.1_008167m.g) derived from phytozome v7.0 (chr-ID scaffold07035; pos 282167 to 282890)
acgcggggattggtattggtttttcgatttcttaggtaatattggcgaaatcaggttaagtgagttgataaatatttttatggctgctagatagtgggttttgatattattgataaagtgtaaacggctttgcttttaagttattatgtacatctgtttcagtttgttaagctagtattggatcagcttcgagctcgatgtcagctctgcttttaggactctgagctgtatttaggagagtgaaatagaagtccttgtgtagattctaaatgcgattacgtttctttgtatgggtgaaaatttgttctttcagataaaatctatgtctatatgctatggcagttagaattgtatgttttgatattctgtacaggaaagccttcaaagaagtgctgtgtaagagtattagtgttttcttttcaagaatgtggtagagttaccccattagctatggagacatgaaagtaaaagaaaactttgtgacaataaaacaccatggttaagtcatttttgttaagagatggctcctttaattccagttgttatgaaatgtatgggcctctaacttgagtattgtgcctataaaacatcgaagattgtgttctgatatttgcaagatgcaagaatgtgtatgtgtttttgctgcttttttgaggcttcacttatgttttagaagctgaacatatgtatttcaatgacattgcagctcgtgaataaaagaata

SEQ ID NO: 44567 - DNA, 523 bp, Manihot esculenta
  Intron number 4 from transcript cassava4.1_014256m (locus cassava4.1_014256m.g) derived from phytozome v7.0 (chr-ID scaffold05875; pos 681687 to 682209 reverse strand)
tcaatcttacccgcaagtagctaacattggagaaggtaattcatgcaagcaaagcataatttaagcacaattggccttttgttttaattggtctcctatattctaagagttcatgaagcttggttttggtgaactaaagaatttttctccctttggtattgtaagtctttattagtgccgaaggcttcttgtaattagtaaggcctcttctgtaatcttatggatatttgattctcagtaactgcttgtttttaaggatacctctttgatattctaataaatgagagagattttgaaaaatcattcataggaagttattggtccacatcttcttggttaagttttagacttgtttttgtcttcccttttccatttgattagtggagaagctctataacttcttccactataaattttggtttatttatttattatttaaaaaaaaaaaaactctatagcgctcctccataacttggccaaataattatctaatttagttgatgttttggttgtttaggattaa

SEQ ID NO: 44568 - DNA, 575 bp, Manihot esculenta
  Intron number 1 from transcript cassava4.1_005784m (locus cassava4.1_005784m.g) derived from phytozome v7.0 (chr-ID scaffold03699; pos 103294 to 103868)
tctttttcattcccatcttttctctctcgacataggtaagttgaataaccagatcctttgccctgtttatcttctgattatgtcctctattacacttattcatgctctttcccaagtgggttttgcagttttgctctctcttttttggatagattttcttaaatttggtgatgtgcaacagggctagacttgttttgattgttcttggtgcttaattttcatgggtgcgatttggttgattggaatatattttaaattggttttaattatatttagtcaagttgggttcaattttcggcttttggtttctgagttttatacttttgtattatgctgagattgggtggatcgttgtattcattttaacttgtttaatgggtttgtattaagctttgttcacaattctgtcgtagtttgctgtttgattcagtttgttcgtttttcataatagtttattgtcatatattgataaattcttgaaatttaatgcttgaagttggattctccaatttcttatttggttgattcttctgtttataggataacaagggatagctaacttgattaaaataagg

SEQ ID NO: 44569 - DNA, 853 bp, Manihot esculenta
  Intron number 1 from transcript cassava4.1_020291m (locus cassava4.1_020291m.g) derived from phytozome v7.0 (chr-ID scaffold03404; pos 107684 to 108536)
gtaagtctacaatatacaagatacctatttatagagtgtctaggacctatagactactaatcaaatatactagaacctattagaatattctttaatacactagaatactatatactaacatcaataatttgttagaaaaaaaagtaaaaagtaatgctgattgcactttaagtttgctgaatatattttaaatttttataaattgccaaagttatgtgagagtaactctataattttatgaaaatttagagtacattccacaaaacttagcgcacagtaagtaataagtgggaccattttttacctttttagtgaaaaattatcaatgatgagactaatttgtgttaagttgttataattttttttcttttttaaatctaggtattaaataaattttaattttagttcaggtgtcttgtggatacatgtcaaataatacaagagtgtaaatacagatttcgccttttttaaagtggtaagtgatcataccagagtgcgattctcttgatggttcaagagaagggactaagactggccctttgtgccagattggaattttgagctctggtttgtccggtttgatcccagttcttaccatagtcaggtctaactgcaatgaataagttgtagatgttttgtttttgataaccaaaaccaatgccatagattattgggtagcatttttcaccttcgtccaacaagagcaatgagcagcaattttgcattgttcttatctgagcgctctatgcatttctggaactacattaacagtgattcattgcctctgaaatttttatgacgtttcaaatcttctttaggtggcaagaacagggcgaatagcactggtgcgaga

SEQ ID NO: 44570 - DNA, 694 bp, Manihot esculenta
  Intron number 1 from transcript cassava4.1_026715m (locus cassava4.1_026715m.g) derived from phytozome v7.0 (chr-ID scaffold12525; pos 453176 to 453869 reverse strand)
gcgctctctggttctcgcgtaagtctctctctctctctccgcgagatttgtataatcttaagttgccaacttcaaatactctgtaactgtctgcatatctcggtatgaaaatgtgaactttataggctctgtttggttgctaagaaaattttggaagcggaaaagcaaagttaaaacgattctcggtattttgctaattccttggctttttatatattagttctttttaatactccaagtgtaattttaatccaaccgtaagaaaaggaaagaaagtaaagaagagtataattttgcatactttgttggatctggaccctggaggtcgaggctgatttgtggaagtttagtttatgtacctttgagctgtggatggttgctagaagtaccgtaggatttcctttcagtttaagatcaagtaaccttctagattagattgctgtggaactggatggatcttaggcaagagctgattatattgagtttatctgatttcaatggattattgtataatatacgtaccaatgtggtggatgtcaagaagttggagggaatcgcttgttctggttttgtaatttgtttatgattggttttcttcgtcttctctgtctctcctagttagagctcacaagattagcgatccacatttgccttctgcatatgaatgttgaatgtttaattttgatatcgcagg

SEQ ID NO: 44571 - DNA, 496 bp, Manihot esculenta
  Intron number 2 from transcript cassava4.1_011903m (locus cassava4.1_008188m.g) derived from phytozome v7.0 (chr-ID scaffold04953; pos 260709 to 261204)
agttcgccggaatcgctgtctggattttacatcaggttagtgtgccaatcaatatctctttgtttttgtttatggaagcgaatcaaatctcttctgctctgtttattgcattagaaattttagggattaagtaatgaaaagcttgtttatagattttattatccacatccacttaccaatataggaaatgaagggcctttatgtttttaaatcctttgcaggcagcttgaattagtatgaaataatttgtttgttattttgcataaacgtaccttcgattttcttcatgctattgatgccaaggagcggtatcattatgattgtactctagtaataatagagatatttgagatttcaaattctattgcataataatatttttgttgccttgctctttttttattagtccctttctggatggatgattgaaaagaactttttttttgcaatgctttgagcagtcagaaccttcatctcccaggagtcagagatctgg

SEQ ID NO: 44572 - DNA, 444 bp, Manihot esculenta
  Intron number 1 from transcript cassava4.1_002885m (locus cassava4.1_002885m.g) derived from phytozome v7.0 (chr-ID scaffold03581; pos 520517 to 520960 reverse strand)
cttcgatttcttgtggtggaagaggtgaggatggatacaaatggttttatgtctgccttttttttccaaaaaaaaaaaactctgttttggtgcctgtcaaatgaaggaaaatatatgggttctcaagctctgttcagatgccttgaaaggggaaggaagataggaaaatggaattttgtatcctactcttctgtccatcttttttctttgttctgcagtatctgctttcagttgctatgcttttgtggagatgaggtttctgccttgtcagagataataatttaccaactctattgcttgcaagtttcattttcctatattttcttctgggttttctacgcaaccaaacagagttggaaaacacatttcttttccttttgtaaccctctgtcagtcttgtttcttgtgttttgacttggtttgagcttggtggtgcaggaggag

SEQ ID NO: 44573 - DNA, 599 bp, Manihot esculenta
  Intron number 2 from transcript cassava4.1_013589m (locus cassava4.1_013589m.g) derived from phytozome v7.0 (chr-ID scaffold07053; pos 77707 to 78305)
ctgttcttgaaggccgtgtcattgcagtggaaaaggtaaaacattgttcattttgttcgtggtcaccaactaagttgattagatattggttaatttgtacccacttaaatttgcattaagaattctggatggtttgatatgaattcttatgagtttgaaagttgtttgcttctttccacttgaagtttctgtggcagcagcaggttagctgtgtgtagcagctcttcatcaaacttcaaagttcttaccacaactaaacaaacaaatcaaatacaccaagaagtatcagactgttagggttgtatgccctgcatttctctcctcttttgtgctgtttaagtttatatgccatactgattgtgttatcactttatttgttatgcaaatatgaaaataaattctacatatagagacgtgctttttagaaaatagtaagaaaataaattctacatatagagacgtgctttttagaaaatagcaaagattttttgttcgcatcttactatcagaagtggtttagtaatccaatgagctaactcttattatttttcaatttttttttaggccaagagacggagaggacgaactcctactcctgg

SEQ ID NO: 44574 - DNA, 418 bp, Manihot esculenta
  Intron number 1 from transcript cassava4.1_025468m (locus cassava4.1_025468m.g) derived from phytozome v7.0 (chr-ID scaffold07035; pos 48420 to 48837 reverse strand)
caactcaggtattcatttttttctctctctctaaaaatgtataaattgagtttactatttggctggcttaatttttcagacacaatgaaatatttgaagattttatatgatgagtttttggaaataatttagctatgttctgtttggatactaagaaaatgcacgaaaagagacgaaatttagaactttgaccgtgcatttaagtgggacctgaagagacaagaattccggtaaattgagccttaaatgagtattttacttggttcattcaaaatagtactttctacgttattttccagtccccttccgagtctaaagaaggaatttgaatgtggaagcgttgtgtgtcaaggcgactctagtaatcatcagaactaaaaattctttggtgatctatgaatataggtttcgcagctga

SEQ ID NO: 44575 - DNA, 309 bp, Manihot esculenta
  Intron number 2 from transcript cassava4.1_026517m (locus cassava4.1_026517m.g) derived from phytozome v7.0 (chr-ID scaffold06327; pos 37463 to 37771)
tgattgggtaaagcatctaaccctattcaatgagttctctcttttttttcttatcatttctttgattcttgatgctctttgtttctctccttgcataatcactaaaatatataaacatttattctaaaaaaaattaaaatggaatgacacgaatcttttttttttaattagagatctcatatatttattacaaatttaaatttaaaaaaattaaatattttgtataaatatgaaatttattcttgcttcttgaaactaattaaatttgtttatgtgcatttttattgcagagttatccccaagactctc

SEQ ID NO: 44576 - DNA, 506 bp, Manihot esculenta
  Intron number 2 from transcript cassava4.1_014271m (locus cassava4.1_014271m.g) derived from phytozome v7.0 (chr-ID scaffold04489; pos 64692 to 65197)
tccctgctgagaacagggctaaattctggtatggaagtttgtcgagaacctcttagtcatatttagctatggctgcaatgtgatagttttcatttataactatgctgatatatctggtttgtttaaacctctgctttatactttctttttcccataacattttctaaatcacatgacctctataactatttagaactctaatcttttgatttgaattaattaattcatgaagttcttgatatcctaaataatggaagcttagctattacccttgtacctattctgaaattgcaatgcaattgttataaaaatattattccttctctatgaaattcatttttctgatttctttggatactctacgtattcttgatttacctgcaagaaaagtagtgctaagccagagtgcatcttgacgttcattttcttcatgttttttgtttgtaaatatactgtcgaactgaaaatgaacatcataatctctttcaccaggtactctactgatt

SEQ ID NO: 44577 - DNA, 1042 bp, Manihot esculenta
  Intron number 1 from transcript cassava4.1_001768m (locus cassava4.1_001768m.g) derived from phytozome v7.0 (chr-ID scaffold04251; pos 566235 to 567276 reverse strand)
gcccgcgaagaagcttgtcatcaagctcgtgaaaggtacaattttttttttcttaattgctgcttggctttgatgataaatttaatatgttcattgcatgctgtgagtttttcatgatttaatgaatcatcaaaggttttactcttcatttttttctcctcctttttgggtttatagtttgggcataaatttgtttttgtagttgattgaatcaatgtggattttttgtaaatttgttggcagagcataaaacttggattttgggatctgggtgatgggttaatagatttcaattgcgagcaaatcgagctgttaattgagtattcagagcttaatttccttgccaaatttaagggaaaatgctacactctgccatttttggatctgggtaatcactatcacatccttatattgctaatggcttgcactcagctaagcccacccagctccgtctggggtaatgacgtgtgttagcagagaaaaagctctaggcaagtctatgctgccaaaaaagagctgatatagcgacacaaattttgtattgtactcgtgtcttcttgagttccttatagtttcttttcttccttccaacaattatatgttttacaggtaggttttaagtaggccttaggttggcaattctgtttcaaaaagaataaatttagattggaagcatttttatttttcatcatttagtgatttaatatagtactattgcatgcacattgacgagtgcttagcctgttgtaaaagcacaattgtagtgaaatccagtgtttctttttggcatttctaaaacattactacttgtattgtactgaatagttcaagagtaacaggttaatgcattattcttgtgacatctacccatattgctccctcattttacattcattttctgattggatcaacagagcacactatgaatagcatcatggaatattgagttctggagtttgaagtttgtaataataaatgtgtggatataataattatgttttatgtagctaaaccaacactacctgcaaattttgaggaggat

SEQ ID NO: 44578 - DNA, 630 bp, Manihot esculenta
  Intron number 1 from transcript cassava4.1_000377m (locus cassava4.1_000377m.g) derived from phytozome v7.0 (chr-ID scaffold12794; pos 1430969 to 1431598)
aggtcagcaaagcttttcgttactttcgtttttttagtgcacaatcagttttgttcccgtgaaaatgaagaaaagaaggaaaacaactttcattattccttattaactagagaaattgaattagtgaaaatttcaatgttggctaattaagccagttacgcttaatcaggtcataatttctcagcattgagtagccaaccataaaatataacaaaactttattgtgcttcatatggtgctgagtttataatttttgatgaatccggtaacttacgagcgaaatgcgaagcgaaaacttaaatcttactctattatgtgcatattgatttgcattagtaagaaatattaactttctgacttaattttgaaattggtttcttaatgtttagtatattaaaattttgacttgcgaatcgtgaatccagtgatactatactgaacgttataccagaaaaaaagaaattaaaaatctatactttcaaatgatcgagataagcttgatgtctagatgataaatggttaggagaatgagatttttatctctttcaagtttttggttattgtgatggcttggcttcataacatactaatatataattttcttgtggcaggttatctttctagcattag

SEQ ID NO: 44579 - DNA, 373 bp, Manihot esculenta
  Intron number 1 from transcript cassava4.1_028517m (locus cassava4.1_028517m.g) derived from phytozome v7.0 (chr-ID scaffold10963; pos 776445 to 776817 reverse strand)
ctgctgtgattggactccttcctttcatccaaaaggttggatttttttttttccacttgtgctattcttttattcaattctgttgggtgataatccttttctagaatttgtattgttggaatatcgactcttttgatcttcacttggaattattcatttgggggataggtgaactttatcaaatgctctcttctgctaaatagatcaaattctcattgatattgattgcttcactctgctctgtctgtttcatgtgaagacacagtagtgtgcttgttctgattactatgctttgcagaattttgatggttgtgtatctttttctgaaacaaaaatagggattggtcaacagattggctgtaatattttctag

SEQ ID NO: 44580 - DNA, 638 bp, Manihot esculenta
  Intron number 2 from transcript cassava4.1_012744m (locus cassava4.1_012744m.g) derived from phytozome v7.0 (chr-ID scaffold03115; pos 59474 to 60111 reverse strand)
atcgaaatcttgaagctcggttgaggactcaattggtacccacatgctacttttgctgagatttttgaatttttattccctgtcatgtgttgaaggtgtaatttagaatatgaaatcaatgtggatccttgggtagagatcatgtgtgtcccaatctggcagtcctcttgtgaattttacttgagatctgcataacagacgattcttttatagagtttactctaatttcctattttattttatttttccatgtaattgaatgtcatcaaatagatatccaagaagatattacctcatgcccgttgcctgttctattacactaacatgatatcatttgtgtcttaagccgcttccttaaactgcataaatatgcttaatatttggggttgcttaaacttcaactaggatcaggtaaacccttttttgcctgagaagtttgcttttgatcgaagatatatgcatctggaatttcatctgttgccgtgtttcttaatctgcaaaactgttgctaaatctaatttaataagtaatggtccttggctaacattccaattttgtattattgatctcctgctgtcagttaaagaaagtatttggttttgtttaaggaaagtctcttgccccaatacctgaatctg

SEQ ID NO: 44581 - DNA, 630 bp, Manihot esculenta
  Intron number 3 from transcript cassava4.1_033500m (locus cassava4.1_033500m.g) derived from phytozome v7.0 (chr-ID scaffold09492; pos 527205 to 527834 reverse strand)
tgaaaattacatcaaaagtcccttaccaattcaaggtaattaaacttcatatatatcacaatgaattgcgatcaatttgtttgaaatttgtattgtaattcaagtttaacttcatatcacagatttcaaaaatatctccaagcttagcaaattgaagtacatggatttgtcctggaatgccttcaatactgatttattcagcttttcaaacatattttcttcggttgaaattctagacttgtatggtaacagtttgcgagggccactgttataccgaggtatgccatcttcctggtcttcaactttcaatctctcttttcaatttttctcttcttccattttcttattatactattgtaaaaactcaccaatttctcttgtgagtgctcaatgcagatatagttagactgaaaaatttaacgatgctcaatctcggcaggagcggattaaatggaactcagccaattcaaagtatgaaattatacatttaaatttcttttaaaaattagttttagttgtttttttgttgatttgctcattaattttacatatttaaattgcttttagataacatcaatcatcgttactccgacaggtttgtgcagcttgacgagacttcaagagttagat

SEQ ID NO: 44582 - DNA, 252 bp, Manihot esculenta
  Intron number 2 from transcript cassava4.1_033500m (locus cassava4.1_033500m.g) derived from phytozome v7.0 (chr-ID scaffold09492; pos 527840 to 528091 reverse strand)
aaatagcatatacgaaagtccctttcccatccaaggtacgcttgattcttgaaactttattttttagcatactcatttgattcattaaattctcgtattgaattggtttgtgatagaagaaatatcggctatcactccatccgtaatttagctctaagattcccattatttcgattttatttttatttgttgtttttctgctttgttgctggttcagaattaagtaagctgaagaacttggaatacttggat

SEQ ID NO: 44583 - DNA, 908 bp, Manihot esculenta
  Intron number 1 from transcript cassava4.1_023516m (locus cassava4.1_023516m.g) derived from phytozome v7.0 (chr-ID scaffold01193; pos 149672 to 150579 reverse strand)
caacccaacaagtatttcgctgaagaagcagccaggtttgtatatacatatatatgatccttttattttacaatttcatagcatccattctttttcttttcttttcttttctttttataagaaaaatattattaaaggattcatgagaacttaacaagatagtgccactaaatccacacagtaaaactaaaacaaaacctccaacctagttagacatgaaaatccaagagagaaagcctagaaaccctgaacatgatatcaaaaaatacacaaacatacctataaccagcaaaacaagctaaccagatccaggaataaaacgtaagcaatgtaacaagcaagcatacaatgtttccctgcaatgaagaccttgctatgctagcaagtcaaatgctcatagcatacattcttgtaattttatttctaccaaatccttttactactggaattttgttgcagactgcatatgatttctgcattcttactgtacacatgggagggcaatttgcagactatacctgattttgaatcattaacccttttttgaaataaaaaaatttataacaatccaatttaattcaattcaatttaattattttctattaaatttcttatttagcatgaaataatttatttctttattttagcttgtaaaatttttattttcaaacgaaaaaaaaaaatcatgcatgattttataaaaaaattatttaaattattttcttataaaataaatcatgctaaatagacgataattgttcttgaatctatcgattaataattttacttttatttttaccataatttccaaatggaatggctaaatatgcatgatcgataaaatggataatataattttcacttttggagattgagagaattaacaaagtctctatataacaggtttt

SEQ ID NO: 44584 - DNA, 544 bp, Manihot esculenta
  Intron number 2 from transcript cassava4.1_030816m (locus cassava4.1_030816m.g) derived from phytozome v7.0 (chr-ID scaffold11297; pos 925497 to 926040)
ggaatcttcttcatccttatcttagtcctttacaggtatatctagtgatttggtgctatagttttagaattctattatatgtttctttatttgaagaaaggaagtgtttcatatattgataacacttcgtgccttgtattcttataagagaatgataatccatctgtcaaatactccgagaaaatgccatggtattctttatttgtagtatgattatacaaaatatttgacttgtttagctgatcttaatgctcacatgatgtctatcagtattattgtatattctgctttaatcatgcttttttgcactatcagttcaattggtattattttccttttgagctctacatctggattcttgctattaatatttcagtcttctaaaagatgaggttttcttttccccatttttttagtctttcttattaatcaattatgtgcattttttgaatatagagttgctttaaatggtaatctagatttcttatgcacaaatggtgtgttttaaggaagaacgactcggaaacttgcggcgaaggctggg

SEQ ID NO: 44585 - DNA, 1054 bp, Manihot esculenta
  Intron number 1 from transcript cassava4.1_001701m (locus cassava4.1_001686m.g) derived from phytozome v7.0 (chr-ID scaffold12513; pos 202851 to 203904)
cctttccttcaacttcaagaaggaggcgttttctagtactattttctctttctgtattttgttttcatctgtggaattttgtttgattgatttcgattccgcatttgtttaatcgcgtttggatctttttgattggttattgtcattactatttttggatgtagcagtagtatatcagttctgatcaaagaaatggatcagtttttattttatttcagctgtgattttagcatagtaatgcagttgcaatttttgaagttacagtagtgtttttcaattgataatatttgttcgttttattcatgtctgccgtgcctgctgtctgctcagttgaatgttcggtgatttggtgatttaattgcgtaaaaactatttgtttaaaggcattgcagttggattgctgatctttagcattttatttgaatttttctcttgtaagggggagcattttgtatttctttggtactaagcttgagagttcttatagtaatgctctctcatggagcttttatactgctggaatttgcagccttatacctttggaagaatctatgaatattttgctgcagagatctgctgtcttgcctttaagttattagcatatatctggggaaactggagtttgatatattccatctacggggtttgggtgctgtgaattgtttttttcagtcccatctctgccattttctggaacaaatatatttgactttatatgagatacgtcagtatttgaatggcgtcggggatctccttgacaagatatccattggaatattctgaattttattttcagtcgtagctcattgataagttggtttgtttcaattcctagttggtgtgtatgtttatatcttcctactactacaaacaaaaattagtatatattattaactgttatatctaagtatctttagaattttctaatggtcaatcctcttcttatgcctgttatatatataaagaagctggtaggtataaaagaagatatatataaatgtaaaaataatatgtttcttgtttgtagggagggtcttctctggaaagtcatctc

SEQ ID NO: 44586 - DNA, 879 bp, Manihot esculenta
  Intron number 1 from transcript cassava4.1_017983m (locus cassava4.1_017983m.g) derived from phytozome v7.0 (chr-ID scaffold04495; pos 641107 to 641985 reverse strand)
cggcgtcaccatcatttcttgggccaggaacttaggtactccagattttttttccagtatttcgttaatctttcattttcatttcagtgttgttttgaataaatgcgaatgaaaactccactttgtctttctttttcaaattaaattctaattttgctgattgaattttactttattaagctggaggaggatatagatttttcatatttgatatttcaatattgcatttgattgaaacctccatcactttaccgagaccttgcaaagatgctccagcgaagagcttgaggttaacagcagcttcaaatcgcattctttgttctttttgaagcgagattctgagtattttactctcagtttctttctaatcgagtcaaaattttcatttcattccaaaatacacatttccccatggtttgggtagatataaaactattcgagtattcagaaaatttgatattggcaattctaatgaaattgtgatgttaatttcatttctttcatttataaacagtagagattaagttcaatattgcttagactacatctagtttaattttagtagtaatttagcagtggataacttaaattttaatgaaacattcactagttgaaatggccgagttttctgatctgcaatctgctgtgagaagctggtggtcatctcgtctagatgaaacggcaggttataatacgtaaaggatatacttgttgggcctcagaccatgtttgattaactaaaatggtcttataatttcaatataggaacttagattagatggtgggcctgagctcatattttctgttttctgagtgctcactcggtcatctcatccaaggttaggttctccagtctcggggatctcgtgtcctcaattt

SEQ ID NO: 44587 - DNA, 984 bp, Manihot esculenta
  Intron number 1 from transcript cassava4.1_002586m (locus cassava4.1_002586m.g) derived from phytozome v7.0 (chr-ID scaffold00206; pos 168922 to 169905 reverse strand)
gcttggaggcgcctaatcacgcaggtcaatttctgcttcttatgttgaatttcttggttaactgtttctattatgtttaggtggtatattattatttttcttcaaaaattatattttggggtttgcaaaaaagccctaactattaatatcctcctgggttttctgtgattcttgagtttgatacttgatagaccttgagtcaacggggctatttatgttgaggcaaagctccgtgaatatgtgccagagctttgtcttttatttcattttgaggcttgaaatgggaaatgaaattttgattggtaattagttttatttccttctttgtgtaatacaaaggaaagcagttacctttggctctaatttctgtatcatgcttttgttctatgaataattgggctagtataagcaaaggtatcgtggaaagaatttgtctttggcgtcagattgaggctttcggggaatttcacgttataaatacatgggtatattggaacatttgtggtgaaatggagagatttaaaactttcttttttattttgctaaatttctgagtttcttgtgatgagaaccataaagagagaaggaaagaaaagttggtgtttgattatctaaaattactctacaaaaggaaatgaaaatgttacacttcgatgattattgcttcctttcaagtagtgcttttgtttctgatggttgtgaattgagtatgtccataatagattttggcaccatggccaggctttcaggactggtagcttagcatctgatgcaaattaataaacttttgtgcatgcatatacacgcacataatattaattttgtggaacagagtgcttttagtgcacgggaaaaggaaaaactcccccttctagctagtttttatgtagagaacaccactgtgcttgctttgttggttttcttgaatttattgttcgtcttgcaacaggttgcaaggcatcaatcagaatcaggactatacaa

SEQ ID NO: 44588 - DNA, 1015 bp, Manihot esculenta
  Intron number 1 from transcript cassava4.1_027355m (locus cassava4.1_027355m.g) derived from phytozome v7.0 (chr-ID scaffold05280; pos 416577 to 417591 reverse strand)
gaactggcctcactgctattatcacaggtctgcttttgctctcttattttatcatccttgccttaatttctttttctaatgtctgtttttctttgattgaggaaaaacttgcagtgaaccatataagaattgaagctttcaatcttatatttttcaaatgaaaaaattaactaatccatttttagctttccaaaattgggatattgttttcgaggttagcgaggatacagcttctttacttcatttctttttgcttatgttcttttgttaaataaaatatgcaaaagcttgcttacccaagtgatcattcctgggtctaaattattttgctttcgtgtttttgtatagtactggatgcttaattcaaaattgtggatggagttgatgaagtattgaagttgatctatcagcatatatgtgtgaacttattttttatttgttcctgtttcacatggattaccaaaacgcgcagaaagagtaaatattttgcttggatttttcaactatctgcctctctgaatcgttttctagattatattagttttgttgatgattgttgcagaatatactcagcagaccacctgagacttgtggtttttagcaagcaaacaaatttctcatgctgaaagcctttcctccaagttttactcgtcgtggtgctttatatgacaatgtataattgtatatttgtgcaagtttgtgaaactgtgaaaaagaaatgacgggaatagaatgcttgtcattgctaggagattcaattatgtacgagtactggaatgcaatacacgttaagaagaagcaaaaacaaactctctcgtctgtacaactaacttaggaacctacgtgtgtcatgtgaagttgctgctctccaaaccaaatgcgcagagtttcacaaaccattacgtgcaccatgtaataacttaacaatattatgtcatcctttttgtggtgtttaattggtttgtctgttaacttcttttttggcctaatttcaggagcatcaagcggcatcggt

SEQ ID NO: 44589 - DNA, 803 bp, Manihot esculenta
  Intron number 1 from transcript cassava4.1_001799m (locus cassava4.1_000673m.g) derived from phytozome v7.0 (chr-ID scaffold06407; pos 420280 to 421082 reverse strand)
ttctctctctatcatctatctttgatttcacctctgtaagtctctctctctctctctctctatctcaacttatatgttgcgagatctgatggagattttagcaaattactgttctttctaaccagattgaatgggttctggggagatcgaggagtgtatgtggctgagctttagatgcatctcgttttcccccctttttaggggtgcattgctttagttttttttctttttttttttttcagctgggtaagtattggtgtgtttgctggattagtcatgaatcgaacgatcttacacttttcgttgctgatttagagttgaaagtttcgatctttttggattttttggtggttgtttggtggttatgtttgctacctgagaaagtttggagaaatagaagaaatgggttttgattcttgcatttgtaacgtagtcatcggttgtgtgtgtgtgtgtattttgtgaagtgattagatttgggatttatctgccttgtttttggcaaactgcactcggtgtctgtagttgctgagaaactggaggatgagtagacttaattgactaagttcattttttctaaatttatttccttttattagattttaaatgaacaagaaaaccacttactttcgctatatcacttatttttcctcttatattgcttcagctaataaacgataaatgtttagttcctcttctctctcacttgatattatgatatagaaaatgcttgttgaaaaagatactgaatatcactttgttttgcaggttgctttcaaaattaaagaatacggaaaggggaa

SEQ ID NO: 44590 - DNA, 725 bp, Manihot esculenta
  Intron number 5 from transcript cassava4.1_013630m (locus cassava4.1_011425m.g) derived from phytozome v7.0 (chr-ID scaffold06932; pos 13761 to 14485)
tgctcgaggccttgcagaagacagctgcagaaaaggtactgtgcttttaatgcctatgtttaatttcttaaaacatatttgataccatctatatagttgggaacatgtcaatgtttaactataaaaatcactgggtttgtattttctgtctttgatacattaatttgtaatgctgtcatgaatctaattctctggtatttaggattcttaatgtttgaccgtcataagcatttggggtaggattaggtttacatacacgcacaaaacacaaacccatatataaagcaagtgagttatcatagcaacacagaacttattttttacttaggaaaataaaaggttgtttcttgcttactgctttagacttctgtagattctaatatgtaaaattcaggtttgaggccatacttaatgttgacccctgccaatttattaaatttgaatattttgtggaagatcctataacatcttagtatgccttgttgtatcactatcgatgtaggaaatttgtggagggtttacgcctttacggtctgatttctttaatggatagcattgtcctttctcatctcttagttattgcaagatgtatgccactaactaattggcgaaatgcttagtttttgccggtaattttttactttttaatttatgagctgtatccccttgttctgacactgacaatgtatttttgttctggcaggagaagaagttggaagaagaag

SEQ ID NO: 44591 - DNA, 650 bp, Manihot esculenta
  Intron number 2 from transcript cassava4.1_007454m (locus cassava4.1_007246m.g) derived from phytozome v7.0 (chr-ID scaffold06825; pos 633913 to 634562 reverse strand)
ctggtacccttttgtttttttaatggaatttttcactcaccaaccaaaaacagttgtttgatacaagtaatttagttttatgatttcctagtgacttctttgagttgcttatggacatgtctacaataattttcctcttgtcatatttgtgttctagcacctgatttgattcgcttacatgcattttacaatttacatggcgtaggaagtttagtctttcccattgtagtgcattgggcaggtcagtttctttgcttattgctgggcctttttttttgaaattggatgatgctaaaaaattttataaatttatcatggactgttatttacttttagcaaaaggtatatgcaccatgtgtacaagtaacaaacgcttacctattgtcatcgtatcttgattcagttttcaacttgagccatagtattacttgtctgttgtatttctgcttcagaggtccttgtgcttgaacctataatttagtgacagggccctctggtttcatttctgatactggctgataatgggataatctctatccaagtaattgtgtgtattcaatttggtattaactgtgcgtattctcgaagctaatattttattacattattattctctttatatttctctccagcaaatccatactcttgtc

SEQ ID NO: 44592 - DNA, 713 bp, Manihot esculenta
  Intron number 1 from transcript cassava4.1_007172m (locus cassava4.1_007172m.g) derived from phytozome v7.0 (chr-ID scaffold12794; pos 1879909 to 1880621)
agaaagcagagaaggtaccactttctacaatgagagatttttgtattggggggtgttttataaggggatctgaagacgcaacattttttagaatcctcaaagaatttatgggttagctttgcctttttagcttctttgatttgattttcttatacttagcctggtaaacttcaagtggcagttcttattccatttgtgtcaaacttgtcccatttttgagtttgattagatttttacttcttatagttgttttttcactttaaagcttttaattcacttttccaactttggttttagtgtttggaagatgagaaaagttaggaaaacaaaaaagaaaattctgatcttattcgatatcggcaacttactctgttcagttagtatctgatttctagactttatgaccataattcttgtacatttgtctgttcgttgcgtaattgactatctatggtttataaaacctgaacatagccctgatcttgtcaataagaccccttaacgtgtttgacaagaaacagagaaagattgataaagcaaattctggaatttaattagaattcagaaacgataaagtttatgcatggaatcttcactttgttttattcattcctttgacttgttcttgctggttcaacgctgaatactgattaagtaagaaacaatgttaaatttcaggatattccagcgaggatagtccctgatacagcaga

SEQ ID NO: 44593 - DNA, 954 bp, Manihot esculenta
  Intron number 3 from transcript cassava4.1_029286m (locus cassava4.1_029286m.g) derived from phytozome v7.0 (chr-ID scaffold09880; pos 130312 to 131265)
tcaaaagagcatcacaaatgtaaagttttctcccttcttcttattccattttttctttatttaaagttaatatctgtacttgttcatggttgactatctggggaccagggttgtgtttcttttcgcaagcaatctctaacctgagtgacttttggttagaattgctggtttgaaatgccaactaaaagcaatttgggattcacattccctttggttcaaattcgtctttcagcagacacatatttgatgcactatgagcccatttactttgtcaagttgttcaaaaccgtgtcagttcacatactaaactgctatgttttagacttttttttgtagaagttacaaattcttggatcagctcaagctagaaaaatcaaattcattctcttttcattgtatcttgtcaatgctccttgtgttaaattcacactgcttttgatacctgaggctttctgctacttaccgggtttcaactcttgtaagcacaagttggttgatttatggaatggctggtaggtcatctctacaagtggctaggtttggtggagggtggggtccaagtagttgaactagtcaaggcttatatgaaggttcagagagtatggagcatgagtttcattaattaaatgtgtatagacatattgcaacttgtttcctttatttttaattagataaagtgagatatttttgtcattttgtgttgtagaaagtagaaacaacagatatttaataaattttttagtttttgttttgaggttcaagagttctgtgggcagctgctgcttattattctattcctacttccatgatttgctgttgctgcttgtgttagcctccttgttttatcttgttcccactaagcagattcaattctagaatgtttattccttctttaccacaaatgacatgccttttaaagtgacgtttgcttttgaaaattcatcaacttcacag

SEQ ID NO: 44594 - DNA, 777 bp, Manihot esculenta
  Intron number 1 from transcript cassava4.1_001071m (locus cassava4.1_001071m.g) derived from phytozome v7.0 (chr-ID scaffold04251; pos 362693 to 363469 reverse strand)
gatcccactcctgccgcgaggtaccacatcactctttccctctctccttcctaaccttaatatgcattccctcgcacgctcacttactcactcactcactcttcatctctcattcggggttttagctgttacagctttgctcctctcaaaattagggtttctgattttgttctcttttagttgtttctgcctctgcttcgtttggggtccttgatgtttggtttctggaaagccgaggaaaagaaatgggtctctaattttcaagctttcccgttttgctatattcaattgagttgagctcaaaaattgtcattgtagtttattattattattttacttctctttggagaccgacttggtagtgactagtgaggttatagagatattaacaatttagttatttatggaccctttgcttggcatgattcaaaaaggaaaataattcaaatgaagtcttccaaaattattcaagatttcaattttctttaaattgaaaactttttaagttaaaaagaattgaatttttcattccaaatgagaaaattattactgggaagttttttattcgaaaccgagtgtcagatttgcagtggaagacgtgtgcggtatacgcttggttcctcttacattgaggaagagaaaggaaaatttctttccccatgaaataatgcaattatatgtgtctatcatgcattattattctcatgaagtacaattttttatgcatgttgcattcctccagttctgctggggcatcctcacctgctgttccaggaa

SEQ ID NO: 44595 - DNA, 658 bp, Manihot esculenta
  Intron number 1 from transcript cassava4.1_009393m (locus cassava4.1_009393m.g) derived from phytozome v7.0 (chr-ID scaffold06582; pos 933640 to 934297)
agcgacacagccaaaaagcctgaagttcaaagcaggtattcctttctaattttcaagaggcctttcaatgtgttttgggtttgtgctgcttgtaagggaatctttaatatttggtattgaaatttgtttttagtaaattctttcaaagctataaatatattgcgggacttgttatcatcagaacttccactgtgtattctacccatttaactgaagaacaatatgaaggtctttgcttgtaataaggaaaatgatcacagcgcttttctggattgcttatggtgttcctcttgtggaaatgaagaaggaatgacgtataattggattgcactccggtaaattatagaatgggagtttcaagaagcaatactaattgggttcaacattatgtatgtttctttactgttaattccgtgcaatttatagcaaattccaaccttaatcgggtttgaaaaattctccaatatagttaagaaggcttgcatgtaaccaggatttctttcctcttcagccaggcatgcatagcttcaactttatgagaaagtagtttttgttatacatcatttgtgtatatgtgatagacttaatgatggtgtcagtttgattgtactaatttacttattacatgttctgacactattattctatgtcgcagtat

SEQ ID NO: 44596 - DNA, 601 bp, Manihot esculenta
  Intron number 1 from transcript cassava4.1_032180m (locus cassava4.1_032180m.g) derived from phytozome v7.0 (chr-ID scaffold08686; pos 469822 to 470422 reverse strand)
gtgtaagtcttttgcctataatctcatttctgtgaatttttaacagcgaacaaaaatctgtgtacttgacaagaatttcatttcacatttggagtttaattattagcatgactattagtttctaggtcaattagttctacagttgctacttgttatggataacgaattgactaaatccataacgaaccgattatatttatctgctagtttcttattctcatctattattttatttttattatcttatttatcttattcgttccatgactggggaccataatacaactcttgtaagaatactggttctagcacttctctaattaatgaaccttctagcatatgcaattatggttttgctttctgcttccagttcctttccttgaatacctctttccccagccgataaaatctaaatgaaaaattatatatttgatcaggacttcatcagtttgattctaacttcacaaacagtactcaaccagaaatgaattcagttggtgtctcgtgaagtatttcaaatacaaaataagcacatacacgaataacaatatggatcttcattagtttgagatgcaaattgctttgaaacaacaggtatttg

SEQ ID NO: 44597 - DNA, 745 bp, Manihot esculenta
  Intron number 1 from transcript cassava4.1_011100m (locus cassava4.1_011100m.g) derived from phytozome v7.0 (chr-ID scaffold05019; pos 113442 to 114186 reverse strand)
tacaagaaggctgaggccagtttttggacaggtactataattctctcggttctgtctgttttgttatcattattatttccgtgccctttttttggattttgggtattttcaattgcgcgcgctctaatattcttatgcgcgcagcttcgttagtttgacggaaagaggggattttgtttggaaaaatggcttctttgaggccattagaatcccccctccttcctgtatatctaaaatttggaaaattttcgtctcgaactctcaatttcagaattttgcctcttcttatatctcttgtagatactcggtgcattattcttttgtttacgaggctctgtttctactcgagactttctagaggaatattcggatgatatccaagccttgttagatgatgtaaagcaactaccttaagcaatcttctttacttcccttttaattcaactctctgtcctttttttttttttcccattgtgaggtattggtggcgaatgacctatcattctctctctaattgattttaaagttcataatatgcatacttgataagtggacttctatttctaatttcacagctggaaaattggaactttagtttgggcaattttttgatatgttattaattgtaactcaacaatttgtttccatactgtgtttgttggcttgcagatgtctgcattttcttttgatttgtttaaataacttgtgagttcacttgcagctgaggaggttgatctttcccagg

SEQ ID NO: 44598 - DNA, 230 bp, Manihot esculenta
  Intron number 1 from transcript cassava4.1_013727m (locus cassava4.1_013212m.g) derived from phytozome v7.0 (chr-ID scaffold00999; pos 363039 to 363268 reverse strand)
aggtaatttaattttttttttggggattaggatatagaattgaaatcaaatctggcttccaatacatcgaattggatatatcctttttctgtttcttatggttctatgtttagtttaaaatgctttaagcttactatgatatcaattatttgtcttctatgtttcaaaatttaacttttcaattgtattttgtaggttagcgatttggggaatctgattcgcttatatag

SEQ ID NO: 44599 - DNA, 761 bp, Manihot esculenta
  Intron number 1 from transcript cassava4.1_029604m (locus cassava4.1_029604m.g) derived from phytozome v7.0 (chr-ID scaffold05144; pos 5739 to 6499)
ctcttgaggtaaacaaattttgatctgcaaagcttctgttttgatttctgaatggttgcctagtattcgtagatttaagggacctctgcttaaattgatggggattctttgtgcgtgtttttgagagataagaacgcaagtaaatgctgcactgattttagttttagttgaggtttatggttccttgatctactctcaagggatttatttagttttgaaaagcaaggaatcagttgcagagagtatatggatgactgtaattgaggttattgaactcactgataccaaattcaaggtttttgtttatgtgaagaaagactgggtgaaaataggggtagagatggtgagaaaatgaatctcccttacattaagcatgtatgttataggtttttttattggcttatatatattttccctttaaatgtgaattttcatttggtgaagtaatttattaaagatatttatgtgtgaatttcaagctactgtatgatgtccttatgggagttatttcaaaacccacctctgttaccagtgaaggagctctgcagcttctcttttttttttctttttttttttttttgtttgttgtgtggatggattctagcaacttagatttgtttatctgttcattttaagacagacttgtcagagttttcccaacataccctataaagtctgaagctagaactggtaattgtgagttcaggattatttttttcctattattttgatattagattctggacggtgcaggtttctga

SEQ ID NO: 44600 - DNA, 626 bp, Manihot esculenta
  Intron number 1 from transcript cassava4.1_015476m (locus cassava4.1_014056m.g) derived from phytozome v7.0 (chr-ID scaffold03834; pos 375106 to 375731 reverse strand)
attccaggtataatattagttttatatagtttcttacttatctacaagactcttgctttctattccttatgattgattaattttctgaatctttaccatctttagttttaaatcagcactcaagctgttaaatttgaatattctattgcctttaatacctttgcaatataatgggaaagaaacatccttgtttcttaattatttttgttagaatgtcttttgctgctgctggtgttttctggtgcaagaagcttctttgttagtattctagctattttattttgttatagtggattttgtgcctttttcctgcaaagtcaattggaagaaccaatcaaatggaaatttgatgatgacatggagatattattagaagaatgtatttatgtgttaaatgttttagagctaataaataatagtgcatgaagtccataacaatttgcggatttgactatggagctaaacatgtcgggaaatggtggatttgttgaagaaagatgtgtgcactcatcatttatgataggggaaattgctcgtggctgaatttatttgtgaatctagattaagcagctgtctattctaatggttgctatcaataattaatggattttttatcttctgcagtc

SEQ ID NO: 44601 - DNA, 965 bp, Manihot esculenta
  Intron number 1 from transcript cassava4.1_026218m (locus cassava4.1_026218m.g) derived from phytozome v7.0 (chr-ID scaffold04716; pos 35542 to 36506)
gaaggtaaaataaaaaataaaaaaaaaggaattatttaaaaaaaaggtgcaagtcagaaaagcacaaaaatagtgcaaacacaaagtgtgtttaccaataactttttctataaatacatatccataaaattgaataaaaagtccggagacagcggctattaatactgcactgtcccacaaccccctctccactcttcaagcaccattgcagtacataccctgccacggtggctttagaatccggcccgatcacattcaggttcaacaatattgatttatattatgttaatcgaaatgaagggaagtttattgttattatttttaatttttttaaatcaataatttatttttataattttaaattcaattaaaaaatcattactattttaaaatgtaactaattagtattcgttagttaaaggattaaattatttataatagtaaaacgcgaacaatcttatagtaattcatttaagattaaatattaaatttaacagacatttatgtccaacgtctaacagaatgaatatgttaatgtatataataaaacactaaacaatcgaattgaaattgaacacctgtctgaaaggaggtggggagagggaagaaaagaaaataaataaataaataaaacagaagccaaaaagcaaagaaagaaagaaactcaaatcaacaagtgtagttgggtggtgtgagagactgtgttagaaagtagtaaaaggtgcagagtccaaagattcagtgagtgaaataagaaatacataagaaggttccaggaatcaagggtcaagatatcatgtgcctagacccataagatcaggagcaccccaagttcaaaagctttttcttcttttttccttttcattctacaccattggaatcattctcttgctttctagcttaaacccttctctgaaaattttgtctcagattcacagaattatccaaacccagattctgcttct

SEQ ID NO: 44602 - DNA, 553 bp, Manihot esculenta
  Intron number 1 from transcript cassava4.1_014331m (locus cassava4.1_014331m.g) derived from phytozome v7.0 (chr-ID scaffold11297; pos 556655 to 557207)
tctcttcttccagatctgcatttcccattctccaggtactccgttttcattctttaacatttattttctttttgtttttgctagagaaactctgttgctctgtattatctgtttgtttcttgactatctgttctgctagagggcgttttgttattttgatccaatagcaactttttatttagttcctttctttcaagaatgattatgggtttagtttttggaaattttgtaaacttagatatgaatcttcctgttgattgtttcattttagtggttgataaaaactcgtattattgacagaaggaagccataaaccgtcagatttgtcatttcttagttagatttccttgcgaatactcagtttccgcaactgggtattgatgagctcatttatgcttgtgtttccctccttccaaatatcactataaatttccagaaatgggtacaatgcagcttattttctatgtacatttaattgctaatcctatgaatttttgttctttttcttaaatgaacagttaaaacgtcaaatctgatcctaattcctcattat

SEQ ID NO: 44603 - DNA, 835 bp, Manihot esculenta
  Intron number 1 from transcript cassava4.1_018305m (locus cassava4.1_018305m.g) derived from phytozome v7.0 (chr-ID scaffold06748; pos 446943 to 447777)
ctatcaacaaaatttgtgccttcactggtaagctttgcaaaatatgaatttgcaacaactatttctgaatcagagcatttgctccttatatttggcatttcataccttagtttctttctgaaaaatgtaactttcaggagcaagagttgtattctgggacctgagaaacacattcctgtttcatttatatcgtggagatgttgcaagttctcgtttggaaagctttcttcctcatgttgatactgtaagttattgaagtaacaagcacacttcgctttttcctcaaaggtttctttctcaagttggtactgggagatattaagtacacctgccttgtatgtgcatgcacttgtgtccattgactcatgagattattgtgacatgtttgtgtgtttctgcacaagggaagtcttcttttcgctgaaatcttttaattgaaggccattaaactattcccttccagagaaaacttctcatgttgatagtttaagatattaaatgaaatcacaggtttatttctacatgcttgtgccaaatgaaatgcatgtggcatgcttgtagcaaagttggtaatcttctttatttcgtttctcaacctaagaagcatgaatgcaggtccttgatctcatttgtggattaattgatgatagtctcagagaccttctggtgttaagcatctttcgagcattgttggtacaccctcaaattcgttgtgtaatgtctagtcaattaagataactttcttagtagtttgaatcttgttacttcaatgtttaggaaggctatgtttgggtattgttggatggaggtccttctcgtgccttttctgattcag

SEQ ID NO: 44604 - DNA, 568 bp, Manihot esculenta
  Intron number 1 from transcript cassava4.1_003401m (locus cassava4.1_003401m.g) derived from phytozome v7.0 (chr-ID scaffold10963; pos 246871 to 247438 reverse strand)
cttccagaccttcgcttatacaagctgtttcgacggtgagatttctctctctttccccctcctccctgcataaagtttttgtttttcttaatttgctgtacttttcatggattagttataggccgataacgatctgtcgtttgtctgcttcatttcttacgacttctgttgatttaatgtcatgatgtttgagtctgactgatgttgacatcatcaaattgagttttactttgtttttgttgctgatgaaatgtttgtctggactcttcatgtgctgaatacatattttgtcacaaacacaaaaatatagtttctctgactgataaatgattctgtggataaatttacagttcagaacttcaatcttttgcgagtaattcttggtcgaaagatatccttcacccttttcttgtcccttttttcccgattcataatgtgtgtatattaaatttgctagctcgatgtgatttaatgaatatactttatgcgttaagttcaccggatttcattccttgggtaatttttgttggcagccagtgaagcctgagactcagactaagcgcagtaa

SEQ ID NO: 44605 - DNA, 272 bp, Manihot esculenta
  Intron number 2 from transcript cassava4.1_024294m (locus cassava4.1_024294m.g) derived from phytozome v7.0 (chr-ID scaffold06278; pos 399407 to 399678 reverse strand)
cccttgctcttctacaggtcaaatatttccttctctaattgtttttttaaatagcttttcaatcatcatattatcatttctatcttcttttgattatatagaaaagaaaaggaggggaggtcttttgttttggttctcacttaaatctcgtgacaagatcatcgtgagcaaaagaaaggtctttcatttcttcatcactagaataagaaattttcaacctcaaatttcattttatagcaatctacttgttcactttctcttgctttggaaat

SEQ ID NO: 44606 - DNA, 669 bp, Manihot esculenta
  Intron number 1 from transcript cassava4.1_024294m (locus cassava4.1_024294m.g) derived from phytozome v7.0 (chr-ID scaffold06278; pos 399717 to 400385 reverse strand)
ggaattcttttggtactattgctgcattgttacaggtatgctacttgaagttgttatttgatcttgtttcttttgcctctttcttattcacatttgaaactgaattgttacaggtacgctacttgaagttgttatttgatcttgtttctttgttttgcctctttcttattcacatttgaaataaagtcagccatcttgttattcaatttatttgagcctgacttcctcgaattcttctaacttctctcctcaagctgattaatatgcattgcttactatctcctgtgacttttttgtgaagtaaataattacagatttgttgtcatgaagtccaaaatcatagatttattgttatgaatcctttgctacttgacagaatggaagaaatatggtgcttggattgtgttttttttttgtggattttttaaatcaattttccacatgccagttgcaaagttttgggttattttacttggagactagtaggcaaagtttactggcagtttttatgtagtgagctgtttagatatcacctgtttttgttaggaagtaaatattgtttaagctttttatccattagttttatttgtacctgctatttttgtaatgtttgaattatatttcctacttgcaggagatagtttcaatatatcctgttttatcaccacc

SEQ ID NO: 44607 - DNA, 875 bp, Manihot esculenta
  Intron number 1 from transcript cassava4.1_007835m (locus cassava4.1_007835m.g) derived from phytozome v7.0 (chr-ID scaffold12272; pos 14844 to 15718 reverse strand)
tctgcaacggtatcaggtaaagtctaaagtctccttacaaatgcatgttcttgcttctctgctgcaattctgttacccatttcttcatttgttgcccttctgctgcgaaaacgcaatagctttagtcgaaattcaacccaaccatccgattgcttttattctcaatcttcatatttgtttatgcgtttttggctttttgggttgtacaggaggtttttttagtgttcgaatgtttttcttgtttttgacggaattattcttccgctgaattctttatttatcctctgctttcaatttggccatttcagtgtttttcccatcctcttgtattgtcaataagaatgtgctgttgggttagatattgaagaattgaagttcagcgtttgagaccagaaaagtgtttgaaatgacataaaaattatgaaattaatttcttttcacatttttctttggtatcgttcatgtgtgaatattgggagaattctctctctctttctctttcttgttattttatttatttgtaaattatcttattacgtcccagtaatttcttcttcatgattctgtctgtctcctgctagtatagaccagatgcattgcttgctgaattttctgttagagatgtaccatctctctctttaatttgtttatgtaatttctttccaaagattcctgagtatcatggaataaattgttgtgtattttcgcccctttgaaatttcaaaatatttcttgatgttcgggacgcaagttttttttttttttttacaatgattgcaactgtggacgactatgtgatttgagcacttggtatgtctaatggagagtcagtggtgttgatgttctgattttcatcctttattatgtaggtgtgc

SEQ ID NO: 44608 - DNA, 851 bp, Manihot esculenta
  Intron number 1 from transcript cassava4.1_031393m (locus cassava4.1_031393m.g) derived from phytozome v7.0 (chr-ID scaffold03834; pos 153833 to 154683)
cctctgactttctgaggaggcctacaagtaggaaggtacctacctccttataaatataaaaattaatcatatgtactattttttaaaaaacattttgtgttttatatgtttgcatgttaaagctattctagatgggaattatcatatatctcaatctacttattcttagcactttaaattctatacaaaaagaaagcccacaaagctggtgacagtagaactttcttaggataattttatattggaagaccttcggtcaaaactcaaaagagaattacgagattatgcttttgagctgtttaagggactagatggattgttgggtaatttcacctccataaatttaattagttttaacttttagtgttaacttcattatgagctttaattccatctaccatgtaatcatcattgcccaaattccaaaactccagtgaacaatctcacctgaaaactgctgtggaagcgatgcttagtggaatccctaatttcagatgaagttgttcaccacaatcagctttcaggtgactttgaaaatgaaaccaaagttcagtaatgaaagtgggacccaaaaaaaggtttggtgattgattcaggttaaattgcctctaatatcactagccaatgatgtttttcttattcttttacatcagagagctaggtatcaaggattgaacttttgacctccttcattacaatgcagcacactttatatcagagattaatggtgtattttacccattgctttagctcttcttgggtgttaatcatgttctcagttcttacagtgatattatacattcttgcttgttccagatcagccagttttccaagaacattgtttgttttgt

SEQ ID NO: 44609 - DNA, 412 bp, Manihot esculenta
  Intron number 3 from transcript cassava4.1_029153m (locus cassava4.1_029153m.g) derived from phytozome v7.0 (chr-ID scaffold08686; pos 130419 to 130830)
gagtttgcattggtcaaggtggggctggattactttgaatttgtttgtctttcctataaaactacaaaataaaaaagcagttataggaaaatttcaacttgttctaattgataattgctatttgtttgccacttttaccgtctcttctttcaaagaatatcctgacacaaagccctcttattgctgtttcaaaataaaaaatgtgctgaatcaatgaaatactgtttggtgctttattatatttttttacttgtcttttaatacgttacatgcttcatgtcctgattattatatatggaatatggatgccagctaaaaataaaaataactccaaggatcagtataactgcaatttttgccctaaaaattgttactgttctttttttccctacaggatttggtttttttgtgg

SEQ ID NO: 44610 - DNA, 933 bp, Manihot esculenta
  Intron number 1 from transcript cassava4.1_012196m (locus cassava4.1_012196m.g) derived from phytozome v7.0 (chr-ID scaffold05310; pos 61852 to 62784 reverse strand)
tttcatccttgcaaaatatgtaagtcttttattttttagcttggatttgttgattttattggaattttagataactatatagatcagcacttctaattctgttttttgatcagtgaatttcaattggttatagaaagtgttacgggataaaggactctgtttccgctgaattttgaaaagctcttttcttttttttttaacccatgaaaaatgctgttatgcgctcttttgctttcttaaaatatattcaaattgttgttccattttgcaagttatagagtgccccgagtaggaatttggtgatcaaacgacggaattggttaataatacagtcggtccttgaccttccgagtctggcttacaattttatatatatttggcctccttttctaccaactaattttacaaatttgcctttttggttcaaggtactagtctattttaatgcagcaccatttgcctctttttttttttttaatgattattttttaaattaatttttagcttgtcaattgctacttgcctatgaacatggaaacttgcaaattttcagttctgaagccaagaatctaaaagcaaggtaagagagttgaattcaaactactggttttacaatggttgcaagctgcaatataacgtccatagttatttttttgcaatccctaatcacaatttcataccgcgatttatatacatcaagtttttacacgaattgacaagttgaagttgaagctggctggtcattgagtatgagaaaaaatgatcaaaaaaggaaaaaaataaccaagtttgctactttttttttctgacctaaaagtgcagaataacaaacagtttcttaattactaatgtagtcattgctctttcaatgccaataaaatgttgatttgttaaacttctaccattatatctttcttggcttttgtttcagtt

SEQ ID NO: 44611 - DNA, 747 bp, Manihot esculenta
  Intron number 2 from transcript cassava4.1_012766m (locus cassava4.1_012766m.g) derived from phytozome v7.0 (chr-ID scaffold08582; pos 90929 to 91675)
taggtggttcttggagtaaaaccgttggatccgctgtgagatttcgagctctgtttcttaatcaagctcttaatagatctactgattcgtatttcaaaagataaacattttcttaatagaacgtagctcaaagttaatattatgtgattaaaatatcaaaggaattagtttgagtgtataagttttcccagttccaaggtagcaaattcatggttttgccttatgcctgacattgcctaagagcacatatcgtttgtaaaatgtaaacaataaaatagagaatacttgttcccatatcttatttgaagttttatttgggctgagagcactggcaattcttggtacttaggtttgtatgaaaaacaaagataatctggccatatactagttgatttatggatttcaaagtgagcattcaggcttcgtttggatgaggtgagggaagagtaattaatggaagggtaaggaaaggtaaagggggtagagaggtatacaatagaatatcccttttctaattctgataaaagtgataaaaaaaaaattttcatagtgtggactttccaccattgaaatttgaaaagcaaagtgaatatgagtcctttttttccaactgttattatatttccaaaataattttctccaagttaagagttttaacttcaaatgcattatatcaaatctgaataaatatttcttgatcacaattttccagggagagattcctctccagggtgacttctctgcaga

SEQ ID NO: 44612 - DNA, 679 bp, Manihot esculenta
  Intron number 1 from transcript cassava4.1_011149m (locus cassava4.1_011149m.g) derived from phytozome v7.0 (chr-ID scaffold11297; pos 571887 to 572565)
aggtttgtgctttttttcttataaatttttaatttaattattttctttgtatgtccccttgtttatttcgatggttgtttatgaactattattcatttttgatccaatgctttcgcaatcttctcgtgcgttgatgatggactttgtttttgtttcgcgggtttttgtatattctgtttgttttcgttggatttatcacaactgattagtttcgtgtcagcatgcgaattttattattctaagtgtgaattgaggattagcatagatatggagatggctcgcttattgttattggtagtttccttaatgggattttgccaaggtgagagctttatgttcattttcctcctagttagtctcagacgatgaccaaaacgtgtggggattaattacttgatatttgttgattctttcatagctggagtttttttattttgttttgtgcatttttgttcaatgaaaggtacatcctcttgaatttcttggttattcaaaaactttgaggaaatgaagttaccttattaagtgtatatgcagaggagtgaggcaaaggaatgtaaaaatagtgatggcaattttttttatattacatatgctggttcatctgatatgtgctattaatctgatatgtcctataatagcagtaaaatttttgtatgttattgtagatcatatttgg

SEQ ID NO: 44613 - DNA, 583 bp, Manihot esculenta
  Intron number 3 from transcript cassava4.1_011149m (locus cassava4.1_011149m.g) derived from phytozome v7.0 (chr-ID scaffold11297; pos 572971 to 573553)
ttaggtatgtcggttctttatattaaaaggttgagcattgaagagcaagttgttgaaattatgccttttctttgtgatcttgctactggacattttatgatattgttgctcagtccgataataggctatctgcaagagattccttcatttcagggaggaagagggcctgcctgtggacaaggagattatgatgatattactattagtaatagatgatgggaagactttacattctagtacaccaatcctgttttcccagggatcagcaccgtatttaaattgttcatgttggtgtctgttcccaacaaccctcctcccctccttagtagcctgatattggttatctgtgtcaggatgatgtttgtattatgatttggtattcattccactatccctcgttttaaaattcttctagcaggatgtgtactggtaatgtattcatataagtacgattgtagatggataattacactatcatttgactttcaatttttggaatcctttattatataaatatggggacgccagttttttttgctcctcttgtgtttcttatgtgagcttgagtttgattatacaggga

SEQ ID NO: 44614 - DNA, 662 bp, Manihot esculenta
  Intron number 1 from transcript cassava4.1_017410m (locus cassava4.1_017410m.g) derived from phytozome v7.0 (chr-ID scaffold06825; pos 596075 to 596736 reverse strand)
ttcgcattacttgcagcaaccgcgttctttcccaggtactcccttcttccaaatgtaaacgctttttcatttttattggcgatggaactctttttatagtgatgatggttaaattgtggccaatgtttcttcaaaaaattcatcttttggttgtaatctaaacacatgtgaagtttcctttctctctcttttcttcttcatgtattttgcttgatggattaatgttggtgggaaaactttaaaccagtgagttgctggtgtttggtgttttgatgcagagagtgagaacatctagtcctggaaagttggcaatttttgttagaaactggcttggttgcccttttcaagttcttgtttaaaaccagacacgttgatttgtcagtgatcaattggattgtaagggaagatttagaatcccataattcctattaggccagggaagcatttgggatttcaagccttatgaaaatggcagttatttgattaatttcttttccatgttgatgacaatgatgtgcaagtttatgttttgtgaaagtaacatgactagaagttagccaatcccaaattagggaactagttcttacatgctaactacaacacctgcaatgctatcttgttttgtaggctcattatcttggcctgtccatcgtagtgcaaag

SEQ ID NO: 44615 - DNA, 718 bp, Manihot esculenta
  Intron number 1 from transcript cassava4.1_019704m (locus cassava4.1_019704m.g) derived from phytozome v7.0 (chr-ID scaffold00077; pos 34141 to 34858)
atcccttggctggtacactctgttttgcccattatccttcctttctgtttccaataaaatgaaaatggaaaattatgagattttaaggttcatgggttcaccttattattgatggggatgttgatcatgaagctgtgttttgtttcttccacagatgatagtattctctcgccgttcttcattttcagttttattagataaggagtgaagtgattggttgcttgctatgaaacaagcttttgaatcttaattttgattttgtttctttgaattctttatgatgctagagaaatttcccctccttttaagatttatgtgatactttgaatttgttaagaattaagtatttcatttttatagaatcaagtaatcgaaatcgataacaaaattatgctcaattcccatctcaaaaattacaagcgaagaaacggaaaagctggaaatgttctaattggttgtgcaagatttttcttttatttataacatttgttggctacccttccaggtgttacttttcaaatgaatgtttttaattaaaaagaattgaaatcttgataaaaaaaattaataggaaagaaattcattgaattgtattcttgcagaattctcgatcccaaataagaggtgggtgcttaaacctagagaattgatctttgattttttttttcttcatcttttaacaggtaaagaggacaataagaaagtgcgcctcaaattt

SEQ ID NO: 44616 - DNA, 415 bp, Manihot esculenta
  Intron number 2 from transcript cassava4.1_010756m (locus cassava4.1_010756m.g) derived from phytozome v7.0 (chr-ID scaffold11297; pos 526696 to 527110 reverse strand)
ctttgtaacagtatgttatcttggttaatactgtttcaatcactttgatgatttttcccgtctttgctgctttagaaatatttatcatttctcctatatgtgtaatttctatcacattttgtacggtcggaactccctcccttcataggtatccctaatataggattttttttttcttctgactcttaaagaggcaatttatgtggaaaactatcttgcaattttgtttttcatttgttttcttacccttagatgggaaataatgattttgctatatttgctcatctttctgggatcaaaataaaatatattgcttttgttgagaagttatttggtgatcagtttttcctactcttatatgacttggattttcaccccaggtgtaaggaaggaacgagctgcacttggagccatc

SEQ ID NO: 44617 - DNA, 819 bp, Manihot esculenta
  Intron number 1 from transcript cassava4.1_012581m (locus cassava4.1_012581m.g) derived from phytozome v7.0 (chr-ID scaffold02431; pos 382527 to 383345)
aacgatcttctatcggtaaattttataagtttttgttgtttttgtttgtttgctgttgtttgttctatttgtgtttgtcttgatctacagtgttttctgtaagattgcgatagcattcttagttggatccactactcacggagtaaattaaggattggattgtaggttctgttagttagaaagttcagaatcctcttttgtttgctgatactgcagaaattttgaagggaaattcaaaaattttcgtggaaattaattgtttggaactatggaatgaaacacagaagtgaaccgttcaagcattttgatattgaagatgaatcttttgaccgcattaattaatctggtcttttttactttatgaagatctcgattctatactgcaagtgctaggcagttatactgttctcaatatttttaattgaattagtgtgtacactcatacaagtgacatagttcctattttacatcattatcttgctgctgtttactaataagagacacccggtggctttttatttttcttctcttttttttttgggggggggggtaatggtgctggaggattcacaatgctagtgaatgtgttaaaacccctgagaagctaatcacaaggaagatgttttcttcactattaactattaactattggcttaatctttcctgaatgtgatctattatacttgttatgctattatcaagtggttgcgatattctgcagatgttagtcaggttatagtacgttgagctgcatgtacttgtaatgacttgattaattttgcaggaatcttttgagatccctcgtggtcagggttctag

SEQ ID NO: 44618 - DNA, 693 bp, Manihot esculenta
  Intron number 1 from transcript cassava4.1_022487m (locus cassava4.1_022487m.g) derived from phytozome v7.0 (chr-ID scaffold03175; pos 188872 to 189564 reverse strand)
ctttaatctaccaagcactgaccgtggtatgttttcaatcgcttgatcaaattcttatattacgttgaaaattcatagggaaaatctttgcctttagagtgtgttccataaaattcagtacccgcgttgaaggtagatgaaatgaaaccagaaaccagggaagaatacgatgaacagtactacgttcacaaaagtcaaacataatgatttacaattcaaaataagatacagttgattgacccctccctcgcaaatcgtatcctacggcattgtgcaagatcaaccacgtagatgcctatttctgaaagtgacacgtggcttacttattctatgatgactaatgaataattgaattttgggtgtaaaataaatggttttatttctatattcttattttaagtcatagcaatgagatgagcgtcatattctggtatgactctggaaattttgcaccttttgttggattcaagctccaaagtcataacatgcaagctacgttaggatctttctaacccttatgacattagaaagcttgtagctttctacttaatttagaatctgaaatttcgtgtcatatgttgtcattctattcagactgaagctcattcatactagggttcttagtacattctcttgggttgattggaattttttttaaatttgcattggcagttcttccaaggagtgcaaaat

SEQ ID NO: 44619 - DNA, 967 bp, Manihot esculenta
  Intron number 1 from transcript cassava4.1_016717m (locus cassava4.1_016717m.g) derived from phytozome v7.0 (chr-ID scaffold00560; pos 392924 to 393890 reverse strand)
ctgttaccaaactcggcggacctgatagtaagtttctccttcctcttctgttcactcttttttccatttctaaatcttacaccctgtttggcaatcagactcagggaaggaaacaggatattcatacatttcattgcttattttccttccttttcttgcctgagactcataggaaacttaaaatctttctcatatgtagagattcaatttgtgcctattttctcccaacttctgaaactataaaaatttcttaattatcttattcttattaacgtattttatttaattaactttttattttattgaattttgagctaaattgagcataaattaacacttatataaaagttaattatcttaatttctgaattaaataaaataaatttaaatcaaatattaagaaattgaatttttctattttgtgccaaatgtaaaaaaattaagaaatttaactaaaaattttgctttttattctgaattgttttattctaaaaattttacttttacattattgagctaaatcaaaattaatcactttatttttgaaattcaataattaacttcttttatttggatgttgtcaaattagagtttcattcattaaaataatatatattttttaattttataaatttaaaatataagcacgactatttagttttaagaaatttaagtacttaatatttattttatcataatccaatgattaataatactatatattaatttgggggtattttcattattttaaaaataattaacaaaaaattaaacataaaaaattcaatttaacagactcaaaatatatagattaaattattaaaataaaaaatatacattattttggcatattttagcgacctaaaagcaatttatttattattaacattgatatttatggcgtgactaattaattactttgaattgggatttcttagaagcaaccccaaagtcagtactaaggttg

SEQ ID NO: 44620 - DNA, 790 bp, Manihot esculenta
  Intron number 1 from transcript cassava4.1_013517m (locus cassava4.1_013517m.g) derived from phytozome v7.0 (chr-ID scaffold03410; pos 170524 to 171313 reverse strand)
ctttgtctctcccaatttaactgctatcatcactggttagtttctcatcataatcttttgaatcttcttacaaccttttgaagattttaagacatgaaaatataaacttaaaatgaagtcctagcctctgttagcttttcctgaggaattctcttcctctgattttcagatctcttgagtttttatttcttgcttctctctctctctctctctcttcatgatcaaaatgcttctctttactttttcatgtcaccttcctctttatcttcttatccttttccatttacttcatattttgtagataattttaacatatttaccaaaatccaatggatacattcatttatagttctgtttttgattacttatccataattctctgactattgcttctttgctgagcataatataatctccagggttatattttaatccattgtttcatgttcaaccagctgaggattatactattatttaatccagcggctctttttgactgtagcaagatatggttttgtctcttgtgaagggtatatccatgattggtttatgctcagatcacttctttctgaagcaaacaatcattcatggtctctttaacatacgtaaaaaacaaaaaaatcatctgggtatttcttgaatttctttattttgcaaaataagagaaaagatatgacatttcatgcacaaatttttctgtttattttacgatgtaagctgataagccacttgtgattttttttttctttttgaaggggctacctcaggtattggagttgaaactgctaga

SEQ ID NO: 44621 - DNA, 418 bp, Manihot esculenta
  Intron number 2 from transcript cassava4.1_006661m (locus cassava4.1_006661m.g) derived from phytozome v7.0 (chr-ID scaffold07859; pos 188957 to 189374)
ttaggtggtcaatacagccctaatttgcatccacagtgtacccatttagtcgtgcagatatcctttaatttctttcttggatgattattgattttatcatttttgtgatttagtatggaagtttggataatatgaatggattagtgcattggctatactgtgtatgagaagtaaaatttgaataattttctgttgggttgagaaaagaattcggaaacttgaaacaaatgcagaagagaccatattatcaagtttctttcatttacttgttgaacaggtttgatgcttattgataaactacaagaaagaagaaatcttttaatcctaaaacatacattcagcaaggctcctattaccaatgcaattcttttgtcgtgccttaatactaattacagctttggtggacgcaagttcgagc

SEQ ID NO: 44622 - DNA, 563 bp, Manihot esculenta
  Intron number 2 from transcript cassava4.1_021543m (locus cassava4.1_021543m.g) derived from phytozome v7.0 (chr-ID scaffold11279; pos 384683 to 385245 reverse strand)
agggaattttaactcatttcgacctcacgcgaaaggttccttccttattgtttgtttctcctttattgttctaattcttttttattcccattggcatcagagtgatagataataattgagtcataagtttctcgtattgattcaggtgaattttgatatcatattttattgaagattctttcatcattgatagattacaaaactgaattggaaatgtgaactagtataaattttggaaaaatcttagaacatatttaaatattctaagcgagtcccactgtttaggaattattatacatgccagcctatcgattcatattggtctgcattgcacatttcttggtagtttctggtcatttgaagtgtcataaactctgttctgatataatgcataagggccatattaaattatgttttgaatcattggcattgctcttcattttctcgttcactagattaaaaagaaaaaaaatactaagttttttttcctctctggtttttaactatttttccatcgggaattctgagtttttaggcagaggctaaaattctgagagggccac

SEQ ID NO: 44623 - DNA, 984 bp, Manihot esculenta
  Intron number 1 from transcript cassava4.1_000969m (locus cassava4.1_000969m.g) derived from phytozome v7.0 (chr-ID scaffold09508; pos 93511 to 94494 reverse strand)
tgacactgaggtatgcactttacttgcaataaattctatttacttttcccttacacagttgcttttgcattagggaggcatactaatctatgacctagaggaaattagtacaggatataaaatcatatacgttcttatttaaaatggtcattcaagtgtatagtggcaacaaagtgaggcaaaaggaagataatgcatttggttgtaggagtaaaatttggagttgattttgagatgagattcaactccatggcttctagttttctcattaattgattgcgggattttgtttataatttaaaggggaggtttctagtgtttgaatgggcagaaaccaaatattgtaaatgaagtgcctgcaagaaaatgtaagttttctaaattcatgcatgaagtattttccttgggtttcataaccaaggtcttggtaattgttcataggattaggattgcttcacacaaacaatgatagttaaaatattctttacagattaaaaaaaatctaaacctctaagggcttaaagctcctaaatagaaaatttaggatatatctatgtcattggaatttcatttatgtgagcatttattgaatttaagcaaggacaagtggcatgtcccaagcctgaatacattactagtccaacaattgggataggcctggatttgaccatgtgggccaaaagtaaccccttttgttagtagtagtgcacagatggccttctattctatgcaaactgtctaatgagtgtatctttcatgtgggacgacagttgttacaagtagaatagaaatgctgtgaactgaactactgaagtggtaaaacttgatactgtatcacactgctcttaaaaggtttaccttagagaagaaaaaataaatataagggttcatgcaactaatctcaacaagccttgtgatttagttcaggttaactagcaactccctagttcttaatattaaaaactttacaggtggccaagattg

SEQ ID NO: 44624 - DNA, 621 bp, Manihot esculenta
  Intron number 2 from transcript cassava4.1_012919m (locus cassava4.1_012919m.g) derived from phytozome v7.0 (chr-ID scaffold08359; pos 1492273 to 1492893 reverse strand)
actgagtcacttcaacaatacattgccatccaaaggtcataatagctaactcaatatattttatgctgacctctatttctaaacaactagagggatattttcattttgaagttttttttttaaattattgaattagttgagttaaatatctaccggttaaaaagctttatactagtgaatgataataccttagcattgttcccaagtaagagaaactgaagcaaacttaaatgtgaaacttgcgcttaaagaattagatgcccttaagtgcatagtaaataaatttctgaactttttttttttggtctcgaaagtgtaattattcttttcttcggtgaatggaggtttatgatatccagaaggcaaggtaagactactgtaacgaacctcgttgactgatattggtagttgaaaataattggtagagaccaaccaagcttacataatgtaaacagaaatactgtgattcaacaacagattatctttgaatcctgcattatttccgaactcttaacttgagatccttccggctttacattttaagatcgatatgtatattgctctaattatggatgactttttttaaattgacagaggttcttgagctttggagaagtgccg

SEQ ID NO: 44625 - DNA, 414 bp, Manihot esculenta
  Intron number 1 from transcript cassava4.1_016870m (locus cassava4.1_016870m.g) derived from phytozome v7.0 (chr-ID scaffold10305; pos 309193 to 309606 reverse strand)
aggtacacgatagattgttagtttcgttattggtctgtttggctggggagtaaatggagtaagagaaaattttagaaaactttatattgtgggtgagattttttagctgaagaattgaattctctaactatttgacgtcatatagcttaattttgacgtgtttgtaaatgacaattatgctgattaactataattcagagaaaatagagaatgaattgggtattttaaggatattttcatcttcttatttggggattgatgttctatcagaagaaagtataattcgtcgaattgacatactatagctgtttacaggctttggacaatttaggggaagctttaaatttgaattttttgctctgtcatggtccttttgcagagattagtccaacaccagcctacacagtatccaac

SEQ ID NO: 44626 - DNA, 1007 bp, Manihot esculenta
  Intron number 1 from transcript cassava4.1_002316m (locus cassava4.1_002316m.g) derived from phytozome v7.0 (chr-ID scaffold06407; pos 398590 to 399596 reverse strand)
attaagctgatattcgctccaaattttggttattggtgagttaatacttgttcagattggttttggttgtgagttcaactctgttttttgttaattaagtgggtattgatgaattgtagcgtgtttcagcttgttattagctgatttgctttagcaactgattattgagctcacgttaagagattttttaataggctaattttcgtagaaggtgtcgttatataagtggaatttgaattggattattcagttaattgttgtttggttgtgttgtttctgtttagttttctctggaacatttagtgagctcactgtagtatgtcttggaatttgggcattgtagtgaacttcggctgattgattgatagttttcttgattggatgccttgaaaatggacgaaacacaaagaaaatgatgaaaatgctttatcttttggtcaatataggattttcttaatcttgaccttttttttttgaagaaaaattggattagttttaaagcttgctcatagattcctgtttttcgattaatcaacagatgggggtagttttttttttctttcttgtgttggttgggttgattttattttattaggctgaattctttgagttgtccttttttgtgtttatttgggattctccttaatctctaatgattttatcctgcacaatttgatgatagattcttgttaggttcgtcttgatcatatccgaaattcctcattggagaataagaatattgctgtttttaagttctgcaccaaagtagtggttgattctagattgtgacctgatatattaatgacatgagctaatattcctcttttttattcgaaatactaaataattatgctctctgttttgatctctccaacctgtttcttactaaaattcgtgcaatcaattgctgtatgatcagattgattgtgcagaatttatctgatgataaatttcagttcgaaatgaattttgaatttttgtttgttgaatttccagctaactgaagc

SEQ ID NO: 44627 - DNA, 994 bp, Manihot esculenta
  Intron number 1 from transcript cassava4.1_022004m (locus cassava4.1_022004m.g) derived from phytozome v7.0 (chr-ID scaffold06028; pos 301928 to 302921)
tggaaaaaccccttgtcttatttgtgtcctgttatgagtgcacacatgttctttccaatctctgctgtcaatggtatggttatttgaaattaggtccttgataatcatccaaaaatttgacttttctgttattcagttgtttgctgtcttattagcttctactctcttctctttttttttctttttttttttttcctaatcaaggatttgaatgaaatcttgagcttatagcattctctccaaaatccagtatcattttgattttcttagtcaaaatttggcttaccttcctctcattgtagaagttcatattcatagtacggacagaaatagaatattgttaaagatttcaaaagataattacatattaatgcaagtgctatgaataataccacaatccatctccattcttctcctttgtcagtcttttgccagcagggataggggaggggggaggaatgaagagggtgggatggaatttaacctaagatctatcttctatattctctaacaattagatgcaattcaagttacagccaagtacagtgatatcacattgatacttacaaggctactgaagacaaataacttgtatattctgtagggctcctcgtctctattttctctttcaccttctctctgccaacactgctgcttagcccctcactgttgcggctgctgctctgcctgagttacatcattcctgccccaaccccacccctttcttttatttcctggtgtatcagtttcaatgcatgcctgatcattttacaatatcttgtcactgttcttgacatttgttaagttatatgtttgtatattgatcgtcactgggtgtactgtaagttggtgaaggaaatgaaaatcccatcttgtttgtaatgatctattgtccttgtatttatgaattgaaacactgtatttacatattagattatctgattctgtatggtccactgttgatattcatcaattgacagtggagaggtggcct

SEQ ID NO: 44628 - DNA, 903 bp, Manihot esculenta
  Intron number 2 from transcript cassava4.1_017195m (locus cassava4.1_017195m.g) derived from phytozome v7.0 (chr-ID scaffold00068; pos 141525 to 142427)
aaccagtttgaagctgaacagttgactgagttcaggtattcgctgttatgacactagaatgaagtgctagaacttatgttattcagtatgtgatcttcattttttttattttataaatgtatatcttttttccctattaatagctttattaattcaattgttgaacaaatctgattgtttttcttgacattttcggatattgtattgaagaaatttgcggggctgagaatattgaatataaagtccatggatgaataagcaataaatattgaatgtgaaatgaagtggtataatctatacttagaagtcattttggaaggttagccctgcctttttatttgcaagggagtgagaggggggaagcagtgcttgattacctgttgcactatgaggcagtaaatggaactaatagcctggtggcccacgacatttattattacctatgaattattgatgtggcaaatattggtagtttctttgaagggtttacatattttttttccctttaaatcatcttagaagtcatatgcaaataacttgcacaataaggcatcatcttgaatatgactggttagctgattcataactgaagtaaacaagtagggactcaaaatcaatccctgatgtaaacccaatgttataaggaactccctgtatctccttccattgttttacacttgtgattactccctcatgcatgtcctcaaggactataatatttgaattatattctttttcagcacccaccaagaaactaatcttggtactatatcatataccttttccaggtcaatgaattgtcataaaaaggatgttgtatttttgttctaatttttgcttttcattttaatcaagcatccgcctgtttacaatattattattacaggattgtgactgaaagag

SEQ ID NO: 44629 - DNA, 939 bp, Manihot esculenta
  Intron number 1 from transcript cassava4.1_008540m (locus cassava4.1_008540m.g) derived from phytozome v7.0 (chr-ID scaffold01497; pos 3379 to 4317)
ctacgcaaggttcacatactccttctggtaattattgcttcgattttgacctttaagacgtgctaccttatttcttctatgattccttaaatgggatttgctaggattttgatgggtttcttttcttatccttcagatgtaaggttttcaatggctttactgttgctgaactttgagctagttcctttattttttaggggggcgggggaaaggaatacttatgccttcatttttttaacttgagcaaagctttatgagcttgtttacatgataacattctttttcaattttgatggtcttattttttactaaatatagcttgttttcttggtacttcatattataagttaaagagctctgcttgtacgtttgggttattatttaaaggttgaaattcttattgagacagttggaaatacccttagattaattgattcttttcaattcgcttttggttggtagatctatccattcttttattgtgagatcgatcagggtttgatacttatacttaacataaggacttgatattattatggctacctctttattccaatttgtttataatttgcacatttaacccattagaaatcaatatccttaaagaaaattgatcatgtcaatggggggtggggggaactctatgctgagtagcactctgctaaaaacagatcaaatcatttccgacgcacttgggcaaatgtaccatctaagagtttgtttagtttactggtaagcatttggtggatggaatgccaaaattgatagtggaatcttagtgtagtatttttgtatgtgtgatacttgagccttgcgggtggtcgtcttctgaaggactgcagaatttgggtttctacttctgccaatactgaattcttctttgattttctcttgcttgcatcaggggcatcaagaatttccagcaaaaccagccgttct

SEQ ID NO: 44630 - DNA, 499 bp, Manihot esculenta
  Intron number 1 from transcript cassava4.1_001908m (locus cassava4.1_001908m.g) derived from phytozome v7.0 (chr-ID scaffold10963; pos 712701 to 713199 reverse strand)
tggcgatcctaataaattcggggacagctccacaggttggtttcccttttctgtccccctctcttcatcttcatcttctttgttttagctggatcttcactttctacatgggttgttagagatcttcgtttttgggatttttagttatttaccagttcttcattttgacatggagttctctcatggcttatctatgtggatgaggttttatgcacgcggggttctttcatttcacatcaattaaagtacatgagatgttaatgtattatgaacccttatgcttgcttgattcacaactttgttgtgtttcaaattctcagcatacattagtatgatcaatgtggaattatgaatggcatgagcttctccacgagcataggaaatgctattatacgtgaattctgcctggcgtccattatgtttggctgttttctcgacaaataataaaatacagtgttttgattcgaattgttcaatggtgcagaaggtgctgtatttg

SEQ ID NO: 44631 - DNA, 972 bp, Manihot esculenta
  Intron number 3 from transcript cassava4.1_004481m (locus cassava4.1_004481m.g) derived from phytozome v7.0 (chr-ID scaffold11834; pos 145722 to 146693 reverse strand)
acctgtgatcagaaaaccaagagagttatatacctgtgagttcttccccacattggtttccttgctataattgcttcaagttaagcttcttgtcattaagctgctatattttcatgaaacaaatttatttgaagggaatttgtaatcagtggaaaataacaggcaacttcttctgtgcattgcttttcaatggtcttgaaaaatgtcgtctccatatattatataaagtatcttgtggcattgatggacccaccctttgtcttgtgaagaccaggcaagattagtccttatgtttcttccaataaaattacaagcatagacagtaaaagatcttgttgatggattgttggaaattaatttaactagtttccttaaagtcctttagatggagtctgtgccataagactgacacttttaattgcttcttcagtattcttttgtcacaaatttattaaacaaagtcacatatactgcatgtttgaattgtagttgtcgacacctgaaagtttattgcctttataatctgttgtcacctcgatgatgcccagatgtgtgaatattccttctttaggtggctgtactgaataatgaaaaaaatgaatgaggaaaaaaatcctgtttcagtactttggttgtttgtgatttcatatacttgtatcttccccaatcgatctgtttaggtttattgttcatttgcttgaaaaggtgtgctatgcggtagagtaacataacatgtttcataactcatatattacattcatgtgcatttcttattcacacgcacatgcagacacatactctccttgcccttgaattctatttcatgatacgatatgataaatacctttaaatgtttaaaaattaacatgttatttgcaattgccttttgttttaatttagcattttgcatttgtttggttgttctaaatttcttcattcaggagtctgaagaatcacaaattaagtggacct

SEQ ID NO: 44632 - DNA, 934 bp, Manihot esculenta
  Intron number 1 from transcript cassava4.1_006762m (locus cassava4.1_006762m.g) derived from phytozome v7.0 (chr-ID scaffold04251; pos 350366 to 351299)
tggcattgtcttcttttgctttgaagctcaggtatcgagagcgctaacggttttcagttgggtttatcagttttacatttacaataatacccctgtgctttcccaaatttaagatttttaaagacttaaaactttttattttctccttcaatttgtcaaaagtctctcatgattttttatgctcttcaattgagtagataacatgcttttaaatctcaaattcataattcgaggttaaaaccaaatttcaagctttccacattttaaattttatccattaaatttatatttgttatactatgaatatttaatatgattgtgttgttttttttctattaaattttcattgcattcaagtttataattttttgaaacaaccttcatatcatatcatagagcagctatatcaaagatttaagtattaacagtgtaaataatgcaatatctcattgtcatccatgggaggagggagacgtctactgctccaagactccacaattagttactagttagcgacccctcagtttagcaaaagccactatgatgcactttgttaagacatcattattaagatcaaacaatgagaaaattgatgctgaattttattggagataacttttcacatgctttgtgggggtagccatggctccacaagccatttcacattattcaagattccctagttgtgtttgcacagtttttcaccttcaatagacatattgacgttgctttactcttcactttgcacttccatatcaattagcttcttaccatgactagctgtacactttttaaatttgtaccttttcactttctctttatttgatgggtaactactttggcatgtttttgtgaaaaaaacaaacaaaaaaaaaatcattggcatctcaaaaatggagaaagcttagattttcatcttcttacaggccaatca

SEQ ID NO: 44633 - DNA, 863 bp, Manihot esculenta
  Intron number 1 from transcript cassava4.1_028070m (locus cassava4.1_028070m.g) derived from phytozome v7.0 (chr-ID scaffold03833; pos 832 to 1694)
taaggagatcagtgaaattttagagattagcgagagtagaatttcacaaattcataaaaaacttttaaaaaaacttagagaaaggctagtgtaatggcagaaatactctcccaagaagaaattgacgctctacttgaagttgttgatgataataccgatacgcctacagcctccaattcaaaagatggaaaagatgaaagaaatatagtcgtatatgactttaagcgtccaaatagggtatctaaagagcagcttagaacgatcaaaggtatacacgataaactagcaagaaatttagcttctcaaatttcatctatgatgagaagtattgttgaaaccaagcttcactcggtggatcaaatgacttatggtgagttcttgatgtccctaccaagccctacaagctttaacgttttctctatcaagcctcttgatggaaactgcgttttagagattaacccaagcatcgctttccctatgatagatagacttttaggaggtcaaggcgatagctatgaggcttcgcgagagcttaccgatatagagcttaatttgcttgattctattttgcgtattattatgcaaagacttaaagaaagctgggctacagtaactgaaatttaccctagcatagaagctaaagaatcaagccccaatgttgtacaaatcgtatcgcaaaacgaaatcgttatcatggtggtaatggaaatcatcataggaaattcaagcggtatggtaaatatctgctatcctgttgtccatttagaaagtatcttgagtcgtttagcaaatcgcgatattatgatgggtgaaacttcggctaaaaagatcgcgtaacaaagagcttaaaaactctcatcggt

SEQ ID NO: 44634 - DNA, 589 bp, Manihot esculenta
  Intron number 1 from transcript cassava4.1_009265m (locus cassava4.1_009285m.g) derived from phytozome v7.0 (chr-ID scaffold06582; pos 751925 to 752513)
gagattctgagttaattttatcgtatattcatttggtaagaactactcaattctctgtttctttcttttctttatttgcaatctcattaatggttttcttcttcaaatgaaaattctcttgtctgccaacttgattaccttttttttttctttggattggtgtattttaagatgagtattcttgtttctggatgaaagttagtttagtttaggttctttttaattttcagctggagattatttcctctgtcctgtgattttctgattgatggatcttgaaatttatcactttttgaactggaaccatgagctgttttgatttttcaagagacgtatagttgttttccagtcccatatgattctgtgacattttctgctggtagttcaaggtttcctttgatagcggaattttgtattggtattgtttatcagtagttgaatctgaaggtagttgcaaaattttcatgccacttctttctgtgtgaattcaaggttggagtggtgtttgccttcttttttaaaaaaaaaaaaaattaattaattctattaccttggctatgacagagatcacaagaaagaaagagagaga

SEQ ID NO: 44635 - DNA, 667 bp, Manihot esculenta
  Intron number 1 from transcript cassava4.1_005054m (locus cassava4.1_005054m.g) derived from phytozome v7.0 (chr-ID scaffold11297; pos 386820 to 387486 reverse strand)
ggggaatttttcataggtgctgttaatatcgatgtgagggttttattaactatatctttcttttgcttaatttcttgattttcgtgttatgttagggttccttccatcttctcgtcattggatgtatgtaatgagtcgtgcgtttttggtaattttgctcgtttgattgctgagttattggctaatatttatcaaattgaaattgtcgtcttcgttgcgatatagatgatgctaagcctcgaatttgatttttattgacttgcttctcaaccaagcatgaaatggttgacgtttggtttgtttttgatggtctgattgtaatgtttttattatttattttgataatagcccggttccctctgttgtgttcattgtgcaattttgggggttgaattgagaataggaaaggaagttatttgagtgttatattttcaatctgagtgagaagtgcatcttgttaccattcaaattgacattttctcacacacttttttttccagctaaaggaatgctaggcttaatgttgtattggtatatctatggaatcatgaagctagcatctaagaatttttaagtttgataccattcatctaaagagcataatatgtatgtgtgatgtatatattaatttattgattgatatggtgcaacagcggactcagaaaaa

SEQ ID NO: 44636 - DNA, 740 bp, Manihot esculenta
  Intron number 2 from transcript cassava4.1_012056m (locus cassava4.1_012056m.g) derived from phytozome v7.0 (chr-ID scaffold03859; pos 146041 to 146780 reverse strand)
cattgctgaggtatgctgttctattttttttggttaattggaaaatgctcctatcttttatacattggagaaaagttagcctttgtgttactgtagtttgttcaaattggaaaaaaaaataataataaataaaattgagctgtgaaacacaagcaccaaaatcaatttatatggttataatgcaggtgaagtgagaaaattgtagagaataggactgaatagagattgattttttttttctctttttgagtcttgaaatttctcttatatagtagtgtacagtaataggcgggtgaaaaaaaaagtaactcttaactaattgccagcttgtctaattaattctaacaaactgatatccaaaatcttctgcccctgcacactatttcattgttttctttgagacatcttttcatccatcttctactgccacacggattccctttgcataaaagataatctctttgttttgcaaacacaaagatcacaaatatagcaatcatgatattttgcattttcctgaaatgtgttctgacttcttcttagacacatgttcgtgtttagtatgccacaacttatacaacaggggtgatacataatttataccttggtgaaattggggaacaaaatattggacactattataatcctgattgtgtattaaatttcatgtgctatgttgattggtacactagacgctttgctgatcctggtgggatattgatgtaggtaacaaacacacc

SEQ ID NO: 44637 - DNA, 496 bp, Manihot esculenta
  Intron number 4 from transcript cassava4.1_029795m (locus cassava4.1_029795m.g) derived from phytozome v7.0 (chr-ID scaffold12004; pos 60211 to 60706)
cgaacaaaggtataatttaatccattgctcatgttcattgttttgttgaaagaaccttaatcctataaaatttaaggaaagattactatttgatctttgtgctacgagaaaactgagttagttagttgatccgttttaaaaaatatattaaaatatttttgaggttttagaaattctattaattaattttttcattaattttgaccgtttaataataaaaggtctaaaatgcccttaatatgaaaagactaattaatatatgattttataaaatttaaggactaattaatgaattttttaatattataaaaattaaataataaaatatttaataattaaaattaataaaataattaattaaaattaagagaccgactaattaatttttttccgtacaataagaagaaaatattcctaaaatgtatttctatgatttttcttcttgacctcattttgtttctttcatgtggaggaggtcgtctgacaacaaaagttg

SEQ ID NO: 44638 - DNA, 920 bp, Manihot esculenta
  Intron number 2 from transcript cassava4.1_010642m (locus cassava4.1_010642m.g) derived from phytozome v7.0 (chr-ID scaffold03363; pos 116047 to 116966 reverse strand)
ctcaaggagtttggaggataaagggcataattcaggtatcaattttcttggcttcttttgcttcctggaatgcctattgagtgttctttgtattgttcttgatattccctagggagacattgagcaaaatgtatctgaatgcttggcaataggagggttcggttcggcttctggtgcagttctagctaagaactggaactaagacccataatttacaaaagtatgagatattttgcagttaaaattgaacttagtaaagcttaatcttcatcagtttaggacagaacacagaatctttattatatcaatgccatctcaagtgtctagtttttcacatcataccctgaagattaattttggattctcaatgttcaaagaggtatttattaccagtgcaagaaaaaaaatccttagaagtccttgaaggtggctgaacataatctctgtagtgtaaactacaagtgatccttgtgattattgctagtgatacaagttcagtggctcaaacgaaaccgaccctatgttctacatggctttgtaagaataacttgcacttgctttttaaggttcactcggtatcaataagaacaacttggcaccagcgagtgttgggatgagtgcttcggcactcttctgctcttaggtgaggagggtttgattcttgtggacgaagcaaatactcgccggaagcactttacctttagtgggccaactctatgcgaacagggcaactactaagatgctcttaattttgttgtttcaagtctgctacttgttactcaatggtctaggctttctctgacattttttttcttgcaggtttcaagatcaataggagatttctatctaaagaaacctgagttcaataaaattcctctttttcagcattttggattccccattccattgaaaaggcctgt

SEQ ID NO: 44639 - DNA, 737 bp, Manihot esculenta
  Intron number 1 from transcript cassava4.1_009757m (locus cassava4.1_009757m.g) derived from phytozome v7.0 (chr-ID scaffold04137; pos 232451 to 233187)
tctcaatctcacactggagacggagctagtcctgggtaggttccttcttgcttctgcttgtttccctgggaaatctaagagaataagatgcatgtttacgcaaattgttgcccgttgtagtagaagctcttttgctagaattaacactagagaaaaggaagtgttaaaaaggaaagttgggtatttgtttttttccattctgtttctaatggtaattgcgtgaaatgaaaggggagtttgatttcttcttagtaattttaatgttggtgattggtttctctgatggtgcttgcgttagaagttcttttgtcattgagggaattagacgctaaagaaaaggaagtactgaaaaagaaagtactgaatttgtttcttccattctgttttcaaatggtaacttcgtggaatgaaagggggagtttgatttcttattagtaattttaatgttggtgattggttcccctgatgtttcttgcatttcttgctacccttttcattattcttgttagatacacgcataactagtaatgttgcagtgctcccattaacttcgtagaagtgtttgtttctacaactatatcagttattacaattggttctgtgtgtcttttgtttttcttttttctttttggatgttgtcggatgctttgagaaacttcaattaagatatctaattgattgctttgtttgattttactacaggaaaattttcattggaggcttagccagggagacta

SEQ ID NO: 44640 - DNA, 571 bp, Manihot esculenta
  Intron number 1 from transcript cassava4.1_003899m (locus cassava4.1_003899m.g) derived from phytozome v7.0 (chr-ID scaffold06948; pos 249295 to 249865)
ctgagagctctctactctaaggtatgccactcaatatccgaaaaggtttctttagaactttcttctcctcttcaacgatgtaatctctaccttatttgctttctggtaatctggctaatccctactcggtgtatgtggatatttgaatttgtctcagagcgccttagggttcttgaattttcataaaagaattcaaattttgattatagttagaagtgaagttgtacccagaaaacaaagaatagacccagaaagaaaaaatgtgtcctttttatacagccattctcttgcaggtataagctgaagctggtctctctctctctctctctctctctctcttttgaatttctgtaggatatcaatgcaagttctcttatctctgttgttctgcttaattatcacacgttctgcatgttttccgcttgttttcaattcaattacttgggattctttcatttttcatgctgctcacttagatttctattaaaactcttgcttcttgtattgttgttattgtgatcagctttggtttgagcttttgaatgtgcatctcctgtttggttgcagtaat

SEQ ID NO: 44641 - DNA, 631 bp, Manihot esculenta
  Intron number 2 from transcript cassava4.1_027900m (locus cassava4.1_027900m.g) derived from phytozome v7.0 (chr-ID scaffold03175; pos 202912 to 203542)
aggagatagaggcaatcttggtgtgttgataactttcttccttgattactgctagatttacattctctagctgtgccatcatttttttagcaatgatgctttgatgtgcactattactgttgtcatttgtttactaatgaatcatgagcatatgttccaaactgtctggtggatgttaattctatgttttctgtgcactgaaatagaatgctgactggtcatcattgagcaagttttgaggtagtgaaaatttttgtctacaactttggagttcattcttgcatccaaaagaagtgttttgtttttttattttattggtgatgggtgacactggagaatgagaaatgatgttaagtaaatgcactgattcaagattattttgtctcatttgtcatcatggtcgaagactgattggttttataagattgttcattgagatttttggaagctatattgcagtctgtgataatggatgcctcttattagcattctacataaacttcagttgttttcttttggagagtgtttctgttttgtaaaggtagaactgaccttgtattaactgtgttgctattctcatctctaatttgcttctttctttgtccttctgcagctgggaggctgcatctga

SEQ ID NO: 44642 - DNA, 621 bp, Manihot esculenta
  Intron number 1 from transcript cassava4.1_007213m (locus cassava4.1_007213m.g) derived from phytozome v7.0 (chr-ID scaffold10963; pos 203757 to 204377)
agaaaaacctgtcagataggagattcttctgagcggtaacctctttaagattgaatttcccagtcataattatttcagttcttcattttgcctgcactttttgttggatatgaatgcctgggcactgatatagcacttcagctctttacatcattgagaattttaaggaggattgtgggaaagctgagttctttagagagatccttatcctataattgcacccaaggtcaaaagattccgttgaggaagaaaaggaactctggatttttaaaaatgttggtaactaaacctcattttatcccagatatcgctttagcaaccaaaaatgtgatctgatgaatatatttttaatctaatgtctgaatacttgggttgccatgcatcctacagtaataattttgaatctctctatttcagatttctttatgtatcagctgttttgtttttttaaaattttctatctgttttcctcctttctaagtagtattgtgatggcttgtgctgcagaaaattcacctgaggagcacaatgatgattttaatgaagagaggacagagaattcaaccaatcaatctgtgctgagtagtcacataaacaagaaatctgagaattgttgtacca

SEQ ID NO: 44643 - DNA, 996 bp, Manihot esculenta
  Intron number 1 from transcript cassava4.1_013122m (locus cassava4.1_013122m.g) derived from phytozome v7.0 (chr-ID scaffold10305; pos 365259 to 366254)
ctttatcgttggaatcgttgctctcagcatcactggtatgtccatgtgtttccgtgcattttactttccttagggttctcggaaacttatgattttcatgggtttccattgagtgtgagattgtgagaattgctgaaagtagccagtctttgtacatgaaatttttttgagttatttggtctattaattggatatcatatactgcaatatgagtacttcccatggttgatgactggaagaatcaattatcaactcaggatacttttgttagggaagagagagtaagagcgtgttggggaatgtaattagaactcagatttgtaggattttttcttctagttaggtatgcgtgttatgaagtagaataatttgggtagtgagaaaacaaaatccaaagaatgggcatcaaatatactgacttccatttttcaaaaataatgagacaatttatttgggtttttagtttccacttctgttgtcatgttgtctccgtttggcataatttattttgtaaaacaaaaatttcatgaaattcttgtaaaatcatatgcgatttcatttcctttgaaatgaaaattttataagttaaaatgaaaatgaaaccttccatttcagataaaaaatgtgaaagaactgaatcaacttcttgtaaatttttttattccaaataagaagaatattaacattcagtttgctaatacagaaactacgtgcttaattctgaaaattcggaaacaatatggttgacaccacctaacttggttgaattttggcgactgcttctaagacatcttcttttgtaatgcagtcctgattgtataatgcatatggaaattcattccactctcatgtaattattgctatctttgtaaccacagatcgagtggatttcttccattatctgttcaaaagctgagcctgaaaaggttgtgtcttgattttgttttgcataaatggttgctcatatgctcaagtattgccttttgtagctgataa

SEQ ID NO: 44644 - DNA, 754 bp, Manihot esculenta
  Intron number 1 from transcript cassava4.1_012777m (locus cassava4.1_012777m.g) derived from phytozome v7.0 (chr-ID scaffold08359; pos 2309370 to 2310123)
cttttttcttactgggtcttctccttctttcctaggtaacctcttcaacctcactcctcctagtctggaatcaatacctctgcaattccttttgttctatatcgattctctgctataattgctgcataagtataagaaagtctgacgaaattacttctttttttttctgtgttctattagttctgattatgttaaaagtgcaaatctccacaaatttctgctttataaaatcatgattagtaaatgatgctttatgatggaaagttgacagtctttcacatatttaccaaggtagaggagaagctaacatttgtttccaagactaaatgctatgttttgtctgaaacttacaagtattaaattttttgcatgcttcttttctttttcatatgggaggtctttggatgttggttgagtttctactctgtccttcccccccccccccccttccgtaatttgaaggctggaaggtggcctatctgggctcagacatctctgttcagctcacaagtgtccactgagatctggttaatttagatgtttgtgatgctctttatatctgacttattgaatcatgctagatagctctttgtaatcaatcaatgcaagcaaaaagcctaaccaaggcctacacctttttgaatgttttgtgaaaaatgacttagaaatgggtactaatttgaatgttcagtacttgtgatcctcaaatatagtcttctaatcatgatatgccgttgatttaggctcaagatcc

SEQ ID NO: 44645 - DNA, 617 bp, Manihot esculenta
  Intron number 2 from transcript cassava4.1_020777m (locus cassava4.1_020755m.g) derived from phytozome v7.0 (chr-ID scaffold06028; pos 326084 to 326700)
aatatcattgttggatctagttagatcagttggaggtaaaggcaaaggcttcaccattaattactcttttttagttttctgattattctatgtgctctgcgatattgattcttgtgttcttcttcttctctttttgttcagttttagtctcttcaaaataattggtttgctatgatggttgaaatgattagtggctaattaggtgattgaattttataaaatcaggagatcaattatcatgcctggctgcctgtggcacttgactctaatccttaagtttctctcacatggcatgttttggtgatttattaattggaggattttgcagatgataagaaatctaatctggtttatttagatcagctgatttttcttttttgggaaatttagatcagctaatttacccaagaaagaagcctgaattggacagtattctatatgtgcaagctcaaaactgaaatgtattccatggagatttcaatgactgataccacatttaacttgaagaacctcaataaatcagcgcacacaaacacacccacacacacagtggatctttatcaagtgatttggtagctgatattttcttcatattgcagatcacattgatctctagc

SEQ ID NO: 44646 - DNA, 823 bp, Manihot esculenta
  Intron number 2 from transcript cassava4.1_001324m (locus cassava4.1_001324m.g) derived from phytozome v7.0 (chr-ID scaffold03410; pos 11840 to 12662 reverse strand)
atatatcccatttagctcttgatattggaggtacaatgtaattctgctttgtgactgctctttttgttctgttatttggtttttggtgattagtgcattctctttttccaggagacggtttttttttttgggagttcaagtggtcctttattattattttattttgataatgttcttggctctttgggaggaataacatgggaagaaatcctggattttgatctacttccacttatgtctatatcttttcccctgcattctgtctcttatccatctagttactttatttaacatactgtcttctcaggcctgtttttcactgtcacttttccagtagctaggcttctgtgatgattttattgcttgactcagtaatggagttgtcaatttcagatttcaaaggggtatagttaatgtgatattaatcatattatacatggagagacgtcctttccttctttccttctttaatccacttatttctttggaaagtttctagtttgaaagctaaattttacaagctattaaccctgatcgtgagaactaagaagtacatacagaatctcttttgcatagtttttatgattatattctttctgagtgaagagttagtttgccacttgtagttttgataggtaatagattgccttcctattgtctttaaactttttttcctttactttttcagtttaaacagggaaatgatttgtaaagttgaatctttaatttacgtaaagtttttggtagccatttgtcgtttgttgaaagttaagattatctgatggcaggatctttaatcaagttggtgtacttctcaagacat

SEQ ID NO: 44647 - DNA, 713 bp, Manihot esculenta
  Intron number 1 from transcript cassava4.1_001324m (locus cassava4.1_001324m.g) derived from phytozome v7.0 (chr-ID scaffold03410; pos 12919 to 13631 reverse strand)
taatcctcatcaaacaaaaagctgcttttaataaggtctgcctttctcacccatttctcttctagttgctttatctatcttaatttcagttcaactgaattggacttgccacttcaaccaattgtattttatttttgtttacttgctaatttacttgttggattcttttcagttttgacattttcttcttttatataattttttttggctgactgttatctgtgtttggcttgatattttcaatttgatttgggtttatttggtgtgcgattgttctaattataaagtacgtttggttttgatcattgaacatatatgaacagtgttgttttggttggactggatgcattaaatctccccaacagtttctaactttttgttttaccatgtgggccttatcaaattgacaaaagtttcccttttatttttcatccctgagaattgaatttccttttgtaatcaatacctatagaatgggcataaagaaaataaaagttttaatttttaatatttttatttatagtcaatttgttgtttctaattcgtcactttctgtgccgaaccggttaatatgcatatatatataaatgtgaatataaaatttatttcctcttcttctgagtgtaggacaagtgaccaaaccagcttctgacccaagactgctgttggttgtgtatgtgtaggttaaacagcaggtggtgagattttggaca

SEQ ID NO: 44648 - DNA, 833 bp, Manihot esculenta
  Intron number 2 from transcript cassava4.1_017700m (locus cassava4.1_017700m.g) derived from phytozome v7.0 (chr-ID scaffold12455; pos 47212 to 48044)
ctcgttggaggttttcagattattgggtcgtcaaggtacgcgtctctattttttctttctttcttctaattcgtttttaaagattagggttttcttttatcttttgcgctttcatagtaattttgctctcttgatcggtgagttgagggttttagttgggaattttgtttaaattctgcgaaacaaaacctaatttttatcagggagaagctcttaacgcttctccgcagagaaaccgacatagttaaccttattgtttcgtatacaaaaaactatctagcttcatgacctgttctttaagagtctttcccgacttgaggtgctttgagttttttgcttgtgagggagatattctggcctgactgtgcagtggttgtgttccttgtttttggccgatgtgccacagatctggcttggcggattaaagggcctgcgtttgcctttagcgtagtagttctacaaccttgcttcttcgttgggtttctagtttggtgtctagttatgggttttttttatgttttgcgtcggcgactcgttcgtgtgatggtgatgtctagtttcttgccgacagtgtgctgttcgactcttggggggggctctggaccttgtacttatgccagtgtattgtataccttagcttaccatctgtacaccgggcaaaattgtggtttcccaggtcgttaactgaatggtttgcagaaaaggttacattgtgtagaaattggctttaatgcaacgcgccttgtatagaaattgtgattaggattgtattttatgtgaacaaagtagaatctacattgtagtatgcattgacaatagttatgctattttag

SEQ ID NO: 44649 - DNA, 272 bp, Manihot esculenta
  Intron number 2 from transcript cassava4.1_015253m (locus cassava4.1_015253m.g) derived from phytozome v7.0 (chr-ID scaffold12004; pos 684943 to 685214 reverse strand)
gctgtgcgtttccaagcttcattaattcggacaaattttttagttgtgctattcttttctcgatcttttatcttctgaaaaccagttgatttgatctgtgttgtcaacaatattttgaaaacaaaatatatctagattgaagtagtcttgaaaagagctgtttttttatataaaaaataattcttcatgttgggaatttattctgttgtgatcctttttcaattagctgtgctgacacatctggtgcttcttaaaccagggaatttgtaaac

SEQ ID NO: 44650 - DNA, 779 bp, Manihot esculenta
  Intron number 1 from transcript cassava4.1_002983m (locus cassava4.1_002983m.g) derived from phytozome v7.0 (chr-ID scaffold11882; pos 208981 to 209759 reverse strand)
caagctactggtggtcatccctgctcattcctcaagtaaatatttaatcagttgttcttttcttcttcttcttcttcttcatattgggatgttgactttatcagtttaaaatttgattggttaaagttaatatgccattgattgtcagggctcttaatttcatttgaatttcagggcttaatgcttttcttatacttggatttcttggcttgaatttgatgactacatgtgaggttcaaggctttaaaatcaatttggtttacacttcacaaaattatactggtattaaattttcactctatggccccatcatttattgcacagattccttcttcaacctaagaaacaagaacacaatttatctccagatgaagaaacaagaacacaatttatctccagatgtactaaattccaaagaatttttaatccctagctttaggaattgctgatatcaattctcataacagcaaattccatattcagtgtaaatgcttgctttctttttaaggttagcatgtgaacatcttaagcaaatgtaaataattttggcaaacctgcaaagtgcagtataggtcacaaacaattggcaaagttactgatcttagcactgtattgaaacattgaaggccctggtgtttatttttttcccctttccaccagtccagttatattgacttcaagaaggttgatgatgataatgatattttgataatgatgagttaagtagatgaaatgctttttcaggtaaaagggtttggggtttttcaagattcaccagt

SEQ ID NO: 44651 - DNA, 568 bp, Manihot esculenta
  Intron number 2 from transcript cassava4.1_008869m (locus cassava4.1_008869m.g) derived from phytozome v7.0 (chr-ID scaffold03363; pos 473333 to 473900)
tttggacgtaagttttcttttctttttcctttttttaaaacacaatttcttttactattattaacaaatggtttatatttaaatttgataagttttacaaccagatgacaagcggccaactagttgttgctacctttttgtatggatttatgggtactgtgctacgtagagaagattgcttgctgtgtctcttgctttgaattttattaacactattgtgaacattttaataagaaacacttaaggatgtgatctggcataaagttcagcctgtaggtagatcaaattgcaaaagcagaatttcacaggaagcgtaaaggattgcaatcatgttatggagcccctcaaagttgctatttcttgggaaaattagccttcttttggctgtcaatttcttacatatctataagtggttataatttgttaatgcagggttttaaattttcttttgttggacccttgtttcaaaaaataaacttgctgcttccattcccatatcacctatctttaatgataaacaatgttccttgcaggcatttgattgggttcttccttttcctttccctga

SEQ ID NO: 44652 - DNA, 663 bp, Manihot esculenta
  Intron number 1 from transcript cassava4.1_020222m (locus cassava4.1_020222m.g) derived from phytozome v7.0 (chr-ID scaffold03581; pos 788940 to 789602)
cggtggtcgtcgccaacttaatcttcgttaaggatgtaaagttctcttctcttttccttcgatttccaaaccctagattttatatttgagttttggtatcgggggaatcgaaggatgtattttcatttaagatttcgattgaaattattcattggaatgatttgcattcggttttattcgtcattcttatatctaaatcgtaggagacatctaaaccttttggctattcgatcgtgtctctgatcgtaatcgtaaaaattagatttgtttaacttagttgtgaattaagaataacactttttgaatgattgtgggagctatcattctttgttaaaataaagagcgtcgctctctgtttaacttctgttcaaaaaatattaaatggaaaaacctgttctgtcattctttagatgttgttaattattagctaggtagttgagtttctttgctgcaatgaaagcgccagtagagccagtaagcaacgtgcacacctgctacacattttttacttgaactaatttctttagctggattatttcataaactgctagttattcaaaccaaagctttttatgcagggcgtaaccatacacatgctaacacattgcgatatatttgaaatttgcaggacccatttcttaaaccaaagaaaaagaaccaaga

SEQ ID NO: 44653 - DNA, 840 bp, Manihot esculenta
  Intron number 1 from transcript cassava4.1_008348m (locus cassava4.1_008348m.g) derived from phytozome v7.0 (chr-ID scaffold05865; pos 193123 to 193962 reverse strand)
tttgtagctctcgctccttactccaatctaaactggttcgatcccttctctctctctctctctctctattgacccttatttagttttgtccaacagtggtcaacgtttcaaattcttgagggtttttcagtcttgcagtgatgcaagagctgattttgtgttagctggatgttcaatttttgttgaatgagtttaattttgtggttttctttgaatcggtctattttctttttttaatgccttttcttaccgagtggttttgatattaatctgtttggttgatgtgaaaaaaaaaaaaaggaaactcaatcgccaaggcaattgcttattccctttccacaaaaataaagaaagtttagatttctgcttttttccttttcaaaattttctgctaaactggtgattatccccttcaattttctcagtggccaaacgtgggtttagttcctttgctgatacccgactgaaggttttgcccttctatggttttgatttctctattgtgagatagaactgaaattatctgtcttcttctgaatttacactgtcaattttggcaatttcctcgtcatttccgtcaaggacgggtcttgggtcttgggtcttttgtctttttaattttggtttctggtgcaatcgagggggaagatttatggtaatgggttctgcttattttctcattcttttcttgaatttagctgggccaagtaagtttcttggtcttcttgagtaatgaatctctgcttctgtatctgcattctgcaacgtaagttcatgtctttgaagggaaaatgaagctgttattatgctgatgcctttttattttgtttgttaaacaga

SEQ ID NO: 44654 - DNA, 671 bp, Manihot esculenta
  Intron number 2 from transcript cassava4.1_020208m (locus cassava4.1_020222m.g) derived from phytozome v7.0 (chr-ID scaffold03581; pos 789656 to 790326)
tgttgtaagcttttcaggtggtttgtgtttgttgattatttttctagcgaaacaaatgtttaagctgcattttggtacaaggctcttcttagttcaataaagtggagttcatgatcaagtttagtaatttctcttcattatgttcaccaaattgctgttgttaaatcttgattgagctaccatgagagcaagaaaaagcaaaattcagctgtttttccttgttcagtaatgataatttttggggtagattgccgagtaggaatactatgaatttctgcgtcgtgttagcgtatatccacttttaattcatcaagaatggttattaataattgatatggtaaattttattctcttaaaaagaaaaatcttagtatcttctgggtatatgattcactggtaaacgttattattattattatgattgcctttcaatcctgagaaagactccaaccccccttttcataggctggatgtagctatttccactactccatgataagcttgcgtttgaattaaccttcactgcgacaggtgatgagttgtgactacggttaggtgtgaaaaaatatctttcatttgaccatcaatgcatgtgatttacataaagttaacacgtaatttttctgtatgtttcaggggaaaataatctaaggagtaatttttcctgaaga

SEQ ID NO: 44655 - DNA, 759 bp, Manihot esculenta
  Intron number 1 from transcript cassava4.1_010375m (locus cassava4.1_010375m.g) derived from phytozome v7.0 (chr-ID scaffold06407; pos 265337 to 266095 reverse strand)
tctaagaggtgatattcctttcgttttatggtgtatttttgtgttttggttgcatttcttcgtgagattttagttttttttaagattttttgtttgttatttgatcatgaccataatgattattgtggctttttgagtcttccatgagagatgattgtgtaattaggagttcaatgggttgtaggtaaaatagaatagagtttttgaatttgttggttgtttggttttgaatgggtaaaatttgtatttttggttttgaaaattgaagtagatttccttcttcttctttttttgtcgagaaaaagaaaaacaatattacctaaattgtcttctttgttttaacaagaaaattgggggttcttttttcttcctctctttgcttgcaagttctttttcctctgtatatgcttttactcgtaacaaatttttattgatgtggaatgttaacttcaataaaggaaacttcttgaatctcaccaagaagaaaataaaggaacttattgttcattgttgatattggagatgctttgtgcatttatgcatgaattaatttgagtttaatttgaagggacgagaattctccttgtcattggggaatggaggtggggtggggtgggctagagtgtaacgatcctccattgatgaaggatgattattatcatattatgtgggtcctcttgttgtttttcttcatctttctttttttaaataattttgttttgttccctttttccagggtactttgcaagttttttgctc

SEQ ID NO: 44656 - DNA, 920 bp, Manihot esculenta
  Intron number 5 from transcript cassava4.1_005211m (locus cassava4.1_005211m.g) derived from phytozome v7.0 (chr-ID scaffold05676; pos 69917 to 70836 reverse strand)
tcaccatatccatttctttttccatccggttacaggtagatgtgttggtgtggagatttgctttggcttctctaaccattgtctaactgccagatgatatacttagagtccaacaaaatttcatgaggacataatttcttctacctcttattgaactctttcaaaagaggcaagatcaaattttctgcacatgatgctgggaagctttgtataatatttgagcaggcaaaaccagtttcattcatatgcaaaattttttccttgtgtctctgggtaggggtggtcatttagtgtctcgaattttggtttttctttacaaatgttataatttcaggggacgcattattcttttggaaagacactagtaacagtgatatgtgtctggaagctgcaaagagaaataacttgaattgcagtggcaattgtccttttggagtgtgtttggcatcattgtgctagagaaactaagctagatttgtgacatgacaattttaaattaagcgatctaagtgtaagacttgaccatgtatcatatcaacagcaaattgaaaaataaagagatgcatgctgtgaactgaggttccagttgcaaatgtataatctcaagtaacctgattgaatttcctttccgaattgtcaaaggaagcttcagtgaagtgaccatattggtactaagacatgacccaggcagcagagatccttgccttctccagtaaggcaaggagacctaagagtggagatggttgtctagactggaaagtaataatactgcagaattggatgttgagcgcattttctttcatctttcaattataatgctttgtgcattttgtcttttctgccatgcacgtcacattttctatctgatatttgacccagttgttgaaaatgaattcttcctaggatttgcgctgggtgca

SEQ ID NO: 44657 - DNA, 253 bp, Manihot esculenta
  Intron number 4 from transcript cassava4.1_005211m (locus cassava4.1_005211m.g) derived from phytozome v7.0 (chr-ID scaffold05676; pos 71079 to 71331 reverse strand)
ctcagaagcagatctgaaaggaaagaaggttattggtaagttgcatttgtgtttattaatctcctgattgtttgtgtcaaatctttcaggttatcataaaattctgttttaggcttttctaggtcaacatttgcttgtatttgattaggatagggtaagaagaaatgttttccttattgtgttgctatcgtgctttctagtttaatgatgaataagaatgtgtttaaacgtgtgtttaaagcagaggaagaag

SEQ ID NO: 44658 - DNA, 842 bp, Manihot esculenta
  Intron number 2 from transcript cassava4.1_005211m (locus cassava4.1_005211m.g) derived from phytozome v7.0 (chr-ID scaffold05676; pos 71695 to 72536 reverse strand)
ttctattgtttctgcaaattcttgatttgtttcaggtgaggttctagctgacactcgattcttgtatttctaaaattcaaaaacaaccgtttatataacttcaatatcttcttaagttgaaacttgtaagatattagtttctttattgatgggatttatggggcttgttctggaatatgtgtacaggtttaggcgtctggtttttgcatcatatatgaagtttttaggtattaaagcattttagctgatttctacttatgttgggtgattcaggatcatctctttattggcttactaggattttctgattgattgaagaagagaaatgtatttgtctttattgggttaagatgccttttgtgttattcatcagttgttctcttctcatatgcttgtaatttttaattatgattcctcttttaggttgactctaggcatgtctaatttaatttactgcctccaaatcttgaagttgtttgccatttgttccttgggcataccattgctttacttgtggtgttgattagcattatattgtgtcctacctctacttccatctcttggttataaatccatcacaggccttttgtttacctcttttgtgttgttgaatcatttaaatagaaaccccttattttgtctcattttcttgatgcattttttgaacttactgtgccattacacgctacagagaatcaaagaagttttctattgcaagtcataatcaaataagtcattaacttaaattcctactgtgtttcctttacttttccatcctgaattactttgacataatttgattctcagaccaaagtttgccaggctgctattgaaaaatattt

SEQ ID NO: 44659 - DNA, 236 bp, Manihot esculenta
  Intron number 1 from transcript cassava4.1_023718m (locus cassava4.1_023718m.g) derived from phytozome v7.0 (chr-ID scaffold03070; pos 61264 to 61499)
acaatccaaggttttttttcttttcagtttttcttttgtttaaatttttcggtatatgagttttagttattcttactaattttattttgagttttaaagatattatattctaaaatttaaatttaatactactaattaaaagagatgagacccgtactattttatttatgataatttatttatcgatgattatttattaatatggctggactgagcaggggttcacaacgtggaat

SEQ ID NO: 44660 - DNA, 602 bp, Manihot esculenta
  Intron number 1 from transcript cassava4.1_007052m (locus cassava4.1_007052m.g) derived from phytozome v7.0 (chr-ID scaffold09702; pos 322589 to 323190)
actattggccaacgtattttggctaatcctctgaggtaaactcactaatcaatgagagcatgcggccttgcatgtaatgtacatttggtttgatctttcttctagttggatatttttctttttagttctctttgtgttttacccccttcattataattttcaaatatgggaacatgcatatttgccatgtaatacaagtggatggcatgtcagattgtgaaaaacataacttgctcagacaatcaaatttcctttgtccaatgaatatcaagttattcccaatttgaaattaagcattacggatacggtgtcaagtttcttttccacacacatattctgctaattaaagctgaagaaacagagtaaaacaaattcagtgcactaatttattcagctacctgcaattattgtttttggggtcaggatacttggctgttttcaactgtcatctgtacttggctcccatttgtatccaactgccatatttattattgtttgtacatatattgtactgcagattcatacagttgacttgctttttgctcttattgtacaagaatctactaaatattttgtaaaactttacagggtgagattccact

SEQ ID NO: 44661 - DNA, 1009 bp, Manihot esculenta
  Intron number 1 from transcript cassava4.1_009144m (locus cassava4.1_009144m.g) derived from phytozome v7.0 (chr-ID scaffold12525; pos 161678 to 162686)
gtgataaggctgttattatacagagaactcaaactgtatgtatgcaaatagtttacatacatctcagacatttatatctgattatagattgttaattggaatttgaatcgtgcctatagatatttctctttcttcctctaatatgttactgaaaacaaatgtttgttgtatactcttttgtttttttttttgtggatacaactattaatcatagataggcagatttccttgaggaaaattttgagaatatatccaataaaattttgctgtgagcaataacttcttgaagaaagaatttttagcattggtagaacagagtattgttttaggtttggacttttgagttatgtagcacaacattcaacttgttagtctttggggtttcatatgctttagggttttttagaagatgctcgaaactaaatactttgtagaattttgtgtacagcagctaatatgtgcgtttagatttgattactgatggtaaagcacaacaaaatttgcagccatgaaagcttctaaaacgtcataggtgctgcaactgaggttgttgttgggcaggaagtgccaacttatacgttgtaagaatcattgatggactctttcatttgatgaaacaaattggtttgaagcttaggaagagatcaaagatagatataaagatactagtgcttttcagagcttgcttacaaagtcactataataatgtggccagaaaattaaaattacatagcatattgttttgatgtgttcttaatgaagatgtagaaaagagaaatgaaatatagattacaatgcaccttgagattctaagcctgtcaggatatgcacttgattatcaggggccatgtatgaaaatttttgctttatttagtgcataatttatcttcaaaattgtaaattgaatatgatatttctatggaatacctctagctgcttcgtaattgattgtcaagttgtaaaaagtctgatatggattttgttttatgtgctgtgaagtgcatataca

SEQ ID NO: 44662 - DNA, 852 bp, Manihot esculenta
  Intron number 2 from transcript cassava4.1_009679m (locus cassava4.1_009679m.g) derived from phytozome v7.0 (chr-ID scaffold10156; pos 58758 to 59609)
cataaggtaaataactggcatctattagattatttttaactggatcatctatttatgtttaatttggagcttttggaaatatggatacaacctgtcatgaattttttattttttagtgggattattcttgaactcaaattgtgactggaattatccattcattttgtccacaattttcctgtgctccttttgttggtattacctcttctcacggtcaaattttcataaaatgataaaattattctcgcccaactttttcaatttattaaaattcaaagtacaatcaacaaaatttagagtataactaataacatgtttgattaattttaactttttttcagataaatcattgataatatggctaatttgtgtttaattattatgatttttatgagttcaagtgttaaataggttacgattttagttaaggcgttcaatgagctaatctcaactagtaaaggggtgtaagtatatattgagccttcaaaatttgtcatacattaagagatggtcccaagatcaagtaccaaaaccaagcaactacattttgagcacaactttacctaacaaagttgagttagtttggttgatcagttattgaatagcccaactttagtcttcattagagatgattcagataaggaaactttcgaggcacaatatcagatgtatttcataaatattgttgcaaatgtgttaatataataatagctctgattatagagatatcagtttaggcttcttcatagaattatggtcttgtaacaaacttcaacaaaattatgggcttttcttcttgagttaagttgtttgaacttattctgaacttatattgaccattttctaggaaga

SEQ ID NO: 44663 - DNA, 764 bp, Manihot esculenta
  Intron number 2 from transcript cassava4.1_026700m (locus cassava4.1_026700m.g) derived from phytozome v7.0 (chr-ID scaffold00321; pos 90052 to 90815 reverse strand)
tccaaagcagggataatcccggttcaatacagaaggtaaaactttaaattttctacaactgtttaagctttctgttgaaacaaatatacacctgcactcgttgatagataaggagaaagagaatagtcacaaaaatttaatatggttcggtggtaaggtacgttaatggagaagactgagataaagttccattataaaaaatatataatataggataggaaatatacaattatttatactctgtaactttcaggtaaggtcaaattcgacccatgagaaaatatatccaaagttcaagcacataattaactatttcatcatttattattttgtcaagcctctttctttaatcagttctccaatcagttaattgtattcacacagattgatttttgttaaaattatagtgattttaatttgaattttgtggctacggtctgggtatgtacacatttattcttatgtgaaaaaaaaaaacaagccgaggggagagccggtgtgcacacgtgtgtggtatgatctttgttgaggtccttccgattgggtacttcacaggctggtccttcgagatctacattggttatagataagtgtgtatgaacttatatatcacaaataaaccttgtaaaagtatcataattttgacttgaattcaatagttgcaatctgtgcgtatatgcacgtctatttaaaagaactgtgttcacattctgtctgcttttgttgcagggttgcttgcaggaaaattggaggaataaggttca

SEQ ID NO: 44664 - DNA, 961 bp, Manihot esculenta
  Intron number 1 from transcript cassava4.1_018507m (locus cassava4.1_018507m.g) derived from phytozome v7.0 (chr-ID scaffold09657; pos 148492 to 149452 reverse strand)
agcagctcgagaggggacagcagagcaataaactggtatttaatctccatcgttgttatatttttttctgtatttttgtgtgtaatttttgaaattctgggatattggaaatccatggtcttgttaagctctgattattgggttaagcttaggtttttgggatatatatatatatatatgtatatgaaatggtctgttgaggctgttcgagatggggttctgctagctttacaagctagatctatatgagttatggcttccctcatttttcatttttaaaaaaattttctcaattaaaacaatggggctggctcttttcttttttccctttcatccgaggtgaggatggggttcctgatgtcctgctagttgttgctatttgggttgcactgaattgtctataatcttcggtttcatatgtttaagcattggtttttgctcttgcagttttttgaatgttggggcttttatacacggtgttttataagtgtcatgaatgatgtatccttctgaaggaccaagatacgactcttattgactagaattgagtaccctgtttgctgcaagtttcatttggttatccagagttgttattgggccagaatgggctcctgagatcttgatgtatggcttggaagcttgcacaaaaatttttcattgggtggggaacaaaaaaattccaacgttgatagagattgatgcgataatgtctctaacccattagaaatcttggttcttgtggtcaaatattgcaacaagtcacgaagtcttcgttgttcttagtctttacaatttattctgtactgcgttaggcatgttttatattggcagggtggatattttcctcatcttcccccatatgccgggtctgatgtgttgttgctggtggattttagtactcttactaataagccttctgaaaacagattgtggtggattttactgcttcctggtgtgggcc

SEQ ID NO: 44665 - DNA, 886 bp, Manihot esculenta
  Intron number 1 from transcript cassava4.1_010071m (locus cassava4.1_010091m.g) derived from phytozome v7.0 (chr-ID scaffold07902; pos 138895 to 139780 reverse strand)
actccatttcagagtgttagagagagaaagctcaggtatttttgctgtgcctctaatttcggtttcgatctcgcttttgttcttcatttttgccttttttttctttttaaatttggccctctttctctttacctttcgtttcatttctattctttcattctcactgtcttttctttcgattcttcctcctctttctttatttttttttcaatcttttagttttccagtttctttctgtaatttaaggttcttttccttgatttctttgtgatcttgaatttgtttaatggctgacgattatcatcagcgtaatcatggggtgaggattgatgggtttctcttttttcctatgtaatgtgtaattggatcctttaattgcagcaattggattgatgggtctctctctcttctttttcactgtttccgtatgcatgtgtagctacagtggtgaatataggtgattaggttgactctaatttcgtcaatttgatggggaattttattcaacggtaaaaggaaagaaaaaaaaattgtaactactaatgtgtttctgcatttcatttaattatgagttttcctattgtgtgaatttttcttcttgtctcatttaatcaagcaagctgaacatgatttttcatattgttgtttgataatcgctgcatttctaagaaaagattcctttatcatttccaggtattcaactgattggattttttgtgtttaccctggatcatatctgttttttaatttagatgatgggatgtgatgattaaaaatatagtggaatataatttgttattgctgaattatctttttggtttgaggtttgattcttaggttttgatgttgaatttaccttgaatatttaatgggcctatgtaggcac

SEQ ID NO: 44666 - DNA, 725 bp, Manihot esculenta
  Intron number 2 from transcript cassava4.1_014768m (locus cassava4.1_014768m.g) derived from phytozome v7.0 (chr-ID scaffold06407; pos 345690 to 346414)
atcaggttcaggtaccaaaatttcccattttagttcgagttcgaataactgctaaagtaaatttttctgaaagaccatccaaaatctccaataattttgcacatgcttttgtcaattctttggttaactagttagatccatgtcccagatgaatatttattcaatttgtccaatggatacatacatacgccttttttacgtagagagagtacattctgttacttgtacatatatacgcctttttcagagagactaatgggcataattagatgagaaaagaaaagaaaaacatatatttgtacataacacttacaaatgatatttaagggtaagttttgaactgacaattctgtttgccattttcttttcaaatgaaccaaaagattttccatatcatatgtggacatttcaccaaccactaattcaaaagcttaagctgttaccaggatgcttatttaactatattaatgagatagcatcatttagaagtaatctatatgctctgcaaggctcacccatatcccatggtggccttcttttggtccattatttatgaatgcaactatgccatctatgaatattagcataattctttcatatgcttaggtgtctcaacaatcttttgtgcatgctgtgcttatgcatacttgtattactagattacagggaaattgatatttgcttgccctctctatgacctttttcatctctttctcttcaggaga

SEQ ID NO: 44667 - DNA, 680 bp, Manihot esculenta
  Intron number 3 from transcript cassava4.1_023389m (locus cassava4.1_023389m.g) derived from phytozome v7.0 (chr-ID scaffold02986; pos 48444 to 49123)
taatatttacaagatcccaacaccattatctagatgtaagttgatttttgcatagttgcttttagaaatgttcttgaattgtattttggtgaaaatgtatacagtacaaactcaaggtagcttcatagttgggatttctttctttgattcactgtctttttaaatcagtcggcagtttccaaattatcatcaaaaggagagagaaataaaaggaagattacaaatgtgtatgatatgcttttgttaactacaagtctctaatcactcgtgtattagagcaaccttgctaatcactcgtgttatatctctttatctcttcacaatctttaatctttttatgttgtgtacttaaaaattagtctgttattcaagtttcttcaagaagcttgaagccgtaatccatttcaataatgagaaccaaatttcaatagttgcttttcaagggtagttactcttgttaaacattcaaaaagaatctgtaactattcacaagataactgataagtttttcaatggtgcagattcttcctctttgttcttttgctattatctactggtttttcctggaaaagtgcaataaatttgtggtagatgtagagcctatcagtctttaattatttactgaggtggagtgaggaaatgcagatagaaggcccaagctgattgctggatcatctgaa

SEQ ID NO: 44668 - DNA, 982 bp, Manihot esculenta
  Intron number 1 from transcript cassava4.1_017778m (locus cassava4.1_017778m.g) derived from phytozome v7.0 (chr-ID scaffold03581; pos 1539410 to 1540391 reverse strand)
gtcggattttggacctttcgaccagtgtactccaggttcgtccgttcttctctagggtttcgaattttgttttgcttcgagagatggaaatgaaattttttgaagctttgaggtttcatgatgttttggtttctaacattggtggttggtacatttaattaggagcataacaatttggttttcgttgccaatgtagaaagaagaaatggaattgcattactcctttgagggtgtaaaatagggttagaagcgttaaaggcttcttcgttgtagtttgttttctgtggaactaaagacatcccttgcgactgatttgtttctttctcaatattccaatatgggcgggagttattaatttattagtagaatttattagcaaaataatagttgattgtgctattaatatatagttatgaatattcaattattgatttgggcatgcaatgtgagtgtttcccttgcccggaactacttttaaagatcaaaacaatgtaatgtggttcttttatgtctagttttctgctgcatagcttaaggaagaattttttagaagtatgttgtagcaacacaatagcgataggaaatacatatctgtaatgtgcttatgacagctgctttgcacctgtaaccattggtgacattgataaacacactgtaaaaactttgttgtatacttgcattaggctggttatgccaatgatataggaatggaatagagatgaggtttatgtttctatactgatgtccatggaactgaaggtagtgacaaggttgatgacatttgattaagataatggagaaaactatatgaaaagataaaaacttagttgcttattgtttctgtaaaacacttttcctctatgtggccttttgaagtactatcattcatgacctagtgtggtgattctagttttaatggaattctttctatgtccttattacagttttgaccattttttttttggcacaggtttaggagaac

SEQ ID NO: 44669 - DNA, 978 bp, Manihot esculenta
  Intron number 1 from transcript cassava4.1_012832m (locus cassava4.1_012832m.g) derived from phytozome v7.0 (chr-ID scaffold11581; pos 955733 to 956710)
tgttggtattggcgttggccgacccgtaaatcttggtatctcccctttttctctttgtatatgtgcaattttttctcgattcctctctttgatttgctccctcagaattcacatatgtgggaatatgaaattttggggattgtttaaacccaaggatggtgaaacgcatttgaaatctctggctataagctcatgtaaacagtcatttgatgtgcttggtgtttttcattcattgtcttcagtaacttgccatgtgcttagttgccaagacaatttgggaaattgaaagaaagttcgtgacttgattgtttggcttaagcgggaagtgatgcttggcattgagtgtcaaattaactaatatgattgcttttagttctgcagtgataatattagttttttgtgtttgttctttgtttacttcctattaacatgcagttgaaatgtttatattgtttcgaagaggttggttaattagtctttgtatttttttattccgtaccataccaggaaaagagaaatgattacaacacattaatcaattggaaggttttctttatgtggaattttaatttgaaattgattgcacgtaagtatgacgtgctatttgcacctgtggaggatgatatagtctacaatcccttaaaatctgcataacaaaattcaaagaacttgtttggttggtcatcctgtatactttgactagaaagaattctaggtgacctgttatcttgcaatcacactctgcaagtatgagatatttacataataagcttctcttatggtacttcaatgtcaatgtggttaggttctgtaacactatcttaattcaggtacatgtatgtaactggcttgatggagagttattttaatgctaaatcctcaaaactagctacatttggaatcaatatttccctctcttcattttatgaggtttttacatgcaagtgttgactcaatataaatgtaggtgcactacca

SEQ ID NO: 44670 - DNA, 793 bp, Manihot esculenta
  Intron number 1 from transcript cassava4.1_003032m (locus cassava4.1_003032m.g) derived from phytozome v7.0 (chr-ID scaffold12455; pos 245533 to 246325 reverse strand)
tggtgctacccatatcttcttcaaccacttgtgttagtctattatattcatctctacttcctttgggcctttttttaatctgctgtttatcttcttgcatgattgtgtcagaagctatttaattattatttcttgtatgggtttgtggatcatgtggattgaccttcttaatataatattttagatcctctgaatttccttttctttttcttttttgggttttgtttatttttatttttctttttctcttttcttgcagtgctttttgcctttgaaatacttgaataattgccccagttaagcagcaagtttatttttgatggattggattacttgacttcctattgttcttttctcattagctgattgatgcttcagttttatgcgatgaatttgtgatttgagattgagatcgaaactgttttatgaaaataatacttttttagtattattgaaaatataatttgataaatttattttgctcttttgaaattattgtaattaaacatattaaattaaagtcttaagatgacacattttttaagcaaaaacactatttgattttgatgagtttctatttgtgaatattgtcacattatagtgcagcttaagagaaggggaatctgtttaatctagttttattgaaatttttttttgttcttcagtggattcttaaaattccaactatatatagtttaggatcagacaataagaaagtcttgagtttcaacaatgagcagcaatttactgtgtttcagaccccttgtcactggttagggatcaccgggcaaag

SEQ ID NO: 44671 - DNA, 778 bp, Manihot esculenta
  Intron number 1 from transcript cassava4.1_002737m (locus cassava4.1_002737m.g) derived from phytozome v7.0 (chr-ID scaffold05875; pos 82348 to 83125)
aagtgagtgtttcgacattaaatctggatttaacaataattcacttattttagaagcacccatagtcaattaattccatctctttccttgaaaataacggaaaaattatcgccagtggagctttttggggttattttggagcatagatatgttgctttgatagaaattgataatagctcagctgacactgttagtagtacaacaccttttttcattagtgatagtttgatgctgtgtataggagaattaagtctatatgcaaagttttcacaattttattcatcgtcttgaaattaggtaatttcaggtcttgcttagactagtaaaaaaatagtaatataggaattaattaacataatacatcttaaattgattttctgttgtttttcttaatgcttcctctggatggaattaaacactgttggacaatatgacactgctgcctatatgggtggatgaattgctggataatacctacaacatactttatatgcaattgggcattctggatttggctgatcccttgtggattttgaatttcttctctaatcatgtttaccttgaaagataaaccgatattcactaatgcttttcttgattgattgtatcttgttactagttacattttgttttccccattttagttaattctgctatgtgatccattgtgcaggcaagttatttgcatctggaatggtattcttgcattttagaaagttgcttgcctactatcaatgctgacactacttttacttgtatgatttttgaagattccgga

SEQ ID NO: 44672 - DNA, 601 bp, Manihot esculenta
  Intron number 1 from transcript cassava4.1_005182m (locus cassava4.1_005182m.g) derived from phytozome v7.0 (chr-ID scaffold04251; pos 306750 to 307350 reverse strand)
gagtacgagaggatacacaaagttcaggtaatgtttcgtttttgtcctttgaagagattttgaagagcacatccagagacccttgtcctgtttttgtttgtccgttgatgtttttgcaacttccaatgtaatgggttctctgttttgtttcttttcttttcctggtggctcatggagtttttctttgaagtgatttagtgtgagccaataattcagttattttctcctgattccgtgatgatctttgttttgtatttttgcttctttttcttttttcttaattgtaattttaattccggagttgtcatctattacttcaagttggagactttttggatttttaatgtaaatgtattcaaaggtctaattttaacggctatttctctcgatttttctattcttgaatgggtcaatttgagaaatttcttgtataaatttgcaatgaaaatgttttgtatatcaaggctatgttttttcttcaaatagtttttttatgcgctcagtagatcttgtgcaagcttgaaaagcttgtcgctgtttttcctgaaaacttgttgtttatcaaatgcagagtgggataatatctccaactaagctgagg

SEQ ID NO: 44673 - DNA, 770 bp, Manihot esculenta
  Intron number 1 from transcript cassava4.1_010728m (locus cassava4.1_010728m.g) derived from phytozome v7.0 (chr-ID scaffold06582; pos 288889 to 289658 reverse strand)
gcaagtttagagaacaagtagctaagcaacagcaagtaaattctttttgcctacccttttcttttcactctctggttttcattcctttttgcttgatttgtgcttggttcctggaaaaatgcgaggaatgggagaggatttagtggaaatttccgggcatgctatagtttttgctgttttcggtttttcattaaagaatgagaagtaattggattcaactaagaatttttcaaaacatggactgaaaatttaggagtaggtaatttttattttatagccttggacccaacatgatcgcttttcatggaatcgaaacagagaatgagatgatttccattagaagtgctaatatcttgtcatttggtctagtctgggtattttggtgatattaactacaggatccatttctagcggtctgtatatatttctgtctctgatggaattggaaattttctgatttgagcttatcggtgttattcatttcgtgaattagtcttgattcctagttacttggattcaacatagagcagacatactttgcataacatcatgtataagcttaatctattgcatttatattctaatttttaagtatgttttggaagtgttaaatgaattagtaaacgtggtgcggtgcactgttttcttacttttttcgtactaatattatataaaattaatatatttttactgaagaaagtaccattggctttatttaattcaataatttggatttcaggctgttataaaacagctcagtgggactggtt

SEQ ID NO: 44674 - DNA, 558 bp, Manihot esculenta
  Intron number 1 from transcript cassava4.1_004839m (locus cassava4.1_004839m.g) derived from phytozome v7.0 (chr-ID scaffold12525; pos 423419 to 423976 reverse strand)
catctcgtataatcaatcactcgaaaaaggtaatataagagatcactgcattttgtacctttttctacttcaatttctttattttttaaggtgcttctcttgttttgattgcttcgttagatgtttcctttcactttttagcttttggtgtggacttagatcctcttttgaggcctattagaataatgggtcactggtaattgccttcttttagctgttttcagtttcatttcaccatatatgagtaaacaacttacaacaatgatgtatgtttgtgtagattcattttctgaatgattatgttttaattgtgttgtcagcattagatgtgtatttggccatcggaagtctcagtggaagacttgttgtgtcattcgtattagtgggtcatttcgagaatactgcatccatctcaatattcagttgtaatccgttgatttttttaatgggtattataattcaagaacgaagttgatgatgtttaattaatggcagactacattgctcttgttttaaattttgattttgtctgactttcgcgcttttcacagttaagaa

SEQ ID NO: 44675 - DNA, 918 bp, Manihot esculenta
  Intron number 3 from transcript cassava4.1_008836m (locus cassava4.1_008836m.g) derived from phytozome v7.0 (chr-ID scaffold04251; pos 595841 to 596758 reverse strand)
gagtttcatctaacgggattggtgcaaaaccgtatgtttatttgattcattcctttgagtgattggcttatatatatatttcacaaaaatttcatacaaccgtagttaagcttcactataatttgttgcaaattcttaatggccaatgcatagttattccccttgtattagttgggagcaactctattgatacctgaattaaaatcaggagctattgaacccttgtgcatataaaaatgataatagttaaacacaaaatactatgctctaaatttgatgactataaattaaattttgttgaattttcgtgacatgacatttattctcgttctattaaggcaacttggttattttatgaaattcaataaaatctagagtacaatcagcaataaatgagactattttttacttttttgacaaggcatcattgacatgattatttgtgtttagttattatactttttataagtttaggtgttcaatgagttacaattttagttcaagtattcaatggtttaatttcaaatattacaggagtgtaagaatgcatttaaccaatttgtaatgattctgaaatagtgatgttaagtgcttctttcttttcgctttccaatttttattggtaaagggagatagagatacaactagatgagtatgcataatcttatactttgatggtaggaccactttttattatttgtctgtttacaaattcagtgctggatctaaacggataggacatgttgttttcatctggagcattctcttaaaaatactgagaacagtaactccatgcttactgagaatatcaaacttccttttgtgaaagaaccattacccttttgcctcgaaaatgtcctaatgtttgtccttacttttccaggcagaagcctttgcttcctacttttgattctgctg

SEQ ID NO: 44676 - DNA, 814 bp, Manihot esculenta
  Intron number 1 from transcript cassava4.1_001631m (locus cassava4.1_001631m.g) derived from phytozome v7.0 (chr-ID scaffold04137; pos 46837 to 47650 reverse strand)
ctttgattgcttctctcctcaacctctaccgtttggtacgatctctatattcttctcttcctttatcattaatcctcagatctaaatccattcctttttccgctgttcttcgcgataactgagccgaatctagggtttatcttatatagagccattggaaaatagtagaattttcggttgcatgttttcattagtcctctgtaagatctggcggaccacttacttcttcgtccgttcataatttggggcgatttgtagcttagtgtttttcattataaggtgattatatagtttgtatgaatttaggtctgccccaaatatgttattgatggatttcgtttaggttttgcttgttatcggctttttttattgttgcgtgaatttttttttttttaaaaatgtgttatcgcttatgttaaaatttgatgataagtaatcatttttcacttttgtttctcctcatcctggttggtttgtcttctaggtgaagttgaaacaagtgcttcgatgttgtaacttgaattttttcttcttcctgacaattttacttgattgagtttgttagtctactagttgttagttgtgtttttgaaattcatgctttttctatttagtatctcgtgtataatcatgtttactttcttattggtttaaataacttagtttgtttagttttatgtttgattattgtagatatgcaattactggttcaatataccggccttgttactagtttcctacaaattgatatatgcatattgtttttgtattgtcattttcttgttgcaggcttgtgttggtgggttcctgtgca

SEQ ID NO: 44677 - DNA, 725 bp, Manihot esculenta
  Intron number 1 from transcript cassava4.1_014443m (locus cassava4.1_014443m.g) derived from phytozome v7.0 (chr-ID scaffold03115; pos 131636 to 132360 reverse strand)
ttccttctggctgggaaaagcgcctagacttgaaggtattgtccttttctttaatggctagatgcttgtttccccagacaataataagaagaaacgaagttttctcgtgtatattattttttaaatttgaaatattttcttcctgaaattttaaggtaacgatttctgactttttctctggcgttctatttctcttattagtttattcattcaattttatcaagaattcgattctgtgcattgtttaatcctatttgtggttgctgagaaactggagaaagaaaatcaaacaccagaatccgttgattctcattctattgggtttggggacagctcttggtattcatggaacgaaagctaagtaggcagaggtttccgaagtccactacacgtttctttcaattcacaataactaaattactttcgaagcagccaaacagtttctgatttttatttgaaggagctggttattttcggggaaaaatcagtttcaaatctgtagattggcaatattaatagtaattaatagcaggaggattggcatttgccttcatttaataatgtttcttcaatgctctgaagctagaaattgccgtctactaattcattacttttattaatcattatctaaatttgttcatatctgcagtttttgataacttgaaacgatcattatccttattttatatataatgattgcagtcagggaaggtttatttacaacg

SEQ ID NO: 44678 - DNA, 569 bp, Manihot esculenta
  Intron number 4 from transcript cassava4.1_014967m (locus cassava4.1_014967m.g) derived from phytozome v7.0 (chr-ID scaffold08100; pos 440390 to 440958)
cacaatttcagaggagaactatcagaaacgcagtggtgagttttgaaaaacaatatatttctttgaatagcagtgggtacattcttctcatatttttgatgcaatacaactgtggctggtgaagattttatattagacatgtagtgacaaaatgttttaagtgcaatagactataatgattgatttagtaattacaaatcatatggcttaggtgggctagattttgcttttcttctctgtttttccttttcctacactgactgggctattccagctatgtctctctatactcgggttgatttttaattctctttttcatgcttggcacttttatcttgactctatgctacatcttcttctttacattcatcctgtgaatttgatattcgaaaacttagcaaatgtacttcatcataaaatgctccaatagtccaattccttttctgttcaaataaaagtactatatatagttgtcagtggagaccacttttcatgtttaacttgctagtaaatttattagtttgtgtttatcaggcactttcagaaaatttaaagaaaaattggtctca

SEQ ID NO: 44679 - DNA, 860 bp, Manihot esculenta
  Intron number 2 from transcript cassava4.1_009397m (locus cassava4.1_009397m.g) derived from phytozome v7.0 (chr-ID scaffold02538; pos 300330 to 301189)
tccaagaaagagagcctcacgccacagaggaaaaggtttctagtgctagttttaatatcgcggaagctgtttatgatttatgcatggtctgacatgatatgcattcattgattttcattgaagttgttttttgtttgtttttattatcagaaattgatgttacccgaagctatttttgtttagttttgatcacattatggtgtctttagtattagctagttactcaatgtttcatgttttccttggcttttttggatgtgaaaatagggtctttagaaaattataacatttttaaatatatggtaacgttttacgtttcattttttcattatacaaatagattctaacatttttaaaatagaaaactattttatattattaacaattgaagtcactttgcatgtcttcctttattttctttagaaaattggaactacagtttttccagaaaatggaaaacaaaaaaactgttttctgtaagtaaacaggcctttaatatttgaataataacctcttcctgcatgagttttggtcagatggcctagcctggatagtctatttattatttgaaatgaattctttacacttagtaacacttctaaatttaaattcaagattctttttcataaagaatgttatctacaactatggtacttgcattgttttattatttgcatagacctgtaaaagtgccttgaattaaattgtgtcaatatttgttaatattagctgagatattgatttcttactctgttgtgtgttgtttatagtgactttatttttgcaattcatgaattgataagtgttggttgatcttttattttcttttgtgatgtttacagtgaaggcatttcccaaag

SEQ ID NO: 44680 - DNA, 685 bp, Manihot esculenta
  Intron number 1 from transcript cassava4.1_030178m (locus cassava4.1_030178m.g) derived from phytozome v7.0 (chr-ID scaffold03404; pos 64483 to 65167)
tcttcttcaacactttcaacatcctggaagaagaggtacaaacgtacaactcaaaaataatatcatataatttggtttgatagaattttcgtttcggtttgaaactgaaccgacttgttacataccctacaaataatatcatataatttttttttaccattgattttgattgggtcgaacacgctactttttaaccctcaagataatccaataccaatgaattaaaacagtgtagaaattttttagatagatccagtctattataaactcaaaatacatgaatgtaggtttcatttgaatttttcacggagaaattcacattcatctatatagatcgaattcaggtaagtttgtaagttttttttttaaaataacgtgtgaaattagataaaatataaaatattgaccaattcagttcactattgaattgaaccaattaaaactgaaataaccgaattctttatatttgaaagggatcgaaccgaaatattgctaatccctaacactatctaatgttttcagtcacccacatttgttttcataatttaagaaatcacacatttatatgagcgtaaagatgtactaaaatttcaggtgcacccgataattctgtgagatttcaataggtgaatttaaatcacttcttctgtggcactgaaaattttttgctgatttctgtcaggca

SEQ ID NO: 44681 - DNA, 803 bp, Manihot esculenta
  Intron number 1 from transcript cassava4.1_010092m (locus cassava4.1_008840m.g) derived from phytozome v7.0 (chr-ID scaffold05694; pos 337038 to 337840)
gcaccataccagagtgttagagagagaaagctcaggtattttggctattcctgtaatttcggttctgatcttcgtttttgctttctttctctttttctttttctttttctgtttttaaatttgggtttctttcgctctttacctttcatttcatttctattctttcattgtcgtctcttttgttgcttttttctctttccttttttttcgatactttgtttctccagtttttttatcttaaattttgggttctttttcttgatttgtttgtgattttgaatttgtttaatggcggacgactgtcatcagcggaattttggggtgaggattattgggtctctcttattttattcattaaatggataattggatccgttaattggagcattttcattggtgttattaatcatgagtaacggcagagatgaataataggtcattgggttgattctaacttgcgttaactatgggaataattctagttatgttgtggatttgattgtcggagagtcctgttatttgatcaaacaagctgaatatgattttacgttgtgatgcttgctgcatttaaaggaaaagaagttatcatttccaggattttaactaatgggatcatttgtgtttattctctcatgcccattaccagtactacctgtgctatatttaaatgattggatgtgattaaaactcccttggattctacttttgcatatcgctgaattgtctttttgatttggtgatgcaattattagattttttatattgaatttaccttgaatacattgagggtatattgtaggcac

SEQ ID NO: 44682 - DNA, 499 bp, Manihot esculenta
  Intron number 2 from transcript cassava4.1_032793m (locus cassava4.1_032793m.g) derived from phytozome v7.0 (chr-ID scaffold00560; pos 267585 to 268083 reverse strand)
acgaacttcttcaacaagtaaacgtttcttctttgcttgcacttgttcttattaatttctgcaagtacatactagagtatatagtctgcaattgttgttgaaaaattcaaaagtgatgcttttcatgagtctcttctttaatctttactacttaaacactctaatttggtttcaaaactttgtgtttgtttggcttcgctgttgaaactgcatatgaaaattttattttgaaattattaatctgggtgatattaaaaattattgaatatgtcacttatttaagccttccaaatgaatatcttctgtttccctgatttttgtgcttatgaaaaggtgttactcaatgcatgaagtgatctcacatttgtgggctctgggagggattgacatatgcagccttcccacgtatctgtgcttattacagttgaaacactgcctaatttcagctttcctgctattgacaggccaaaacagcaacagaattggctttgggggataa

SEQ ID NO: 44683 - DNA, 612 bp, Manihot esculenta
  Intron number 1 from transcript cassava4.1_028822m (locus cassava4.1_028822m.g) derived from phytozome v7.0 (chr-ID scaffold03436; pos 8333 to 8944)
ctccggccacctcacctagtcgctataaaacagaggttcatcttctcctcattttcttttatcagttatttattaacgtatgcatatatatgattatgactcggctagtgaactcgtgactcagctaactgagttttgagttgttttgaactgtcggcaatatgatgtcttcttgcaattttggccggaatgtcgatcgtaaatgacaaatactttttagggatatagatgtcatttggtaaatttaatggctgtgtgttttatgaatacttatgatcatgagtctgccatgcaaatcttttatttttaaagattgtttggaagaaaaaaataatttcccaagaaaggacaaatcgctttcttgttttttctgctagatcccagcacaaaaatccgacatccctttcagtgaaattgctattttcagttgtatttttcttgaaaatttttgaagaaaaagtcaacaaactcaccaccaattataattgtaaaatactataatattaaaaacaaaaagacacaacaataatggaatcgaattctgttagccattaacgttaatgatgtcctaattaaggtggttgtgctattattttcagggaaaacagagta

SEQ ID NO: 44684 - DNA, 404 bp, Manihot esculenta
  Intron number 1 from transcript cassava4.1_025369m (locus cassava4.1_025369m.g) derived from phytozome v7.0 (chr-ID scaffold03115; pos 70886 to 71289)
aagaatcgggctctgcaactcgggagtctcgactggtaagtaatattagcatggtctcctctttgttttcccctcaaatgatagtgtatacatgttcttttgtttgttttgtcttttgtttttttttttcttttgattcctgggaagtgaaataaaacttcgttgcttttgtcttttgaaactttgtaaatgacagacttcagttcaacggtagatttcttttcgtaaccttttctaggcaactaaagttcctttgtgttcttctaattcttcattctatgcgcgacagttattctgcatattcccttttttcccatgaaacttgatcagtatttcagtattttttaatttttcttcaatcatgtgcagaagctctacaaaaccactctgctacttgcctacca

SEQ ID NO: 44685 - DNA, 753 bp, Manihot esculenta
  Intron number 2 from transcript cassava4.1_016508m (locus cassava4.1_016508m.g) derived from phytozome v7.0 (chr-ID scaffold02022; pos 54956 to 55708 reverse strand)
atcgcaattggattatcttcaacagggcttgccaggtaacttttttttttaaataattccagtcatcgtttttcgtactgataattacaagtttcttactgcattctctagctaggcaaatctgcttcaaggaagactgtgtttatgtattcaactcctgggttggtgacaggaggttaaggtgcaatcagatgttggtagtgaatgcgttttttgttttgggattacaataatgatcttgtatacctttttttctaaatattatcaaaatgataatattcatatacaactacgatatggaatcatttaatttctcttggtaaccaaatgcctttttcatcaggtagttactatgatttgcgattagaactttggggctgttggttgcttgattattattattattattatctcaaagcttgccctcaaggttcctaaggtgtatgcttatgggcattcagaagaactatcaatgttgtatagctcatgcctcatccaatagacataaaaaattatcagggacattttcgcttgtattttattctcaatgctatgtaatatttgagtttgattaccctatattgcttgatatcattacagaagttggattcacttttccaattatgatattatttgtgcatttgtgctttttgtattgttgtttttcattatccaagagggtgcaatgttagaagcactctcttgctcttatgaatcctgaaactaggtattgcgccttttttttttaaggtt

SEQ ID NO: 44686 - DNA, 368 bp, Manihot esculenta
  Intron number 1 from transcript cassava4.1_016508m (locus cassava4.1_016508m.g) derived from phytozome v7.0 (chr-ID scaffold02022; pos 55681 to 56048 reverse strand)
tagttattcccctgtgattctttgtacccaacaaggtttgctttaccttccctgttcgtgtctgatcttgtttcttgttgctttttcctttgaatgtttgatctggatgtctcttcatttgtgtttgggaagacgggttcttcttttctgctattttcttcggatttgcctggggatttcttaaggtcgatattgggttagaattagattttattgtttgtttgtctttggatatttgtgttgactgtatttcgattgatgattgatgttaatagtttctgttgttgtttcttgttcatcatttctgcccctgatgttgttttgatgattcaggtgtgaaatcgcaattggattatcttcaacagggc

SEQ ID NO: 44687 - DNA, 864 bp, Manihot esculenta
  Intron number 1 from transcript cassava4.1_017989m (locus cassava4.1_017989m.g) derived from phytozome v7.0 (chr-ID scaffold03115; pos 303175 to 304038)
cagaggttggccttcctccgattattttgttaaaggtaatttgattgcctttttctattacgatttggaagggtttgtttttttttttttttttttttttttttttaaattgggagtactgtcaaatgctcggattttggatgccttcctcatctagagaaaaattctgtgtgattttggtagttatgaatgtttttggttgttattagctggcttctcctttccgaaagattgattggttgtgttcttcaatgcgtatcgacgtatgtatgtttggggtattctaatatttatttcctacttcccctccttatgcatgtctctaagggggaaaaaaaccgtatactactgagtttttcctggaaaatacgttctttctaaagctcaagagtaggaggatgaggaggtcaggaggagaggtcaaagcgagaacaattattatttagattcatcaattggatgcccaattttactactacgctcccagcttgtgcctctgagagggatactgcgtttctttcctgtattagagattagtttttagtggttcttgaaagtccccaacatagattgcttgctctctcctccgggaggataaatacactagtgtttcccatagcaaaaatcacatattgctgaagccttgaaaataaaagtaggtaggatgagcagatgagggaaaatgatgttatgagtcgcttgaatttataaatgtggttatacatttggaacttccttttacaaactgatgcatgctgcaactatttcccaggggtcctttgaaataatagcttatctggaatacaatgttaattacaccttttcttttcgtcctatgttcttataggttcacttccacattca

SEQ ID NO: 44688 - DNA, 925 bp, Manihot esculenta
  Intron number 1 from transcript cassava4.1_004924m (locus cassava4.1_004924m.g) derived from phytozome v7.0 (chr-ID scaffold10305; pos 428383 to 429307 reverse strand)
tagggatttcaggattttcgtaaccacccagaaaggtaacgtgattgttcttcttttctgcttgatttcttttttgttttttgtgagggcttgttatctgggtattccattttgcttgtgtataagcaggattttcatgtgggtctttcgatttgatgatttttgatttgtgtcaaattttctggatttcgatttctgatagtcttttgtttatttattcatttgattattttttatcttgtggatctagttttcagttgctctatgcgggttgatgttttccgggatgaatctatccttgatttataatgtttaaatttagtattattcaactgttctttgtgcttcaattggcaattttatggtttttttttaataattcagtaatattaatattaggtgttttaatgcctttatcaataggcttgaaattataattgtgccaaatttgtttgcttatagcatccaaaagtaggaagagatttgaagtatgtgtcatgtgaaactagcctaagttcatgtggatttccagttttagggaacagatattagtaaatggtgaaatatgatattcatctattctttttcttatactttctgcaaatttatcgattatgaaatgggtcatgtactctttttggttattttgttgttgctgaacaactaatatgaactaaaatagaagttctgttcagtgataattacattgatgctaaactgaattcttgcttcttctttttcctggtcaactcccctgtagaggggcatgagtgggcttgagttattcaatgtagtttcatatgtaatccaatcttatgcaatgcgctcagttaccatttccgtatttgtttttttcttttgacttattgagctccctttcattgacaaataacaccggcactagtcatctgcttcaacctccttt

SEQ ID NO: 44689 - DNA, 720 bp, Manihot esculenta
  Intron number 1 from transcript cassava4.1_007368m (locus cassava4.1_007368m.g) derived from phytozome v7.0 (chr-ID scaffold02912; pos 67716 to 68435)
gcaacccaagaactgcaacttgcccaggtgtatattctttgcttatttcttattgaagctgtttattggataggaaagcgtgggaaaatgaaacaagaaactaaagattcttttttttttgggttaaagtttatagtcattagacctgagaaataggatcaaggaaggcctatttaatacgttactagccattagcgtttcagtaaggcctgcaatttatgttttgcatccctgttttacatttctaagcaaccaaacagataatttcttattctttttctttttaactcaatttctggcttttaacttttttctttgtccctagaggagtgattgtcaagctttagtaatttattccttgcatgaccacgacagcctcttttgaattcttactttattttgttctattttttgcaactctgaaatttccagttagtttctgctggtatctctggctggctgaaaactttgtcttctacttaaagagacaagtctctcaaacaaacccgtgaactttacatacaggaaaggaatgctttttaacaatgaagaaactgatcgcttttctataattttgtgtgcctattagctgtttctcatgtctcagcgttagctgtctactccttttgcatgtatcatcagtagctgtttgattccatgcaaaaatttattcgaagcactaagaaagcctcgtactttttcccatctgtataaacagat

SEQ ID NO: 44690 - DNA, 884 bp, Manihot esculenta
  Intron number 4 from transcript cassava4.1_028243m (locus cassava4.1_028243m.g) derived from phytozome v7.0 (chr-ID scaffold07894; pos 219487 to 220370)
tctcccgggaaaaggttggggatattatcttgcaggtattgtttttatgttgggttatcaggccaaccatttaagttttgtgatgatgaagtttattgctttaaatgcatccgagtcctttatgagaaataaagtggactctaagacacttcaattgtgtctactactgcatcctggaacttctgagccttatttgactcatttctgttatgttaactaatctcaaggcaaccattttacgaagtgttggtcccaacttggtcttttatcagaagtaacatggacactaagagactaagaatcttagttgagataggatgaggttgggcaagctttagcttgttgagttagaatgattgctaacttagtgcaaattaagtctatcttccgtttctgctggagcatagcttgaaattttcattaaatttagtgcaatctcaaatttggggtcaaactcaattttaagattgaagaaaacttagtattgattagataagtcttttatatatatatataatttgaaaaagtgatcataggaataataattcaaaacaaaaagaggaaaagacttgttcgttgagtaattcattaacatatgtgcatatgtttccagcctacagagctaggtagaattagagagggagccccaaagctatatttatcctaaactgcattgtgaacagtcaagatatacaatctgccttttgttttcaaatacacgagcaaacgtaaaaatatttgttgatgcatgaatattgcagctatctctattcagttattgtaactgagatgagtctttgttggctggataatgttttcatttcagtttccattttaatcattgaccaggaagataaaggggctcaaatcctacttgttccaga

SEQ ID NO: 44691 - DNA, 698 bp, Manihot esculenta
  Intron number 2 from transcript cassava4.1_033636m (locus cassava4.1_033636m.g) derived from phytozome v7.0 (chr-ID scaffold06028; pos 228196 to 228893)
gtgttcttgtggtacgtgtctccatttttaccatttgtttggtctgaagttatgaatgtctgtttcattaagccgactcgtagttctttttagagggagaagaagacgaaggacattgaaaatgttgtgtgaataatttgagtgaaaacagaaacgatcatataagttcagaacggtatcgtatatatgatccaaaattgaaacatgtatacgagtaataatttgatatttcacgttgaattgtcgttttcatgagtccatgaacatagcaaaaggaaagctaaacccatgaagccgagatttcagttaatatcatcaccattaatttcttgatatggtttaatatctttctagggataaagatgccgacccattattttctttagcgagaaggaaggtatcattctgtaaaattaacaatttatattttctaggcagttaaatttgctcaggtactatgttgtccttatgggtgtgatggtcacaactcagaattcaagatcttcatcttgttgtcttctattgctcagaaatgggctgctagtttcctctacttgtggctaattagcctctggaaaaatctttgcaaactttcaactccaatcatgttttaacttggaagtccagaaattttatattggaattatcatttgacgatgtctttttatgtatagcaagtaacaatgtggtggtgcagg

SEQ ID NO: 44692 - DNA, 670 bp, Manihot esculenta
  Intron number 1 from transcript cassava4.1_016659m (locus cassava4.1_016659m.g) derived from phytozome v7.0 (chr-ID scaffold00097; pos 122607 to 123276)
tagtattaccatcgatctcgactctccagcttcaggtgaacacattctcactcttcttgaggcaaagctttgattactaatgtttatctgatgttgttctagtttgtgctatttgggattgaatttgcactttgattcttctcgttaacacaaaaacctaacttcaaagtgaaaccagagggaaatatactttcctattgggtctgtattgaaactaaaagatgaaaatttagctgcctcttagtcttgaagcgctcggcaccactgatttctgatacgttttaaaccttagtccatggggaaacagtgttctgtgtgtttttggcattgttcttgtttgttatttttcttttgggaaagtgtcatggtttaagtggttgtttatatgtattgaaccattgaggtgtttgtgtactattttcacagtaaaattttgttgttgcaacatcaagtgatcttttggtttctaaaatgtctcaaagctcatttaacagtgcccataaaagcaagaggtatagagaaattatacgtccaccattaactttatgcttctcccttctaccatctaagtgaataaatttgctgaaaatttaagggaaaactatgttcaagatgtttttaatgtgttcttacagaggactttgaaaatcagcctccaaaacagtgcgct

SEQ ID NO: 44693 - DNA, 434 bp, Manihot esculenta
  Intron number 2 from transcript cassava4.1_029750m (locus cassava4.1_029750m.g) derived from phytozome v7.0 (chr-ID scaffold07817; pos 31396 to 31829 reverse strand)
acaacaaagatatcaacccaaattcaagaaccacagtgagtgtaattcctctttcaattttccagtcttcttctttatatatatatttattttttctttctttcttggaaaatttcccttttaagtgctttttttttctcgaagccttttagtgcattcaagaacactcaaacgcggtttctttacagctttgtatttactcatgaaactaattttttttttggtaagctatccatgaaatttactaatttttttttacaaaatgaaagtaactaatttccttttattgtttattttctcgatatattcttgacaaataaattgttttaaaaaaaaatcccatgaagaagaagacaactctagccttgacgtgttatttttttttaatgaataaaatagttgcagagaagcctttccagaaaagggtctctgcg

SEQ ID NO: 44694 - DNA, 925 bp, Manihot esculenta
  Intron number 4 from transcript cassava4.1_022474m (locus cassava4.1_022474m.g) derived from phytozome v7.0 (chr-ID scaffold08359; pos 1236975 to 1237899 reverse strand)
aatctatttcagaactgcagaagaaggtaagcaacagctatccttatatatttttgttacaaataatgtagagatagtttgatttgaaagattgaatggttattaaaaatctcctttttaagtttagttaatattgatattaggagatttgtttaatttttcttaataatcctttgggggtatgtgagaaaaaaaaagtattttcaagagaaaacttgtaaaaaaaaacttagtaaacatgtatgaacaagtttaaaagtttctattagagagaaaaaaaaaagtttcaagataaagaatactccagagaaatgtttgacaagaaatatatctaagaatactctttcttaagtttaattaatatataattcatgatattaggagattaggttaattgtggtattgtattaattcattatggaatttcttttttatgatcaaattttttaattaaaaagaattttaaaaaaaattaatttaaatgatttacgtatgaaacagcgtaatttattaaatatctaaattttaaaaaataatatttttaaacacaatttgatcgtatccatgattttataacagtacttgaaagtgatttttaaaaaaaaattaagtgtttaaagtaatattttttaaaatttaagtatttaaaaataatatttttaaaatttaaatgtttattaacttataattaaaattgaaataactattatattaaagtacatatgcaagtatgcttttcgctaaacaaaaacctccttactcattgtggaattagttattgatgcattaatatatgagagggttatttgattatagcagttggaacctgaaaacctaaggaactaatgcagttcaaactgaatggaccactcatctgttttcttttacaggacaaggcattacaggaccaaaacaaccagcttgc

SEQ ID NO: 44695 - DNA, 673 bp, Manihot esculenta
  Intron number 1 from transcript cassava4.1_014433m (locus cassava4.1_010795m.g) derived from phytozome v7.0 (chr-ID scaffold04137; pos 309173 to 309845)
agggaaagtaagtcaaacttttggggttctttgttttcttttctgtttgctattctggagctttgatttactttatccagacttcatcagatttatatacttgagacccagttttatttctggacattttctctttttcttgctcaatttagaaaaaccattgcttgaattttaatctttttttcatttaagaaaaagggtatgcctacttatcaaatcatttgatggaattttgtggttctgttctaatgatggattgagcaaatctgataattttcggattactttgttcagttatctctaccagtaatttataggtttctttttgtccccctttcaataggtataagaatcaaaatgttgctattaaagttgttcatagaggagaaaccccagaagagattgccaagagagaagcaagatttgcgagagaggttgcaatgttatctagagttcaacacaaaaatctagtgaaggttattttactaacatttaagcttaacttctcaattacaaaaatatataatgccttctctttgtacttgattttgagcattttctattttactgatttaaatcctaaatattaattaacagttgttgaagttagcatatgcacaataatagggttgctttttgttaccagtttattggagcttgcaaggaacctgta

SEQ ID NO: 44696 - DNA, 909 bp, Manihot esculenta
  Intron number 1 from transcript cassava4.1_032394m (locus cassava4.1_032394m.g) derived from phytozome v7.0 (chr-ID scaffold02912; pos 219542 to 220450 reverse strand)
tgctactaagacctttcaagttggtgacattattggtaatttttcttattcttgaatcttgacattcttaactcctagttttggataacttttttacttcttgtcgggaatatggtttaattcagtttcttgttcttgttttgtttagatactgtagttttctattccatctccctcaaaacccagtaatttcttcatgttctcttcgatcaacttctgggttttgtgattctcgatctagctagttttgtttgagttcaaaattcttaagtacaagatcttaacacccactggcttatgcttgttccaattttcatgtgcttctttcctcacaaggcctcagaaaacaactatttcccaggttgtccctttgagccctggcttgagaattccgcaatggaaagtgaggagacagcgtggatgacacatgtcgttataaatatgactcacattttaaggtgtaggcattaggtacccacttgttagggtggcatgatgatatggtgggccactgtgcaccacatattgtccccacaggccacactagctctccacctgttttggcatgcttgagtgaatcatagccttgtgtggaggttccacattgacattccaccaaaccgataggcaatagcctcgcagaaatacagtgttaaaagctgcaaccatgttgttttgtcggcttggccctctttctttggagacatttgatgaatgtactatttgtgattgatacttcaaatatatataataatttttcttattatacatatctgttaaagcgtttaatttggttagaatttatttgtaataattgaggtttctgtgtctaaagccttccacttattatatttttttttggcttaattgtgatcagtttttgagtacaattctcaatttcacaacgtg

SEQ ID NO: 44697 - DNA, 477 bp, Manihot esculenta
  Intron number 2 from transcript cassava4.1_000013m (locus cassava4.1_000013m.g) derived from phytozome v7.0 (chr-ID scaffold00952; pos 29874 to 30350)
tagcttgggtattgtagtcgaaggctatcctttttttcaagaggctattttttcaccatttgatggaagaagacttattgaacttattgaacttattgataactaaggcattagttaccaggattcaaagataggtagagatgttgatgtgattgtagaagtatgaaactacaacatatctcttttgattttatttgggtttttcttttcaactttttattatgtgatgcggtgtcaattgctcattgtctaaataaatggttgatctttctccttttcccttctttttcttttttcttaataatttgttttttggattattgtcaaaaaatgtttatctcggaattttaacatcttagtaaatgactaatgtcctttatccaaattattgtgcttcattttatttcggggttccagttctccatcattttttaaatttcaggttttcatcattcttccatcacttactgctgaatt

SEQ ID NO: 44698 - DNA, 910 bp, Manihot esculenta
  Intron number 1 from transcript cassava4.1_008298m (locus cassava4.1_008298m.g) derived from phytozome v7.0 (chr-ID scaffold06028; pos 80887 to 81796 reverse strand)
ccgtccatacattctctcggttacctctatatactgtaacttccgattctatgtttcaattacgacctttttttttccattttaatgtatatgaattgatggtggttgtatgatgttagggtttagtctctcggtctattataggttaggcatgcattagcatatatgtttcggcataaatattgggattttttttttctttagtccattactctgtttgctaagtaaatagaagaaaagaggggaatctaaagttcatcagagaaagattggttgctaaagtatgaagatgaagttttactacctattaaggcagcagctgcattttggtcaattgggttatatttttacttgtattagaccttattatagaaacaaaatttctattttttaattgtttatacagcaaaaggatatgtatttttagaatgtaagatttattacactttggaagatttaatcttttagcttctggtttaatttgaatttgcgtacttcaactaatatgtatttgtgagcaactattgtttatatgcgacattgttagtgaagatcaattacttgaatgcatgggagttggttagatgtgttaaagggtggaatataaatggggattaatcttgtttctaaccttgtagagaagaaagataaatgaaagttaaatatttatccatgaacctctattatctgttttctcccccaatatctattttttttaatcaatcgtgtagagtaaaatctgtagtcctgcttttcttagaacactaaaatagaggttaattcttaattgaacttcctttgcattctaataaattcctttccttttccttcccctgctagtgtgcttttggagatgggagtagtaatattatatatttgattgcttgcttatttctggtggcagagacgc

SEQ ID NO: 44699 - DNA, 498 bp, Manihot esculenta
  Intron number 1 from transcript cassava4.1_024338m (locus cassava4.1_024338m.g) derived from phytozome v7.0 (chr-ID scaffold06653; pos 20695 to 21192)
gtggtaaaagtgagaagcgattcgtttttttttttttcggatttttcggcggaggtctcacctgcacggggtttgggctgaggcgttgggcgccttgcttgtagcgcctttcataactgtgtatggggctcaccttgaaccgccctttttcgtctttttaaatcaaatcttcctcttaacttcaaactacagtctttggcagttgaagggggtgcccttgaatcgctcttatagcccttttaagtggatattttgaattttaatgatttaatagtcgatgaaattgttttatggtttgttttaataagaaaaatagagatttgtgaatttgatgattgtctgggggtttgaatttaacaaatttacttcataaatttatggtgtggatccatacttgttgaatgttcatgttttctttgcgttttgttttatttttttttcctgtggaattggatgttgacattctgaattggtagattatgacaggaaacaagggaa

SEQ ID NO: 44700 - DNA, 567 bp, Manihot esculenta
  Intron number 2 from transcript cassava4.1_024338m (locus cassava4.1_024338m.g) derived from phytozome v7.0 (chr-ID scaffold06653; pos 21441 to 22007)
gcaaaaaagcgtaaaggacttggtgatagtaaggggttagtgtcttcctaattccatgctaatctctctttaatatatatatatatatatatatatatatattaggtagggaagtgccctcctttaaattatataccctctaagctgggtttctgcgcaaaatgttatgacctgtcctttgcatttgttagatttattaaatattctgcatatatattctgtaaaggaaagtattatttgtgcatgagttcaaattccatgtagcatcaaaactaacttgtgtttgaaagtctaaaacagcattctctctttattcttcgactccatttgtttcctatttctttaagtgacttttttcttgcaggataagatggttgttgggtatgaggatggtggaattgaatttaagaacaaacgtgattgtgatattatttttgattaatgtttttctttgtccctcttgtcacttaatggttttggcatgttatatacttgtatttggacttatttttggtatatttttaaatgacagtgcagggtctcataagaaggctaggcaagaggatt

SEQ ID NO: 44701 - DNA, 685 bp, Manihot esculenta
  Intron number 2 from transcript cassava4.1_000483m (locus cassava4.1_000483m.g) derived from phytozome v7.0 (chr-ID scaffold06278; pos 122012 to 122696)
cctttgattcggttctcgactccaattcaaaccaggttcaagattctctctgtgtattcttttataatttgcgcacgacttcgtttaaaattcattgtttgtattaaccctcttctttggctgatgagagaaagacgtgaagatattgacattatttaaaatatttgtttggcttttagttagtgaataccgcagaaaagaaggattcatctaatgatatctgtttaaaagctagaagaaaaaaaaaggcattagaaacatgtttgtgctctccctcttgattgtttttctcagaagacaaaagctggctttacacacacacatatatatatctgggttcataaggaggagggcccgtgtcgcactccagtgaagtgtcttaagtagcttctgttatttggcaaatttgttttcttttgttcgtgagaaagtgctagaagaaaacttgaatcacacttctcacacccttctctattcgatttaatagtgttacaataacttggaagtaatataggtgaatgtttttacatcaaagttgaattcagaaaccattctgcagtcctttttgtaatctctctctctcctgcacaaattctccgtgaccaaacattaaaggaatctgatttgttagctgttgaactgtgtaccaggaagaagtcttccagttagttggtatacctttggt

SEQ ID NO: 44702 - DNA, 969 bp, Manihot esculenta
  Intron number 1 from transcript cassava4.1_015670m (locus cassava4.1_015670m.g) derived from phytozome v7.0 (chr-ID scaffold10963; pos 630331 to 631299 reverse strand)
aattgacaggattttgttggtgggttcttctgcaggtctgtgattttcatgatttgttttttaattattttcatttgattaatgaatgatgttctagtggatgataattagaaatcattgtttgattggagttaatgaatgagtctttagatctttgaaattgatactcgtttgtgaatccattacaggcttacagctattaggctcttctatgttgtttattttatttacatccagaaaagggaaaatatttaactgcttctcaccacatctgggcttttaatgtcagagattgattaggtagaatttgatgtctaaaatcaatatccatatgagatggaaattatgatttgagaattgagatgcttgtttgggaattttttgctgctctgttgataatttcctatgcttcctagattttgtgtgtggtgatgacaattgttattagattttcttgagtgcatcattattgaaagtttcagatagtgaggaaacctttttaatagtttgatatggaattcttgaatgtcatattgttggtctggcattcctttaaatatctttttcacattcaagtgaacttctttttccagaatgttgactcttatctctatcatatcctattttgcttcttattaaaaatccatcgaagtatgaaaaaaattcatctgttcgtttccccttagaaaaggaaaaggctaataatgcaacaaaaggtgtttggcagtctactctgatcaaaatatcagtttgatggaaaaaaggtaaaaattcttgatggcttttcttatggattaacaaaaccataaaaggaaaggaagccatgttgtttgttcctcactgtgtcaattgtgggaattttcctcatggcaaaaggggattctctcgtatgctgcaagctcactagtttcggttaaagtaatcatatgccttcttgtccaggtgcgccaattgcaggatctgcagtag

SEQ ID NO: 44703 - DNA, 865 bp, Manihot esculenta
  Intron number 1 from transcript cassava4.1_012640m (locus cassava4.1_012640m.g) derived from phytozome v7.0 (chr-ID scaffold05875; pos 2063409 to 2064273)
tattggaggacgagcttcaacttctctgcgaatatgtaaaatttccttccctctctctagggtttcttctctttctttctctctttgttgttttcatcttttataacaatggaaacttagggtgtacttctgcccctttgctttaatttctcttcctcattgtgcatctttgaaactaatacagaaaatgacaatgtacgtgatggtttaatgtcagcttcagcccttaaaaaattttctgttactagtaaaatgagggcctgttatggttggtttatttattttcttctgttctcattacttccattttctacattttcttctagctaaacagagagttcggggtttttcatgtagtgcaagagactgcaatttagaccttgttctcgctgtcgtttggtctcttgtcaatggagacttttgctataaaagcagatattttatgatatcaagccttgccttgaattcatcttccagcagatccaaataatggaaaatatagtgctcgcaggttttatttgattcttttcttgcatttctcagaattggatgaacaacgactgcattttgctatgccctttgttgtattttcttcaaaacatataaacaaaattttatccaatacaactgtaggtatatcattttttgctgcctgtgcttgtgtagattatagttaaattaaccggcaactcttgaaattgtcctcatatgtctccttctctttatccctgttctttctaatgctctttcatggatacactctaaaattattttatataattataaacttgttagatagttcaaaatttactttgctattatttgtaaacaacacaggtaaaagagatcctcattgaggagtcca

SEQ ID NO: 44704 - DNA, 933 bp, Manihot esculenta
  Intron number 1 from transcript cassava4.1_017057m (locus cassava4.1_017057m.g) derived from phytozome v7.0 (chr-ID scaffold11581; pos 403183 to 404115 reverse strand)
tcctaattcctacatcactttactttttactcaaggttattactattactgatgctgaactcttattgtttgcttgtaaggtagccaactaggtggtatgatttttgttttaacttcaattccatttcaaagcagctggagttattgcaagttcaactgaattagatacacgcatgttaagttcttcattagttgatgcatactcagttgagctcagggttcctcttttcactttgcttcttccccagttcattaggagcccaataggcttagtgttacacaacatccatgtcacaattccaagtttaaaccatttttgtccatctgtctctgtggagacaacgctggttatttctatagcttaattcatttcttccacgagcaatctttgttcttgtttattttccttcttttcctttgttataaagtgaaatataatcaaattctcaaatgcgcacgtggtataactcttggcttcatgagcatgccttcctattttgtataatgagcaatagcttgttgagaggttaggtactttctttgaaaggaagatttcatgttcaaggtatttagacatggattgtacctttcacgtttggtgaaaatttgtatcctatgaattagaagttggacagaatttgtgttcaggtggctctttctcattattcaagctatcttttgcatctcactgtaatggtttttcatgttcatgaatcatcactggtttttttcatttgttaatttttgctggcggtcttggtcatcacctgtccaacaaatgcgacttagtttattggagatgttcagtgaagtagtcctccaagttatttgaggtgtatgagaatagactttgtgtctgcattgttattaattgtgtataaattttgtgcgcatgcagaaatttgttgtcaaaccttactaccttcaaagaga

SEQ ID NO: 44705 - DNA, 428 bp, Manihot esculenta
  Intron number 4 from transcript cassava4.1_010843m (locus cassava4.1_010843m.g) derived from phytozome v7.0 (chr-ID scaffold05280; pos 879223 to 879650 reverse strand)
cctacaggtgtgtaagcttccttcttctctttgtttttcaatttcttttggttggggcaatcaacatggcacttcccttcctaatctaattaggtaatatgttaaatgacacaccatggctctttcagtgcaagtgtttgttgataaatgaagggggtagtacatgactggacttgacctactcaactcaaactaaacttagctaagctatagtgcaaaactagttggtaacaggcacagaggttatttttctccaaaaagagaaaaggaaaggaaatgcggtgataatattaatggaatactcatttgcatctttcatcatttatttattaatcgcagttctcagtatattatcgagttgtttcttcaagtaatatttaacttttaagttagaatatgtgcaggtgcagctcttaaaaaactggagg

SEQ ID NO: 44706 - DNA, 445 bp, Manihot esculenta
  Intron number 2 from transcript cassava4.1_006450m (locus cassava4.1_006450m.g) derived from phytozome v7.0 (chr-ID scaffold03115; pos 289850 to 290294 reverse strand)
gacaatttgtaaagatatctggggtaatgcataagtttttgtgatataatatttcatcttgattatgtttgtggtatagtgtaattaagtgcttaagtgtttgtaagttacctgtgcatgtgccaaactgcattaaagcattatctgaattccacatggagtttttggaaattgtgctgtggttctatatttgctgaagtgtcacatgaatgactatattatggagagggaatggatgaatgaggaataatatctattgcagaagttgtggacaagggccttatgttcaagcattaaattgggatttcttttctttaggagttatatttccaatgcatttgaagagcctgttggttatatatatgatggctattacttactgcttttctggttaaatctataatcaaatgctttattgggtgtttgtaggtggtgacctgtggta

SEQ ID NO: 44707 - DNA, 575 bp, Manihot esculenta
  Intron number 1 from transcript cassava4.1_006373m (locus cassava4.1_006373m.g) derived from phytozome v7.0 (chr-ID scaffold09958; pos 9320 to 9894)
gccatttcaggttgattatctgtgctttgacgattcttttaatttttccaatatttctgaattgacttgcaaaacttgttctcgtatatttggatccgtgaagttctgatttgaggttctttatgtacgagcgcgtttggctgtgtgtttcttcttcttcttcttcttcttctatggttctagaacgttctttttttgtttgcttgcattctttctagataaagcatagtaaagcgtgctaaatatttttgagttgtatgattatcggtaccttatttcctagatctcacaaatgttttattttgttatgctctgcctgccttatctcttgatttgtatttagttctagtaaatctttctgtcgaagattatgcttaattgaatgattagagtctccagaatttcatactcaagtttgtcaatgtattcgctaaaacaattattcaagtctatacttaattaaaggtggaaaatagttatcagaattgttcttaatttgttacggtttagttgcttatgtcctcgagaacgtggaattaggatctggaaagctcataacttggggttcaacggag

SEQ ID NO: 44708 - DNA, 909 bp, Manihot esculenta
  Intron number 2 from transcript cassava4.1_007248m (locus cassava4.1_007248m.g) derived from phytozome v7.0 (chr-ID scaffold04251; pos 398039 to 398947 reverse strand)
atcttgtgaaaaccccattttttcgatattttaaggttcgttaaatgcctcttggtagtattacccgtttatgtatcatgataaatatgcagatttcgaaaaaaatggatgtccatgataggggcttatgcataatagaaagcaggtgcctagtcattttagttatatggaggaaaaagaaatggagataagcctcgagttatggggttatgagtgcccttcattactcttgcagtacaagaccatggagttcttttgacatctatatataattatttcttttgattctgaaatttaaacttgttatcgattactccataaactatggctaatttctgcaatagagttttatgacaatattgagggtggattggccacgtaatgttgttattttcctttttcagtgtttccttgtggctgttgccatcgggtaaagttgtcattaacatgttaccatgatatttattttaacaaatcattcttatgcatataatggatcatgatttaaatttcgaaatgtatcttattgcattcacagctatgatataatcagttgatctaaatgcattcctttgatatcatgatcaactgatcagtttttttctccttagtggatcattcatgtgcaagttgtaaaataagaatcagaattctctgcttgcattttatttggtgggaatttggataaaaatgagttcaagatgcattacttaatgaaatttacttgtcatgaagctcttgatcttgacccaatatactatgtgtctaactttgaatcttctccttctatgataattgacgttagagctacatattactcatcccttattgttatgtattttagtttaaaggctatggaccaattgtatggcaggttaagttggggtgtgactgccctttctggcctga

SEQ ID NO: 44709 - DNA, 465 bp, Manihot esculenta
  Intron number 1 from transcript cassava4.1_007248m (locus cassava4.1_007248m.g) derived from phytozome v7.0 (chr-ID scaffold04251; pos 399024 to 399488 reverse strand)
tctctctatttggactgccctgtagctgtcctcaggtttgtgttcaattctatgtttgcttattgaggaaacgaaggaaaggaaattgagaaagaatattgaaatcgaattatgaatattgaagtcgaattactgtcacctgaattttgttaatcgtcctttttgaatttggtttttgggtagtgaataaagaaagttcagaatctttcaagtatagaatgttcaattctatactttatgtaatggggtggaaaggggctgtgatttgcgttgttattttggttataatgcgagctagtgtttgcaccgttcgagtgctgtgatcagtacgattgcagtttggttgtcatgtttttgtcagatgttgaaattataggagattgaatattatatgatcatattatccttcttatccttccagctcaagctttgctttattttctttctgtgcagaggtacagtggg

SEQ ID NO: 44710 - DNA, 608 bp, Manihot esculenta
  Intron number 1 from transcript cassava4.1_008219m (locus cassava4.1_008219m.g) derived from phytozome v7.0 (chr-ID scaffold03850; pos 138970 to 139577)
tattcccctactgttggccttcctcaaactagaaagtaatctgctattttctccattcttctcttttatgattactttgtgaattattgattttgtagagttttgttcaatttaatgttaactcttgcaggccaatttgggtttctaggtttagatttgagaattttcttcatttcgaattgaatttgatgttctaaatggccagtttaatgtgctcaaattattgggtttctttaatttagcttaattgcaattgcagctcaaacaactcaaaattactacttggggtttgaatcattaaatttctttgtctgtttcttacagttggtgtgttgaaattaatctttctagtagccttttttgcgtttttaaacattatttctgtgcaattgttgtttaaagtgatggaatcctatcttagtttctgaaaatagggcttaattctagagttatggtaggaagaattagagcacatgaaacttctagttcaaaattagagaagcctcttctgcaaataatgtgatgtatattattatttattcatttaggttttggctttctgttattctacagggcgattgctgattacctatcgcgtgatcttcctt

SEQ ID NO: 44711 - DNA, 453 bp, Manihot esculenta
  Intron number 1 from transcript cassava4.1_007764m (locus cassava4.1_007764m.g) derived from phytozome v7.0 (chr-ID scaffold07035; pos 564174 to 564626)
accactcccaggtttgttctttcttctccttatatgtcagtctgcttagttttcattatttttgtttttccgtctttctatctccacgctctgtgattttaggttcttttctgctctttattggttatcaccaagcatctacttctatttttctttgatttcatgggttttctgaattatatgaaatacatgaaatttctaacaccaaatccctgcttttcgttatcagaaattgcttgatcgattagatgattccagatctcttttataaattttttgactcgtctttttttattttctgctagtttgccaatcttagactttttcaataatcttgagctaaatattttctagtatgtgaacgatcatttctttgaacttagaattttaaattcccatatagtattttctctgatttgacgtttctctgcttttgcagggtcgtcatcgaca

SEQ ID NO: 44712 - DNA, 669 bp, Manihot esculenta
  Intron number 1 from transcript cassava4.1_001154m (locus cassava4.1_001154m.g) derived from phytozome v7.0 (chr-ID scaffold00318; pos 94407 to 95075 reverse strand)
atcttcagttggttttaatccacagacccaggaaggtgagtatcattacttgcagatttttttttcctttttctctttattcttctgaggtagttgttgtttttcttctcttttctttctctattgtttttttttgggaagggggtgggggtcgttctcccgctttctctcaattctagttttgggtttattcatttttgtccaggtgtttgattgagttttgtggggagattgtggtttaagcatggaattgggaccacaaggtccatttgttacttcaaaaacctgggaatgggatagaaactgagatcttgaaaagcacagttggctgatagattctctttggttggtttaagctctctactttttgggttttctttggtagcttcagctgcacggtggggagatctcaattggtacaaatgtttggatctccccatcttctcccaccagctgtttctgtaaatcactcagaggaatcatatgtctaatcttgttaaattaataggcaaggcctttatggcatctttgattagttgattttactagtaggagggcttattgtaaagttttgaggacatcaatggtaggttttcatatgattctaaacatctcactctaactaattttgcaggggagaaacgggttttgaattctgaactttggcac

SEQ ID NO: 44713 - DNA, 437 bp, Manihot esculenta
  Intron number 3 from transcript cassava4.1_016007m (locus cassava4.1_013025m.g) derived from phytozome v7.0 (chr-ID scaffold06137; pos 70830 to 71266 reverse strand)
tcctactctgttctctggaatctctatcagattgtgtaagtaacccattttcctgtatttttcttttttaatgtcaaaattttcacttcaaaaattaatattggacgccatttaatgcggccgttaaggagagccttaatgacgacgtagccatgtgagtgaactgtgacacgcttaatttgatttggcccactgactccagtggtccaaccagcttgaaataaatcaaccaacattggactatgcgttgaagttaggccaaagcaggttactttgatttcttcctcacttgacactacgaagacacagaggatgctctgtttttttttaatcccgacactacttttgagctgtcaactacatttgatttccataaattgcggagaaaaatatttacattttgagcaatcatgaataattattcaggttctttgtgg

SEQ ID NO: 44714 - DNA, 674 bp, Manihot esculenta
  Intron number 2 from transcript cassava4.1_021056m (locus cassava4.1_021056m.g) derived from phytozome v7.0 (chr-ID scaffold10963; pos 45048 to 45721)
gagagttggagcactctgcaaacgatattataccggtaaagctagttgttttctttcgtgtgcataggcactcgtttactttgaaaagtctcgcgtctgtttattgattcaaattgcatatcgtccattatggccaggttagaaatttggaaaaagggaaataccatctatctttaccgtttggtttactcattaccatatcgtttactagtagtttgaatttgtagtacagaattttatgatcgttcgttttatatatttttgagagttcaagtgcctctgcaaaatgaaatgatgaaaataatcattggaaagagaaacttcccaaaggttcaacaaatttgtatcagatgcaggacacgtgtgtcatggaaatagatggaattaggtgctttgtacaaaatcctaatactgtcgtggttatattttctcccagctttaattgccattgcattggtcttttatcttcaactttaggttttatgtgcactgtgcttcgctggagttgcttttggtgcctaataagttctctttcccccatgtatttgtgtaccttgcttgaatgaggaaacgttggttaatagatagctttcttacattatgcaatatggcttttctgttaagcaattgatgtggcatttactttatttcttttcctgacagttccttctcca

SEQ ID NO: 44715 - DNA, 965 bp, Manihot esculenta
  Intron number 1 from transcript cassava4.1_030363m (locus cassava4.1_030363m.g) derived from phytozome v7.0 (chr-ID scaffold11279; pos 285422 to 286386 reverse strand)
atagggaagctgagggtattgtcgtgaggtctcctgtgagtgccgtttaatatgtgccttggttaatgtgttttaaggaagtaattttgtgtacatttgatatgggtaatttgagttggagatgtgagtcaaatcgttttgaatgctgtttggtttctgagaattctgtcgttagaatttgggttagaaagcgttgagatgaacatctacatttcgtattttttaaaattgtatttggtggcttttatttgagagaatcttgtgtcttatatcaacctcggatcgtctgtgagaatttgattcttatgagacgtagctcaggtctacagaccgctgattaaatttctgtttcgtgtaagtgaatttctagcgaccctgaagtaaggattgcatctcaactcaccggtttcttaaaggatatcaattagtgcaaatattccttgctacctatgaaaatttttcccattatttggtttagattctcaaatttctcgtgtaggtattttatccatgctgtgtgctttgttaagtgcaaaggccttttgatcgaaatgtagtagattttctttgtattcaactgggaagagcttgtatgtcttccgtgttttcatttcagattgctgcattagttgttttgatttccaaaatatgatcacacaacaatgtttaagcaatggggaaaagcttaagtgtccatcatcttcgtagttccacctacatggatgaattcctgattgtcatacatggactcttctttttctgtgatttcagctgcttagaaaacatttgtggtggagcttacagtttattcttcgtcattcaattgtctgtctttctgttaattagaattggaatatgttccattatcatactcacaaactggaacatgtctcttctggtgtttgctcatctatttaagtagtatcatgtttatttgtacttttcctgattttggcgtttcttag

SEQ ID NO: 44716 - DNA, 809 bp, Manihot esculenta
  Intron number 1 from transcript cassava4.1_001472m (locus cassava4.1_001472m.g) derived from phytozome v7.0 (chr-ID scaffold03604; pos 370590 to 371398 reverse strand)
gtactccaggggtttgtgcgaagattgcgaggcaggttggttgattttttttttctttcttgttactgttggcttcatttctggatggtgacgattggaattttggaagctttagattttatttcttttggaaattctaacaatctgtcttctgataccaatgaatagctcatgaggtttgtcttaaagtgctaaatttagctgaattatgaggaaggatcggggaacaagtgatttcttcatatcacttttactggactaatgtactcactaagctgtaggaaatgttatggtttcttagaactccaaaaattattgaagctgctggaatgttctttgaatggttgcatttgtgtttactctcattgtcgaagtggttaaatcatataactgcataaggaacacctagtgaatgcgtcgtaggcacaatgccataagaagcttttgtgaagttaattttgccatttctgtcatttagcaatgccttatagatgccagtttgctatggttgcttcacaaagctgttaagtttgcttttttttttcttaaatagaattctgaaagttgtgggaaaaaaaattatgctttcccatgattggtaaaaagtttataaacccatctgatttaacatccatgtaaagcaactgcgttatgtgtttgagagccagagatgttgtatttcttaattatttctaaatgtgtgattgagctgtcacatgaagactaatgacattttccttgttgattttatggttgtttggatttgttttaaatttctctgtgatgaaaattgcaggttgggctgtact

SEQ ID NO: 44717 - DNA, 643 bp, Manihot esculenta
  Intron number 3 from transcript cassava4.1_028036m (locus cassava4.1_028036m.g) derived from phytozome v7.0 (chr-ID scaffold05656; pos 106223 to 106865)
agaagcactcagaagctgctgcatcttacattgaggtcagtttatggagttcgtttaactgttctttttggttaacttttcagatagttcttgttttgattgcctcatttttattcttttcttcctgcgcatgcctatgtggtataggcctaattccaatattatgctttctgtatccaatcacatgtatctaatttgctaaggaaaaatgaaattgcatttttcacatagctaatggagttgtcagttgtctatttgacatttttgcagcttgctctttgttgtggacgtactcttccaacaaaacctttccctgtacaaaggaaggaaattgtcttctgcagttttgtccactctttgaacttgtaacttttgatgtaaacttatgttgctaaacaacacttaaatttattgtgcgagtctttaatagttttctccacattcactgcaagaacataaatagcttttgtgtgatgtgtcattgttgtatcggcaaaataaaaatagagcaatatgtttcattagactttcttcaataatttgccgtatagttgctaggtcagtaatgttcttgacaaacttacagatcaaatgttttaaaatgacagactcaaatagtcaaggcacgggaactgcaacagca

SEQ ID NO: 44718 - DNA, 890 bp, Manihot esculenta
  Intron number 1 from transcript cassava4.1_005671m (locus cassava4.1_005671m.g) derived from phytozome v7.0 (chr-ID scaffold03175; pos 311712 to 312601)
gagaggactgtaagcatgtgagtggaagcagcgacgcccgtgaagttggggattgcgcaagtgtcggctgacttacggagcctatatactgttttgttgggctaagactttaggcccatctcagtccaaagtggattacaaaattatgataaatattaaatgtgctgttttttaaaaagatatttgtttattttttatatttatataaatataaatattcaattaaaaataaaattttgatatttattgctgttggtggtggtttaaatatccactcttctagttccaagtccaatccaacgcggcccatctatttattagtagtgatagtgatttggattttatttgatactaaagaaatactaagttatttagatcataaattaatttaaaattatagttgatatattaattaattatgtaatgaaataattatttaattattttacaataatatttaatataagtttttcggcctccagcccatcaaccagatctagtgttgtgtttttaaaatatcaaggtttcaagcgtgaaaaaactgaccagcaaaagaaaggtaaattaattacgagcagagaggaaccgcaaaaacagttgggggatatggaggccaagcccaaagattgaagcttgttggttgtttggagtagttgagcggctaaacccaaatgaagaattttagcgtctcaaaccctatttgcaattatcgccaagcttttgttcactacccaaaccaactggtggcggattctccaacaaacccaaatcaaaccagcaaacaaaactctttctttgttaagtccttctctttctctgataacccaaagttgcttactttttaaatctttctagattttcagaaagggagagcaaggaaaagatcagct

SEQ ID NO: 44719 - DNA, 802 bp, Manihot esculenta
  Intron number 1 from transcript cassava4.1_021524m (locus cassava4.1_021524m.g) derived from phytozome v7.0 (chr-ID scaffold09365; pos 86415 to 87216 reverse strand)
atcaagactggtttctgtatgagaaccttccttttcatccgcttctttgctaagaaaacccccttttttttttcatttactgcttgttatttgattaatttctttattttatgctgaaatgctcgaatcggatgcatcaccttattaattgatgttagaggtttcctaggaatttcagtatttgattgggttcaaagttttcggaattgaacaaaatgtacttgaggaaaatcatttttcgacatataaagaaaatctaacaggggattcacttgtttgaggcatcaaaaaactaggttttctcttctaacatctagcagtttttgctttgtttatcaatattattttttacaatgctactttatgccaatgtatgaaattattgtttatgatgattgaattttaggaatgttcctttttagtttgaaattatgaaagttaaatggtttgaatggtattaaaaagttagacgtcatgcttttaaactgtgaaagcaagcatctttgacattataaaccactattatcacacttaagtctagactggtacttaagtctgggcgaagtgaaatgcttctgcatatgtttcctggtatcggctgattgattcgtgtgtttgaataaggttcaacgttttgatagaaagcttcttttttcaccggctaattctagtctttttatgtctgattgttttatggttgtcctttctttgatgtcatactgtggatttgttccaagtagagcacctaacatttttaacaattgatctacaattttaatttacttgttatgttttcatgtag

SEQ ID NO: 44720 - DNA, 466 bp, Manihot esculenta
  Intron number 1 from transcript cassava4.1_027178m (locus cassava4.1_027178m.g) derived from phytozome v7.0 (chr-ID scaffold06559; pos 97464 to 97929)
caaaacttggccaggtaattaatggcttaatttatttctagtttttttcttcatttataagagattattagtttaattggaaaggtcatttggaaatttgttcgaattgattgttgtttgatttggatgattaagatggtacaaggtttctttatcttcccttgccttgtcttgatggggaaaattttttgtcctgtatttgtgttgtcaattattgaaaattttaacttagatgtgaagtaagataattagttcaagcctttttttctttttaaaaaataaaattatttttttaaaatgatttatttttttaatcaagaaaatattttttattgattaaaattttatgagtattttaaatattggatagaaataatgaataatttcaaaatatattaattaatattggataattataaaagtgtattatctaaataattaaagcgatatatatttgtgtagggct

SEQ ID NO: 44721 - DNA, 473 bp, Manihot esculenta
  Intron number 2 from transcript cassava4.1_018049m (locus cassava4.1_018049m.g) derived from phytozome v7.0 (chr-ID scaffold02431; pos 410411 to 410883)
gctgtaattccactggtattcagtctccttatccgtgcttctgtaaatactgaagtataaattctctgggtttgaaagtgtctttagacttaatttctttctctttggtgttctttcgttttccaaagtttcttttttccggcgcattttatctattcctttttgttgaatttgagctgggtttttgaatttaaccaatatggtttcgatttttgttatcttgtaagtgggtttaatttgtgggctgcagttaagatgtcctgtcactcactctctcttctgaagtatgttaagcttgaatgttcccaaatgccaaatgcaaattcctatttgattttaagctcattgctctaaattcctaattacagtttattttattgactggaattgcaatctgtggttactatgtcttttaattatcttacttcttacttgaacattaggacctcatttcaatccattgaagaaggacc

SEQ ID NO: 44722 - DNA, 732 bp, Manihot esculenta
  Intron number 2 from transcript cassava4.1_008389m (locus cassava4.1_008389m.g) derived from phytozome v7.0 (chr-ID scaffold04380; pos 15541 to 16272 reverse strand)
agtatcttaacaaggtcgaagctgaggagttggtaatgcttcccttctctttcttatgttcaattaaggggagttttcttttttttttaaaaattcagattactgattttgtttgtttggttagttttcttttttgctgtattgttgttgatagtactatatgtggttgacgaggggagaagtgaacttagtatttgtttcatgagaccaatgtttgtattaggcacagttgagtaatgaagtctttctttattggaaatagtttatccagcagataaactgtgacccttttattccctgcagttaattgtatgttaaattgctggtgaaattatagtttgacatattattttcttttatttggtctaatgaggagatcatatgatccacttaaacaaattctttgcaaagcaagggtaaggttgcatacatcagcccttcctagaatccacaagtgtgggatgcttcatgcactaggtcaccctttatctgattttcgtttataaaattcaattttgtttttcctgctaatatgtatcaggttgagagatttttaacaagtggttatatgatagatctaatttattggtgctgtggcgttgtggcccagtcaaatatatgttttaaaattaactggcattgaactagatttattgaacttctttttaattgtacttttgctttttcttgggggttaacttgcgaaggaagcggatttagttttggggggag

SEQ ID NO: 44723 - DNA, 511 bp, Manihot esculenta
  Intron number 3 from transcript cassava4.1_024159m (locus cassava4.1_024159m.g) derived from phytozome v7.0 (chr-ID scaffold05129; pos 127889 to 128399 reverse strand)
gtttcgcagacaagtcccctgttagctataaggaggtctctctctaaatgggtttcttatctctttatatttttgttaatatatactgtactctgttttctcctttttcttaaggataatgttcaaactttagaaggcaagttctggtttggatataaaggagtccatgtaattatggatagtgaagcagtgtttttcttttcttttttaataatgactgtattggaaattgttaggcattataatcatttctgtgttctatacatggtaatagctgaataagaatcttcatatttccagctgcgactggccatggcttgttgaatttgattattgattatcagtaacagataatgttttctgggtttatttgatgttacattttagagctctcaaattccatattggattctttgtaccatttggttctataccattttggattgatgcataagttttccccctctttttggtaggtcgcatttgaaccattggagagacccaggaggtt

SEQ ID NO: 44724 - DNA, 766 bp, Manihot esculenta
  Intron number 1 from transcript cassava4.1_003027m (locus cassava4.1_003027m.g) derived from phytozome v7.0 (chr-ID scaffold03581; pos 429679 to 430444 reverse strand)
tgcgggtaaattatgacaccttaagtttatctagatttgtacaccttgttctttatttaccaaagtgatgatgttccaatcagaaatttagagtgattcttgttctttacttaccaaagtaatgatgttccaattagaaagttagagtgattctcatattggtgtgttgaatcccacgtacgtgcccttccaagggtcttaggcagcaagacccctccccttgagcttgtttttaggccggcccaaatttaacatggtatcagagcatcctaggttggccttcttaagtatttcaggctccaatttattcctgggtgtgaggggagaggtgtgttaaatcacacgttggtttgggatagaaaggaccttggcactccttcccttaagcgcctgatccaaatttaacattgtggcttttacattgcttttgtagatgatgatgtgtttatcttttggccaaaaggatggggtggtctcgtggcatatcagcaacctgccatggcgtgaggggttctgtaagatttgggactaagagtggcgtttagtggtagcctttagattattccgttgatagttacccaatttcttaatttttagtgttggcatgacacgtttgagtttgtgatgttttcatggtctcgttgccatttgcattgaagaggaagcattgcattttgatgggctagtcttcttgtttctgaggaaactgttttctcttcaatgtcattaatttcctttctttttctgttttcctttctgttacagt

SEQ ID NO: 44725 - DNA, 624 bp, Manihot esculenta
  Intron number 1 from transcript cassava4.1_032274m (locus cassava4.1_032274m.g) derived from phytozome v7.0 (chr-ID scaffold10305; pos 338557 to 339180 reverse strand)
agattaaggaaaccccaaaagaaaacattaaacaggtttactgatttctctgtttcttggttgttcaacttggatttttcttttctttggctttttcatctataacaagaaaagaaaaaaaaagttgacgtttttgggatgtttttatttttttgtatatttgcagatttcgtatttttatttgcatgggtgaccatgacatttgatattagttcactttcttttttgttttcttgtgctttatattttctcgttaatctttcgtttctcgttcaagaacaagaagtagaattttaagcgtgagtttatgcagaaatggatatgaatatagatttttttttttagtctgaagcacagaacattcatccatttttcttatcagttgcttgcttttctttttcatggtgggatgtttttatccaactttatcgactctccctattcttccttttttttttttttcttttttccctttgattttgactcgtgggtcgtggcttccactgttcaactgttctcttttatcatttgaaattccttcttgcatagattccacttcattaactgatcatcatcttctccttcacagatcaaggtggctgataccctcttgagtttacgccc

SEQ ID NO: 44726 - DNA, 788 bp, Manihot esculenta
  Intron number 2 from transcript cassava4.1_019443m (locus cassava4.1_019443m.g) derived from phytozome v7.0 (chr-ID scaffold08359; pos 296767 to 297554)
accggtaaatatcaattgtgctccgctctgatgctgagcttccatacaactgtaacttgttcttgttgttcttcaccgctgcaacaattattttagcgataactttggaagaattttgcttgagttaaattgatggctgaaccactctttagacatggatagagttttgaagaaaaatggaaaataacttttccattttctaataaaaagtaggtggtcctggctgcttgccttctctggtaatctttcctgatttcttttattttgactgggtcctccgatggtaaaaacttcagagattaccatgcctcttaatgcatgaagctgaccatacattcacagaaggtggtccagaaacgttaggagataaaagaaaaataaaggggaagaagaagttttgagattccaagtcagtgtcttgcgttctaagaactatcacactcacttgagctgttctgtaaatttgatttgatagtgtaaaaaatgcgcaaattatcaaaagcctttactttctttgcttacacatttttttttgttttcttcttcatgttttagacgtttatgattgtttaaatattcaagtggggtatctcccacatgcatatttatgtgtttcttcattttctggctaaaattggaccctattaacagatattacttgaggtatttgcaacttgaagttggctgtttcttagtcttccagttgggaatagaatgtgctgttaaacatcatctttcaatctggtcttgcagggacggattctgtgtcagttaacgtactggagaag

SEQ ID NO: 44727 - DNA, 504 bp, Manihot esculenta
  Intron number 2 from transcript cassava4.1_001661m (locus cassava4.1_001661m.g) derived from phytozome v7.0 (chr-ID scaffold10305; pos 521255 to 521758)
ctggagaggtaaccattaggttctagttatattattgacttctttgttgataaatttgaattaatatggggataacctatttgtttggtcattactggctttgtttattggaattgatgttaactcttctgtatttgttaatgaactcgttaatatatagttagcaagtgacagtttttggatgtctattttaatagttttggatgaattaatttatcaaaattttttgcttgaagcacgtaggtaagctagaatgtagaaaagatatgactgcatcgtaacccatttagtttgggataaaattattttgaatttcatattccattcatcttgatgttattgttgtggaaggatagcaagagataaatggaacaatctcaatatataatttgcttagattcttcaggaaacccattaatgactacccttttaaaattgttatttgccttaatatttatcatcattgcaggggttacaaagattttgtgcagagcataagattaa

SEQ ID NO: 44728 - DNA, 582 bp, Manihot esculenta
  Intron number 2 from transcript cassava4.1_005811m (locus cassava4.1_005811m.g) derived from phytozome v7.0 (chr-ID scaffold02996; pos 35092 to 35673 reverse strand)
aggtacatgtaacttgaaacaaaaggcgttgtacctggcaatgctgaaattttctgcatctgtcattgttgtccacattccctttcagcctgtctccagctttcttctacttggctagaacctatctagctgttcgagtccattagtttatttataaatagtttgcaggacctaagaaagatctcactgatagaataaaacatattctaaatcatgattgccaatcattgttaaactcttctttcattaggagtggaatggattggccatattgtcctcgtaaattttgcattatgattgttgctttaatgcctctgtgatcatactatgctggatgcatgatgcatcaattccatcataactgatgttttctatagactaatttcaagaaaaatcaaaaactttaattttgctgattttcgctgcagtttctgtacaaatgctttcatatggcaatcaatctggctattagcaatattttgtgttatggttgttgagatttagcagttttatctttcttggactctgacacacattatgggaacaggaacttgctcagtcaccttttgctatccaccgagg

SEQ ID NO: 44729 - DNA, 721 bp, Manihot esculenta
  Intron number 1 from transcript cassava4.1_016737m (locus cassava4.1_016737m.g) derived from phytozome v7.0 (chr-ID scaffold03942; pos 421819 to 422539)
tcgagattgaatccaggaatattgaccttgaacaggtatatttcgttcttcgccatttgtgcatgtgattttgtcttttgtgctggttatccttgcggatgatatcctgtgattttcacaaactaacttttctgtgactggtttaaattacattcattggtgtcttgttcacgtggagactctgtgaaaatcttgaactttgtagggtatttaggttgtctccaaatattggtaagcagccgtgtcacttgctcaattctttagttttgaattgattgctttagtgggttggagagagacttcaagagataaaataccaacttgcagaattattattttggtactttttcgggtttgctcttcattccgataaaaagaaaggaaaccaattactaaatgggcgttgaatgccgaatagacaaagaatatgatgtgtttccattgtgtttgtgtgtaagaaattcaagctacgatcttgaatgcctatactatcatatataagataataaaaattaaaggtaattaaagataaagattaggtatgtctaattttaattgacctcaattctatctgtgaaataggcaattagaacatgcctcctttgcttatcaagttggtggtatcaaaactatgaatgcagtatgcagtatcagaatcgttttgaacttttattcttatctggcagccagaacatcggattagtggccttgaaccggtgct

SEQ ID NO: 44730 - DNA, 573 bp, Manihot esculenta
  Intron number 2 from transcript cassava4.1_016737m (locus cassava4.1_016737m.g) derived from phytozome v7.0 (chr-ID scaffold03942; pos 422568 to 423140)
agccgtgaggcgtttagtgctgtggaagatacgcagtaagttttgccacctgtagtttgttgtatttttgaagaactacatttgtattacttaaaatgtgcatcccccaacttcccccctcttctcccatctctctctcattgatgaaggtaattatgtgtgtgaatttcctgttatatttgtcaaagctccaaacgttgataaaatagtgtgttctttacttaagggcttgaattttttttttctcttttctaatgacaaatttgagccctgagctgctgatttgggattctgcacccaccaacgaaactttagaattatttctttcttgcatttacctgagcttttattcattcacctgctgctgatttgattgatgttcagcagtatatctattgtttattgttctttgtttgttccctcttggttgaagttcaaaacttatgcatgctgttgtgattaaatggttgttctgttagcttttttgcgtttaatctaacatatgaataaagggaagtcctaatgctttcaacttccataaatcggttgatgctttttcaacaggtgctcaat

SEQ ID NO: 44731 - DNA, 675 bp, Manihot esculenta
  Intron number 2 from transcript cassava4.1_030643m (locus cassava4.1_030643m.g) derived from phytozome v7.0 (chr-ID scaffold02295; pos 3881 to 4555 reverse strand)
aacgttaccattattggaccccctgatacgctttagtacgtgttgttttctgcaatttgattagcttaaagctctcttcttttcttttcttttctttttgatgattattgattttatttaagggctgcttgatcttgatagtaacttgggtgaatttttttttattagataggattagggaagggctgaagttattgcttttattagaggattggaaatttgattaattgcgttggagttttatttagaatggttggttttaatgtgatgattgaagaactgagtttgatattatcataatctttttctacttgtggcttttcctgagaaactgtaggaatataaattatttgacaagtttgagttctaaattttttcatttgtcaatgtagttgtctaaactttcaagccgaatgattgattgacttgaagagttcattgataacttgttcttttgactcctttgtattggtttaacttgtaaactgcattctatcaagagttagtttctttctgtttggttttgagaatttatttcaagatttatcgacttgcaagtctttggatattgttctgttctagtatttgatttttcattgctctttgagctagcttgttgaaaagtgtgatcaactagaacatttccttgctaatctttgatggcagtgaaggagg

SEQ ID NO: 44732 - DNA, 493 bp, Manihot esculenta
  Intron number 1 from transcript cassava4.1_017382m (locus cassava4.1_017382m.g) derived from phytozome v7.0 (chr-ID scaffold12865; pos 216904 to 217396)
gtttctgacgatatacttcctcatattctcaacttgtcagttcctttctctcgcatttaagattaaattgttctgatactgaaatggttgacggaaactagttaattttctatgaatttagggttgattttaatcaagaatcaggggcagggtttatgtaccatttgattgatctgtttctaagttcgagtttgggattcggacatgagaaacttagatacgcaactacaaattaccgcagttgatgaaaaaaatctcgtcaggatgttcagttaccacttgttataactgtaaacgggtaacttgattttgttatgagatactggctaaaatgggtttaagaagatgaaccttttgggttcctaggctacttgtgtaacttacataggaggagaaatgaatttatatattcatcaacattctacttaagttcaaaacgcttttttgtcagataatttttcatctataattatcttttttcattgttttagat

SEQ ID NO: 44733 - DNA, 621 bp, Manihot esculenta
  Intron number 1 from transcript cassava4.1_005057m (locus cassava4.1_005057m.g) derived from phytozome v7.0 (chr-ID scaffold02431; pos 499124 to 499744)
ctccactattactcgcacttcgcttggtcccagtactttctcctcctcctctctccaatctccgttcaagattgatgtgctttggtaatttgatagaaacttgtatttcatattgtgaagtatgcaaatgtgcttcgctagatctcgtttctgcagggcatttttagagttttggcctaaatggatttccattggtggaaagcgtcatgtattttgatttaaaactgttttcatggtcaactttgtggaaataaaaggaggagaaaattagtgaaccttttaactttctcaaacttaattagttttagtgaaggataatgtcaattctacgtgatatctgagctgaaaggtgctacatgacacttatgactatattggatgagtactggcttgatttacagtcaggtaactggagatcaaattaggatttaaatcaattcattgtgggatcgataagaaggctttttttttttctttctttctttcctataattcctctccatttgtatgtttttctataattttttgtgcgtactcttggttgccgttatctttttggtcttaaatatctcttaataggaattttattgaggttttttctttcctcctctgcattcaggt

SEQ ID NO: 44734 - DNA, 901 bp, Manihot esculenta
  Intron number 2 from transcript cassava4.1_015416m (locus cassava4.1_015416m.g) derived from phytozome v7.0 (chr-ID scaffold04182; pos 425836 to 426736 reverse strand)
ggttctgccaaggtactgttgctagcaacatcaaaatcagttcctctatgtgttgatcgattactgtaaattgtttctctacggctccttttggatttctagtttctctgattgatcaagtttatggcttttttttaacctgctcaccagattgctattaccagcaattgttgagatggtgttgttggtttgctttttgattttgcttttgtattactagtagctgagtttgctattaaaggaacaaggtggacctttttctttctttctttctttcttttctttttttttttttttataccttttgtagtacggtcagttgtattgttgctaggttaatacttaatagtttgcattataacacatttgcctcgcacgtttttcacaattgatttttcatttcaagcctcgattgtgtagaaagtaatatcctccatgttgttaaatgatctgattaataattttatagttcacatcttgcggcacataacgtgaatgtgcattctatttcccaccttgcaataagtttggttaccatgtatctggaaagtgaaacacccaagggtaatcgcttattttataatctcatgctacagtattgttgcacctatggagttacagccacaattgtcgatgaacggatgattctatgttcattttctgattgtacaaaatagaaaatttggtgctcctcttatgtttttaccacttgtttttattcaatacaatgcagtcatttgggttctatgtggtcttggatcatgtaagcttactgtgttcttatagaggatgccaagcactagcatgtaacgtgcaatgaccttattccttctttattttcatgtccattttgtaatttgttacaggcacttgctaaggaaattgtgagatctagaaaaac

SEQ ID NO: 44735 - DNA, 495 bp, Manihot esculenta
  Intron number 2 from transcript cassava4.1_012501m (locus cassava4.1_012501m.g) derived from phytozome v7.0 (chr-ID scaffold04137; pos 284670 to 285164)
agcagcaaagtgagcaatcttcttagctatttccatgggagttttgtacttacagtgctgttttgaaatcttcatatgacccttctttaaattctagaaatgtggaattgagcttcttggtggtttcttgacaaacaactgtgtctgtaatcactttcaccttttacttgtctgaagcagttcaatctttgctttggaagtggcaaggggaaagccacttccttaacaatctacaaacttgaaataacaaattagttagaaacgaacatttttttaatttctattatgatagaaattatatattgtatggttattacaacactttgttcttgctgaaaagattgggctttacgtctgccccaaattagctattgttgtttgagtttttatatatactaaatcaacagttatgtgcacaacttcttctaattcttgatcacagtggatttctcttttgtaggctgtttggaagccacgtaaagccatcaggggagg

SEQ ID NO: 44736 - DNA, 783 bp, Manihot esculenta
  Intron number 1 from transcript cassava4.1_001894m (locus cassava4.1_001894m.g) derived from phytozome v7.0 (chr-ID scaffold02477; pos 325391 to 326173)
tggaagtcccagcacttgtcaactttcattgaacggtaatacctttctgttcgtatttacatttgttgtatacctacgtgttttcgtagatcttccttcttcttgcatctctgattgagatccaacgcaatcatacttttttcgatgtttgctttccattttttccctattagatggaatgtttatacgcgtttgattctaatgcctttttttagatcttagggttgtaattccagtttcaattttcatttattatttaatatttttctatatatataagaaatatctcttacggtccgttgctgagaaaatgtgggaatgaagaggaaaattgtactttgaaatgagctttttctttctcatgttccattttcctgatgcaagcgaacggactactttcaaaagttaaattttcatctctctactttcattttatgaaatactgatttatgcatcgagcatcaactgcatttcattcaacaatcaacatttacgtgctgcagttattttgattcttaaataatggtctaaatagcttttctctgaccaacgaataatttgtaggttgtttctatgaattaatctcaagtactcttaattgaacaaatattaggatagcaatctagcaagccatgatttcatgattttaattatttttctttactaaattttacttagccttcaaatgtatgttagggcataaaactgcatagctctgttggatttaaattattaatctttgttttaggaggctcaattaccgtcgaagctggaaaatctata

SEQ ID NO: 44737 - DNA, 514 bp, Manihot esculenta
  Intron number 2 from transcript cassava4.1_001894m (locus cassava4.1_001894m.g) derived from phytozome v7.0 (chr-ID scaffold02477; pos 326450 to 326963)
cgtagtaaaccttacactccagttgtgagtaacaatgtttcacttgcttgtttggattctctgttgataaatatttgatttagctatgtgactaaaataaggacaaatatgggggcataatgtttatgcactatggttattggactctattttgccacctgtaactgtttcatggtctttactgcaacagtcattttttgcttctttaggtgaatgatctcaattccattgaattttggactatgacttgcccctgtatattgttggcattcgtttacatctaaccttgtgtagctatatgatttttggaactgctgattcaatgtattagtagcagtgattaaaaggaaaggcctgaaagatgagaaatatattcttttttgtttgtgacaactaagaagcaaccttttattttctgtaacatttttccctcgctatttgattttgctatcttccttgcacggattaaattgattttcctttgtacagcttgttcgagccctcctgggaataa

SEQ ID NO: 44738 - DNA, 683 bp, Manihot esculenta
  Intron number 1 from transcript cassava4.1_008712m (locus cassava4.1_008712m.g) derived from phytozome v7.0 (chr-ID scaffold10963; pos 431297 to 431979 reverse strand)
atacagtgagatctcccctgtggatcagtagaaaggtaagcttgtaataccgctccttctatagttttacttattttacctttggttcattacatttatcaatccttgtttgatttcctaggcaagtttcagtcttcattccaagaatttgtgcaacgcaggtttagattgttgggtcttgttgggagtttttttttgttttaaaaacattaagtttacttattaagggtctcttttattgtgttcattcagttttaaactcctgggtttgtgagaatcatgagagattaagttccaggtatgcttttgaatgctaggagttggtataaactgtattaggttcatcggatttctgtgagattttactgcttctgtggttgcccagaaaatggaaggaggtagagcgaaatcttgttgttttatgctcttttgtcctttagtttcttatgatggagatcagcttgagtaagcggtgagccaagtgcttacattaggcgtaattaagtggttttgttgatttttttgacattggcatgtctgaaatttgagattgtagattgtttcctatttcttcttttctcagcgactgaacatccttagagtgcttgctacttttggattcagtttgtttacgtatggatacttcaggtttgggggggcgttttctgtcaggtccaactggt

SEQ ID NO: 44739 - DNA, 495 bp, Manihot esculenta
  Intron number 1 from transcript cassava4.1_013390m (locus cassava4.1_013318m.g) derived from phytozome v7.0 (chr-ID scaffold07007; pos 117094 to 117588 reverse strand)
ggtggataccctcttgggagcttcaccactttctggtaagttcaaacttgttcttttcaattctctttttgaaagaagttgccattagtaaattgttctgcttgtttcctcatttttcatgggcgtgcatttgcatggataattttaaaaagaaaaaagaaaaaaacttttcctctggggaacaccatggatgcattgggtgtctacagatttgaatgttgagaggggagagggaaagctctttctttaaggtgtctgcaagtgccatgccttttgatattgaccatagactgcaacacctctgcttttttggcccatttcgtaactttcttgcagaaaaatttcaattcaaacctcgtttttattatctcaaacagaaaaaagaaaactaaagatgtttaataattgaccattctgaaaaaaaaaaaaaacaaactcataatcgatgcaggtgcaacagtaaagttacagtgcaataataccaagcacccacaa

SEQ ID NO: 44740 - DNA, 548 bp, Manihot esculenta
  Intron number 1 from transcript cassava4.1_010880m (locus cassava4.1_010880m.g) derived from phytozome v7.0 (chr-ID scaffold09557; pos 70809 to 71356 reverse strand)
agcggtgggagttgctgctcctgtaccaatttcaggtaattggactgggaggcctcttggatatttgtttatgattttgggctgtttggcttttttgctttgttttttctccttttaaaagaagaagaagaatttatctggggttaatgcaataattgtggttggtatcaaatcccaattccttatagggattatcttacaatttctttttttggcattttagcagagattttaggtttttttagggatgaatgatattgtaaagttgttggtggggctctaattactgaatggtgggagttggctccaactttctacttcgtctgggtttaaaggaacacactacatcgttgttcttatccatctcccatcatttactatctctaattttttggggggtttggcaaattttgctttttgttagcctccgattcagataaaaattgcacctttgtaaaaaattcttgctaataattgattctttttatgtttaaattttcttttgatattcagagcagcagtaccaaccagaaccagctctacaagca

SEQ ID NO: 44741 - DNA, 407 bp, Manihot esculenta
  Intron number 2 from transcript cassava4.1_030986m (locus cassava4.1_030986m.g) derived from phytozome v7.0 (chr-ID scaffold09788; pos 148586 to 148992)
taattaagcaaatcttgtgctctgatacgcaggtacgcctttctttgtcatgcatagaacatccgttgacagtaaagtttgatttgcatatcaaaaactaattgatatctctattttgaaaaatatattaaactttttaaaaagtctattgcaataaaaatatctggagggagatggactaattagtaaatttttaaaaatttgagataccaattaataatttttttaaattataggattaaataataaaaaattaatgaaagaaaaggtctaagtattaatttattcttttattaatttactatcaatttttgtcttattcttctatctcatacacaccttacacatagaggatagaaattcactgtgattctaaattttaatatcgagttattgttagcagcagg

SEQ ID NO: 44742 - DNA, 780 bp, Manihot esculenta
  Intron number 2 from transcript cassava4.1_022415m (locus cassava4.1_022415m.g) derived from phytozome v7.0 (chr-ID scaffold12216; pos 139090 to 139869)
tggaatttgctacactcacccagaaaagttgccaggtgaaaatattacaaggatccaaccatttcttgttcattacagcgtaaagatccccaaatcctcatcacatttcatgatcatggttaatcacataaatttaggtcttctgatgtttggaaaactaggttattattaggtaacccatgtaggatttttttttcttttgttttttttatagaacttgtagacaatctggagaagacatgtctatgcatgaaagtggagtgtacagttttcatacggaccagcttgatttgtctctgaaaatgaaaaatgtatgagaaaaattatcaccggttacttcgtagtgtaaaatgatagtgaatccattcgaaaactcgtatatttattttataaattcatgtagatctggtatatttatcaattgataaaacccaccaactaactttggttacatatatagcattcgccattagattagaagaaagtagaaaatctccgcgaaacagaaacgaagaaaccctccaactaaccctaatattgcacaatagaatgcttagaagcattcattttctaatactagaaaatatttttggtcattttcatcttgtactcaaaaaaattttagaatgctactaccattacaaatactacaccttccagtttctatactcaataaaaaaaaattatatattctaatagtttaagaatacaaaatcatttgttgcccatatgtgactatgtacaggagttagcaaggacggcctagttcgccacttcttt

SEQ ID NO: 44743 - DNA, 825 bp, Manihot esculenta
  Intron number 1 from transcript cassava4.1_018907m (locus cassava4.1_018888m.g) derived from phytozome v7.0 (chr-ID scaffold00321; pos 77581 to 78405)
ttctgctgccgctgccgccttgctttctgtcttctgtaagagattgattatgtcttcttttgtttatgagtgttattgatttatgcttagataaatggaaccagtagagggaacactcggccactaggttgaaaggaacatttatgcttaagattgatttcttccactcgctggttccacaacactaatttattcagtctcattgattttcatacttgcttacagccttacacagttgcacaatatgatcatatatgtgtatatgaagttataaactgcattacgagttaggtcaagggaggaggaaaaaaaaaaaaataagcagagagcaccaattcatgcttaaagctttaagctgagccaatcaaatcgtctcgaaacaccttcgtttcattcacttctgcgagtttctcccttggtaactcagtcctacataacaatcgtactggtaagccactgcctcactcatccaagcataaacaattttggtcttgcgaagtggcaatgtatcgttggacaatgaaatgcggtactgggtttcatactattctttgattgaaaatccaagatgaattattcctaaaattctttattgttgcaattaattcatggattattgctggtgtttgagttttgttgttgaaatttggtatagtttgagttaaatttctgggttttgatcggtatttttttttatttttaattttttgtttaatttaaatatagtaaatgattttaatttttaggtttgtttggactttgactttttgccgtttaagtatatattcaggttataactaaactacaaacccaaacggtgctgta

SEQ ID NO: 44744 - DNA, 560 bp, Manihot esculenta
  Intron number 1 from transcript cassava4.1_008222m (locus cassava4.1_008222m.g) derived from phytozome v7.0 (chr-ID scaffold05875; pos 1290846 to 1291405)
aagacgacatcgctcttctcaaaacttatgtaatatttctctctctctcattcagcccgtcttcttcttgttcagaccctaatcctaactgatttatggtgttagaactgttaggattgaattgaattctgaaatggagctcagtaattgcttcgaaagtctttggatttagtagattattggttgtgttttttttcgaatttactgtagattgactggtaatttgctctagttgctagttaggagtgggatattgtatctagtgaattgtttaattgctttaatttcttgaaagtcttttggttttatccgtttttgagcatagggtgatggcatgagccagatattttattgttcttcctgtattccttcaagtattcaattttattggttatgctatgcttattgaagattcctgctaggtgcatctaatacttactctcgatcccttctcagcgtcaccatttattgggtgcttgtattatacattatacaaaaacatgaaaattttaaattttattgcagggtttaggaccatattctaatagcattaagaaagt

SEQ ID NO: 44745 - DNA, 379 bp, Manihot esculenta
  Intron number 3 from transcript cassava4.1_029270m (locus cassava4.1_029270m.g) derived from phytozome v7.0 (chr-ID scaffold04324; pos 425472 to 425850 reverse strand)
ataatattcttcttgataattactttaatcctaaggtaagataatttaataataaatataaattttatttatatcattacaatgtggaattatatgaacccattagtttgattgttgtaattcattaataatgaggcttaacaaggtttcttgtcttttttaatgctttactactttcttaataaaccttattgaagtacagaaaacagtgtaatttatcaagtaaatatatatatatattcatgaaattaagtagaaaataactgcacctttaaattaatatatacattatatatatgtacagcagaataaatttattaatctacttaaatcatatgttttagatttcagattttgaacgtgccctgttctttaggga

SEQ ID NO: 44746 - DNA, 738 bp, Manihot esculenta
  Intron number 2 from transcript cassava4.1_022594m (locus cassava4.1_022594m.g) derived from phytozome v7.0 (chr-ID scaffold08359; pos 1068331 to 1069068 reverse strand)
gagaaagaaagagaaagaagagtcagaattaaagagtaaagaagagtcagaattaaagagtaaagaaaatgggtaagtgcagaacttgaaaactcgatattcgttacaagaatttgattgttgatcgtgaaatttttattctgaacgtttaagaacttcaagtattcctgtttgtacttttggctgaacaagatgaattgcgaaataatgatttgcatctgagttcagctctgcaacgatatgtcgtttagcttggatcaagtcgcgttaattagaaagaatttcattaaattaataaatcttaaaaaattgcaatcttcgtattttcagccgatttcgaactcttctgtcgttgacaaggacgacaagcatcgtcttcattctattctatattgtaaaacttactaaaactgaaagacctcaacagcagatgcagacgcggaaatttgctgttgatttgtttaaacagtgatcctgcgttttgaaacaattcctctgttgtttgttgccaagtaagctaccttcctttcttttcttaacgaaatactcggagcaaaatgagaatctgtgttgcatatttgtacagctaaagcaacgtttcttatattccagcagaaagtactgaatagatgtgctatgaaattgtatacccttgcggaggattgtgatctttttggctactcccgatgctagagattcagaagaagtgcattttttttttaaattttagagttttaa

SEQ ID NO: 44747 - DNA, 712 bp, Manihot esculenta
  Intron number 2 from transcript cassava4.1_013298m (locus cassava4.1_013298m.g) derived from phytozome v7.0 (chr-ID scaffold11581; pos 994599 to 995310)
agatctctcctgtcgtccagactcatcttaagcaggtatgatttttgctggaatttgttgttgtattttcaattgattcctgagaaatttttgtttaattatcggatcagttgtatggatttataggatttttttttaatatgcttttcgtttgtgggatctccttatgcgaagaacgataagaaaaaggaaattaagaagctaaatttgtgtagatagggttactggtggcgtcttggttgatcgattagtttgacttggtcgcctcttttgaattatggttggttttagggaagagttttgtatgctaatcgttacaaggatccaacaatatcttacggtggtattctctgatttatcaccttggttgcggtgtaagtatgttgcccccgtgcttttatttatggttgaaagcgtttgattctaagaaaaccgtggcagggaaaataataaggggaaggacatagaatggtatacgtgttgaagtagagaaacagccatttcatttatgtagtgaaattatttatattttactgtatttttttttatcgcatattggtttggctgtattttgctacgagtattttttatctatttattcttatttatcgtctttaaactgtcatagatacagttttgaggaagttgcataacttttcatagctggtctcacagccttcaacttcctaattttgcaggtttatttgaccct

SEQ ID NO: 44748 - DNA, 859 bp, Manihot esculenta
  Intron number 1 from transcript cassava4.1_000825m (locus cassava4.1_000825m.g) derived from phytozome v7.0 (chr-ID scaffold11297; pos 375324 to 376182 reverse strand)
gcaccggatctaaggaagaagtgaggtttcctttctttgtgtctcctgttatttgtttttttttcccgagaaaatcggggacaatgacagaaaattgaactttccagtcttttaaggggtttcaaatgcttgagttgtttctctggatttctgcttgtgtgtgaattcgttgactatgtagaagttgggcttattaatctcagggtttttgaagcacacgacgttttgcatttggttcgatatgtgcgtttgccttttttttttttttccctctctccttgtgctgttgggctactggcgaagtgaatggtttaagcaagtggttttttagggtttaaagaacttacaatttttaatggaggattttttggcatttcaactttggaagttacgccattgatgcatgctgagagcactatcgagccattctggatttcttcttataatttgaaatcggtgaaaaattattgatgctttttctgatatggcaacctgctttttgttgtaatgcagcgtctcacttcaaccataattttttttgttctgcttatcaaacaaaatactcgttctgagctatttttctgaaattcttattgcaattttagttttgttttgcttttgaacttagagctattatttaatgaaagcttaatctgacattattattaggggtttgatcttttggattcccattttatttctttataatgtggtgccttgacgagttgcaagtttagcttgtggcatgtgcaccttttttttgtttcaccaagtggctatattttctcccttttttattatacttttgatccttgtgatgacagagggctgctgcagaccggatattgcaggagttgca

SEQ ID NO: 44749 - DNA, 692 bp, Manihot esculenta
  Intron number 1 from transcript cassava4.1_012401m (locus cassava4.1_012401m.g) derived from phytozome v7.0 (chr-ID scaffold12865; pos 405709 to 406400)
aagaacacggtagttcaagattatgggttttatctattttatgtcattatcatcttgagcaatcttgagttagttcttgctcttggaggtttaatatctctcacttttgagtgattggatcgcctaaaatttttcacctttttttaaaagaatttttttaagcatgcttgcggtctcaagaacaagtagagatgcctggagagtaattgtttgtttacttccttgtggtgatgattccccacttgatttatgactgctacctacagttggaatctgagttgaagcctaggtgattccccatctatgattaggagattctgttctgatccttttagatagtagatttatccatggtcatgtacttttattagatctattcacaggaccaatttaggggtgattctctgcttgacatctcaatccagtaaaacctgattgaaattcataaataaaaaagagcttggatttgtttgaagtgtggtgaagcctacacaaaagtctatctgggatcatgatctataaattatttttgttcatattggaagaacgacttttgatagatgaaggcaaatctttttgcttaggggagtaatatatcatcaaaattctcatcgttaattctatcactgtgtcttatcgtttctaatgccacaatttgtgacgatctgcaattttgatttcaaatcaggtgt

SEQ ID NO: 44750 - DNA, 795 bp, Manihot esculenta
  Intron number 2 from transcript cassava4.1_015152m (locus cassava4.1_015152m.g) derived from phytozome v7.0 (chr-ID scaffold02998; pos 141467 to 142261)
ctcaaggtctgtattgtgtttgattaattgcctgattctctattatgaataatgtcattattaatcatggaaaattggcaagttagtttagcatactttgaattgtgcaactcttattgattgcattatttgaattttacttaacactgatacatgggttgcttatagagtgcaatttgtttctatacaatggttcaattcaagtgaattttaggaaaatgttggctggcaatttgattatgatattatgtcgaagtgaagggcatctttttgtgaatctattggcatagatatgcctgatgttttaatgggccgtttatgaataattatcttctaggtggtgtttgctatgacaggatgtgtactacaggtcaactgcagaagaaaaaaaaattaattaaaaaacacagtataatattaaagatcaattctcattgctgcagttaattgtagaaaagactgagagcttccttttttgcatgcttacacacaagttgatgtgaagaataaccttagtaactcatacttgttgcctacagaagaaaatcattttccaagcatattgattgaggactgtaaatatttgtggtggacatttagttgccatcttcttggaatatggatatgataatctagtgtacttacattcttcaattaccttaatgtattgaaaaagaaaatatatatttttggaacaaagttgattataatatgcttctgtttctttttttttccgtttaattttgatctacctttgcagttaaatcaaggagacgccaactgattgctgtcagc

SEQ ID NO: 44751 - DNA, 625 bp, Manihot esculenta
  Intron number 2 from transcript cassava4.1_007074m (locus cassava4.1_007074m.g) derived from phytozome v7.0 (chr-ID scaffold05875; pos 1752806 to 1753430 reverse strand)
cactgtaatgtcatcctttcatatactagtttcattattatttgactctgcattctagattttcatcttcaatcaacttgttattcttttctctccattatgtttagcctttgaatttgcccatgccaatatatgtattcaacaaatactaacatggttgcgatcaattacatccatttaagtatctctgctaccacaactggtgtaagaaatcttttgtgatagtttgaagttgaattatgaacttcatattaaaaattttaagatcagaacaaagcaatcagtatgatttcttttttattgatattcatagattagtatatagaaaggttaccaattgctttctagtggttgcagtagttgaacttaattgtgactgttctttgtttctccctgtagctgttccttaatcatgatctatcaattatgataaaaaaactgattggaagttcgttaagccttatgatccctgctctagtttaatactttgatcagtagcattttatcagtactttgaaaagaacttaatttgattatctgattgtgatgaatttcttataagttgttttttcataaactccggttttcagtggcatagagggaagcacaatccatccatatcgtg

SEQ ID NO: 44752 - DNA, 499 bp, Manihot esculenta; identical to SEQ ID NO: 44630
  Intron number 1 from transcript cassava4.1_001911m (locus cassava4.1_001908m.g) derived from phytozome v7.0 (chr-ID scaffold10963; pos 712701 to 713199 reverse strand)

SEQ ID NO: 44753 - DNA, 549 bp, Manihot esculenta
  Intron number 2 from transcript cassava4.1_004477m (locus cassava4.1_004477m.g) derived from phytozome v7.0 (chr-ID scaffold08359; pos 488975 to 489523)
atagagtttcatcgtctaagaagccttcttccaaggtatcaaaagtgtttgatgaatctcatttagaatctaattctatgcttttcctatttgattctgactctacttgaattggttatgcttataataattgatcactaattgtctcactgttctctcacaactcatcatgcggtttgatcctcttgaaattaggcaaaagcctaacacggcaacagttaaaattctgtagtacaaaattgaaatgtgatatatcagaatgataaatttctgccttcaaatgctcgtgaatattcatttccatgggaagaccaaagatcccaatttattgatattatgccaaatttattgattcatgagatttatagtgaaaaaaacttcttaattcagtttcttttttgggttttcatgataataacttatgagttgtggatgtgtatttcaacttccattttacagttgtgactagaagtaatgaacaaaacatgttactgggttcccacctattttgtagagggaaggtgacttagtcttgaaaaaggcaactga

SEQ ID NO: 44754 - DNA, 709 bp, Manihot esculenta
  Intron number 1 from transcript cassava4.1_003677m (locus cassava4.1_003677m.g) derived from phytozome v7.0 (chr-ID scaffold02477; pos 367941 to 368649)
gttacgttcgtaaggtaattaatttttttttaaaaaaaaatcaattttcaattaattataaccattcggtttcttcattggatgagtttcatttggttcgttttccaactggaatttttgagtgttcggatctaatttatgattacaatcgatccttatgttatttgatcagttcattgattatggctttgaaagaacataattagatcaaattttggattttctaaccagtggtttcaaagttgtttttaagttttttttttttttttagatatgggatctaccttgtatggggtggggtaatatcaaatgctttgccaataataatggtattaatttgacaagagatgcagtgattacatcggctttatttaaaagctataagtttttaaaatctagcattcagactcgatctgataatatgtaatgttttctactgatggataacatgccataagaaatttgaagatcggaatcgttgcacgatttcctaatttttagctaattccaccaggcatcaagctcttttacctgtgttactgttcactggttattagtgtattttcctacattgtaatcaggttataatgcttattaatattctaactttactcaaatcaagtttaatctaaaaactttttgatattccattgcagatatgatgaacgtcttattgttttacaggtatctggaccggttgtggttgcag

SEQ ID NO: 44755 - DNA, 988 bp, Manihot esculenta
  Intron number 1 from transcript cassava4.1_003037m (locus cassava4.1_003037m.g) derived from phytozome v7.0 (chr-ID scaffold05280; pos 660489 to 661476)
agctttgcaactctttacttagtggaaaaggtgacttctttgccttaatttttatctcacttttgaagcatatacgggaatttgttctttttattggtttattttcaattttcatcgtatttaagcttataaagccttagagttatatcggagggaacttcttttgatcccttatacttcattttgtgataatttcagctaacttgttagctctgagctccttttattttgaattggctattcttttgtttacggcaatcacctatgatttcagaggggagcgagagcttttccttggcgactgacttagagggagaaatggttaaaggctacgagtagcactaaagttagggaaaagctccgatctagtcatgctggtgcaggacttatggctcggaaaaattagaagctaagcattcatagggccagagaaattgctggattgggtgaatgatttatttttattatttttgttgtttgttgttccttctgtatctacaatttctttcattgtgtgttacattaatggtttgaattagctcgcatatagttttgtagtaaatagggcttcatggaagaaacttcattgtgtaatgaagtaactgcttatatggtagtttagggactagggagggcagtgcttcaggttcaacatataccaacagaagaaaacgttccctcttcacttgtcaatgattgagctgtagtcaagttttgcacgcataaacctctaaacatgacagtagctccagaaatgcttgtgggaagttcaactggaagtacttttcgttttaataactaatttggaacttactagttttgattaagttcttcttcttgtccatatattttatatggtttatacatcactttttggcttgttgtgagtgggtgatcttttttcctctaactatatttctgaaattaattttcattggaatatgattggacagaagcaacaagcacagcaattttttttgagtcaaca

SEQ ID NO: 44756 - DNA, 622 bp, Manihot esculenta
  Intron number 2 from transcript cassava4.1_011572m (locus cassava4.1_011572m.g) derived from phytozome v7.0 (chr-ID scaffold03410; pos 61881 to 62502 reverse strand)
caatccgttgcctcagcttcagttgtttggagattgtgagtttgtcttaaaaccaatctgagtttctgcgcttaataggctgtagctcgtaaattttaagattattgcctggtctagaatggtatttgtactgtcatttgtcttttttttctttttttgcacttcttcttctccctcttcttattttattcgttttaatttttgtttattttctgtacgtgtatgtgtatgttttgatatgttgaaggttgttttatgcttaatggatggaggctttcatttgatgtatgcatctaagatggagttaaggcttgaatatgattttaggttcatgttgcttccgttagacagctgcaatttcaagagattgtcataggaagagggaaaaggcagaactttagatgaaattctttggtggttcatcgcctcccctcccatgtcaattttgttttcgcagcaaccttagttttaacttgttgcatgacttcttgttcatgctcagtttgcttattccattttccatttcctcctgttttgaatatcttgtgattggcctagtttcattgtgatattgcaatgtgccacagatcaagtcagaagcattggaggccccttaaattac

SEQ ID NO: 44757 - DNA, 397 bp, Manihot esculenta
  Intron number 1 from transcript cassava4.1_011572m (locus cassava4.1_011572m.g) derived from phytozome v7.0 (chr-ID scaffold03410; pos 62574 to 62970 reverse strand)
cagatcgttctttcccaccatcacgccgatttcaggtcatttaatttatggattactatgttttcacctaaatttctatatcagattgatttcgttgtagcgtttgatgaattcctgcggttttgactagaggcctttgtagttgtttctgcattttctgggtatttgtggtacctttatagggtatctgtttagcttattggtattgcagagatacttcttttgatcgttatattctcttaaaagaaaattccaattggatttttaatgggtattcttcataatccatatttttctaagaagttgcctgagattacttcaaattgcaagaacacatttgactttgattctccaatgaagtctcagttcatcttgttcttgttttccgtataggaac

SEQ ID NO: 44758 - DNA, 958 bp, Manihot esculenta
  Intron number 3 from transcript cassava4.1_011093m (locus cassava4.1_011093m.g) derived from phytozome v7.0 (chr-ID scaffold03859; pos 427292 to 428249 reverse strand)
tccggcctgggtgggacttgtttgctccgtggaaggtcagttgacgttagtttcttcttctgcttgttatgatggctttctatagtttctctttcaaaattttctttttgtctcactttaaatttcaagtcatgaaggtataaattttcagtatttatttcaaacagttcttggggctgcattgtcagtactttctactacgtttcaattgacaaaaagattctatttgagttttttttcccctgcaattaaaaaacctaacgaagatctgtatgttctctgagaaatggctggttaattgtgctgcaaaatccatttggttacaagaggaacgtgcatactaatgttgctgttgttaatggtgtgattgcattcttgttagttttttgagcaagcaccggttctgaaatggaagaggaggttattcttaagaaaaggcctctctcaggtgaagtcaaccacagtatctaggtgcattagagtctccacggtgaaagctactcaaatttagatctctgaaagcctaaccgttctcttctattccaggatttgacaaatctagttaaatatgatagaaatgttaagtggtgaatatggcagatagacacaaaaggtgtatggagtgctttcttcatgccgcagagacatacatctgtttatttggctgcatgtatttcccaagtgaatttttatctgatatctagacacagtaggaaagattgcacatgttaaggttagaaaaatgctatttgcgatggtaactatgaaaattggtcacaatccagaatccaatgtccaatttggttgaatgtgcttacttttatcatgtaaatatacatatgacagatccgggctgcaaacctgcattgatcccatgagtcatctattgaatgatgggcttatattatatcagttgctttattgcaggttgataattttggcacggttagccttgtcg

SEQ ID NO: 44759 - DNA, 826 bp, Manihot esculenta
  Intron number 1 from transcript cassava4.1_007332m (locus cassava4.1_007332m.g) derived from phytozome v7.0 (chr-ID scaffold12794; pos 1308354 to 1309179 reverse strand)
atccctttgttgttcagcttcgatactctttccaggttcttctctctcctcttctgtttcctttgtttgtggattttgtattccgtttcttcttcttcctattttctctctttctatctattttgtggtgtaaaatttgcctttctctaatccagcgatgtagatatatttcggaattagatcctcttgtagttgaattaacataaaagtttgctctatttagaagatcgctttttaggtggcattactttgatgagcattaatctcattaccaatagcacgttatgcttgtttaaaagttgtttagcctttccaacaaaattttgtttaaaattgagttctacttgatatgcttgttaaatttattgcacttctttattttggcttatgtctccttttgggttaaggttgcttataagatgactatagttctcttctgtttttaaacatggcttttttattgctatagaaatgatattctagcttactttttgtattgttcaatttaagtagcaatttgagtggccatattatccaactgtagtagaagcaggatgaacgttatcgctgtaatcaaatttctagtatgcataagcaagttaatgaaacaaaggtttatggatgactttagatagtccttagttctcacagccatcaacgcatatggcctagacacttttttattatgttactgatttgagtatgtgtatactgcattgtttatttccctgtggaatggaagtgatttcagcacgaattgttaaaattagattgtcctcttaccttttcagacgaaggctaagctttatctgatcctggattttat

SEQ ID NO: 44760 - DNA, 786 bp, Manihot esculenta
  Intron number 2 from transcript cassava4.1_003220m (locus cassava4.1_003220m.g) derived from phytozome v7.0 (chr-ID scaffold11882; pos 92998 to 93783)
ttgtatcaaaattggaccaacgttagttcccccatccttctgtaaccctttgtttggatgcttaatagtgtagggagaatgaggagaaattaaagaggagaaatgaagagtaaaagaatggaaatttgatttactaagttgttttcatattaattgagttatgtataatttgtttgttttgctttttctcccttttctgctggcggaaaaggagttttgccgatctagatcttaatgaatgtgttccaggactattcactgctgattttctgtaaaccaagtctaattatctggaggatgtgaggctgtatcaatcaatgtgggaaaaaaaaatggttagaaacaatgcattccaaggaaaaggaaagaacaaattttatgcctatactgatgtaggggcatctctcaactctggcaaagtttaaagtttaagcccttgttaccagttttttgaaaaagaaaaatgaacaccaaagtttgaaataataattttgtagtatcttaaagagaggagctttggccaataattttgtttgtcgttcctaatctaaatttgattttgaaatacactctttagtttcattaaacatttgaatagtattatgtttattttctgtgtctcattcgctatttttcagagttgtcttctatgggattagatgagtcattactaattgaactaattacaaatattctcgaaataggattactttgctaaaaacagagtaacgttagaatttcccttttgtaggggtgccttctcatttactattacgttctgctgct

SEQ ID NO: 44761 - DNA, 280 bp, Manihot esculenta
  Intron number 2 from transcript cassava4.1_032385m (locus cassava4.1_032385m.g) derived from phytozome v7.0 (chr-ID scaffold07873; pos 97599 to 97878)
aggtctcaacacacaagaccttgttgtacttgtcggtaagctttaaatacttcccggaccgtccaccatgaatcaaaacactgataaatgagtttgtaaaagaaaaaaataatagatgtgacgacttgaatatctgttgatctatggagaaccggatcttcttaaaaacttacgtaggctactctcattttacactatgaatcaatatggacctgacaataattttgcgtcttgtaatactacaggaggccacaccataggaacaacagcttgccagttc

SEQ ID NO: 44762 - DNA, 528 bp, Manihot esculenta
  Intron number 1 from transcript cassava4.1_031075m (locus cassava4.1_031075m.g) derived from phytozome v7.0 (chr-ID scaffold11853; pos 114595 to 115122 reverse strand)
gagtagccatagtagcttactgaagattcctcagtgtaagtgattctatctgctttcacttctttttctttttttttttctttctttttttttttttgtatttttttgatgctaatatattcacgtagtgagcatatattatgaaataaggttgatcaacatatgtaatctgctcattgtccataatacaaaaatgaaggatctggatttgatctcatatgggtgggagtgattaatttgcattcatccacacagtaaggatatctagatttttcaattgaaacaaattgctcctggttattttcttttattctgtgtgctatttgtaattgaaatactttcattgtaaaggcattcttcctaattctctctatacaattttcacattcaagtctatatttcttttcgagttgaactactgtttcttgatctatcaagaccttattacattttcttcaggaaactagtttttttttttttttttttttttttaaattacattttctcaagcaatattctttactacag

SEQ ID NO: 44763 - DNA, 568 bp, Manihot esculenta
  Intron number 1 from transcript cassava4.1_004076m (locus cassava4.1_004076m.g) derived from phytozome v7.0 (chr-ID scaffold05875; pos 1711885 to 1712452 reverse strand)
tccgctctcaggtaaattagttagtgcttattaatatgtttggttttttgctttttttttttgggttgttaaggaaatgggagaaatttaaggattgaaaagtttgaattattttacaggtggaactgcatagagctaaattgttatgttaggcgcttggaatttttttagtttgagtagatttttgggttgtatttggttgctaagaaatccgaagcaataataaagggaaaatatttgtatgttcagaattaggttaatctaacttaattatggaataatatttttttcatttcatttcttactctatcagccaccaaatagagtagtattgaggttctaccatattcttttatcgcattttttttgggtactgatgtaatggatgaaggctggttgtggaactgtggaaggaaaagcatatggttgtggatctgtgaagcaaaaagacaatgtctgcttgatgctatgcgttttatatttttataaagctcatgtgtaacctgaaagtttgtcttgatgtatttgtctgtcttttggttttcatttaccaggtagcagaaaacag

SEQ ID NO: 44764 - DNA, 450 bp, Manihot esculenta
  Intron number 1 from transcript cassava4.1_026771m (locus cassava4.1_026771m.g) derived from phytozome v7.0 (chr-ID scaffold10305; pos 41596 to 42045 reverse strand)
ggtggactacattcaattctttcacatttggtaagattaaaactttatatatccattatctattgtatgatcttgccggactaacatatataaagctaataagaacaagactatgttcttattgaaatatatctcttctgttgttcaaaagaacatcttaattatcatagaagatatattaatatctgaaaatataagatttagattatttatgattttagatttgatttagtagttaagaattatattctctttagattttctgttatatttttttccctatctctccttccaaaaaccaacaataaccaacagttctaacattaaagtcatcctatatttaaatcttaatatttatttctcttcttaaattccttgaaaaattggagtgaatgctgaaaaattcctggtgcagctgtagttgggcaagggtttgttgcagtgaacatt

SEQ ID NO: 44765 - DNA, 512 bp, Manihot esculenta
  Intron number 1 from transcript cassava4.1_007022m (locus cassava4.1_007022m.g) derived from phytozome v7.0 (chr-ID scaffold06825; pos 140617 to 141128 reverse strand)
agtcagcttgtttctctgtaagttgcttttgattcattttggcatatttggtctatgtatgctgtttaactattgctgcttacaatcagaagtgggttaaattgaagggttttaaatggattgaagaattaaatctgttgtttttgcctgtgattcattgtcaaaatggattctgctcatgtgaaatctcacttggagggtatgagctaactatggaagctttgagtagctggtatcttccaatttcaattacagttaaagagtaagggaaaagagaagaaaagaaaataaaagatttttacttcctttgacttgtgacgtttactaagatcttctatttatttgacttggctaacatgaatgatcttgctgctgtggttttagttaacagtgtttcttccttaggttattagcatatggatcaatttgatttgattttcggtgatttgtttctaattatctctatctatttgttagacttcagtttgtgcggctggagatagtgctgcata

SEQ ID NO: 44766 - DNA, 335 bp, Manihot esculenta
  Intron number 1 from transcript cassava4.1_019915m (locus cassava4.1_019915m.g) derived from phytozome v7.0 (chr-ID scaffold12004; pos 252028 to 252362)
ccctcagcttcgctctacaaagtccgacacgtaaggtactgaagcttcccctttttcccactacttctattatccatttaatcgtataattttttttctcattttccctcaattttatcgaacgatcgctagttcttccctttctctaccccccttcaactttggtggttgtttggtcaacgagaaactgctggaaaaataaagaaaatttagttcatacggtgtgttcatttctttattacttgttgcaaaagtgtctagctcagataaatttgattatgtgggttctaattcatcaattgaatcaaatttacagatccttcctgtgaacaaaa

SEQ ID NO: 44767 - DNA, 955 bp, Manihot esculenta
  Intron number 1 from transcript cassava4.1_004988m (locus cassava4.1_004988m.g) derived from phytozome v7.0 (chr-ID scaffold09492; pos 22943 to 23897)
tcagaagcaattccctggatctagacagcggagaggtttgtagaacttgtccaagtattttagtagtctattctatttatcacactttcttttcaaatttatttcaaagaaaaggagactttttaagatgagaagacaattgatttatctaataaaggaattgtcaagaattattaagcactagcttttaaggaagaaggccaaaaggaatattctcttaaattatactactcgtgtctctttttcttttaccctcatccaacagcaatcattctgcttatcatgtaggttcatttatgtatgatatccaagaagggatggagtagattcacctaatttttttggaaggggaaacaatgtggatgaaagaagaaggcaggaacaaagcataagttgagaaaatgattgttcccccttttgtttgaattggagggaaaatggggggagtaaaaatgtagtaaatgttattatgaatgataaaattatgagtttatcctccattattgtgggaaaagtattataggaggtgtatggcattctccatctacccttaacattctctctgatttggatagagaagttttggttgtctaatgtgcatctttccactctcattttttcttccttcactttaccttctccagtgcaatggaaaatggttttttgtccaatgttcttccctatctgttttccccctattttaccccattccaagaatacagtaaaaaaaaaatctgatatgatgattgagtggttcttttggaataattttggccttattcacgcaatcaaatagtactaattatttttgagtagtcagagtagtgaaatcattagaagctttagcaaaaagaaaaatggaaaagagccctgctgtgttttttaacctttctatttttccctgtaactttaatggttgttttcctttgtttcgttttcaggtgatcatattttt

SEQ ID NO: 44768 - DNA, 578 bp, Manihot esculenta
  Intron number 2 from transcript cassava4.1_002328m (locus cassava4.1_002328m.g) derived from phytozome v7.0 (chr-ID scaffold05859; pos 612864 to 613441 reverse strand)
tggcagctgtggatttgtcatgtaagatttcgttggttggctcagttacattatagtgtattgctcagtttaatttatagtttgtcaatctgcaatttgttctattaagctactagaatgaatcagaagaattatccatgataatcgtaattggacaggctctatgaagttaatgataaatttttttggatggtttaaatgaacattgctgaaatgcaatttctccttttatcattatcttgacaactggaaggggtatgcatgcatctctaaatattgctgttcatggctttatatacatataggctatataaattagtttaagaattgaggtataactttttatattttgatttgagcatgtaagacaagtattgcatctctagggaaaacatgtgatctctcttcttcaaaaataactgtatttcttgtggtttttattctttcttattctgtgtaagcctcagagactctttatgtttttattctattcttttccaaagagatgaatacttcatgaactcttcctggatttatctgcagcttcagaagaatttttggagcttactaagagtgca

SEQ ID NO: 44769 - DNA, 914 bp, Manihot esculenta
  Intron number 1 from transcript cassava4.1_030682m (locus cassava4.1_030682m.g) derived from phytozome v7.0 (chr-ID scaffold02080; pos 126852 to 127765)
tagggcttcccctatcctttcagtccaataaggaggtaaaacaccctcagtttcttttaaccttacttgtaagttactcatatgtgattcacgaagaaggtccattgatattatattcattatgccggtcattgtgttcaatgcttacctgattttcttttttttgtttagaaaagaaaagcattctgtggagtgaatggtttcatgaaataactagttatcgtgaaagaacatgcaagtcagtaatgcagctaggggcatgggatgtgatatgatatcagggttatcaaatcataaattagtccattctgacaagcatttgagtgtgctttagcatcaatttggattctgtgtctagccaaactatgccattgtcattgccactcaagtgtttctctctcttattttctttggaagatatgcaccacctgcttataaattgcacttcagtaagatgccatccatagaaaaatttgagaaccaaaggaacgctatatttatttatagcctttggactatacctgtccataaggaaagggtaccaggtggagacatattgacattattctattttggggggaaaatatcatctaagtccaaaatgtattgtttttaattcttttatgaaagaaaacaatctgattaattgaattctttagctaactaattcaatgcatttaaagtggctatagcttattttgggttttcttttattattattatttcttttaaacttcaacataagaccaagaagataatagaatttttcctccctcactaatgttagttgtatcactagttgttgttcttgttatgtttgttgctgttgttctgtaattgctaatgttatttcaactgataatatcaacaatctggcagtcaaggaacaaaatttatacaggcaaaaggaaagg

SEQ ID NO: 44770 - DNA, 719 bp, Manihot esculenta
  Intron number 1 from transcript cassava4.1_014827m (locus cassava4.1_014827m.g) derived from phytozome v7.0 (chr-ID scaffold04438; pos 169 to 887)
ggtagcagtgggtattggaaaaatagcaaagattttcattttttaagtccattattgtgataatgctatgcctattttcactgggttttttttcctcaaaccatattctccttttaatttaaattaataaaatttgaacgcaagatatttgtataattttctaattatttatatattttataattaatttgttactgtttaccatggtttattacgtttttagttaaactaaacattgttatttgaattttgaaaagctggcttagcgtgatggatttcttattttaggagaaatgatagaaatttaatgtaaaaataaaattttatgtccgtttcagtccaatcaaatttaccctttttaacactttttttttaaaaaaaataaagaaattaccccttggaaaaaaaaaatacaaaagcaaaaatgtaaataaagattgaaatgcgatcattcgcacattcgcgtattttagcgtgagcagagcacgtttaagcggtaaactagccgttggagatcaagaagaaaaggactcgatacaatcttcaacgccgtcgttgcaacgttcaaaaaagaaattttaaaacagcagcgcttcaccaactctcttcttttatatactccagtccagaacccacaagatcaatttcacacatttctttcgctctcttcactggaacgcgtagaagaagagcgaagaaaaccctccctgagtgtctct

SEQ ID NO: 44771 - DNA, 986 bp, Manihot esculenta
  Intron number 1 from transcript cassava4.1_010762m (locus cassava4.1_010762m.g) derived from phytozome v7.0 (chr-ID scaffold03581; pos 1230066 to 1231051)
aatctcagatctcgtgtgagcaggtaccgattcaggtaccaatcctctcagttcctggcttcttccccttttatctttattttatgctgcaaaagaatcgggtttccttttggattatttttctttttgtggttgtgtctatctaagattatagtttcttctttaaaagatgcgtttagggttcatgcttttgttgtctgtttctgtaaatttgttccaatcgctgagggatcttgtttaatctctcgttttcgctattttaattcaaagatctagtgtttttggtaagtttttctcccatcttttttcctttgcttagctctttctgaatagtaataggctaagttaatttttgcgtttgattcttttggtttgtttatgtttcaattatcaattgaaggcatgaatttactcagttgttctcttccagaaagaaaaagaaaagtatttttattttttcatagatgaagctcagattgatataggtatatatatataaatatatatgagacccagctctcaaacagttgtgtctatttttattaaacatctagttttttttttatatattttacttttgattttttaaggtcttatttattttccattttttgttgctttctaaaccggtttatactgtataaatttattgtcaggttgaattggaaatgaaatttgacttgcgggtcctttgatatgattttgatataatatttgtaaggaattaagtgggaaggttctgtagttgtagcttcattatttttatttttggattagtttatcatttctaaatgatggtactgtgttgatagcgtcacaatttctcaatttatcttgcatacgttctgcttggttgcaatccattctagatcctgcatattttgtactagtattgtacaattctacttgattcatggaatttgtatctcttttagcaataaaatcaatgggtttgttttgtcaactcattgcagtaaataaccaag

SEQ ID NO: 44772 - DNA, 697 bp, Manihot esculenta
  Intron number 1 from transcript cassava4.1_001250m (locus cassava4.1_001250m.g) derived from phytozome v7.0 (chr-ID scaffold03299; pos 199469 to 200165 reverse strand)
gcaacaagaagtcagaggtgaaagtttgatctgtgtttagcgttctttcctcttttttattttattttattttttttttctcttttgtgtagttttattgcattaggtgtgtttgttaaaatttttatgcttttgctgcttatagaatataccattttataattctagtgaattgagccacagagtgtcttgacattgtatgattaaagtttccacattgacagattctcgtccaaggataggaattcattgcaaataaattactaacgaatataataagttttttctttttctttttcctctttttttccttattcttggacagtgcaaaataaatttattcagatttgaaggtgaaatttccaatgatgagataagaacaaaaatacggctgaatattaatgtgcacatgaatcggagctggattggttactaaaagaatctgattttcaattatcaactcactcgatcactgtcttcatcttatggatctttttgaaccctgctgctagcaagcactttacttatcagttaatgcaaggaatttgatcttttaacctaagcttttgtagtgtgttaattttaaatatgtacatgtgaaagattgctgttttaaacttgtatttaatgatctaaataactttcctgtattagatatttccctgtccaagatgtactcccttctttgtttgacaga

SEQ ID NO: 44773 - DNA, 410 bp, Manihot esculenta
  Intron number 1 from transcript cassava4.1_023903m (locus cassava4.1_023903m.g) derived from phytozome v7.0 (chr-ID scaffold10305; pos 270886 to 271295)
ttatattcgtaagatgtctcatccttgatgacctgatttttgttctattgaggaagtttcctagacaaccaataatactctcttcttttgtttttccgagggccagatcgttttgcttgaacctaagttccttgtaaaagttaaattagtctcctacatgtaatctggttgaactgttaattgcaatccaactgcatataacctttttaactttgtaaacttttttgagtactactgtttctataaatgagactcaatgttttgaccaaaattaaatcatgtttgtgctgtcatgaacattcatttacaattgttgccttctgccttctggttacaattttttttaacatatataatagtattgaaaatgttcttgtatgtgattctctatgttcacatattgcaggctc

SEQ ID NO: 44774 - DNA, 417 bp, Manihot esculenta
  Intron number 3 from transcript cassava4.1_014598m (locus cassava4.1_014598m.g) derived from phytozome v7.0 (chr-ID scaffold09692; pos 75881 to 76297)
ttgctggaacaaaagggaaggtacggtcccagtttaaacctttttgttaataaaataactagattgtagactattatttgaaccatgttgcgttttatttgcaattgcaatttattttaacattccaatcaaacctttttgttttaaagtgtcccaaatttacatttttgaaatgttgtttgatatcacgtaagcatgttcgtggaaattgatacagtttcacttcattctactcgcacaagaagaaaaagagaagaacagaaatgaagcacagcttcttctgacatttattctgtcagattttgatctgtggattgtttaaagtgtattaaaatttagtaaggaaatgatatttgatagcacttgttctttaacatggtttgttcttcctttgattgttttatttcagggttcaac

SEQ ID NO: 44775 - DNA, 599 bp, Manihot esculenta
  Intron number 2 from transcript cassava4.1_031120m (locus cassava4.1_031120m.g) derived from phytozome v7.0 (chr-ID scaffold07851; pos 62381 to 62979 reverse strand)
aattagaatccgaacatcaaaagaaactctccgaggtatcaataaaatatatctctcttttttcgaataaaatggatatatagtcaagctgaccatacactcagtagaaaatatttcgcctttcacccttacacatatttaataatatcttcactacacctgtgtcgtggtcaaaatttaagattaatacttgattaattccaagtaaatatgtcatgatactgataagcacacaatggaatttgaacttaaaatcttccgaactaaataaatctcttttgcaacttgaactcaccccttgaaaataataaaatttatttctttagctataatttattcaaacaaaaaattataaaatatacgaaaataattgagaaatagcatttttctattggatactcctaatctaaaaaagaatgaaacttgtagaaataagatcgagaaaataacattaaataatctctcatagtggactgctttaaacttgaatcaaaattgattggttttttttttttttttaacttggattgaaatgaaaatattttaatttggtgaaaaatgcagacaagtggaagttcagggaccacagtgaaaaggct

SEQ ID NO: 44776 - DNA, 811 bp, Manihot esculenta
  Intron number 1 from transcript cassava4.1_004533m (locus cassava4.1_002969m.g) derived from phytozome v7.0 (chr-ID scaffold05501; pos 74297 to 75107)
tttggatcctacggattcagagagttcaagaggaggtgagtcgattttatttgtttatgtatttttctccgatgggtgttttattttggtttgggatattgtagataaatgatggattttaaagtgggcatctgtgatgttccttttggattgcaaagttggggaaaacttgtttttggctttatcagatcccttaatctgttcttgttttcactcattttttctcttggcatgtttctggatgtccaaacagctagttcgtatgttttgattttattggtctgtaatatatgtgcttaaattggtattttgtttgtgggtattttgattcatgctgttttagtgttgatcattgatttgtttatgtatttgattttttctctaattggttttgaatttgttgtctaatattctttttaaatatttcatagctcaaaatactctctttgaaaaaatagaagatggatttgagttgtataaagtgaagaaggctttttgaactcgttgccatctcttttgtaaaattgggggttaaaggtttttagaagctgacttttaagcattattctgaacaaaattctgaagctcttcacttctgacacatggtgagcaattaaggagtttaaacttttaagtagctaaaactgaagaaatggtattgccatttagttatagtaagtgcatttacggttattgagtttcctttagcttggtgtgataattgattacaggtttaatatatttttaggtgttttccacttattctttttccatagattgagttggctgatcactgaggacttggtgcggt

SEQ ID NO: 44777 - DNA, 825 bp, Manihot esculenta
  Intron number 1 from transcript cassava4.1_006393m (locus cassava4.1_006393m.g) derived from phytozome v7.0 (chr-ID scaffold00560; pos 237772 to 238596)
agttctgggcgtgaggggaacgtgttgaatcccacgtcggttgtggaaaggggtaatgtgccccttatatagggggccataggcactcctcccccttgagctagcttttgaggtgagttatacctgacccaaatttaacacttcataatataataatatgcatgtattattttatatagttttgtgttataaattatgaactttagaattatagacaattagttaagtaaattaactaaaaaggaaaaaaaagaagagggagaggaaaaagaatggttggttgaagaaaaatagttaaggattttatatacattttttttatagcaaaagtgaataagatcttaaattttgcaaatataagatctaacaaaacctttataaatagttaattgaatcgggtgaaaatttagttggttcatattgattcacttgattcaaattgagtcataagtcatgtattgtataggtttgaattgttaggatgtagaattgaatcgagaatcgtaagattcaaattaagaaccgcaaaattcaggtatatttaagattcaccctatcaattcgaatcgatttgttggaaaatagattcgatcgatttgttggaaaatatattcgaatcgtaagattctaacaacaatggctccattaagtcatataatgttagtcaaatgaaattctcatgaacatctcccaatgaatatttaaaaattaattgtcagtttttatatgttattttcttaaattttgtctgttatgatgtatgaaattctgaattcacatcatgataattcattgccttgagcaggtgggactgcagtttccatt

SEQ ID NO: 44778 - DNA, 844 bp, Manihot esculenta
  Intron number 2 from transcript cassava4.1_006393m (locus cassava4.1_006393m.g) derived from phytozome v7.0 (chr-ID scaffold00560; pos 238638 to 239481)
atatatcatagacttcagcttgactggttttcaatgtaatatttctcgagtaaacttaatttttgatagtgggatgttgttgctctcgttttcttttccttgaaagtctttgtatgtggttatttagtttaaattacatctcttctgttccttacctccaatttgttaatgtatatgtgttctagaataattgtgcagttactagaattagagattctattaagctgagaagtggaaacgtggatatggatgtgggacatgagaacaataaagtgaagtgacatgtcaatttattaaataaaaaagcttcataacaacaagagataacagattagacctacacaaactgagcaagtttatacaaatcgacaaaggagtatatgttagaaaggtttaaaggctaagttattacatattcataattttgttaacaagaaatggaagtttgtccgagtttcaaatgtagaattcagctaaataacatattggtactatgtaagtcataacttttatctttaaaaaatttgagtgaataattattcatctcctctaaaagtgcacatgcaaagaaaacagtaaactcaatttgaatagagtaaattgcaaaaagaactagatggtacttaagtttagttgaataagaaccacgagaggattgtagttgaagaagagcttgcatgattgtaattgatggtcctgttattctttgttcacgagagagcagattaaaaaatagatccagaaaattatgagtggttactattaatgtttgtaaatttatactactgctgctgtgcttatatatctcttgtttgcaggtttgtgtggcctcgtgacctttgct

SEQ ID NO: 44779 - DNA, 310 bp, Manihot esculenta
  Intron number 2 from transcript cassava4.1_002263m (locus cassava4.1_002263m.g) derived from phytozome v7.0 (chr-ID scaffold09880; pos 169552 to 169861 reverse strand)
tgtattgtcttggggaagggtatggctctcttcatgaatatgctacttcttcgtttcttccctatgtatcatgcaattctggaaaatgtgaaaatgaaatgtttgatatttcaagtgtgcctcatattcttatttgttttagtctaatgtccttttttccagtgtataaattaattagcattttcttttaaatctctgaaacccttatcagtcactttcaaaattgtcatgctggtcagcatgatttgaggacagacttttcctttgttttataggattgttggacaggtggcagttactggaaaacatc

SEQ ID NO: 44780 - DNA, 613 bp, Manihot esculenta
  Intron number 1 from transcript cassava4.1_002263m (locus cassava4.1_002263m.g) derived from phytozome v7.0 (chr-ID scaffold09880; pos 169997 to 170609 reverse strand)
gctgtgttttggaagctcaagcatcgagctcgaatgtaagttgttaaaactttctctttggtgttttttcacttttgagaatatataagtactgattttgtagttcttctgatggatatcttgatgcgtcttgttatagtcaaatttggaattttagtacttataggcatatatgtaatgcatttttagcgtttgagttaatttcaagttgatgttcaggagattggttgtcttgtggtccagtttattttatttattttcaaagaatcatttggggctatgatggtgtatagcatgctgggtataacttagtttgggagggttttgagctagcaactggtaccaaccattgaatttcacatggtacttatttttcctatgagctttggcttttatagctctctgtagagaacaaaataggagattattaccaactgcttatgttactaattatgggaataatgttcctccttgtccaaatagttggtctgatattgagtgtcaatttacgtttgcccttagtgatgtaggtaaacacccatagtatgtgtgttgaaatcttttctgatttttttagtatttctaatgtttaacagggtgttaacttgggaag

SEQ ID NO: 44781 - DNA, 945 bp, Manihot esculenta
  Intron number 1 from transcript cassava4.1_004083m (locus cassava4.1_004083m.g) derived from phytozome v7.0 (chr-ID scaffold04205; pos 92484 to 93428 reverse strand)
cttctgttaaggctggtaatatatgatctttatagttttttttttagtgaaatcatgtttgggaattttctgttgttggtagtgacgcttttgcttaagaaatgatttctatatctgatttggttaacttatttggtttagagagaagatttcggaactataatgagattgtacgaattttcctctgttaagttataaaatttcagatgtaggtgaagttttcttcaactaatactaagaagacgtagtatagtgtagtatagtgctagactcttcagatctgttagtctttgatgtttgggatttagaaggaagtttaggagaatattccgattggggatagggatgacaagagatcgggtaccaatcctaatagatagatttgggtaattataataaaatttgagacggattctaatttaaaaaatatcagactgggttcggtctcgtgtacaggctgcccattatcataacccatttatataaataattaacttaatataaaaaatatattttacaataatatttataaattttttatatatttttatttaaaaatttaaatttaaatattctttagaagtattggattttttaaatgaaaattattaatgaaaaatattttttatataaattattaattaaaatataagattaaactaattcgagttttattcggataataataaagagttgagacgggttcgtatattttaattttcgcggctaacctacctgtttacttacgtaattagggagagtttcttttatcacaagttataaagttatgctgtggatgaaattttcctaggtgttgctatatgtttttctttctagtataaactttttataccggtaaacaggctttagttgttgtccagattacagatgcactaaattcttttgtgtattggagtggttcaggaaagtggcaaaggaacaaat

SEQ ID NO: 44782 - DNA, 1029 bp, Manihot esculenta
  Intron number 1 from transcript cassava4.1_034080m (locus cassava4.1_034080m.g) derived from phytozome v7.0 (chr-ID scaffold11287; pos 44378 to 45406)
ggaaattcgatttcgggtctgatctgaagcccaaggtgagtttcgattccttttttttttcttcgtgttgattcgttgatgggtactttgtatcttctcctggatataagattagattttgtttattaatcgttttttgggtttggatttggatccaacatctgtatctaagaaatgcttattctggtggtacattattcaatggctatcgatgaatatgctctcttttttcccccgtttctttccctttgaatgcttttattctgatgtttgtcttatcacattgaaacaggataaaggcagatatttctttagtgtttatcccccccttgaaattctttatatttatgcacttatagtttggcataatttttcctttttatccggaaagagatgatttataagagtatgattatatatacatatatatatatatatatatacatacacacatatatatatatatctgtgtgtgtgtgtgtgttagacatttggatgattgttatgcctggaagttcatagttagttccatcaaataaccttattgctagatcatattgttacactagtttagcatttgtccatcagtatttaaaattgattttaaacaatattggagcttatttaattgatttaataaattgaaccaataaagggcttctttttttttgtgtgtgattaaaaatttctgttcatttgatctaaaactattttaatgtttttccattacatatcattctgatttacaagtcagaattcctattacttgttccttttacagttgtttcaacaactttgtttatcatttactttggaagatattttgacaccaactaaataaagtttgttgttcaattctgattattaagctcatataattcttctctttatcatttactttgtttatcattacatatcattcttctctttgtttatcattacatatcatccatttatttgcttcaagaaaaggaaattttggattatttgatgacttctttccatttctaattctgttgcatgccagat

SEQ ID NO: 44783 - DNA, 890 bp, Manihot esculenta
  Intron number 1 from transcript cassava4.1_004704m (locus cassava4.1_004704m.g) derived from phytozome v7.0 (chr-ID scaffold00131; pos 126010 to 126899)
aagtttctaggtatggtatatgttaccctaactaaaattcttgttttcgtttttgttcttcttctcattcttcgccctccccttcttcttgtttgtcatattaatgtgctgctttggttgagattaacatcttaatttcgttttgtcaattacttagtattgcttaacaaggttttaacaaaacccatgtccttacattttttttcccaaaaagggtattctttctttcttccttctttaatttttgctcttttgctttcttactgatggtaatgatgtgaggaagaattgttcgctttgattaataagaagatgccaacgaagtcattgtggctttttgctagaaaaaatgactactcttttactgctgcctgataaaactttttgaagcaaatttcgtttacaggtttttgactaagaaaatgactgctcattcacagactgagatgctataatttcttagtcttgtttttgtgatttcgtgtttgaaaaagtcgctgatgggcttgtttatggctccatttctgactcgtttttccaatttgaaaatctgtaccttgctttctggtgcaagtttcgctggtctttttttttccccctaaaaaatggctaaacttttggatccttaggcacccatcttctaacaggaaacttctctcataggctttatgtttgtttcgcaatttgaatagtcgcatactaaattaggcaaactacaagtactcagcaagaaaagaactccaacttacacagcattagcaaagctcattatcacatgaagtttctttgttattagttaacatttcaatctagggttcctcttgatctctcatgacttaatttcttctctctatttttatatgtatatatatacacatatatataggatc

SEQ ID NO: 44784 - DNA, 513 bp, Manihot esculenta
  Intron number 1 from transcript cassava4.1_002953m (locus cassava4.1_002953m.g) derived from phytozome v7.0 (chr-ID scaffold08686; pos 72927 to 73439)
ccagtatcagggtatattttctgtttcattctatgtctcacgtttgtgaattagttcttcccttgatatgggaacgtggctccaattttttcttcttctttttgttgatttgatctttaaaatcaaactcacatggaatactggatactttgccaaggtgctctgtttcatctgtcactgtataaattctaaatgtctaattctacaattcttttgattcaaatcttaattttgtgtcttgtaattgttgggttttcaatcctcttgttgttattagcaaatttaggattttggtttgattttgattttttgtgtatatttgtttggttcctcctagaaacttgaacatttggttttatgatttttcattttggtccatgtaaattgatctataattataatgagttgtgagttttgactatggacattctttcaaggtttggtttctttttctcattggacatcaatgattctgcagttacaactactaatcaagcaatcacagctctgaaa

SEQ ID NO: 44785 - DNA, 924 bp, Manihot esculenta
  Intron number 1 from transcript cassava4.1_014051m (locus cassava4.1_014051m.g) derived from phytozome v7.0 (chr-ID scaffold08359; pos 2115751 to 2116674)
agaagctccaggagatccaggacgaactcgaaaaggtgtgtgtttacgtgtactacgtggattttatttgtgtttgtgtttgtgtttgtttttggatggtttcatggctccttgtttgttctttggtttcgcgtgaacagccaaagcagaattcaggcaaattgtttgaacaaggggcagttgggtggaagtttatcggaatttcgtttgtgaatagtgtttgtatttttttttcccaaaagttattggttttcttttatgaaaatttcctagtagagaagtttttttttccgttctaggttcggaaatgagcagttttactggatctgtatgaagcaactgatgtgtgctttttgataaattggctccatactgcgtttctatgcagcaattgggatgcattatttcttaaagctgattttttgtttcagaaaaattttgtaatggttcagtgtgcttgttattgcgagctgatgaaatcagaccttgcctattgattaattgtatgtctacttatgacccagtttttttttcattttttaactaaactcatcggaaattaaattcctctgtgtgctgattcgcaatagtcatataacttaactttaaatagcaatgcaattggatgctcttggactctattcaagtcattttaggccacttaaaagtaagtgggtaggagatagagagctgattttatattagtatcatttgacattccttgatttttttgtttaactgtatatgcaggtttatagttttttcatttatatttcctcactatttttttagtttgttccccttcactgattcttttctttgattttcatttctctcatttaagctttgttatagcatccaacgtgtttcaattgtaaacagtactaagctctagatgtcttctttctatatgtttccagatca

SEQ ID NO: 44786 - DNA, 656 bp, Manihot esculenta
  Intron number 2 from transcript cassava4.1_018023m (locus cassava4.1_018023m.g) derived from phytozome v7.0 (chr-ID scaffold03942; pos 128822 to 129477 reverse strand)
aggtctccaaaacggctgaggttagtacccttccttgaaatttctcgtttttgttatagaatttcctggggaagtaaggtggtagttcagttgattaacggcattctcatgaaatcgagctttaattggagatttaagttgggatttaattggaagtactattttctgtactattactttccgttttcaattgaaaccctagcatgcgtaattttttagtggaatttttatttaaagtagctcttgttaactcatccgaactgttattgggaaaaagaataattctaagtatttattgaattggcgtgtcttccgttaagggctacactcctcaagtgaaattgtctattatcctttctttcaacggaaagttcccctctttttttgattgattgaacacggtcaagtattttcagtcaatggaggattgtgaaacaaaacactcttcaacttatctccttaatttgcaaattgctatactattcataggttctagttgtgatgctctgttttgggatgtgtttgtagttcaattgcaccgatttttttatctgttgggctccagtactgtttcccctttttgaagcttacacaactgaatccaccactaaccccattcctctcgtgcttggttgcatacagaattttttggcact

SEQ ID NO: 44787 - DNA, 660 bp, Manihot esculenta
  Intron number 3 from transcript cassava4.1_032539m (locus cassava4.1_032539m.g) derived from phytozome v7.0 (chr-ID scaffold02059; pos 32715 to 33374)
ggttctgttcttgctttcagagtcggctttagagagtatgttgtccaattcgattctactcatttatacctccttttcatatgatatcatatcatatcattatgcaatgatcttgtattatcatctctttatagatatgtgggattagcatgaggtagttgttgtggctttaattttcacatctgaaacattgttcagggcagcttctgtccttttgccttttagaagttacttgaacaagaaattcataaagtgagtggtcatggtcatgaagcctttttctaggcctttggattactatattactaatttcatttaatcagtaatgatccttaatattgattttggtttatttttggttagtgtaccttttatcgtatggcttttattttctaaaaggtagtttatacaagttttgacttggctgaaaagcgaatgtagtaagaagaaactcgacttgataaacttatgcatttcacatcgtatgagagaaaaaattacgagaaattgaaagtttccatttttattgaaagtaatattttttgtttttgcttttatatatatatatagatatagatatatattgttttttactgtttaattttgttgtgtttttttatttttgctttttgatagcttcaatcctacggattcctacat

SEQ ID NO: 44788 - DNA, 574 bp, Manihot esculenta
  Intron number 1 from transcript cassava4.1_028166m (locus cassava4.1_028166m.g) derived from phytozome v7.0 (chr-ID scaffold08359; pos 1641456 to 1642029)
acctgaaaagaggctgcaaaaattatcacatagaagtttacgagtgcatggatatttattaaagtcaaagaggtacctccaatccttttttgctttttaagaaccaattatacatttgggaaaagaaaaccaaattgtttctacttcttattcttcttcttcttccccttccacccagtttcgtttctcttgattgaggtatttgcgtgctatcttggtagagggagattttctggcccagaacagtcctctagctgtgttcagaatacagaatccttaaaaagaggtacaatgtttctacagtagaaacaactagctatgcatgtccaaaatgacaacaaaattaccatatgtagttctacagttggaacctgatctttcctttcccatatgcatgtgttaattacaaattcaaagaagcttgttatctcttttaatcactggtttcaaattagaattcatgcggtcttttattcatgaaggacaacctaatgattatgaaaaaggagaaaaaaaaaattaactgctaacttttgcagataagggtcaaaactggttccagaagcagctttgt

SEQ ID NO: 44789 - DNA, 461 bp, Manihot esculenta
  Intron number 1 from transcript cassava4.1_025890m (locus cassava4.1_025890m.g) derived from phytozome v7.0 (chr-ID scaffold04176; pos 59323 to 59783)
tcataacaattttaatagcaccctatcatttaaaggtaaactttaaatttctttgtgtaatttgtctttacatttataaatttgaatatttttatgaaaaataaatgagtttctcaaatgtttttattaaactaaaatattaagataaattgtttttaatagaataagtgtttagttgcaaaataactaaaaggcagtatagtattttgtgcgtgttattagttttatgggtttaagaacttttacaattttagctaatcacttcaaattaatttgaacttttagttattagaataccaaaaattccaaactttttaacttatttttataattaggattaaagtaaaggatttttcataaaattgtcataatcatttgcaagagaagatgttgatgttaataatctttttatttgttataatataggtttgtgtggtttaaaagatcttcaacatttagat

SEQ ID NO: 44790 - DNA, 1029 bp, Manihot esculenta
  Intron number 1 from transcript cassava4.1_010350m (locus cassava4.1_010350m.g) derived from phytozome v7.0 (chr-ID scaffold03581; pos 1158891 to 1159919)
caagaacacgacaagtttctagaagctcttcaactgtaagtcggttcagagtcctctttcaatttgctggatttttttctttatagtttgatttttttggttattatttatttcagagaattggtgggtgaggtgatggggaaagtgtggaatctttgaacttgttctatgcgattgatataatttgagattttgtttctgcttctgtttgtctataacagagcaaccaaatgaaaaattaggaattataatcgggtactgataattgtgtcattgagtttaagatgcgtaaactatcgttaattagaggcttccgtttgtttttattattactattttcagttttgaattggtgctgcagttttgctgcagaagtgcaagatgatttgaatattattccagatactgacaaataaatcaactcaattttatcaatttaaattgcatcaagctcctctaagttgagtttattgctattccaattcttaacagtaaagctttacatttgaacttctgaatttggtgtttcattcatcttttgtatatgagtctctctctctctgtctcaaataacagcgatacatgttcaatgggcacaggaagtgccttgggtttggttcctttaatttgtttgtgttctatgtcccaattaggtaattgaccatgcatcttggactttctttgtgcttggaatctatattctaagccatagagcaggattaggattatttcctaccaaataacgggttcttctatatgctcccaactaccaattatgaaattcagttggtaatagcatctctaagacgaatggtttggtggatgcactaaagagaccaactttttatatgctctaatgtggtagaatacaaaattttttgttcgttgtgttctaaatcatgagctgcagttttttttttttttttactctgtttctgaatatagaacacataataattctgaagtttctttttggttttgtgacgcatcacagatttgatcgtgactggaagaagattgaagcttttg

SEQ ID NO: 44791 - DNA, 595 bp, Manihot esculenta
  Intron number 2 from transcript cassava4.1_007256m (locus cassava4.1_007256m.g) derived from phytozome v7.0 (chr-ID scaffold02080; pos 114750 to 115344)
tcgcagagaaatatattttttcttttataggaaaggtagaagtaaaattatttattcattccttcttgtttatctttttatttattttaattttataagtggccggtatttgtatttgatctctgttattaatcaagtttaattttgcatgatctgacgatttttggtgtttctggcctatgtttttggaaataattttcacctgaagctgctaatttttgtttcttcttctacctactgaaatttcttgcttcggaaatgccataagctagggttttgcattgtgtgatggtgtctcgtgttttgaattttctggttgaacatggcaatgttgaatttcgtcagtgttatgatgtatttttataaatgaagtttattatattggattttttatatttaattttttggtgagattttgaagtttgagtgacgctttattttttttgttgaaaattttttaagtaaagttggattctggacttgaagtatcgcagaagagataaaatcaagaaactgaacaggaacgtctgagagcttcgagtttattggattcatttttagctgtttaacactgttgtattcagatatttacgaa

SEQ ID NO: 44792 - DNA, 815 bp, Manihot esculenta
  Intron number 1 from transcript cassava4.1_014930m (locus cassava4.1_014930m.g) derived from phytozome v7.0 (chr-ID scaffold04305; pos 178847 to 179661)
ccacgaaatccatatacccgctcaatctactttcggtaattctctttttcttttctttttaaaatttttaattttatattttatattctctgcttctttttaatctatcattgatcattgaaattgcattgctttagcttgaagagtttgatctcggttgtgggagatttgatttacaggagtttctgttgttttattcgtttgtgaaattagggtttttcaagtgaggttttgcctgtttccttcatgttcctctttttgggttgttaaagtgagattcttttgtgtttaacttttaatgggctcctttaacttgcatattttttagcaaaagcatggcatatgctttgcttccttgtatggacagagaattttcttgaagtaaagtttcgctttagcatattttggcgtatccatttaatcgaacttgactctaagccattcttttttacttgttgaaattgttttcttcctgctttattatagttgaatgactgttttcttgtttgatagaaagttggcaatatcttttaattatcatactagcaatttcagttttataaattagaaaatttacaagattatgcctttaaggatctagtttggagtgtgaataggctttttacatatcggtttcatttgattttagcaataatttcctttctatttcaggatatatgaaagaaattattgaatcaaaaataggtctagagcctaaacagcaaaagattttgtttaggggtcaagaaaaagaggatggggaatatttgcacgaggcaggtgtgaaggataagtcaaaggtcttggttttggaa

SEQ ID NO: 44793 - DNA, 370 bp, Manihot esculenta
  Intron number 1 from transcript cassava4.1_033384m (locus cassava4.1_033384m.g) derived from phytozome v7.0 (chr-ID scaffold05875; pos 1800389 to 1800758 reverse strand)
tcgtcgccgcagctgcagcaggttactattcttttatttcttttgtttttttttaaatatatatatattggtaaggaggatcaacatgctgatagaataatactttatacaatttctaagcaagttttaaagactaggtcatgtcttggaaattcttctcaaagctcgtctagaaaatggtctcaattgatatgggctacataaggacaaaaacagggtagatgcaccttctgataaattaatggaatttttcttccattaaactcgttgatttaaaaaaaaaaaataacacgttgaattttttacatccttaattatctcttttgtaaatgcagctttggacttgataaaaaacgttcaagtagaagca

SEQ ID NO: 44794 - DNA, 876 bp, Manihot esculenta
  Intron number 1 from transcript cassava4.1_004738m (locus cassava4.1_004738m.g) derived from phytozome v7.0 (chr-ID scaffold05875; pos 2241603 to 2242478)
tgacttttctccatatcctctttataactcttcttgtctgttcgctcctttctctttccattcccaatacgaagattattagaaatcgaggttccgtttttttacgctctgcggcttctacagctctggtttttactcaacatgactgacaataaggtattcttttcctctttctgtttgggttcaatagaaagattgccgttttttttttttgttttttgtgttctgacttttgtttagtttgttaaaagatggaataaatgcatattttttcgtccgttagggatttaaattagttcactagtaggaagttggagttaggaatgcagttttaacggttttcttgttaatgtgtgtatttgcaggtgatggattttagttttagtgttgttgcttaaccctttttttgtccatcaatacatcagtatagctttgaagctggtttttttaccgtgcagcttatgatttttttttttttttaaattctcactctaccaggtgctagtatttgggtcattcactgaagatgagaccaagtcatggctgcaaaagccatcaactgagaatcacgaaaagcccgtggaaaagaaagaattgcaatttggttctttgaattttgcaactggaataactttcggagattttaatagtgaatcaagcaggaaaccaggttctgcaaatggaaaagccagttttcagacttcaaatccagtgaataaggaaaaggatgtgaagattgcacagaaagtgcatgattttcctggagtgctgggaagtctaaaacaaaatggaagcattgacaatttcacccaagatatttccctcaataatggtgtgaaagacttaaaaaaagagagcatagatttgacttctctg

SEQ ID NO: 44795 - DNA, 820 bp, Manihot esculenta
  Intron number 2 from transcript cassava4.1_014546m (locus cassava4.1_014546m.g) derived from phytozome v7.0 (chr-ID scaffold07434; pos 106036 to 106855 reverse strand)
cttcatctttgcacctcaccaaaagttgtgtaagttttctccctctttctatcaccatggtagtatattcacaatatacacatattttgaacttatttttttgaataactttcagtgattgtcccatgtgtttgtgtatttggaaataaccttgcagaaagaacaattaaaagatgctacctgcattttccttgctagcattttgttgcttttctttctaaaatttaatttccattaaaattagaaatagaaaagaaaaacttttaaataattaaattttcccttgagattattatacccttgttcttttcttctgaattttctggacaaaaggcttttttttgggggttcaacaaattactgttctttgcttcataaattgtatgccatttgtgtatttttctttttcgacatgtgagatttcaagttcagattttaccctatgctgcattcagtaagacacctctttaccacacattactactgtcacaaggttgctcgaaggcttgagtgcacttggataaacatcttcctgtgacacaggttcctggtcaaatctgaacctgtttctgtttcaagagattgaataacaagtagcacactttttttttttggttctaggttggtagtttaatttttctgtctcatgttgagtggctgaaattttcattttcaaaagttgatttgaagttttttgggcacaagcatcctaatggttcattaattgtcaattttctgattaagtaactttgcatgttgcatgtgggaccatcggatggatgcagttatcaacacactaagtatcacaaacgtaagtcca

SEQ ID NO: 44796 - DNA, 755 bp, Manihot esculenta
  Intron number 1 from transcript cassava4.1_014546m (locus cassava4.1_014546m.g) derived from phytozome v7.0 (chr-ID scaffold07434; pos 106886 to 107640 reverse strand)
ctccctcagtacctccggcgaattgtcaaggtttctctctctttagatctgattttttaaaaaaatattttaatctagtttcctttttcaattggatccaatctttatcattattcgaaaaatttcctctgtttatggttcgtaaaatgttcaatttcgcctctttaatgttaaatcatcaacttgtggaaggaagctaactttgcttctgctttgattagggcgaatgcgaatgaaatttcattgaagttctatttctatctgtaaacgaaatttgatttatgtgcttatgtatatgcaacgaataaatgttgataagaatttctttttctttttttcttttatgagcccataagcatcagcattgtctgatcaattgatttgtactaatgtttggaaacaaatgaatatataattcatttcatttcatttgcctataaatttcatttaggtttcatttgcaaataaattttgtattcgtgtttgttattcaaatacacagagtataaattatatagtatatatgtagcttatatttcatatgcaaattaaatgtaaccaggttttatttctcatagtttcaaaatagaattgcaaatgcaattttttctttttgaatgtcaaatgtagatttgcaaatgaattgtaatcattattcatggaattcagtttttctaaactgcttattaaagttgcattcaaattattttaattgggcaatttttttatctgatttttcatgttagtggcaacaa

SEQ ID NO: 44797 - DNA, 675 bp, Manihot esculenta
  Intron number 1 from transcript cassava4.1_003577m (locus cassava4.1_003577m.g) derived from phytozome v7.0 (chr-ID scaffold05815; pos 130353 to 131027 reverse strand)
agggaagcaaggtgtatcaggtactcttttttattgttctgtttgattgctaggaaattcaagtaaattgaaagttgaatcttgtgttttggtcttctttggttagcaaaataccgctaaatttgctccaggttgaattgttaaaataacttgttctttgtaggcagtctatgatgattgtttcattttcttgggcttgtttttctgtttgtttcctgagaaaatggtaagagagttcggattattgttgtcttttaaagaatggaaaacgtacatcggttctgtcaactcaaagttgtgtcattgtacatggactactgcaatttacattgagcaattgctgtgtgttaaatcaggaaattagcttagatctggtcaatttagagggaagataattaaatagtttactgtttttgagggaggaagctttgtttttatgttcttggtagtttatcaataaattcctatctcagttacctcttcacactgtttcttccctgaacttcttcttcttcttctgtgaaattcccaggttttttactaagtattgatgtgtgataagattaaataaacattagttatttggcataccttgttttttctcgcaataatcataattcaaaatttttcaatcccacaggccatacaaagggacaagatagcgcataagttttg

SEQ ID NO: 44798 - DNA, 679 bp, Manihot esculenta
  Intron number 1 from transcript cassava4.1_008463m (locus cassava4.1_008463m.g) derived from phytozome v7.0 (chr-ID scaffold06582; pos 844433 to 845111)
atcgcttgaacaagccagctgttaagagcattgaggtatatatctctcaaaagcttgtttggttgctgagaaagtttggggggttgggggagtttttgtttttcgttgtcaaacggcttaagatttttggttcgagctctcagcctgccagtggttttatatcgggcttgtttgtgtaaaggatttattttgggcttttgaaattatgaattaaagtgctaaaaatatttgaaatgggattcacattcttttcgtttcctttattttttttcagtaatcaagtgggtcatcaaagtaaatggacgctgcttattgctttgatgctgtttaatatccacaaaatagttgttttaactaaaatttagacttatagagttaatgattttctgattatttccttgtcttctctctttcctctgcaattatttccttttgtggagttaagaaatgaagagtaaaactgaagtatgcatttcatatgcaacctaaccgaacgtaacggttgatgtgtactttaatttcctttctcttttttttaatccatctacttatttttatgtattggaggttacaaatcactcgttaccttcaacataaaagtctcagaaatttctgggtataggagttctcatttgtttgttttttcttttgggatgtttgatgattatacagagcccag

SEQ ID NO: 44799 - DNA, 403 bp, Manihot esculenta
  Intron number 1 from transcript cassava4.1_005119m (locus cassava4.1_005119m.g) derived from phytozome v7.0 (chr-ID scaffold05280; pos 365870 to 366272)
agaccagtctcttgggtttgatttcctctgctcctgtgactactcatatcctatcttttgtttattcttatataaatattgacccacttgtttgtaagagtctcgtgttattgtttaaacagattttgaactatcaagtgagaatacatcttgttgtatctattactgttgagtgtattctcaaaataattcgtatttgcttgttgggcaatgttgtttggattattgagtttgagcttatctaactaggatgttcctttcacttctaaataaatatgaaagttgtaatttttcaagctgttgaagtgaagtagttcatttgtatcacacacagcacatccttacgtatttctttgcattttttgcagcttcaggctacaggccgagctagttgctttcgtaa

SEQ ID NO: 44800 - DNA, 403 bp, Manihot esculenta
  Intron number 3 from transcript cassava4.1_013653m (locus cassava4.1_013653m.g) derived from phytozome v7.0 (chr-ID scaffold12525; pos 712570 to 712972 reverse strand)
tgcaaggtattgaacctctcctgaaaattcttgatattttgctgaaaaacaaggagctggatacaggcaaccccctggtgtttgatttattgtcaaccatgttttatgctaagaaaagtttatgtggagtagattagttcgttaaatccagaatgtctggaacatatatattcatgagtttctttcttttagtctctgattttgacataatttggctggaaaatgtttgattcttgtcaacttgtgttcctagtgaccccaccattaataacatatggtccatgtatttatattataatcttgagtttatatcttaattgggagaattgaagttctaatttttatgtttgtgctttctgtttcaatagggtctcatcattgaaagaatccaggcttccatagc

SEQ ID NO: 44801 - DNA, 365 bp, Manihot esculenta
  Intron number 1 from transcript cassava4.1_023382m (locus cassava4.1_023382m.g) derived from phytozome v7.0 (chr-ID scaffold00077; pos 37047 to 37411 reverse strand)
cactgcaactcattggtgttgttggcgtcgctcaggtatttattcttctcctgttgtagttgtctgttcaaagtttaaaatgttcttttatattggtttgatctctctctggtgggcttgatatctctaaattattaaatattaaggatcatgagttttcatgtgatgaacaattgggcttagatgctctgtctaatttcctccccttctttctaaatgaaagctctaattttcatgcataacatgttgggagaaataatctgtgatatacttaatttctttttagtgatccctatgtttcctaattctatgctcttcacacgccaccagagtatttatcgacgagctgcttcatacgagggccc

SEQ ID NO: 44802 - DNA, 514 bp, Manihot esculenta
  Intron number 2 from transcript cassava4.1_012097m (locus cassava4.1_012097m.g) derived from phytozome v7.0 (chr-ID scaffold03581; pos 900208 to 900721 reverse strand)
aacaaggggaagaacttttatttaccagtagcaaggtgtgtttcttttttacaaaatcacttagatttgtgcttgtccagtgatgtttagtcaagtaaaggccttaattttggatctggggccattatttatgaaagtgatattcagcatatgctgctgtctcagtcaaattatatcagaactggaatcttcttgaaaaataaagatttggtccctacttccaacttttattttaatttatctgtcaccaagctgataagtgaatgagaaatgtgtagcattggagcctttaacttagacctttgcttacaatacatctttaagtacgttattgacattacagaaccatctgctaattttgctgcaagttcagcgaaaacgttggtttttgtttaaatcttagtttctgaagaggctgtcctggagttggttatcattgataaatttcttgctagaattcaaaggctgatttactttgtgataattgtaggctgtctttaagccaccgaaagca

SEQ ID NO: 44803 - DNA, 858 bp, Manihot esculenta
  Intron number 1 from transcript cassava4.1_017346m (locus cassava4.1_017346m.g) derived from phytozome v7.0 (chr-ID scaffold10183; pos 16334 to 17191)
ctaaatcctgctccgaaatccctcttcatttgcaggtcccttttcttccttctttctccctttccttcttctattttctcatcatgctctctgcaaaaccccttaatttatttcttttttcttctaatttctgggtttttgttttcttcctctaattttttcatgaaaattttttaatggaataaacgtttgcctcttttctttttcatgtcaaacttctttttataggtttacattcctagtaattcattatggttgacaattttctgttcacttcagagaattgttctggttttttgatgatttccttttttttttttaattcacagcacttgctcagaaattgaagagaattatgcctatttagcctagcttcagttttttaaattgttttgtgttaattaaaattgcatttattgaaataattaagacttaagattcagtctgcttcattttttttatttaatttcattttaaagagttttttttttatatattacttaattaataagtaagaggcaaaacattatgaataactgatcttcatcagtaaaattaattccaaactctaagaatttaatttctaaatcaattatctttgaaactaaaactttaaaatttgaaaataagattataatagttaatttatatataattataatgtaaacaaaatagaaaataaataataattttagaataaataaaaaatataaaaaattatgggatgaaatgattattatatatttcatttattttatacgtatttttaatatgcaggagactaaatttagataagaattgatgtatttagcagagaaattaaatgagtgaaatgggttttgtatgcagacagcagga

SEQ ID NO: 44804 - DNA, 781 bp, Manihot esculenta
  Intron number 3 from transcript cassava4.1_006662m (locus cassava4.1_006662m.g) derived from phytozome v7.0 (chr-ID scaffold06582; pos 159763 to 160543 reverse strand)
gtgaccgcacaaacttgctaggagactccaccaaggtacttttgctgttccttggattactttttgtccttatttatgattttatgtcagatggttttgcaatgaaaagctactttcaagcacaataatgcatgatggttccatgaggttttaaatgttttatgcatttattttctgtttaaaccaccccttagtgttatgagagcaccattagattttaaagtagcacagtctattcaaaatttcacccaattgagtgcgctagtattcagtaatggtgttgccttccatttctcatatgtggtttacaaatcatttacatataaaatgatatctgttagtaagaacagggatataattatagtgcatactgcatggtccgttgttcttgggtttaaatgggagtgcagcacagttgcaattctttagagcagtcattatatgctagcttaggcttctattaaaatcttccaattgagaaaattgtaaaacccatagtcctgtctttgtaatattcatcctgatcctgtctcagtttaataataaatctgctacacgcaacaaagtattttatgatagtagaactgaatatgatggaccataccctgctctcccccagctccaaattattttaagaatagcatgtttactgtttagaatgaaatattacctgcttatttggtgatcttgaaagaattgttctacttttgtacaacaattatttgatttgttatttccattgtttatcttttgtttttctgggtgctttttggacagaaat

SEQ ID NO: 44805 - DNA, 432 bp, Manihot esculenta
  Intron number 1 from transcript cassava4.1_003775m (locus cassava4.1_003775m.g) derived from phytozome v7.0 (chr-ID scaffold09508; pos 151148 to 151579 reverse strand)
gcagtgacaagactggaactttaaccctgaatcaggtaaataatactagttttagcatagttttgaggttcataattctcttgtaaaagtagttgcagatgaggagggagtgggttattccacttgttgagttctagaggtgcatggatcatgataaatttgagtgtggttctctgcaaagctcagaaccttagacagtgtcaatttagtggatgatgaggttttggaaaatgtaataatatatggctgcagaattgggtgtgtgctttagaagaaaatgctccaatagcatcttgatttgttgcgagaaaagagttcgttgctgcaactcattttctttttggtcaaacagatgcggaaaaagtttttctttctttctttttttctttttgaccatttgattgaacaaacaaccatttcttttatttacag

SEQ ID NO: 44806 - DNA, 564 bp, Manihot esculenta
  Intron number 1 from transcript cassava4.1_027912m (locus cassava4.1_027912m.g) derived from phytozome v7.0 (chr-ID scaffold08359; pos 1568225 to 1568788)
ttcagggttcgcatccatctcttactgtttattatattctctgtggaattaagctctttatatatacaaacgcacacgaacatttttgtgctcaatggaatatcttcttgttcattgctattttaaccaaagtttgataacaaaataaggcaggtaggctgtttagttattgaactacattggaattttttctactgattttcttttaaaatatttggctgaaatttctatcaatatttagcaaaacaaggttaaatatgaagtgaaatttagttattgtgctccaatgaaaaatgagtttaatgatgatgggtgaaattaagtcataaattaatctattgagaaacttttaggatcttgaagttattgttaggaatcttttttatttctttaataactttagttgcttctatatgacaatgaaatttcttgttcgattaagtttatactgctattaaatttaggttgttttgttggttttgactattgttgtgcaccaccctttttctttggatttttattaatgcgcaatcttatatgtttttggcagtataagctctgctc

SEQ ID NO: 44807 - DNA, 700 bp, Manihot esculenta
  Intron number 1 from transcript cassava4.1_029489m (locus cassava4.1_029489m.g) derived from phytozome v7.0 (chr-ID scaffold04851; pos 746086 to 746785 reverse strand)
caaagaagccaacactcaccacctttagtaaagcaaggattaaaatttgtttatctcttgctagctctgtgtattgcaaataagtgatctcaacgtgtttgtaataatgtgcagaaagatctttttccacacccagttgtttcatcttcaacaatctcttctcctgctggaccttgtcatggtagagagcccccttcaaaccaaacatgtcatcactatactagtttgtggccagaggaagataaggcaagtttaattaattatttttaatttcatcattcatgcatctatttaatttttgtaaattcatttgcaggaggaaatcaaaatttttaatttgggatttttcttttttttttttggtgtccaaaaaattatcaataaaatttgtccaaaacatggcttgttttaatttggcacatcatttcttcaaataaagaagaaaagattgggaaaaaaaaatctcattcttcattaattatgattaacattctttcttttttttttaaaaaaaaaaattctggatcacttcaccttatatttccaagaaatcataatgagggctattaccaaattagagaaagaaagaaatatgtctattctcaatcacaattatgaagctttatatgaaactattgagaaaatggagaatttttttttttgttcaatttctaataatgaaaatggttactgtacacag

SEQ ID NO: 44808 - DNA, 531 bp, Manihot esculenta
  Intron number 1 from transcript cassava4.1_003787m (locus cassava4.1_003787m.g) derived from phytozome v7.0 (chr-ID scaffold03574; pos 27503 to 28033)
ctctgaatcctctcagcttcaaccaaccaaaactggtaatttttaccctccacaaaaccctaaatcgcctgcattttttgttagatttctttcctttttggtgaccactgcgtgctgttataaatggtttgttttttttttttctaatctgtatatgattctgatttgatctcatttctggttttttccttttcgagatctggactgctgtaagaatggaaagtcatgcacttgattttgtgtgtttttcttttgagtatttgtagtttgaacgtctaaactgtataaggtgaaaagagaatttggaatcctctgcttaactgtttttatttttatattattttatttttggaaaattcaattggttgcgtttccgtttttcttttgttttcttggtaaatagccaaacagaccgttagagactcgaaattttgtaaatatggatctttttgtgttctttatttattttgtttgcttcttctgactttttttgcaggttgatctgattggttagtactccagattggtttt

SEQ ID NO: 44809 - DNA, 595 bp, Manihot esculenta
  Intron number 3 from transcript cassava4.1_009920m (locus cassava4.1_009920m.g) derived from phytozome v7.0 (chr-ID scaffold04305; pos 38540 to 39134)
agctacttggtattaaaggagcgaagcaagaaactgtgagtgctgaattgagataatttattgagctcgaattcctttatttctatttatgatttgtataatgttaaattttctgctttggtgctagtaaaacttgaaatattgactattttttccggtgatttttcgtgctaatttctgttgctgacacgagaggacatccgattctaatttgacatagctccgaaattgagactggtaatgtgaaaaaacatgtagaataagtagaaaataaaataatcgtggcataagctgaatgcggtggacttgcaaggaagtgtcatgagaaaaggtagcaagttctttgttctttgcttaagtgctttaaaagatcactgggttagaatttgtgaggaaacagataatccctggaggactggatgtggctgacagatgacttgtatttgtatacgtaatagtcaaacttaaactatatatctgaaaagacccacttaatgtgtatttatcatcgaggtttaagctgcttttctggaacaaatggaagatctgtcacgttttggtatgctgattgtgcaattgttatcattcagaacaa

SEQ ID NO: 44810 - DNA, 615 bp, Manihot esculenta
  Intron number 1 from transcript cassava4.1_008982m (locus cassava4.1_008982m.g) derived from phytozome v7.0 (chr-ID scaffold05875; pos 131402 to 132016)
caactaaaattcaaactgttttcagaggctatttggtaagtgggtggttttaaaatattaattagcattttttttcccattttctttttcttgtatgggattcagatcaaagctcaaagttgatattctcatctgggtaattttagatttttgcagtttctgctctgctattttccttgaaaattattacaatatttacactgtagtggaaatggtacaattttttttttttattgttgcttttatatctgctcttaaaagccggaaacacacatcaagggcaataaatgaaacagtacatgcgcttttgagagatgggtaatattagctttttggctttagttgcttttctttatcatgtctcttctcaaaagctggaaacacagattcaaatgctaatctatttgcttgggaaagtagattcaaatggtaatgaaacagtagctatgtgctttaggtcaatctaacgtacatatgttttcaactttcttttgacttgttggctatgaatttgaacatttttatctgaaaattatgtgcttttgaaactttagccttatgttttggttaactatgtcaggctcgaaaagctcttcgagcattgaaagggctggt

SEQ ID NO: 44811 - DNA, 651 bp, Manihot esculenta
  Intron number 1 from transcript cassava4.1_019604m (locus cassava4.1_019604m.g) derived from phytozome v7.0 (chr-ID scaffold10963; pos 158829 to 159479 reverse strand)
acaggtaatcctgggttttcctcttccctgtatttctcaaagaattggtatcttctcgtgtcattgagaccgatggcaatgcagaatacgatttctctttagtgctatggtgaatacaagtgatgtttgaactccttttttctacttgggtggtggatggttgatgttgcatcacgctaagaactagaacttgttgcttcagtttcataaattctatttaccagtggtcaagccttagaatgagaaggaaaaattgggaagttgctttcgagaatttcttgtgcgttaacagaatttacattttttagccaattgatgtggctaatagtaggctttggggtgtattacgggtcatctaatgaccgctgcttgattgcctagacagagaaagggaataagggaagcaatgtataaattagttttgattgggtgccaatccagtgaatattttattcctgaagatagttaatacttctatgcccttgagtgagttaaataacatatataagctttctgccttgtgaattctggatatgttttttatttccctgatgatgcaggatataattaagttcttgaggtttggtgtcctgatttgaattcctctttgtggcaggtattactgcttcctggtacccttgactcttccta

SEQ ID NO: 44812 - DNA, 906 bp, Manihot esculenta
  Intron number 2 from transcript cassava4.1_020000m (locus cassava4.1_020000m.g) derived from phytozome v7.0 (chr-ID scaffold12794; pos 1096323 to 1097228 reverse strand)
cattccacgtcgaacctcagcctcgcgagaaagctgtgagtttctcctctctctatctcagctactgcaccctatcttgctagtttcttagggttttaaaactttttcttttcccttttgagtggaaagatatttttatcctttattttctgagatatgagaatcttcaacaaggtcagcgtgacagggtctatccgctgttatggtcttatagatatcgagattttgccttttaagtgaatagcttgcgacacttcaatcatgttttcgttcttagatgaggaatgattgccgtttatatgctcgtgtatgtgtgttagagactagtttaatatacaatcttatacagttaatgaagttgttgaatttcgattgcatcggatgcattgttggtccagcatctaactccccaacttggtccagtggcatacttcggtatcatttggttgacattcatgttcaaggacctttgttttagttaagtgaccaaatagtagcgatcaaaagcatggctgtaatggtggagaaggtatcctggagcttttttagttcatctatgacattccacgctttgatgaaatgctatagcattgctctgttttcattttgagacatatttctgtttctccctctattctccaaaaagtcatctacttgagattttttcctgcatgaagtcaaagctaactacgcaatgcctgtctgaagacttcaagcaatgtgcttctctgtttaactaatatcgtaaacttttgtcttgaaacttttcacattttatgttgtgcaaattagtggataactgaacttgaaattcaacttaagtgctttttttttagattttccttgttgttctaagttatttgcattacagctcttggcagaagacccagctcttaagcgattcaa

SEQ ID NO: 44813 - DNA, 801 bp, Manihot esculenta
  Intron number 1 from transcript cassava4.1_014502m (locus cassava4.1_014502m.g) derived from phytozome v7.0 (chr-ID scaffold02477; pos 130995 to 131795 reverse strand)
tgcctactggctgggaaaagcgcctcgacttgaaggtattttccttttctttcgtaatagatgtttgtctcctcagaaaatatgaagaaattaaggctttttttctccttttttttgttttcaatgattgtgatattatgtttgaattttcaaatcctttttttttcaactgaaatttgaagtctatgaaattacttttcctttttctgtagagatttatttattgctttagcatatttaattttattaaaaattcgattctttgctttgctcaatcatctgtttggttgatgagaaactggaagaaagtaaatgaaacagtcatatcaattgattctcatcctattgggattggcgacaccttttgtttttcagggaagacaaaaagccacacccaaatgggaagagcttaaaatgacaaaaaaaaaaaaaaaaaaaaaaaaaaaaaattcaaatttgtcttcggttcataatttattgacttgatttttccagcagccaaacagtttataatttatttagagtagttggttattgaagtgaaaaaggaaattgtttaaaagctatacaattacagtattaatggtaatagatgtcagtgggattggtattttggtattcccccctttcatttaatagtgttcttcaatgctctgaagttagaaatgcctccaacttattcattacgttgactattaataattacttctaaattccttaatcccttctgtttctgataatttgaagaatactaatttcccttttttaattactgcagtcaggaaaggtttatttacagag

SEQ ID NO: 44814 - DNA, 464 bp, Manihot esculenta
  Intron number 1 from transcript cassava4.1_022124m (locus cassava4.1_022124m.g) derived from phytozome v7.0 (chr-ID scaffold03859; pos 88106 to 88569 reverse strand)
agaggcttgcagagaggtgtgtgttcaatagatgaagatagcataaagtgttttggaataacttgttcttgatgaaatgctgctttttattatttaaattacctaaaaatttaccgatatagaaattcttcatttattaaaattgcgagacctgattattaaaaattagaaagtttaataggtttattgaactgcatcgaattagaaactttttggaaacaaaactccgacaatttttgcatgtttgttttgatgttatgtattaatctggaacttctaataaagatgctagtcatttaagtgaaattgacatttcctggaaacagcatttgacttttaagacatacattttcttctccctttgtttcttcaaaatttcactttagatgaactcatgcttgtatgactagattttcttcaattctatagatctgccaatttgggagaggaacttaggcatcagc

SEQ ID NO: 44815 - DNA, 753 bp, Manihot esculenta
  Intron number 1 from transcript cassava4.1_002938m (locus cassava4.1_002938m.g) derived from phytozome v7.0 (chr-ID scaffold08368; pos 81845 to 82597 reverse strand)
catcagttctttttggtcctcacgaccagaaacaggttatagattctgcaacaatcttacagaaatttaaataagctgataaatgcttcaacatattttacctgctaaatttgatatgaattgaattggtccagacatggacattcagtagtatgcaagaaactccttttgctatgcttcttttctttgctgcagcttgttctcttttaggctcaagtatatgatgttgttagaatgctaatgagtctgaggtcaagtttgtaagcagcacctcttctctgtagtttgatcttttatgaagcacttgttgctattatgcaagaatgataacattctagtgctccaagtttcactctgctccaacttcttattatgcatcaatgtcgtgtattatgtaactcaatctttgaaaaaccagtctccctaaacaaaaaacatctcaccagccacataggcacattcttgaagaagcattggcagcctggctatataattgctattatatcctgtaaggggctaaataatgacgctgtaattagatgagaattgcttgtgtatatatgcatttctggattaatttattgcatgccatgtatcttagtggtttcattcttattccagatttgatactccactctgctgctttgtgtcttataggtttttttattatgttaaaactttctttatgtaccctttttccatgtctaatttgtttcagattagcttccaagagttcaaaaccaagctacttga

SEQ ID NO: 44816 - DNA, 496 bp, Manihot esculenta
  Intron number 1 from transcript cassava4.1_016895m (locus cassava4.1_016895m.g) derived from phytozome v7.0 (chr-ID scaffold09702; pos 294981 to 295476)
ggtattcttcctatttcatctctttcactcttcaggtgatgattcactcttctcttgtttttgcttaatacaatcgttaatcgttagtttgtcgtttttatgtgtttgattggtttttccctgtgggtattgttctctttttctgaaatgatgattgtttcttcaaatatgattcctttctactgagatattaagctaagtagattttcaaacttttgatggtgcttcttcagaacttttctccttttcttttttcttcccaattattatgttggcctactccagatggatactcatattaattgcactgttgtcctagatcttggtgcaaattgattattaattaactatatacatttctgctgttaaaaaaaatcaatgagatcttgaaaaatgttttaaataattccttctcttcatttttataatgttaaacgaaacccagttttctaattttgacttgaaaattcaggtactagaattagcaaactagacc

SEQ ID NO: 44817 - DNA, 614 bp, Manihot esculenta
  Intron number 1 from transcript cassava4.1_018519m (locus cassava4.1_017873m.g) derived from phytozome v7.0 (chr-ID scaffold01579; pos 55569 to 56182)
cttcctcggcgccgctgccgcgcttgtcttctcttgtaactataactctataatttgccttttcttttctttttttttttaatctttaattaagtgtgtatcttttgttttagatctcattatttgaatttgtcaattttaaattttgtgtttgttttcctagaatcagatggaaaatgatgtttaggtgtctgatcgttaaaccgatatgatggaattatatgccccaagtgatatggtttcgtttatgatttatggtttcttaatcttaattccttgttttacgcgatagtgtaattcatggtggcgtagatctttggttatattattagtgttatcggagttcattgctgtggtgcttagtttaggatccatggcttgtttctcatgatttctcttggaatttgagggacacagatcattaagattcagaatgaacattgttttaatagctaagattagttttattcaattcaaactttagttccaaactagttgttgttcataaaacaattcaaattttgctttaaacattgcattcaggtgctttaaaatgggaaaaagctttcgagtctcttttgttatgaatattaaagattattgggtttataggt

SEQ ID NO: 44818 - DNA, 561 bp, Manihot esculenta
  Intron number 1 from transcript cassava4.1_022850m (locus cassava4.1_022850m.g) derived from phytozome v7.0 (chr-ID scaffold12004; pos 423163 to 423723 reverse strand)
gagtgtcgatttgctttccatcttttcagtcggattttgctgtaagaagtctctgagagctagaaattcaacttgagttctttcagtgcaaacattgactagcatttttcataaatttttatgctgcatgatgagaagtggttctgtttggtttttctctactaggagcttcaaaaactcaatggataattgaaactaattctagtaaatttttgtttgagttgaagctctaataggatgtttatcagtatttcatgctcaacctaaataggtgttcatttctctaattatataacgtaaagtattttttttctttctttattatacaattttgttaagaggccttccttaagatgtatcatacttagatttcatctttttcaatatgagctacctttttggattgctaatgtgagtttttacttggaagtattctgtatggtacttccctgttttgctatttcttttcccaatcaatgaagttaacagttactgtgtttttatttttatttttacattttggcagtcacagctgtagcaaacggtcttgaagcttggaag

SEQ ID NO: 44819 - DNA, 811 bp, Manihot esculenta
  Intron number 1 from transcript cassava4.1_000501m (locus cassava4.1_000501m.g) derived from phytozome v7.0 (chr-ID scaffold01193; pos 240729 to 241539)
atagtggcatatcttcctctatttcgactactgaggtaagggttgttcatttgacgttgtagttttggtgacagttaagtggtgttggtgcaatactagatttttggtcaacagtttctaatttctgggtgaagaattgtagagtatagaatatcctttcttttttgtatgttgaagtgagaaatttacaaggtatttatacaaaatctctagcccaaaaaaggaaactacactaattactcaaatgcaatattttaccgaaattaagctagtcaaatcaaacaaatcatgctgaaattatgctgaatcttgctctagtcaacactgcagacatatgtctgttcgtggatggtacatcattgatttctggttaaaatttcttttgtgaactgtttcagtaaaatttgataacagcttcaatgtagaatgtatattctctctctgtgtgtgtgtgtgtttgtgaccaagtcgtgtcccttggaacagttagctgatgtagaaaattggtgaggtacaggataaagtaaatagtacagtgctcctttgctttttgaataaacatatttgttgtgatactgaagtttagcaaaaatgtaacgggatgaagaatgcataaaataatgaataaggaaatcacttcatttcactaatttatgattatttcaaaatgtgttcattgccatatcatgatgacagttaattactcattctattttggaaccattccaagggtagatttgggactatgttagtcagaattttttcttctccttgtttttgttgaatgtccaaggttgttacggatttgcta

SEQ ID NO: 44820 - DNA, 720 bp, Manihot esculenta
  Intron number 2 from transcript cassava4.1_013233m (locus cassava4.1_013233m.g) derived from phytozome v7.0 (chr-ID scaffold05656; pos 196241 to 196960)
ctgatttcaaggagggcggacaaagaaattggtactgtgcccttattctctttcttgtttcaatatatgaatctgtatatgcatttatgctatttgaggtgaaggactgtgatttgagctaagaatgcttcttcctttgtttttacagaaatatacctcaatatatgcctttttgatcgagttaggataaaaaaattgttgcataaatgacaaaaacacacctcttttcaattgataaatcaaacaatttttaacacttgagagtatgatgttactaaaattgtagaaggataggttttaaatcttaataagttgcagtttcggagaaattttgtggtgttgattttatatgtctcaaaagagtaaatatggagagaacctttctaatttgagttcctagactttctgtttgttcttttatgataatttgccaatccatatgatccaaaatgagccatcgaagatgtggcagagacttgtcctagtgttcacctgttaagccaattcaatattccagccaaggatttgatctctaggtctatatttttaatcttgagacttgaagacaaaatctgaatggttgaggttcttaacataacacatgcgaatatgttcagttcactgccttagatgcattttccttgattctttctttaatggtgtgattcctttttgttcttatcaggatacaagttctgtttaatagcggtatttctgctg

SEQ ID NO: 44821 - DNA, 837 bp, Manihot esculenta
  Intron number 2 from transcript cassava4.1_015345m (locus cassava4.1_015345m.g) derived from phytozome v7.0 (chr-ID scaffold02538; pos 131210 to 132046 reverse strand)
gcggattcggtcgcctacgttgacgcggagactaggtttgtttctgtggtttctaaagaatattcgattcagcattctcaaagtgtaaaggcttatataattaattgctacttgtttgcttcttttgatgtttataactgattatgaatagacacatttttttctttctggtccttgatctgttcatcaatatgaaatataatggatttctccaaaagagttctaatttttttctttctttcttttttttttttaatattcccgtaagccaagatttcattttcctcataatttatgctcgaattccatttcctggtttttcggagaggattggcattaaaatcatgacccaaacttgggttgaattgaggagaaattattcaatgcaatacaacaattttcattgatcaggttgttacttacggtggacccaccataatcaatgattataatttaattatattgtaaaatttttctgaattgaggctttgactgttaacttgttaaagtcaacttcttccgcattctttttgcagtgaaaattttgaaaaaggtagctttggtaagttagtaaaaatgacgttttaatttaccttgaatccaaggttattatcctcaaaaaagttgtacttgactcatagtttgattctcccttttgtagtgttcatattgatttctttatgcaggtctgatcacccactgcatagttgattttagttgctagtatatggattcagtgtctcctttttggtggattttcaaatgattttgttgttgaattagataatttgctgttgtgcagttgtaaaggctgttgcccccccagattcagccttg

SEQ ID NO: 44822 - DNA, 635 bp, Manihot esculenta
  Intron number 1 from transcript cassava4.1_026827m (locus cassava4.1_026827m.g) derived from phytozome v7.0 (chr-ID scaffold03115; pos 6551 to 7185 reverse strand)
caggtaattaatcatctccctccatgtttatgcatttgtgttgaaatgatctaggttgatttcaagttcatagaaagtcctaaaattttatttatttgattgactatatatattctttaaatttctgaaaaatcaaggtgatcacatttttcttaataaataaaataagttactttttataatataagtttgttaaaaattcacccaagtttaatcaaacgaggcctttcaagctgcattcaacgaaaatcatagggggagatggttgtactagacatgcattgcgtatcaaatcattaagtacctactttaattaaaaatataaataaataaataaatggatggaatttttcttaacatttacgagagggaaactttaattaatgtaaaagatatatattataggaaaaggaaaatacgaggttagcgtacataatttaagagtcataacttagagctcctccctttgaaaatatacgaagttattgatttggaacaggctttggcccgaagaagaatttagtctatttataattgctagaaatattttaagtgataaaatattgttaaatagttgttcaatttaatttgtatcttcagggaagttgcactcgagttcttaagaacatcaacca

SEQ ID NO: 44823 - DNA, 990 bp, Manihot esculenta
  Intron number 2 from transcript cassava4.1_029416m (locus cassava4.1_029416m.g) derived from phytozome v7.0 (chr-ID scaffold06407; pos 40620 to 41609 reverse strand)
gatcatagaaagtaaatatgttaatatagggagtaaatattgataaatagatcagttgcttaactttagaattgtataatcataaacttaattttcctttccgtttagataccgcctctcatatataaatagattgtaatctctgttgtgaaatataataaatattatccttctacatgatattagtctcaccgtagagatttaaatttttttagagatttacgattctgttcattttggattacctataaagataacatttggagacttagagctatattcatttggattatccataaacactgtttattttagcttatctataaagggtaacatttggagaatcaagattctgttcatttgggttacccgtaaaggctaacatttggaaatttaggggttacccgtaaaggctaacatttggaaatttaggactgttcatcaggattactctataaaaaataatatttagagattaggaactctattaatttggattacctataaaaagtaacatttgcagacatcagacactgttcattgagtacggttcatgggtactgttcatcggttattattcacgaatattgttcaaaggttctgttcttctgatcctttatctattttgattgttttggattgattgtccttatggttgaaattgattatatatataacaaattgggcatgattaacatttatgctctaacttgaaggggagttagattataagaagtaaatatattaatatataaagtaaatattaatagatgattcagttgtttaattttaggattgtataatcataaacttgattttcctttctgtttagataccgtctctcatctataaatagattataatttctattatgaaatacaacaaatatgtatttgggaatgatggtatgatactttgggatgcaattaagcaatgggttactgattatgtgaacaactactacccaagaagcaagccaggtcgcatctg

SEQ ID NO: 44824 - DNA, 648 bp, Manihot esculenta
  Intron number 3 from transcript cassava4.1_012970m (locus cassava4.1_012970m.g) derived from phytozome v7.0 (chr-ID scaffold03434; pos 7436 to 8083 reverse strand)
ccattctttggagtcccaaggagataatgttaagtttttttttattttttcaatctttcgatcgatgtttcgattaaaataaaataacttcaaaattttatagataaacgatcactaattcaatagttaacggtaataatgaatgataaacagatttttttattttttttataatttaatcgataaattttttatattattatttttttatttttttgagttttagtgaaatattccaatgatgaaacacttgtcacattcccttgccaggactttcttgttgtttagtgggatgtggtgaatctgaatcatgagtggcttctgcaagaaacacgggttaattatgaaacaatataattattatgttgttagttattacccttagatgaatactgtatttaattattaaattttaataaaatgattattttgctaatcgaaataaaattttaagaattaaattatttttcattaaagtagagacaaatatatagattttgttaaattttagaaactatattataaattaattttttaatattttcaccagaaagaaaaaaaaaattaggaagaatttatatacctagtcaatttagaaatgtcatattctaaaccatagttatttgtattatttcagattccttgttg

SEQ ID NO: 44825 - DNA, 800 bp, Manihot esculenta
  Intron number 1 from transcript cassava4.1_029185m (locus cassava4.1_029185m.g) derived from phytozome v7.0 (chr-ID scaffold09140; pos 30147 to 30946)
gtatgtgacgtgaagcttttgaatgaactaaaaggataattattttcaataatgaagatttggtttttttatttttttattttttaatttttgtgtttatctttttctcttttgcaaaatgggttatgcatatatttagaatctgaacttctattcgaggtcccttgttgcaatgttgatatgcacaagggtttagttctgcttaaatcatctatgttccagtatgatgaaagcatattttgcaggcccatccccctcctccccctctgccgtctcttaaaaagaaaaagaaaagaattttggttctgttattcttctctattcctcccctcccccaccccaattcttttctctagttacttgctccctttcttttagctatgtatgatgctagtatttgaagtcatttgctaacaagtaattcccgacaccaataatagtgttgctactaactttcatgacctccactccaccaatacttttctctaattactagaacttcaagtaaggtcttgcatgcttcaacttccatagacttgattctagtatcaggattagctctgaggactcgcctaatctcattcttcagttatgatctggaaaagctactttggttggtcaattggcgatcttaatggagtgtgccattcttcaatactgaattaagtgaaatatatgtatccttgaaccttctgtaaattagtcacgattatgcatccttttttgggtataagtggaacattctttttatttcttttaatttattgaaattgttagatccatcgtagacaagcttgggc

SEQ ID NO: 44826 - DNA, 455 bp, Manihot esculenta
  Intron number 1 from transcript cassava4.1_015925m (locus cassava4.1_015925m.g) derived from phytozome v7.0 (chr-ID scaffold00206; pos 318748 to 319202)
aactggtttgttatttcacctgcactctattagattttattttcattaactacgataccagttgcctgttctaaaaggaaccacctattttcttcattcttgtctgtgtatctttagctgctgtggattaggtttttgatgtatagaaccaagtttgcttctttcgataatggggttgttctttgtaagaatgaattctgctaatcgttttctatccatgtgattttgttataacatggatgattttgtgtattggattggattttctctgtttcctaagaggatgtcatttctttgattgttttgttctgtggtctcaaaacgctcgctatgtgtatgatttcttgcttcactgaatgagttgggaatcgggttttgtgaattttgagcaaatttctgtctgtctgcttatagtgggtgtgaattacaggtgaaaagaaagatagaccttgttt

SEQ ID NO: 44827 - DNA, 227 bp, Manihot esculenta
  Intron number 2 from transcript cassava4.1_012939m (locus cassava4.1_012939m.g) derived from phytozome v7.0 (chr-ID scaffold02959; pos 87899 to 88125 reverse strand)
atcgcctgcctgatcattcttgccctttgcctaaggtacgattttaaccttaccttactaatcctcattggaattttcttttcttctttgattttgtaaaaaaaccaaaaccatcaatttcatacatggccagttatgaactggtggggacagtgaccttatgaaactaccctggaaagtgctaatatataattattttatatttatttaatgcaggatatagtctt

SEQ ID NO: 44828 - DNA, 397 bp, Manihot esculenta
  Intron number 3 from transcript cassava4.1_013612m (locus cassava4.1_013612m.g) derived from phytozome v7.0 (chr-ID scaffold04137; pos 291476 to 291872)
tttcaaggaagacccatccttgtttgatgtatgttcattgcagattatcgtctatatttttcttttttattaattagttaccgtgtctataatttcactttttagccaatcatgtaaagtaacgtttatgctacttaatgaatggcaaggctcaaagtcaaatttcactgaatataattttgctaacatctgtgatgagcttattcttctttagttgtttatattctctctataatatttagtctttgaaattgagaatttatgctgatattaaccgagaatttctttaggtttctcttttctacaaggataatacatcacttgtatgattgaatgattttttttcctatttgagaatctccatcttgactattttttcacttacatggccagtatc

SEQ ID NO: 44829 - DNA, 315 bp, Manihot esculenta
  Intron number 3 from transcript cassava4.1_006556m (locus cassava4.1_006556m.g) derived from phytozome v7.0 (chr-ID scaffold01633; pos 6573 to 6887)
gagaaaatcccagggttgatgtaagtacagtgtagctaccgtttgctatcttccagttaaaactgacatactgaaacaatataaaaaataatattttcgtaatagggacatgtaaggttcaaggaggacactatagaggtgcttcagcacaaacacgatctgttcttcaaaaaattgaattttttgtggtgtatgattttttctctgaagttttttgattgaatttggaataaaatagtatgaggtgacggtgacctggatcatattcaatcggctaatccctttctttggacactgatgctatttaggaaatat

SEQ ID NO: 44830 - DNA, 552 bp, Manihot esculenta
  Intron number 1 from transcript cassava4.1_005176m (locus cassava4.1_005177m.g) derived from phytozome v7.0 (chr-ID scaffold10963; pos 253294 to 253845 reverse strand)
cctgttatctctttcacattcactcttctgagttggtatttttcacattctttaagttcttgtattaaattaattgaagctaatttggatatccctcagattcttatccagatcttcagaatttcttggtgggtttttgtcaactgacacattgtttcactatttgaactcaaaatcttttgagttttttcatattcttaatagtggtattatttcatttttatttgcaggtgtccttcttttttttttttatgggatatttattgtataaatctacttttttttcccttttttttgtgaatttattctccattttgtctttctgggtttctggaaaaattgaatctttgtatacattttccatgtcttttggagattcctcctttcttttctctctattttttaaatcaattatttcgtgaaactaataaaatttaaattggtgcaagttcctacatctagtttgttgacaaatttatttctgttattttgttgggcgttcttgcaatctctgcaggattttgcttttctttggtataaattggaagtttt

SEQ ID NO: 44831 - DNA, 964 bp, Manihot esculenta
  Intron number 3 from transcript cassava4.1_011037m (locus cassava4.1_011037m.g) derived from phytozome v7.0 (chr-ID scaffold10136; pos 293152 to 294115 reverse strand)
gtgtagctgttctgtctacatctttgcagcaaattgtaagtattctttaattcgtctaactatatttcgttttcatgattagtctatttctttttcatgattagtctcttttggtttgtttttgtttttcgttcttccccttcttgttctttcttctttttctttacattggctttggacaggcattccgtagataatcaatcatgcttatgtgaaatgtaatttgaatgcagaagataattgatatggacgagtatgagtgtattttgcagtgcagttgcggttggaacagtggtcttaaatatgttagatagagcgtattaattaatttaaaaattaattgacatatttgagttataagaatatcaaaatcataatatatgcttttccaggttgcactttgtaaccttatcttaatgggttttatttatttatttatactccttaaactcaatgccaaagaggtatatcttgcaagctgaggtctgttgatgtcagtaaccaagagggtggggggccaaatacacatatgtaaatagggcatcaacaaaagcagtggattgatctgttacataatgaattctgcataaatgatattaaccagctaacttgacagttggggcttgtctaaagccatttggatattaatatggaaggtagcaaatagccctagactaggctaaaatttttctactattttgcagttgaaacacaacattgaaacaacaacgttaacatgtttaactaaattgtgaagataatcaatgagatcttttgattgtgttatttaagttgcaacatatagcttttacttgccaagtaaattgatcaaagagtatcacttttgtaatatgaatgcagtttgttgcttgaaactgttgtgcttgtgaaataattttgattcgttttctttttcttttgtgggacagactataggttctttacagaagaagtattcaattgg

SEQ ID NO: 44832 - DNA, 711 bp, Manihot esculenta
  Intron number 2 from transcript cassava4.1_004208m (locus cassava4.1_004208m.g) derived from phytozome v7.0 (chr-ID scaffold01636; pos 36242 to 36952 reverse strand)
atcagggaacctgtgcctttccttcttgctcctaagtatgcccttctctctcaatattattacaatgtttgtgggtttgtttcgtcttctggtgaacttcaatgatattattagtttgattgaaaatggaattagtcatagccttgtattttgtaatgctatatttctcactttgttagcaagcaagatggaaactttattataagatggaagttatatgtatggcatacatgttaaaactaaacttttctgaagtgagtgaaaataggaaggcttggacataaatttacagatgtacaaagcatgattcagaggataaattctttgatagctttcattttcttgttaatcttccccatttgctgcaggagttacaaaagatctagcatttaattttaacttattggcaatggtcaaacataattaagaccaagtaatcatcttcaatctcagtttgctttgtattcatattgttatatgtgaatctgaaggctaagttattgttcctgatgtgttattttaacaatgttctgtatattccactgaataggtatagggaaaatactagataagtaagttgtgtaaaattcattaaaatcctttcttaagtatcattattctgcactaccaatagatagagagtttaaagtggcaccatttaccttttatcatgcagggtaagcaatcaattaggattagaggcagctgttg

SEQ ID NO: 44833 - DNA, 602 bp, Manihot esculenta
  Intron number 2 from transcript cassava4.1_013276m (locus cassava4.1_013276m.g) derived from phytozome v7.0 (chr-ID scaffold03834; pos 48480 to 49081)
tcatcaggtatgtccattgagtattctttctgattgattgtcatgtgttctaggctgcatgcttggtttaaagctgttttgatttaacttagtatgacaatacttgcttccatattttcaccctgaatcatgtataaccaaattcacatgcccatctcctatgaacaaaaaggcagtattaaaaactaggttgttaagatccattggagtgtaaagatattgcaatgtgtcgtgcagcaaactactatataacaaacaagaaggaattgcaaccacttgcataaatatgttgttgaacttgtcacgctcaaggtcttatatggttacaaacttaatcgtattgttgattgctcatgaatatcttttaaaaatcttgaacaagtatgtgctacttgtctggtttctatgttaatttttacttttgaaccagcttgtactgtgtactgaattctttatcatgtgttttcagtactcggtatttcttgtctaattctttggatatatttaataaatgtatttctgcactatagactttattattcatgttcttttgggattgatgtgtagccttaccaacctggttatactactccacctcatcc

SEQ ID NO: 44834 - DNA, 233 bp, Manihot esculenta
  Intron number 1 from transcript cassava4.1_003810m (locus cassava4.1_003810m.g) derived from phytozome v7.0 (chr-ID scaffold08359; pos 2108133 to 2108365)
tggagtaagtaattatatgaggctcttattttcctttaaggttctctactcttcttctctgcattgttctaatacacccaaactcttccctctgtttctgggttattatgctcgtctctttgttaatcagcatggaatgtttgtttagtttttgtactgttttgtatttgatttgaagaaaggcttgatcgtgcttaggttgcaagttggggtgcataccttttcaaaaagaa

SEQ ID NO: 44835 - DNA, 614 bp, Manihot esculenta
  Intron number 2 from transcript cassava4.1_016102m (locus cassava4.1_016102m.g) derived from phytozome v7.0 (chr-ID scaffold02998; pos 30426 to 31039)
ttgcacctgatcaatctcagtgataagcctcagtatcagaatcagctaatcgttgagccttgaaaagaaaaaaaatcttaatcgatgcttgttttgtgtgcgtttagtagtttatttgtagagtttgtgcaaatggtttttaattttatgacttttatctttatatgcaattgggttgtgtttgcttgcgtgtacactttgagtccatttacgcggctgttctgttcatatattctaaaatttttgaaattgaagtgttgatggtcaactgttgggggaaccaagcaagcaacttgttttggtggttctctttagggggaaacgtcactcctcacctcagttctcccagtttagggggaaaagtgaaatgtttttcttttttccttttcaattgagaatcactgtttaagtaaattcttaatctattttaacaaaagtagtgaagatcaaatcctagattattacaaaaaacaaggtgaaaaaagtgcacacattaaatagactcgtttaaaatataggtactgtttgaggcttttgtatgtatgattcattagtagatgggtgctgttgttttgataggtttttggaaataagccctgaagggaaggtgccag

SEQ ID NO: 44836 - DNA, 269 bp, Manihot esculenta
  Intron number 1 from transcript cassava4.1_004831m (locus cassava4.1_004831m.g) derived from phytozome v7.0 (chr-ID scaffold08359; pos 2226533 to 2226801)
ggcataagttggctcagttcgttcaccctttcaaggcatcgcttttttttttttcttttccatttttcttatcttgcagaagctgcacctggttttgatttaatctgatagcttgttaaaagattctttgttttgatgagggatcgcgaataaatattatggtgtttttgctcctgtctaactgtttcatctggaaattaaattttaatagctttttgtttctttgtgtagcagatctgttcattcgttgccttttgcaacagtagaag

SEQ ID NO: 44837 - DNA, 426 bp, Manihot esculenta
  Intron number 1 from transcript cassava4.1_004555m (locus cassava4.1_004555m.g) derived from phytozome v7.0 (chr-ID scaffold05875; pos 1569147 to 1569572 reverse strand)
ccataataactttggttcccgcgggaatttcatcggtcagtgatccgttatcgatgtatttatcgatgtattctttgtttttgtttgattctccttttggttgccgggaaagtgaaaaagaacttgtaaattaattagaattcatgaagataactcggttaatgtttggatgtgttgaagtttgatttggttccatagaaagtgaagtgaaatttatagtttctttaagatttaagatttgaatttagtatggatattatagtaaacagatgatgagaaagggtcaattagatcatttttcttagggcctttttttaaaaaatgtcttgggtgcatttaatttgggttattaactgaaataaaagattatgatgttctgctcatcttcttggatatcagacctgttgtcggagctgcacaataaat

SEQ ID NO: 44838 - DNA, 691 bp, Manihot esculenta
  Intron number 1 from transcript cassava4.1_017539m (locus cassava4.1_017539m.g) derived from phytozome v7.0 (chr-ID scaffold05019; pos 4681 to 5371)
aggagagattaacagagctctgaagaaggtaaatatcttaactttcatatgtgatcagagaaaataaaatgtgtttgtcaatggatcatttgatccgttcttcctttttttttcctttgtttttttagatttatgacgaaaagtttatactttctggatagttctatatgagtatgttttgacccaatttagatttcccacctgataatgttaatcatatgctaattttgtgtgatataattcaaaatggtattgagatgatctgacaagtttgtggaaatatttgagacagtttttgatcctttaatggagacagatggatacactgtaataacttcccaagttgttttttcgtgcttaatagtgtcattacactgttacagttgtacagatgatactattttcttcagatgattgttctgtaatgagatttagtttgggtattacctgtgactttgtactcatgttgtttgctctgaatttttgttcttcttgcatgatcttcaaaaaatctatagtatttattccttccctgtgttagttggtgttccttagtctcgtttgcctgaagtcgtagacaagccatcagaatggagaaatatgagtgagacaaggatgcatttcttaattcttataatcttatgcctttcttgaaggagaaattttacatacaagtggactgcttgctctt

SEQ ID NO: 44839 - DNA, 518 bp, Manihot esculenta
  Intron number 3 from transcript cassava4.1_017539m (locus cassava4.1_017539m.g) derived from phytozome v7.0 (chr-ID scaffold05019; pos 5737 to 6254)
attttatatataaagtcattggaggtttggttttacatccttctactgatgaatttatttctcctgggtacccatagcctcaaatttatttgatcataacatcatggttcttcggttgctgttttcttcttcttcttttgttttttttttccttctcttctttgacaaaataactttttcaccgtaactctgttctcaacttcttgcattatgaatataactttgaacttagttgtaattttctttaggattttcttgagtgttttccttttaatggtatatatttatgatcccattaatattattttctgtttatatttccttaaagtagttccaatcctaccttgatatgcatcagttttatggtgtttgaccatttgagtatctacactcaggaatgcttgttgcttgcaattgcacaaaccatattgagcttctgttaaatgaaactcactataacttgatgttttctttgtgatgtagttgcggataaagaagacacaaatttgagacaatac

SEQ ID NO: 44840 - DNA, 531 bp, Manihot esculenta
  Intron number 1 from transcript cassava4.1_000699m (locus cassava4.1_000699m.g) derived from phytozome v7.0 (chr-ID scaffold09492; pos 149740 to 150270 reverse strand)
gagtctccttctctcctcccggttcccggtaactctctaatttacaattgatttcctcttctgtttctcattaattttcaaaatctttgaatttgttgttctaatttactggaaaactgaaaactctgtggctcattggaacttttaagctcttttttttatcacttcttctttttgggttgtgtttttattattgctttgtttgtttgctaagataaatgccccgcatagaagggaaaagtagactgcttttaggcttgctgaagatttttttttcttttaacgtttttggaagagcccaaaactggaagataggtactgggtttgccaaaaacaaagatttaggtgtgcatgtgatatagaatttgtttggtcatttgtctcaatgaactaacgataatgtcttttttttaaaagaatcgaagttgtaggttgtgtgattaagttttaatttactaaagcatgatgatgattattcacaaattgaaaatttgtgttgtgtgtaatgttttcagaggattccaataaact

SEQ ID NO: 44841 - DNA, 853 bp, Manihot esculenta
  Intron number 1 from transcript cassava4.1_016180m (locus cassava4.1_016180m.g) derived from phytozome v7.0 (chr-ID scaffold09702; pos 238599 to 239451 reverse strand)
cagcaagatcaccggaagaaggtgatggattattcttgtgtcaattacattgctaaggctcattaatcctttttttcccttcagtttcttctttatctaagagaaatttctgattagttttatgtctttttgagatttgagaagttattacctttttacatacaattgaagatgaagcataataataaggagataaatattcttgaatgttcattagctaaccctttcaatatctcaacgaaaaattatttatgaaagaaaactttgcaatgcttaggccactattcactcctaatgaccaaaaaaaaaaaaaaaactcaaaagagaaacaaccggtttgtttggtaggtaggtgggatatcctggtaggttactctaagaaattgaaaattgtgatataaatagatacgttcctttgatgggtgctactgtgctaggttaggtggcttaagctcgtaaatgcttggtgtttcaagatttgatggctcttagttaaggatacttagagctcttacttagtgacttagtttgtctagttaaaattcattttttattttctgagtacatggtaaatatttatgtttgttttccagtcttctcgtattttactggtgccatttgctttatgagcttcctatgtttaatatgttaaattaatagaattaatatttgtttcatacataactccaagtgcactacatgcacagacacagtcagaacactaagtgcatgcttatttgttaaaggaggtttagtatgagcttcctgcagtgtatttatcaattataatggtacttctttatactatcatctaagtctaacttggaattttgtgcttcagaattcaacagag

SEQ ID NO: 44842 - DNA, 748 bp, Manihot esculenta
  Intron number 1 from transcript cassava4.1_018797m (locus cassava4.1_018797m.g) derived from phytozome v7.0 (chr-ID scaffold10424; pos 24376 to 25123)
cacaaaatcgtcatcttctccaagtcttattgcccgtacgtctctctctacctctcttctgcttgttactttcccttgtatcatttttcttagaatacgtaattcgtcttaggtttacacgatccgttaaaaattaaagagaatttgctatttctttggtctcaagtgagcataaaaggcaaataataatgtatgggatgtgcaagcgttcatcaatcaatgtcagcaaaaactccactgggaatttgattaaacatttttgtgttcaatagtggcttctcacagcgtgagatgatgtgtttactgaatcattgattgatgaagagttcgcagcataagatatgcctttgattaaagatgtacttgttcgctttgattattttctattattgattcacttcaatcacgggtttctgttatttttattagttgaagtctgataaataccagactgaatttaacctttccttcgttgtggattgtctaatgtactaactcatattttgtaaaagtgatgcagctaagaaaaataaagctcactgattagtttcatctcagttctttgttatctaaagcttaggttgttcttgttaatttgtaattgtcaatctggtcaaattaaaggaaaaaattcctaagtttatttttcttcttctttgtacatttactttcttttttccaatttcatttacttgtaagtttttgttatacagatattgtaggagggctaaagctgtttttgaagaat

SEQ ID NO: 44843 - DNA, 769 bp, Manihot esculenta
  Intron number 1 from transcript cassava4.1_010108m (locus cassava4.1_009860m.g) derived from phytozome v7.0 (chr-ID scaffold02477; pos 199049 to 199817)
ctcccaaaacccaaatctttacctctctctttaatgtgagtgcttcgaaactccatttttcgtcatatttatctctgtttttctcgagtattcgattcgatatctgggttttccccctttttatcttttttcctcttgaacatgttactttggattttccacttgttgtttaaatggttgtgcttgtcggttttgattctgattattccgtcctcaagtatctttgtgttggttgatgaagtttgaatcgagcgatcacggtcggaaaattgataactttatgttgctatcaactttgaattacttgtgttgatttgataggtgccgcaagtttattgcttttgactgtgagcgctttcagtttcttttccttttttttttttttaaaaaaaaaagtgatctttcatggacttaagctaattgatgtatgtgtggggttcagtagttacaatctttattgtttccaaattactgtagtgtgtaacgtagctggatgatttgccctctctgatgcgcatggtatactgcatttacaactattgttgctttcgcactcttactgaattctgaataaataaatacctgttattgtgaaagtagttcaatttgtttagcagttttgttttctgttttttgatgctaggaaaaagtaattagcttgatagtttcaaatgttagttatttcaagcttgcttctgatcctagtatgtttgtgtgtattatgtttctctcagaagaaaccctttcgcttacaagctgatcctgtcta

SEQ ID NO: 44844 - DNA, 990 bp, Manihot esculenta
  Intron number 1 from transcript cassava4.1_024117m (locus cassava4.1_024117m.g) derived from phytozome v7.0 (chr-ID scaffold04165; pos 317417 to 318406)
ggagaggcctcttgatcagatctcatcatcttctggtatttcattcaaaataaattcagaattatgctttcgggcttttgaaatttttcctttttttaattcttgggctaattacaatgcttttttcccccctttaaatgtgataaaaattaatgggaatgaatcattttcataattgtgtgaatcagtcttttctgggtttggaattatttaattggcgatagacctagaggaagattttgaggacgatgttcctcgttgatgcatgtttaattattgttttagggtaatgtggggatgttgattttttgctcaacctgtttgagctacttggattttgttcaagttttagaatcattggtcccttcatagttcaattaccttatataatttctcacattgtaaaattccagaagccctatggctattttcatttattttcctccatgttgattgaataatcatttattgatttgttataacgttgatgaatttattgattttctaagttgttagctcaattacttgctttctatctgaaaccctgatttttttaagaagaatttatgccaatgcaaatgtaaatagttaattattgttatggtggtcgtaaagtgttgattttatgactttttagtagcatgttagaatttcacataaatggaagctattcatatttccagtcctgctggatgattagtggtccttatgaaagcaatatgcaacactaataaatgaatttggttgtttttttgttgtgtagcattataaatccaaacttacaactttgcttcccgactgtttgtttgtcttttatgattcttgtttttttctttctaaactctcaatgataatataaacttttttggctgttaaactgcatttgaattgtggtttgttgctttttcacatccatttattggtagcattatttgcaactttcctttctggttattattttagataaaacaaagccaaattcggcattgg

SEQ ID NO: 44845 - DNA, 898 bp, Manihot esculenta
  Intron number 1 from transcript cassava4.1_026562m (locus cassava4.1_026562m.g) derived from phytozome v7.0 (chr-ID scaffold08614; pos 57511 to 58408)
tgtcgacttttgcgtttccagctctccttcttggcgtaatctctctctctctctctctctctctctctctgtttttcttattactgtcagtctgttttatttttctttttactggcttagctaaatatttctaccacttggattctctttgttcatatttttctatcactgttgacggatttcccgcgctttttcttttctatgcttcattctctcaaatgtgtatttctcctattgatgcaattccgattttcttctcgattttctgtatttttttttaaattcttttacttgtattatatatatttgctgaaaaaatcgaaaaaatgatgaatgctgaacaatgaaacgatggatcagttatcccttttttttttttatcctgtttgatagccgagaaacttatccaagtcttcttttatcagaaaaaaaagtgaaaaggaaatgtttgatttcttggggtttaggcaatttattgcagttcttctcttgttttcctgcattttccgacaaaccaaacagagtctgcaagtaaaaaaatattgggttacttacattttatttcttaaaaaaagtttatgaggtagatgtgcaattttccttttcttagcatctacatatttaattgtggctcactggcttatttagatcacacttgaactaacttttttatagtaagaacaataagatctgactggcaacggctcaaatttttatgaacactaaaattgcctgtttgacttcaataagattattcctttgaggcatccgttgagcattaattgtaattataatggtcaaattaataatacattcctatgcacaaatcagtttttaacataacttgcctccatttactgcagctgaggccatcgttttaggatttcagcattaccta

SEQ ID NO: 44846 - DNA, 796 bp, Manihot esculenta
  Intron number 1 from transcript cassava4.1_015587m (locus cassava4.1_015587m.g) derived from phytozome v7.0 (chr-ID scaffold06707; pos 33108 to 33903 reverse strand)
tccataggcatcttaccaggttagtgatccactatattcaaactttcatttttatgtatttgtttacttattcacccattatgtatttactatcctctctagttaacatatattagcatgctattttattgcttctttataatcatctcataaaagatttttctgaatacagattttcatctttgtgattatggcatctattttccctctggtaaacaaaaatcaagtcatccatatttcctttgtttggactttggactctgggaaagctttttgtttcattatatagttcaagatgtatattaatctttccttatatatatatagataatagatatagatataggcacacattaacgtacatacatattaggtatttatgcatgtataaatttcatatttgatcaatcctatattttcaacttcaaaaagatgtattacaaataatagaaatatttgatgaatatagaaattagtttatatatatgataataacaatgtaacaaaaggaattctttatttgtaacaagaacttatcttaggatcattggagtaatcctaaactttgaaccatgttatttatactgttggggggggggggaggggaaatttctcattgtctaattattttgattggtctggttgttgtatgaacacagtgacggaagcatcccacttgtatgatcggatgcatatgtttaactctttccctatgctttagtcactgatcgaataatcctgtgtattcttcatgtatctaggcctgattcaagagtggtgagattgattgaacgtg

SEQ ID NO: 44847 - DNA, 303 bp, Manihot esculenta
  Intron number 1 from transcript cassava4.1_006806m (locus cassava4.1_006806m.g) derived from phytozome v7.0 (chr-ID scaffold05116; pos 150526 to 150828 reverse strand)
tcatcatcttcttcagactggactcaaactttactgttaagtttttttttttttttttcttttaatgaatcaagatccaagattaagctccataatttagatataaagtttgaattcaagcacttgaagacctttaaagtctaaatcttcaactacaagttagaagaagatagctttgctcggaaaaaagaagtcaatatgatcatcaatttagctttttccttttttcaagtttagttgtcaagtgggaaaatttttatatcaattagattcccttttcttttcttttttgcagtagaagaa

SEQ ID NO: 44848 - DNA, 736 bp, Manihot esculenta
  Intron number 1 from transcript cassava4.1_012464m (locus cassava4.1_012464m.g) derived from phytozome v7.0 (chr-ID scaffold06856; pos 52522 to 53257 reverse strand)
acaattctgctgattttaaggtcacaggttagttgtacctgacttcttaatcaccgttaagatttttatttccatttgtttgattaagaattttgattataatttatcaaaaacttgtttgcttatactagttacccagaatctaaaatttccaggattttcttttgcagatttaggaatccattgaattttcaataagctgcaaggaatcggtgtttttatttttacttatttcagtattaaatattcaagtattttgaagaaatttatacttttgataatttctatttgtatcttaattttggaaaaattgaaaattattgtttaagaaaataaatcatggaaatagaatataaaagtaaaaacagaaaattaacgagtgaagactttgcagcttaattttctgaaggcagaaaggaaatggtctctatcagtttctcttttttctaaaatttttttgaatgttactaatttgagaaattaattaattactcttttttttgtggggattcaattttgattaatttttctcgatagtgtaaattctttttatcatttgagtgactgaacatcatatgtttctgattgatattataatcagttcatttttttttcatgtgggtattcactctagcatgtgtttacatgaaaatggatagaaaatatataaaacagggttgaaattttattgagtgcatataatctaagaggaaaggtggtgcaggagtgctggctg

SEQ ID NO: 44849 - DNA, 570 bp, Manihot esculenta
  Intron number 1 from transcript cassava4.1_018005m (locus cassava4.1_018005m.g) derived from phytozome v7.0 (chr-ID scaffold06582; pos 617559 to 618128)
agttgtgatctcttgagaaacaaacagagaatgtaagcttttcagattcctttttttttaatttttttattttctgcatttgtctttagatctgttgaaattatttcaatttttttttgtatcgtttagggtttggatctattatttcattcctgtattctggatttggatgttctgcgctatgtcattcacggttgtgttgacagaaacaatggttgattgcgtgaagctttttataattttgaattttgatgatcattacttcagaaaatttcaaatcatgagatgatttttttctttgccttaaaatagttggattgcaaaaattttttcagcttagggaagctttccaatttcgaaaaatccttgcaataattcattctgtgttcaatcattctacaaagaagaaggaaatccaatcatttatgtcttctaattttctccaaattatttacctaacagtgttacaaattcatgtcattgatttagtaatgtgaatacaaacattgatggcttctgttactttgtggaccagattcactttgtccttctcattagtcgacaagggaa

SEQ ID NO: 44850 - DNA, 790 bp, Manihot esculenta
  Intron number 3 from transcript cassava4.1_009477m (locus cassava4.1_009477m.g) derived from phytozome v7.0 (chr-ID scaffold11821; pos 47538 to 48327)
gtgttgctgttggaaacactcctgtaagttcaaaaggaaacaaaaaaaatcttttctagtgttttattttgtttggatgacttgctagtttcatcccttaatgtgcaatgtttcagttttgatattgaatgattgttgaagaaggtgactttatttttgaagtaatatttcatcccttttgagtaatgttattaaacctggaatggaggttgatctagcaaagggaacaggtcgatgggtaatttgttcatccagtgcagcattacacaagtaattaaatacaaatatattaattaaatatgatacctattaatgtaaataagtaaatctaattaattaagttttaattatttaaaatcatattatcaacatttatcaggttatatttgcatgtatgttaatactgcttaaatcttataaaaaagtattcaattttggatatcattattagttttttatcaggttatatttgcatgtatggtttttggatatcattattagtaaatattttttctataattattattataacaggtcaaatgcttgggtaatagttactctaattagaccatgttatagaacttaggtttggtttctaacaagtcagctgcttcaattttgtttcttcaatatactgagcacctaggtatatttatacattagtgtgcatgtgtatatctctatatgtgctttctgcaagtttaatgctcttgcaagaagagaaaaataattgactgtgtagttattttggttagggagttcttacggagacgacagcagagttagcagc

SEQ ID NO: 44851 - DNA, 893 bp, Manihot esculenta
  Intron number 1 from transcript cassava4.1_015231m (locus cassava4.1_015231m.g) derived from phytozome v7.0 (chr-ID scaffold05875; pos 1255728 to 1256620)
cctttccagtcttcgcctaattcagatttatacaggtgcatgattaattcttctatttgttgtatttgcccttattttttcctatttgttctcttaatttttcgaacatttctatttggtgcttgggatcagtccctcgattgttgttttttttttttagctgcttgattgttggattcttcacggttttgattacttcatttggtagatgagaattggtaaatttagaattgatccttttatcttcgattttaatgaatcattcatcattcgggaaaaaaaagttgaatcattcactaccatgtatgttgatctcctgaattttttttcttcttatatatattttgcgttctttttaagaaaaaaaatgttcccttcattccaaaagaatatgttattatgtgtgttatattaatcataatttgactgaacaattgcagaagggccatttagcttcccaccataatttagaactgtgattgtaatttaactcttgtaatgggtattctttttgtattgaaatttatattttaatatgcaattaactacaaaattagtgagattctttcaaaattagtgaaacttgcaactcactgtcacaaagtctggtttggcatttccttaattttcgtagtatgaatttttctagatgggtgttgtttttcatgcatattgttactgaattagaacatgtgaagcgatgtagatgtctaatatttatgtttgttcttaatgatcactcttttttctttcattacgtatcagttgttattgcaattattatatgtgaaatctgattaattgcctctctttctctgtatcagctaacatttttgtggtttttgaattaataaaaaggaaaagctagaattagtgagctttagctcagtggt

SEQ ID NO: 44852 - DNA, 986 bp, Manihot esculenta
  Intron number 4 from transcript cassava4.1_004744m (locus cassava4.1_004744m.g) derived from phytozome v7.0 (chr-ID scaffold05144; pos 59994 to 60979 reverse strand)
cttcacttcaggtatttgtgtttccatgttcagtttcttgttctatattgcatgtgagaaagtaatttcaaggagaagtgatggtcagtaccttagacgagctgtctgcatttggaatacgattcagatttcaaaatacactctgaacaaaaggaaccttgcatttagcaataatttacttcttttgctttttgtctgctaacgcatatctctactgaatctaagtaagaaatctgtacttcattgaaggaaaaagcaaagtttctcctactaggaaataggaagaaggacgactcctctgcttttctctttttgcattatagaatttccattgcttcctttccaattcactgggcctgatcagagatggtgcaaaagagaatttgttgtgaaatgagatatcataagttccaattatgtgaaggggtttccaaaatcttgtttcctgtttttttttccccaagaatttcaactgtttatctttcccttattgttttctcaaccatctataagaaacagatacggaaaaatcagtcatgaaaagttattaagttccgccaataaaaaatctgaaaaaatatgtcatggtaccagtcatatcaaccataaatattttggagatacaactttaaaatttttctactgtgctaaacttgttactgttgtctggaagtccgaaaacacaggaagattttttagtcgttgaagataactaccaatagagcttatacaagatgctttcctcaatatttccttcttcccaaagaccttgatgcttaaagaatcactttaaaagcatgctgcaaacttatggaaaataaacattttaaaaatgaattaagtcattactttttaaccatttttctttcaggttcgtcatgcgttaagcctcagtgaaaaaaattacacctgtcttattatcaatttggctttattgttttatggctgtaggaaccactggaaggccgaagggcgttgtcataaac

SEQ ID NO: 44853 - DNA, 789 bp, Manihot esculenta
  Intron number 1 from transcript cassava4.1_008834m (locus cassava4.1_008834m.g) derived from phytozome v7.0 (chr-ID scaffold02717; pos 238600 to 239388 reverse strand)
ttgcaaactactgaacgactccacctccaacccttgtaagcctttctccttgttgtcctctctttattaatgggatcttcagtaccacaattttttacttcaaagttgtagtctttttctcttttttcaacgtgattcatttatcataagattttcgatcgactgattggatgctgagcttggaaataagatctagttgatgaactctgtttatcatacccctcttttatatatatatatatatatggattgttccaatggtaccttagtgttgagattgctacgtcctcagtgagcagacagttgtttttgagattgcattgagtagcagtttgtgaaagagatgttataatttgttgatttctattaagatgtctggatgcgccatgacattgtatcattctatagtgcaaaagtttgcaattaagggcatttagaataatctcttttttcctctgtacaatttctctaccaagaaagatgattgattgcttgttggtaccaacgttcactttcatcaacttttctaccagttgcttgtaataaatttgctggctttggtattgacaaagccattggcatgtatttagctaattagcttgcattttatactaatatctttctttcttttttaatttcttttgtctctttgatggcttttctatatcttgaacagttaataaaaatccaaatgtttttctggattttgcacctgctgattcttgctataactagctgcatctaacagtttttcagacattgtttgaacagaaatattcatcttagaaa

SEQ ID NO: 44854 - DNA, 114 bp, Manihot esculenta
  Intron number 1 from transcript cassava4.1_025306m (locus cassava4.1_025306m.g) derived from phytozome v7.0 (chr-ID scaffold06600; pos 1038 to 1151 reverse strand)
cgtaattctctctgccctccttatcaggtactacggtttgcatcttacccaattattttctttgattgaagagttcaatttagtttttttaagttaattctcttttggtttcag

SEQ ID NO: 44855 - DNA, 743 bp, Manihot esculenta
  Intron number 1 from transcript cassava4.1_013353m (locus cassava4.1_013353m.g) derived from phytozome v7.0 (chr-ID scaffold06748; pos 54178 to 54920 reverse strand)
tctccgacccggcgccggaaaccaacgacacggctgtgagtttccttttcttttttgcagctgtaaaaagccctaatttagttctgctgttctatcagattgatcttgtattcttttttttttttttttggagcagtgatattggaagggaacacggctatacattaagttaatatcagtgtgtgtgtgcgtgttgtttaatgcatacataggtactgggttttggattacttaggttgctcctagaggtttggcgccggtctagggactctgtaagctttattcaagatagtgaagtagaacttcttgtttagattgtaaatgggatacaatttctaaatatggctgagaatttgttggtacttctactcaaatttagttctagtatgctatgacataattctttgctttgatattctgcagaggaaagccttcaaagaagtactatgtagggtgttagcgttttgcttttgcttttgcttttcctgaatgtggtaaagtgactccattttttatggagacttgagatgaaaacaaaagattgtgacaagaacacaattgtcaagcatttgcttcagttcatgttattaggaagtagagacctccgatttcggtatagtgcccataaaacatggaacttgtggtcttctgatatttatgtgcttttgcctctgaggttcagccatgttatgctagctgataattatgaaattctacgtatgcagttccagaacaaaagaata

SEQ ID NO: 44856 - DNA, 454 bp, Manihot esculenta
  Intron number 2 from transcript cassava4.1_014133m (locus cassava4.1_014133m.g) derived from phytozome v7.0 (chr-ID scaffold03806; pos 57640 to 58093 reverse strand)
gtcgagcgcagatagtaaatcgtttgattaatctggtaagtgcttgaggtattttattaatcttgttttctcgttaaatcatttgaattatttggctcttccatttaatcatatgctgttgggattttaagaaatatgttttgctgttgtgaattgtttgattagatgctaacagtcctaatgaataaccattgatttgtggtgaaaacaatggagtaatatttggaaattataattggagtagtaatttatttccttcctatatgagatgagaaatcaggacatatttgagtagaaggctactatatatttgttggggacatgctggctgttcagagaatttgctgaaagtgttttgttgaatgtaaaatatgccatactgggtactggatttattaattatgtttattgttgtgcagtttgttcatcattttcttcgacttctgtggcattt

SEQ ID NO: 44857 - DNA, 835 bp, Manihot esculenta
  Intron number 1 from transcript cassava4.1_030411m (locus cassava4.1_030411m.g) derived from phytozome v7.0 (chr-ID scaffold06278; pos 22012 to 22846)
gaaggtatggatttctagctccaagatcagatggattttacattttgtgagtgtttgtttgtggacttgaattggtcttgtgcatgatgagtacacgctttactcatgcatgttgaaaatctagaaaaagaaatcaggagaattcttgtttcttgagttcatggtgcgtcattgtgatattgcgctaaggctatatttgatcgatataatgcagtagtattgatggtatttttctgaagtctggggtttgttccatcatttttacaaaagaagggaaatgaaaattgcccatcattgtgatatagttggtaaaaataacactttatatgaacttatttcggcatgacatgtagtgatgtgcaggtgtgtaacctgatgttatttaatgtactcatattaagggatcaagggtcttagagcattgatgttgaagtatgtaattttcttttaatattaatcttgactttgaatgatgacatgcctctgaacattgtatgctgaatgcaaaatgatgattcattagatttaaagtccaacacgctaaatttgggtaggcagcattaaaatttcataagtagcatcattttttgtgcaataaatacaggaacacttattgaactttaagctgtaatatacatctcttttcagcattatatattccaggttatgatatattttgattactaaataacttattgtgttttataaattcaactatgttcaatgtttgcatgtggttacctctttcttttcgcctctgtgatgatttttctttgatttacttgtctacaaacataaatctatcaggtccgagagctggctgaaaaagagcctg

SEQ ID NO: 44858 - DNA, 453 bp, Manihot esculenta
  Intron number 2 from transcript cassava4.1_026942m (locus cassava4.1_026942m.g) derived from phytozome v7.0 (chr-ID scaffold09880; pos 441039 to 441491)
atcggcaagggtgcatttggggaggtatacacctttcttccccttttttagtgattttgcaagggtgcatttgtggagggatacaccatttttttttgaagtcaaatgtgcaaagtatggaattcatttgaaccaaacagggcgtttgcttcttcttcttctttgtttcccagaaaaggagttggccctgttgaattattacagacttatgttagttcctgacagtcaatatctatcttttatctcatttatatgtttttatatatataagctattaatttattacatgtctttgacaatatgttattgcatctgggctaaatttacattattgacttatccaggtccaatttttattttttcttttatggctctttttgccagtaatttcataattgactctaattttggtctctgagcaggttagagtttgtagagaaaagacaactggcc

SEQ ID NO: 44859 - DNA, 938 bp, Manihot esculenta
  Intron number 1 from transcript cassava4.1_004648m (locus cassava4.1_004648m.g) derived from phytozome v7.0 (chr-ID scaffold09231; pos 62962 to 63899 reverse strand)
gcgaagaatcatccaggaacacttctctgtcaacggtacttttgttttcttttctttttaaaatttgacttgcgttttgtttggttgccgagaaaatatatgacttcgcgtgagaaaaagagggaaggagactcaaactcgaaaggacgacgttattattatttttgagtaaataagtcaatagtcatgtaactttttctttttaattaaatttagagaaaatgaagttgtaaattttataattgtaacttttttctgtgttaaaattcgttatggataagtgatttggtaatcgagtgagcaattgagtatgaaatgctttcttttggtctgattttggacattgtggttcatctttcaggataaatttactttctgcatttagaatatgcataaacagtatcttaaaagaataaatgcaattaataaatgagtgaaaaagaaaaatagtttgatgaacaaattcttttagcttttcagttgtgtgtacagtaagatgtgtattatgtttctagtaaccttttataacaagtttttgcctgtgagcaatggtcaattagaagtgtgaaatgaaggttttgggtgcaacggttatgttcttctgcacttatactggaaggcactgttggcaacatttttaaaagtaatgtttagtgtcttgacttatttaaggtattggattttgaaaaactactcctcaggttgactaaccactaccaaaacaactagctggtccaaaacagccaaagaatttccttttgcacctttgcagtgtttatgttccagtgttaaaaaggaactgaaaacaattactgtgtttcatttttagaggtttatggaagattgttaccttctgcaaatgcttattagaatttggattgtaaatgtttgattctttttcaggtgcttcaagaatccggagtcttcctccagagcag

SEQ ID NO: 44860 - DNA, 1012 bp, Manihot esculenta
  Intron number 1 from transcript cassava4.1_024478m (locus cassava4.1_024478m.g) derived from phytozome v7.0 (chr-ID scaffold00468; pos 42856 to 43867)
gcttgtccaccggtaagcgtttatattcttgttcaccgttagaagtttctacgggatcgcatggcttcatcaattgactcggcggaggatgcaatgaatatgcgttctcaacttaatttcatagttattaaagtctcaaggctggttaaggcaccaaagagtcctggagtctagacctaaagacctaggtgcgtgtttgagcgaataataaacaaacaaataaaaataattattaaaaaaactacaagttaattatttaaatttatttatttttataataatagaattttcaattttgataatataaaatttataattataaattatatttatttatttgtaatttttttatatttataaataatataataaataatttaatggcagcaaaaaattatataaatttaatattatacaatcgtatgtaattctctttgataatataattgcatcaccgatgaattttttgttataaacacaatacctaaaattttttataaaattaaaaataaaataaaattaatttttaatattaaagaaaataataaaataggcaagcacttttgaatagggtgcttggattgccaaggcgagtctaggcacactgggtgcgcttttgaatcatcggtcgcctggtgagtgtttttgaattatcgcctgcctagtaagtgtcaaaatactgacctttgagctccgtgcgtctataaatttgagcgcgcctattgatgatgagaatggtgagctagtagtaggggattgaactaataattgcgatctcagtctgttgttcagtccctatttcaattatgtattcttggatgttttatttttgatctcctggtgaattttgtggccatatattctatattggcattcgtttggtgttcagtaaagagaatctgtaagaagaaatttgtaaccaaccattaaattttttaatgttttcactggttgatttttaatgtaacctaccagagaatcaacctactcaactggaactatctgatattga

SEQ ID NO: 44861 - DNA, 939 bp, Manihot esculenta
  Intron number 1 from transcript cassava4.1_002329m (locus cassava4.1_002329m.g) derived from phytozome v7.0 (chr-ID scaffold03175; pos 345584 to 346522)
attattcttcttcatctgaaactgtggagattaaggtaattattaaaccaccggttcttaatctttcattttgcaatatttcatgctgttacataagttaattaaaatgctaagtcgaaactaatccacaatattatttaattacacaagttaattaaaaaattctcaaataactaataatttgaggaaagaaaacctctaaaacaatatttgtcacggaataaatgtagtatttaaaaagagactaaattatagttactatctcataaattggcttaaagaaaagttgtgattttaatttttatgggataaatattttattttgtctaggaattttttgttatttttatttttaaaaaaacatggagcttgtattcatgtacctagtgccgtgcggtgctaatacagccgaaatgaagatagattcaaaaggtaaaaggttgattagacgatgtcatcctgattaaattaaaaaataaaaatgcatacatatatacagaatcgtaacaaattaaaattcattctgattcttagccaggtgccacccatcaattttaatttataaaggtcccttaaataatataatagtatttgtataaagtgaaatttattatttaatttttaaatattatcactatttaagttaatttttatattttttaaaaatatattaacatatttttatattttttcttatcaaccaaataaaggcttcattaaacagacgaaggatgtgcgaaaaaatatttaaaacaatataatgtttttgcaatggtaattgacgatggtgcaatagcatgggttttccaggttgtcttgaatgagaaaaggtcatcaaccaagaagaaatgaaaaagcaaagacatttaatatgaataattaagaaactggtattttgtgttagaataatagatgagaaaattaagttgtgtgtgacag

SEQ ID NO: 44862 - DNA, 626 bp, Manihot esculenta
  Intron number 1 from transcript cassava4.1_003231m (locus cassava4.1_003231m.g) derived from phytozome v7.0 (chr-ID scaffold12794; pos 949596 to 950221 reverse strand)
tggaacaagctgaaagttttgcctcggtcctcaaggtacctcttcttttttttgggtgatttttggatttttttaatggtggttctgtttatttttcttgtcctttaggaatattcttcatccggatggaaattggaatatgattcccttctttcgtgtgttgttttttttttctccctgctgctatgcagttgcctgaatattatcgccaatgcatgcaagtgattgtttattgaaatttttatttaaaaaaatcgggaaggggataaattataagttttatatattatgacattttaaagacaaaagaaaattagagaattttgactttgtgctattggaaaatgaaactgcatatcttcattgagtcagtaatcagtatattttatccagtttgactaattacatattcagtatattctgaatgctataaattattattattatttgaaaacaactcataagttaattaacttcagcaattcagtagttctttgagtcaaacaattaaaacctgcttaatgaattctaaacgtagatttgggtatcatattattgaggtccatcaaatctagtctaacttcaatcactaatgcaatactgatttctgcagttccaacttgaag

SEQ ID NO: 44863 - DNA, 857 bp, Manihot esculenta
  Intron number 4 from transcript cassava4.1_015669m (locus cassava4.1_015669m.g) derived from phytozome v7.0 (chr-ID scaffold05875; pos 1740070 to 1740926)
ttgccaaacacactggtcctggtctactgtcagtgtgcatctccttttgaaccaaatatatgccacgttgcttttagtatggaatgctcatgcattttagttactattagaaactttcatcatgcattgttttcatcttattttgcttttctacatgcatgatatgattagtttctaaactttgaacaagtggtgaccgagtccaatgatcttaaggcatttcctattatttaaaaaaaaaaagacctactcttaagatcagggattttatgggtatgtttttagaggtttattgtagccatcagcctccttggctaaacctagaggattgcaccagacgagtgaatgactgtcataaagcgtgagtctttacacttgaccaatgaatgaatgacatacaccctaaatgcttcatctcatagtgcatggcagtcatttgttcattcggtatggtgctctaggcatagcaaagaaattttctgaacttggtaggataaagaggtgtctatgcacttggaaagagttcatagttgccagcttggaaaatagaaattagaactcaatgattaaatgcattaaacttgtattgtatttaagttgtgtgatggtttgaagttctagggccaaatttgtcagggtattattcaattgttagaagtaccatatctttctttacaaactgtttcattacaagtgaatgctctaatttctctcaataaaacctttttttagcagtagtctaccacctatactgattttatgatgatctttagtttgacactaaggactatccttgaatcacatgtattgagcatgcaactctcttctattgcaggcaaatagcggaccaaacacaa

SEQ ID NO: 44864 - DNA, 530 bp, Manihot esculenta
  Intron number 1 from transcript cassava4.1_009756m (locus cassava4.1_009756m.g) derived from phytozome v7.0 (chr-ID scaffold08691; pos 46692 to 47221 reverse strand)
atcgtcgtcgagttcataaagaacgacgattacaagtatgtacctcttattctgctgtcaatttgttatttttaatttgcttcccctccccccccaaattttgcaacaagtttggcatttaggaagttgaggaatggaaaagaaaacgaatagattcgatttatttccgtcctgtatgaattgcttggtttctgtttgattgcaattgatacatcaattgaagatgagatgttttgtgtctagtaatatggtattattgaaagagaaattgattctattgtttgcttctagttgtatttgttgcgttatttattgcaaaaagtaatgagtctgttttgcttccttacaatgctaatgactagttttggtttccatggtgccttattagctttcacgtccttgtcttcttcgtctgttggattaaatactactgacatcaattttgcaccgttttcatgaatgccattttcatttgatgttctccattgctgttcacctgttctattgatattcattatttgggtgcagat

SEQ ID NO: 44865 - DNA, 773 bp, Manihot esculenta
  Intron number 2 from transcript cassava4.1_010004m (locus cassava4.1_008188m.g) derived from phytozome v7.0 (chr-ID scaffold04953; pos 260709 to 261481)
agttcgccggaatcgctgtctggattttacatcaggttagtgtgccaatcaatatctctttgtttttgtttatggaagcgaatcaaatctcttctgctctgtttattgcattagaaattttagggattaagtaatgaaaagcttgtttatagattttattatccacatccacttaccaatataggaaatgaagggcctttatgtttttaaatcctttgcaggcagcttgaattagtatgaaataatttgtttgttattttgcataaacgtaccttcgattttcttcatgctattgatgccaaggagcggtatcattatgattgtactctagtaataatagagatatttgagatttcaaattctattgcataataatatttttgttgccttgctctttttttattagtccctttctggatggatgattgaaaagaactttttttttgcaatgctttgagcagtcagaaccttcatctcccaggagtcagagatctggagcatctcttgcagtggcagttaatggattgactaatgctgcagggcttgggaccctaggacctgaagatgcttcagcaacttctggaaactttttcgaggctttgacttcttctgaattctataaaagcacgaaggttctacttcatgcattatgataactcaaagctttgttgttcctgatttatttgctattttctgaattctgtggaaacagaaagcttctaactttacagcattcaggttcgagacatctctggatcattccggtgggcacc

SEQ ID NO: 44866 - DNA, 807 bp, Manihot esculenta
  Intron number 1 from transcript cassava4.1_001625m (locus cassava4.1_001625m.g) derived from phytozome v7.0 (chr-ID scaffold06948; pos 844299 to 845105)
ccgtctccttgcgttcacttccatttcctatcaaggtactcacactcacctgatttgcctcggatctctctcttttcatttctatctgtatggtttttgtgcagatctattgtaatttttgttgtgttcctttctcatttcagtgttgaatgtaatttgacatgtatgtactgacaagctaatgagcttttgttgttgagcacaatggaagtgattgatggaagaggataatgttattttagtgatttcgtgcagatctaaaacaattagatttgggctaggtgattcgtcatttgtttacttgtggagttacttttgttttttcttcctacatttctttaaatgctaatcgtatattattttgcttattttcagctttaggttagtgtttttattaggtttgtcttttttttaaaaaaaacttttgttttctttctcctcttttgagttagttgctctaagttgagtcgcgatctggctattaatagttatttgtggcttcaaattgtaacaagggaagacttcaaacatctggataggtttctttcctattttgttagttattaatagttaattcgattaaggcaactgcttcccacaagtaaacttgtgctgacaatgacagtgtaagactcctcaagtcctgtgagctgtgaaactagagtggtgatttcttttcattagtgtcactgtgatgtagttgtaattttattggatatctcaaagttggctgttgctttgtacgatttatctaagttggtttgatctccaggttagattttcaagaattgattgaagaaagtaaaa

SEQ ID NO: 44867 - DNA, 870 bp, Manihot esculenta
  Intron number 1 from transcript cassava4.1_008557m (locus cassava4.1_008557m.g) derived from phytozome v7.0 (chr-ID scaffold12794; pos 2043038 to 2043907 reverse strand)
tagaggactacatttgggtgaggcttgtttcgcaattttctagtcttttggttcgtgagataatgagcactctatttcacttcaatcattactagtatttgtcttgattgattttgtctctctttttctctctttctctataagctgttttcttgtattgagttgaaaatgcagtaaaaaataagggaaaaattcaagttctttttttctatttacaagagctgaagaaacaatactgtatatattttataatagtgtgttatttgccttttcctgcattttcttggaaaccaaacgggcgggacttttgtgtagttgaatttgttttgtatggttttttctttcttttaagtgtttggtagctgtggagaatgtgtgataagacaacgatttaatttgtttcctttgccctgtagctgctcactagctgcttactcgccgggaaatccgatgggggaattgacaagaaaaaaaaagatatttcattttatttttgaaatttactgttttactttctgcaaaactgattacaaaggttgaaaaggatttgggagtaaatattttagtttatatatcctttccttctagaaaaattttggtcaattaattgcacaagaacatattcatactgctgttgcttaatgagagaaatataatttcttaatgtatgtttggaaaagtggcaatgtttactaaaggtttagttgtttgctgcattcacttgttatttgagagaggattggtccatctattttcttgcactactaggaaacagatccttttgatgtgaagtttttgttgttttcttgagagtataattgaataatttgtgtattttcaattagcgattgcttgataaattgcaggcaa

SEQ ID NO: 44868 - DNA, 846 bp, Manihot esculenta
  Intron number 1 from transcript cassava4.1_018801m (locus cassava4.1_018801m.g) derived from phytozome v7.0 (chr-ID scaffold12794; pos 1671370 to 1672215 reverse strand)
cccgtgtgcttatcaggcagaggcatatcaggtgtgcttattatgcaagttggtagtagaaatagaaaatgtcagtatttgtctcgtttcattttatgctttttgaagattttcataacatcctgttgcttcgtgacttgtaataacttagccatcttagttattctgctaatggtgtaaaggtttaaatttccagtgaagttacaaaattttgagctttaggataaataatttctcgcagaatcactggagtagtgcaatatgatgattatcaggtgttgcattgacttgaaaggactgataattaatgttgtgggaaagtaataggaaaagtttcaccaggtttgccaatagcatgggtttgtgaagactaccatgcaatttgttgaagtagaagtattgggatttttgtgttcaaatccctctgattatcaaaagggtgggaaaacagaagattagaaagcagcttgtttgatgatcggttgaaattctaattaagcgtttggcgctgattaagtttctggattgaggcttttggttctttacatgtattgatatgcattctggccctgttagaaattgggaacgtaattttagcaagtgtcatcacttgctgctggttttttcaccatgtttggaagaatcagtattgtagataagattccatgttgttgtgaaatacagtttgtcatcattaacatcattgttgacttttgttcaaaatattttggctccctctttttcttttgtagtaatgatgacacagccatttacataatatgctatatcctctaacttgttgggttggcagggttggaaggcaggtggtgaacattccatctttta

SEQ ID NO: 44869 - DNA, 539 bp, Manihot esculenta
  Intron number 2 from transcript cassava4.1_028024m (locus cassava4.1_028024m.g) derived from phytozome v7.0 (chr-ID scaffold11581; pos 481042 to 481580 reverse strand)
atccagcttgttttgatctcttttgcagggtaagcaaacttcattaattatatgtaaagagggatccaataaatgtttttgggtagttcgaagccttgtgcttttgagaaaaatatatgctttcgattttccattttttgtaaaaaaagaattacgtgaattttcgtcatgagtttcaaattctgggaatagatataaacagaacatttgcttgctgaacttttcttcttttgttgttttttcctccctcttatttccatatataatttttttaatcacggtgaaagagaaccccatgagttcacctaatgatttccgtttgttatttgaatttgtaaataccaagttctatgcatccatatcccatccaggcaaaacaacttatctaaacagggacccacagtgaaaatgcacgggtttttacgcggatccatataaaaagtttctgttttcaaatagtataatttctcctgtctccaacttttctactatttatttaacagaactaacccatgaattttcatttgcagggtaacttt

SEQ ID NO: 44870 - DNA, 823 bp, Manihot esculenta
  Intron number 1 from transcript cassava4.1_014097m (locus cassava4.1_014097m.g) derived from phytozome v7.0 (chr-ID scaffold03604; pos 892313 to 893135 reverse strand)
gaatctttttggttttggttccctgttctgtaacggtaaggttaaaaagaagaagagatgattatgaagtagagttccattcatgatcagatctttttcaagtacagatgtattttagctatcactttgattccatggaatagcatgtgatgatatctataaatcgaaagaaaaattctattgaggaaatgattggatcttgagaaacagaaactactgcaagagttaaaaatgcaaaagtgaagtgaaaactaaagtggagacatataaacaaggtattcttctttcatttgctaccccatgtatgcttttgcttcttctttttatccttctcaattttcttttcttttcttttctttttgtatataaaaatataaaatgttgttcaatttgaccatatggggtcctctggttttggtctttttgttgtatatcttgattggagacaaacagttgctacaatgaagtggtttcaaaattataaaaatcccatctttaactttgctcttcttaaagaaatatatataaagttttatatgtttctgttggttctggcttatctttcacagccaactcttggatctgcagttgctcattagatggaatctcttactctttttatttttataaacaactaattaatcttaatttcatgttattaaaatatgaattatgctttaatctcgcattccttattccttcctaataattgtttaagttaatgttgatgccatctaactaaaacatcaatggaagaaggttacctgctctaatttttttctttttggcagtggccactctatcagcttatactcctgattaa

SEQ ID NO: 44871 - DNA, 669 bp, Manihot esculenta
  Intron number 1 from transcript cassava4.1_021183m (locus cassava4.1_021183m.g) derived from phytozome v7.0 (chr-ID scaffold12455; pos 310411 to 311079)
actgtgagcagctcagaaaggctttttcaggtttctctattctctttctttactatctccttgtttcgatcgtcccctgtttttgcggctcagtttttgttgtgaagaaatcatccctttttactgatctgacttttgttttagtgtttcgttctcttagatctgatgatgatcgtttgtttgaatcatgttgatctccgttttctttagagatcgatcttcgttgatagtgttagaatcgtatgatccgtactttttggaatgttaggcttgtgttctgcgtgattgattttattggagatgaaggtgttttgttgcggaatttgagttcttgggtttaaatcaagcactgttcgtaagcaaacatagcttaccttcaattgtgaaaatcacagcctttcaaaaaaacctgtatcacgaatcagaaatgtttggttttgtatggatgagaatttcttgggaaatcgaaagaagaaaaccttcttgaacaatgaaatcagagtttggatgatgttgcataaataacaaaacattaatgtgatcagcagttcaacactccatatatcatagcagagcattggcgttcacggatttgcatatatcattgcctgtgtttgtggatattttaattttttgaaaaataattttgagtaataatattattgcagg

SEQ ID NO: 44872 - DNA, 678 bp, Manihot esculenta
  Intron number 1 from transcript cassava4.1_009937m (locus cassava4.1_009937m.g) derived from phytozome v7.0 (chr-ID scaffold00435; pos 147867 to 148544 reverse strand)
gttactgtaggcgatattgcccaggtgagtttttggaaatttatggttggaatatttttattgctatattttaaatatttatataaacattctttttttttgcttttttacggtatgtagtttatttttgtttttaaagatgggagtcctgtctagttgggtccaagtggaccacagtgggtaaggcatctggctcgaacttcagggctccaccactttggctttttgtgccaaatgatggtgtctgaccaatcaatggtttctgtgcttgaaataaaaaaggattaaaataaactaaaaataaaatgaattaaaactataaatcttctttttttttttgaattttaatgtattttctgaatcttaaattaattttatctatttataggaaagtcaaattcaaatttagctagcgaattctgacaataataatgtagcggtttatcattctgaagaaaataggaataatatatagaagtattcaagtaaataataatacagcaatttatttggaaatagtttaatagtaaatttaaattgaaaaaataaaatttgatatttttaattttcactgtacatttaacttttttttatataaataatattatttaattataataaattaattttatggctattgaagataaaattaattaaaaaattgacaggtgtggagca

SEQ ID NO: 44873 - DNA, 427 bp, Manihot esculenta
  Intron number 2 from transcript cassava4.1_022944m (locus cassava4.1_022944m.g) derived from phytozome v7.0 (chr-ID scaffold08359; pos 2198054 to 2198480)
ccaaatagtttgttttggatagaaagtcctgagtagtaattacctttttttttttggtacaattgatcgactgaaatttgaacttaaaatcttccaataatgaagacactctagtgtcaatgaattaaaacccattgatattagcttcattccttttgctcctcatttctcttaccgtttcttgagctaaattgtccctagcaaagaatttaaacgagaagttatcaacaaatttgagcaaataatttcaagcaccgttgttcttaactaattaatcaaatgtatcatatatatgtagttcagggttcacacttctttctctcattcaaagctgtgcgagattttatcctatatcagaatatgctcattttatttcggttggtatgataaagaacaagttcaaatttgtgtgggttcatttattcaa

SEQ ID NO: 44874 - DNA, 661 bp, Manihot esculenta
  Intron number 2 from transcript cassava4.1_014574m (locus cassava4.1_014574m.g) derived from phytozome v7.0 (chr-ID scaffold04707; pos 39466 to 40126 reverse strand)
gctccttggaagtgtggattttaattctgttggaggtaatctcttcacctgtagacttcccattgttgcttcagaattggaggaaaagaatgaaacatttgtttaatttgcttagatattttgcatcttgtgattgattgcaaacaagagctcactttggggtgagtgtgttaaatctcttaacatattgcattcgtggaaatgtggattttctgtgatctttttcctggcaatttgtgttcatgatggctcataacaagcctctcttggatttacaaagtctctgcttcttactctttggagaggaaaattcatgtcatgcttatgaatgattacctccaacagagttttgccaatgaatgatttctttttccataatttatatgaattatatctgtttatagaatgttctttcaacttcaagttatggaatttgaggtaattttatcgtcttcctctttccatatgcatttcatccattgaattttgcattttcattcaaattaagcaatattccatgttttatctttctggaatttttcaagtgtacttgtatcaatagcacagatcaaatttaatctctgttttttgtttttttttaattgttttttactataactatatagaaactctagatccagaagttaagatcctgagtctg

SEQ ID NO: 44875 - DNA, 617 bp, Manihot esculenta
  Intron number 3 from transcript cassava4.1_026897m (locus cassava4.1_026897m.g) derived from phytozome v7.0 (chr-ID scaffold05831; pos 62022 to 62638)
ctcgcttgctgtcaggtatcatattgtagccattgcttaataaatggtgtaatgctgttgatatagagatgcagctcgctatcatgcatgcgatttcatgtttgatacatttattagcatcttatacattaccattttttgaattcttttcagctaatatttttgctttcttgctttcattcccttatcataaaaatccctttgtggattgcaacacatgggtttatgaatttaaaatcccacagtttttttgtggaataaacattattttcttgggtatttataagcactttctctgcctttctcatcattatttgtttgcatatttttcccttgaaatgtttagatttttatcatcattatgcggaaaagtttaatgaatgctgatgactgtacatgtctgaactgcgagatatttatggctggaaaggagggggccctacttaggttctgctacttaggttctgctacttgaaaaggattgcacaatgtttcccctccccctccccccacccccacttttctttttttatccatcatcttgagatgaaatgctgttctcattttcatttatttctgtagcttctggtcaaaattgctggaggtgggtatttgtc

SEQ ID NO: 44876 - DNA, 747 bp, Manihot esculenta
  Intron number 1 from transcript cassava4.1_014120m (locus cassava4.1_014120m.g) derived from phytozome v7.0 (chr-ID scaffold12794; pos 1751377 to 1752123 reverse strand)
agaagctccaggaggttcaggacgatctcgaaaaggtatattgtatgtgtatccgtggatttatttgtacaagtatttaggtttggtggttttatgctccttgttgctctttcggtttcgtgtgagcgaaagcagaattcagacgaaatttgaaccaggggcttttgggcggatgtttatttgcattgggactagaagtcctatcggtgttttgtcaagtgttggaataattcaactgttggttattgttgcgggtttatgaaattagaccttgccttttggttaattttattctaatcattttgggatggttttgtctgttcgctttttaagctgaactccacttggaactcaaacgcctggatatgcttactcgtgatagtcaaatgaatctactttagtagctattcattagatactcttggaccttattccagtagttttacgcctaaggggtgggctattgtttattagtatcattttgcatcccttgatttttaatacaagttaatagtgttctcagtgtatattttttctcatatacttatgggtttttcctatccaattcttttctttgcttttcatttcatttcactcattttaagctttttatcacatccactgtgtagctttctatcactgacagcaatagatgtagttgtgttcttgaagacttggttgtgtgtgtgtgaagaatataattgctcacaaattctagatgtgttgtttccttatgtttccagatca

SEQ ID NO: 44877 - DNA, 816 bp, Manihot esculenta
  Intron number 2 from transcript cassava4.1_009045m (locus cassava4.1_009045m.g) derived from phytozome v7.0 (chr-ID scaffold00097; pos 132906 to 133721)
cttttcatccaggtattttttaaaattttgcatcagggttttgttttccttttactttgagcttgtaacgcattgcaaccgacgtcatcatgggtataggatcagtctctgtttattacattatgtgatcctgattattagactgctttatttactgatgattaatgttgaaggaacagcctcccatatgtgtgtgtgtgtgtatgtatatacttatctatgtatgtatatatatttttgtgtccagttgagattcagaatgttagtatgtcaagaactcaagatttaatggagctgcataaataaaacatctacacttgcatgattagctaaatcccaactgattgttgccacaaatttaaataatgagaaactaatagctgacctttatcgttcttaatgatattgcataatagaaactacctgcagcatttgctattacaagtgcaattttcctccttttttctttatggtcttagactttcaaggaaatgagttttggttgatctttaaatgtttcagctctttaagactggtattacttgaagtcagattaacagatatggcttttctaactattggttcaccaaattaggttcagttaggttgcttgccctatcaaccctgaatctagggagcgagaaatatattcatgcaagcatcatgtacttccttatgaattgtggttggagattttttctttgcatgctgtgatttcttgttaaacttttagtgctattcttttttaattttatttatcttgttctactccccccttcaggctcgacataaaaaggttggggagaaaccttttct

SEQ ID NO: 44878 - DNA, 723 bp, Manihot esculenta
  Intron number 1 from transcript cassava4.1_030424m (locus cassava4.1_030424m.g) derived from phytozome v7.0 (chr-ID scaffold10504; pos 37281 to 38003)
aagtggttaaggagtctacaaacttcttgagtcaggtagtaaggtttttctttgtagacattagctattggcaccatcatctgtatctcaatattcgttgaaatacattttggttttccttttctggattgtgtcctctgtgtagcattttattttattttattactgcaattatggaagggatggtgtttgctgttactaattctactctttgtttccttctgatattattcatgttattaccagatgtttttgttgattacatcgttgcttctaaactggcaactaactaatttaccttaagtcatcatattgttcaatttttaattttttgttgtatgcagtaaagatggcactatttgattacctgtgattagaaataacatgtccctagtaagcatccatttttcatttcagttgatactccatagtccttttcgactctttgaaagtttctttagaatccgattgctggaaatgctttgcgaaaaaagtctagttattgtttgcagaattgttataaggagggactgtaagggatcgagaatgttgaggagaagagaatggatctctaggctgctagcagatgggacgcagttagctgtgattaaccattcattgtgccatatgaaatgtgttatctatgggaaacatgttgatcataagccttttattgtttattattcttttgtttctcatttaagcaggcaacgtcagatcact

SEQ ID NO: 44879 - DNA, 519 bp, Manihot esculenta
  Intron number 2 from transcript cassava4.1_001973m (locus cassava4.1_001973m.g) derived from phytozome v7.0 (chr-ID scaffold06573; pos 11014 to 11532)
gacctgctgctatagtggctaccgagaaaaagtaattagtctccattttgtttctttattttttttggttggggggtataacttttatattggtatgaaaagtagaagattgttttatatccaagtaattaaatcttgtttttgacgttttgttattgttatgaaattgttatgacttttggttgcagtatggttataacagtgttggattcttagttagcatatctcgttgcacttgattagttgaaataatttcattcttcaattatggatttgttaaccaagcatgtcaaatgcaaatttcattacggattagacaaagtttgtgcagctagtgaatgataatcatttatggttactactggaactttctttcttatctagtttaagactacatatggtcaacatagtttgatgaaattgaagattatagtggttatgttatatatatgccaataagctacccttttcatggcttgatcagggtttctgatacgcagtcccatcaaattgctgcta

SEQ ID NO: 44880 - DNA, 685 bp, Manihot esculenta
  Intron number 1 from transcript cassava4.1_016461m (locus cassava4.1_014681m.g) derived from phytozome v7.0 (chr-ID scaffold05019; pos 180191 to 180875)
cttctactcctctgcatcgtgcccttcatccgtacgtcaacaattcagatctcgtatttatcctaatttctttttctttatcatggaatcggccgctaggctatatagttttttcatatttttgttttgggggaatatattggtgttgaatttgatgatcgtggattcaattattggttgtctttgtgaaattgttaaattaaattactttcttatatggttttggtagaggtgatgaatgatagatggggtgaatctctgttgttttttggatgatgttttcttgtatttgaagagaattgaatgtctttcagttttttacctcttaacaatttgctcggttgtttttgcttgatggtttcttgtgtttgtaccctttatagcattgattatctattaggttttcgttaacagtttatgactatgataaaattggagattaaagttacttgtttctgctatccagatatctggtaacattagattaaacctgcagcttttgtcttttaaattttttgtttcctttctctttgatttaagtgtgtgcaatgactatcttccatttttcagaaattctaagacattatttctaaattaaatttgctgaaatttttgtgctttatcttaacaatgaacttgaaaaattgcagtgttgtggcccttgcacgtttatcaccagaagcac

SEQ ID NO: 44881 - DNA, 543 bp, Manihot esculenta
  Intron number 2 from transcript cassava4.1_033760m (locus cassava4.1_033760m.g) derived from phytozome v7.0 (chr-ID scaffold11279; pos 272453 to 272995)
ctcaatctggaaaattttcaggcacaggcgctaaggtaaaaattttttgcacaagcttgatacaaaatcacagaagatcattccatcactcctagaggaaacacaaggaaaagctacaaagattaacacactaaaacctatctgcaagttaacaactttgatctctgcaagcaactgcttgctatattcaataaggaatcgtttggttggttccttaattaagatttgcttattcccatttgcacacaacaaaatcgacccaatctttcctttggtctttcaagcttataagcttcatcattcccctgcatcacttttcctcaatcctcagtctgtcaattattacaactgattttgtcattttatacccttttttagcaaattttattacccattatcaagcaaaaaccacgcatacagaaacagagtatggacagttcaacatgtaatcaatcacgattataatatacaaaacaaaaataaagctatcaacgagaatactaacgccatactactaaacaaccttgcagaaggcaagcaagt

SEQ ID NO: 44882 - DNA, 630 bp, Manihot esculenta
  Intron number 1 from transcript cassava4.1_018503m (locus cassava4.1_018503m.g) derived from phytozome v7.0 (chr-ID scaffold05280; pos 64384 to 65013 reverse strand)
tgtagagcgagagtctctgttcacctcctgtgacggtgagtgcttctctccttctcttccgacataaacctcgtatttgatttcagttcagaaacaagattagtatgttatctttgctaggaatttcaatttgtggttaagggcttcgataattcttttatttacgtccatgtttggtttctgggaaactggaagaatctggaatccgtttgccttattgggttttggaacagcaaacggaaaatccagtttttgtaccaaagttcttaacttgtggatttagtctcattcaacttgcctttcgaggatttgagcttttagttcactaactgctacacttgaaagtattggttgctttcttttctgctttcttttctcttgttattaattaagaaaattactatttagtgtaggagaactcggtagttgaaaaataatgttttgaaaataattttagctattaatagctaatatgaaaggactaactagtagatgagagactgactaataagtctcttaattacgttaacttggatattccattgctggccctttttttttcttgttctttctttctccttgcatatttttgggtattcatttgtgttggggttgaactctgcagtactc

SEQ ID NO: 44883 - DNA, 805 bp, Manihot esculenta
  Intron number 1 from transcript cassava4.1_003765m (locus cassava4.1_003765m.g) derived from phytozome v7.0 (chr-ID scaffold03834; pos 125794 to 126598)
agcagcgaagctactcaagtggaacacttccttttgcagactcaattttttttttttttctagttggagtgttggatcttttagccagactgcttgatgcgattggtaattttttttttcttaattttgttttcccccctttcttttttcaatttgaattaggcttgcttttcaaaatgttattttctgattatatttcaacttcactaaaactctctctttttatttttttgttagtttaaattagtgtgttgaattatggtctcttttttcttttttgatgctctgaggttttgggatgggatcggatttggatccagtgtgagcttaagtttgctgtttaaagttgacgtttttcttaagaaaaattgggcccctttttatttggtaaacaaagatttaactgaggattaacgaagttaccaaatgcgtatcttatctgttctttgtaggagtacttgcagatttattctattcataatagctaggattttagcattgattttactctttggttcttagatcttgtatgtaaagaggataaaaatgagatgccttctaattttttggtttatgtgtaattttatgtttggtgaatcgtttgccttctctttgtatagatcttttagagattgcactatacacgacatagcgtgtgtggttggaagaaatatttcttgtttaagaatgacatcttagcttttatatgcatttatatatccgtggatctagtagccttgggtttggttttttgtttcttagtgagttgatactgaatccatctgctaatggtttcaggggtaca

SEQ ID NO: 44884 - DNA, 982 bp, Manihot esculenta
  Intron number 1 from transcript cassava4.1_013102m (locus cassava4.1_013102m.g) derived from phytozome v7.0 (chr-ID scaffold03581; pos 1367508 to 1368489)
ctctctcgtcctagatctctttcgattgtggttctgtaagtattgtggctgaattaatacgtccttatcgattttttttgctttcttttttataggattgcatacgatgggaggttctgattattgtttgatgatgacaattgtttgctttgatgaatcacgtttctaattatgatgtgattaagagttttttagatcctccaggtgttctatactgactgattgatcttttattatgtggccgcagcaggcatgttgttgttttacttgataattaattaggttttttttttttctgtatgaatttatgatcttattttgttaatattgagtttctggtgaccgttagaaatcaatgatattgatcgaaattgctgttgaaataagccagaggagaggtatgctgctgttttttggatggtattgaaagaaaatattcattctcaataacctgagggtggtcatcagtgtttaaccaaaactaccaatgaaaaagccagctatattttttatatggaaaaagatgatcttacgtttttttttttgaaaaaaattgcctttttctgactgacacttgtcgaattctcgtttttgaaattgaatagggaatattattagaaaatgccaagtgaaggagcaggggcaactttgttccatctctttatgtcgttggcagcttgcttcgtgtttggagccaaatgaaaatgtgatttcatttcatttgtgaaatttcacaattttttacttccataggtttatatttgaaacgaatgaagatttggatttatttttaagtaatgtaaaattcaaattctcatgatttcatgtgtgcgcttatttcctctggttgccacaggaagttgtgatatggtgaaagagaattatcttttaattttgtttatttgtacactgattaaagaattcattatttctcaatattttgagtttggatgtgcattcaggaagatagaagccttggagg

SEQ ID NO: 44885 - DNA, 649 bp, Manihot esculenta
  Intron number 2 from transcript cassava4.1_009558m (locus cassava4.1_009558m.g) derived from phytozome v7.0 (chr-ID scaffold03300; pos 8934 to 9582)
agggacctcaacgccctctacgacgcataatccaggtaattaattaattaattaattcaaactccacttaatctaaaaattaaattttattgttttatgttaaaaattgacactcaatttagagaattaattaaaaaaggattttttttttcgataataagaaatagatagagaagaatgaaaatttcaaggaaatgcataacattgcagacaatgatggagaaaattctgatactttagcaaacaaactttaattgaacagaacactacatcccaacataattcatcactgagctgagaatgtcacgttactttgtttttgacgtcatctatgatcacatgtttaaagttgtaatgcccattggggatgacagtgctctgcttgtttgctttaacttttctttctttctttttattttttattttttcttcttttgcacttttgtctgatttatcgcattactgatcccagcttttgttttttcctcctcactttttctttatcttgtttttgtatatttttaaaattactatttgatcagacgtctttttttaaaatttttattttgtactatttaaaaaatgataacgatgatgatttgatcataatgcagggtctagatccaaagagcacagccaacctatttgc

SEQ ID NO: 44886 - DNA, 850 bp, Manihot esculenta
  Intron number 1 from transcript cassava4.1_008453m (locus cassava4.1_008453m.g) derived from phytozome v7.0 (chr-ID scaffold10305; pos 318090 to 318939 reverse strand)
ctctgcgaaagtcttcttcgaggaacgtttcggtatctcttactgttcctctcgctctctgcatttatccgtatttgattgcatatgtagacgtaatttgaacactgtcaatggattcactgttctcagtttgagaatgtagattgcggttaacattatggagtttgtctcgtgattatagctgaattttgttatgatatgtcaatgataggttttttggtgcgcttaattttcctatctgtggatctggtagcattatacagctgcttcttctaacagcgtaatttaagctagagatgtgatcattttcgatagatctgtttttagtctgatcatgaagtttcgtgctgcatgttttctggatgattgttttaagataattggttgttgttgtttggtttaaggcttgcatgtgataatcgattgagaaattgtatggttacatgaacgatttctggattgaataagcatttttttggatctgtatgtataaatgttggataattgaaaactatgcctttatcgtgtttgatcgatgattgaatgttgggtttaaaatgtcggaaaacttacattcacacttgaattttcaaaatttggaattgagaaaatgtgtgcgattgtaaaaaaaattctgacaatcagcattttcataactcggcatggtcaaggttagattttaaacttctggaagcaaaggaagcatggatttgattgtaattgcatataaattgtgctgtttattattcacttttcatgatttttactcggtgttggtgtagtatttgcaattttacttgttatgcaagagattcaattgatatattttatttgcttcatgaacgtctag

SEQ ID NO: 44887 - DNA, 599 bp, Manihot esculenta
  Intron number 2 from transcript cassava4.1_012217m (locus cassava4.1_012217m.g) derived from phytozome v7.0 (chr-ID scaffold12794; pos 1300212 to 1300810)
gccgttctagcctttttgatattaccactgatacggtattgatcgcttatacttcttttcatttttcttaaaatctgatctcctgtctgtttatcttcttttatgaccctttattcgtttttttttttttttttttttgtgaacagttgtttgttgatttattaaatgtgaggaaattgattgaaaactggtgatagtttgatatggatcggcttacttgattatttgttcttattcagctgtaaacaattataacttctaaaaggtttcaaagttggattgttgatatcgtttatggattaagattgagatttttcatgttttaggatcctctttctcggttgttgaaataaataggaaagccaacatcacagagttctgatttcttggcagtgaaatttttttgacttggtcatgccaaaaatcatatcaagattagttgtatgcttacggcactatctacttttctgtattttaaacgatgaatactggatttcgcagctactaaaatattttgtttgtattctgttatttctattcatgaaagttgttgagcatttggcgttgaccttgttcttaatcaggtctcggcatttcca

SEQ ID NO: 44888 - DNA, 622 bp, Manihot esculenta
  Intron number 1 from transcript cassava4.1_003189m (locus cassava4.1_003189m.g) derived from phytozome v7.0 (chr-ID scaffold07402; pos 257043 to 257664 reverse strand)
aggacgagggaagcacggctccgcttcctgagaaggtgactttcctttttttaattaattcttaatttttaaaattttcctgtgtggattatgagaaaaaaaaaagcatagtgaagatatggaagaagacaacggttttcgttttctgctgctttttggaatacttttaattgcatattagtaatatgttgggctgatacgaaggagcgaatggtaatgagattattattattattgttaatttgttctcttacgtgctgtttctgaaacccaagcacttgtggttatggctttaaagttgttctttttttggggataaatttttgtgaattctgattttgttgggcttcatttgcattttcaaactaaagcttgcttgatttgatatcgaaatgtatttgaaggaaaagaaaagaaatcttatttgatttattgtatcactgcatttggctgttaatctttagcttaaattggcttattttttttcttacttagatgacttgtaaaattggactgtgaatgactctggtagtattagtacttagcaaggtaatgcatcttaaatgttttttggttatatgcaacaggtccaggttggaggatccccagtctacagaataga

SEQ ID NO: 44889 - DNA, 990 bp, Manihot esculenta
  Intron number 2 from transcript cassava4.1_001419m (locus cassava4.1_001419m.g) derived from phytozome v7.0 (chr-ID scaffold03604; pos 152889 to 153878 reverse strand)
gtttgttagatttggggtcctttacactttggtgggagatgcagtgatcctcaatcttattcttacagtgaaggagttctataataggtttgcatttctttagttactctaccttgcattattttgggcttccatgacctatctttccactttaaagcatgatcaatgatttctttgcgtcatgttctgaatgaaattcttgtaaaatataaaaataaaaaatatgattgggttaaggccaactcatgtttgtacattgtttgtgcagttctgtgctgtatttatacatcagtgaggtctttgtccaggtttgttgcccctttgttccttttcttccttaaggttgatttttattttatttttacatgcttgcaattgttacagttggttaatcctgggatttaggctgttaattagctcccttcagttgaaccagtgtagtttgtgaggtgtgtgtgtgtgttttgtttcatatattagccacagattaggcctgatgcatgacttaagctccattatcaaagcatgctatatggtatgccatgcctatcagtgtgggttttaatatttcaaaaaaattaatcctcttaagaaatagcgattgttggttgttttccggttaaacggttatagcgcagttctgctagaaagtaggatcatgttgaatgctaactgtgaaacgtgttgagcctctaaagctgacatttctattcctccaataaaattgggctattattattatgatgatctatggcagattgatgctacttaattaatggcataacatgattagtgttgccaagggcattctgcaatttatttaattctggtggacaaagatgactagatattgcctctaaacaggtagtgagatagaagattgtttattgttgaatgggatctatttactataatcatggaatttagtcctgatctaattgttatcttgatttaggttttatttggaatacttttgcttgtgtacgttcc

SEQ ID NO: 44890 - DNA, 483 bp, Manihot esculenta
  Intron number 1 from transcript cassava4.1_001419m (locus cassava4.1_001419m.g) derived from phytozome v7.0 (chr-ID scaffold03604; pos 153936 to 154418 reverse strand)
aggtgcgtgtttgtttgtttgttttttagttcactatttggtaccttctgttttccttctgctttgcgtttctttattaacagaattaatgacattctaaatttctctcctatttgtcagacattaatgtttaattctgacttcttgtgtgccatttcaatgccttagtttatgcctgaaagagaattagatgattagatgcatgtgctacaactcttcagtatgcattctcttacataggaaatcccagattgtttaaatttacggttggataaattatgcatgtttttttggattagttacgggtatatcagttcatatttttcttttgagcaggctaatttgctatccctttttgtccttctcattcaaactcaataatcatggtatttacccttgcggtctaggttttacatgcactatgaacctaatgacgttttcttggcagattgtttccttgactattgaggctcttgcttggtg

SEQ ID NO: 44891 - DNA, 716 bp, Manihot esculenta
  Intron number 2 from transcript cassava4.1_014949m (locus cassava4.1_014949m.g) derived from phytozome v7.0 (chr-ID scaffold03175; pos 353092 to 353807 reverse strand)
aagaattaaagacaagagaatcacagtaagttctgagattagagtattaaataccatataggactatgctatatatggttatggcattgaagtggtagtgcgttttataatttatggtgcactatgaacatgcgcaaaagatagtagtgttatatcacattcttgataagcccaacaaatcactcagaaatggaccccctgaaagtgacccctataaagtttatccaggtagtgtccatgaaacacctgtccttagttaataatggcagtagagaaacttatttattctcttaggaaatttttggtatgggtttggttaaaaatatggaatttctgataaattaaaaatgtcctttgaagattgataaatgttgcagactagcaggtgcttaaatttccaattctggagtccttttggtggttcacgttgccatttttttcatataatttgactggagattctcttgggtaatgaacggttctgaccaatttggacaattccaattcctaaccaaagaaagtgcagcagcataaattccaaagaaaactgggctttgaattctttgtataattaccaccaggaatttagcagaactttcaatttatgcttaagaaatttcagttcatatactgaagcatccaccgttcaatcaatcatctgaaagattctttcttttgcaggtgttgtgtttgcttgggggaatttgagatcaaag

SEQ ID NO: 44892 - DNA, 981 bp, Manihot esculenta
  Intron number 1 from transcript cassava4.1_004606m (locus cassava4.1_004606m.g) derived from phytozome v7.0 (chr-ID scaffold05875; pos 1460414 to 1461394)
gctgcacatgtaagtctattatttgcatgttgtggtgtagaaatagtccttttttctttagagttgtgttgaatattaattttagtgggaaatataaatttagaacagttgaaccaaaatgttctcaactatatctacttgagatttgtgaataaaaatgtgatctggcatggcctaaatgcttgtgtacaattttgtaattggagctttcttaagcaactgtgtttccattttaagagttttattctgcattctcaatttagaaaaatcaagttctggtggccagaaattttcttttctcttatatacagaaaacctctttttaatatttatattttgccccttcctatgagcaagttagatgtaatgaagatgggtactgcagttataaatcttcgtttctatagataatggaaaactgagtagagttgggacctttcttttgactgtgctaaagatttctcaatcaacatgttgtaaatttctgaagggggggaaaattgttatttgcttcctacatctatgaaaaagttgtactcaaaatttaaactagaggcgtttccccctgtttttttttgttaagaaatatataaatgaatatttgaaaaaaaaaaagaggagaaaatgctgatacttatgcagttccttggaatatgaagatttctattcctcttgggaaatagattctgatctttctgttttaggactttggcccatgctatttttcccctagatttttcagcataaatgcatgtttgcaaaccatcaaaggatattacatattatagtttgatgcgtaaatacgttacaattatctttcaaatgaaaatttttacaattttctatctagttgtgtacagcttctttgcaaccattctccatttcgagtttcaaagtttttgttctcaaagatatatcacatttcaactagttataattttggtctcttttacttctaccagttgcctggtcgtacagaca

SEQ ID NO: 44893 - DNA, 542 bp, Manihot esculenta
  Intron number 1 from transcript cassava4.1_014205m (locus cassava4.1_014205m.g) derived from phytozome v7.0 (chr-ID scaffold03115; pos 55912 to 56453 reverse strand)
aatttgagacttgagtaattgataatctttggtacgttttatgttatttgagctgttcatttttattttgcgaccacaatattgggatacaaggattcaggtcaggaataatttcctttgttgcaatagggtaatgcgtttgagtatgggtaggcgaattgaaaagaatgttcctaaattagtatggtgctgcgacgctcttctatcatctatctacgaactgatagcttctgtcttgggaatcatgaaataggtatcaaggcaaactagaatgttgaatcatccgtattgaaatttgaaaaatgatatattgtgatgtttgcgatatatgttttggaaacttaaaagttcgtgtttcctggagcagtggactagaatggttttattcgttgaattgtatcgttagactctgccatcggatgttttttaaaaattattattattatatttttaaccacctgctttccccctcaatggtatggattattcttaggctttttcttgtattgacccatctttggccatccttgcagggagctctt

SEQ ID NO: 44894 - DNA, 319 bp, Manihot esculenta
  Intron number 2 from transcript cassava4.1_008229m (locus cassava4.1_008229m.g) derived from phytozome v7.0 (chr-ID scaffold10365; pos 144539 to 144857)
ggcttgcctttcttggagagagagtataggcgctggtaatagaccattctcattctcattctcttcctctccatttccttctattcccttcaaaaagctttctatgcactcgtttgctactactctttttacaggcatatcttcttttctttttgttttcatcacactggaatcttgcttttctttgttttccttttgaatacttgagcgttaaagtaaacaccccagtaagcattgattcccttaattcaaaataaggaacaagttgacaaaaaacaaaacttaaatccctcactttttttttaatgcagaacaacta

SEQ ID NO: 44895 - DNA, 840 bp, Manihot esculenta
  Intron number 1 from transcript cassava4.1_009399m (locus cassava4.1_009399m.g) derived from phytozome v7.0 (chr-ID scaffold05280; pos 568261 to 569100 reverse strand)
gcattgtttggtaatctttccttttctttttaatcttcaatagtttttgttttctggttttgatgtgtttggcttaaatggtaagtgggtttttgaaaatctacggaaaaaaaaaggggcttttgtttatttattatctttgatccgtataatttaataaaacatgatttgatagaatgaaattgtgcttgtcgcaaaagttgggaactgcaagcgttatgccctcagaacttcaataaatttgcctaatggttagtatcaattatgtctggtactatctatatatctttctcagctgttactgttattttaatcgaccttcctttgttaaccatgttgtctgatttcttgaatagtataacgaatattctatcagcaggatttatacattttatctaggatagggaggcattaacggccaaaaagaatttttgatgcatatagggtgtggaaaaagaatgtagccagtgtctatggtttgtttctggataagacaaattgataacttgcatattcatgttgcatttgccaaatatatttgttcttattgatcgttctcattaagttatgctgataactacaaatattttatatacgaacattttctctctgtagaaattcggtaaatatagctttgactaccttttcccgcttattatttacattgaaaggattgataattttgaggaattgcctaaatctgctcttttcccattagaattcaatgaaaaacgtatcgttgcccatttgttagaccaaaactgtgtggtgaatgagtggtaatgcataaatgctttcttttcagtgctgctgtgaattcagagacacgtgaggaagttg

SEQ ID NO: 44896 - DNA, 485 bp, Manihot esculenta
  Intron number 1 from transcript cassava4.1_011396m (locus cassava4.1_011394m.g) derived from phytozome v7.0 (chr-ID scaffold12794; pos 682598 to 683082)
tagtcaggtcagtgcagatttagggttttttctttatttaaatttgcaattaggttaggttatcctttggtttctgagaaaaattgacggaaaggaaaagagtatgaaacttgaagcttttatgtttgtatataagagaatatctgcttaaaaggaatttaatggtgttttatggcataaaatggaaatctgtttctggaaaaaaagaaaagctcggcctaattcggtggatacagaaaggtaaattttgcgattagctttttgttgcaactcaacttaggctattgagctgtccttttgaagaatttatgtgagcagaattcttcggaatttatatatattttttggcggtgaaattggttttataatttatctcgtttgtttttatttttagtcaaaatactttttttccccttcttgctgattgatttttatttatttttgtaatatactaacttttatttgaattaggtgttgttcagtaa

SEQ ID NO: 44897 - DNA, 972 bp, Manihot esculenta
  Intron number 3 from transcript cassava4.1_019518m (locus cassava4.1_019518m.g) derived from phytozome v7.0 (chr-ID scaffold05875; pos 901163 to 902134)
aagtgctaccagtgaggagtgcactgttgcctggggtatgatctcgcatctttacaaccctaacctaactctttaaattttgggggattcctcttaatgttgcttctgaaattatgtttttgagtcatgactttgattttgcttggttattgaatagcttgacactgggtggtggtcttgatctttgagtcataattaatcaaatcagagttctttgtaattcaggttgcaatctcaaagtaagaagaagtttattgtaaatgagaggatagctattttttgttttgtgagtggtgtttaacttcattacatgctgatgcttagaaagatccaaatggattagtattttggcatgaatttttatgagcctgatggaggtcccttttttcagttttcttagatgttgatttggaggaaaactttagaccttgattttctgtttcacctggaaaatttactcatagagcacagaacgtatgaactagcaaacatccttttatattcattgagtatgcctaagaatgacaagggaacatggagattcttcactggtgaattcttgttgtcaaacacgaggtagaaatggtagagtcgggctgttatcagctttgatgtgattaagtcgttaagaataccattcttggtattcaggttctggagttttatgattttactgtcatcagggggtttgtaatcattgccgggctgcttgtacataaactgatcactgcaatgttttctcattgtcacctctagctctgttactggtataaaggccccaaatttgatgtaggactctctctttgtttggttagtttatgatccagtgattgtttgaagcttgatcaacttttgtacatgtataacgttcacaaaatacttcatcgtatagggttagttatttcatttgttttgtccatcttattacatgatgaagaaaccttggtttttgctcaccaggggtgtgcaatc

SEQ ID NO: 44898 - DNA, 735 bp, Manihot esculenta
  Intron number 1 from transcript cassava4.1_002958m (locus cassava4.1_002958m.g) derived from phytozome v7.0 (chr-ID scaffold10963; pos 343371 to 344105 reverse strand)
gccaacttcaagactgtccctcagagaaaggtgagctctctcttttcaatttacgagaacttcaatttcatcatttctgtttcttatccgttgattttgattgcaagtttgtttcttcgttttccattactaatctggttgagttaaagcttttcactttcggtagttggaaattaattttgctcagcttagtgtttgtcgttaattatagtctttacgcgttgtttgggttgatccactttcgcttaactaggccatatttgtctttccccacgagtttattatattttccgcatgatgttagattttaccatatcgtgatatcggtttgttggtgttatgatctgttgtttctgtctaaatggcatcagtcaatcaaggaaaagaataatatgaagaaatctgtacatttatattataggccaatgcttcaatcgaatctatgcatgtgttagcagatgtgtttcaaacactgttaagaagatttcagtctatatgaagtcttcaaaatattaaggatgcaaccttaatctatatggagaattgtgtggtgttgtacaattgggaatacttctctggattgtaagcaatatgataatgaaacatgaatgcttcttgtttggttgtacatttgatgtgttgctgttctgagcgcgagtctgcagtctgctttatgatttttgccaatatatcagctaacccagtctataattgcattgcagaataatctacaag

SEQ ID NO: 44899 - DNA, 898 bp, Manihot esculenta
  Intron number 1 from transcript cassava4.1_012828m (locus cassava4.1_012828m.g) derived from phytozome v7.0 (chr-ID scaffold12355; pos 25306 to 26203)
tcgccctctccagtggccagatcttctttaacaaggtcaaacttcatttttttttcttggattgtgttattagaattccactcttcgaaaatttcgggactcagaaatgttttgtgtttttgttttttcttccagtgctttacagattcgtcatactccttttgctttctgtgctttattctagtttattcctaaatatcctattatttggtttaaatatgcatgcattgatttgtatttttaggacatttcatctgcatttaacagtaaaactcaaacatttgtaacatgaatatctaagttgaagattgagggtcaccatctgtgtttgaaacagtttaggggtctgattttggagatggttcagactattaggttatctcaatgatcttttaggaattcagtcagcattgaaaatttctgggtttggtttttggaatccaataaggaagagcaaggagggtaaagatgataaagtgaattctcagttcacagtctcagaaaatgtcaaactatataccatagaagaacttatgatttagcatttacaatattgatacgtcttcatggaatttgaattttatattttggtgtggaaaaaactagatgattggcatatgacaatactgacctgtgtcaaacctaatttgggtaattgccaagtaaaataagataaattgatattgactatcatcgggtactgttaaatggtcaaagaatagcagctttttagattggaataattctttcattcacatatgctatagggtctttacatggttttctgatataattacatgcttataaaatgttactcctcttggctaacataaggtctcttttccaaaattgtttgattgcagtgggttttgtcttctaaggaaataaactttcctta

SEQ ID NO: 44900 - DNA, 305 bp, Manihot esculenta
  Intron number 1 from transcript cassava4.1_011226m (locus cassava4.1_011226m.g) derived from phytozome v7.0 (chr-ID scaffold03581; pos 1576553 to 1576857)
aattttcaagcctgccttgtttgaattttggtttggtaagctgtaaaattagcttgcatttttgtcttttcttttaagctcctagctttttagatttcagacccttttattttcttctattgctttcttgcttcctttagattccgagtttttctgtatttttttgcatctgcttatctgtgcattcttctaatatatctaatcagttttgctaacactttttttaatgtatatttgaagtttctttgaatctaagtgttctttcctttatatttttttgtaaatatagatctcgggatcctcgc

SEQ ID NO: 44901 - DNA, 787 bp, Manihot esculenta
  Intron number 1 from transcript cassava4.1_016628m (locus cassava4.1_016628m.g) derived from phytozome v7.0 (chr-ID scaffold12262; pos 95656 to 96442 reverse strand)
ttctgaagatcaatcattagatttgtcattttctggtgagcctttgattcttccctcacattttttccaagaattggttgcatttattttggtattacccttcctaccttatatataagtagggatggggtcagactagtaatatgcctttagtcactgaactaaatcaggctatgccatatttgtttgttaagcttttcttggttgttgcttttttcttttcttgtataggtaagactgctttacttaacccaaactagttgaaattggttgcattacttgttgggtgaattataaaaatgtctctggtaatgcattattaacaagttgatgcctgtgttttgagaaacttattataatgtccctaactgttgattttagtaaatactttcatccctctttccctttagccctgaatataaagaaaaagactacacttaaaatttcactaacagaatattgacattattatccaatgacgtgtaaatctcccatatttcataaaaatctctcttgtattggatgttgtcatatttatatttgaatttttagttttgttgggggaaaagcaatattcctgaacaattggaaacatttttgcatggctatataagtatcatatcaggaaggtcttgtgttttgattttcccataattgggaaatataacatgaccacaagtgtctgttacctttgtacacttctctcttgttctctgctgctgccattctttcttatttgctatggatcttggtatattttcaaatgtgactatcttatgtacagggg

SEQ ID NO: 44902 - DNA, 763 bp, Manihot esculenta
  Intron number 1 from transcript cassava4.1_026355m (locus cassava4.1_026355m.g) derived from phytozome v7.0 (chr-ID scaffold12004; pos 355675 to 356437)
cccgggaaccctctcatcgcctttgagcacaagaggtatttgtaattgtactctcattttttactaattttcatctttagacacgcgtcctcactccttgctaggtgtatttctttgatctgtcaagtttggttccctactgtatatgtagttgctggccattggttgaagttctctgtaatttcatttgatcgctgttgattagtgttgtgttttacgaggattcgcggttttgaattttttttttgctttgattctttttttttttttttttttttttatgggaaatgagtgattgattagagatttttatgatttttgtttcggatattgattaatgttgctgacattgtgtgatattgagattagtttaggaagtaagtgtggtttgtggaatgtggcatggttttctttgaagtagttgagtttgagttggggcaacggggaacgatatgggaagcagaatctgggttttcagttgaatatgttgttgtctgatttgagtcaccgattttggaggcagattgcaggtaagtggaaattctataataatccacatttttgtgtgtgttatttttacttttgtttgctatgaagaatttgaatggtaattttacggatggaggaggtattatgtgtgtttcagtgttttgtctgttttcgagaaatcttttgagtttttttttggttatgcggttatagattcatgtggacacgaagatattgaagctgaagagttaatgagtattggttttgtacaggg

SEQ ID NO: 44903 - DNA, 969 bp, Manihot esculenta
  Intron number 1 from transcript cassava4.1_029206m (locus cassava4.1_029206m.g) derived from phytozome v7.0 (chr-ID scaffold06906; pos 10688 to 11656 reverse strand)
tcgtccattccattttcaagttttacaaggtcacaccttggatgttgatcacaaatttaattctattcatgagtgctttcgaggagatatgtcgaggttggggttttactccttccttaaacttgttcagggctttcttcaagattttgaaggataacaataggttcttgaatttttgttacaggaatggcttgaccatttttagtagccacaaagactccatcaaacattgggtgaaaagttttgctatatagtcggagctaagggaaacctaagagttggtgatggtccatctatgctcgaggcttcccttagctccgattatagcaagactttaacaagcctaaatcctttgcggaaatagttagttattagtttaagtctttaattcatagcaatttttagtatttaatttttcctatttccgccaatagataaagaacatacttcctctaagaaaatacatttcttatttacaataacttcaataccaaaaaaaaaaaatactttaacaagcctaaattcttcgtttgtaaatggttcttcaggaaaaaaattaacaaggaaatacttgcagtattactttgagtgaaaataatatcatccatataaataaataaacaaattaggtcaaccttaaactatcaataaaaaaaaaaattactcgtcaccagtttggatctgttcacatagattcatggtctcaagagaactaacaatcgatggactggaactgtcttgaactagaactcatactcaaggttcaagtagctggatttggaaagggtgataggcattctccgactactagacctatataataaaccataaaccatggaggatggaaactcaaatttaaataataaagatgttcattgatttgggaaagcttctaacatttcagagattaggttatttgataaagattggacagggtaatagtttcaacaaagtggagagatcgttttc

SEQ ID NO: 44904 - DNA, 578 bp, Manihot esculenta
  Intron number 1 from transcript cassava4.1_019687m (locus cassava4.1_019687m.g) derived from phytozome v7.0 (chr-ID scaffold09880; pos 25300 to 25877)
agtcgcttatcaccccacaagctcagcttttccaggttttcttgcattctatgcctatgtatgagtacacacccgtttatatctcttttctcatgctgtttgttgattcaaattaaggaatgtgaaattacattttgtgtttttctttattggttgttttggtcattggattatgaaatatggatatttattgatgtaaaccgaatgcaaactatagtttttgtggttttagttgtttttcaattgtggggatgctcattcaattccaagatcctgtataaaagtacctcctttttcagatttcatataatttgtatgaaaagagttttagggttcaacttcacactcttagtctcttgagatttaagatcaatttggatgtagtgtatttatcatttttctaatgctgttatctgttgctttgtcacaatatcatcattttaaagagcaagagctttatttcaattgtttgaatgttttcaaataatctttgtggactctgttatagtaattctaagaagactcattgtatggctgttttaggcttcctgtggagttgggtggtgcactgtccttaa

SEQ ID NO: 44905 - DNA, 962 bp, Manihot esculenta
  Intron number 3 from transcript cassava4.1_007929m (locus cassava4.1_007929m.g) derived from phytozome v7.0 (chr-ID scaffold05875; pos 293877 to 294838)
aagatcttccagaagaagaacaagtggtctctgtggtagggtcattcagtttctttatttttttcacatgatttattaattattggagtataatacgtggtataacctgctaatggctgtataacaataacacgttcatgcttcgtgtgtcattattcaaatatataataactaaacataagataaaattcttcccgttttaggattgttcctaactttttgtttttccatgtctttggttctttaccaatgaaagaactcctgaatttggcctattgactttatagcaattagaaaactcctttggctttgtatcaagatatattattaaaatctttgcttgaatttcatttagcttgaaattgctttagcctttcgttagcaaagctttgattctgagttttctaattagcagttcagactgtcatttcttgacctagtagcactaattaagtattgtatgattaacatttgtagatccttctcattctcaactcaattgagctactagttgtggctggctacatggattcttttcctcctttagcattttctggagccaaatttttgttactcctcaaggatatggattcctagaggtttacataatatatagtttgacgttggatattaacctgcacaattatctctctttattaggtttttaagaatagaacatacctaatcccccctttatcaaagtttgatgtattttgttcttatggtagatgctattgtttttgaaagtattcatgtgtgctttcctatgtcaccttatgtttttgaagcgttgcagtagtgatgtgtggtttgttgcaaacaagcatcaatgcttgttatcctatttcttttttcttggccaatgttcttacttagatttggtgcaagcatattactaggtttttcccccttttctttctgctacagggtcatactgctggcctatttaatctgggaaacac

SEQ ID NO: 44906 - DNA, 830 bp, Manihot esculenta
  Intron number 1 from transcript cassava4.1_024355m (locus cassava4.1_024355m.g) derived from phytozome v7.0 (chr-ID scaffold07035; pos 651331 to 652160)
gaaatcggaaacaggaaaaaaagtgctcgctgcatctaatcatgatgatcatgtcctgtttttatctggttacaagctttttgccaggcttttattcaattgaaaatccatatatttttgctacaagaacatctcaatgtatgaggaattgaagctcttttggatttcaataaactacaatgatgattcaggatcagcttgaaaatcgtcacatttgatagacaaccaattcataaaatatgaaaaatttaaaggctcaaatatgtaaatttttcttcaaagattttgactcctgacctaacaattttcctaattgacacatatttatcttaaataatttttttattggagccaatatgatccggattggctttcctgttactctatattaatccatttcatttgtcatttcaagttcaattacgagtgagctttctttcttttctcctttttgaaagtgacggtcagaaaactacaatttaatatgaatttaattctattaatttttaataccttttatttttaaaataatatcatcaacatcaatataatattagcatttaaaaaaaaaatcagtttttgggggcggtctcccatttccgcaggagtggatctttcacaggatgggctacacgaaccaaagttaggagagttagggccttagatttaattttacaattgagcctaaagcctaggccctaaaccacaaactcttcccttgcatcctctttttaactttttaatattttcctttgaacttttaaaattttaatcagaaaaaataaaatggagcagagccaggacatagaattccagtcttctttccctgg

SEQ ID NO: 44907 - DNA, 683 bp, Manihot esculenta; identical to SEQ ID NO: 43852
  Intron number 1 from transcript cassava4.1_013370m (locus cassava4.1_012137m.g) derived from phytozome v7.0 (chr-ID scaffold05965; pos 195091 to 195773 reverse strand)

SEQ ID NO: 44908 - DNA, 386 bp, Manihot esculenta
  Intron number 1 from transcript cassava4.1_001241m (locus cassava4.1_001241m.g) derived from phytozome v7.0 (chr-ID scaffold05875; pos 886530 to 886915 reverse strand)
tgttttggagcttattagcactgaagttgatccaagtaagcctttaatttctatttctggctgtgagaatttgggaatattaaatgttaatgcttctattttatcatgctttcggtttccttatttctgggttcttcactgttcagccttttatggctggttttgaggtaaagaacctaattctcaagtgggtttaactttcctcttttgggtcctcgataatatgtccaagaaaaatgagggaaaaaagggtgtatattgatttttgtacaatcaatgcttgtttggcatccttgagacttgtttataatgatcaaaattaataatgaggttgaaacttgattcttgtagaaaccaacacaccgaagagaagcaagaaggctgtg

SEQ ID NO: 44909 - DNA, 974 bp, Manihot esculenta
  Intron number 1 from transcript cassava4.1_013698m (locus cassava4.1_013698m.g) derived from phytozome v7.0 (chr-ID scaffold09969; pos 16221 to 17194 reverse strand)
aaggtactcttgtcatctgaaggagacattccctttgtacatttttacttcttgttcataaaatgcatgatttgcatttacttggtcacaatttaaacttcaacgttttaatttatgctttactctttgcaagtgttttctgatgaattgtcattttggatataaagcaaatgcaattgcaaccataagaagcacacttggtaaagacataaatttcacttcgcatgagaaaagcaaaagacaatttacaaaagaaaagaattagttttgattatatatgtttagaaaatagacctgagcctaactaccatccaaatgctagctcaagtggggaggttgcttagttccctataaatggcacattacccatatagctaaccaatgtaggatattcaacacataccctcatgttcagccatctgaggccaacacttggaatgtgaaacactcatgggaggtccaactttggttagaaagactctgatatcatattaagaaaatagacctgagtgcaactcaatctaaaaggtagctcaagagaggaagattgtcaaatgtgggatatatatataactttttgcatacttttttcttatagttagtgcctaattccaagatattgctgataagttctcaaagtatttcgttgttgttgtcattgttttattctttttctttcgttttttttcttttttttatttattttacaatagagtattgatgataagatcaaagaagctggttaatctctgcctgaaaaagcaaaggactcaatctgaatccccctaatcttgcagcattatatgctttactgctgtaaagcttgataatttgaaagacaaattccttagttgtaaaactttattctctgtataaatttgacccctccctgataccagatgggaagttctcaattccctgttccttttctgcttgcagggtttgtttgtaccttcagctgtttctctagccat

SEQ ID NO: 44910 - DNA, 1039 bp, Manihot esculenta
  Intron number 1 from transcript cassava4.1_012516m (locus cassava4.1_012516m.g) derived from phytozome v7.0 (chr-ID scaffold07007; pos 67327 to 68365)
accaagtacttgacttttcctcacaggtatgtatatcaaaactatgcttgaatgctaatgaattttctgtatttggaagcctaattttatgtctgcttagtattttgttgattctctgtttgttattagtgggttctggatttttgtgcgcttgaagtgtttaaatttatgggttaaacttaattgagattaattttgtgatggcaattctatgaatgtgattacctgtatcacaagagtgtttgtagagctaattgtatgaaatcccatttcattttattcaagccattaacctctacttcagatcaagtgagaatttttgaacgtttgcctactcttaaatgcttctttatttctatccaattggactaatggagctacctctctgcattatggctgtttgagttccatcaagatgatgatcagattagtcaggactttgttggaaccactagatcagttaatgccactggtatcccttagctttgaaatctaaaatggaatatgagggatttcataacgttcaagtcgtttttgtcgaaaatgcaggtatagggtgatttaacttccatcatgttatagaaccgagttgctcaggacgtgtaagttgttacctgcttatgccatctcaaggacattggctgttaaatgcttaggcataagaatcttttgcctactttagttcgagttcttaagtaagataggacagaatcacaaaattgacagtagtatataccttcatggactgaaaattcaattgtgcaaagcctttcctatagaaattttagcatgatggaaaaattgaagaaaaaattctaaaattttttgcttcttctggctaaaaggaattgtatatttgtattatatccatatttgtattgcttggtcacaagagcatgaattctgttctgtatatgacatttcacataacatagccataataacaataagcttaggttcctgcaaatgctaggctgaaattaattactttgtgtaaatgaatggcagatctgaaggagattacggagcagcaaaggtg

SEQ ID NO: 44911 - DNA, 906 bp, Manihot esculenta
  Intron number 1 from transcript cassava4.1_010401m (locus cassava4.1_010401m.g) derived from phytozome v7.0 (chr-ID scaffold06278; pos 558427 to 559332 reverse strand)
ggaagaacgctgcagattttcttggtcagtattagctactaagcacctctaaaaagtctcataatgttccaaatcattccaccttttctagaccattcttcttatcatttttctcattacttatctgttatttcttcaacttttactgctaatatataatttattatctttttaaaaaaataattttaaggctaaaaatttcaactagtaaatcttgcagtattaatttatttatatatttaattattttagtaatggattaattattaattgtattagtgtatgtggctaatcagtgaatcactcaaccttgcatgtgtatttgagttgcatgtgtaattagaacccacgtaaatccaatgagcatttttccagcgattgattattttccataaatcttctatcagattctttaataccaatttcattataatagctctgtttacagagacttttaaccatcaattgaatttataatatataaataaataaataaggttgggtgacatgaaattaagctggaaatttcaagtctctttcttcataacctacaagttatagtgatgccccaccatataaatttattctgatatttcaacttcttgacaataataaataagtgaaaatccaattaattggatttatttcatttttgtttttaacgttgaaagggacaaaccatggttagtaatattaaaactttgatgctaatcttattgatttttctttgaatttattttttttatttattaatttttttgaattatgattttcttttgcagcatatgactgtttagtagtagtgagtgtgggtgtgaattactgaattttctttgataattgatattccaatattgggtttaatgggcagccgagaagctggggttgcccacttcaccaccatat

SEQ ID NO: 44912 - DNA, 583 bp, Manihot esculenta
  Intron number 1 from transcript cassava4.1_032215m (locus cassava4.1_032215m.g) derived from phytozome v7.0 (chr-ID scaffold04495; pos 108816 to 109398)
tcaagaggagttaaagcaaagcagcaagtaagatattgaggtgcttgtctaacaacgatgtagaggtcaccagactctcattctctattgataaactgctttgttggaagatctgaaacaaacaatagctagagaaaaaaaaagacaagacagaatagcatatggaccgcgtgagttttctaacaaaagacaatagtttaaggaccgagtgagttttccaacaggaatatgatctctaaaataggtaaaagtgtctacaaggttgactttctataatagtatataaatagcagacatgtaacaaaaatcttatcagtgagaattacacaaatatgctctcaaatttatttatttcatcatagtaaaattgaaatttgctatccagccttgtttattggtggatccaaggaagagatttattgtttgttctgatttcatacacttaacgctcaccatcactgtttggcattttatcctatagacttatagacccaattaatttggaattaaggcttagttgttgttgttgttgtttattttgttttttccttctttgagttataggttgaggacatcaatttaa

SEQ ID NO: 44913 - DNA, 661 bp, Manihot esculenta
  Intron number 1 from transcript cassava4.1_008411m (locus cassava4.1_008411m.g) derived from phytozome v7.0 (chr-ID scaffold05161; pos 230107 to 230767 reverse strand)
atcgcttaaacaagccagctattaagagcattgaggtatatctctcaaaagctttgtttggttgctgagaaagtgtttgggggggttgtggttttaagaaaaggaaaaagcgttttgactatggggttctttttgtttttgatgatagctcaagctctcagcctagcagtggtttttatatcggggtttgtttaattatgtgaaggatttgtattggtttttttgaaattatacctcaaatactataaatatttgaaatgggatacacattcttttcatttcctacatttttctaatcaatcaaatggttcaacaaagcaaatggactctcctttataccctttttttagatttttttttttttgaagaatcgttgatgctctgattatttcctctcctctttctctatctatcatttgcaattatttccctttggcaattattgaagaaataaagaataaaactgaagtatgcatttcatatgcaagaaacagtacataaatgctaatgggtactttagccttttttttctttttccttttggaggcctcaaatcactcattaccttcaacatagttttgtttgaatgagaaattaatgggtattatttaaggaaatctcatctcttttttggattttttgatggctatacagagcccag

SEQ ID NO: 44914 - DNA, 1019 bp, Manihot esculenta
  Intron number 2 from transcript cassava4.1_027038m (locus cassava4.1_027038m.g) derived from phytozome v7.0 (chr-ID scaffold09788; pos 378582 to 379600 reverse strand)
tggaagttagaaccattgacttcattactcaggtacctctcagtgactcttgcaattctgcattaaatcttgtctaagaaagcttgattctcacggtcttgtttaattaatatctttattgttggctttttgtttgcaatttttgaaattcaaatgaatatataaagcaatttatcattttttctcataatccttacttagcctatgagcttctaatgtttagtccagtgcatcatcttgttttcctttatggtttgtttgtgcatgtttcttgacaatctaccaggttgattaaggggaaaaaagaattctgctctaattaaagttgaagggttaaagagttcaaaatactaaattcaacaagactaacctattgtgaaaagacaacaaattctaaacttaagccaaaatcaattgattatgtcttgaaaatagcaaattgattaataaattaaccccttgtttggaatccaaaaattttcacaagaattcaattcaatttaattcttttctatcaatttttttttttcgtttggaatggaagaatttatttctttttcaacttacaaaatttttttttcaaaggaaatgaaattatgcatgcttttgtaagaattcatttgaattcttttcttgcaaaataaataatatcaaatggtgggtaaataatataataatgagtcattaggttgtgtgacagtaataaattactattttcatcggtgtccttattagaatgcctcaaagttcgctttgcatgcggctgaattttccctttttttattattgtttatttttgacaaagttaacacaaataataatttgcataaccagctttttgcttgcgtttgtatggttttcttcacaatacatagccagtcttcttatataaggttgaaccatccattcaaagtaatgtctatattaattaacatgcatgtcaatgttttagtcttgtaaatggaaaatgttgtttttttgaagggtaagcaagtgaaaaaagaagcaaacttgtgggc

SEQ ID NO: 44915 - DNA, 530 bp, Manihot esculenta
  Intron number 2 from transcript cassava4.1_009061m (locus cassava4.1_009061m.g) derived from phytozome v7.0 (chr-ID scaffold09657; pos 56540 to 57069 reverse strand)
aacgcagtaagttctccttctgaatttcctattttccctccataaaattttatgaattaagttcttttaggctggcttttcctacttgttcattttggtaccattgcttttttccaaatgttgggaagtattcttcgtggttctctgaactgtatattactgtcatctttgtgacttttacaatttatcccttgttgcaagaccacgaattgcaggaatgttgtgggatacagtaattaaagaaaaaaaaaattgcagagaaaattgcattaaattttgttatgtcaaatgtaattgtattaaattttgtttatcaatgtatacaagttactttctaatatatacatgaagaaggtgcattaatgcaaaacaggtctttgcagtctttgattccatatctcatcttttattgtctaccgctttgtttggttgattagctataagagctagtcaccacagttgataatcatatagtaatggttgcttctgtatggtttcagtgattgttaaagcaagcagtggtccccgat

SEQ ID NO: 44916 - DNA, 417 bp, Manihot esculenta
  Intron number 1 from transcript cassava4.1_011774m (locus cassava4.1_011774m.g) derived from phytozome v7.0 (chr-ID scaffold08359; pos 59528 to 59944)
caactcttcaacagaggcgtttttggtgctaagtctgttcatttctctctcgttctttgctcttctgtattttccttccgatggtcgatgattatttgattttgattcttaatttacttttttcactttaaacttgctattggtgaacgcattctaggcatcttaacaatcaattttttgtgagtttgtttaatatcgtataggaattgtctcatttttcatgtcatgatgcctattgttggtttatgggttcctcgcagctcaatgtttcatggaagcattagtttgataatttcctgtgtaattgtggatactctaatcaaattatctttgttttggtgatttgaaattgaaaaattgcattatgggttgttctgcttctcctgaattatgataactggctttttgcagcaaaac

SEQ ID NO: 44917 - DNA, 613 bp, Manihot esculenta
  Intron number 1 from transcript cassava4.1_009776m (locus cassava4.1_009776m.g) derived from phytozome v7.0 (chr-ID scaffold05875; pos 2175568 to 2176180)
tctggtgaaatccccattgtgtctgattgtttcaggttttacttctattctgtctgctgctcttttaaaagcccgggattttattgctcttttatgctttgtttggattgatgtaaatggaggggaaagaaaattgaatctctaaaatctcttgtttggccttcaaatgaagggaaaaagaagagaaatggagataaaggagaagaaatcatagtcacttctttatatttagcccaaacatttctcttcaaattatagagagataaaaattagttgtatgaaaatgcttaactatcctcactgtttttaaatccatatttcttaacttgtgaggcaataatagttattttctatattatggatgatctttccaaataaaagaaaagtaaatttcatttctattattttatttttttcgtcatttctcctgattaatttctcttcatttccgttcacaactaaatgtccaaacaaagaattatagttttggtccctgtttaatcaaataatagctaggttcctatgtgtgtttgtgctttttactgtgtgtctaatacatcccatgtttggtcaagtagctgatgacttttctttgtgcaaagccaagaagaag

SEQ ID NO: 44918 - DNA, 634 bp, Manihot esculenta
  Intron number 1 from transcript cassava4.1_002005m (locus cassava4.1_002005m.g) derived from phytozome v7.0 (chr-ID scaffold00206; pos 435156 to 435789 reverse strand)
tcaactccggctccatttgcttcacttcctctaaggtatttgctcgatttaaataactcgaagcttttacttaagatttgaaattttggccaactgaaacgaactctggttttcaatcaggtgtttcagcccttgaaagttgaattggtggaagcagatgcaattctggtgttggagttcgctgaggcacttccaattggggtgggagttctcgccattcagttcgacggagttttgaatgataaaatgaaaggattctatagaaggtatgataacttgttaaattccagaatcctactggttcaattttaaagttttactttagtttccggttttttctttccttttcagtacttatgagcttcagggtgagaagaagaatatggcagttactcagtttgaggcagcggatgctaggagatgctttccatgttgggacgagcccgcttgcaaggtctgtctcaggattgagttattgcttttgtatttctcttttgcattttctgattattattattgttagtaaggactgtaaggtgcctcttatagtttacaatggtgtccaattaaatgcaaatatttgacctaatgcattggctgttggttttgcaggctatattcaagataactttgg

SEQ ID NO: 44919 - DNA, 360 bp, Manihot esculenta
  Intron number 1 from transcript cassava4.1_011241m (locus cassava4.1_011241m.g) derived from phytozome v7.0 (chr-ID scaffold02538; pos 389338 to 389697 reverse strand)
gaaagttgaagagaaaaagctgcggccagcccaccgtaagtgtataattagcattttcaccataaaattttctttttttcttctattttccccatttgttttacccaacaatcacttgtctcctcctcgccatttcgtcttcattcttctaaatatttatttaattttttttttcgctttttgtttgtaccccaatttcagtttctgtgcgtacaagtacgagttcttgtcgttgatttttttaaaaattttttgatggttgagtgttgatttttagatagagagagaaagctgtacattttttaatttggtttgatttttgcagggcgcgaagacagtggggtttgagataatcgagaa

SEQ ID NO: 44920 - DNA, 877 bp, Manihot esculenta
  Intron number 1 from transcript cassava4.1_012049m (locus cassava4.1_012049m.g) derived from phytozome v7.0 (chr-ID scaffold03352; pos 43800 to 44676 reverse strand)
caaaggcaccgctccccgtaacgcccttattcgtggttcgctcttattctatccttccttaaacataattcttgccttttaagcgtttgtataattttgaagcagggttagcgtttattaagttgaattaaagtgcatacaagtggtgttggttctctttcagtaatatgaaggtttttgaccatagaaagcatgaaattattgctcatttgttagtaaggcgacctctttaatcgtctaaatccaaaaatgattttatacttatcgttgttgaagctttgtgtctcagttgagcagccaaatttgctaacttaatttccagcctgttatgttggtataatttttataattagagtttatctatcattattttctaaaaaaaaataaataaagcttattgttattgtataattcaggattgattttgttgttttaaaaatattcttagttttctaagcagattatcttgattacgctcaaattatgtttaacattgaatgtcacaatatttattttagacgttgtgtgtaagagaaaggtaggatagcgaggggagagttttgtgggggaagagaggggagaagagagagaggtgagaaacgagaaagagtaggaaaatatgggcatttttatccaaaaaatgttattgttttaactttgtggaattcatttaaattatttataataattccatagaattgattttatttttttcaaacctgcattataatatgaaattcaattgaattccacctttttttttggaattcatttgaaccaaacagaggcttacattctgaaactctttgagttatttgtgcaaattttctttgtatgttacgtttagcaacaagggacacttcaaatttgctggcac

SEQ ID NO: 44921 - DNA, 635 bp, Manihot esculenta
  Intron number 1 from transcript cassava4.1_012221m (locus cassava4.1_012221m.g) derived from phytozome v7.0 (chr-ID scaffold12794; pos 832179 to 832813 reverse strand)
gattcgacgaattggctgcaggtaagctcagcatttcaatattagtttgatactccctggctattttcattttagattaactaaggttttgccggtggaagtttctcactgtgcttgataagccaaatgtaagtaaaggcttaaaaatggcatgaaatttagatggtgttttagagtggaaatctacaagcgaaagctagtccctttatgtttcattttgagtttaatctttagtgttactaaatgtctatgcaaggggatctgaaagtggatagaaatcaaagagtttgctgtttttgtctaaattatcaaaatctttaatgctgaatacagatgtgaagctttataaagtcgatctaggaaaccagaccttcattagttttgaaaggttaattattggcttctgggaatctctggcattttagagatactatagttgatatgtgaaaggacggaggaataatagctggtctttttggatcaattattactgatatcttcgctgccaggacaatgaacttttgttcatttattttaaattattgacactctgctttattgaaaccacagacaagaaattctgacatgtttcacataattttcttttttctcctcgtgtcagggcacgattcacg

SEQ ID NO: 44922 - DNA, 417 bp, Manihot esculenta
  Intron number 7 from transcript cassava4.1_017167m (locus cassava4.1_017167m.g) derived from phytozome v7.0 (chr-ID scaffold03002; pos 12892 to 13308 reverse strand)
tcttgtgtgtgggaaaaactagatcaagaggtatgctgcttactatggaaaagttgaaatttattttaaataaagggaaaattaagaagaagcagaagaagaaaaagaagcatttgggtttgggttttgtgattttgaaatagggggatttttagtgagggttaattttgtcaattcatgtgtcccaaacggttattttggacggaaggactacgaatttgaacagaaaagaaagtgagggacttaagtgttgggttgccaaaatagagggtcagaagtgttaattacgttaaatctctgggactaaaaagtaattttcccttaaataaatcatgatatgcttgttcctgatggaactctgtttttgatttgttactaaattgtactgtaaacttgatacaggttgcctcaacacct

SEQ ID NO: 44923 - DNA, 596 bp, Manihot esculenta
  Intron number 1 from transcript cassava4.1_007406m (locus cassava4.1_007406m.g) derived from phytozome v7.0 (chr-ID scaffold00321; pos 133291 to 133886 reverse strand)
aacgctagctctttccgtccttgccccgccggaaggtcattcaactgttaaactttgtttgtcatttagcattcttagattcttttttaattattgttattcttgttggtttctatttgttattttgggccatttcaagtttttagttcatgaatttagggtagtaataagacttcttttattccatttttgttttttgaaaattatgttgactctacaactgggaaggggaaaatttctggtaggctgcaatgaatttttgagcttaagcttacccatttagtagttgaatatgagctatacatgctccttaacccagatatatttcgaatgtgctggagatgctctaaggtatactgcttctaatctagcaatcttgtcctgtatattgtttcatgaagttatttccttctcacattgcctacttttgttcctttgaggtgatttgctggaagagaaatgtttgtttctcttgattgagtgttccttgtgggtgcaatgggattttttttacacatagtggttcaatgatttttacgtttcattcgttgcttgttaatgcagactgagaaactgtgcatttgtggatttcaaga

SEQ ID NO: 44924 - DNA, 494 bp, Manihot esculenta
  Intron number 3 from transcript cassava4.1_014657m (locus cassava4.1_014657m.g) derived from phytozome v7.0 (chr-ID scaffold08494; pos 130229 to 130722 reverse strand)
ttgattctttctgtttctgttcacttggttgcaaggtatgtcttcagaatttctcttccatttattcctcctgccaattcttgattcctaacatttctttccatctacagtcaatttaatccatttccaactattgatttcttcaatttcttgttaaaattaagatgggtttttgccatttcttaatttcacttattcttctgggaaaatggcccacttgcatatttattttggtacttttattaaaattaaggggttagaaatgcattccccatccccttcaatataaaataaaaaaggagaaaaatgtgcgtcagaaaaaaggggaaattaaaaattaaaaaaaaagggaaaatgtgcttgtatttcctgtttaaaaaatcaaataaatgaaataaatatcaaatcaattgcaactttacatggctaattgattgatttggaatttgtgatgatcagattgctgggacatcaaacagcttcaagaaaaagaa

SEQ ID NO: 44925 - DNA, 722 bp, Manihot esculenta
  Intron number 1 from transcript cassava4.1_028665m (locus cassava4.1_028665m.g) derived from phytozome v7.0 (chr-ID scaffold12865; pos 603811 to 604532)
ggaaggtatcaactttctcacaatttccccacttttttcacttcttagttgggttagtttttgggttgctgaagaaaagaattgaaataaacgaaaattgatatggtgaattttcctgggtttgtttttgtctatggaatgattatttgggagatcacttgaatgagcttaatcatatgtgctccattgagcacacttgtttttaatctaatttttcttggtgatttgattttgatattgctcgtgtaaatttatctgttgaagttctgagggtataagctcctctggtcaattgagtctgtcgagtaagatcaatttctatccatatcaatacaatcaacaagttctagtatggtgcattgaaaatctcttatgacttaagtgaagaaaagtatttttgatgaaaaatgttgaggagaccagaaaatagccaactatagttgtctgaatttttcttctctcttcccagataacaaacacgctgaggatttatatcttatgcttagcacaaagaaaatgagtcatctcaccctactggaattactttgtgcaatttatgtcatacttaaaatgctaatttattatctttgcaaccaaagcaaactgtttatttttgttgatttgaattagactttcttttgccttagtgttgattcatagctccttcggtttttgtgcttagtgtaggagatttccctttctgggggtaggtatcagaattg

SEQ ID NO: 44926 - DNA, 744 bp, Manihot esculenta
  Intron number 1 from transcript cassava4.1_023059m (locus cassava4.1_023059m.g) derived from phytozome v7.0 (chr-ID scaffold05019; pos 185052 to 185795)
tatcgttcctggcctatttgtcgccggtcttggctgtatgtaaccgttttcttagctctttttttgttcctttgtttcttttctgggttggtattcaccttatgttctattagtaatcatttttggaatccattgttttgtttcttgagtttgagatgttgtgctctctatttgcttgttaatccatatggtttatctgatgttttactataataattgcttgttgcttttcttttctttttaaaaaatttctttctttagtctctcaatcagagttcaggataagattttattacctgattgtgtttgattgcaaagattttggtgaagtgtatgttgcttcatgagcggcaggcaggaagtgacttccagtatccagatctttatttcgatgaaacgaactcaaatacagaaaagacatttcaagctctgccgaagaaactccaattagttgactcgtgttctccttcttttttcaaccttttgttgttttgccatttttctttccaactcaactagtggcatcgaacttttggattctaataaatttcttgatgggatcccagctagcatgttgtggcttctaattagcttgtctatgttaaactggatgtgttcatggcacaagttattcacattttgtcgcagcaaaatgtactgttcatattctggacttctgcgttatttatccatgaaacgcgagtagtgtctcatcactttaaaaactttgcagctctatatacc

SEQ ID NO: 44927 - DNA, 923 bp, Manihot esculenta
  Intron number 1 from transcript cassava4.1_005326m (locus cassava4.1_005326m.g) derived from phytozome v7.0 (chr-ID scaffold03604; pos 864642 to 865564 reverse strand)
tcctctacaggtccgtttctatataaatgaaaccacttactctttgaattcacagtaattctcggaattgtatacgaagggtcattggttatctaacgaacaaattagagttgtgggtttgcttaatgcagctgatatgaaattatgcaaatgaaataaaattgattttttagtccagaaggatgagctggtaaagctattaacctgataaactttcttattatttttaagaaatttctaacattttaacagatgatgccatttgtgaaaatgttgatttggattgaatgtaataattgttggtatatattaactagttattgctgttttgaattgtggtttttatgggtcgaacctgaaggttaattataacttgtaaagggaaggttttaagaagagagcttgctattgtattatgtaacggagtttgattgtttgcaattgcttttcaactgtggctagaatcctaaaactttgaggctttgaaagatattaacagatttggagagtaattgctgtcgcaaaggtttttgctgttgcaataagcaagtctcaccaaagtggaaaaatgacgaattgaattttaaaaattttgaaaattaaccacttctagtcctgagacactgagtttggggtcttgtatgtgcagagaaggtgctaggcaccccacaatcatccataatcatagatattaaagctttgagtatggttctcatgttgcaagttggagttgatgttacccctttaaacttaggttgcatggatttgtggatgtattttgttgttatttgctttgctgatacgttcctcaagacttcatagttttttcacttagtttacatttctaatgttgcgtgtttgtttttcttgatgctatcatataatttttcctgaaatctgcagatatctgcaacacttaggtt

SEQ ID NO: 44928 - DNA, 647 bp, Manihot esculenta
  Intron number 1 from transcript cassava4.1_019853m (locus cassava4.1_019853m.g) derived from phytozome v7.0 (chr-ID scaffold07035; pos 587673 to 588319 reverse strand)
tcctcattgccctacttgtcatcatcgtattccaggtcaatccccaaaaaccctacatctctctctgtctctctctctctattacttatgaatgtttcgtcaattcttttattctttgctttcaactgttgcactcaactttctaaatgctattttatcaagaatagcatctgtttgaatgtgttaggccgtgcaagttgattttttttttaaaaaaaaaaacctcatatatattcattgagatatgttggtgccaattttgctttgaaattttattgcttaatgtagtcgaaggcgatgggcagctgtggaaacacagtttatgcggattatagcttattgcggtctatttatatgtccaataagcttaagatttgttcattggatcgtacgctatttaccaattcacagttcctaattgtgggggttttcacgtggataattgcatattctaattaataattataataattttattcattgcaaaaactaaaatgcttttagggaataactgaagttaaaacaatgtgtgggcattgcatccaaaggattatgttctgcattggtttgtgttttatcattgcaattggaggtatatgatattagatgatggaagcttaacatttcagaggtatttgttgcagcta

SEQ ID NO: 44929 - DNA, 246 bp, Manihot esculenta
  Intron number 1 from transcript cassava4.1_021669m (locus cassava4.1_021669m.g) derived from phytozome v7.0 (chr-ID scaffold10963; pos 279729 to 279974 reverse strand)
gtcactactaaaaggtaatatgtcattagtttgttttactcacaccaggtcatacaggatttttccatgcaaaatcaacccttgtgttaatttgaggctctttgatgttattttacttcctgtattatgaggtttcatttttttgaaaaaatgaaaatatctgcataattatggacacaaagcattgatgagttgctaatcttctctgttgttttaatgattttggaaattaaagcagatatcccg

SEQ ID NO: 44930 - DNA, 546 bp, Manihot esculenta
  Intron number 1 from transcript cassava4.1_010895m (locus cassava4.1_010895m.g) derived from phytozome v7.0 (chr-ID scaffold08494; pos 230281 to 230826 reverse strand)
ttgtcccatatactgatcttcgtgctgaagctcaggttagacctttcatatgtttggcttgtcattttcttattcattttgttaaatttttctttgttttgaaccttaatctgtttaattttgccattagaaacttagctatctatttacagtttcttttttttctcctttgttagtaacagacatgaaaaatagaagtgatcttctcctctcatatcctactctctcagtctctctactagctttctcatttatttatttttttcgtgttttccctataaagacggtggaaagagagagtaaaactaaaaatgtcttggatgtgcttaatatatttaaaaaccaattatatttcgaattaaattgggcctaatttggcatcatgattttattatttctaaaattataatttgatgactttaaaatgttgaaatttattgactttgatgatatttagttacaagttcagtgattgcagatgaaattaaccccaaataatatgtggtttgactccttaactactggcaggctcatactgtattggag

SEQ ID NO: 44931 - DNA, 814 bp, Manihot esculenta
  Intron number 1 from transcript cassava4.1_007587m (locus cassava4.1_007587m.g) derived from phytozome v7.0 (chr-ID scaffold12794; pos 431693 to 432506 reverse strand)
tgagagtgcttaatctctctaataatcagctcgaggttagcttcttcccttttatccattattagaaaatttagttgacttgatgtagatagaagggacatgcaattttctactaacgttttagtaagtggatacggattcggattacaaatgattagttgattgagatttctgggtcatggttttagttgttgcattctaggcctttagcttcggagcttttgctttggttatgtatgtgatataactgtgatgggatttttaattaatagagttgcggattccctaggatgtgaactccaggctcttgtgaaattatactggtggataaactgtggaattatttatctaacctggataggatgttgcattgcaattcatctgtgtttcttaaggcttgtctgttctttcatgatctttttacataggtaaagcacagattctcagccgtgcttatgcctttatatggttgtaaatagtagtattgaaagtttattttgtttgattggttgtaatgcgttttgtgcgtgtgcatagtgcatttctttgaggaaaaattttgcattgtattcattggtacaatcagaatcctattggtcacaagaatttaaaaagtttgattttatttgctttgtttgcatgtttcatttcctttccttgcttctccatggctttattgcccataatgtctcaaatatctattaaactacttgctaatgggtatgcattgtgttgacttttttactttgtacttatgtctgtaacttgtgtgacaacagttcattcctgactcaatagctgggttagaaaatct

SEQ ID NO: 44932 - DNA, 353 bp, Manihot esculenta
  Intron number 2 from transcript cassava4.1_008634m (locus cassava4.1_008634m.g) derived from phytozome v7.0 (chr-ID scaffold05859; pos 93801 to 94153)
ctgatccttcctttcttttcaaagttggaacagaggtttgttgagggtaatttttcatgtttattgtacatttttggacgagaatttggttgctttctcatccgatattcattacttcccataatctatttgaattgttgtgccattacttccttttttatgtgtatcagtgcttttgaactttaactgaacgttgtcatattcttgttcataacaagttttgatggtatgaagaataccaagttagaaatatgcaaatcattgttttcctttttttttttttttttttgaaactcttcttgttattgcatggtgcagattgtcatagattcttgctgtgcgacatttgcgga

SEQ ID NO: 44933 - DNA, 885 bp, Manihot esculenta
  Intron number 1 from transcript cassava4.1_001643m (locus cassava4.1_001638m.g) derived from phytozome v7.0 (chr-ID scaffold04182; pos 169017 to 169901 reverse strand)
acttgggtctaactaaacaatagatttctttaaaggtaattttcagcactgagttttaaatcgttctttcgtttttttttttttcttcctttcttgggttgcctctcttcgaagataatacaaactacgaatctttaaagcttgaagttttatttcatccgctgtttatttacttaattatttttaaattttctcaagttttcgctcatggggttttcttgctttattttatttcttcttattactctgaagtttcttttaagaacaaagccaaacctaactcagcaaaactagctagagagctgtatttaagggcttgtttgtgcttcacgagttggatctgcaacttaaaaggctgaattcttggatatcttatggtgataatgggaggtttcaaggtggtattttacgaactagggttaacagtacgtgaagtataattacagtgtagataatatattatagacatatatatcaggaagagagctgtaggatatgggatactgctctgttaacctttcgttttgtttcgaacgcttgggttagttcctgtttatctctaccaaatagtggaagatttcgcacactcttttgctttggtgggtgaagcctcatgagagtttagtcgacaaaagccatcaatttttgtagtatatctcagacaaggcaggttctttctctcaccctctctctctctctctctctctcctgtgcgaggggtgaagctatttcccagtagttttttgagttctattgtttctgtgtcgtccttcaagtttcatgtcttctctttgtgcgtgtgttttttttagctagaaaatgacgcctgatctttttatttattattattatttttgatatctgtatgaacttttcaggaagcta

SEQ ID NO: 44934 - DNA, 661 bp, Manihot esculenta
  Intron number 1 from transcript cassava4.1_018612m (locus cassava4.1_018612m.g) derived from phytozome v7.0 (chr-ID scaffold09365; pos 121990 to 122650 reverse strand)
cctctttctcaacctcccttaagcttcccacccaggtaattttttttttttaattttttatcttgatctgctttccattttctcttttgggtttgatttctctgtttattttttaatattgattctattggtgattggggattgatagttgtttttaggtttaatacccaattcatgtagattcaaacttgagattgtgttgtagaagagtttcatgtttaaagtgttattgaaatctttatgaggcttttgtcacgttgctgattgtgagttataaatcattttcaattgttttaccagtgatttgcaaaaattagctagcgaataaatctttcttgtggctctcaactgcaagattgatctttaagttgagtgatttcagttttcaattattttaccattgaaatggaaattagcccaaagtgcagtaggttgagtggttgatgattgtttatgcttcaagtgtagtgagctttcacatgcttgagtgtgttgaagatataaaactctgctcacctgcaaatttaaatctataagttgggtggtttcttggcactattattagaaataggctgttcttggtgatatacttatctttgactgcatataatatcttaatgtttatggttttcttttttaatgtttgggcagacatcaagca

SEQ ID NO: 44935 - DNA, 963 bp, Manihot esculenta
  Intron number 1 from transcript cassava4.1_004840m (locus cassava4.1_004840m.g) derived from phytozome v7.0 (chr-ID scaffold03542; pos 331701 to 332663)
tcttgcttagtgtaagtcttctgtcttttcgctgatttctttatttattttctctcatattcttacttcctttttaatatgatattcggatccctgcattccatttccttatgtttctggataaacaatatctataggtgagttgaattatatcaatggaatcacagtgataacgtgatacatctgataattagctgctgaaaaataactatacttgattctggggaaaaaggggggtggtttgatttgagtccacgctagcttgttaccagaagatgatatttatatttgcttctcaagaagagaggagtaaggaaacaaggttggagattttgtacataatggggtgaaggattatcgaaaaaaacatattttggttttcatgtcacggcaataaatgtatttgacagtagatctagactggagtgctccacatatttattttcatagaggttaaaacacgcttaaattgggagttgttggtgtctcatgctcaatgttactcaaatatgtatggttatcttgatatgttccaatagagaagtaatggcatgcaacctgcatgctggaatggtaattctggaacttaaagtttggacttggacattagcttcttgatcttctgtttttcaactcttattccttaataagtcataattcattgtttcatattgtatctttcttatttgacaacttttcagatgttcacatcatattactttgaccccttttttatgcctttccaccgttaactgttagcatttgttcttcattgatgagtgtggatctgaaacctagcatgagcaggttgcaggttttcttgtaacccaacttggctgttgttacattagatttgtagagttgcatcaatcttattggacagtgtacttttgtataaatgtcactgacagtcagtccaatatttcaggtagctgcaggagctgctgttcagtatttgggtta

SEQ ID NO: 44936 - DNA, 706 bp, Manihot esculenta
  Intron number 2 from transcript cassava4.1_022067m (locus cassava4.1_022067m.g) derived from phytozome v7.0 (chr-ID scaffold12004; pos 250550 to 251255 reverse strand)
tccaagctttacattgggaaagtctcctacggcaggttgtttagaaactccctgtttttctgactaattcaaaattgcaaatgaacgctaataggaactggcgtgtgaaatggtgcttaaggtttatttggttgaatagggactcgttattcatcgtactggcgattgaattaaagagcttagagtgctaagatattgttttcctgccttcaagtctggtgaaggaatagcctgttgtcttctaacaggttgggaaatttgtccatttatttcgtggccctatatgatgcgtagctcctttctggatattactctaccatttaatcccatgctatgctctgaactgttgatgatgaactgctttgtatggcttctaaaatggaagtttctcccctacaatgtggagaatggtggaatgtgtaattacttttgtgcataagagtgacaatgttggtttgtaaatgaatgcctaatttggacagaaattcattacctgagttgcagtgggtaaaatgatttcatcttaaaaggcatcaagacgcctttctttttaaccatgaaaattcatgcaatgatgcattgcagctcttgttatagctacaatttttttaggtatttatctgttcatctaataatatatgttttagatgcaggtctctatttgcttctagagacatacaaattggggactgcatattgagagttc

SEQ ID NO: 44937 - DNA, 891 bp, Manihot esculenta
  Intron number 2 from transcript cassava4.1_026937m (locus cassava4.1_026937m.g) derived from phytozome v7.0 (chr-ID scaffold04049; pos 69378 to 70268)
ccaccttgaatctgaggttcatttctctctctctctctttgatattttacttcttcgttttttattgatttccaagagatttgattacaagtctcttgatcaagtccaagatcttactactatttagacttcgagagtattgaaagaatcaaacttaatcaagtttcaggatcttaactcttaagcatagtagcaaatgggttcaaattttcttctttaaattaaaatttccttctgtttcttggaaaccaatcagagaataatgaagtaatggtacaggctatactctcgttgccatgcttttagttactttcttactaaaataaaaacagtaaacaacacgtaaccatttcatttctctaaaataatagcaaataaggatattgctgcctaattccgtgatttatgataccatctttccttgcagccaatacccttccatctttttttactagaaaaacatttttaaatattttaatttttttttttaacttgcaaagagctttggggttgaagaaagctatgccacgttgttgggtctagggtataaaaaaaatccttgcataaaagttaacaacattgactaggaacagaatactgccacttcctaccacaacagatgtaacattacagaacccagtgtccaaatgatccaatcaactaatggagttgtcctttccgtacaatgttctttaaggtcgcttggtcttgggcttctcaaggcccactagggtgtcacttgctcccacgtggaatcctgcacgccatgtacgaaacttgcataaacaaaaaagccacttcaatgcacagaatctcacacatacatacaaaatttaaagaatctttctctgtgcaggttttgaagctcaaagagaaacttttagaagcaga

SEQ ID NO: 44938 - DNA, 441 bp, Manihot esculenta
  Intron number 2 from transcript cassava4.1_016363m (locus cassava4.1_014223m.g) derived from phytozome v7.0 (chr-ID scaffold12455; pos 88043 to 88483 reverse strand)
tcctgatcgtgcttgcaatctggctaaacaggtttgtgaactggattgtgatcttcaatatgtatcttgcgtttatgctcgtatcctaagtagtggtggacctgtttggcgtaagctttgaattaatctacaattgtcacttttttgtgtagaaaacgtcgattgaaaaggcaagtttcttttttagaatcttatgccctatgctttcatcacttccacgttgaaaatagtagtattactttgcttcttggatttttcactagatttaggacatgaccctttttgcaattccaaaatcaatagtacttgattgatcttcgtgatttggattttcacggtggctaaataattttatgctatttatgtggagttacagtttgcttatcatggtatgcccccgttccccatttctttttcccctcgaattttaccaggcttttg

SEQ ID NO: 44939 - DNA, 687 bp, Manihot esculenta
  Intron number 1 from transcript cassava4.1_028289m (locus cassava4.1_028289m.g) derived from phytozome v7.0 (chr-ID scaffold02477; pos 170943 to 171629)
aaaactggcgagctcttcctaaacaagcaggtctcttttcttttcttcatccctgcattcttcaagttatcattttcgttttcttctgaaacaaatcaaagaaacatttctttaatgcagatactcttccagattcttcatccttatcttcaaattcattattttttttttttaaagaaaaatctctctatctattcacatgaatgccatgtttcaaacttgaaacgtggctataattctttagttgtgttgacccaaaccactagccggaagacaagtttgaaacgtctcattaatataatgtcagacaaatttatagattactgcagccgtttttctactgatcaaaataatattctctcgatttgctgttttctgattctcatgaactcttcacattaaggagcaagatgtatattgggaagaaaatgtcccaaggcgcaatggggctaaattaattttcatcgtttgattgactctaatgagattcaaatttgttgaaactgttagcctgtatttgaacatagatatattatatcttataatactagaaagacgtaaactaaaagccttggaggattagctggtcaattttgtccatacgcctcttcaagtgagttgcggtcttgattattaattggttattaaagttaaaagttgaagtttttgttttgcagggttgctaag

SEQ ID NO: 44940 - DNA, 691 bp, Manihot esculenta
  Intron number 1 from transcript cassava4.1_028183m (locus cassava4.1_028183m.g) derived from phytozome v7.0 (chr-ID scaffold07787; pos 1334 to 2024)
gttgtctttcaggttggtcttttgtagtctttctgctttctttttctatctttccacaatgttttttttgactttttttaaagattcttgctgactcctcatcctttattgtgcagtgctattgtcctaccttacttttccctttgtatcactgttgtggttttgcttcatacttataccttattgtgcagtgttgttgtcatgccctgcctttccctttgtgttgctgctgtggtcttgcttggtattgtgctggcccaacttctttttatacttttcttactgatcttttgttatttgttgtgaatatatctacttacaaggaagagaatatgcgtttttgcatttgaacctattaggagttttagctcattagtaagatgtaagcattagcattttcgtgattcaaatctgtaggaatagagatgttgcttttgtcaataaaattgagatgaaagtggtgttaaaaactgttgttcaattagtttgttgtctgttgtttaattagtttgctgtttgatgtgcctataagcttcgtgcttctcttttatttttgtatatgaataatttacatgcttttctttttttttttttccttgatgtgtgcagatgctgcatgttgttcatgcaaaatgtttattagaatccctcttaaggctgttcttcaacatatctttcaaagtctggattt

SEQ ID NO: 44941 - DNA, 913 bp, Manihot esculenta
  Intron number 1 from transcript cassava4.1_002907m (locus cassava4.1_002907m.g) derived from phytozome v7.0 (chr-ID scaffold12525; pos 333560 to 334472)
ctttggggtggaacatttggagaagtatataagaggtacgaatgattgaggtactctactggtttccgaattattttgcttgtttatgtatttgtttgatgaattagaaatatgaattgctttgctgtatgtagaagttctttaaacgtcaaccagcaatttttgaacgccctgtagggcttttccctactttttagtgctgttaatgtaagtattactcgtgttaaggcaacgggtcccttgatagggagaaaaactttgttcaggataaacttttgattaattagtttggctttagttaatttgtttcctcttctttctatatatagggagaagttcattgttatacaacttgccaatttggattatgtgtcagctactcagctttgtgtttttgacgccaaggaaggaagaaagaaatctattttgctgaactattgatcactggaaacagacattctttttcgccatatttgaagtttgatcatttaacaagatatctcaattaaatattcaagtttgtcaacaggagtgtaaactctgcatagtacactaaactgaaacagaaagcaatctttcatgtaaataatctgattggacatgtctaaggctcattgttaggaactcatcactgtttccatcttccttctactgtaagataaaatgtaatggagttgaactttggcttagttgcagtatacacaagtggaaaggattttataaaacctttttatttttcttattaagaaaaaaaatgtgtgctacaattgtaggggcctaggaattgctgattcaaattagatatcgttggtagctttctcgctatctgctgtgttatgcttttggtaattaatccagcacctttctactgttctcttggatattttgcagacctctctgttgggtagagcat

SEQ ID NO: 44942 - DNA, 371 bp, Manihot esculenta
  Intron number 3 from transcript cassava4.1_001416m (locus cassava4.1_001416m.g) derived from phytozome v7.0 (chr-ID scaffold04251; pos 40142 to 40512 reverse strand)
cattggtccaaaatcttgaggtttgtattgtcttcatgtttctgaattgttctcttcaaaatgttttatcctggattaactggattgcaaatgaaaggtttatgcagttttgagttgactgttgtcgttgttgtctgaaattgttaacatgtatattgacctgacctgattataagaaaactataggcatacttgttgtggtggagacctttctgatcagggtcaaaacatatctcatcaaggctgcactgaacttgcaataatgtgctttgtttaaatctatatacatttgttcttgcacttacttatatgggtgaacttttatgttgaaaataggatttgacaaaaggtaaagatacttctataccagt

SEQ ID NO: 44943 - DNA, 539 bp, Manihot esculenta
  Intron number 1 from transcript cassava4.1_000860m (locus cassava4.1_000860m.g) derived from phytozome v7.0 (chr-ID scaffold10305; pos 163933 to 164471 reverse strand)
aattaatttggcttcaagaaaagctgacgaagcttgtatgatcaagataatctttttcttcatttcttgtcaccttttcgttttgtttcttattttttcccttttcttgtccacactttggttgattttggttttttcttattgtttttggatgcttgcaaattaaaatttttttatagccatactctttgctggtttctttcaatatccaatcttggatttaagctgttgaattttctaattagctggttgattttcacgaatatgttggcatgtggaattgagtgttaaatcttgtagtagtgacaggattccccttatttagccttgaaatttgagtttctgtattgcattttccatggataatcatttaagctgtgcgtgtacttgtcacttctggcaagaaaaaaaggtttttgaatggtggttgttccttgtgtttagacttcggagttgggaggaatgtaattgttaacatttggttgcaaagaagaataaaaatttcatgttgccggcttattttgcagcccttagaaggt

SEQ ID NO: 44944 - DNA, 749 bp, Manihot esculenta
  Intron number 2 from transcript cassava4.1_007865m (locus cassava4.1_007865m.g) derived from phytozome v7.0 (chr-ID scaffold12525; pos 477229 to 477977)
caatccggattcaaacagcttttcggggcttgttggtaatttgggtttcttttatttggccattccttgttctctttaactttgaagttaatgaattggttttttgtcggtattttgcaagtttgaagctaaggtttattatcgttttagggtttgtaggtctctatttgtaaatttgtgctccaagaagttccaaaactaatagcattttagcaccagttttcaattctcttcagctaattttgggtggtccctcagtgcagctgagctcatttgctctcttgaatcgcctaaattttggtcgttgtaggaactgttcagtagttgaatgcaggccatagactgctaggtcttttaatagttgagttcaatcattttccaaaagaactgataattggaaaaacaagaagatgaaaatttaagaactaacaagtctttggatcggaacagatgattacatttaaaactgctaagtacatcattcttctgtttcttttcgaaataatttcctaattttcttgaatcaccttttataatgctcatgctcatgaattaggaagctaagttataaaattagtacaccctcagaatttagttgttaaggacttgttcaatttgattgcatatatgaaatgtcatggctacacttcagaattcttttcttgcaagtgccactttcttttgtttgtggggatttatgttattaatttgcaggcaagacgggcattgagggccttgaaagcagtggt

SEQ ID NO: 44945 - DNA, 846 bp, Manihot esculenta
  Intron number 1 from transcript cassava4.1_007635m (locus cassava4.1_007635m.g) derived from phytozome v7.0 (chr-ID scaffold09557; pos 26708 to 27553 reverse strand)
gacccacctcctctgtatttcagttgtggggtccctctcctctgaaaggcgggaagacgaacccagttttgtcctcccctccacaccagaatggtcctttacagacaagtgtacaggtttttttttttaaaaaaaaaaacaaatattaatttttttcaaggaaaaatattttttatttttaatagtatgcagtacttgtgcaagtgatagagagacgcaggctagtggctgtgtgtgagtctgtttctttcttcacctaatatatttgaactttgtctgtctactcatttagaagaaatgatttgggttctttgttagtattggtatttgctcaaggaacaggaaggacatgacttctctctggcttgaagcagcagcctgaaactggaggaaagatttgatttttttgcttcttctgttttgggttcttcacagagacgttccttgaataaaatgctctacatttatgtttaatatggaagtatttgcaacttcggtctttgattcatgtagaaagaagacaactttagtctccaagagattggaataggtgacgttgtgattctttagcgtctttctcgtgaagattttgagttgaaattcgattttcatctcccggttattccttatagtttcggttttggaaccacttgaaagcttctccttcactctctcggattttcatatttgcgtttgagatttgaggttcttccctccccagcaatttgaagtgttttagcagaatctctttcattcattcattttgaagctggagtcttgttttggggttcttttggttttgagcttctgctatcatttataggatcttggttctgtgggcttttt

SEQ ID NO: 44946 - DNA, 803 bp, Manihot esculenta
  Intron number 2 from transcript cassava4.1_014873m (locus cassava4.1_014873m.g) derived from phytozome v7.0 (chr-ID scaffold03604; pos 663306 to 664108 reverse strand)
accacttgtgctatcttcttcttcatcctttcctggtaaatttactactctttaattttctcagttcttaattttgattttaacgaaacgtaacctaattaggtaattagaaatagttgcttagctgtgcgccatgtttagcatctgaaacatctagattaagattgggtcccatctcttctgctcaataataatgccaaaattaacaccctttgtgctcgatgtgaagttgtaaagtgtttaatttaaaaaaaaaaattcacatgattaaattattagtctaaacaaagcacaagaaagtggaggggtgtctttccttttgtctttcaataattagatccctccatagttatatgataatttgttattgcctattactgggggatcctaattatttctctgcctgaattatttattaaaaattggcagtattgcctgttatgaagggcaattatttcaggaatcaagagtttaaggtaatctgaatagtaaattttttgttgcagttctaatttaggatatgtatgattcctatgaatgatattagggaccccattagcagatttgaaactttttgctagtttatttgaatttttagttcaaagtatataaatttaatatttaaagaaggaaagaaaaaataaatatgcccaagtcaaattttgaagatgaatcataacctttaatgtcttctgaagtgtcatggaagaacagctatgcaaatcatgtaagatttagaatgtcagagtaaaattttgacaaaaaattgaaatttttagggtaagctttttgggagctgaggc

SEQ ID NO: 44947 - DNA, 655 bp, Manihot esculenta
  Intron number 1 from transcript cassava4.1_025957m (locus cassava4.1_025957m.g) derived from phytozome v7.0 (chr-ID scaffold12146; pos 252189 to 252843 reverse strand)
ttttctcacagaactaggtacacataaggatgaactacaaaatgtctatttgcatggaagtaatactacatgaatacaaatgttgataagagaactatctatgaatgattccatcagctttagtgtttgaaattttcctaattatgtttcttcaaatgttgaacttttttggtactttcttgtgccttgttcaataaaataaaaatgattcccatgtttaacttgtttcctcagtaaaacacttttgatgcatgttttttcaagtttagcaataacaactttttttttcttttttctttttgcaactacaatattgtgtagattagttaatattcactatgaaatacattgcaagagcagcacatgtaattattcttactggagggacgactctgtaacaatagctcatgtaaatattcttacttggggatctgtacattctaagtataattcagaggtgaagtatcacaacagtataaaaagaatatggctacagacatgaataagtgagaagctgagttacttgtttaactagcatatcttaattgtaattttgttccattatttgcacttcaaatatgcttcgttcattctgctaattatttttaatgttttctcagaacctgctcaaaattctgtgaaatacttaacttgg

SEQ ID NO: 44948 - DNA, 804 bp, Manihot esculenta
  Intron number 1 from transcript cassava4.1_018061m (locus cassava4.1_018061m.g) derived from phytozome v7.0 (chr-ID scaffold11297; pos 387797 to 388600)
acctttcttcgagagctcagggaagaaggctacacgtcagtttctctttctagttctctgtctctgtctcttttttttttccaaaaaaaaaatcaattttgttcatatttgactatgcaatccctaattaatctgaaatgacccatcaaaataagatcacaagggaatcgaaaaggtatattacaaatctgtatatattttcttgtttgatgggttgccaaaggtccctttttttccccttagttctgacctgaaatgctttaatatttgatttcccatattttattatcaatgaaatcccgaagtggtgattctttttatatggttgatttctagcttctgtttggcagctaagaaaaccctgaaaacggaagaaagaaactaaaatgcacgggaggaaaggggcataaagtgtaggaaactgaagcatactgagattggaaactttggtattgggtactcggagtggggaaaaagccactaatgcaatgctttgaatgggttttagtgtgtatttaaatcataataacctcaaataaatagtgggttttgaatttcgaatatatggatgttttataaattaacatacgtgactttctgcatgaattgctgccagtaaattatagaacccaataatctacactttttcattttgaacttctagcagttctgtgacatcttgattgcatcgttaggttagtatatttttggagctttactgacttctttttcatttttcttccctttcattttgtttattatctttcaggaagtgccttttggacggaaatttgctgtaagtta

SEQ ID NO: 44949 - DNA, 910 bp, Manihot esculenta
  Intron number 2 from transcript cassava4.1_005162m (locus cassava4.1_005162m.g) derived from phytozome v7.0 (chr-ID scaffold09410; pos 53347 to 54256)
actgtcttaatccaacctgtggttttagacatcctgtaagcatatattctaatcagttctttctgtacatctctctgtgtgtatatatgtgacattaggatttattgagtttgtcggtttacttgatgagaattgcacatttagtttccaaatgctggtgttcacttcactcatattttcacatgcaaatgaacttgttacttcactttctatatgaaatgtttgattgtttacctttcagccccataagaataatgtttctggatttttaattgtgcacactcctggttaatgatatgttccatgtggctcaggcttttgtaccttttagttatatgctttccattcttagagttgtcttatagaaatcactatcaggatcataacttcctgtggttgactgtttgttattgccttatcaaatttggaatagccaagaatgccaaagtgagtttaatataatttgtctgaagccccttgcctttttattttattttgatgggttgggtgtgtgcacttagagatctattaattagaaatttagaatgtaccctggttggtctttttccccttcattgggagtgggactatcaagtttgtgtctcgttttcatctatcagttgtgagtttatcaactttatggtgagatttgttgaaaagataagggctatctcccactatgtaattcaccaatgttacttgatccattggacttctttgagtagaaagaggaaccaaaaaaatggagatcttacaggcacacctttaagtattgcttttccaatgtattattccgtatctgcagattgttcatcaattggtggctgtgctttttaccattattgccctttggccttgtgacctaattctatcgaactatatctgttatttcgacagccattagaaaggc

SEQ ID NO: 44950 - DNA, 1010 bp, Manihot esculenta
  Intron number 2 from transcript cassava4.1_019699m (locus cassava4.1_019699m.g) derived from phytozome v7.0 (chr-ID scaffold05875; pos 1231506 to 1232515)
aggaatccgtacagtacagcattttcaatcatttggggaaaaaattctaataatttgattatgcctgttttcatttctttgtgaaatgcatataaaacaatgagcattgttcattcaataaccttcaattgctttctaccatttcattaagtaaccttcatttagaaattcataaaatctagtttctatacttcttttctgtgcaaataaaatgtgtttataacagatttccaagtggtcgtctgctattaaacccaggatataaatagtttaacacctatcatagctggtcatgataagaatggtcctatcctgagtgctaagctgtttaagtatttttttgctttccaatgatgaaatactcccacctctataaaagtaataagtcgaagttgtacatacatgatcccaaaggactattttttagtctgggtatgttagggaaattatgttccttgtatcctttcgggtgtgcagcagcagcctttctgaacgtatgcgaatttaataactatccagagatggtgcaactatattattacgtacaaagttaatactcatagaagctactagaatcaaccctgtggaaatgcattgatcatgctatgacatgttacagtacatgttagtgggcttaaaaaatattgtacatgaacaggtattatacatgttagtgggcttaacatgctatgacatgttacagtacatgttagctgctcctgctctaatgtgactcttcttccttaatctccctcccttctttcccccctctcttatgttcgcaaaacactgcattacttggtagctccatgagtagttcaaaatgaatgtcacatttcaatgtggtcgtctgtgctaaatataatagtttgccatctgtgctaatattagacgtcggtgagccttttccgccatctatctaacatgtttgatttgaatttctgatgtcatgacatgacttgctaatttatgcaggacatcactcttcaagagggcgagacaattgcact

SEQ ID NO: 44951 - DNA, 641 bp, Manihot esculenta
  Intron number 1 from transcript cassava4.1_004424m (locus cassava4.1_004424m.g) derived from phytozome v7.0 (chr-ID scaffold10963; pos 572072 to 572712 reverse strand)
ggtgaattggtagagattggagctgatatcaggtaccgctttcagtttttgttcatcatttcattatttacccaaaaaagtttgattttttttttgttatcctcttatctgttccaccgacagcaactgcattcgaagttattttttgggtcattctttttcaactagattgttttgcgatgcaaaatagtagtggctattgtatatgattttttatttgcttctatataaattcatttggagggaatttttgttagtatctgatttgggattatgaggaagatgggattttgttttagtggagatatggtctttattcttcagaatttggttatattataattatttgggtttctgacagaatttacgaaatgaaaatcgtttaacatttcatgatcgaattcttggccttttcgtaccggagaattaaattctctactatttgagcgtaatagaactattttgttttagtgagagtattagatgaatgcaactcctgcccagtcccctttctcttgtagtgcccaattatgtttctgggtaagaagatggtggacaactgtatttagagccctgtctgatgcttgctgattccttggctgacagttcggatattgaagttgacgatattgcggagaaag

SEQ ID NO: 44952 - DNA, 953 bp, Manihot esculenta
  Intron number 2 from transcript cassava4.1_012443m (locus cassava4.1_012443m.g) derived from phytozome v7.0 (chr-ID scaffold12455; pos 657688 to 658640 reverse strand)
aagcgtaaagaacagcttcaaaggcatgtgagccgtgtctcatacttttccgtgctttatagtgctcaaattgtgtctgctctaaataagagttctttagtgtcagtcttcgatcttaatttttgatccacggtgtagatgttgcttttctgagttctgacttatttggacgttgtggcaaatccatcatggatgttcatcatggttatatttttataatatttattactgaagagtcatagatgcatatatttatgggagtggggatattgagcccggccatgtaacaaggtctgagcttaggttttataccctccatgccgtgctgaaagagtagccctactaaaaataggtcagacttcggcttcacattttgagcccaaaaccggcccaatccaaattgtagaataatatatttttacatataataaatcaaaaaaataatataactttttatgtaaataatataaaatataatatagtttacatatatatattttcttataaataattatattaatagacattttgtattaaaaaattaaaattttagattgtgggctgggcatgagctcaagtttttgagccctgcatgcccacccgtatatggatacatgttaaatttgaaatgttattagttattgtttcagaagaaaagaataattccgagtgagaatttgtgagaatatatatcttacaaattgataagcttacacatttaactcaaaataataacataactaaaattttgaagttggcagcaaaataaggaatggctggcttaaatccatcctctccctgctacccactggcaggatgttcctcattgggcttttgtaggatgatattgtcgtctctagatgttgtgcagctggtttaatattttatttctccccataattcctcattttggtttatgtagaggaagtgtgatctcaagcatccccctggtg

SEQ ID NO: 44953 - DNA, 384 bp, Manihot esculenta
  Intron number 1 from transcript cassava4.1_000133m (locus cassava4.1_000133m.g) derived from phytozome v7.0 (chr-ID scaffold00435; pos 104775 to 105158 reverse strand)
aaggaagtcttaactgtgagttcttttttactcagctcctctcttcacttactataatttgttctgttttaaaaatttgagctaatttaggatcaaattttggatgcaagccacgtacttaattgtaatttcatttgatttgttacaaggtgtgtgttttaaagtttttgagtatctgattcgtgtgttgcttcttcagatctgttaattattcttcaaaatacttatattgttgtttgtttgtgttaaactctttaatttccgtggttgtttttgtatgctgagttgagggagtggtgatttatgaagtgtgaggagaatttggtctgatcggtgtgtttgttttcagttgccgagcattgggatcaatcctcagttcatcac

SEQ ID NO: 44954 - DNA, 619 bp, Manihot esculenta
  Intron number 1 from transcript cassava4.1_021349m (locus cassava4.1_021349m.g) derived from phytozome v7.0 (chr-ID scaffold10183; pos 182542 to 183160)
aggtctgccagaggaatccccattcaggtttcgctatttttctactcttaattttcttggcgtcgatcgttgttggtactttgagattagggttactgattgattttctagttcattggtttcatcattataaaatttgaatcatatgattgttcatattcttcctgtttcttgtttcatgctatttctgttattaatcgctttttggatttaagattttatcaatgattccaatagttcaaatttgctattttcaacagctcctaatagctatacttttagttgagattcaagtaaacttgatagttcgaattaagattttgcaatattgggaatttagtaccttccaaccttaattacaaattatttcataaaagcaagttataatgatgagaataaaatagacccttttgactgttttcttttctaaaaaagaattattagtttatcttatttacaaatagatatttagctgtacactttaatttgagagcacagagatgccaacattgccttctatgcgcaactagtttaacttcctctcttctgaattttgtttaaagagtttgtctttttgttttcaggaaccatatatccgttcccgagagaatccatactt

SEQ ID NO: 44955 - DNA, 548 bp, Manihot esculenta
  Intron number 1 from transcript cassava4.1_015320m (locus cassava4.1_015320m.g) derived from phytozome v7.0 (chr-ID scaffold03698; pos 3415 to 3962 reverse strand)
gagttcccgtcgttgacgccgatctcgtttctcgggtatgccgttttctcttctcatttgcttcgcttgcttacataatgtttccttttcttgtttgcttttcccgtgttcgatttagcgaattaacctgacccagcgggaattaagaatgcaaatggtttaacttgatcttggctggttgatctctatatgtattcagcatttttttcactgaatttttcgaaggttttttttttgttttttctttctttcttttttttttccccttcaattgaactgaagttaggagagtagattatttcagttttcaattaaccatgacaattttaagtaacatttgatgattgaaatgataggttattgtatatcgaaccaggctgcaaataatgtccctggttactgaaattttttttgcaagtttatacctatttgacagcgtggtaacgtcatagttgaatttgccttcttgatgcttatttgatcttacactagatgttgtccattccttgggatctttcctgaacttctcttcctgttacatttccagg

SEQ ID NO: 44956 - DNA, 586 bp, Manihot esculenta
  Intron number 1 from transcript cassava4.1_000070m (locus cassava4.1_000070m.g) derived from phytozome v7.0 (chr-ID scaffold05129; pos 45799 to 46384 reverse strand)
ttgattaccttaacgaaaaggtaactgcctcaattcagctattttgtcaattgcaacgtgaaagtttgcaattatacatacgtttgatttgtcggagtagatgagctaaataggtgtatagagagttaaaagatatgttcttgcattttttttgctgcataccctttctcttatgctgggaattccattgattgaagtggttatagaaacctgaggataagcgcatgttcatttttgtgcttgctatctgaaagtaagcttacatggcttctggtaggtggtttaattgttccttttgtgctgatattacgcacttctattaggttctcttctcttatctgctggttgattttgcaatgaatatagcctaaattacttttcatgtctgccttttagatagtggaagcagaactaattaattttctaggaatataagtgtgtgtgtgtgtgtttgtgtgttctgctttgggagtgcactttaaacgctgaggtgaatgcttcaaaatctcctctcatggtgcttttctccttcttgcgtctttgttatccagtttggtgcatccacgttggtgattataaaagaagg

SEQ ID NO: 44957 - DNA, 343 bp, Manihot esculenta
  Intron number 1 from transcript cassava4.1_006470m (locus cassava4.1_006470m.g) derived from phytozome v7.0 (chr-ID scaffold12525; pos 662770 to 663112)
gataaacgtcgccgcatgtaagtttctgtccatctttctatacatacatacatgtattaatcctagatgatacaccttaacaactcaagttttattgttaatgaatctgctcctacatgtatgtatatgtgtgtgtttcatttagttaccatgtacttatttgaataagcaagtaattaatatctgaaccataatgaaagaaaaggctcaaagggaagctttagagcctatctgcttttctttttcagggttttgcaggaaagtatatatgtctgcagaaactagaagatatgatgatgatgatgagattttcttttctttttcttgtttgtttttggtaggt

SEQ ID NO: 44958 - DNA, 575 bp, Manihot esculenta
  Intron number 2 from transcript cassava4.1_006470m (locus cassava4.1_006470m.g) derived from phytozome v7.0 (chr-ID scaffold12525; pos 663401 to 663975)
accacccagtatacatacaagacgaaaccaagaatgttagtgctcaccttctctctctctctgtgactcagttttgttttcttctgtttgtgctgttttagcagagagtgaattcgattcttggagtttgaaacccattttttctgagatgaattcccttttctttatttctggggagaagagttcagttccattttggacatgagaaaaaacaaaagttgtcatctttcttaaacctatctctgtcttcttcttcttctaagttttcacatgttccatgaaaaagtactgctgaagagagcttcaatggacatgtagaatctctttgctttgcctttgtctctcactgtagtgaaaggaatcattgatgtttgaattttatctctggcttctacttaagttagaaatgattttgctggaaagtagtggagttatggggttcataataattttgcatgaaatcattttgtcttcaacataattatttcttacagcttctttctaaaagttactaagaaatacacttccttttgtctccagattgcctttcaagtcttagtcaaggcattgatcag

SEQ ID NO: 44959 - DNA, 776 bp, Manihot esculenta
  Intron number 1 from transcript cassava4.1_007705m (locus cassava4.1_007705m.g) derived from phytozome v7.0 (chr-ID scaffold12455; pos 281345 to 282120 reverse strand)
gtttcaaggtatgcgctattttttgttcttgtttttctaattggttttgagttttatctgtttttgctcttgcagctccccccttctctttcttcttctttccttcctcttattttgcatgttctcatgaactaattgagcatcttgttataattttcacgttaattgtagttcaaggaatcaagggtgattgttttttcgagtgcaaagagcttggatttgtacatgattaattcaaatttatgacccttactcaatgagaatgaaactgcagcaattaaggctaaagggctttttttttcttcctagcatgtctagttctccttggaaattgcatggaaatggaaatggatgtctagatctcaagatacctattccaattttgttttagaaataaccaaaaatattatacttcataatcttagtttcaattttattcgaatacaaaaatatcataaaaaagtttggatcatttatggacaagaaaaagaaaattggaatctatctcttgcatttcatactagtttcgatggtaaatcaaacatgggcttcaatgttttcacttccaacattattctaattaagaaactttttttaaaatatattctacttcagcatttgatatgacagtgataactgaatgctgtttttgataaccatggtgtaatgttctataggatgttgatttatttattgttctaaattgcttcatatttgtctaagcaaaagctgttgtaccaggacttttgttgctccactggagagattaaagctgg

SEQ ID NO: 44960 - DNA, 418 bp, Manihot esculenta
  Intron number 1 from transcript cassava4.1_006275m (locus cassava4.1_006275m.g) derived from phytozome v7.0 (chr-ID scaffold06948; pos 179064 to 179481 reverse strand)
aggtttccaggtcagtttttttcttttaattccaggttttctccagaaaattcgcttgagaatgacggaaaaattaagtagattctttgctctcttttttttttatatcatttattgttgggtttccatggaagagagtgactagcttccatcaattcccaccgccataatcatttttttggagaggataacactaacccacttgaaaattacagatgaattaaattctttttgtttgtatcgattgggtcttatagcttctaatttttacatgtcttgacttgttatttaattgtgttagatattgctaattggttaattcaaattaaagaattgaagggaatctatggaatagttatttttattttaattgttgctgttagattattaagtgagcttggatataatcgaagtgcca

SEQ ID NO: 44961 - DNA, 839 bp, Manihot esculenta
  Intron number 1 from transcript cassava4.1_009145m (locus cassava4.1_009145m.g) derived from phytozome v7.0 (chr-ID scaffold08359; pos 1606844 to 1607682)
ctccagttgaactctgttatttcgttcttttccaggtaaatctctaaacttctgtgtataggcgtatggttgtatgggtatctttttgcttgggttgttgaagaatatatgcttgaatataataaactgatttcttgtagaagaagattttagcttcgattgttttaaatatagtttgatatattatactgttttataaaattgcctgcttgccttctcccttctttttttctccccccaatttgattgcttttttgcttgatatcctaccaaaattttattttttttgttaatttgggggaattgggttttctccaatgatttatgcctgtatacttacctgtttcctttgtttaatgtaatgaataaaaccttttctttttctttttgtttattgtttctgttcagtatacagagaatgatgcgattaatcgagttgtaaatgtgaaaattaaatgtacttgatttttgtgcaagaggatggtcaaattatatgcatttacttttctttaatggatatttgtgatagagaacattgcctatatcaacctttgctgcagtcacaataatagtcgtaacttatgctacttctcaatattaggtccatgtgtagaacgagaattagaagggggttatttcaattcttgaggaaatgattgataatatgaacaattaatctttttttttttttttttcattttttagtttttgtgctttggtgtccatccttccaatattataataatgttttgttaatttggtaccatatattacattctaaacttccttcattttctttgataggtccatatcttttacctttacttagcaataaagag

SEQ ID NO: 44962 - DNA, 736 bp, Manihot esculenta
  Intron number 2 from transcript cassava4.1_012426m (locus cassava4.1_012426m.g) derived from phytozome v7.0 (chr-ID scaffold03581; pos 261214 to 261949 reverse strand)
cggcaagcctccacgttgccatcattgctctgtttgtaagccagcttataatcattgtttacagctagttgtttttttttccccattaatttctatcgtgcattttttcataaaattttaccagttcttattttaattctttaagtaacacttctaacgttgtattgggcatttatgatagttttaatttttatttactccagtagtatatattgaattttttttttttaagttcagaaatactgcttttatcatttcttttgatctcttttatgttttccatagttgctcatttatggaattttcccccttattagttcaagggaagtagatgcgaagtttagcttctacgaaattttgctttttagactttctgaagttgattgtatattaaacatgtgatttgtgttattgttatagtgaagatttgtttgtctatttttcacctttaggttctttcataaatcactttcatctactctttagtctttaccccattggaactctggtgctggccttagctgcatacaatcaagatagaaagtaggtaaataaagggtgaaggagaggtttctgaatttaccaaattcacaagcttttattgacatttgtaagatttactaaatttggttgttttgtccatatagtgaaagcatagattgttgtggatgggttaaaatgataagcataaggtgctgaatttttttttcttttaaataatttttgcaggccaaag

SEQ ID NO: 44963 - DNA, 720 bp, Manihot esculenta
  Intron number 2 from transcript cassava4.1_012445m (locus cassava4.1_012445m.g) derived from phytozome v7.0 (chr-ID scaffold03081; pos 113194 to 113913 reverse strand)
ttatcaaagctattaaagaagcagggtgcgtcaaggttatagttattctaatctgcctctgaattttattgtctttctgttactaattacaagatggagagggtttgtaggtgacttttcagtacattattgtaagaagaaactgcagtgcaggctcttattctcactgcagagttaaaatgtatagttaattttagataggtgaaaaaagacctttggaatcaagagatttgcaagatcaattaattgaaatggaagaatcaaattgaatgtgtaaacaaaaaatttcattttgaactaaataaaaattttacataattgtgtaagaatccaattgaattattttcttgcaaatgatttattccaaaaagggccaggggagtctggtggtctgcatttgttgacagctcatggagtgtagaacgtaggtgcaactgcaaatgttaaaagttaggtgcatttataaaattttattgttgaaagcatatcattttgctagttgcatctgcttttctgaaaataccaacaagatccatccattcaaagtatactaagtataaaaggacgtcccttacgaaataaattaggaatttcgttctttagccctgtatctgcttagtgtaataccagttatcaaagatttggttccctttattcaaatagttgaatctgtgtattgttacagaagttcattccatcagaatttggagcagatccaga

SEQ ID NO: 44964 - DNA, 796 bp, Manihot esculenta
  Intron number 1 from transcript cassava4.1_006491m (locus cassava4.1_006491m.g) derived from phytozome v7.0 (chr-ID scaffold09880; pos 90021 to 90816 reverse strand)
ttccatctgctgagtctcaagccaaaacaagagttagtgtgatcttacatgtactgttatggcttaattttttttttttattaattgagattatcatatttggtttattggagagtttagtacttgccagttcccgtcaattgaaacaaacaggcagagttccatagacctggaaacgattctttggtttaacgattaattcaccttaaagttttcgggaaaaggaggattgggagacccaattaacaataatggtgtatgagcagtatatgacaatgggtctgattatgtgtagagtttgaaaccctagggtatagtacacaagttatttgatatttgtgattttcttattagtagctttcttggtgatggagtcctgagccctgtctggaattgtgtttgggaggtaaaaaaacttggttgaaattgtattatttttttttcctttgagtatcattttaaatacattgaaaaagcagttgaagagaactgttttgaagttcaatgagattaaaacgtccctaataatcatttttgagataggcagctcaaaccaaaatgccaaacaaacctttattagagtggatgagcaagttgagaatcatgccaattgttgcttactggaaactggaaggttcaattaccagtgtgtatataaattaatcttacacttgttgtccaagatatttttgcctaggtagaaaacgtttgataagtttttatttgtgttggctaatcttctttctttggtgatgttttaggcaactcttgctgattctttcctggcggaccttga

SEQ ID NO: 44965 - DNA, 988 bp, Manihot esculenta
  Intron number 1 from transcript cassava4.1_003258m (locus cassava4.1_003256m.g) derived from phytozome v7.0 (chr-ID scaffold08359; pos 1059863 to 1060850 reverse strand)
ctctccgtgggattctctcagatcttgcattcttggtgagttttttgctgccattttacttcttaatggttttttttctcaggttgtaatagtatggttctatttgaggttttaaaggtcggttagattaatgttttctagtttataaccatacgtagttttgacttgtgaaacattctttttcttttcaaggtagtatcatgattcttccttttctgtgttatttgttttttttttttttttcgtgtgttcatggtgtgtactgtaggctagtgttcaatgcatatgctcagattttgagaggggttgagaggactagcttctgggttttcttttacctctaggtttagcagcctcttgttacttttatagattcaatcaagttttgcttcttgcaaccccctcaccaacaaaagccacctccaatctctgatcatggacttctcttaaatcggttgatgctgatgcgttaatgcttaggaaatcttaataaaagaagccgatagtggatatgcaaccatttgcctggaagcatttttttttaaaaaagaaaatggatctccgatcttgagttaaatttatctactgctttgtagtccttatacgtgctgtttagtatttactttgtaagatatttctatgagctaattgtcatttttttctacctctgatattggtaccttctccccctctctctcatccagatacttttattatcaagtgttgtagaaatggcttgcttggcatagcagtgggcttgggatcttcttcggagtctctatttttgcggtaatggtttctgcagtttgaattgtgggtagagtttgagatgaggttgtcaaattaatgattgatagtgaattttattattttcgacaagatcagttgcaattggtgtttggcgcttttttgggagggaagaagctctcttccttctttgctgcctctgtcaccagccacttagaacacaagattctcattccatttc

SEQ ID NO: 44966 - DNA, 536 bp, Manihot esculenta
  Intron number 2 from transcript cassava4.1_000955m (locus cassava4.1_000955m.g) derived from phytozome v7.0 (chr-ID scaffold07859; pos 264358 to 264893 reverse strand)
atatttatgtaagttcaactgtgcattactttccattggtttgtctagttgacaagtgttgattagtgtgcttttttgcttaattcgaaatgattttgttcagttatggaaaaccgttatcttaattattgcttttctaatgccaactttgttctagtggttgaattcaaatcaattgggggcaagtaggggggtggtgatttgaaattagaacctccattatcgagaggtgtggatgttggcatctgacataataagttgagcatgtttggtgtatatttggaattctgctggaagtttagggctggaaatgattattttgggttgtcatgacaatgctgctgattgaagtattttattggcccacttaattaaataactcctctgaagctaatgttgttctgttattctgccccactttatattgaaatgcgtaaggtaaatattgaggactttgcaatgtcatatgaccttcttttccctcatctttgtggttggtagacatacacaggaagcattttgatagctgttaatcc

SEQ ID NO: 44967 - DNA, 990 bp, Manihot esculenta
  Intron number 1 from transcript cassava4.1_016946m (locus cassava4.1_016946m.g) derived from phytozome v7.0 (chr-ID scaffold03542; pos 288607 to 289596)
acccagaaaccttcttctgattctcctcctttgtggtactttgatactttctctacattattatttacttcctgttctattttctttgctccttttttttgtctctatcttttatctttgctggttgtgtacaatttctttttttatctatgtggcgtttgctttttgcattagtctacataccatggatgcatatgataattgatagatttaatgtcctttatatgagttgttcttgtataaggttataaaacttctgtaagaatttattttgttcattggtattgtttagcactcacttggtacttcttggcttaatttagcacttctattatatatgttaattcttaaattgattgatgccggaacttttcaacatgcacttttattgaattagaagtttttagtactaagaaatgatggtttgaatttctttttcgtggtatctgcagtgggcaggttttagctttgctgcttcacaatatttgactacgagaggtgttagagtgattgcaacctagattatttccgttagttgaattccttctcatccatgaataaattaataataaaaacaatcgtgagttcttataatttttaaaatttgttgctcgtttggggcacttaagttttgagagactttcttgtttctactagaaatatattttaagttgatactagatcttttttttgggtctgtgttaaaattttccctttttattgtaattgtacaagtaaactttaacgaaaataattcctaacaatttttccccttaaaaaccttgacttttatttaaaaaaaaaaaaaaacaattcttttagttttcatgaaatattatatttatagtggtagagtggggaatttgagtattgctttttggcctataaattttaattaatttactttcttttaccgagtgccattgttattacattaatattcactttttgatatcaggataccaataatatttgaaggtaatttggctc

SEQ ID NO: 44968 - DNA, 418 bp, Manihot esculenta
  Intron number 4 from transcript cassava4.1_030336m (locus cassava4.1_030336m.g) derived from phytozome v7.0 (chr-ID scaffold04324; pos 276457 to 276874 reverse strand)
cacatctccacatccaatattggtggaactgtggagtaagatgcttttttattttttattttcctattaattgcattatttgatttaaatcgattcattttaaaaggttgaatttttttaatagacaaaaaaaattattgatcaatggcatctgacacaaaaaattaaattgaaatgattttatttcaatctcattttgatttttaattcaatgaaaggaaaaaacagttttaattgagtttatacttgattgaattctaattttaaaccgaaattaattaatgatttatatttaaattaacaaaaaatttaattgttgtgcttctctagcaagagtttcttttctaagaaatattctttaactcgtactttttaaattacagttatatagatcctaagcattctggacaggcaactg

SEQ ID NO: 44969 - DNA, 796 bp, Manihot esculenta
  Intron number 3 from transcript cassava4.1_028079m (locus cassava4.1_028079m.g) derived from phytozome v7.0 (chr-ID scaffold07402; pos 244607 to 245402)
cctaaaggtgtttacttttctccagttttgatattgatattctgtgctgcaaaactgcagaatttttttgcagtcatttacctagatgttttgtacttggtatcatttaacttaatttaatggattaacgactgcagtttattctcattgtcacttcacttgatctatatttatttgtttttcttatgcaatctgtatttgtgccctttcttacaatgtgtgctgcctgaaaatgaaagaagttctctggtcacaagctagatttccttgtttctagcatatttaataccttgatattttcattagtcaaaatagttcactgaagtaaatatacatattgcaactgtgtcaacttatcagaggtaacattatttggaagtgctgttatgaagttccaaacgttaataattgaggatttggtgttatgctttgatttatagcgtactatgttgtgtggaattgattcagaagtaacctcatttattgcattgaatggactgtaactgtgaaatttgttttaaaatgaaagcttcttttctccatcctttttatccgtattttctttctgttttctcatttaactgcaatttaatttataaaggcatgtagtagatggcgactgttttgtctagctagcccgatatcttcccaagtttcttggagcttcatgcctctgcttttgcttttacagcagaattcacaatcttctggagaatgatattttatttttgaaattgctaacaatgtttgtacaaaagcaggagagggagttccagatttatctgaattggaattt

SEQ ID NO: 44970 - DNA, 789 bp, Manihot esculenta
  Intron number 4 from transcript cassava4.1_007979m (locus cassava4.1_007979m.g) derived from phytozome v7.0 (chr-ID scaffold06582; pos 481580 to 482368 reverse strand)
tcgtcactgacactccattagaggtaccactgatctcaaacagaaatatctttatattccccctaccaacaaatgatagacttactttctttgtttatccatcctaaattataggccgcttttctttttggaaaacaaaaaaactagtttatttattaactttctaatatgcacctacaatttgttagttccataatttagcaatataaattatttaatttacaataaaacaatatgagtggagagtatattagaaaaagactatacaaagtttattgctgaattatattaactttctttcttaatagtaagcttatctttgtttaaatttgctgtttagggccaatattattaaaaggattgatgaagttgaatgctagtttggggcatttagtatcagctatcactttatagcaccaaacatgcatgcccaacgagattacattctgtcttatgcgagcttattctaaagccttttccattcacgattgtacaattttgatgctgttcacaaatactccagatgttatttgtccaactgataacatttaagtattgatgtataggcactttactatttactaaatctatttatgctttcactgtagaagggcaactttagcctgatttacttctctaaagaagacagcctttttttcagagaaaggtttttgagctgtttttaaatgtatttaatctttgagcttaacaaaaagaaattaacatgaattttcttttacctatgtcaacacaggtggcaaagtgggttgatccaaagagtgggcaatc

SEQ ID NO: 44971 - DNA, 829 bp, Manihot esculenta
  Intron number 2 from transcript cassava4.1_000315m (locus cassava4.1_000315m.g) derived from phytozome v7.0 (chr-ID scaffold03581; pos 725289 to 726117 reverse strand)
tccgtgtgaaagaagttcagtacattcaggcagaagtaagatccatatataactctttaaaattttgttattgttaaaggctgtctgttcatcttccctacctcactgtcttcgtattttctgtttgtttaaattttttaattattgccaactttatcaaaggcaagccaggtgcttgactcagtggttcccaggcaaggtgagttgctgccaaagtgcctcattttgtgtcttttgtgaggcaacttcatctagccattgcatagtacctgagccaaggcattagtttgcccaagtgcttgagatgcttggctcatttacttgaggattactcctcttctttttggctttttgcgtggtttgttggaactgcttgggttggatatgcatggtacattaaaaggctgaagattacccaaccctattgttttatttgatatctgcacttttttatgctctttaatcatcatacgtcagtggaaaaggtttcaagttgcttcttgagattttcatccattggattgccttaattttttgcatatgggtgatatacatatggctatatgtattcttattagttttgttactgtgagatgactatcaatcagtcaccagatgggaccaccatcagtaaaacttcctcacctttgtgggactagattttaggccattgctataactgtctcacggaatccctgctacagattttgatgcttatgaaattacttttatagaaaagtttagcttttcttttttttatttgcttgttattcttgatgagatattgagcatcttttgtttgaatatacatacaggtgaagataataaa

SEQ ID NO: 44972 - DNA, 295 bp, Manihot esculenta
  Intron number 2 from transcript cassava4.1_015468m (locus cassava4.1_015468m.g) derived from phytozome v7.0 (chr-ID scaffold07575; pos 244948 to 245242 reverse strand)
cttttaggtactttgcctagtattcttcatagttatcaaattttcaatttagtgtatcaaattagataatcaaatcagttttttttttaagaaaaaacaagttttcttttagaatttgaagtgaccttatggtttatgcttttttgttttgtattaatttatagaatccatgaatcatagatgtagggtggcactttgtttggtgtagctgcagatatatgttgcattatggcttccatacattatctctaacatttgttttctgtcattcccagaagggaaggtggtgaaactt

SEQ ID NO: 44973 - DNA, 943 bp, Manihot esculenta
  Intron number 1 from transcript cassava4.1_004445m (locus cassava4.1_004445m.g) derived from phytozome v7.0 (chr-ID scaffold07035; pos 323132 to 324074)
gcttctgtgcctctgctaaaggtatgaacgtcttctcaatttgctcttcttctgcttattacaatctttttgcatgaaattgatgtgtctttttttggagttcattagtttcaactttgtttcttttcttcttattcattaagataatagattcaagcaaaatcctacttctttctttgattacaagaaaaattatttgtttgattagaagaaaattttttgtacttgtacactcaacttagaaatttatattaacacgtagattttattatattttaaataaatttttattaattttaaattacatatcaaaattattttgaatggatatatgagtttgaatgtatgaaagaatttctttgattataaatagattttttttattatgaatcatattattttacttaaatattaatagctttttatctgaatttaataattgaaaaatatcaaatattatccggaaaggactactaattaggaagacgagagaaatatcggcatagaaatagacgtacgatctaacaattatttctttcttttttctttttttttttttttttttgggtgtctaaaggtgtatatgatgtaaatttaattaatgaattactgaccaaaatataaggtaatccgtgtggatcagtggttgtttatcagtgataaggcggtcctccacaaaattgatttgtgggacaatctaattaaattgccactacctaatgccccttttgcggttgcacttgtgatatctttctctctccgatcaacttttctatcatatatatatattgaaatttttaaagtattaaatttttctttgaagactactaaaattttaaggttaaacaaagtgaaaaaaaataaaataaaatcaatgggtggaatagaacatccttaatttgatgcaaaattctgtctgtcttaatttccagactactctttc

SEQ ID NO: 44974 - DNA, 982 bp, Manihot esculenta
  Intron number 1 from transcript cassava4.1_019018m (locus cassava4.1_019018m.g) derived from phytozome v7.0 (chr-ID scaffold06407; pos 98371 to 99352)
acccatctactaatctcagctggtgccccggtatgttcttccctattttgatagcggaaaaaatatatctcttttagttcataatggatcaaaaagatcactcattattataacttctgtcaaagttatttcttttgaattttttttatatgggttttgcttttgtgctgggatttatttgttatactcttcactgagctataattctgtgttgtatgtttatgggtgtttgtttgtttatgccccttgaaaggggcaaaaaagctcgtgagatagagttttctttgaatagagtttaaagaattgatggtattttataagttggtgccctaattgcttggatgattgctctcactgttgaagcaaatggaattgaaagggggaatgatagttaagattcctcttgaaattgctttcaaggtggaagtttgtgctctgtgtgatgtatctgcaactgttcgaactgcaggtggtgcaattgttgaaataagcatatttatttggaatggcatgtggtgtgtgcacccttctttctttattcatttggacttcactgaactctggaccaagctgtagtaccacggagctaaagctcattgatgcctgttgatatgaaattgctgcaaggttgatacctaagtgtgtttggtgaaactataatccccttacaatgtagatccttcctggttctttgttttgattcgagatatgaacaatggtttaatgttttagttgtaagtctatgttgtttgattcgatcttttcacttcactacagtccctttcatgatgttatcttatcaatgaagtgcattttcattttcgaaggacgtgaaagcaatatgaaatttctgtgctttgttaagtgtgcttggtttgaagatctcaacaatggtgaactcattgcaatatgtaaattatctgttgtctttttacatctctatccagactgtgtaagagctgaacctgtcattaacaagaag

SEQ ID NO: 44975 - DNA, 369 bp, Manihot esculenta
  Intron number 1 from transcript cassava4.1_014554m (locus cassava4.1_014554m.g) derived from phytozome v7.0 (chr-ID scaffold05280; pos 775 to 1143)
aaactggatgtaagtgcatgtctcctccatttcttttctttttccttgtttttttttatcatcttgttgtcgatgtgatgggttcgataagagtctcacgaatagataagttttgaggggcttataactctttatttaggaggaggtttttgcattgatgagtggtggaggttttttaagtaaaatttcgactttcaatttatttgaattattttcttgcaaaataaatcatatcaaacaatgagtaaaagacccacatctatttgttcatctttactcttcaattcaaaattgtaacagtgttttctgggtcttgctttcattttgatttcagttttctgcaacaaagaggagaaagacgttcctgct

SEQ ID NO: 44976 - DNA, 468 bp, Manihot esculenta
  Intron number 4 from transcript cassava4.1_022432m (locus cassava4.1_022432m.g) derived from phytozome v7.0 (chr-ID scaffold02538; pos 472352 to 472819 reverse strand)
gaatcatagtaaggaattatgctttctattgtatgagatcagaaaattctatagattatttaccacccaaaactgtcctcctactgttctccacgggtaaatggcttagtgttacattaaatgaccattattcttgattgctttctgaaaataaagtgagtttcttactgcttatgcttgtatatttgttatcagcattggtttgctgtagcattttctggattactaatatctttagttctagcttcacggtctatagtgctttttttttcctgcatcatttttacttatttcttagcgttttatgttgataatatcacgtatgaattataattgggcatattatggcacgattttcagaatggtacttttgtactactttacttttgttgtttgaattcttaatcgtcctatataaagcaattttaaaggtcctgagatttgtgtgatgattgtaacagatagtat

SEQ ID NO: 44977 - DNA, 730 bp, Manihot esculenta
  Intron number 3 from transcript cassava4.1_018832m (locus cassava4.1_018012m.g) derived from phytozome v7.0 (chr-ID scaffold08359; pos 660165 to 660894)
tgcaggtatctatttttttaactgtgattgatggaattgtagtaagatgtttcctgatgagagtgaagctgttgaacatttattctgatattttacaaatttcttttattctcattcttccttggtgatgcttcagaactgaagataaggattttcatcttattctgttaggaaagagcagtttctgttccaatatccaatcgaaactgatatattgtgttttactctgtttcattgtttgacttgctatctgtgcaattattatctaggtcaataattgtgtgtgactggatattcttttctgcctgaattatgctccagacaaatataatgattttggtattttactttgaaatttgtatattcttctaatactttcattaatataattactaaattcttatattagagcaattttctttacgctaagtgcccaatgtcaatgtagtatttggcagcatctattatgctgctagttacaacttttggcaacttgcgttgcataatttatgagtttgatgctgttcctatagaattcgtagctggggattgcaaagttgcacctctttattgttgaataattacctaagaggaaactgtttgcttttgttgcaaggtttttttgtgcttttaatagtttaaaataaaattttcatgttcatttgacaattgatggtcttcttattagtgtgcagggtgtgagcaatatcacaaattagctgataatctt

SEQ ID NO: 44978 - DNA, 326 bp, Manihot esculenta
  Intron number 1 from transcript cassava4.1_029644m (locus cassava4.1_029644m.g) derived from phytozome v7.0 (chr-ID scaffold08302; pos 74790 to 75115)
atttcatttttggtacagctacttctgcttatcaggtatttataatatatgcatatatttgttgtagtagttatgccgattttctcccatgcaatacccctttcttcactctaaagttagtgagcaaattgttcaatctttttgttttctgcaattctaccatgtttttttcccttggactttgtgcctggatttagtttttttttttttcctgatttctcattaataaattctgattatttattcacttgctatcctttgactgatatcttgtttgtggcattcattcagatcgaaggtgaagcaaataaatcaggtagaggacc

SEQ ID NO: 44979 - DNA, 1031 bp, Manihot esculenta
  Intron number 3 from transcript cassava4.1_006412m (locus cassava4.1_006412m.g) derived from phytozome v7.0 (chr-ID scaffold03352; pos 2884 to 3914 reverse strand)
tcctcttccttatctctatgtaagtgggtttttttatggcctgggatattgattgattggccttgttttgttgaataactactgctagtttgtttggcactgtcatatttagtatattatttgtcaacattttgcctctaccaaacttctattttgtccaaattttactctctttaattggtttttgttgaaaccacaatcaacttcagcttttgtgaaacatcaaagaatttcagctataaatccacaaacagctttagcttatttgtcagtagattgcgttaattagtaactaggtgtttgacaaaggtagctctatgcttttaataattttacgtggcttttatctaaattttgtgcttaaaatatccaatgtagggaatgcataagttgttcatgcaatatcgaagccagttgccttaagtggccagcattacattaagtgcaattgtgctctagttacttttggagagatgagatccagaaaatgattctgtaaaataaaatattgtttttctataactttttgaagcatttgtctcatgtagtaggctttttagtgtaatccaaatttgttttcggtgacaatttatttgattttgggaagattggttctaaagaatgatttttatactatttggtggaaatgaaaaacttagaatggtactcgaaatggtaagtcaatattaggaagatgttgagagattctagcacaaactttgtcaggaaaaatgtttgccccatataagcttccttaaagaaaacagaaccttaatatagggcagtaaaatttcagcatatgcacatctgcatcctttcttcctatgtgttaagagtaagaggtccaattatttgagcttgggggtttaccagagatacttaaaatatcattttgttgatgaattatcactttctgtatgtgtgatgtcatagaagttatttgttgtccatttccccccttctctgtcatatttgtctaaagaaattttgctgcagacagcagaccaaagctggttgctggatctcctgaa

SEQ ID NO: 44980 - DNA, 869 bp, Manihot esculenta
  Intron number 1 from transcript cassava4.1_022219m (locus cassava4.1_022219m.g) derived from phytozome v7.0 (chr-ID scaffold00277; pos 57010 to 57878)
tcgttccagtcattaagcactagcccgctcctgggtccgtctatcgaagtcctcagatttaccggaagcttagacccgaaatggatgcagataattcctccgctgatgcagtgagttctaagtttttatgtgtcattttggcttatcttgcgaaatagtgatatgggtttgatcttgtttagcgctaaaattttgggcgggttatttgttttttctggtgatttggagatggggatcttctggctgttgtagattttttttttcgttgataggatgcaatgacagttaggcattgtaatgttgcaaatcagaaccaagtgactggaagataattatgggattttgtaatttagttatgattcactgaaacagcttggtatttgcttgatgttgtgtttgatgcctaactggtgatgcccagcaattcttggatttggcagtatatactgaaacacacgcatctgagaattcaataggatgcttcttataattcagtaatcctaagcatatttttagcactatcaattagcactatggatttcagtaattttattgctgtcatctgtagatgttgcagctagtgggttaaaacttttagataagggcttacgccctcttgttgacccaaaattaatactatgtggggcagttatatggttttgtagtctctgcattccaaaaccggctctggagaatttatctgttttattttctctcaactctcaatcttaacatcaggtgtatattttgtctaatggctgcatcaggttttatgtcttacgattttttaaaaaaaaaaatataaattacgcatctttggttacttggctctcacattagatatctaatctattgtagctatcaactat

SEQ ID NO: 44981 - DNA, 950 bp, Manihot esculenta
  Intron number 4 from transcript cassava4.1_017803m (locus cassava4.1_017487m.g) derived from phytozome v7.0 (chr-ID scaffold10504; pos 76387 to 77336 reverse strand)
gatttctcggtgagtatgaagctctaacagtaatgaaaatgtcctcagctattaatttgttttttttccaaaacatggtttgttaaggtctgtttacaaacttctgttaatttttagtctaccttcttgtggaaatcctaatttttatcgttctttgttcttaagccgccaccttgtttagttgccccgaaaatttaggactttaaccttgcctcttaacggtaacatttatacagttactcatgcagaggcactctttattgctgaaaataggagttttggttttcatgggggcagctcttttttccaactatgagtttcttttgcttgataattataagaaatgagaaagatgggattcgtttaagcacagcttagttttgtatttggatagaaatatacgagatgattattacaatttgatggagggcgattaggctgagatttagttgcctagagcttcaaattgaacatgattttatgtaatgttcatccattgagatttatgattattcataagacggaatatgggtgtcagattattgtatacaaatgaggaggtaaaggatcatagatggagttttcaactagtgaggactgaaaaaaacttcctttaccaacaaatattagaatttcttcttgctgattgtgattgataatactctgcagaagttaaacatgggtggggatgattttgatgaggaagagttgaaggatgaagaaggttagaatttttttgtgaaataattgtatttcttgaaatttactagcgaaagcttgtcctggtcatcgtctcgaaatttccaactgcatattcaacataaaagatttttggtgggttcaactgtctaaatacccaagtactgctgtttctttgaatctcataacaatgctctttggcatggaacttctcagaaggagcaaaagtcaaggaagcagaggaaggcggc

SEQ ID NO: 44982 - DNA, 708 bp, Manihot esculenta
  Intron number 3 from transcript cassava4.1_004257m (locus cassava4.1_004257m.g) derived from phytozome v7.0 (chr-ID scaffold12794; pos 1610876 to 1611583)
agtcttccaaatctcatacagctaaaaggagagaggtagcgtttcctcttagtcttcgcccaccccttcttttgattactaggtggcacttacctaattattgatattatcacatcttacacttcaaatgtccaagaagtattactccttctgaaatttaattttggaacttttaatctatataacattagcttcaaatttaatggcatctcattttagcttttctttacttgttcctgtcttgatcttaacggaattgaattcttgaacggtcaaacctgtgccactcttactattgaggtaagacctaatgaatcacagcatatagaaatgcgccttaagctacctttccatgctttagcttttagatggtaattgtggaattataactgggaatttataatgggtttggtgtttgtggaaaagttcatatatttacatgacaatatttctatattcatgtgaaatatgcacttagtggacttattagatttttattttctctcatttcttgtctttttcttcactgcgagcttgcctacttattgatatatatatatatatatatacatatatatatccttctactttggagccactggtttgataaatcagtatggtttgactattaactttctcccatgtgtatcaagttatgtaggtaaaaatttatatgtaacttcacttactatgtgtagagatctgcaa

SEQ ID NO: 44983 - DNA, 344 bp, Manihot esculenta
  Intron number 1 from transcript cassava4.1_013960m (locus cassava4.1_013960m.g) derived from phytozome v7.0 (chr-ID scaffold05875; pos 1861301 to 1861644 reverse strand)
ttttttcagttttgacaacgcctccaattgccagggtactttctgtttgaatttttatttcagcttgattttcatatttcataataatcaaaacgattacgataccatttatctcattggttctgattgtttatttgttaattacgatacgggtctcagtacgagtttgagtctttcttgttcgatcttctttattgtttgaatcccacatgaaatttcaagtctatgctcctgatgcaatattggttctgttttcttctgctctggcctctgtttaacaaagggatttgttgctgagaatggaattaaaaccaaaaattgagctgatgtttgatgatttacag

SEQ ID NO: 44984 - DNA, 744 bp, Manihot esculenta
  Intron number 2 from transcript cassava4.1_007558m (locus cassava4.1_007558m.g) derived from phytozome v7.0 (chr-ID scaffold02912; pos 71210 to 71953)
gaggtttctaatctcaatcgccagttcctcttcaggttttttatttctagacttaaacctctataatttttaatactctattctgctataccttttcagttcgatatctctttctttactgttaagtgccaatgaaaattagaatatgatgatgccaactagtgtattgcgtcgtcagttgtagtttatgtaggagttgcttaattggttgtttgtctcctattttgaacttggaaattttgaaagaactttggcaatattatggctctcaactgggtattagatgaagtgaaattcttcacactttatatttcttttcatttttcaacaacttgcaaagatgaaaagaattgagtttaccggacaatgtccttccaggtttcttgtgaaggttatatattggctttgcaagttgagaggtcaatttttcacaaggcagaattagagcatcaaacattgggtcttaagctaatgttgcacatgtttttagatctatatatctgtggctacacgcatatgagtagttttttccttgtgttgcctgcaaatggttacgcctggaatagttagcatttgaatgtgtttttttctttaaaaaaaaaattctcatcatttaatgttcactatggaatcctagaaaatctgaaaagtctgcttgggcttgtagatattgcatttatcagttgctttgagcatttctataagaagatctcttaatcttgtttgcttattgcaggcttgaag

SEQ ID NO: 44985 - DNA, 866 bp, Manihot esculenta
  Intron number 1 from transcript cassava4.1_000142m (locus cassava4.1_000142m.g) derived from phytozome v7.0 (chr-ID scaffold05875; pos 667174 to 668039)
tccttagaatcgctgaccattacttacaacttgttgtgattatgaaacaactcaacaaaaatataaaagaaaggggagaaaggaatagaagaaaggaaaggaaggaagcaaagaatgagatcaaagaaggaagaaaagaagaaaaggaagaagaagaagacgggaaaaagaagagagaatagaaggaagagggagatagaatttaagagggagaatggaagattttatattatttcgaacaaataatatcctatttacaattttatgtcatttctctacaattctactcttagctcactcagtaaccaattggctaacgaataactgatacaattaggaggctctaataccataagaaaattggttgggcttagcttatctcaaaaactagctcaagtgagtggagggcccaaggttttatacggggaaaacgatgtttgatttttttttcccttaaatctattgctttgttattagtttaaaagttatttatttggttaattttaaaattaagtttttgttatttataaatttattgaattatttatcaaatagaattaataaaaatcaaaattagattgaagttgggatccatggaactcatttatgttcaaccagtataatctgcccttaacgggtaaaaatttgagcttttgatagcttgtgtaacatgctgaagaaatctaatgcatgtttaaaaagcaatatttcaggctctgaatctattattgtacttcagagatcaaattgaagttcatctccttaaacctagtttgtcttcctgtttctcattgttttgtttattcaagaacttccatttttttgttgcagttgtggtttcctctattctcagttttgcaccatag

SEQ ID NO: 44986 - DNA, 671 bp, Manihot esculenta
  Intron number 1 from transcript cassava4.1_003565m (locus cassava4.1_003565m.g) derived from phytozome v7.0 (chr-ID scaffold05815; pos 113587 to 114257 reverse strand)
gaggcaagtcgctttcaacatttttaactgcatataattatgtgtagaaatgtaatatggatgagcatgatcatatggcaaaattaagcttgcttgaaaaaactttgaagtcgtgcatttttgttgatttcgattctctggcgactccatcacttcaaatgtggacataaggagtccagtagtactacaaagtacaaagtacaaagtgcaattgtgtaattttcgtaaattcaaggaaaggaccctcgtttatcttttgttcatgaatctgattttctcttgtggctatctaagattggtctcattagatgggcaaaacaagccatagacttccttattcctgttcataactctaaaattatgccacagaacctgctaaattattttttctgttgattgtttatcataacataacttgattgaaatggcagtcaatttcttggcacttttcatgtttctactttgtatgagtattgctgatgtgaaggacattgaaaatggttaaagatttgcctgtatatactaaaagaaaaattttccccttacattttgcattattttgcatttttatgaaccttcggtttattattattattattatttttgaatttctttttgtggtcattttttttacaggagttcgctacttggagaaagccgtgtttaatctt

SEQ ID NO: 44987 - DNA, 948 bp, Manihot esculenta
  Intron number 1 from transcript cassava4.1_011405m (locus cassava4.1_011405m.g) derived from phytozome v7.0 (chr-ID scaffold08582; pos 38605 to 39552)
ctgctgggaggatcgggaagagcttgatttttaaggtcggttgatttttttttatcgtttgtgacttttcatatctaaattcatttttttaaaatcaattagattgtatatgaatagatctttatttctcaagagtgttcatctgatctgattatgtttgagcatgcgtatccttaagtttcaattgctaagattagttacaatgtaggcttcaattggacaatgtctgcaccagaactactcaggatcgaatttatatatttttataaattgtttgcaattccctttgcctagtttgggatttagaaaaggaatcgatagttgccgatttcatgtgatatctggcaatgctaagattcacaatgcatgtgtttggagataacagtgacatgtattgttgattggtttagcagtgttttggtggagttgcaattgcattcatgttgctgattgtttgagctggcaaccttgtgatttttttgcaaagcttatttgttgtggatgtactgattttttctttttcaattgaatgaccctttacttgctattatagcatagtcttcccagtcacttctccctgatagaaattgcagcttcattaaagagagagatgaaacaagttggagtatacaagggatttacttaatttaaagtgttggttggttattccttgaaattctagttgagtttcagttaaaaatgccaccgattttgcttgcaattgggatatcagctgttctgtcgatctcatctttgatgtaacagtggttcatgcacctgggaatgcaatttcttcctcaggatggttcttcaattccttccccagcattcacaaactgcactctcatactgttgcttaaaactacaaaattattgtgtttgcatgtttggtacgtagagcacaggaatgcctaagctgctgaataatggcgtacatgtaggtaaaag

SEQ ID NO: 44988 - DNA, 789 bp, Manihot esculenta
  Intron number 1 from transcript cassava4.1_009907m (locus cassava4.1_009907m.g) derived from phytozome v7.0 (chr-ID scaffold02912; pos 189732 to 190520)
atctaaatttataactgatcaggttatctttcttttttttttttaatttgataataggatcgcttatattattatttttttcaattataagtgtttgctttttgtggtcgattttcttcggaaaatttgccgtttgtactgaaattcgaatagtctgtttgtattgtatgttttgtttggttgctgaaggattttacttctgcttttttaggatccgagctaattagattcttcgattgcttatgtttaaatttcgtttaaatttgttattatcgacgagttaagctggtttgttttggagctgctttttttccccagttgttgatgcttagagcgtcgatgttaggctaggaatataaaaaaagagtgcagctttgtctgaatttttaattagccaaacttgaaattttgagattttgctgtttatttgatgggtacatctatattagcggagtgctcgacctcatacgaaaatgagttcaataacccttagattaaatatttatatcgagacttagagcaatcagctgaagtgtatataataaacacatgaatttagatataactggttaatttggtgaatgtcaaggtcatccttctaaaagtaattgtcctacttgtgtaatgatgaaattgtataagttttggaaagaaacatagatatcaggtttatggtatctcacatcattatgcatactactttcatcttggtggataagtctaatatatatatatatttcttttaatctcgttgacatttttcaatatttgggtaatttttcagcaaca

SEQ ID NO: 44989 - DNA, 872 bp, Manihot esculenta
  Intron number 1 from transcript cassava4.1_015934m (locus cassava4.1_015934m.g) derived from phytozome v7.0 (chr-ID scaffold04851; pos 631636 to 632507 reverse strand)
aaggcccagatttgggataccgccggccaagagaggtttcacaaccttcttctcctttcatttattctgcattcttttttcattttattaatggatatatgtttgcatgtatttggatgcattcttttttcattttattaatggatatatgtttgcatgtatttggatctcgatccaattgatccccatttccacattttcttgtgaaacaattgacttcattttgcttctgatcattttggtgtggaaattttgatgattggattggccacattttgcggcaatctttttatattagaggattcattatagttacaacccattaagggaaggaattgaattatagcgaatatcatagagcaatgaaataaaattgtgcacttgcctatgataaatggttcaaatggctactgaatgcaagaataaaccgtgattcctgtggctgtgaatgtgatggctgaagggtggcagatgtgattagggagattaagaaattcagggttgattgctgaggaatgatttgaacctaaaagaagacattttccccccgcaaattaggtgatagttccaaccaagactctttaattctgaatttaactacgaagtccatgcataagcatcttaatggtcaaggtgattttcagaggagtaatgcatttatatgtttcaaatctcaggatatgcaaacagctagcttccttcgctattttcaattccactttttttctttttcccttatgtttgtgttctttcttcattatggaaatctctccaagtttatgcaatttgttatttggatgatgtttcaaaaatctgacaaatgtttctttggcaaagatatcgtgccatcacaagtgcatactacagaggtg

SEQ ID NO: 44990 - DNA, 640 bp, Manihot esculenta
  Intron number 1 from transcript cassava4.1_031725m (locus cassava4.1_031725m.g) derived from phytozome v7.0 (chr-ID scaffold12794; pos 79665 to 80304)
tgttgtgagttttactctgtttctgtcgcttttgctgtttgcgattgtttatatagaactgggtctgattgaattttgttgctttgctgctgttcacattttgggattttgggttggactacttcttattaaccttttaacttttttgtgctatgggtggctaaccagagaaatttacccgactaattggattttgagaaagtattatcttgacagagtgttattctgttagaatcttatctttaattcttgcagtttaggttttttcttttactacactcatctgatcaacagtaacatttttatctgtgattttctataataatgcatgttgaattatgcctgatgaattccagtgttcttcccttccctttttttttttttaaattatatatatatatatcatgtgtatatggtaataacattgcatacgaaacataatacaatttccttccctcactcctattctatattttgattttctcttcattatcttgcatacttatttttccttttgctgcaaataattttcttaggagctgtatagagcagaaagtgctctgagtttgttaagctagattgttgaatttgaattacatttgtagggcagcttctataccaagaggcaagagtggtacct

SEQ ID NO: 44991 - DNA, 487 bp, Manihot esculenta
  Intron number 1 from transcript cassava4.1_009941m (locus cassava4.1_009941m.g) derived from phytozome v7.0 (chr-ID scaffold10524; pos 173698 to 174184)
ttatttggataaggaagatattcacaagatcaaaagtaagttctttatttgcttccttccctttttgttttaagatgacttcatgattttcctattttgcaaattgtcatttatttagttataattgaaattctaggaattttaacgatgccattaggcttgtaatggaaatctgatgtctgttttgcgaatcaatttacacctttattggtacaagtccatcatcttctctcatgatgctttttgaccaaatcatgaatgattggaaagtctcgatacagtgtttccacgagatattttgtaattgatcttatgtgatggttaggcctctttttaatggcgacgtttctatattcacatgctacattactacgtaatgggtcaattttgggttttgacgaattctcagttcctgttttgaacagtattttcagtgtgaaatgcttttgatttcaacatcgggttccattgtaataacttgcaggaa

SEQ ID NO: 44992 - DNA, 622 bp, Manihot esculenta
  Intron number 4 from transcript cassava4.1_005125m (locus cassava4.1_005125m.g) derived from phytozome v7.0 (chr-ID scaffold07902; pos 173117 to 173738 reverse strand)
ctgcaaatttttgtgcaatatgtatcctttgttgattgttcctactttttttcaaaacctagtattgctcctacttttttcaaaaccttgttttttcttccttggatgataataggtattattctgatttgagattgagctgtgtctaatagtaacttgctgcttgtttggttaatcgcactatgttgtaacttgtgcttcttcatgctatttagatttgaaatatcttcaaatatggtgatgtatgctttagtcagatcagtaatttggcatatttactataggaaacccatcatcaggaggatagggacactggcaacataggtatgagctttgaatttgagaaaagtctttgaattgcctctctaaagcaccaattacaatttcatatgattaatgatatgtaatggcatctttgcacatcatatttttccagaagtatgtttgtcatggtacttcattcatgcatttccttggcaagatcaatttgcacaagatagtgtgttatccttctattttacttgtttcgaacatagtcttttcaatctctgaaagcaagaaagcttcctttaacaaacttgttacagatccacagaagtctgtcccttctatagcagctatt

SEQ ID NO: 44993 - DNA, 790 bp, Manihot esculenta
  Intron number 1 from transcript cassava4.1_000364m (locus cassava4.1_000364m.g) derived from phytozome v7.0 (chr-ID scaffold05965; pos 111150 to 111939)
gtaggcttattcgtggtgcttcatcatcaagggaggtatggttggttgaattgcatagtttctatttatttaaatcacgctatgcatgtttacaccatttaagttaggattaaggttttgatatatatatatgatgccaatgtacaatttgaatgtttctttatgtctgaaattccactatgggagcatgagatctgtattggagttcaaacaaattgtctgccttggtaattgaccctcgactgagaatagttcgttgatattctcttgtctggtattgaatgaaacttgtcttcttgctctgagttttgtgttgcatagaaaattttacaagttgcgtgttgttataacattcttcatgcattcagtgataatactgttgttatcattttttgtatttgcatttataagacatttcacacatttataaattcacctgtgaccgctgttcttaaattaaataagttgtgtcccctcattctcattttccatggtatcaatattaaacttcctcatgtaaattctttaacaggatacaagttatcacatatgcaaaatgattacttctgttcttttatagattattcatgagttatctactcttaactgaaattggggcttatccagcttcaagagagttgggtaatttactctgctatatttgttacaatagcaataaactcgcatgggctgtataagaagtatggtcatcggctgatttttttgtaatgcatattctggcttcgcctttccagtgtgcaagacaaggatttgcattaggtttgactgt

SEQ ID NO: 44994 - DNA, 1021 bp, Manihot esculenta
  Intron number 2 from transcript cassava4.1_005065m (locus cassava4.1_005065m.g) derived from phytozome v7.0 (chr-ID scaffold12794; pos 1411741 to 1412761 reverse strand)
agtaagtcataatctacttgagtcttctttgtcttcttaatggaagttctcctgctcaacattttgaataaaagtgtcatatttcaacaaactgattatagtggaatgcctaggagctattagtggttgacttggatccctaattataagatcatggaagtagaggcccaagcataggtagaacatattccctaatgatggatgctcagttccctcaaaagaatgactgttctgaactacttgtatattctgcataacgtgtggcaatggtgcttccatgccaagtgacttcttattgttatcgtgtctagctcatcataaattagtgtcagttcttctcataaacattaacccaagtatgatgcttcttttgccatgaggcaccagatttaatttttctttagaactttcagtgtgtgaagattgaattcttaagtccatggaacattgtagatatatagcaagttcaaacctaataatgccaagaaatctgtagatgcaaacaaacattgatatttttaatgtactaaaagaaatgaggaagcaagtcgtgattgacgttctctttctgttgttatctgtacctgtacattactccatgcagatatgaggttgtagttggggattggaggtggtatttttatagaattttggaatagatgttgctttgggctaccctgtttaccaaaataaaacttttgggtttactctgtactaattgaagcttgtagctatagtaaatgtccttcactaaaaaaattagaaagaaaaatgtcttacaagatccattgctcaggcactttttcatgctgcgtaagttttttcctttgataattatcctgtggttttctatgacttctcttcttctgttgcctagctgttgactgttgtgcccatatagatgatacttttgttgcatgtgacttggaaatgaaatttgcatatgctagccttttctcattagaacatcttaataattggtgcagaggcagacggtgccttggataaagcaagaaaacac

SEQ ID NO: 44995 - DNA, 781 bp, Manihot esculenta
  Intron number 1 from transcript cassava4.1_030385m (locus cassava4.1_030385m.g) derived from phytozome v7.0 (chr-ID scaffold06688; pos 223807 to 224587 reverse strand)
gaggtcagttctctctctctctcagatggaaattgtttatctttgatgggtaatttcattattgtatttgtttgctgtcttgtcttggtaatgggattcttctattttgtctgttttcactcgctttttagctctacgtgttttcttttcgagttctattcctttctccaattactgtagttgttggacttgtcattccatttatttgcttttttccttttctcgaaagacttggggagccaaacgttgaattctgttccatttgagggtctttatatgtcgagatgctataatttggataatttctcctgaaataatttaactttgcttttctaaattagaagaaacgatatgcagttttgggtaaccaaagtagccttttaagtttcaagatttgcaatgcatgtacttcttatatatgcacaaattctctggctgatttctgcgattccctgctcaaaatttggataatcaaagcataattttaacagtaatttcagtgttcaaattagccatgaaacagccgtgctcaaaggaaagatagtaattttcttccgcttttgggagtgagattgatgagtgaaggatctgctatagtaggcctacatattcactgttcctggaaaagcttctctttcatgaatatccatttctttcagaatataaggatacacttctctgtttattctaattttaggaagtaatgatccacatccatgattgctaacagtgtcttccattttcaggtcctggttgttcctccattggtggaggtgccttc

SEQ ID NO: 44996 - DNA, 826 bp, Manihot esculenta
  Intron number 2 from transcript cassava4.1_016645m (locus cassava4.1_016645m.g) derived from phytozome v7.0 (chr-ID scaffold08686; pos 111125 to 111950 reverse strand)
atcctgtccgaagtgctttttctcttctgaatcaggtaattcctgttttgtgctatggataaaactgtacaacttaagttgtgtatgcatttaaatggctttgagttcgttgattaaatggtgaattctgcattggttggctttcatcaatggaacaaaaggaggcctgttgtggtgcataatgcactgtgattgggatatcatttggtcttctttgtgtttgttattaggtgcctcgtataacttggattctgtagctaataacgatttaaaactttgcagtatgttatcatgtaaatgaatgtaatccttagcaataaagcttcttgatatgatataatgccatgactcatttgtttcatgagacatgacaacctaatactctgatttagaatttgtttggtattgaggttgaaacaagctttttgaaaaaaaaaaagaagaaaaccattttaatgaagcagtgtgaagaaggtatttatctattttagattttttatactaaaaattcatcaaatttaatgtaaaaatatttttaaatagcctccaactaatatttttaaggtaatatttttctcaagaatagtgaaaacaataatgtcaaataaaccctaatgtgtcctttgggcttgaagattgaaagcaatgtcagggtgcttgatattatttggaccatgtatttgtattatatcttgattgttaaatatccttttcttttttgcctggatcaattatatgtagttgctatcatcttgatttcttgatgagatgagaaattgtaatgtttgcaggtgctagacgagtatcagaagaattttggtgattc

SEQ ID NO: 44997 - DNA, 431 bp, Manihot esculenta
  Intron number 1 from transcript cassava4.1_007180m (locus cassava4.1_004600m.g) derived from phytozome v7.0 (chr-ID scaffold09667; pos 63376 to 63806)
catccgagcgcgttcttcgcttgaattcgcagcaggtttccgctcctttactctcgcaactgctttgatattttgttgatatattcaatgcgattaatattatttttttacttgttattgaaccaaaatgacgttgtttggttgctgagcgtagcaatcggttggaattttaccttttttagggttcttttctggttcattttttcttttcttcaattgctgctatattttagaaccttgccttttgttttctcaattttttttattatcaatcgtgtgtcagtagcttcagttttccatctctgacatttaaatttttatttccttaataattccttgtgttgaagtttctttggttcctataagtaatttcttgctgtgtttaaatcattttattctgttgcatttgcatgcagattgaagacgttcgt

SEQ ID NO: 44998 - DNA, 746 bp, Manihot esculenta
  Intron number 1 from transcript cassava4.1_010373m (locus cassava4.1_010373m.g) derived from phytozome v7.0 (chr-ID scaffold11834; pos 11045 to 11790 reverse strand)
cacgcgtcttgcagcacttaccagctcttcaccaggtaattctcttcttctcccctttttttctcatacccatttgctcaattctcttgtcatgaaattcagtaatgggtttcttcaatttttgtggttttctctgtggggattgataattgaattatatggcgaattgtttgttctcgatttcatttttctttgaattctatttctgtgcccttacttcagtaaatgaaaattccaactctgcccatttggcctcatattcattcccctttttcttggatcaagaagaaattgataaatttctttgtttttggtttcttattagtgaaatatttatgaattctgggacattaagaggagagtatattatatttttatccaacaaaatattattaggttccctttttgcctgcaatctccttaattctatttgaatgaatcataatgattgatcataatcattagatatcaactaaacagacctttttcctgaactattttggagttcattgtaataatttgtgctgtctgaacgtaattcatttgagatctgtgcacatctttattgaatattaacactttggtcaattctcaagttgggttgctatttatggaacttagatattgagcatgccaatattgcaattataattctactgcaattcttagctgattctatatggtaccatgtttcttttactttcacaatttctatctccttaaatttgagtgtacaacagggagca

SEQ ID NO: 44999 - DNA, 737 bp, Manihot esculenta
  Intron number 1 from transcript cassava4.1_015245m (locus cassava4.1_015245m.g) derived from phytozome v7.0 (chr-ID scaffold00821; pos 279292 to 280028 reverse strand)
aatcctttctctcttggtaattatgcttctttccctgatttgattgtattgaattccctgtttgtgattctatccattgtgggtttgatgcatcgtttgcagattttataacttaaagaaagataagttatcaaaatctcttcaacccattaataaatgtctagaaaaacatttccttttttaaaggccttccccaaacaaatctattaattttcctgccaaacactgtcaggagacaaggataaagggaagtattatggttttcagcataaaaaatgttgaagcactgaaatttccaaatatgcttacgatttttccctgggaagtctcacttggtgttggtccttaatccaactgcagggcatatgtatactcaattcgcatgtgatttgtttcctcagcaatttttttttcattattcttttattccttcctaaccctaaattcacgttgttgtcttgttccttgctctagtgaaaacgttgtggctgtatcttgcaatttttgtgattattttttttcgcatggaaatacaatagctagtgattagatgtgtatgctagctatatctctggggataatcaactggattagtctaaagtttttgtatccacagctaactgtgtgttatactaattttgttgtcttagcaagtagttcctctgttgatgagtaaattcttgtttgctgtttgcataccagtgaaagagctgttatacatttgatattcaagactg

SEQ ID NO: 45000 - DNA, 524 bp, Manihot esculenta
  Intron number 3 from transcript cassava4.1_032887m (locus cassava4.1_032887m.g) derived from phytozome v7.0 (chr-ID scaffold05116; pos 49347 to 49870)
ccgtagaagttaggcattctttttcttgccttgctattgacgcctaaccagcaaatgcatttctaaaacatctacctctgtgttccaggccttattctgacttctatcttatttatacaatctcccagcctgtaatgcctgtcatccctttcttttattcatttggctattgaactaaagctcattagtcttttttttttcctttcttgcactagaaaggcatattattcgtctgattactaacatgaaatacataatttttaatcagatttgagtttgttaaatttccaataacagaaagagcaccattaacaagatgataaatgagttttctttgtgtagctattcgcctgcacttggcctaaatgtttctacattttaaataatttttatgtttaaataccacatttcttttgtatttgcaatgtaattttcctcggttatgcagatgagtatacaaagaagagaagaggttttctcaaaaagaagggcaagttggctattctagtgttctctgttgcttt

SEQ ID NO: 45001 - DNA, 625 bp, Manihot esculenta
  Intron number 2 from transcript cassava4.1_011155m (locus cassava4.1_011155m.g) derived from phytozome v7.0 (chr-ID scaffold11581; pos 1240388 to 1241012 reverse strand)
gctggacctcagggctcatctttggaaaaggagaggtatctaagtttggttgatattttttcagtcaggtttttaatcaagtaatcaatcacataaaataaatataatattcactagcaaatcctagctcaatacaagcaatgatgcttagcttctcaatgaaatctgccaaaaccacacagacaagttattctcacgtgcaagtataagtactgcaatctacataaaccaaccaagcttggatctttttccttaattacagcaacttgtggcacaccaaaaaggagagaagctctctattcagaggcttctttggctggtccacgaggtctaaatataacatggacatctctccaagttgaattcagttgtggaatatagtattcaaacttccaccattcattctttaaatttttttcttaattagcttctcctttcttttttacccttatggacttaaattcataacgctgcctccttagaaattcaaatattgctacaatttttttggtacattatgcaaaacatcttctcgattgttgccatttaaaattagtaattcacagtattgacgttctagcttttatttgctcccttcagggcattgttggcttggaaacagaat

SEQ ID NO: 45002 - DNA, 661 bp, Manihot esculenta
  Intron number 1 from transcript cassava4.1_000968m (locus cassava4.1_000968m.g) derived from phytozome v7.0 (chr-ID scaffold03299; pos 31420 to 32080 reverse strand)
gacaatagttctcaatcctccggttcacaggtaacgaccataatatcagcatttagttttatctttaacaccaacgtctcaacatgactcagcagtgacaggctgtttatgctttgtgtgcgtgcaagtgtcatacctatagcattatattacaaaagaatacgtaatgatatttttcagagaaatctgaggtttactcattttctgagctgataatttaagctattcaactatgtcctaggaaattggctctgtgttttgcatgtgtctgttaatacttcaatgccatagaaacaggtcttctattttttgatatatatatttatttttaattttaaaataaaaataaaataatattttaaatttctgtaagcttatatctaccttttcaatattgattctgaccgcttttccaccaagtattcattttaaataaagtttactcccttaaccctttttgctttctttctgtgtttgtgtgccactgttatgtggattagccatttagtcctcttgcatttggatccttggttcctattttcaagtaatttttctcctttttatgttgggcattttgtaatttgattgtcttttaggagttatgtctaaagtgctatgtcttgcagtttcgaccggtaggtcctccacatcaagggcagcc

SEQ ID NO: 45003 - DNA, 632 bp, Manihot esculenta
  Intron number 3 from transcript cassava4.1_015502m (locus cassava4.1_015488m.g) derived from phytozome v7.0 (chr-ID scaffold05219; pos 78858 to 79489)
gccctggagaccgaaccctaactcaaggattaaaggtgccaatagttatcttcatatttcttgatgaaattgcagatgtacttgaattcctactccttgcctactgaatgcttcttcaataaagttaattttccggggaaataaaggtcaggattttcctttctttttccatgtgtaataaactgccccccagaaagtgttcaagatacaaaaattgggaggtttgctagttgcttggcatctaggaaattgtctgttaaaaatgcatttgttgcaattaggaaatgattttttggtgaatgtttttctctatttgatttcatgaactggttttcgtacaactatagtcaattagggtattggaaacaatacgaagccattttcgcatatagatgtagagaaatcaaataattttgattccttttgagcagagacagcatgaaatcttcagaaattgcaagtcaatagtagtgtcaagtgaaaaaatggaatatttacttaaatgcttgacattatgttcaaagacattgaaattgctatactttcacagtatatatgtagcaaggagactcatttgggctcttctatgtgctccagggagatcccacctaccttgttgtggagaaggacag

SEQ ID NO: 45004 - DNA, 592 bp, Manihot esculenta
  Intron number 1 from transcript cassava4.1_002736m (locus cassava4.1_002736m.g) derived from phytozome v7.0 (chr-ID scaffold05859; pos 246654 to 247245 reverse strand)
agctacgagatacaccaggactgggtaagttctttttgactggttatgattcctgtgcttgattttggtgcttgagagaagcgggaaaaacaaaattttaaactgcttcatgtttatttatgtgaagtttggagtttgactcgttcttaaggattgtacgagttaacaatttttaatatgaaagaaacggcaatgctcttttgggtgcttgtatgatgtttgtggtttttttttcccctgtttattgatgatagtaagatattgtgagatagtaattattcttttttgttggtttaattgtcatttgaatgaggtactttttcctttgtaactatagacgctgacacatgaaaacattatttttttcttattggatatgttggcaatatggaagtttttgtgtttgttgttagaattattgtttaagcttaagtggaatttataagatagacgagtgtgttcttcgttggatttattcacacatttaaattggcttatgtttgttagacgagtgtgttcttcgttggatttatgcacacatttaaaattggcttatgtttgttgtatactgtttcagttcccattggtctat

SEQ ID NO: 45005 - DNA, 652 bp, Manihot esculenta
  Intron number 2 from transcript cassava4.1_033538m (locus cassava4.1_033538m.g) derived from phytozome v7.0 (chr-ID scaffold05019; pos 10539 to 11190)
tggaagacactgttctctactcctttgtcgttaaggtatactgtgccaatactctattacataacgctttcagtttaatcctaagctaatttattaagaacttattacaagtgcaaatatttaggtgggtaattttgagcaagacaaaaaggaatccaacccattatatatatatatttgatctgatgaaacggacagcatagacgtccccacatagagaattggagtggagattgtcattttcactttgatgaagaatttttggagaagtacttgagcatatatagcttattttcattggcatacccaccaaaacagcatgcactcttacacgggctctctatacgtgtcaagttcatatagccttattttttggttgatattttgaagtctacaaccttataacttacgaaacgagtctagtacaactacttaagctaatactcattaattcatgaagttattattaccacttctactttacgtatattgatagtttgagaaaaatcgattattataggagctttgttgttagaccagatattgtaataatgcatgtggtttgttttctttgataatatagtaactgcaggttgatgagatagttgtatcttacattggattatgaatatgtatcgcagatagggctgga

SEQ ID NO: 45006 - DNA, 689 bp, Manihot esculenta
  Intron number 1 from transcript cassava4.1_002813m (locus cassava4.1_002813m.g) derived from phytozome v7.0 (chr-ID scaffold03850; pos 48647 to 49335)
tctacaaagcgtaagtattccttgatcaaggccatttattgattaaatcattttcagtgctcatatttgtttgttacgggagctagtaactattgtagtctgctcttaattgtttaaagcgcatcatttgaatttgcattctcgtgctgataatcatatgcaagattactgtaaaatttataaacacatgtttcttttgccatatatattccttagtaatataagtaatgagtacttctgttgtaaattgtaatgcacttgcaatgtcgatagtgatttttgcatttgaaattctgcagtggtattgaaagaaggaaaagcacaaattagtcaaaagaatgttttatttcaagaattgtgtttccattggcaggctccttaaatgtgggttatgttatatgattgtttaagatgattaaactgcacaatgaagattttttaacagaaaccaattacattatcagaatctaaaaatgttgctgtgatactatgtatccataattatgttgaacattacagggctttataactcttgattcattactgtccatctttcaagctgttcttattcccaaaatactgtgtgttgtcgttacaatctgaggattggttgccttctaacctggcgttcctgatgcattctttgatatttaggtttgataaggagcttaacaaagaagttgctatca

SEQ ID NO: 45007 - DNA, 814 bp, Manihot esculenta
  Intron number 1 from transcript cassava4.1_014427m (locus cassava4.1_014427m.g) derived from phytozome v7.0 (chr-ID scaffold08368; pos 30452 to 31265 reverse strand)
cactgttcttgtcactggagctggcggcagaactggtactttctctctgtctcagtttatttctcttttgcaacgtttggttgttgtcaaatcgatggaagcggacagggaggaattttgatgtttgattttatcttttggtaatttttgaacctttcagattttgggcaaaaggggaaaaaaatcttgtataaagtttataatgtgtgaaattgggatttttaggagggctctacgaatgttttctgttgataatctcgcgcctttatgtagtgttgatgacaattgaaaatagaattgttacttaattgtgccgtctgattagaagccttgttggatgtgctatctgatattaattgagtataaatttaggcttaaagtggttgaatcgctcttcttgctttgcatccgtaaatatttttgctttagaaaaaggcagagaagggattgatgcagaatgtagatatgcaacttcagcatgctacatatgtttgctcctaattacatcaatgtttatttccacaatggcagcaaattatggactttggattgcctgaattgtgcaattatatttcggcagagtggcttttttgatagctctgtgatattatagatgattcacttcatttgatcttgtagtttctagtgcttgcacattttcctttcgttactgaggctagaaggagaggatgtaacctcttcctcttcttattttcaatgaagtgatgcattgttgtttgtcttttctttgccatgatttgttgcgttatctatggcaggttcaatagtatataagaaattgaaggagagatct

SEQ ID NO: 45008 - DNA, 852 bp, Manihot esculenta
  Intron number 2 from transcript cassava4.1_018527m (locus cassava4.1_018527m.g) derived from phytozome v7.0 (chr-ID scaffold03859; pos 463045 to 463896)
cctaagaagcccccgactgctttcttcttcttcctgtatgtgagtttttccttctcaatcttgtaatccttttatttctttctcatgttctcattatctgctaaacaaccaaatgaagaccttaacaaattagtttatatactttctgacttctgatggtcttgaaacttgttcatctttaaaaattttctctagttttgtgggatttcctaattagcacttgatgcttatggctctttttccttgttatatggtaccaattgtattcagacgccaagtaaaagaaagctgtatagtatttaattcttttgagaacagtatatattcttgtgtttttccacttgttgaatgataatgtcttattgaagtaactgctctccaataaataagcatggtatactttgctgggatccgtggcaatagctatgtctgcttagtctttcatttttgtggtaattttgttattttcgcatgtatcattttactgttgctttaactaggttgccttattaactttattaatttatggtattcccaccacatattatcaatagttagctaatttcatgtgacgacttggagcatatttgctgggccttgtcttagatagatcctatattcctatttcgtatgcttttctgattcttcttggcattgctatttttaagctaatatgtggacaatcatcattgttgccttactgaacttgttctttgtaagttctaggtgactactgattggttctgtttggtatatatacaaacataaataccttttttgcttcgcctgctaactaaattttactttgattttgaagggaggattttcgaaaggattttcaagagcagaacc

SEQ ID NO: 45009 - DNA, 799 bp, Manihot esculenta
  Intron number 1 from transcript cassava4.1_031620m (locus cassava4.1_031620m.g) derived from phytozome v7.0 (chr-ID scaffold06707; pos 41229 to 42027 reverse strand)
ctgggaagtcggccttgactaattacgtttgtgtctattttttctttggttttttggtttactgtcagtgtttaatttattggttctctctaacaaatttcgagttttgctaccttgagggttctgttttgactttagattgtattaagtaacttcttctctggattgtcaaatattatatgaagtaggtggttacaaagttatttcctttgcttttgcatgctggataatgatgactttcaatttggctgaaagtgcttaggggtttggttgaagcagttagagagatttgtggtcttttaggagtttggcatttgcatgctggataatgatgtagtttcaatttgcatcatgttggaagaatctctttttgttgatgttttcagattctagcctcaactgtggaatactgaatgcttgacacacacatataaatatatatagagaatattaatacatttatagtgtgagttgttcacttctgacagatggtttttcatttatagagagcgctagggaggaaacatacatattttttttttctcagtattgaattttattgtagttctgttttcacatgtgctgaaatcacttttaaattgaaaatatgatattctatggaattaggttagatattttcttcgtttttgcttcaaatgcttgttgcatttacttatctagtattttgaacagcatgcatttgttgttctatcagcagcacttatctgacaatggaaagtgctgatatgtgttttatggttcaggttggcacgaaggtttctgctgtctctaggaagac

SEQ ID NO: 45010 - DNA, 814 bp, Manihot esculenta
  Intron number 3 from transcript cassava4.1_011878m (locus cassava4.1_011878m.g) derived from phytozome v7.0 (chr-ID scaffold01046; pos 23853 to 24666)
gaggcgctctcaagtaattttcattttttactcataacgacctttttttccactttgtttttgctaattgtgattgtatttaaccttttttggtttattatcatctgcttaactgagatgtaaagtagtcctattgtttctttgtagggtttctcgttactgtgtttcattttttccactgtttcaatttatattcagttgatttgttcaatccattttgttaatatgtggcaatattttgaaataccagtcctggaagtgtagaacatctctctgtcgaagaatcttgttctctgtcattcaaagcataccatctttcagattgtgcattttttcttgtaaagagcgtttgatttaatttattggttaatcattttgaagcatctatttgcggtttttcagttctaggaatttgaaatgtctgaactgtgccttacttggcttattttccttgtcatttatccaactattatatatgttttccatcccaaaatttcatgtatatttctcttcctccaagttttgtgatcagaaaggatttctcactgcaaaatttgcataatttctagaaagttttctccctgctgctagaaactttaaagcgcggtatacaattgtctattctccttatggaagttctgttgaattcatttctaatattacttgtgtgtacaattctgatagattgaataatagtggctagataatttaggcctttccaaattacgctccaatagacataacgtctggttgatttacttctgtattatggtgatcagttacaatccactggaaagaagggaggcaagcaagg

SEQ ID NO: 45011 - DNA, 928 bp, Manihot esculenta
  Intron number 2 from transcript cassava4.1_029479m (locus cassava4.1_029479m.g) derived from phytozome v7.0 (chr-ID scaffold08100; pos 424070 to 424997 reverse strand)
cacttcttggaaacaagtgagattacattatcttttcttttctctattgtctcttgtattgaggtttctgggtttttccatttagcaggcattagggtttatcttgttctgggcttggtttatatctatcctctaaaattataattattaggttttttctttgatcttataaattacaattatctaactaattattttctattagattgcattttattgactgaaacttactttctttttccatcatgtcaaattataggttttttaagatgataatttatttatgaatatttttagtttttttcttaaaaaatctacttttacaaagttttttctagaagctttggaaaaataattttctctaaagggagattgccaattgttcaatttccagtgtaagcacgaggtactaaggactaataattacagttgcacaatgtcaaggctgactgaaactaatagatgaagcagttcaatgaactgaatttttgtttttttatgaacttcatcagatttattaggtggcagtgactgctgggtattatactttcaagtacttttttctaaaaataaataaaatttatctttaaaatatagaaagaaatgtgtaagacattcgaattcaagttttatatctactactgttttgaagtcataaattcatccttttggaaaaaatattttttcaaaaacccattttatggaattttttttttataaaaaagcctatatgtatggtgaaattattaagtattgattatatgaacaataaatttattatagttattaattatttgtattaagtaattttttcttacacgtttaactgtcaaattacctgataattttccatgaaaatgtctataacaaatcgatccttttattctgctcaggtggtcagctatagcaactcacttgcccagaagaa

SEQ ID NO: 45012 - DNA, 527 bp, Manihot esculenta
  Intron number 1 from transcript cassava4.1_026763m (locus cassava4.1_026763m.g) derived from phytozome v7.0 (chr-ID scaffold06980; pos 118149 to 118675 reverse strand)
ttgtatccatcgctaaacttctgttttcttgtagtgagagcagaaaaaaagttgacaaaaaaaaaaaatcaaacgatgtcagagatagctatggattgaaaaggctaaagatcttctggttattgtagaagttgtgggtgcattctctagccataagatgataagcaaagcataagatagcaactttgttgacaagatttatcttgatttgtataaactatattctatgcgataaatacttggtatgtatccacatatgaagaaataaacaagtaaatcctttaaaaaaaaaaaaccagatgaaatatactttaatgtttccatggtggactggattccgaggcgtaacttttacttcttggtgtccaaatggcatttagaaaccaaagactactcagcaaatttaagaccaaatggatttgatgacttctctaattctatgggtaatgtgcaaaacaaagcttccacatatagaaagagcatatctagctttcattaagggattggcactgctgtttttggtagca

SEQ ID NO: 45013 - DNA, 506 bp, Manihot esculenta
  Intron number 1 from transcript cassava4.1_010562m (locus cassava4.1_010562m.g) derived from phytozome v7.0 (chr-ID scaffold11784; pos 263897 to 264402 reverse strand)
gaagacttgccactgacttcataggtaatagctctctctgcatctgcccaaatatagtaattgcacccaccagctgtttgtttatttttctgttttagaagtatatgcttttgcctatagcagatttgcatgactgcagtctccattcttcttataattattattcttattattttgagtctgcagtctccattgataggatatgggttgaattttatttcacatggataattaagtttctgcattatgggctggacaccagaaaatgtgtgatgtgtcacggaagtgggtggattcatagctaccctcttgattatatggttgatttctactgtttcatctcaactactagttgcatgttgtggccagccagctttttttttggaaatgccataaacagtaaattatacagtggatcatactgaaaattaatagaactgataattatatgtttgtttttctaaattacagctgaggcaatcggttatacaaaagcaattccagct

SEQ ID NO: 45014 - DNA, 859 bp, Manihot esculenta
  Intron number 1 from transcript cassava4.1_019590m (locus cassava4.1_019590m.g) derived from phytozome v7.0 (chr-ID scaffold08359; pos 1369234 to 1370092 reverse strand)
ttgcattcagatctgatccaattagccatttgcaggttagtgtcactctctctctctctcttccctcttccttgcggtttcgagttctgctcgttcgcttgaaaatttagctaaacaaacgaaacgcactctttcaagttttacattgcgtgttttctcgtcaaccaaacagacctgttcactataatttcctcgatactttgttggttgtacttgatgttctctttatctcaatgaatctctttttgtgcagccacatttggcttggatctgttagatttttattaattagggtagatgttcatagaaagagtttagattgtgcgaacagttttagtttggttgatgtgggaattaatattgcttaattctaattatgcttttcaattaaggcgaacccttctttgaaatttgatgcgatgttaattttgaaaatctctctctcacgcataaataggtgatgatgcttaaaatagtgaatgatgtatgtgactgtgatcggtgataagtcgtgggaactgtaaatattaaatttttactggccacagtccgagatacattcatgactgcaatctgcatgcatcgctattagaaagttcttgtaaatcatttgtagttttgctctgtgtgtgtgtgtgtgtgtgtctgttagttgtaatccttttgaaaaacgtaaagtttatatgcatatgaaaatctttatccatctgtttgctagttttgagctctgaaattttcgttattcttctttgcacatttgctagaaatttgtgtatttcaagttgagtttttctcttttcttttctgatggataatatttgcagaccctagcctttctcgtataacagttctaatcgag

SEQ ID NO: 45015 - DNA, 855 bp, Manihot esculenta
  Intron number 1 from transcript cassava4.1_006991m (locus cassava4.1_006991m.g) derived from phytozome v7.0 (chr-ID scaffold06582; pos 70536 to 71390 reverse strand)
cggatcttggaggggataaactctctaaggtttgttgagtttggttctgtctgtgtggcttcttttttcgatttttcttgttttgctttgtggattttttatttcgagcgtttgtgtgtgatgggaatttgacgtttggtttggatttgggatctgatggttgtttgataggtgtttgatatatagacgaagagagagggagcaattattattatgcattgctacttgatcttgctttattatgaagtgtgtatctctaagaaaatgctaaacattcgagtcaaagtggtcacgcttgtatatttcactgtgtttgtgtccattagctttgatgttcatttcaattatttgaattgttatgcattgtacagttacttttacttgagaatcatgtaggcttctcaggtaggcggattcgatttgtgtgtgtgtgtgtgtgtcatctgaatctcagtatggatttcaccactgctcacaagcatatttctggaattactaatggattggatcaaaaacagtttgtttccgtctcaaagcccacaaatttgtagttcctttgttcttattttaatgttacaaaaggtgcaaggtattggtctgtattttcagagattcctatttggcttttgctaaatccacatagaaaatgcattattctctgttttatcaattgatatatttttttctaacattagtgaattagtatgaatttgggaaggcgttataaaactgtcctagcttatgtctttgtactgagctaaatttatttacttctattttttcccagatttatgctcatctctttctttttccactgcagattgataaagagcgggctggtgtgcttgttggaac

SEQ ID NO: 45016 - DNA, 932 bp, Manihot esculenta
  Intron number 1 from transcript cassava4.1_001802m (locus cassava4.1_001802m.g) derived from phytozome v7.0 (chr-ID scaffold12783; pos 97589 to 98520)
ctccgtgccttttcttctttctcttcttctttaaggtatatgtgtgttcctttcaaaattgattcaattctgtgctctaataggcctgatttgttaaaaacagattgccgttttgttttgcttgttttgccttcaccacttcttttatctgcttctccttgttaatgggttccttctgtttttctgatattgcttttgtttttttgagtggatagacacagtttactgtggttttgttgagacaatgattgaattataaattttattaagttgggatctccctttttatttgatttgaagctcaagattggacattttgatctcttttcccgcttgtatcctgattagttttccatagtttggttatttttatgatggaatctgggttttgagtttgaattttttttccgatctgtaaactgggaaggctcagtgatttggatccgtgtaaattgtcggtatacttaagtttgaatgtttactgtagctattcatgttcttggtgcttttgtttaattagagttcaatatgtaattgagtgagtgaagctcttatttgcctaagtgctcctttgtcgttgggttcttttgatcgtattgtatgcttaattttggttttattgcacctctcttttctgtctttttcttggaatccagaaagtggatggcttaaatatagtttaaattaaatgattctaaatgcaaccatttggtatctgttttactggtttcttggtgttctgtttgggcccttgggccgttgattttaccaatgaagctcttgatttgaattgactatgatgctatagaacaccttatccttgattttttttgaactcttttcatgttattattcattttggggaaatcatattcttttctacatgcatggaagtttaatgttctttttctgccatatcattacacagagca

SEQ ID NO: 45017 - DNA, 718 bp, Manihot esculenta; identical to SEQ ID NO: 44020
  Intron number 1 from transcript cassava4.1_010892m (locus cassava4.1_010892m.g) derived from phytozome v7.0 (chr-ID scaffold05875; pos 106848 to 107565)

SEQ ID NO: 45018 - DNA, 989 bp, Manihot esculenta
  Intron number 4 from transcript cassava4.1_023729m (locus cassava4.1_023729m.g) derived from phytozome v7.0 (chr-ID scaffold06556; pos 137160 to 138148)
attgattttgaggaacgccttgaagcagttagaaggtgcagttttcatacgcttccatattcttcaaacgcatgcatattgaatgcatctttaccggattagcaatcctatcaactggcatttaattctatcataattattgaaggcaacgttgtatttactacttaggccttgttttgtttaaaatactctgcttcctgggaagtatatttcccataaagtacacttctaggtaatttattgctaggaagtatgacataattgtgtttagtatacaaatgggaggttgattgctcctaagttgtaaaagaaaaataatgtctataatataatttcaaatgtaatcaattgaaggataattagtaaattctatgaaacttaattagaaaagtgcaacttaacaactcccatttagttaagttacttcgtgctctacttccccggcagttaacttaaaatgtgaaccaaaccaaatgagaggaagtgccactttgtttacttaccccaaccaaacaagaatgtcaattttgtaatgcatgaaacacactgttttatttccctcctttcctctagttagagacatgtgattgttgattttttgaattattgttgattttttgaattatgtacaatgtattctgccacgtgtaacaactggtgttatctgaatatgcatacatgcgtttctattcctggttttgccagaaattggtttttctgtagaagtgactgtcgtacattagtatgctgctgtaccctatagtttcctcatatactgcttcagcacttcttttgttaccattccttttatatttttacaattatattttgatcgattgctttaaatcaatttcaagttacgttttcccattaaatgacaatggttgattggtcagatttgcttgcttttcatcatttttgcagttcttttccctgaggatcattccttctgttactactcaggtcagcacttgaacagaaaaaggcag

SEQ ID NO: 45019 - DNA, 900 bp, Manihot esculenta
  Intron number 1 from transcript cassava4.1_000027m (locus cassava4.1_000027m.g) derived from phytozome v7.0 (chr-ID scaffold10954; pos 158223 to 159122 reverse strand)
gcagtgacattgacgtttctgctgcatcaaggtaaaccattttaccagatttatttgattttcataactatgctgtggaattttctttggtcagttacaaagtggataaatagcaagctatgcaagctggcttggtcaagatttttactagggttatgtagattgatctgcaaattttatacattattttattttttataatctgactatatttcttgatattgatacatatgaatctgttttgtaatgtagatattggtttatttcagttacatacttaaaccctgtgtagatcaagcctccaggtttttctgatttttttgttttgcttatataggattgatggttacatggtgaacattttaattttcacctaataatatatcgtttttatatctttgtccattcttaaattggctggttagcttgaactggaaagtgctggggactggggttgcatttgcctctgtatagttgactaaaaatgttgcattgtgatttgcgaacccatcttagtctgcacatttgctaaagggtcatttcacaaatttttgaggccaaggaagtggtcaagcaaactgtgattttcttccatttgcctttgcatgtagttggtatcatatttcactttcttcccttttttgtcttctctgtgagtactgcagtaacatcaatttcgctcttaattcctttttttgggtcaaattttcgctcttaattcaagtcttaagatatgattgatagttcagtttccttttttttatgggtgtcaggaagttcattgttggctgctgtttaactactggttacttctttttgttcttttttcttttttcttttttcctttgtgaaatctgtattacagggttcttgcattggccacttgcttcacaaccaaga

SEQ ID NO: 45020 - DNA, 553 bp, Manihot esculenta
  Intron number 1 from transcript cassava4.1_006097m (locus cassava4.1_006097m.g) derived from phytozome v7.0 (chr-ID scaffold08359; pos 373612 to 374164 reverse strand)
actctgactccgcatccgttgccgccatcgatcaggtcctcttttatctaatttcattttgtttcgattggtataaggcgttttctactcagtttagttacattaattccttattcttctttctgttgcttttgttaattcattgattgtgatagtttatggtttgtgttcacttcctaaattcacgagtcaacgagttgagttctgtgatttcacttatcgtttaattaagtttacgatcttattgttctttctagtcctgtattaattaatttcgtaatcttttgattagtgctggttcagagtttaattaaacacacttaattttccaaaatatcgaattatagttgacttaaaaaaataaaggaaaaaaaaaaggaaggcgtggctgagcccctaaacatgtattttcacaaactaggaaacacatgcttacattcaaatttttgaatttgtacttaattggatgttaagcctttattactttccctccttttcttgatgatgatatcctcttatctgatttctatctttctttcttctcgctactaga

SEQ ID NO: 45021 - DNA, 1016 bp, Manihot esculenta
  Intron number 2 from transcript cassava4.1_005526m (locus cassava4.1_005526m.g) derived from phytozome v7.0 (chr-ID scaffold05338; pos 19811 to 20826)
ttttgcttggtttcggtattggctttgccaatcaggtatattactctcttctttttttaatctttcatatcttgatttccttgcctaatgttttctttgcttggatctagaaattggtatctgtgttttaggatttttttgagcgtatttaacaagttgtctaaagagaaaaaaaattatgcagtgtttttattattccttctgtttctgggtattacgtcttttttaaatggggtttaagaattgaatttatctagctgtttgttttgttttattgtggattaagcttttattcagatctgctctgtaatggttctgtgtatagatcagacaagtaggtctctttcgaaaatgacaaaagatgtatttttgataacaagttgtttctgatccacatatgggcttttagtcccttcttgtagttttgctttctgatgttgagaaaccaaaacactgatgtgtttggttcctgagaaaagcctggaggaaaaaaaggaggaaaatgataactttcgcagtcaaaaagatcctcactttttaaaattataagaaatgagacgaaggcagagagaggcgttgtttgttttcttttggttttttttttgtttaaaaccccctctgccaaagtcagatatcgaggcttattttctttgtatgacgtcgctggcaagtggtaccttttttcagctaaattttactacttgatgatgctacgtagaatagaaaattggctgcctgatagtagcttattaaatttaaaaaaaaaaaaaagatgtgaaagcaaaacatttgcctcggttttcttttgttaaattttttttctttgttcgatttgggagtcgattaaaaaatagattgattttaacccaggaaacaccggcaacaggacaagaacctgtgatcctcgagagagacaattttgttctatttaattaattcatgattggtttaatatttagaaggtgattaactcaatttgtttgtaattacagtctgtgcccctctacctctctgag

SEQ ID NO: 45022 - DNA, 919 bp, Manihot esculenta
  Intron number 2 from transcript cassava4.1_025387m (locus cassava4.1_025387m.g) derived from phytozome v7.0 (chr-ID scaffold05280; pos 590137 to 591055)
gacgcttttttggtgcctactccttattatccagggtacgtatccatatctaatttatttaaaaacatcagtttatataactataatacattttatctacaactgatataaaatctgaaaaaataattcataagtagtttacttacccatcacccccgtgagagagagattgagtagtaatcaaaataggtcaataagtcaaataatttaaatgtcaacatcccaactgatctcttaatagctaatatgtcacaatcttagtagctattagagcaacctgtattattggtatgagatgaatagaaagaagatgcgatttccaaaagggtcctcgagtgtcaggattttccatgaagactaaagaaaatggagaggtctatcttcctcggcggctttgatttggggtctaacaaaagttttttatgagaaaaagaaatgtatgtttaaaaatattaaaaataattttcatgaaaacaaatggtacaaaaaaatcaaaaacaacctttgaaatggacaaagggagtagtgataaggaacaatctcatcagctcaagtttatcttatgtatatctcaaatcttgttgttgttatcattatcttatttttctttatataaagccataatatctctgtcttgtacataaagtcatgcactaatatacatacctaataatctatattcattaatatgttcatgaacactaaaattaggaatttttgccatgtcgtttgtccttatgctcaggattgattgcttggaacataattcatgcatcatcagtacaatagactgtaattattaattatttattcactagattctccctttcgataaaattacatccacatgaacgacttttatattctgatttactctgaattcttagctctcctattgcagatttgatcgagacttgag

SEQ ID NO: 45023 - DNA, 419 bp, Manihot esculenta
  Intron number 2 from transcript cassava4.1_024807m (locus cassava4.1_024807m.g) derived from phytozome v7.0 (chr-ID scaffold11297; pos 541573 to 541991)
agcgtgtttggtcaaaaattgagttaacaattaaagtacgtatctctgattctgatcctgttattgtattaggctatgtttgtagtatatggctgctactgagatatagctttagaagagacatcaaagttaaaaaaaaaaatctgattaaaagttaacaagctgtagtctaatccaagaaaaatgctgctttgtgtatccaagtcgccatcaaaattaatagttccacttaattgagctaatcccaatgaattagagttgttaatctttgttttttccccatgcagttgaggatgagattgagtaaaaacatttgatttgctgtttcttcttaattatctctgctttatttccttatcaaccaattctatgtttatgatattccctaagaagaatgaatttataacactaactgcagg

SEQ ID NO: 45024 - DNA, 856 bp, Manihot esculenta
  Intron number 2 from transcript cassava4.1_006727m (locus cassava4.1_006727m.g) derived from phytozome v7.0 (chr-ID scaffold09657; pos 63585 to 64440 reverse strand)
ctggaccgaggcgttcaggtgatttttgagctttctttctattttctggtttaaatgattttcttttgaactggaaaagagtaatttcttaaaattcagccattagtacttgctttggctgggaaaacttttctagttgtaattgttgtataatgtgaagaagcctttttcgtcatgggattatggttataggagcttcattgttcatatagtgccggaattcttgagaaaatatcagtggctcctagtgcagtgattttgagctttgttattatctgcctgatgactatatttcagataataagataagtttatatgcctatcttcacatgatattggtgaggatataattataaatttagagaaactgtattgccttggagcacgaatattgattaaagaaatgttggagatattcccagacgttgcatttattttccttgtgttctggcttgaaagcccgtttgattgattgatttcctcctttcttctttcctttttttttgttttttttttttttttccgtattgttgttaagtggtatcgggagccaacttttgtgcaccattattcacctgccatggtcttgccaaaggcagaccatcattctatggacaagggatttgcaagaaaaagaattagctactttgtggtctagtcgcaatatcagaaccccaggaataagatggagagccaacctggttaccagctaggttaatcctgggttgtctttctttactctcaaataaagaaaatgatatctttgtaattttgataacatgtttgtggtcttgctgatgttgaattgtatttattgttaggtcttgcctgcaaaaggtcagagtgccatagatac

SEQ ID NO: 45025 - DNA, 650 bp, Manihot esculenta
  Intron number 1 from transcript cassava4.1_010395m (locus cassava4.1_010395m.g) derived from phytozome v7.0 (chr-ID scaffold05875; pos 545289 to 545938 reverse strand)
cgatacggatccaaaccgcttttcgaggcttattggtaaaatcggatcctatgattttgttatttctgattttctttagctttcatgtccataaattggtttttagtcgtagtttgcgagtttgagctttttgggttaccgtaattttaggtgttctaagtgtaaatttgtgctccaaattacttccaaaattagcattttaccacttctcaattctgtgacagccaatttgaggtcagtcagtgcagtttatcttatttgttacttgtaatttccagttaaatatgttcacatgagttttgttggttgaatgtgaattatgaaatctgttttccaaatgtgttatttcatttcctctattctcaatgcgaagaatcacttgtaaattttcaaataatcacaatttgcttgggaaccatagtttgtaatcctcgtggattagaacgcttagttgtcaaattaatacaccctcgaaatcaacataacctcagaagaatcacttctgaattttcactttgaactatactagttcaaattgatgttttctttgtaatttgattggcttttatgtgcaactctagagtttctttcttgctgctaattttggaactgcaggcaaggcgggcattgagggccttgaaagcagtggt

SEQ ID NO: 45026 - DNA, 313 bp, Manihot esculenta
  Intron number 2 from transcript cassava4.1_010657m (locus cassava4.1_010657m.g) derived from phytozome v7.0 (chr-ID scaffold02431; pos 163814 to 164126)
ttcttcgtcagattttcggttccagcgctgaaaaggtctcacttacttatctttcgctttttatcttcttacggagaaatcaaaggaaaataacggagtatggtttcttaaaataaaaaaagtttttgtgcctatgaaaatagtaaatggattaatttgcaagggttttatttttatttattatcatgatttgttgctaattaattgctaattataattaggaaattactggcattcttttattttgtttttgtgttccaataaactggttgtgggatattgtttgattgcaggtgaaggtggaaaatcggac

SEQ ID NO: 45027 - DNA, 456 bp, Manihot esculenta
  Intron number 3 from transcript cassava4.1_010657m (locus cassava4.1_010657m.g) derived from phytozome v7.0 (chr-ID scaffold02431; pos 164130 to 164585)
gaaaatttatgtaagtttattgtcttttttcttttcttttctgctgcaactgcttgattaatgattctaaattaactgaatgttaccattatttttaagttgttgtcatctgtttttgaatgtacctaagtttgttaatttcttttagatgtgcttttctcttacatgttatctttctgagagatcacgctttctaatatgcattcagcataggacactggtgcatattttttttatttgtgaagtagctatgcacaaatacactacatattttgccccttctttatgttaagccatattttgactctggattcagcagaaatttgtggtatatttgggtttgtaagtctgatatccagtgttttcttttttgataaatacgtatacaaagctaaactgattctttataatttcattttaggccggaagtagaactattgaactggagcttactac

SEQ ID NO: 45028 - DNA, 357 bp, Manihot esculenta
  Intron number 1 from transcript cassava4.1_013002m (locus cassava4.1_013002m.g) derived from phytozome v7.0 (chr-ID scaffold08686; pos 350711 to 351067)
taacaagaacattgtttttggagctgtgcttgaaggtcagtaatttatggaatttttattttttttcccagaaattatggatttaagaaataattacccttgattcttcaactcatttcatttaaaaaatttcatgcttttgcaatttctattgttgaattcaaattgaattttgagaattgtgatgggggtgtggagatgatttatcagttcgtttcttgtgggctgattctgcataatgattaataataaaatccagaattggcgagtgaatttgatttttagattagtaacttgtgttctattttctcaagaaattattacttagtgattggagttattccattgcaggattgg

SEQ ID NO: 45029 - DNA, 759 bp, Manihot esculenta
  Intron number 1 from transcript cassava4.1_026484m (locus cassava4.1_026484m.g) derived from phytozome v7.0 (chr-ID scaffold04849; pos 3712 to 4470)
tctatgtttattgctagatatgtatttgatgtgtttcacactcactaaattcatacacaatcaaaatattagacctatatttttttttcttatatagttgtgccttaactttttgaccaaaagggtaaataaaagaaaaaaaaaacttcttgtgcttattggatgcactgcaatttcttttcataagaagcattcactctgaagctttcttatgctgatatttggcagaagatgtacagattataattgagtcttgactgaactggccaggagataatattttttcttacaatttcattctagctctagactcttgtgctcatgtagctctctaatccgcaatagtaaaaatagcttatatgaactcaatttatatcttgctttaatagaagaatagaaaacaaataaaactttagctcagtgtattaagttattttcatgggtaggagtcaaatgaagcaaaagaaaagtaggacaaatcagcataatatcttatttgtgtagagctaataatgaaaccagttggacaggattccctaggttgaaagaaaagcacatattctgaagagtagggacagtacttgatggaagaactttggtcatgaaaatctcagttctgcaacaagtcccctttcttttatacagttttatatgttgttccacacgatagagtccttgcttaatgcctatagatgatgagttcccatttccttgtaatccttagtctcatctttccttttcattcccaagcccttgcaa

SEQ ID NO: 45030 - DNA, 889 bp, Manihot esculenta
  Intron number 1 from transcript cassava4.1_018691m (locus cassava4.1_018691m.g) derived from phytozome v7.0 (chr-ID scaffold03116; pos 210371 to 211259)
caaagcttcgagaacaggtcgctaagcagcaacaggtgcctctaaatctaaccctaatatcagatccaagtttgtcttttttctgtttatcaactccatgtctttaacggtttttaattagtttctcctttagtttctgatttctggtcgtttatgtcatatatgtgtagttctgtaggcttagagagccctgccactcctaaaagagatataaatgttgacaaaagagaaagattttaatcggtatgtagagtaagaataaggcattgagttgattttaggaaaatttaagttactttttgcaatgtatgatgggttgagttttggactttattaattacctagttttccagttgctaataatgtcttatatgctgtctatggtccaatacgtaaatcttttagaatcatgattacgtaattcaactaattttactcttgaaaaatgaattgggtttggttttaatttttcataataggatatatatgttgtttgcggggtgatattgtggtataaatctagttctttgctcatacctaatgtacaagttcttgctgttatatgtcattcatagtttcaatagttatttatattttcaggttcttgttaaatatggtatttttttttttttataaattttattccagggtagtttcaatttgacccatgaatcttattctccatggcattttgtctcttcaattatttgccctttatgaggagtctcataccgctttcatttttatgcacaagtaacaaccttgtcttcttggtttcatgaataatctttgcttatttagtttagagctttttgcttaaattgggaggcattttgattaccttgagtgttacttcaggctgttctcaaacagtttggggctggtggat

SEQ ID NO: 45031 - DNA, 862 bp, Manihot esculenta
  Intron number 2 from transcript cassava4.1_006375m (locus cassava4.1_006375m.g) derived from phytozome v7.0 (chr-ID scaffold05129; pos 69866 to 70727 reverse strand)
ggtaaagatttgtgcttcagtttcatctcatgcctaaatactaataggtttttttcaaggattcatcttcctcttcttagaaaagatgcgctcaaacctcaaactcttaattatttgtattaaaaaatatttattgaatgctcctgtttgttatattcacatgttttatatttgtatagatatgcttgcactcattgaagcctgttgcttggtttcattttctagcttccttttcctcttcattggataaagatatataatatagtcctaattcatgattacagtaaaaagggaatagtttttttgagagactttcttttttattaatttgttattctacccgattacagcatgctaataacttagcataaaatttacaaaaagaaaaaggtctaatggtaaaaactccagaaccttttaggcattttgcaattatagccaatctttcctttttgtcaatttagtttttttttttttccgtaaattttgtcaatttagtataattttaaagatctgttacaattgcagatagcattcaaaattgatgagattgatgatacagaattgtgtcatgtaagctgctttatatccaatttttgacagctacctttaaaattagactaagattgcccccaaaaaaaaaagaaaaaagaaaagaaaaatcactatttagtttttatacacatctgaggggctttggagtgtgattagggtggcatgccttttatgcattcatggtgtaatggcaataatcatagttgctcatgtcagggttgtaattagcttttcaacttgtgtgttgtatctatctagtatctacgtgcttataatttttctcttgtttatgtagaaactcagagca

SEQ ID NO: 45032 - DNA, 928 bp, Manihot esculenta
  Intron number 1 from transcript cassava4.1_006375m (locus cassava4.1_006375m.g) derived from phytozome v7.0 (chr-ID scaffold05129; pos 71465 to 72392 reverse strand)
tcctctatcactacaggtttgaatgggtttttagatttttacggtttcggatttgtgttttaaaaaatttgtggtttgagatttgtatgtgtgaatatattgagttgtatttgtgagatttattgaaatgggtttctgaaatttgttgaaaatgtcttgaggggttgtatttgtgatagttgttgaaaatttgtgagatttattgatgtgggtttctgaaatttattaaaacgttctcacttttaatcgaacctctaacaaatcagtttcttttcgttcaatgaccttgcctatgagctcgcctctctccattcatggtttttgattcgtaagtatcctatgaggttgccataatttgcaaatgcagtaaaatttttttttctcagagaatgcagtataattggatccctacaatttgtgctcttcgaagcccatatgataaaattggggattgacatccattttgtgtgatttcttatgatttttggtgaaaagatttgataagaaattgggagaggttttatattcgttcctaattattttaaaatttaaaatttttaaaacctttattcttggttcggtctgggtattttgacccgttaaactattttatggtcaatatttcagcaaaattccttactagctaatcggtttgtgtagtatgcgggtaatgttaaatgaatttgtgacggatacgaaaagtaaaatacaatttctattcatataaacatgtccggctttgagtacccaaaatttttcggtaccctaccaccaccattccttgtcaaatgtatcaatgcacataattttttttaaaaaaattcctgttattattttttcttattagaactaaaaaatgtttatttaacccctttcctttttattttcttcaggccagaaaaaccctaaatccttaaaaaaaaaggtt

SEQ ID NO: 45033 - DNA, 913 bp, Manihot esculenta
  Intron number 1 from transcript cassava4.1_025466m (locus cassava4.1_025466m.g) derived from phytozome v7.0 (chr-ID scaffold06825; pos 357314 to 358226)
gagcttttcatttcgtatttttgcgcttcatctatgtgagttttctatcttctctaattggtctttgtagtcgctgctcatcctgaattccaaatcatgccttgaaagtcagcattacctcttcatgaactttgttctcagaatcaataagactgcaaattactaggaatatggcttatgcggaaagccccttaccagaaattgcatgttgtatctcaattattttctagaggaatgagaaattttgtgatttggcttatttaggtaaatcgaagctggggatgattgatggcaacctttagcgaaaacccagtttagaatgtcagtagattagatcaaacagaatgtacaattatgtgctttgcactgattatgggttattctgaatttaattaatggatggcagtgattggcagcaaaatccaatttagaatgtcagtatattaaatcacagaatttagaagccttcttgaagtgaagggaaccactatcctttaaatttagggtcatggcctacttgtataactgctgagaaatgatgtaacttgactgtataaggtacacttcattgtcttaatctgaagcctgttctgcctaagaaacactgggaaacgagtgtgttctcaaaatgtgtgaatgaaccttagcatatttctgagaggggcattccttagggacactttgtagtatcagatcacccaaccatacccttgatgtctggacctcaatcagatttcctattatatgattggtttttctgtgcataatagttgctcattttccatgattgggaatgtctaatgtagtatggtgatccatcctacctgtgacatatttcaaaaggaattccaagcatcattattgttgcatcttatgagttcttctgcttgttacaacctgcttttggtcactt

SEQ ID NO: 45034 - DNA, 764 bp, Manihot esculenta
  Intron number 2 from transcript cassava4.1_003191m (locus cassava4.1_003191m.g) derived from phytozome v7.0 (chr-ID scaffold05875; pos 761909 to 762672 reverse strand)
agctcactgatcccgttgtatacaagcttgtgcgggtaattctgaaatatctatggttttggtaattgttttgtttattatcattttgattaggtggggaaggccattttagtttgtttttgggcaaaaagttgaatgagattgtccaggatagcagtttcggtgcatgcagtagcttagaacatggaattagaaataatatttatatattaccatcagtcaagattgtggaaggaaagcagtgaacaaatttttatttttgtgattaataattttacttgggtaaaatgataagaatgtctttaaccctccagcatttttattatttagaatttgttgcaattttcagtaaaggctttggactgttgtttggtatttgaagaaaggcgaactgtgttttgggagtatcttatgtctgattagattctaactcaggagcttcttgattgactaaaaatcaataaaatttaatatgtcattatgattgttgttattgatagcattactatgttggaaagttttttcatgtgaggaagcagtggctgcactaacctttcttatcttgaagcaaatagaagaaaattctaatagatggttttatgcttatcttaaacttatgcttatcatatgtttctcttctcaaaccttatattttcctcacttgaatcttatgctgcccagtaactattaaacttatgcttagtattaatagaagttttgatgtgatgatatcctattcctatcaaatgcacaggtggaaggag

SEQ ID NO: 45035 - DNA, 869 bp, Manihot esculenta
  Intron number 1 from transcript cassava4.1_003191m (locus cassava4.1_003191m.g) derived from phytozome v7.0 (chr-ID scaffold05875; pos 762783 to 763651 reverse strand)
gactcattcttcatcgccgcgcacatactcctgtgagtcatcacttgctttatttcatttccttattgttagtttttgctgttgcattttattgaagaaatttgcttttttcttatcttaaaatatgcataaaatttgtcaattttaagtgtttgtagtgagctcagtttcaattgagtttgaaatgcactcttgtgggttttgtttgtatgcaattatataatccttgtttgcatatcgtgtctttgattcatgatataactgcttgaattgaatatagctttgtatagatatggttaagtgtgaagtaccatttccgtggttaatttataaatacagataggtgcctaggaaattttgctcccctggggagggggtggtggtttggttatattgtcatattattggaatttagggttgttaaccaattaggtgaaaattagttggtttttcttttggatgtgtcaattgtaatttgtaacagaattaagaatgtaactattgctttatgtagtttagtggcttgctaagtttatgtgattgttttgggttcattttgctattgttttatgttcaggcggatacttaaaacaattttgtgactttagtttggtttttgttaagagcatttggaaattggaaactttatctggtggagtaggtaaattaaatgtggatcttttcttttcttttttgagaagtgatataaataaacttcataaagatagtcattgttttagtgagtttggatatgtgtgccatttgcatgcggtacataaagttgcagccttcaaaaaggaaaagaattaaccagttattgtgtcttgttcacttttgtttggggttttcagtttctgtatttgagttgc

SEQ ID NO: 45036 - DNA, 782 bp, Manihot esculenta
  Intron number 1 from transcript cassava4.1_019034m (locus cassava4.1_019034m.g) derived from phytozome v7.0 (chr-ID scaffold01508; pos 299737 to 300518 reverse strand)
agctttttcagctcctttccaatctcctccagcaagtgggttttttttaatttcagtttcggattgttcttcttgattcaatttctttaattattgttatttttctcattatggatgattgatttgggggcttaatttaatcatacgtgcacataaaaatgtcctctttttgtttatttgatgatgttcatgatctgggtatcgtcaagttgtttttgtgattgggatgtgattgaaactcaaatagcctgccttttgtttgttagatgttcttgttaattgtgtgcctttggcccttggatatttatggggctgagctgacagcatttaaattgtttaataagttgctggatttgtcatggaaactaatttgagtgcacctggagcatggtctggggatctttttctcttggggaagacatgaaggacgtgcacttgtttaatcattaaggacaataaccaaatggtgctaaacgttatctcttcttcttcttttttgggtttatgaatgaggggagagggactgaaacttgggattttatccaactgagggagcacctagccacctacagcaaaactaaacttgtgcaacgcgaagttaaagcctgctcactatctagagtggtaatgagttgcaagatttgagatagtgtattaataatttgctgcttgcatgtatgcgtagatatagtgaatctttgatcttctttatatgcttaattttgtgttctttattcattcaattaggtggaggccctaaccaatcaagaagaagttgaatt

SEQ ID NO: 45037 - DNA, 876 bp, Manihot esculenta
  Intron number 1 from transcript cassava4.1_021797m (locus cassava4.1_021797m.g) derived from phytozome v7.0 (chr-ID scaffold09788; pos 538618 to 539493)
caaagtcattctcttgtattgatatggctccaaaattatttatattgtttatttgcttgttttggtgtctattcttcttgggatgagtatattactgctggtttgcttatggccaaatttttttgggcttgttgtaaactcaaggataagtgttgaaaattgaaatggatgaagacattaccttttttgtataatcacgcactatttgctcattgtgatagatttgtatttttttgtcagagttggaagatttgaagaagttaggttctttttttaaagatctcaattgatagggactcaaatgataattatgtcttgagttattgatactgtgtagctgctcatggaaagtttagttctgaaataatcacttgtcacttgtgtagaaaattagaaatatacttatgtataatttcttcaacatattttaagttagaatgattttttctgctttcacatcaacattgctggagacacctttttcttatttgaattgtaaattgtattctgtttattgttattatattattaattgcacttttccagcctatgcatctattgaaaattaataatctttcaggagagctttattttttttttctaatatgaaaacaccatttgtggtggcgtgaagcattggatcccacacacagaactccaaaatgcaagaggctgaaagttttggcttggtggaccagtatcaggttgggtgacctcctgagaagctccatcaagtgggcctcaatcacgcattggttgaatgaggtttgaaggcttccttactagtgtaatcaattatgtttaactatacatgtaattgttgcttctaatgtgtgttgcatctgattttgcagagaccatacgtgtgttcagctg

SEQ ID NO: 45038 - DNA, 418 bp, Manihot esculenta
  Intron number 1 from transcript cassava4.1_023958m (locus cassava4.1_023958m.g) derived from phytozome v7.0 (chr-ID scaffold03511; pos 20337 to 20754 reverse strand)
tctcggggatccctgagcagcatcttcgaagaagggtaggccatcatcattttctatttccttctgtacttggatgattcatttctctgcttcataatagaaaaaagggtttctgttagtagtattgaattgcatgtttattgaggaattgggaatgggaaattgtatttgagaagcttcgatgaagagtaattttcacttcacaaatatttataagcttcatattattttgatatgcttatactcgcactgaatttaaaatggatttgtctttcacacaaccttctccatttattatgccccttgttagttgaggttttctatccgaggataattgtttccctttcatgtttgatgactttgtttccctttatgcattccaggtacttatttactcacctgctcgaactgcaacaca

SEQ ID NO: 45039 - DNA, 752 bp, Manihot esculenta
  Intron number 1 from transcript cassava4.1_027954m (locus cassava4.1_027954m.g) derived from phytozome v7.0 (chr-ID scaffold09894; pos 85952 to 86703 reverse strand)
ttgtttctgcagcttctgctggtaattttttcatactcgttaagcgtatttcattatttatttttggtgaaaatatatcattcaataatgcaatcaatgtaaaacctcgtattttttatatgagacttgctatttttcagtaaaatgtaagttgttgatgagttggtgtacgcatctagctgcaggcaagaattactcgagagtgggttggcggagattttgattaattaagcatattgtttctcaatatcaatctctttttttttataaataaaactatgatattctttactcttcattaatatattttcaatatatattcatgtatttatacattaaattatagaaaataaaataacaacgttcaaattgatcaaaataattttttaattcatttttatttggcgtaaatttaacagtttaaaataattaattcaaattacttaataatttcatgctaactatcgtatacaactttaataactttaatttcctgtaaatcgctagtgtgggatttttttcccaatcaagtaactgaacatcacaaaaaatctttaacatgtgataataaatttttagattaagagaataaaaattgccttaaatataataaaaatttttttttatcaattatatcaaaattgtaaaaatatgctttgcattttctttaattaggcctataatttttccttatctttttctttctaatataatttcattataattatatgaaatatgcagtgttggattta

SEQ ID NO: 45040 - DNA, 894 bp, Manihot esculenta
  Intron number 1 from transcript cassava4.1_002897m (locus cassava4.1_002897m.g) derived from phytozome v7.0 (chr-ID scaffold07992; pos 143374 to 144267)
gcccaaggtgtatgtgaactcttatggttgcaaaagttattgagggagttgaggttgctcgagaaagacaagataactttgtattgtgacaataaagctgctataagtataacacaaaatccagtccaacatgaccggacgaagcacattgaaattgatcggcacttcattaaagaaaaattaacagacggtgtcttgagtttagttcatatgacttctactgggcaacttgcggatgtgtttactaaagggctcaacaacaaaatctaccatagtctgatttgtaagttgggcatgtgctatatctttgcaccaacttgaggggagtgttgacttatttactgatcctagctgattctagggatataatttgatttgattaagatccttaattatctttgtaattattatttaattaattggttcctgtttagatataattctttgtgtataaatagtcatatagaccaattgtaaagattaagaatgaaatataagaatactctaaattttcccaaaattcttcatctatcattgaagaacagcagttaacacatcttttgcctgaaaaatatgcacgattaggaagtggcacagaaaatacagaacaatcaaagtgatgcacattattattccatttctacggtagataattttaagtggaataagggacaattaatcatgtttttttgttgtttgacatcaaaattttaaggcctcaattccatagtgatgaatatttgtctagtaggtttaggtacatataatgagattcagaattttggaagtcattattattgagtactggttgctggagtattttcatgacctccactttttcttctgttttaaattacaggccctaaaggatttgtataaacatttgacccctat

SEQ ID NO: 45041 - DNA, 500 bp, Manihot esculenta
  Intron number 2 from transcript cassava4.1_010857m (locus cassava4.1_010857m.g) derived from phytozome v7.0 (chr-ID scaffold00318; pos 22937 to 23436)
tcggtcaattccaatacattctgggcaatctaaaggtgattagcctacttgtttacccctaaaaaacatgcattactgtggtgttggagatcacttctaccatggaggagtcccaattttaattatttaaatagataaaggaacttagtaatgaactcagccaaaaacagtcatagttccattttagttttgtgcttactttatcactaactttatctgcttttcttttaaaagaactgatcatcactctctattcagtcccattgctgcccatgcctatagtcttcctggtcataaatgaattctttgttcagtcattttctattaaaggtctcaaagttggacatttgataggcagacagttgcaacatagaagtggtctttaagaatacttttccttttctccctctcaaattctcattttctctttgaacatttattctgttttttgatgttgcttggcagattttgtttatcagttcaaacagcaaagtcttcca

SEQ ID NO: 45042 - DNA, 523 bp, Manihot esculenta
  Intron number 3 from transcript cassava4.1_006744m (locus cassava4.1_006744m.g) derived from phytozome v7.0 (chr-ID scaffold07528; pos 336330 to 336852)
catgtgagtttcacacttatacacacccacgaggagaattttgtttaaactggtgattgtgaatctatttccttgtttccttttcaaaattattgtgctcccttgaaaaacttataaatgttgtgttcaaggtttggggattataatgtttatttgctatttggatttggaatgtaaagcaaaggaaaatgctaaaatgttcttttctgggattcgaataatttaacttaactaaatgtcagcaagtatgggttttgctttgttttgtttctcttgaatattaaatcttttgccctgattacttctttaggaggtaagcttacatccgaggaatgtagtagagaacaagagattaattgggatttgggctttctctaatgcctttctttttaattataattttcaccatattaggagtgcaaaagtgtatgccaattgccttatggaagtagaggttaattaacatgatttattttgaatttgtggtgctgcacttgactgatttttttgatgcaggccataa

SEQ ID NO: 45043 - DNA, 306 bp, Manihot esculenta
  Intron number 2 from transcript cassava4.1_005720m (locus cassava4.1_005720m.g) derived from phytozome v7.0 (chr-ID scaffold04251; pos 126843 to 127148)
agcaaaatccttctacaaaggtttgaatttcttttcttttaatgtgtacatgttgttcaaagccacagaaaaaaaaataatcaaaagaaaacgactagggagcaaatgatcaaaagaaaaaaaaaccgatgtcattgttgaccattcaaagcatgaagaaaatataacatcttttttttttttgctttattgcgtataagttcctgctatcattttgtcccctcacactggtttaagattttttgtcatggcatgtttaaccataacctgttctgactatttttttcaccctagttgggaccttca

SEQ ID NO: 45044 - DNA, 851 bp, Manihot esculenta
  Intron number 1 from transcript cassava4.1_000311m (locus cassava4.1_000311m.g) derived from phytozome v7.0 (chr-ID scaffold03070; pos 16717 to 17567)
gttagctaaccttgaggtgtgctacagcttactagcgattgtttgttttgaattgaaatcgttttagcttgggtcgtttttgttgattgaatacgtgttatcatttgctgttattttcagtcagctgtagtgcacgaagatttggtataggcttagttagcgagaaaaacgaattaagaaaaaagcatgtgaagatggaagttcgtgtttgaggttgatgcattaggttcttttagggaacttttgagagacttatctggaaagcaaaatgtctttccagctcttaacgacttgcgcctaataattttctcttcactagtttctctgattttttatcaacaaatttctgctaactgtattagtttttcatggaaaattaggcttcaagagaagcgagttacaataggatgagagcagaactttaaggtaaaggcaatggtgttaactaggcccttcggtaacaccccttttataagatatcgttgtcaatgtactggaaaatcttcctctcgccaggctgactttcttttattgatgtttctactcattcgtgaggaacctattgtgaaatgttgatgaggactcattgtaggactcaatttctggttgtttctattaataaaatccctgccctgtataaggaaaggcaatatccagaatgaagttacatcataactgaaattcaaaaatacatgaaacccattactcaaatttgaaaattaaataacaaaaagatgatccagattatttgagataaagatgttgctccctttgatctctgtacattgcaatttttttgattcatgtgcattgcagttctgtttccttttaaatcgagaaggtggtattcc

SEQ ID NO: 45045 - DNA, 666 bp, Manihot esculenta
  Intron number 2 from transcript cassava4.1_004067m (locus cassava4.1_002349m.g) derived from phytozome v7.0 (chr-ID scaffold07005; pos 98879 to 99544 reverse strand)
agaatagtgtttatagctgtcaaaatcttctccttgtacgtcttcttctccagggtaatgattattttatttgtggattgtggttttagatctcaaataatcattactcataagttgaaaaagtaaggtaccgttcggccacatagtatttataggtcaaggaagattaccgaattagcttagaatagcatgttactgtttttgttttctactttttaaaattgccagagtctcaaaatcagactcaaattttgataatagaatatcagatataggaatttaaagagtagagatttctgacactttcaactaccacgtatttatttcttctgtgtaaatgccatctacacaattcttttgggaaagatgctttctcctaaaaaataaggctttagtggaaatttgaccacatctctttagtgcattgacagagaagccatacatgccatgtgggtaaaatcatttacttgatttttatgtttcttttaagtatagaagtttctttcgtactgagtaaggttggcttctcaatttcattcttaaaatccataaaaagaagtatatatatatagaaactaccagtagagaaaaattctaattcaaggatacatgaaagatagtgagatttaccattttttttttcaactctccatctgtcacagactg

SEQ ID NO: 45046 - DNA, 867 bp, Manihot esculenta
  Intron number 3 from transcript cassava4.1_027820m (locus cassava4.1_027820m.g) derived from phytozome v7.0 (chr-ID scaffold06890; pos 128820 to 129686)
ggacgcctgattccttcctttcaaaggtaatattggaatttatctatactcgtaagatatttttttttaattgaaaaaaaatggaaaaaaccaacttcacaaaataaataaaaagattggaatttaaaattttattcgcttgctatgtgataacttatgaaatatcaacccactaaaattaaaacaggtgtttacggtctgatcatatttaaaattaataaactaatatgatttagagaataaatgtgagttgacagtacgatgagtcagtagcacaatggtcgatttctctaattccctttaaaatttttaatatgcgtgatgtatatcaagttgatacgaagtaaatgaatcgataggatatgaactaactagttgtttatttattagttgactttcaactattaatgagtttacagacatatatttcataggatatcctcattcaacctaactggatataaatcaaagaacacgagtacgattgagatataaatatccttaaactaactatataagttacacttaatttcttctgaggatttttagctgaaactctttattgaaccttaacttttccgaaccgacaatcagctttattaattttcaactattcatttcgatttattgattttctcgtaacattgaacttttattcacgcgtttatatcctattgaattcattaaatctctaactattgtgctttataagtaaagaaaaaagttaaattatcttgttccgcgtttgtaagattctttaatatatacatgcaaatgcaaaattgcaactctaattccataattaattattaatttaaataattgcttgcagatacttcatcacataaaatcagtggggaaggaaga

SEQ ID NO: 45047 - DNA, 258 bp, Manihot esculenta
  Intron number 3 from transcript cassava4.1_001387m (locus cassava4.1_001387m.g) derived from phytozome v7.0 (chr-ID scaffold10156; pos 139995 to 140252 reverse strand)
aaaaaccagcaggaagttattcgttggcataacaggtttacttctaatcgaattcttttcctatgttgcttttggtggatcttatttattattattattattatttttgggcagacgtttctcacttttcacttccacatctgcttagggaaaagggaaaaactttgttctagatttcggctcatatttgtgctttttttgggtatttgttttgatttgttaggggagttgcagctcgggctttgcatttgtcgagag

SEQ ID NO: 45048 - DNA, 708 bp, Manihot esculenta
  Intron number 1 from transcript cassava4.1_027486m (locus cassava4.1_027486m.g) derived from phytozome v7.0 (chr-ID scaffold06582; pos 216624 to 217331)
cggtggaactgcacaacttagcagcactgacccaagtaagatatgacttgttaatgcataatcatttaattcatctttgagaactaagagcataatttctcaatctttaagaaatttgatagaacctacactcactgttctaaacttctgtttgttctgtttgtttgcgggaaaaaaacttatatttgaaaaatattttttatgaaaaatattttttataaaaaatattatctgtaaaaaaaattaataaaatagcttaaaaataaaatatatcaataaatttatacataaatgtcttaataaaaatgttaaggtgtggaaaataattttctttttacttaaaataattaacttttcatttgatcagaaaaatattttcgtggattaaatttttatgagtgctgtaaatatcaaaaagcgcaaaaaaatatttttctgaaatatttatgtgaaagaaacagaggctaagttcaaacaaaaagaattactagaattctattagattgatttttttttttttcatgtttgaaattaaagaaatgcaattccttccaatcgaaaaaaaacaccctttaaaagaaatagttatcatgcacgattgtatgaagagttcaattgattcttttcttgcaaatagtttattccaaacagggtgataattattttcctgtgagatttcctgacttttgtatttgcatattacaggta

SEQ ID NO: 45049 - DNA, 768 bp, Manihot esculenta
  Intron number 3 from transcript cassava4.1_025248m (locus cassava4.1_025248m.g) derived from phytozome v7.0 (chr-ID scaffold11279; pos 389594 to 390361 reverse strand)
taaaaaggaagcaaggtaagttggcgtgctttgtcttcatttttggtttgtgtagtcttcttcttacgagtatcttgatattggggtagttttcttctcaagggtgaagctaacatgcgttgtagaattgaaacacagttgatattaagggattatgaggtggaaaattgattctctgtgttatcctttgcttgactcttaatggtgatttgaccaagctgtgcattttgtttcaatttatttgtttgtcatgttcatagtaaatggaattatgtcttgagccgtttgactaagaaccaaaacaagaattggcattatgtcaggagatgaagacctttactatttttaggcaaaaatgatggttatagttcccatcttaaactgaacttacaatttggggatcagattaaatatatgtgtatgcttatagttcctttaattattttcttttaatggatggaccccaaataaaataataatgctgtggctggggccttgttattatttatgatatttacacttgctttctgtaaaaaaacaaaaaatgaaaaaaaaaagatcttttaaagttcaactgcttttttgcgagttgtcagttgtataatgcagaatactgtttggcttggtttgctgagctttcccagatctttaataaaaaaataaaagaaagaatatttgcattgatgatattgataattttttttaacctctgctagatctttaatctaatgtcttctgttttgtgccttatttaatgttatggtaggt

SEQ ID NO: 45050 - DNA, 665 bp, Manihot esculenta
  Intron number 4 from transcript cassava4.1_014591m (locus cassava4.1_014591m.g) derived from phytozome v7.0 (chr-ID scaffold06327; pos 327082 to 327746)
attgcactgtccatagaaattactttggcagtcaggtaaattgtgtgcggtttgtaccataaccaatacagtgaacacataataaataaaacgtgtttaaaaatttcaattgcaagcctccgttgcaatggcagatttagttgtcctttgaaacatgttgaagttctgaatttggtatccatggaaaatttggtgttaggtttgtgatgtaatgcgttttatcagtcttacagattttctatctgaacacagtgatctctgatttaggaccttttgaatttgcatattttgtgtgtgtgtgtgtgcacgtatggaattgttgtctgcagctgtttctgtgaatttctttatgctagcattcatattgattaatttgcttgcaaatttttgaaaaatgtgttgtacagctgaacatatgcattaacagtatgcagttttatctgcataatatgtcagattagtgatgccagagttaatatcaacaggatcttcacttcagttattttgttcttttgttttgagataagaaacaaggcttattagagccatctcatttatgattactaatactattggaactttggaaattcagaaactctaaccttgtccactaaaatcatgtctactcagattcaaagcttcgaggcagaccttttagttcctga

SEQ ID NO: 45051 - DNA, 763 bp, Manihot esculenta
  Intron number 1 from transcript cassava4.1_013646m (locus cassava4.1_013646m.g) derived from phytozome v7.0 (chr-ID scaffold00510; pos 166381 to 167143)
cttgtggtgagcgtttctttctgatttatgatgtttcaggttgttattcatgtttggttgagttctggatttttaacctttatgttattagccatctgaaaaatgatctagtatgacatggcctttaatgtttaaagttgatcccaatgaatgccgaaattttaggccgtattagggagttttcacttgattcatttattctctcttagccttcttgttgataataattaccacaagatgaagaaagtatgaaactaacttgggactttttctttgtgaatagtccctgtataaatgattcttagtgtgtagagaagcctaggtgaccagtgcttgagggtttcctctctctctctctcttgatgattatcttatctaatattagttcttgagagtacttcccgtgtggttgtttttgtgcgtctctctttcatatgcttctcctaggtagaaacctaagttccagcattttactaactttgtggataacattttcacctttacaatggacatttcagtttagttttctctaatcaaatatacacctgttatagcccctttatggagaaagtccccccccccaccacccccccccccccaaaaaaaaaaaaaaacgtattatatgaatacattgcatgcttttgagatgctcatagtattcttcatatcaaagttgatatagattcattttcctgttaaacatcttttctgtttttctgttaagtaatttctcttatatgttagggaggttagaaattagaaa

SEQ ID NO: 45052 - DNA, 897 bp, Manihot esculenta
  Intron number 1 from transcript cassava4.1_022828m (locus cassava4.1_022828m.g) derived from phytozome v7.0 (chr-ID scaffold05280; pos 174331 to 175227)
gcctttctcaatcacccataaaggttgttattgctgtaagactctcatcaactattctaattcaatgattttctctctctctctctctctctctctctgtttgtgtaccttactggatcaaaatcaacatcatttctttctttgtttctttctttttttttttttttggcgtatttttttggcttagaaaaatgttttttcatttggagtttggaagatatcaggctttgaacagtgagttctccaatgatcataatatattttatgtggctttggctacatatattagatggcttatgccttcatgtgaaaagtgttgcccttcatgcacttaagggggaaagaacacagagatgagagaaattcttattagctgtgaaatggcatgcccaactgtcattctctccctccttgcctctttttcctgcccctccaaaagacatgcacacacgtgctgtttgttcaggagtttgagtgtttaggtattatattccttaaaaagtgagggattttgcgggattaggataaaaggcatgatatgaagcagagaagtaagaagagactcggtcagaaattaagcgagaaattgacaaccacagcttgacttagtagtgttagttagatgtatgagatctgtaatcatgtgtttgaataattttactatatgcctggagcatagagatgacacattagttaatttattatatatcttggaaagtctatatatgtttctggagtttgaaaagacaatctattgcagcgtgactgctcaatttggatggaattcctccttttcttttttcaatttattttaaagtgtaattgaaatgtgataagttttctcctttttggaataaagttctcatatgagatactgttgtgtctcagataagcaga

SEQ ID NO: 45053 - DNA, 760 bp, Manihot esculenta
  Intron number 1 from transcript cassava4.1_008567m (locus cassava4.1_008567m.g) derived from phytozome v7.0 (chr-ID scaffold01755; pos 102909 to 103668)
gaaaggtatcgattagcgtttttacttctcagttgaattcggtatttggattgcatcaatgattttctggttttagcttgtttttgtctgtagaattgctatctggtagttcactttaatgagttcaatcgcttatgcttcctggggaattgatttcctttttctaatttccttggcaatttattttagcgtaattttgatatggtctcgtgtaaattttctttgtttaacttctcaagagtataagctcctgaagccagctgagtcttttatatttgtttttatccttattaataaaataaactagttctaatgatgttgtctagaatctatcaggatttaaaataaaggaaaaatactcttgcggagaaaatgctggggaggccagaaaaatttactgatcttgaaagattggacatggattcatggtttaattcgattttaaccggattgttttaccctttgtttgatattcaagatggtggaagaagagaactactctcattatgcgatcttttcttcctttctccccccaaataacacaaacgctgaggatttatatcaaatgtaacgagtcaattaaccttacaggaagtactttgtacaattttcacagtagttaaaatgctaattttggttctttgtaactaagttgttgatttgccataatttcttttcctttttgcgttgattcatggttgttttgtttttgctggttagtataggagatatccctttctggaggcagatatcaaaattg

SEQ ID NO: 45054 - DNA, 941 bp, Manihot esculenta
  Intron number 2 from transcript cassava4.1_003663m (locus cassava4.1_003663m.g) derived from phytozome v7.0 (chr-ID scaffold04495; pos 161816 to 162756)
cattcaaaattcaggtgacttcagttagctataaacttatattgtaaagaaacatactggaaagtttattctggttttcacttaaaattaggacacttcctaaatatggttccgtttttagtgcaagtgttaaaatccccattaatttcgtagctgctacaattccccacatgagatgttatcctaaataatttcgctgttgctagcacaactaggtgatgaactgtttacctgaagtatgcatgtgttttttggtgaaaggtttgccatggatgctggagtaaaaatatgaattggtattaggttcattttttaaaaaataaaataaattgaaattatatttgatttttttttttaacttgatcctaaatatttttctatagaaagtaaatatgttgatatagaaagtaaaatatgaataaatttattagttgcttaatcttaaaggttgcatgatcatagacttgataaagggattctctttcttttctagataggtgaatatattttttgatcccatgtcttctggaattggattaggtgaatatatttgttgacgacgtacaaacaaaatgttgtgaacatagttaatgttgcactttgttcaatttctgtatctgaatccactgcttttttatttttttttattttttttacccaaatcgctgtctataaatatgttaatttcttgcaacttagaggattctgatcttgataattacaacattttcctctgcaaaaataaaaagaaaaagaaaaaaaaaacacttggatttgcagtataacattgtgataatgttaatttcttgcaacttagaggattctgatcttgataattacaacatttccctctgcaaaaataaaaagaaaaagaaaaaaaacacttggatttgcggtataacattgtgatctatctaatgtaggttcatttgaggagggtg

SEQ ID NO: 45055 - DNA, 819 bp, Manihot esculenta
  Intron number 1 from transcript cassava4.1_005325m (locus cassava4.1_005325m.g) derived from phytozome v7.0 (chr-ID scaffold06948; pos 695474 to 696292 reverse strand)
aacgatcataacagtagtctttttggtggctacaggtgggtcttttttttaatccttctaagttgtgggttttgttcttggatgtcttttggtggtttggttttggatcagcaggttgtaagacatatattttaaattgttgaagcgatcataattgataattttgcgtgagaagaaatggttttgagttcatatcaattgttgttgtgagctattttgtagatgaaaattagtttttttttttaaatatctaattttgttgttgtgtcagagtttggtttctgtgcttgctgtgttgtctgttctgtctcatgccctcttttctgtgtctctgcccccttctttagctattttcctgtcagagttgcttgattttgtttctccccctatttcctgtcaaatgctagatgtaggtattttactaggcttcagtggatctaggtttactccctgcagcagtgaagccaggtttgaaagaacttggtttttacccattttggttttcatttgggattaactattaagagtaaatctatcaggttcttctttggaaatagtttatgttaattacatgtgcttattgatcgttacaagattaggagctatgacttttcagcttaagtgtaagctcttagccattggcatttctgcttcttacgcctgctacaactgaagatgttttatttcttttcaaaaccagctaactttagaatctaattggttaaactacatgactaagcattacaagaatagtttccttttgaattctcaagtgcaactactaattgaaacccatgtcatctgttgatcacagaggac

SEQ ID NO: 45056 - DNA, 776 bp, Manihot esculenta
  Intron number 1 from transcript cassava4.1_021309m (locus cassava4.1_021309m.g) derived from phytozome v7.0 (chr-ID scaffold12235; pos 75259 to 76034 reverse strand)
tactttcaaccacgattgtgtccttgatagttgtagtgagtctagtcgggttggggtgactgctagagagattagccatttggcttgatggttgttgtgtatatatgtatattctagtgtgtttctgatttcatgcttattaatgttcctcttttattttctcttttgatgaattgcctattttggaatgtttaagggattagtagtaaaaggagtttgtgatctctgaagaactactattgaaagcataaaatttagttttgtgccattttaaaaccaaaagttattcgttttgatcactgggtatgggtggaggcagtgggtttcagtgggagtatttgattatttttagaatgattcagttttattgatagaggttttatatactctttctcagtttatacattgtaaagtaactaaaatgagtaataggttttggtttgttatagttgtatatggcaattcgaaggagtacttgcgcaatcatctattttcgatcattagtgatctgaatgtgctaacatatgctccatgggtgttgggaggtgatgttaatgattttgcggctccttctaaaataactagcattagtgcccaagcatctactcaatgtttgcattttcgagattagatttttgatatggggctgatagacttggatttctccagtcttgcttttatgtggtggcgaagtgactttaataattttgtgagggctgccagattagataaaatcatgtgtacgccattttggcggcttttattttcatcagctg

SEQ ID NO: 45057 - DNA, 498 bp, Manihot esculenta
  Intron number 1 from transcript cassava4.1_012082m (locus cassava4.1_012082m.g) derived from phytozome v7.0 (chr-ID scaffold06829; pos 12519 to 13016 reverse strand)
tgaaactggggagcttcttcaaccttgcattgaaggtactcaccctatttttttactttctgcaatggagatctttcctgcttcaagtaatcatattgcagtgtttgatgtgattgcaagatgcagtatcttaaaattttgaattatatgtatgcaactgttctatgtttggcgtccatagagatattgaagtatttgattgtaccatgcgttctcatgggcttttcacttcagggccactagtttacttcggtgattgtggttaaatttatgtcaaagttagtacctctcactagtttgtctaaatattttaaatttttgctaatgacactatacttggagatactattttgacacaagtgagtgaaaagcatatgaaaccacaaggtagttttttgtacttttccttgatcataggatgacagttatggtaactgactttgtgtttaatcctcctcttcttttattccaatactgctcagctgctcttaatttggg

SEQ ID NO: 45058 - DNA, 942 bp, Manihot esculenta
  Intron number 1 from transcript cassava4.1_033151m (locus cassava4.1_033151m.g) derived from phytozome v7.0 (chr-ID scaffold10963; pos 801288 to 802229 reverse strand)
ttgttactggtaagattatcatttccttctccatttttcatattgtaatgatcatatgcaaatcattttttttatgtttctctcctggcttctttttctttaaaaaaattttaaataattctatttataattattaacctatattaggcaaggaaatatgttatgatattgcagttggttcagttgaagattggaaatactctaccatagaaccataatttaaaatcatatggcaatatccaccctaccaaggaagatttggctataccttatctttccaacaaatgtccattaatgagaggatataaaagaatatttatgtcattataaagttaattattatcatattacgtatgtgatgattttggaaatcatatatcaatgatcgggtcaaagttcaaacgttaaattcttttttgcaattaaactcaaatccttttataagagtatgtaaatcaatcaatacgtaatcaataattaatatcaaattaatttgttcttgcatgctattgtggccatgaattgagctatggtaattacttgtctgataaagtaaagtattatcatgagtttctttcttcttttgattttcatgggattacttcaatggatggtataagtcatgcaatcacgttactcctaattgatttgagcaaaactcaaatatgggattagcaccgaatagtctatcacatgattgtctgttttaatcgtgtcacctttactataaatagaaccataattagtcatatcttacaataagatggatatcagaatgacccatatatttaccttcttaattcataaaatgtcagatgtgacaggtcatatgatttacttggtcgcctcttaattcttgtattgttcttactcgagcctgaaaatttggttaagtattaattcttaagcatgcatgaagttatacgtttagggtatagctta

SEQ ID NO: 45059 - DNA, 775 bp, Manihot esculenta
  Intron number 1 from transcript cassava4.1_018312m (locus cassava4.1_018312m.g) derived from phytozome v7.0 (chr-ID scaffold02581; pos 42824 to 43598)
gttgtcacatcctttctcctcagctccattgctgggtaagtattgatcaattttacttcttttttttttttttttttaaatttcttaaaattgttttgtttgctgagctgaaagccgaatgatttatttttggagtttttttttctgtactgtttaataaaaattttgaatctgttgtttttgttagtttagtagaagtacagtatgattactatttaaggtattggtttacattttgttggcatcagctatgctatcttttagttgactgcatccctcaatttcctgattgatatagaaggatctttagttttttgtagtgcctgggaaggatgcccagtatatatgctccaggacacgtttgtatctctgtaaagggggctcaggtagaacaattttagcaatgctagtatattgtttcaattagtgtatatatatatatataatgctttcgagatggttcggatagtgggaattcagcaaattctggttttaacatttcctgtttggtcaggtaatttgagcagctcttctgtctttgtgtgtggagatgccatctgttatgcttcttactcttgatatgattcatgtcagtgagaaagattgttgtttttagttgtaaatttgctatgttctaagaaatttcacatccctttgcattgactttgttcatgcctgtatgtggtagctgttgaatgtacagtactgttttttgtttataatatataataaacttcctcgtttttctgtatttggtttatgtagagctggattt

SEQ ID NO: 45060 - DNA, 188 bp, Manihot esculenta
  Intron number 2 from transcript cassava4.1_005852m (locus cassava4.1_005852m.g) derived from phytozome v7.0 (chr-ID scaffold05471; pos 124311 to 124498 reverse strand)
cagggattgtgggaaacaagtctatctaggtaggagtctattttgatcttcattacaagtatatatgtattattatttctggaaaaaaggtttctttgttatgaattgttcaaacacatctgatatgtgattggcttggcgttcttcttttcttggatattccaatacaggtggatttgacactgcac

SEQ ID NO: 45061 - DNA, 655 bp, Manihot esculenta
  Intron number 1 from transcript cassava4.1_027424m (locus cassava4.1_027424m.g) derived from phytozome v7.0 (chr-ID scaffold08359; pos 2186550 to 2187204)
ttcttcctgagattgggaataggctttcggacaaggtatagcttttgtacttgttactactcttcttccttttaggtcggtttctcctttttatttagcctgacttaaactctcttttttatgtagcctttattaatttaggtatctctcaagtttacaaatcaaagattttggaactctaaatgattcatgcttgcttttggcagttctcaatagaatgattccttccattaggaaaaagaaagttgatatttactcatggagtttgcttaatttctttatatttctttctctctctcttttatccatctaaaagaaccaaaacaggaatcccaggactaagaaatggaaaagtaagctatacagaaagctggaggtgcaatattttgttatgctgaagtttctttcctttcttcttcttcttcttctctttcataaaaaaaattaagcataattttattttttgcatttggaagtgtactctataatttatatttaattcatttgacttgattcatttccaagaggcttcaaccaaaaagaaaaggaattaattattctgatgggagaagctttactaatatagagaaaaaatatattaattgattgttcaattacaggtttcagctgcgaaggtgttgcaagagacgtgcaa

SEQ ID NO: 45062 - DNA, 534 bp, Manihot esculenta
  Intron number 2 from transcript cassava4.1_020057m (locus cassava4.1_020057m.g) derived from phytozome v7.0 (chr-ID scaffold04851; pos 421885 to 422418 reverse strand)
gttggacccctgaaggtaaattagatatggtgatacactcatgttttagtttatgctctgaatttcgagtggactagaattctttatccacaaaagatcaataattataattttaaattgaaagattaaaaccgaaatccgaaatgaattattgtgcttaaatgaaatttgggatgttctgtaatgtaaatcaaagatgaaggattgcatagttagttgagaggccgtctgttgctagtgattttcttttattgataaagcagctgccaactcttttcagattaatttagaagattatcttctgatcctttggaaacccttttttgtattaggtatctaggtaagtggggaacattgcacgcgtagataaatgattaattgcctatgatgaggaagtcttcatccatactgaaaccattgtgatgtgcccttttctgcatcaagattttggtctcattctttaagtagtgccattttgtctctcttctctcccttgtgaaatatgaaaacatccattcttccttttgtagggca

SEQ ID NO: 45063 - DNA, 675 bp, Manihot esculenta
  Intron number 2 from transcript cassava4.1_019182m (locus cassava4.1_019182m.g) derived from phytozome v7.0 (chr-ID scaffold02717; pos 38549 to 39223)
ggctaaaagttccttcaagcttgaacatccacgaggttcgtttgtcatttttttgtttggaactatcgaatttttaataactcatacatatctgatgtgatcaatcttaaatattggtatgggtactccctaattttactggggcacttgctgtttattctatgcataacttgattatacttgctgaaatgccaaaataattattgaaaaatgaaattgaaattgagattttggatgacttagattggtcacgagttttttctatttatttgatggggtgcatttatgcgttagtttccattatttccaaatcataattttgatggttgactgaagaatttctatttttggacccccactctctctatagatcaaaatgagatctttctcagtgcatatgaatagaatgaattttaactgatataatgcctgattctttcctcaactataaaacagaagttatggcttttttctgtcaacatctatcttcatcccttgtttgtcaattggtgtataactcgaactctatgtatgatgtccaccatatgttcaagataaaatttgaacaattaatttagaattataacgactatataatttattatcttctttgtgcctgctttcttgtttttcttttcagagaggaggcaagcagaagctgctcgcatcagggag

SEQ ID NO: 45064 - DNA, 612 bp, Manihot esculenta
  Intron number 3 from transcript cassava4.1_009939m (locus cassava4.1_009939m.g) derived from phytozome v7.0 (chr-ID scaffold12794; pos 262299 to 262910 reverse strand)
aggtacttcatatcatccgtataatcaaaatgaaagtgtggaagagatttaattggtccactgaccttctttttaatctttttctcctaatgttttcttcattttttagagtaacacttgattgagaaaattcttcttaagctattgcaatggaatagcgattctacaaaatctaatatgtgcttgaagagatcttctgaaacgttgtttttatgttccttccgtaaaccattggttgcaaagagaatttggatggagatagtctcctgatttggtttcacatgcagggaaggtagttaattttgttgctctgcttctgtaatcttacctgcatgttaaatgccagagcatcataaattagttttgttcagatcccagggtattacatttgtatgttgtgacataattgtctcatttatacttactctgttgtaagttgcatattgtagattgatcttatcattaccaaaaaagcatgactggagtttatataggttgttttattattcttggtttttgtggggttctatttacattctattttttcgtcttccttactgtatatatgtggctaattattgattccataattaacttaggcaaattcactgt

SEQ ID NO: 45065 - DNA, 731 bp, Manihot esculenta; identical to SEQ ID NO: 44280
  Intron number 1 from transcript cassava4.1_003259m (locus cassava4.1_003256m.g) derived from phytozome v7.0 (chr-ID scaffold08359; pos 1060120 to 1060850 reverse strand)

SEQ ID NO: 45066 - DNA, 855 bp, Manihot esculenta
  Intron number 2 from transcript cassava4.1_031103m (locus cassava4.1_031103m.g) derived from phytozome v7.0 (chr-ID scaffold03699; pos 63643 to 64497 reverse strand)
aaagggtatgtatgcaagggtaattaatacataacagatatttttatgtggttatgtactttctcttttgcatttgctaattaggttattatctgcatctatgatctttcatttgtttgattattttgcaattgcaaatatactttggcctttgccagtttctaattgctctgaaccttacttttggcaaaaagagaagaaaaaggggaaaaatctcctctctttatggccaaacaataaactacattttatattggactagcatttaattttgataagggacatgcttttaaagatatttttcaatctttgtgctatatccacataagtgatgcttgcacttataaacagtaacttctaattacttttgaacataatgatgaatgcatgtgaaacctagggctagaccggtatgtacttatcaccctactgctagaaggcagctggtttatgcatgattaacaactctaaagaaaattgtcttgtgaaaatgatctgcatccaagatggtggacagtacaattcatgctcctgaggataagtatgggtttactaatttatttaccatgctctagggaaattgtatgtcagtcctactagatgttctgtgtgttcagctatctagcagtttccagatgtattgagttgagaatgatatttctgtcttactgtacttttttcaaaaataaaagtgaaacttgaaggtgaagtgcattatatgcccttgctgaaaaatcctcaaaacaattgtagttagaagtgtaaaagtgcaaattatgtttgcatcttttctgactcctattttgctttcaaaacataggtcactattgaagttaaaattacagcaggaactcc

SEQ ID NO: 45067 - DNA, 488 bp, Manihot esculenta
  Intron number 4 from transcript cassava4.1_012425m (locus cassava4.1_012425m.g) derived from phytozome v7.0 (chr-ID scaffold11581; pos 748048 to 748535 reverse strand)
gagtcttactattgcaaagttctgtaagtttttatttccgtagtgtttttcttgttgactttatgtttataaatgaatttgaagagtgaaaatgaatgatgtgcttaacttttctcttttgaattcaactatcttttaattggtgcttttcctatttgctccctatctcttcctatttattgaaaagtgctttttctattaaaatgttgaacttttttttttggcctttattaaataaagctgaatacttgttgaaaaaaactggaagtattttgttggggtattctgcataagatgacactttggtataccctgacacaataaggttttgttagattattatttctgtggcatcttcatgcatctggagaacttgcatattggacaattttagacctagggaataatagctagatggtacaatttcttacttggtactagatgctacctcaggtctgctggaaaaagactaatctctttgattgctc

SEQ ID NO: 45068 - DNA, 457 bp, Manihot esculenta
  Intron number 1 from transcript cassava4.1_017851m (locus cassava4.1_015358m.g) derived from phytozome v7.0 (chr-ID scaffold06407; pos 112164 to 112620)
cttaataagcgcaagcccaaacctgccaagctcaggtctttactgtgaattcttatctctctttgatctttatgtgttcatttcttcggtttgattctgttgttatttattagcgttcagtcttagcattttattgattttttaagcgtaaaaatatgtgcattttgggatgattttggatttatttcttaattcttttatgattttgtagatttattgtattgatatgaatctctgttctctgttgtatttgattgagcatatgtttgggtatatcaagaaagtgctggtaaagtgggagataatggtttcagttcagcgcctttgttatttgttttagatagtgttgtttctccctcataatatggattgaggctaatgattgacgtctgattgtcttttttatggtttttcctgcagagctagcatcacagcaggaactgttttgatcattctt

SEQ ID NO: 45069 - DNA, 487 bp, Manihot esculenta
  Intron number 2 from transcript cassava4.1_006812m (locus cassava4.1_006812m.g) derived from phytozome v7.0 (chr-ID scaffold10632; pos 50767 to 51253)
gctgcctactacgccaagtactttacacttccttaaccattttccctttcatcatctttaacttggagttatttgtgattctagtatataatttattgaatgcaagtgggttctagttggttattgtgattagtatttctttgttatttaacaatgctcatgttattttatgtgcctcgatacttgattggaagttctagtaagttcataatgctttcaccagtttcaattttgtttatgcatttgtatttttctttttcagaagggttcttttttctgaacccacttctcattcaatcaatgctgaaagttagaaaattaagtccgtgtttgattgcagttgaacttaaaataatttgtttcttgaactgcaaatgtgattggttgcaagaaagatgactgaatccaaactttatcttcataatttaattgaatttttctgatatcctttccattgtgggattgaagggaggtggaggcaggtcta

SEQ ID NO: 45070 - DNA, 557 bp, Manihot esculenta
  Intron number 1 from transcript cassava4.1_008512m (locus cassava4.1_008512m.g) derived from phytozome v7.0 (chr-ID scaffold12455; pos 35187 to 35743)
ctgatccttacaagcttcccactactaccactcaggtacataactgttttctcttttatcctctttttattcactataaagaatttcgattagggtttattctttatcttgctttggaaacttctaccaatttcttgtttctgccgcttgattcattgtgcctgaattttcttgttttaaagattagttttcgctactgtttttagaggttttatttaaaaaaattaaatttcatttttgactcttgaacttttttacaaattcttttaattgaagaaggggacattagctttaacacatcgttatttgttaatttgccatttattcatattttttcgtgatatatatattatttatcctatgattggaggtttattttttataaagaaaaaaaatgtcactgataagatttcatttcatcagtatattttagattctttggctgttaatatcttaacatggagattttgttttttccctccacaattttgctaattttttgtttcttgaattcgtgaatttaaatgttcccatttgctaatttctgtagcagcttg

SEQ ID NO: 45071 - DNA, 866 bp, Manihot esculenta
  Intron number 1 from transcript cassava4.1_004726m (locus cassava4.1_004726m.g) derived from phytozome v7.0 (chr-ID scaffold03604; pos 382038 to 382903 reverse strand)
gccagcgagtcctcaatactggatcacctatcacagtgtgtacctctcatttgtttaaattatatatgttttatacttagttggacgtgttgatctgattatatttgatgagatatttctgatttttttaatgctgttcggtcttttgaattttgtgatctgtcttgtgcttttagatcttattactcatttccggagaaatatggagtcgcaaaaaatttgctggaagtttataacttttaaaagatggggagccgctgtcagcagtttggcggtgctattgattatttttgcctttttaataaaacacctcttttgcctgaatcacagtaaagatagctttctacctcataacgtgtcccgtttggaatcgacataaacgttgtgtccatatcatcaataatggctttgtttgccctatactttaagtgaacctaaaatatgtgattatactgctatgacatgatgtgtgttatgctgttattatgttattggctagggctaccttttctctcaatcaattttttatttgggagatgggcggtctttatgctgattgattttgaaaaggcatttgtatattgtctgtgtttgttatgtagatatgtttgtgttttagatgatatgccgaggatgttgtttcctctgtggtgattgactttgttttcttcatgggttaaaggttgcctatgagtagcattcagttatggtgtttggcattgtgtaaaatgttcttttggctttgagattactgcgttatgtctgtttctatgctttttccttgttaatgctgatctttgaagctgatttctttatttgaatatgcttaaggtgcctgtgggtagggccacccttggtcgtatcat

SEQ ID NO: 45072 - DNA, 780 bp, Manihot esculenta
  Intron number 2 from transcript cassava4.1_003818m (locus cassava4.1_003818m.g) derived from phytozome v7.0 (chr-ID scaffold02431; pos 103936 to 104715 reverse strand)
catcgggacaggtatgttattatttttcttgtatcgttgtttcaccatctttatgatttttttggttagttaatggagcatatttaacagtcattaggaaagaattacaaagtgacagggtttgcagctatcctgcatgtgtttgcctttaaaacctggagaatttgttttccttttggtaacatcatcttttgtagactagattagagctagttggttccttctcttaattacttgcgtggtatgaatagggtatcatctaaaaagtagagaaaatacacaatatgaattgctttctttttcataggggttaaggagattgatcaacattttagccagagaagtagaaaattgaccacatttccagtttccacaaaccatactcaacaagtggaactaactaaattcagaaaagaaaaaagaattgaaggtttgttggtttagtgttaggcagcatgatgcctcaagtgaatatcctttctgattcctaaaaatagtgcaattacaagcaggccagtttgttttttttatgactatggttcttgttcatgttgatcaacttgttttgtttgatttatggactctgaactctcagatgttctattcgtaacattactacatgactacttatttactcttcctaagacatttaattgcatttgatctttaattgctttaggctttgttcttaattttatgtttattgtttgtatacccatgtccttttttttctatctttttgtagagccaattggcaggaaagttagtaaggagtattga

SEQ ID NO: 45073 - DNA, 829 bp, Manihot esculenta
  Intron number 1 from transcript cassava4.1_009448m (locus cassava4.1_009448m.g) derived from phytozome v7.0 (chr-ID scaffold12455; pos 404488 to 405316)
cttctcctcttcatctccgagctcagtacgttctatagtccctttttttatttatttttttgttacactctctctttttccaattctattttttgtagttattgtttctttgcagtgaattggatctgtatagactctatttgcaatgaattgggacttaaactacattattgttgattccgaaattgagtcatttgtttgaaattagagaaaaagaagttgtctttttttggtgggcattattttcctcattttgtagttttagtgcttttgtaattcgcttcaattgaaaatttattttttccccggaagctatattataagtggagctcttattcttgtactagctgggtctttatttggtgtgtctagttaagtcgagcgtcttggacaagagatggttactgatggatgcaaattgtggagacatatatcatgtaaagccttcttagttcttatgagaagcaaaagatgtgtgtgattttgcgaatgagtttttgctttgttcccttctcaattattttttactcctttaacagttgctcccttgaaatatacaagattaatataattttatttaactttcctttttaaacttctacaaaacaccattaattatttttatactcttttaacaattactcccttagaacatacaagagcacttatcttcgaatttttaaccttgtacaaaatgcactcttaacagataaaagttaatcaatttagcaatgagccaatgaaatatagagcttttgtttgttctctcaaattgccttcttttctttgggcttactaatttttcttcttattgcagggttgtatctcc

SEQ ID NO: 45074 - DNA, 528 bp, Manihot esculenta
  Intron number 1 from transcript cassava4.1_021201m (locus cassava4.1_021201m.g) derived from phytozome v7.0 (chr-ID scaffold09657; pos 216840 to 217367 reverse strand)
tcttgcctgcactcgtttagccacaaccacgacaggtaaagtagctgtttacgatacaaacaaaaccaaagtaaacatactaggacgaatttcttttttaacttttttttttatgactcaaaatctgcgaaaggttcatgaaaggaattttcaagaaactgtaatcccagagaaaagtcgtttgcgtatataaaatgatgagatcttgaagaatttctcgactccccagttcattagtacccaacatcgaccgtatcctttgcgtgtgttagtatcaagtccacctccacagccacccaccacatgcttttttctttttctttctctgtcttttttccaatttatcactgttcgttagtaaaactgacgaaaaaaaagtaaccaacaagaggctgccatgattctttctttttgtttcgtatattattatcaattgcatagagttttacaagcaatctttactcgattcacactgattctcccaaattttgagacaaattagggttggaaatagagcactttccaccg

SEQ ID NO: 45075 - DNA, 607 bp, Manihot esculenta; identical to SEQ ID NO: 44319
  Intron number 4 from transcript cassava4.1_008802m (locus cassava4.1_008754m.g) derived from phytozome v7.0 (chr-ID scaffold09683; pos 154173 to 154779)

SEQ ID NO: 45076 - DNA, 626 bp, Manihot esculenta
  Intron number 2 from transcript cassava4.1_007622m (locus cassava4.1_007622m.g) derived from phytozome v7.0 (chr-ID scaffold08494; pos 106669 to 107294)
atgtaatgtcttatcaatctttgctgtcgtaaagtttaaattgtgcatatgtgtctgtagaattgtatgttggatgtagagattgtttcctttcctttccttctttttccttttcttttcccaattccatggaagcaaatatgggtctctggcaataaaatttcaggttcatatctttagatcagctactttatgcagaatatatgacttgtgggattgtctttgatcctgtgttgaactctcttcagtgggaatacaaataattacctttttgcaacaaattcattccttgttttaaatttgtggagtatctcacattcatttgataaatgctggtgttatttaaaggtaggcatgatcagcaatgtgaaattatcatctctgaaatgacaattttactttaaccatatttgattaaaaaggaaaatgggaggtttagacttaaaagtgggcaatcaatggtatttctaccatatttcaatatatttggtctgttgattctcatctgttcctatctaatactaaagtatttataaattaccttggttacaagctgtgtgtttctaggttctctatcttactgagttctacgagagttgcctgaatctgcttttgacaatgccagg

SEQ ID NO: 45077 - DNA, 562 bp, Manihot esculenta
  Intron number 1 from transcript cassava4.1_003858m (locus cassava4.1_003858m.g) derived from phytozome v7.0 (chr-ID scaffold03175; pos 226259 to 226820)
actccttgcctgctatcgctgtcgtcggtggccaggtcacaatcagatctctttccatatatgcttatcttttgaattttatttaagttgctgtgatgagctcaatcttggctttgaagttataggacttggctataggatcctagctggtgctcagtttgatgattatttttaggttttagtcttcgatatctatttaacttcaaatgcttaggagttaaaagcggtttgcatgacttcgaagtaagtgtgtttgaatcagctttgccgaaagctccttagcttgactaggtaggtgatagattaagtaagctttaataaggaaatacggatttgattgcaaaagtaatgctagacatgacttccagaggcttagcaattcaaccatgagcttccgatagctatggattatcgtttgtctatctgttagttgctaaagaacattgtagctgctacattcttttttccacttcctattcttatattacataaattattttgcttatgtttcttaattctattgacagagttcagggaagtcttcagtgttggaaagcattgt

SEQ ID NO: 45078 - DNA, 764 bp, Manihot esculenta
  Intron number 1 from transcript cassava4.1_027063m (locus cassava4.1_027063m.g) derived from phytozome v7.0 (chr-ID scaffold12794; pos 1342475 to 1343238)
ttggtaagcagtgtgagtgtcacttcaactctgcccttattttctctcaattttgtagctttgatttgaattctttgaaatgtttaagataccttgcatttactcatacataatcgttatgcttgttaaatgcaagatttatgagttgatggtggtggacaccaaatgaaaattcttgcaatctattgcttaaatcgctaatggtgctttgtaatttctgcttgcttctaaattttgccatgaaacctgtaaaattgggacatgccagttatgtttccaggtaatttcttttttcctattctttaacctgttggaaaataggaactcaagctctgatatcagcaaaacagaggaaagggagttggaaatggttttcaaccaaaaagggggcaaaaacctcaataacacataacaaaagaggcaactcattgctcaagaacagagatacacaaacagaaaaaactgacaaagactcactttccttttctctttattctttattttcaattcgctctccagctaacctcaactcactcatctctcttccgcagctcccttttataggcaaagggtgatttttcaagtaaattaatacatttacctatcagacaaatttctacaaagcttgcttcataaatggagagccattcttttgcaactaagcacatttcatgtttcataaaaaaattgacagcaaaatatcttaactccaagataacatctaatatatttggtggatggattttgtgcattagcgagggaag

SEQ ID NO: 45079 - DNA, 975 bp, Manihot esculenta
  Intron number 1 from transcript cassava4.1_016287m (locus cassava4.1_016287m.g) derived from phytozome v7.0 (chr-ID scaffold06357; pos 72439 to 73413)
tcataaagaggtaaagttttgctctattcttctttcttttttcgttttatggattatttctttaatgggcgttcctttaattccataaatttcagtttcatgtgggttttgattgtttggtatcataaaaatatatgttaatgctgttaaattaacgattcaattgtgtcctttgtttgctttcttgatgtttaccctaacggatcccattcttgattctcatagtggttaaatatgacaaaatttacggtagaaaaaatagtggagccatttggattcttctaggagttagaaacatgtcacattaataataataaacttggtatttgaaatttttaatattgtataggacttaaactcttgataaaaatctaattgtaactatctatctcaatgtgagataataaaattgttgtttttatcatataatgcgagaataagaagaaacatctgtactggatacatcttttagctcctgtacatgtttcagagtgtagctcttaagaaaaaatttatcctgaaatttaagtcctttttcatgcctagcttttaaacctttcttttgccttaccttcagatggatattggatagcaactattctaaactattcaagccaatataatgtagcatttttttgtgttgagggacatttgttagctatatctgtcaaagattcagtgattcacgagttggtttctgcatcaagatgtgttcaaagtagcatactgcattcattgatgcaaatctcagtgtttaattgaatactccactgtcctttcattagataatggcgtatgaggtaaaaatgaaaagaagggtccttgctggatttggtagtatgcaattgccaatttatagtgtgctctcatgcttccagttacggaaacttgttaccttgtcatgatcacttatccactgactatatatgtttgatggactggctgtacctctagtgctcaggctggacctataac

SEQ ID NO: 45080 - DNA, 623 bp, Manihot esculenta
  Intron number 2 from transcript cassava4.1_025722m (locus cassava4.1_025722m.g) derived from phytozome v7.0 (chr-ID scaffold05875; pos 2397666 to 2398288 reverse strand)
taaagttgagacttttcaagtgagtttcctgatttttctactaaattccaatgtttccatgttcaatttggggctattgatcttgtaagatggaaattttatagctcactttatgcaacttttttgccccttgaacatgtgggtaagcttctcactgattctatatattaaagtaaaataaaaattttcaattcatgtataatgctgaatgcttcttgtttgtcaatggccttgtagcctaacgagcactacgtgcctcaaagtgcagatgatcaatggattaagttcttgttccctcccacccccccacctctgcgtataaaaattactgattatttattctccttcttgctagttagggttccttgttcttaattctgtgtctgacatttgaagaatgatgcttgtggctattgtaaaccaggcaatacctgttcatctatgtcaataatatgataatagtttttgcagtcatatatgcttgcgttgtgattttcgtatgatattttgaattcaaaactatcggtgcacatgttgtttaagatggtgttccattgaagttcttaattaacaaattgtttgctttttttagattactgaattgctgttgaatatcaccaagc

SEQ ID NO: 45081 - DNA, 425 bp, Manihot esculenta
  Intron number 2 from transcript cassava4.1_013352m (locus cassava4.1_013352m.g) derived from phytozome v7.0 (chr-ID scaffold09365; pos 161927 to 162351)
gcgccaggtactgtttggtcaaccaactcatttggttatttgatgggtggtcatgtatgtattttctgcgtcggttcatctatctcatcctcaatgtgggtatttttattgatgggttatattttaatgttggctagattaactgattttgggttctttaatttttggcttcgcatgttcaggcctatatgggaattgtgtgtttcttttgggattaatttgctggagaggcatcagtctcatcctcaattctctagaggtttttaatgggtggctatagtttaaattaggattctttgccttgcatgttcaggcctatatgctatcttttggtattaatttgcttgggagttaagatgctagtggtttggttttgagtctatatctttctattcttgagcaggaatatccagggtgtcaagttt

SEQ ID NO: 45082 - DNA, 674 bp, Manihot esculenta
  Intron number 2 from transcript cassava4.1_000170m (locus cassava4.1_000170m.g) derived from phytozome v7.0 (chr-ID scaffold11297; pos 406983 to 407656)
aggagggtacgagtttatggttaactatattttttggattattttgttaattgtttagtggttggatccatttgtctggttagggtttcgttgtttctggttgttttgatggaaaatgagttttaatcctgggaaatttgtactgaaagtctgtttccttctggaaaactgaagtgggaatcgggaagaatattaattttgatccttaaaattttttttaggcggttattagttgggattgaagcgtttggtttgatttctgcttataatgctggaagatatagtttaacttgaaatgttttaattctacttttgaaatgttttaattctacttttcttccctattaattgtttatttatgattcttggttggatgtttattttgtcttttcatctcctggcttttgcatgtaacttctgcttataatgctggaaaatatagtttaacttgaaatgtttaattctacttttcatccctattaattgtttatttatgttcttggttggatgtttattttgttctttcatctcccggcttttgcatgtaaattggtggtattttttgttaagtaaatattttattgtagctgcattggaatatacattttttccctgtgctgtcagagggttatttgtttgtaatatacttgtggtttgtgcagaagaagggcagg

SEQ ID NO: 45083 - DNA, 801 bp, Manihot esculenta
  Intron number 1 from transcript cassava4.1_010101m (locus cassava4.1_010101m.g) derived from phytozome v7.0 (chr-ID scaffold07528; pos 405941 to 406741)
ctgccactgttgaaaccattgctaactttttgcaggtattcttttcaattttatttctattcacctgtcttaatcttgttcttgtagttgttcttcttcttcttttgcctatttccatttcctcttctttgttcattttgtttgatttggagtttcgaattttttgagagtgtttattgacctctgtaattcttgacctttttaccttagtagcgtggagtgcattgcttagattgaattctggaatttgtgggcaaattttgtgatttttggcatctgggtaatgtttggttttccatttctctcacttgcacttgtgaagatatgaaatttggcagttttcagatggtgcgtcacttgttttgttggtttgtttaaccgcctcccttaaaatcgtcatttttctttcctttaattttcctgattcccataactattacctatcagtctttttgtttctatttccgtgagcagaggaacgctgataaacagattcaaatcgttactttcatagtataagttttgtttgggagaagtacttgtttttcattattgaatgatgattttgctcaacagaactgggatctggttgattactttcagagaactggattccatttgattgtgtcacatttaagcattaaacttggttgggatatccaaatggctcccccccctaataataacattatctgaagatcaaaatgactgtcaatgaaatttaattttcatcacgtagtttttcttatgtttttgtataattcgtggggaaatatgttctctaggaggttggctgcaatc

SEQ ID NO: 45084 - DNA, 316 bp, Manihot esculenta
  Intron number 1 from transcript cassava4.1_016399m (locus cassava4.1_016399m.g) derived from phytozome v7.0 (chr-ID scaffold10821; pos 49623 to 49938 reverse strand)
acggtaagattcctttgattccttttcttgtctctgttttcaatttgaaattagttttactaatcatgctgattagtgggtttactttacgatcaataaattaatgtagattttaggtcaataactgaaaatctgtcgttcttgccttcttctcttttatattatttattgggaatcttcaattttttccttagctgatcgattccttgattcccatatataattaacgtggtgaattgtttgtttgtctgtcgacttcagacccttccctagaaatttaatatatatcccttttcctcctttctgctgagcttca

SEQ ID NO: 45085 - DNA, 833 bp, Manihot esculenta
  Intron number 2 from transcript cassava4.1_007263m (locus cassava4.1_007263m.g) derived from phytozome v7.0 (chr-ID scaffold09880; pos 748195 to 749027)
ctggtacccttttttcctttttaattaatgaaatcaattgatggattcccccccacccccaaccaacaaaaaaaaacatgatttggtttgacatacataaatcaatgacgatttgttttttttttttttgcttttcctctgatttctttggatggattgggactatgaagtcggtgattcgttcagtttatttatttgtttttgctttgagttatgaacatatctcttttgtagttattttttgtccatttttttcttccaacacctgatttgatttgcttacttgcattaaccaagagtaggaaaattgtctctccccttgtaaactgtgagtgggttggattatctgtgaagtttttgggtgttcgcttttgaggtgtcatagttttgcattgaaatcataggatatgcattggacatgtaggtgtgtccttgaggcttaaacgatactaaaaaattgtaaatttattatatagtatacatatagcatgaactgtttggtgatggttgtttacttcttagcaaaaggtttgtactttgtatgcatatgtacacaaacacctgtcatcacatcttcatttaattttcgttgtcagccattataggattttcctgttctatttctgcttcataggtcctagcacttgaacctataatttagtgacaggactctcttgattcatttctgattctgggccctaataatggggtaatctctttccaaataaccttttgtctttactttggtgttatcctttattattcttgtaattgctaatttattacatcattcttctctttttgtttctctccagcaaattcatactcttgtc

SEQ ID NO: 45086 - DNA, 601 bp, Manihot esculenta
  Intron number 1 from transcript cassava4.1_023256m (locus cassava4.1_023256m.g) derived from phytozome v7.0 (chr-ID scaffold03542; pos 414948 to 415548 reverse strand)
tggcgcaaaggtccccttggccccaaggtaattaatttatgctcatacattacagcctcgtccagcttttactcagttaagaaatgagattgactcttctctttcctaatgatattgagaatttttgaagtttcctattattgttttttggtttggatttcagatttaataaaattgaacaatcgaatcaaattaaatctttgtatgttttggtgcaagaaaatattttctatatttttttaatatttgaaaaaaaatcaatgaaaagtattttttttttataaaaaaattaagttatttttaagacttttaagcattttatttatattatacataaatttattaatattttttatttttatttttgttgaattataattaaaaaataaaaacaaattatttttcacataaattattttatgcaaataaataaaagctaaatgatatataaataattaaaaaatggattaaccaaattaaactgaattgagttattttgatttagattcaattttatggattcagaatatgtaagttataaacctctcagccaggcagactaactgttgttttcttttactaccccaccagacactgtgca

SEQ ID NO: 45087 - DNA, 861 bp, Manihot esculenta
  Intron number 1 from transcript cassava4.1_028608m (locus cassava4.1_028608m.g) derived from phytozome v7.0 (chr-ID scaffold06278; pos 148373 to 149233)
ggactatccccgagtgaccttgtaactgctctgaggtgagcttattttttaaattactcatcataggctacctttcttcttactgttttaaattttcattttttcttataatagtgagatgtttctttcctatccttgttctagcatcacagaatcaccagcttcatgaggtcttagtgatcttcattgcgcattgtgattttatgaaaagttaaccatttagtctttatttttagtgattgatgtcatagagaacgtgtcagcaatcacttctcatgaagcttaaggtctctttattgcccctcatttcccacttgaggcgacgtcgttcaatatgtgttcatgctaatgaaggagcttcattgactatttcttgtaatacatgcggaaacgttgacaaaccatttgatatggagttcattttctttttgtcttgatgagtacttagagaaagtgttgttattttgaagtattagtggcaggttgatctgattcctcagaatgagcaatttccatgagattatggtgtgttcacattatgtttatatttttaggtcttagattgagcctctatgaatttgaaagaataacagagcaacgggcataacttttcaccacagatgttaagaataacatgctgctgctttatacatatcctctcttactcatttgtagatctagaaattataccaaatgaaaataacatatagtttaccattctcgattcaagaaaatgcaaaatgccttttttgcttgtagtctctctttctctctattttaaattgagtggcatacagaggttacctggttatacctttccatatgtgtgtatttgacatttgttcttaatcagggaatttg

SEQ ID NO: 45088 - DNA, 661 bp, Manihot esculenta
  Intron number 2 from transcript cassava4.1_021128m (locus cassava4.1_021128m.g) derived from phytozome v7.0 (chr-ID scaffold01796; pos 18387 to 19047 reverse strand)
tcagtctttcttgatatattatagcagataaagcatttttctcttccaatgttttaaaaatttgatggaattgaattaatttaaaattttaatttgattttttatttattttaattcgatttgatttttaattttaaaatatttggttatttcagtttgattcaattttgataaaaaaatcaaaaaaattaaaccgaaccaattagtgataataatatattatttttaataatgtatagagattagattatattaaaatcaaaatattttaattaaattttaaaatactaaaaataaatataaaaaataaaaaattttattaaaaattcaaatcgatgaaactgaattgaattgaatcagatcggttcaatttgatttttaatcaaaatcgattcgatttgatttttataaataccaaaatttcaatttttagtttatttggttcggtttgattttgaaccgaaattttagttggtaaaaaccggtttggttggtaaaaaataatataatattttattaggttataatttacttaatcataaatgcaaagtttaaagtgaacttattccaacttcaataaaaagtggagacttatttgtaatttttatctttattttcataattagtcaacataataagggacagacctaaaaaaaaagaa

SEQ ID NO: 45089 - DNA, 592 bp, Manihot esculenta
  Intron number 3 from transcript cassava4.1_015374m (locus cassava4.1_014862m.g) derived from phytozome v7.0 (chr-ID scaffold05875; pos 1561955 to 1562546 reverse strand)
aacttaaagagatcgtctgtgctaaagctgaggtattctattcgtggcattttttttctcttttcttctgtggcaccgaattcactttggctagtttttcattgaacgagtataatgatacgaaactggttgaatgcttcaaacaactcccgaattcttgattggtttgtgttagaagtggaatgtgaaccctgggataggatacaattctatccttttacaacggagccaaacgcagtctagtagaggtggaattggaatactttagcggaattttgaaattgcctaaaatgaaatttggaacgcattcatttataattatattacgttttcaagcaaatcaatttagtggatttggaggtttagtatgcagtaattcgttaaaaacattggtagtgtgccttattttctaaggtgagagcgttgggtttcttgcatacaagaaccatcaccatggagtttggtctagtgagaactgagattggtataagcaagaaaaaggcttagtctagagtttctttttgatttccttccccttgccattgcactcattcatgaattaataagtgactgaattatggataggtagtag

SEQ ID NO: 45090 - DNA, 1007 bp, Manihot esculenta
  Intron number 2 from transcript cassava4.1_017423m (locus cassava4.1_017423m.g) derived from phytozome v7.0 (chr-ID scaffold08359; pos 1348276 to 1349282)
attggactttacttctttggggtgaatgtatgattgcaaaactataatcttttctttattataactatttgctcttgaagctgcttctgttcagtacttcagtcggttattcatttcagaatggcttttgttcaaagatgcattctgacattatactaaatgataacttgaagaaaaacaatttttttgcttggaaagactgattgatttacatatgttcattcttataaatggatttaaaattaaagatctgaacggtctatatattctggtgggtggttcaaaattttcctaatatatgctcaaaggatatcacccatataaaatgggataacgtggatggttatgcttgtctggtcgcttttcacacattgtgaatgtgaagtcattttctctaatctaagaaacaatttcttttgtttggatggggatcaaattaacccattacctgtttacttgtttaggatgggtcatttcaagataatactataaaagttaatcctgttgatctctttttttactatattaacatgtgtatttttctatgaaaacaagattaactaatttggtttccatctggacatttaagtatgattgccttcagtttcaacaaggtagaagttaatttatgttgttggggtcatgtagaaaaaagatcaaagatgtgaaattatgggaagggttctgtttcaaaactggttgttaggacttcgaatatagagaaatcataaaatgatgtcaagtaatgtttactttttttttaagtattaaaaatcaatttctgatgaaaaataaatttcatattaacttcattcagtgatgatagacagcattttaagtatgtagacaccttgcatttcaaccccccccccccccctatctctcttggtatagttgtttcttccgtcagttcctaaagctgatgtgtctgtgctgtgtgttctttttccttttctttttcctgctgctcagattggaagaacttttggacctgattacttgttaaa

SEQ ID NO: 45091 - DNA, 620 bp, Manihot esculenta
  Intron number 1 from transcript cassava4.1_025921m (locus cassava4.1_025921m.g) derived from phytozome v7.0 (chr-ID scaffold03404; pos 169542 to 170161 reverse strand)
ttgtatacttgtttttggctttctgtccagaaggggtcaaagaaaaaaccgatagagaagaaaaccaaaaaaagaagggaaactattgtcggaagaaggatggacattattaaggtaaaactcctctctgctcctttcttttttgagtaaattaatatcaactcccaaaatatttatgaaaatcaactaattcattctcatttaaaaatcactcgaactaaaatatttttttattttataaaactcaactctttaatcattatactaaaaatatatgataattaatttaaattatttatatcttaacacaaaatctcaaagttactgtaaaatttaatgtgttcttaaatttaatgtgtattttatctctgaaaaaaattgattgaatttatattttataaaaatttgataattttttttatttaatttgccaagcaaaacaatcagtccaacatctctagttataacacgagggtactctgttttcaatataattaagagagacctgaatttttctacagatttctacactggagacgctggttaccagaatgagttaaaaagaaatttgtgaagtaacttcaaacttcagcaaacaaaacgtcatcggttcaggaaac

SEQ ID NO: 45092 - DNA, 789 bp, Manihot esculenta
  Intron number 1 from transcript cassava4.1_008280m (locus cassava4.1_008280m.g) derived from phytozome v7.0 (chr-ID scaffold03581; pos 1222603 to 1223391)
gaagctgtacttggtacgctttctcttctttttcttctttttcttcttttatgtttaaatacggatgattttctaacgatccctcataatggaaactctttcgttgtcacttcacgttcagttctttgtttttttttttttttttacattgttcatttttaatttgagattttgttgggtcccttcgtttcgtaatttggctttgattatttgaggcttgcaatatgtgtgctaggggttttccatttactccgtttttttattttttgtggtcaaaatgtcgggtgtggatcagttttcttttgctgtatgtagggcttgtttgtccagaaaggtatctgtttggttgtcgagaaaatttagaggaaagaacttacctttgaatggaagggatctctatttcttggctgttaccttaagtatctaaaataatatggtccatacgtccatttacatgggttaccgtttggcatctgagaaaatggacggaaaagcactcagctcaagccaatggattataagactacatctgaaagagctgacatgtccaaagttcatttgtttcttgatttaatttagatttgaatactttttttcctatacgtctttaatgtgtcttatcattcactcaactagtcgtaagaaaaaaatgttaacaaattgaacttccctttcttttcccatgcatttttatccattgcgatttactgtgctttctttttaaacatttcccgaatatgcaaggtggagtttgtaatagttgtttggcttctccaattttcaggtttt

SEQ ID NO: 45093 - DNA, 758 bp, Manihot esculenta
  Intron number 1 from transcript cassava4.1_000706m (locus cassava4.1_000704m.g) derived from phytozome v7.0 (chr-ID scaffold05309; pos 151234 to 151991 reverse strand)
ttcttttggcttcaagtttgatccatcggatctgggtttgtttcattttcactatttctctttcttttttccccttcaagtcattatgtatgtgaagtttattgattttttttcgtctaatctttctctgtgggttttttttttggaagaaagcaaacccaattctgattttgtctgaattattggttttcttgttaatgccttgaattatgatgcctttgattttgagccttctgttttctttcataggttagttggtttttttttccttctgtttttttaaaggatctgatgttccatttgatttacaatttgtttattcttttattgattttatatgcattgtgaggcatctggaaaaggaatatgtgggaattccatctatagaatcttttcttaattgaaactgcaacataatcgcacgccaaatttttgggctgatgattgatcttttaaagatttctcttacatgtaaaatttagcggcttctatctttttattttattttattttattttatgctgtctttagtccatacgataatgaattaagtgtaaattgaatgtctggattgttggcaattttcgttgtgtttggtgttattgaattgtttttgttgctgtttgaaatgagtatcttatttatatcactcttattgtagaaatttaacagttggatttctttcaacagtgcttaagaggggtctttgaattgaactgtgtgatttacactgctattataggtcactgcttgtgaca

SEQ ID NO: 45094 - DNA, 446 bp, Manihot esculenta
  Intron number 2 from transcript cassava4.1_018081m (locus cassava4.1_018081m.g) derived from phytozome v7.0 (chr-ID scaffold06948; pos 393844 to 394289)
agcgcatcgaaaccactgttgccaaggtgcttattttcaatctcttgttcgacaattttaagggtttatgggaactatatgtaattttgattgagattttacttctttactatgtttaattttatatatatgctctcttttttttctctttttatgttaaatatgttgatcgaaaatctgttgtagttgggagagtgagccgattgaaatctggttttagattattgttaaactgagacagtaagaataatgtctgatttggttgatttagtttttatataaatgcatgttcagttggttgttctttgggtttgtggtaatggtggtaaaatgataattggtaaaggtaatgttttgaaaagaaagaaggggaattttactgagctacgtaatttgttttgttttccaattttcaggcaaaagagattcgacgacttgcagataat

SEQ ID NO: 45095 - DNA, 985 bp, Manihot esculenta
  Intron number 3 from transcript cassava4.1_018081m (locus cassava4.1_018081m.g) derived from phytozome v7.0 (chr-ID scaffold06948; pos 394293 to 395277)
gtgcagcttgggaaagaggtgtgcatgtgattggttgtttgattgagtttgcattctatggcatgctgcatgttctataagcttgaatagatgatagaggcttaagaatatgaatgcaagctggtgtaagttccaagcatctcaacgaaggaacatggttatgttgaaaggggcttgcttgttcaccaaatggttctcaagttgtgagaaaagcattttacagaacagttctggtttccgatttctgtaaaattttccctgtatatattttgggaagaggcacatgtctgagttagaaaaaatacctgttatgcgggttaattggaaatatgggaacttggtgtggccttgaattgagaactattatacagtgctaaaaccagttggctttctctacaacttagcttactctaggaattgggatgggattggggcgaggataatttcattctccatgtttgtctccacttcaaagggggaattcccaacctgtctcctgcctccctgaattaactatgtgcatcggcctgaagttggggatcctcttggggcagagattatactcccaccccaccaatggggatgaatttcccccagtctgatccctgagagaacaaagatgagaacttcccaccttgttcagggtggtggtggatcctgcaggaaaagagaaatcactgcctctctaccttcctgacttgtttctttcattggtgaactataatattgtgtgtttaacattcattttaagaatttcttgactctttctgggcctttttccatttatgctttactttgtccattagtttaaggattttaatttcattaattgattaagatatcccatttgttgctcttattgaactgcttgaaagaataaaacatagcattgaaagtatatggagtaacacgccatcattatcacattctatttggggaaaaaattacagggcaccctttgtgctgcaaggcgtgcagctgcttt

SEQ ID NO: 45096 - DNA, 316 bp, Manihot esculenta
  Intron number 2 from transcript cassava4.1_020005m (locus cassava4.1_019951m.g) derived from phytozome v7.0 (chr-ID scaffold03408; pos 81702 to 82017 reverse strand)
tgctaacttgcgggctttttgcgagctgtctcgtaccttctaccgtacttgtcaggatcgctagtggtctctttgtgagttaccatttctagggcacacaaaaaaaatgaagacagaatgtttttgaattgttgttattcataaggtgttactctgaataacttcaattgcaaactggaaattctctcattgttttttcagtaacttaaaaatttatggctgattgatcaaatgagcaagaaagtggttaggtttttgtttgttttcataaaactttgttaatgagaagacttgggattgggattgatagggagga

SEQ ID NO: 45097 - DNA, 979 bp, Manihot esculenta
  Intron number 2 from transcript cassava4.1_023971m (locus cassava4.1_023971m.g) derived from phytozome v7.0 (chr-ID scaffold12865; pos 25754 to 26732)
agaagactctttctaccttgaactttgcaggttcgaaattttctcctttctttatttttaatttttttaaaacttattctgttgtgggttttgttatattgctacaagagtctgcattttctattgctttctcgtttctttatataaatttccaaaattttatttttcccttgtcagttttgctttgagagcttggaatggtataatttttccatatataaaggcaactaagagatggatataaatggtggtatatatatatattttttttcgtttcagaggcaaaggacagctccaaatacataacatttcagtagtagtagccccttagtaaattttaattgatgaaatggctactcatgttgcttgttatttaaaagataggatcataaaatggtaaattgaaggttggtaatatttctttttggcatgatagaagttacagatgaactggagaaataaaattcttaaatgggctcccaaagaccaagtggacctgaaaatataatgtttcttctactcttggtaaaagtgtagttcctaatatcaacccttttcatttgaggatactctcataaacctatagtttggggcttctttttattttaccttgttttaatttcttcgaggggtgcaaaacaagcttattttcaattagcactctttccacctatcttccaagttatacatgaatgcataagaatgtatggtcacacacttgcttatttgttgtatatgtatttttgaacttagattttctttccatctatattaaacaacatgatggggtatgccatggtcttaaaccacattttgaaatttgaattttatctgcaattataattatgggctctttatctcctttgatatgtatgtggttccctaccttttttttttttttctttcagagatcatatttctgctttctgtttgattacatgcagattcaaagactctaaaagaagagaagagggaagaa

SEQ ID NO: 45098 - DNA, 861 bp, Manihot esculenta
  Intron number 1 from transcript cassava4.1_000883m (locus cassava4.1_000883m.g) derived from phytozome v7.0 (chr-ID scaffold03581; pos 389861 to 390721)
tttttttctcggtcattcactttctttgcaggtcgctctctctcttgccttcttgaacttagatttttacagtgtgattcaactttttgatggcttgttgactatggtctttgcctttgtttgattatctttggtttttcggtttttttttttggtttgttttttgaatagcatgtccagctttgaattgatgtaagagctactactgagccttatcttcattctatttcgttgaatttttgttgaactgtacatatctattttattaagcttcctctcccatggttgtatgtgataaattgtaagatttgacacatgtttacaattgttaattcttgtttcgttgctgttaatattagtcttagatttcttcatgttcagtgtctgagaaagcaaattaacttcaaatgctatgtttaataactattggtttgaacttcccgtgctgttgcgatctgagtttatccgtacttataaaggaatgaactaagaaagaggtaaaaaaaaaagaacgttttaattgttttttctgataattgaaactcatctaccctcccaaaaaatggattaatacttgctaaaatatttaaaatgtatgatgttcactattccctgtgctcttggcaacccagcagaagttcaacaagtgatggtaattttcatgctttcttttttcttttttaaagcaatgcttattgaatgatgaaggcttaatcacataaacattattagttgagagtcttcagattttttgagtttattgtcaattaaagtttgaggtggctgcttattcttggagacttattcaaaaaagcgattgaacataagctttttttttttggcagtgaaactggagaatcg

SEQ ID NO: 45099 - DNA, 677 bp, Manihot esculenta
  Intron number 1 from transcript cassava4.1_019256m (locus cassava4.1_019256m.g) derived from phytozome v7.0 (chr-ID scaffold12455; pos 593634 to 594310)
agaagttggaagcgctggagggctttgtaaaccaggtacttggcacttactggccatttccctcaagtcggtccctttgtttgagatttatttctctgaattctttcatgcttcttgagctccttccctacatggtttgatttctttattttctgtggcggggtagaaacagaatccacttatccaaatgggattatgattgttgttatactgttatgtttcccgtgacgtcacataggattgactggttattctgcacgataacatgtaaattggaaaatagctagttttattacttttatccccttcagaaggttaatgtgtaagaattcatgtctgcttgatctgagtcagttaatcaggaaaatggcagttatttagattgtgcaacccttatttccacttcttgtctggcacatattcgtacaacgaataatatcaaaacatgtggattctggaattttattttctttgattcttcttctggccgttaacgggaaagaatgagagagagagagtctggatgagctaaagctttcctgacaagcaattaatatgctgaatgacatgctaattaatgcatatttgtcaacttttctcttgatttctcagttttcatcgttcatgcttttcttgaaacaggcagatcaccttcgacagcaaactttgcaacaaat

SEQ ID NO: 45100 - DNA, 891 bp, Manihot esculenta
  Intron number 3 from transcript cassava4.1_004007m (locus cassava4.1_004007m.g) derived from phytozome v7.0 (chr-ID scaffold06582; pos 880051 to 880941)
gccaaccaaaagcctctactattcgaattatccaagtatctcccttttcatatcaatatattccatctttcaaactatgctattctgctagtaatgtgcaatttgttttatttaactttttagctcatggttatggtttatggaatgtctcttttcttgatgcttttttagcaaaacatgagttaagtttgagggatttgctctttagcttaggactgaatgagccatttattgtactttctctggaatttaaacttaactttttagctagtgctaatgcttatggatcatggaatggttctattcttaatgctcttttagcagaacatgagttaattttgggggatttcttctttaggaaaaatttaatgtgcatgttactgcattaatttttgatggttaagttttatctattgaaccttgccttaatttttacattgacatataatgacctattctatttctattcaaatggtctaggagtctcattgtctgcataggtctttatgcattttgttgactcatggctcaatgctttttggatggttgtgttacccccttcaagaccttgttcctctattgtgcaatccaatgattgataagtacccacagtggttagcttgtatgttagagtataggagactttgttgtatcatttttgagcaaaaccttcttaattttttacaaatgtatattctatttgttttggcattacattctttattcaattctattggcaatctgttagaaatatttgttgtcctcttattaattttctaaatatgaagcaagttctttgtttattcatcttaagcaaacatgaatatttagttggaccattgcttcaatcttgcaggataaatatctccaaaaggttcatttttctcggca

SEQ ID NO: 45101 - DNA, 885 bp, Manihot esculenta
  Intron number 1 from transcript cassava4.1_005163m (locus cassava4.1_005163m.g) derived from phytozome v7.0 (chr-ID scaffold03581; pos 1410024 to 1410908 reverse strand)
ccaagaggcctggctgcgataataactttgttctggtacatcttaactgtactttctttttcttctctagtcttattttgagttcatgttcaaattttattttgatttttcaatggttactgttgatttctgtttggttgccgggaaaatttcaaaagaaatggaaaaaaggggcggattattttactctatggttggatgttggcttttggtattcactatagtaaataagcttactggcttagttagattggatgctgagtcgcttaacagattcactttagttcagtatttggtttgatatattttgttttgttactatttgttttctgtttgcttgcttagaaaatggggaaatttggtaacgcaagggaaatatgaggatttttttccccttgtgctgctttgggattgcaaaatgaagggctcgattgaatggtcttaatgaaccgattaactcactctgttttctgtgtatgagtgtttaagtgctgaaaaaattagggaaaagttcgatgtaagagcagcaaaaaatttgtctagcattatgcattaggtcgtgttggaagataattgttatgagagaaaaagaaggatgaggaattaaaaatcttaactctaattttactgaagatttagtattaggttcagtcaggtggtgctttccgtttttgggcattaaatagtaacatttttaagttataaagtggaattatgccatgaataaaatccaatactctctttcttttcagatattgtttcaactccaggggtaagcttgcttgttgctttgtgatgttcatttcctctgaatatttgtctattgtatgctatgtttgatttgttcctgttttatttaataggtaaaagtccctacttgggttg

SEQ ID NO: 45102 - DNA, 896 bp, Manihot esculenta
  Intron number 1 from transcript cassava4.1_003599m (locus cassava4.1_003599m.g) derived from phytozome v7.0 (chr-ID scaffold06582; pos 30896 to 31791 reverse strand)
ccaagttccgccaacgttctttcgtcaaggttcttacctcttttttttgtgatcaatttgactctttccctctctgcagttgcttttttattattttattgatataaccatttagcttgatgagcttgatcgtgtttgtgtttactttggaggtttgtttatatttttgtgggaatttgagatagaatcgagctctttttgctttaaatattggttagctatggaatacttttgtggatttggttaattaccaataaataacgacaatgcaatagcagcttcgatttctaaattctcaactcggcaattacaggttggctgtaagaattctatttcctgctgctcttttatccatttgttggttttctccagtgctcgtgaatctattataaatggacaatgtcagttgaccatgaaatttctttttcagatctaattatttctattaatagaattctaaacttggatatcgcttatttagccactgattcaattatctattcattggtgatgtattagtatgaaattcttatcttataacgtggtatacaattcttctcattttagtacgaagcaatatatcttgtaacgcagtttacttactccaacaatctccttttgttgtccaaaatttaagcattaacctagacaatgcatcttatgacatagccgtaaaattgttattaagattactaataatttatcatgacacttatgatgtccttaaagtttctttatctttctcccgtgtctttatacagtcatctatttattgtatttagaagcaatgattttcattgatataaatattcatttattctggtagaatgcttccagcttattgtgtcttttttcttccaggtgatctcgcagtccttgattactagtaacttaaa

SEQ ID NO: 45103 - DNA, 680 bp, Manihot esculenta
  Intron number 1 from transcript cassava4.1_009486m (locus cassava4.1_009486m.g) derived from phytozome v7.0 (chr-ID scaffold04056; pos 221090 to 221769 reverse strand)
atttcgcgattcaatttctcctcttgtaatctcaggtactcttttgcgtcgcttcttctggggattcaacttggcattcccgagctttgtttgttttacatgaattgatggtaaaattttcaggttttggaacgtggtggaaagtaggttaataatcgttcgtctttttgcatgatctaaagctagattgctttctcttttgaaaattattgcaaatttattgtgtttttgggaaggttagctttatgatcttttgcttgtttaatcttatactttgggatcacattcagctttttttcaatgtatttacagacttggaagttggttgtgagtctcaaattcaagtgtatattgtgcttctttacaatcaaatgaatttcaatgcgaaattattctttggcttcccatttttagggaaccaattgaacaattggagtttaatttgtttttatccaattaattgaaaatttttgttgaaacggggttcctttaattactgcagttataacatacttttgtaactagtctttgaaggatgagaactaacaatatagcatccatttttactgttgttgtataccaagttaatatgatcttgaagctagttccagtaatgaactcttcattatatttactattgtgcaggtctggtgcactgtgttttcttttttcttataaaa

SEQ ID NO: 45104 - DNA, 542 bp, Manihot esculenta
  Intron number 4 from transcript cassava4.1_030720m (locus cassava4.1_030720m.g) derived from phytozome v7.0 (chr-ID scaffold04165; pos 72615 to 73156 reverse strand)
tgctgtttgtgttgttggtggtgagaggtcagtttacctttttagcttatatttctaatttgcagtgttaattaagccttgtgcatttgatggccactttttcttgttgtgagatgttaataaatgaattgcctcaccttttgacactgtctcttaaatatatgtggtccatctgtacaacaatcaattctttattgcttaatgtgctgatactatgaggttgtttattatgaatatgaccataatgctattctagttaatcaaactaaatgtatcactaaaggtcttctaaagatccaacctataaaaaacaaaaagattcatgctggtggtttaccactatgtatcccattctgcattatatcaagtttcttttcacagtattggtgtgcgtatgccagttattatttatatcattcctaaaggctatgatatttaaaacataaaattcagcaccagcaatatctcttcttataatttgtatgctgggtaaaatattttgtgcagatcacttattgcaaatttgtcggctgcaaattgtt

SEQ ID NO: 45105 - DNA, 951 bp, Manihot esculenta
  Intron number 1 from transcript cassava4.1_007265m (locus cassava4.1_007265m.g) derived from phytozome v7.0 (chr-ID scaffold05694; pos 115089 to 116039)
gtgatcgcggctgcttcttccctctccttaggtaatcgtctctgaaagctctcacctttttgttttctccctatttttgttgtttctacttttagtttatttcttttgacgaatgcaaattgattttttgaatgtttatcaatttgtcaaatacccatttgtattttgatgttattgaggacaacccttttgatattttgcttaatttcagtactcttcgttgagaaaggctggatttagagatttctgtttggaattttattaaaatattgaagcagccatttcagtgcaaagttattggtggctgatcacggaactattttttaaccgttcatgatttttgtgtgagattctacttgaacgtgaattttttggttactacaatgaaatttcttgaaggaatcctcgattgaatttgtgagtcctagctgaaaaaggcattgctattgattgcgactgcgatattttaactacgaacaaatcttagatatagaatagtttgtttgaatgtttgttgttagtatctttttaagctgagctgctttagaaatgcttaaaaaaaaaaaatcagattttggttttgattttaacttcactttgcggcccccttctgtgtattgcactttctttctcttagaatctaattcgtaattattggggaaatattgggaatattatggaggaactaggcgagatagagatttttctgtgaattagtgaagtaccaatttcaatttcatgttttataggaaagtcattttgacctttttgaaaactcttatatgaatttaactcaactatggtgcctgataagttaggaactcagctcggtgagctgatgatctcttctctgcttcttcaccttttcaaacctttattatactttatttcaagatattttcctgtaacatttttctcaaacctaatttcaggtcattcccactgtcaatt

SEQ ID NO: 45106 - DNA, 668 bp, Manihot esculenta
  Intron number 1 from transcript cassava4.1_033694m (locus cassava4.1_033694m.g) derived from phytozome v7.0 (chr-ID scaffold06453; pos 8796 to 9463)
aatttaaaccaaaggtaagataattttaattataaatatatatattataaatttttatttatttatgattaaaatctttctcaaaaattattgaaaagttatataaattcaaagactttgatagatgtattttaataataattgagtttgattgttttttttttatggtttaacatttttaaaaggtaatataataattagtatttatatttttaaaaattatctatttaattcttataaatttttaggaaaagttactaaggtagtccatactataagaagttcgttttagtttttatttgttaatttgttgtattatttcttctttatttaataatgatttaaacattaattctaaaataaagattatcaataattattttctttatttaagaaatattataattagacagaaaaagttactaaaattataggacttctagtttcatgattggtaacaatattttcatttaatattttatatcaagttaatgactaacgtcctccttcatgggtttttctcaaccgtcaacctttgaaagaagtaagaaatgaagcaattaatgctatatatgtataaaaatagatatggcataataaatttattaatcttcttaaataatttttttttaggtggcaaattttggacttgctcgatttttttcaaa

SEQ ID NO: 45107 - DNA, 701 bp, Manihot esculenta
  Intron number 2 from transcript cassava4.1_029114m (locus cassava4.1_029114m.g) derived from phytozome v7.0 (chr-ID scaffold02423; pos 16197 to 16897 reverse strand)
gtgataccttcacctataaatttgttgtcgacagggtaaatgaccaactacacaatcccttaaaacagaacttaaatttagagttttcctcaattagtgaagtttaaggaagaaaacaatttggacacggcttaataagactaacgatgctgagtgaaaaaacgtaaccaacataaagaactaaaccgaaaacatatgaagaccataaaacagagcactcaaacccagcagcataagcatgttgaaagaaagcaatttcatttggccaactgcaaaagcatgttgaaagcaagtatacccatcatagtgcccaaccaaacaatactcagcaacacggcaagtaacctgcaaaatcaagcaaagaactcagactttcctgtgataccttgtccagccggagaatccgctagaataagacttcatatagcaaattgactagtggttcaatattgtttttcattaatgaggtcgagactcttaatcctcataaataaatcaaatagtcactgtgagtgctttattattcttaatcaaccgatccagagaataatcttgataaagaaaaaaaaattcatattaacaattattttcattgtgcaggacattttcacattgttataaaatccccacaatgatttctgctcataatttgccaaatgcattattgacctgttgcttgattactgtagcctggaacatac

SEQ ID NO: 45108 - DNA, 412 bp, Manihot esculenta
  Intron number 4 from transcript cassava4.1_006742m (locus cassava4.1_006742m.g) derived from phytozome v7.0 (chr-ID scaffold03834; pos 356051 to 356462)
ctcttgtgcgaggtaatcgattctctctttgtgcattcagtaaccacagaaacctgctgcagcttgatttggtgtgtaatgatttaacggtgatagcacaaggctcattgtatagaaattcaagctttcacaacttgtacaagctgtctgtgccccgactgtgctcttttgagcaaatattatcttttttctttctttcttaattttcattgtgtatttggtttctctttctgatacaattagatatccagtttatgaaatggaaaaaactatttcaaattggagtggactgagaaatgcttgctgttcttccagttcaaaagattgagcagaaacagctatttcattggatgtggttacagtatctgataacttgagatgatctgcaggcccagaaaatatttggtaacag

SEQ ID NO: 45109 - DNA, 742 bp, Manihot esculenta
  Intron number 3 from transcript cassava4.1_025493m (locus cassava4.1_025493m.g) derived from phytozome v7.0 (chr-ID scaffold06582; pos 327052 to 327793 reverse strand)
aaagacacttggattctgagataattgattttcaggtatgctacatgattcctggattctataattaggtcagcagacttaattgttttaaggaactatgcatgttagtcgtggattgcaatatgatacaatgcttataattggtcaccttataccccatcaaataataaatcttttgcaatacttggagtgcagtaggaaacttcctcttaatgtgataccttttttccttaatttgcttgagaaattaataattgtggatgagacaatttacattgaggttttgaaagttgaagcatgctgttaaagaagagaaaagttggttaagatggctaagccaaatgggagatgggcaggggaggtggtttaacagtaaaccttcataatctcttgtttattatggcaatcgaacagtagaaaagaagaaagagtgaggaaagagagaagggagaaaaattaaaatgaatgaggtttacctttaaagtatttgatattaacagacatatgtgatataataaacaaccttcataatcttttgtttatgggcaatcgaacaagggaaaagatgaaggggtaaagaaagagaaagggaaaaattttaaataaatgaggtagaaagtggtattactatattaaagtgcttggctctttacatatttattgtgattttgatattttactgatgcaacatttgttttttcatgtagatattggatagtgactattcaaaacttgcattttt

SEQ ID NO: 45110 - DNA, 598 bp, Manihot esculenta
  Intron number 2 from transcript cassava4.1_022189m (locus cassava4.1_022189m.g) derived from phytozome v7.0 (chr-ID scaffold06582; pos 51810 to 52407)
tgattttgcaggtaattttcaggttcttgcttctactcttctgcaaaacattcgtcatttcgtttctgaatgtccaaatccacaccctccaattctccaaccactgaagagaagaataaaagaaagagaaaaggttttgagaaagtggtagctaattaaagctagttttacacagctataactataatgtcctgtgagagtaaccagttgtgatcatgcaatatcttttgccaagttatgtcatcatagcttccttcaactttaataatgatgtctccaattttattattttttctttgaatttcttaaaattttttacaacttattaattagttttaataataaataaaatcagtttaaccacatgttgatcatgaattcttaaaaagcaagaaactaagatttgtcttcgtgtcaagtgatgctaatcattcgatatcttgagcttataacttgtaagaattattgctgcagctgtatatttttaaacagtaagcaaacttgaaaacgctagagtttcctataatattaatttatatataattccatttattaactggcaggtactctcagtgcttctcgtcacatctggagctat

SEQ ID NO: 45111 - DNA, 823 bp, Manihot esculenta
  Intron number 2 from transcript cassava4.1_004018m (locus cassava4.1_004018m.g) derived from phytozome v7.0 (chr-ID scaffold04716; pos 147246 to 148068)
accgatgtaagttagagagattttttgctttgattgtttgtccattttcttttcaatttcgaagcaatgagatgagaatttgtgacattgatatgaatcacgacaagaaatttgaaagcttttattttgattgcagtgaaactgtgaagcttttattgtctatatacattatctttattcttacctgtagcaatgatgttgaactttttctcatcaaatatgtgcttatgccttatctgtgctgtaatggatctggtctttttcttttggcctgtgtcttttggaaacaaaagaacaatgttctttgcctgctggcatttgcttttggttcttgtataatttcatatcctcctgtgaagcttctgatgagtttcttcttggacgcatatcctgtttagctgataggcatgtcttaagaatttcacatctctaatgaattttgcatccttgtgttccttgtttgctcagttggtttaataacatatttgatttacgtgctaatatataattgattagtgagatgatgatattttggtaatcactgattatgaattctattacattgcctttgcttaagcatcctgttggttcatatggtatgctacaattttgagataggttacatgttatggtcaatgttacgttgttacttctgttctttcaacatcatgctatatgtgattggttgttaaatgttaatgcaaaatcaaaaagttttacttggcatttggacttgttgcactttttaccttttgctgttgcaatttcagagtaactaattgctagtttattttccaacagattcccctgtctcacatctctg

SEQ ID NO: 45112 - DNA, 671 bp, Manihot esculenta
  Intron number 3 from transcript cassava4.1_008515m (locus cassava4.1_008515m.g) derived from phytozome v7.0 (chr-ID scaffold05875; pos 2404492 to 2405162 reverse strand)
tgttggagagcagctaattgctgcaaatcctgttggtatgtgtcttttcaatgggtaaatggcatgctttttttttccccaattaaataggtattgattgaattatacaccgagtccattacttatgcattattttcaaattttgaagttggttagcttctatattttggtgaaaattgaaagaaagctttaagcactgctgcatccatgtgcctatgttgcagatggccaaatcatctcagttatatattttttcctaagaggttccatattttcttcctacgaattcactctactttctacttccatgcatccatctcaacattcttatcttagctatgatagttgtaaagaagagaaatagaatggtgcgggttatgaagagagagagagaggaggagaaggagagagaggtgacaaaattagagaatggaggtacacaacgaagaactatgtatgggagcctatgcaggctcatctgaaatttgatacaatattgaaactatgcttcagaatgtttcttatcctaggaattattttttcatgattattgtttgcattatatgctagtttgttgcaagaattatggatgcttgtatgttctattgatctctacactatgtaaacccattgcagagctggctgtgggtaatatagtgaggcgtgtttta

SEQ ID NO: 45113 - DNA, 415 bp, Manihot esculenta
  Intron number 2 from transcript cassava4.1_006975m (locus cassava4.1_006975m.g) derived from phytozome v7.0 (chr-ID scaffold03115; pos 64642 to 65056 reverse strand)
tttactattccattcctcaggttaaatgatttccatggttcccaatgttctgattttcttttagctcttaaactaagtttcattattgtttccccagatagttagaacatgttggttttgaattttttaagcttgcatccacatggaactaagaattgttgagaatctctaaatgtgaagaaaagatcattacacaaagcaaagtttacataagcaagttttccaaaagaggcaacttgtttctgtttcccttattcttttatgggcactaaaatgatgtgttgactgtgtagttattcagacattgcataagcaggttttgtgtgaattggtatgctaagccttttcgatgctgagaattagttatgatattaatgcaggtggaacttgctaagcacctagtagcttgctcttt

SEQ ID NO: 45114 - DNA, 941 bp, Manihot esculenta
  Intron number 2 from transcript cassava4.1_005640m (locus cassava4.1_005640m.g) derived from phytozome v7.0 (chr-ID scaffold11297; pos 869942 to 870882 reverse strand)
ccactgagtcccagattggttactgtgcgaagaaggtactaaattaccgtttgatgctgttgttattgcaattttttaatttagcacaagtttaatgatgtcttctgcagttgttcgaagaaagttgccgacaggcaaactaatcattttattaacagtatttgcattcaaaagaaaaaaggaggggcaaaacaatgatccttccagacttcagtcatacatttgtggattatgctgtttaattttaaccatataagcctaatatcctagtcttatcatcattcaattgaataattttggtagattgcagttgtaatactatcctaatcttatcgtcattcaattgaataattttggttcatttcagttgtgatactttccatcatattcctttttctgactattaccatttttggttggtaggataatggtaatgactgacatcttttcgtttgttggattggattttctcaatgagattataaaataaatgatatgttcgcaaaaaaagaagacaaccatttattcaatgcattcttgaactacctcattgagttcctaacaggtctaatctaaccttgttgaaaacatttttaataatcttgttaatgtcggttgcatttaatacataatagctctattgtgacttgtgatatcacttcgcatatttccaatttagaaatttgatcccttcttccacttctaaaaataaaagatgaagaatatgagaatggaaaagaaaggaaaatgatcagttgcttttttcacattattctgcaacattggtgatggaacactggttttggagttaatgctctgttgatgttttgaatttctgtagctgcacaaataaatttgaattatgcacttctataattctttctgcttttgcccctatttcttcagggtaaggtgccattgttatctatagaagcactaca

SEQ ID NO: 45115 - DNA, 542 bp, Manihot esculenta
  Intron number 1 from transcript cassava4.1_025034m (locus cassava4.1_025034m.g) derived from phytozome v7.0 (chr-ID scaffold07894; pos 274902 to 275443 reverse strand)
ggccaatatcactggttataactttacggtaacttcataatctatctctagcttcaatcaattttacttagcctattcatttcttacatattttttaaacccaaaaagaaaaaaaaatattaggaaacttgatattttaatttctgcaacttattttcttaattgttattatatcaatttcattaaccattgaatagagctgatagctgataacgcataactaatacggatagctgaattcagaattaacaaaagatatcatattgaagccccaaagaaaatagaaaaaagatcaaaagacagctactagcacccccaaagaaagaaatccatgcaaatttatcttaataccattaaaaaaattttaaatttgaagcacaaacaaaaatatgaataaagattacatggatgtattaataatgtagaatctcctaaagttgtcctttaacaattatctgtgccctgctcctcgttgattcttatgcttcttcattttctttgctgtaggcagggttaagtgaagccctagaaacattttgcgg

SEQ ID NO: 45116 - DNA, 735 bp, Manihot esculenta
  Intron number 1 from transcript cassava4.1_015646m (locus cassava4.1_015646m.g) derived from phytozome v7.0 (chr-ID scaffold00924; pos 19328 to 20062 reverse strand)
gaaattgtgaaaccatctcccttgtctctcttttagctcattctatgctattactatttgttacctctgtgattatgaaacccattctttcttttctatctgtaaatttttgaagaacttaagaatattaattgtgtttgctttttcatttcgagtgcctatttgtggaaattttcatttttgatttctgggtaatcagttctctgtggcatgctttatgttaatgaatattctttatgaacaaataattctgcattgctttgtgtttgcttcctcttgtttgaaactatctcttttgattcacttacacccgttcctttttcctagctaatttgagagttttcaaccacaaacccaagttttgcattcctttttttcttttttgaaaactcatacaaaacacaatacgagaataatcttctagctaagtttttaccatactaggttgattttttaggtgttgtacaactgcaagtagttgggaggaatattttatttattttggttcttatttcgtgtgaaacttttacttctcccccatattatagttctggaagataatgaaatctcttctcagatgttgcatactgaacacaattggtttattacagatcgttgccaattttgttgattctaaagattgcacttctctctattaattcccttcctatgttaatgttgttcttctaaatctctattgtctcctgtggcaggtagagcttgctgcacttcttc

SEQ ID NO: 45117 - DNA, 847 bp, Manihot esculenta
  Intron number 1 from transcript cassava4.1_004793m (locus cassava4.1_004793m.g) derived from phytozome v7.0 (chr-ID scaffold05144; pos 75986 to 76832 reverse strand)
tgattgtggagcgctcaattcaccggctaagtaatgtaagtctcatcctgcttttatttccttaatatttctcatttgtatttgttatttactttatttagttacgcgttattttttttgtccgtcaattattattcaacttggaaaattttgtgggattatttggttgtctgagttgcattaagcttcaggttcttttctctctgtttggcatgattcattttgcaagaaaagaattcaaatgaatcatgcacgatttctttttttttttttaaataaaaactttgtaagttaaaaagaaatgaattcatacattccaaacaaaaaaatgacagaaaagaactgagttgaattgaattcttgtgaaaactttgattccaaacaagagattaaaaaaattatagggaggaattgctaattttctattaaaaaaatggaattgaaaatatcaaaatatatctttgcattcaagtttttggctaatgatatggaaattacagaagattttttgtcctgtaaattaggccatgcaattaggattacttggaggtgcagtttatggttttttatatgcataaatttgctcctaatatttggtgtgaagaaattttatgtgaatttccaattgctttgcttggaaatatatccacagcatagaagttcaaacaaggatatactcttaagattataattatcaaacagattgaattcaagttattttaatccttgcacaatttgattaccctgatattgatgtgcatcataatttcagtgcttttgtgtttactctcaatttcatttctttgtttaagtggctgaggaaaactaatcggaaacctttgcttgc

SEQ ID NO: 45118 - DNA, 933 bp, Manihot esculenta
  Intron number 1 from transcript cassava4.1_014844m (locus cassava4.1_014844m.g) derived from phytozome v7.0 (chr-ID scaffold05269; pos 312342 to 313274)
gtacctcaattcccctggcggccaagtcactgctggttcagtaaccacaaagccttgtttctattgtttttgtttttagttttctatggttaattatatgggtgacttgaaatcttccagttgatgtcactctgcttggcttatcttattgtaatgtttgtgggtgtgtggcttactacatcttatcatttagcgtttccgatttcatggatggacatagaaacatttaattattgcagctgattctttggatttagatgttctttgttcgcttaatagtgctaaataaaaaaaaggattgtaacgtttgataatattctttccaaccacttagcagtagagacacattttgcaaagttcatcagaaattagaatagattggaggaagaaaaaaaagaaagagaaaaaaagaaagataggaaggagagcttggagaacaggcagaaggtatagtttgagtggaaatagtgccttatcgaacaattttacaaaattttaattcgaagtgcgcgatgaaaaacagtccgttggttttggcacaccgcggatgctattgacttcatcatgtgcgtatcactgttttctcaagttttatgatttttgtttaagcttggattcgcaatttaaaataagtgttgttcatctgataaaagtattatctaattttgaactcagatgggcaactgttactcaagggtgatgaatccctgaaatgccatgaaacttttacaaattcttttgctgcttttttataatacttcttgtcatatgatactggatgatcaagcagtgggatattgtatgcgaatgtctagtcctaaatttattttagctcaactaatcagcttaagcatttaaagtttgagatatataattctctgagctatttaaatgttgatttttttgtggtgttttatgtaggtcttgctattt

SEQ ID NO: 45119 - DNA, 312 bp, Manihot esculenta
  Intron number 1 from transcript cassava4.1_025165m (locus cassava4.1_025165m.g) derived from phytozome v7.0 (chr-ID scaffold01086; pos 21448 to 21759)
cttcacctaccactcaagagcactgtcaaattgaggtactcagacgcaccaaatgtcaattatcctttgtcctagcagacaacaccacgtcaaatctaccctttactttctttaatttttaaccaatcaaataagagaatgtcagtctaaaaccttacccgtcaacttttcttcccaaaaacatgctaagagctccgatgagtggatctctctctttgttttttaatcgatcgtaggctgatttagttggtaagtttgtttatatctctgaaaatagccctattttatccttggaaaacctacctgtttgcc

SEQ ID NO: 45120 - DNA, 796 bp, Manihot esculenta
  Intron number 1 from transcript cassava4.1_004905m (locus cassava4.1_004905m.g) derived from phytozome v7.0 (chr-ID scaffold04495; pos 353209 to 354004 reverse strand)
gaattttaaggagaggaagggtgcttcttaaaaatgtattctgcatttaatttgatgattattttcaagagaatttagtctttttattttttttttgaaaattttctggtgattttgttgttagtatgcgcatgcatgtggtgggcttcaccatttatgtcctttttcttgttttgttttgaagaatttccttccagctttgcttctgcacttggtggttcccttcttttcttctcctttctggttccttcattttcagtagctatatttgacattttcttgtcttttcctgttcaaatgataaagatcttacatgggtttttgtgtatttttttcttgcaaaactatgaagaacaaataattaagatcttcgggcttttaaacaagatcttgtcttcttcttttctgtggctgagactgatcggtgtatacttgagactgagattgtttatgagttctttatccgtgtctttcttttttcattaaacttgatgtaaaatagaaagagaaatcgaaaaaagtaatacagtggagtacatagaataagtttcttgatactgctcagtgttgagagatcagtctattacatgtaaaaaacactttgaaaattttgatttggttcagtaatcaaactgctgtttaatggtagatggtcttttaatgtatagtgggcttttagattttcttttttctttttctttgtctttatttggcttaaagatatgggtcactagatcaagtacgaagaaaatattgatgtgaaattcatgttcatatggatcatgcagtgtgttgg

SEQ ID NO: 45121 - DNA, 885 bp, Manihot esculenta
  Intron number 1 from transcript cassava4.1_029740m (locus cassava4.1_029740m.g) derived from phytozome v7.0 (chr-ID scaffold08886; pos 1415 to 2299 reverse strand)
aagatagtaattttaccataaatacattaactcaaacctttaccatagataaagatcaagttcaaactgactatatgtcagatcaaaaccgagggaaaagggaactatttttgaacacttattccagaaaagaataaagtctacttaaaaaataattttttgctttttgtgaacaagtagaaaaaaccataccattttttacatatttaaaatattttcatgaaaataaattaaatgtattagagaagaaaatacataaatggcataaagtaaataatgacggtgaacctagtgatatatgcaatgaatgtgaaaaaccacctatggacagagtatgttttaaaaagaaccaaattgcttatggaatgcaaccaattgtaaatactaaaaatatacagagtaataacataagagatattaatttacaaaataattggacaaatgtatcattacataaccattctaactgaatataatgagacttcttctacttcagatgatgaaaccatatataatcctttagaaatatcagacttggaccaagatattactgttcctataaataccatggaaagacacaataatagaccagatgacttaaaaatcctagatagaaaacaaaaacaatataatgcaaaaaatatttatgaatggaatatagatgatctctcagaaatagaaataatacaaataaccaaagaaatggtcattgtaggcaatatttataaacaaagagttggtattactgaaagagatgcagctgaaaatataatattaggattcacaggagaattaagaacctggtgagacaaattactaagtaatgaaataaaaactaatatactaacagcaagaagaattgatagtactacaggagaaccagtt

SEQ ID NO: 45122 - DNA, 834 bp, Manihot esculenta
  Intron number 1 from transcript cassava4.1_014444m (locus cassava4.1_014444m.g) derived from phytozome v7.0 (chr-ID scaffold07630; pos 40989 to 41822)
attctgagattgaatacgctgaaaaacccacagatgtaagtttctaggttgtatttaaattatatgttttatgttgatttttatggtctcgtttgttgcttagttgtgcttaacatttggctagttcatataaatctctggcgttgaggtgggttggctttgtatctcccccctcattttgtacacttcgatgaatttcatcaaacttgggtgaccttttccacgtttctgcataattgagataaaatcccagccttcttatatttgaagataagtgggttcgtctctgtttgtgtctttatatttcttaattatttttgagacgttatgtatctgttttccttgtcctgtattggaagttggatttgcgagtgcagcagacagcttctttagaccggcgcttcttctgctgctttagtctaccttacaacctaagagtgctagcatgtagacaggacatctctttctaagtattaacttttaaggttactattgaattctatcaattatttgaaaattttaagtggaatggaattttgggaatctacacacccattttcaagggaaaccaatcatgctagatcttcaatcgttttgatgttattcatttcttaaatttcctattgtttttcttctcatagcagtatccttcttgtaccccaatatttaaatcttgttgataaaggtaatacttaaggatgcagtctgaaattcttattaaagtgattgagatgaatgaagttcacagatgctacaaacataattttaattttacttggttttgatgatccctaaacaggtagaggatctcccagctcgatttccgtttgaaat

SEQ ID NO: 45123 - DNA, 773 bp, Manihot esculenta
  Intron number 1 from transcript cassava4.1_019377m (locus cassava4.1_019377m.g) derived from phytozome v7.0 (chr-ID scaffold06407; pos 208397 to 209169 reverse strand)
ggtactctctctttctatctctctctctttttcccctgacacgaagctatggttgattgaatatgtaaatcttataaaatggtctagatctgatttatagaagcttaatttttggggttttggttaatttctgcgcctgtaccatgtgtagtttcatccgcgtacttgctaagttttgcatagagcttggctatcagtacacagaatatataaacgtgtgagatgacagtagaggtcaagagcctttgtaaattgtcatttgggaagattatgctgtccatgatctttattcttattgtaaaatctcatcttttgtttagaaatggttgtatatcttttttcatcttcaggggctctgagagctcagtttatacaatagcagtttattctgaatgttacccttctgcattatttaactaaatcttgtaaaaataatcttaagataataggtaatctcgatgtggaagcatttttctctagttgtgataccaattggaatttaagttcatcaaatttgcattgcatccctatcatgcaattcatttcaacagaaactttaaggttctgaagctttctttctcttttaatttcattgattgactttttatgctaaagaagcttcttttttttttttattaattagtgagttaagcaggtgactctagcgtttgagtctttgttgtatgactgcttttggctttgaacttaaccttaaactttgtttgagttcttgtgtagtactttcaagaagaaggctcctaaggctataaagg

SEQ ID NO: 45124 - DNA, 681 bp, Manihot esculenta
  Intron number 3 from transcript cassava4.1_020989m (locus cassava4.1_020989m.g) derived from phytozome v7.0 (chr-ID scaffold11581; pos 1102833 to 1103513 reverse strand)
agcatattacaagacaaacaattccaactcatcaggttttcataataattggctattattcttccttttatatttttatatttcttctggatgttcagtttattccacaatttatccacaaggctaacaataatatgcaatgcaagctatagttgtgtacatatgcacagacatgtttctgtgcagaggcatagacacatttttgtttagtcttctttcctcaagtataaactatatgatgataaggcttttaaatggtttgagaataattatttgcctcaaatcagagttcaataacagtagaaatggggtttgattcacacacacacaaaaaaaaaaagagttctgcacagaggtattgcatatccaaagttcaagtgcaaccaatattgaaaatttatgtgattatagtctatgttttagctatactaaatcatgattcagattttgcatctcatctctcttatgattgaggttgaaccaattgcctattgttgccaatctgcatatcgtgtttattgatttagatggctatgatagctgttggggtgatttttccttcttgtgaatattttgattatatgtttagaaattgatattagcggtctttgttcatcaattgtttgcatgcgtcttgttttttcagtgtgacagcagagaagtgggtgcccatcattgaag

SEQ ID NO: 45125 - DNA, 552 bp, Manihot esculenta
  Intron number 1 from transcript cassava4.1_027882m (locus cassava4.1_027882m.g) derived from phytozome v7.0 (chr-ID scaffold04137; pos 317782 to 318333)
gcaaggtaagctgaagacggatgggaagcaatttttttggtttttaatctgaaaattttgcttctcttggatgattaaaacactgggtgatgagaaattgaactctaagggacatttggagcttgtgttttggtcttgtttgatgggtttgtttgctttttttctttttgttgccctggttttgatgggtatattttttcgttttttgccccataatttctccctggaaatggaaatggtagctgatgattatggcttctctggtttcttaacattcagtcttttcaagtcgtattggttaatggggttcttttggcattgctatttgttgccctttcctttgatgatttcaaagtttccccaaatctaatctctgtaaatggaaatgttatctgatgttcataagtgctgtggttttttcgcattcggttttttcaagtagtgttgtctctgtgccattaacgggaacagtttctgtgctgtttagtgtttacattgatagatggtgtttttgcagagcttggcttatcgatagtagaacaattgcaagga

SEQ ID NO: 45126 - DNA, 844 bp, Manihot esculenta
  Intron number 1 from transcript cassava4.1_000669m (locus cassava4.1_000669m.g) derived from phytozome v7.0 (chr-ID scaffold09702; pos 9050 to 9893)
tagaagcagtgcccttcgacagaactgtggaacaggtctatctcgttttctttcttctttctttttttattttcaaatgatcgaatgagcgatctttctttcttctcttctcttgtctgcattgtaaacttattgtgttctctccttttcaacttatttttagtgtaaattgagtgatcaatcactttattgacttcccaatttgttctaagctttatcaattcaaattttgctttgctttgctggatttgctttatgcataactttttaagcaaggttgattgattagcctttccgagatcatgttgtatttgattctctcttatccctctcttttaataatcaaatttgcgttgcattatgtaatggatccttctatttgtttctcatttctagatgaaatgcttcttgtaattcgttttcttgttagtcataacttatgtcatgtccttgttatactacgatagttgggatctctgttaaggatttcacagagttgtctgttctttcacattcttgttagcaatgcacttccttttgcataggtatactagttttttttttttttttttttaaaagaagaaaaatctgcaaagtttggcttctgggttctcaagtctttactgtctgttaatgtctttttgcttcatgtgattcttcctctaattttgaacttttaactttggattttaactaacacttcgattttgcttcttttttttttttttctatatttgttccttgttgatttatttggtttgtccgaggtgggagtcttattcttaaaagttatatttaatggcatgcaggcaattttagctttgaagaagggagcgcacctgtt

SEQ ID NO: 45127 - DNA, 532 bp, Manihot esculenta
  Intron number 1 from transcript cassava4.1_012924m (locus cassava4.1_012924m.g) derived from phytozome v7.0 (chr-ID scaffold06748; pos 227520 to 228051 reverse strand)
gtggtaccaaggtagcgttcttttgaccttcccctctctttttttctgtttggatggttagaaaatgagggaaaattttattatgggtattagatttccaaatgaaaatgagaagttccgccaaatttaactggggtattaatgttttggttcagtttgggttgtgttttcgaagatttgaattgccaaattttattttctttttcttttcttccgtttcttcaggatttgcaataaataattatgtgattgtctttttgataagaactaaaggaaaatgcggatttcttgtaaaaaaccgctattactttttgtacttatctgggcagtcggactttctggtgatacttctccaggtttctgtttgtttaatgagaaaattctcagaaatttaacttaaatgttgtttccttttggcttaattttgaagttcttagtaacatagaaataaaaaaggtctaatagaaaaagaagagtcgaatttttgttagctaaagattctgattattaagtgtgggatcctgcagaaagc

SEQ ID NO: 45128 - DNA, 693 bp, Manihot esculenta; identical to SEQ ID NO: 44081
  Intron number 1 from transcript cassava4.1_018789m (locus cassava4.1_016732m.g) derived from phytozome v7.0 (chr-ID scaffold03834; pos 233028 to 233720)

SEQ ID NO: 45129 - DNA, 385 bp, Manihot esculenta
  Intron number 2 from transcript cassava4.1_020201m (locus cassava4.1_019951m.g) derived from phytozome v7.0 (chr-ID scaffold03408; pos 81634 to 82018 reverse strand)
ctaacttgcgggctttttgcgagctgtctcatggtaccttctaccgtacttgtcaggatcgctagtggtctctttgtgagttaccatttctagggcacacaaaaaaaatgaagacagaatgtttttgaattgttgttattcataaggtgttactctgaataacttcaattgcaaactggaaattctctcattgttttttcagtaacttaaaaatttatggctgattgatcaaatgagcaagaaagtggttaggtttttgtttgttttcataaaactttgttaatgagaagacttgggattgggattgatagggaggaatggaaaagacgggtgatgcacgtggactttcagtcagctaaagatgcaggatttttgcaacgatagt

SEQ ID NO: 45130 - DNA, 732 bp, Manihot esculenta
  Intron number 1 from transcript cassava4.1_008305m (locus cassava4.1_008305m.g) derived from phytozome v7.0 (chr-ID scaffold03942; pos 488815 to 489546)
tcacttttgtttcatttgcagctacaacatttcaagtatatagagcacgaagaaattgagagatggagagtatcttggctgttgaagcttcaagctgcgttgagatccagggtttcgaatgatggattttgcgttaactctgaaccattggcatgagaattcttcattttttgatctcttgtagaaaagaaataaagaaaggaaaggggagagagagagaaattatttttttaatttaaaaaatgatgacatgtcagtttattacctggctattaaattttacttatattgattaaattaatatattaataaattttaagttatgaattaaaattaagagatacgctgtttaacaaagaaattggactaaatttagcctaccaagtactgtagaaggtgttttttgtttttcgttgtatacaaaaaagttagcccagcgaaaaagcttcaaacacgtgcttctctgaggaagcgagtaccttttaatgaaacaatgccagctcagcaaacctccctgtatctaaaacagtaaactgcctcccactcatcataggaaattccaaaagtagcaaaatccttctcaaatttaacctttttatagaagtatttaatatgtttctgttccaaatagtaattttcaaaaaaaaaaaaaatctaactcttcgaattggaatctttcaaaaaaaaaaaaaaatagcacgcctcaacttcctcagtctcttctccggcgcc

SEQ ID NO: 45131 - DNA, 644 bp, Manihot esculenta
  Intron number 1 from transcript cassava4.1_001357m (locus cassava4.1_001357m.g) derived from phytozome v7.0 (chr-ID scaffold04251; pos 291664 to 292307)
ctcttcagctggttttaatccacagacccaggaaggtcagtgtttttttcgcttgcagattttcttttcctctccttttctattttttctttctctctttattctattttcatgggtttttttttgggggatggggtggggggttgaggcggaggcggtggcgatggtggtaaggatgttctctttcttcccactgttttgggtctattcatttagatcgagggttgaggcgagtttgtggtttaagcatggaattaggacgtcgtcaaagtccgtttattacgtagaaaatatggggaaggtgaaaagacattgagatcttcaaaagcagagtgggctgctagattctcttggtttggtgtaagctctttagtttttggattttcctttggtagcttaagctgcagagctcaatggatactaatgtttggatttttccaccctttttcagccttttcagtaatcagtcagaaggataatatggcgaatcttgttaaattaaattaatagtcaaggctcttagatgttgtagtgttaattttcaagtcttgatgacatcaaatataagttttcatgtaattctaacatgctctcgaaatgaatttgcaggggagaaaagggttttgaattctgaactttggcac

SEQ ID NO: 45132 - DNA, 391 bp, Manihot esculenta
  Intron number 4 from transcript cassava4.1_010261m (locus cassava4.1_010261m.g) derived from phytozome v7.0 (chr-ID scaffold08359; pos 1502780 to 1503170)
gggccactgggcaaatttcattgctggagctgttggtgagctaaccctttaaaagttcattaataacttcattttgctcacagaagaactttttggattattgctagtttattgcaattttatcttggggatggcatatttcactcttcgtgcaaaatttcatttatattatttacaatcatgtgcacgctctggatttctacatgtattatgtttcatacttaggtagaaagttgttttgtcagtgtgattctgctatgatatgaaggtcttatttgtttaaaagcacttttgatatttcttgcttcatcagccaatggatttctatgagaactctgattttccatcttcttgtttaacatttcaggagatacacttggttcttttgcat

SEQ ID NO: 45133 - DNA, 997 bp, Manihot esculenta
  Intron number 1 from transcript cassava4.1_026613m (locus cassava4.1_026613m.g) derived from phytozome v7.0 (chr-ID scaffold03542; pos 429679 to 430675)
agtagaatctacaaacccaagagttgcttatctatgtaagttataaaatggctccccctgccagtttgcattttgaggcatgcattgaagttattaactaattatcttacatccttttttttattattttcttttcttctttctttatctgaactaattttcttttaaactgagactatattcagtttttaacagcagaaagtagtttgagttgtaaaagagtccgctatactaatactgccaacatgggtttggcctgtatagaccgtcttgctggataatcagtgtgttaatatcttgcaaaatagtgaaatctggcttagtgttttttccatctctccttcatgtctattgctttctatgtgtcttactgtgtgttgggttgtttaagcttgcttttttgctttttcttgcaagcttgcatttgttatattgagcgaatttataacttttgtcacttggcatgtatgtccatgacatgagatttaatatttggcatcctgcagccttacgtatgttagaatttgcatgccttaaatatgctacattcatgaattggattgcatcttattcttctcctgggtgtactggtggtttagattctgcaaactaattgttgctgccttttctagactattctatcttgataactaaattataattttgtgtgcatttctagtctcctgaaagcatttttttgggttctgaatttagttgacagtaactgaatgagaactggtgccaaatttaacttgaaaagcaacaataatttgtatgcttttgaattcaaacttttccttgcattcctcaagcaaacagctatatacatttggatttttcttctatattttgatattagatcttccatttgatatgtatatgtatatctcattttcctgtatccttaatgtaggtcgattttatgcatttgagaaagcacataggttggaccctacttctagtggacgtggtgttcgccaatttaaaactgcactac

SEQ ID NO: 45134 - DNA, 772 bp, Manihot esculenta
  Intron number 1 from transcript cassava4.1_026993m (locus cassava4.1_026993m.g) derived from phytozome v7.0 (chr-ID scaffold00097; pos 194106 to 194877 reverse strand)
gaagagaatttggtctctttacaaccccaacacaggtctctctctctctctctcaatgcatttactgtgcgtatacttatgcatgtattccaatagctaagctttctgctgattttttttttggttatgtggtgacgatgtcttggtatctccgatttcgttgttatgatagagagtaaaagaggataaggaattatttttatacgaaaatgagctgggtttatggattttggttggttggacgaaataacttaaggaggcaaaagctggggaaaagaagttggatatcatccactagtgctgtttgtcgtagcatttattataactagaagaatcgaggttttttttctttggttccaaaaagtttgaatcttttgtgaatttcccggatatatttgatggaatgagtacaaccagcagtttatgttttcgttttgtaatgttctgtcagttaaaaaaaaagtcttatctggttatgaatatgataatttggagacaatcttagccatgaagtgtcttgagagtgaatctgctcatatataatttaaatgtactagtttggtagatacaatactgtttggttattagatgatttaaatctgaacctatcggctacatggtaagagccttgtttgttaaattaaatatattcctctttaagtttctcacttacttggctcttggcttgtgcttcatggcaatttgatcttttgaatctgttcccttgaagtttctccattttctttctccacaggttatacagaagtactgg

SEQ ID NO: 45135 - DNA, 741 bp, Manihot esculenta
  Intron number 1 from transcript cassava4.1_003409m (locus cassava4.1_003409m.g) derived from phytozome v7.0 (chr-ID scaffold04251; pos 178420 to 179160 reverse strand)
attctgtaagtgtagtgtagcaatcttgtgaattttgttggaaattaagttgcaattctagaaatttagctgcttttttgcgtatgaaattataatttggtgttataggagttgctttagtttcaattttctagtttttgcttaacttggattttagttttctgatgtgttttcttgctgtttactctctgatgttcaatgtacatttgtctgtttattgttattcttttgtaaacttatcttgttatgcgatcatgtagtaaacctaaaatttttaagtttgatccaactatctagctgattcaatcaaagaatattaattgacattgttcaatatcaactgttggtgggggtaaaggaatttttattgaatttttgcttatgcatatcatatcaaactactttgacaatcaaatgactggatcagttttttcgaagcacaatctatcattatttgatctacaggtcttctcatttatattgatgagatactaaatttgctattttctttgaacgggattatagaaatgaggaaaatgttgttttatatttgttaatttgatgtcactgctgtggacataacaaatcatctttcatttgttgatggtgatcatttggagaggaatgttctattcattggggctgcctttccttctatggctaaagtactgttgtgatcatgcacattctcttaaaaatgtataggtacctctctgaattttgctatctattgatttaagg

SEQ ID NO: 45136 - DNA, 567 bp, Manihot esculenta
  Intron number 1 from transcript cassava4.1_025287m (locus cassava4.1_025287m.g) derived from phytozome v7.0 (chr-ID scaffold12004; pos 56421 to 56987)
gttggtgagtatcccttctgcaatcttttagctatctgcttgtctctgataccttttcgaaaaaagagatagccgtttttttttttatgtattttgaatatacatgtatacatacatctaatgctttaccaactatagtttatgtattttaatgtaactaaatattaatgtttttagttagattaaaacatataaaatatagttggtgataaattatatctatatataatgtatagaagattaatattaatttcttaatatagataaataaaagtaatatataaataaaaattataattagaattattatactttaatcattataattataaatactatatgtaattaaataaacaatacaattcttttgcttcccaattaaatgtttgtggatggcctatattcatctatggctggcctgccagatatcagttcaagcagaacaactcaaaaaatgtatacatctaagtagtttttgcacatggatgactgaaaagaattgtattgttgatcaagttttgtaatttttattggacaataggctgaaataaagtacctgggccaact

SEQ ID NO: 45137 - DNA, 438 bp, Manihot esculenta
  Intron number 1 from transcript cassava4.1_017987m (locus cassava4.1_017987m.g) derived from phytozome v7.0 (chr-ID scaffold04715; pos 1112 to 1549 reverse strand)
ctacactatcaaaggcaccaacaaagttgttcgacgtatgtactctctctctctctctctcgctctctctattggtggaatctccatcattccttttttgcctttgggaacccatgaatttctcatctttttcccccttttagaacccatattctcatattgtttcctttttttgacgttaaagattttgaaaacccagtattaatggaagttttcatactttgtttttcatcatttttaatgttgggtcatttgttttcccgtttgggtctctgaagaccgtggaagttgctacttttttgcttattctcaaaaaccccaaaatctcgtttttatgataatttttgaaccgcccattttgcagaaatattgcctaacttttattttttgatcattcaatgttttgttcattttgttgcagctggtgattgtgtgttg

SEQ ID NO: 45138 - DNA, 903 bp, Manihot esculenta
  Intron number 2 from transcript cassava4.1_001255m (locus cassava4.1_001255m.g) derived from phytozome v7.0 (chr-ID scaffold04137; pos 334345 to 335247)
aggataggtaaactacagttgtattttgctgtttgccatttttgaggttaaagaatgcatcaatggaggttcaccgagtactggctgtagctacctatacatgattatgtttgttgggattgagaaacatagtcaatgatcacagcattctgtggctctattcttaaaattattttcttgtaagcaagagcaaaaattaaagaaattttggaatgatgacgtcagtaacttctaagatggctgtgttaattagtctcaactctaattaaaagttaagtttctggaaatggagttcttcagaatttctcatgtcgatgcttttactgtgaactgttttaatatatgaattatttgttgcaataaaaaaatgttttaatctattgcttcaactcaacttagtgtaaaaacatggcttattgattattgcttaaaaaaaagataaaatcaacatcatccttgctatatctgtaaaggaaagtctctgatggatttggataacctaattgggattttgatttcgtcacaatttagtgagactgtcattgtgtctcaggcacatatgcatatggatgataggtggtcacgtattggagtctaagaaaattttgggaggcatttaatctatatctctcagtttattcttgcagctagctatgctggccaatcttaacaattgcaataactcacagtcaataattctaaaattttttctgcttgatacacattagatttgtgccttctttctccatagcagtacttttgctgtttgacattagtttttaatgggttataagaagcttttcttatttatttttattattttcttgatggttcatggtactgatttccattccattcgtttttaatataactaatcttctttatcaccttaaatcaacagct

SEQ ID NO: 45139 - DNA, 988 bp, Manihot esculenta
  Intron number 1 from transcript cassava4.1_027259m (locus cassava4.1_027259m.g) derived from phytozome v7.0 (chr-ID scaffold11355; pos 146228 to 147215)
acgagaacgaggtctacaaacaactgggtatgttttctttttgccttttgccttcctctgtatgcttgcatgtacaaacacttgtttctttttgcctttttctgtttgaggagtagttattgccatattgggagtttgattttgatatgagtttggatagttgtagcttaactgagatgggtttttaattttggttaatatgccaactgttcgacaatgattctcagttagtttctttgctgaccggttggttccttagaaagccaaaggtaactggaaagaaaattgttagaactttttcgtctaatttaagtccatctttttcgtctaatttaagtccatctttgacttgctttttcactggagtacctttagaattgccttctctactgcaagttaactttgtaaattgaatgtctgaaaatacaagggaagtatgtgaaaaagcattaaaactagtctgtaaaaattgtcgcctttatttaattgtgtataagcaaaatagttgttgctcttgttaagcagatttttttttgaatgattttagatagaatagtgcaggaggctaaagttttaatgtcttttcactagcatatgcttgagcatgccatggaaattcgaattgaactagtttttttatgacatggtaccatagcctaaccatcaatatgtttctacacttatgaaaaatttcctcctttctgttgcaaatggtgcttttttatattagcataggagaaacaccaaagggaacttgaaagcatgctgttaaggcagatgttctactttagtatatcattgaccttaacagataattgtggctcattagtcatgtgaaatcttataacagtagattatgtaaggagcctgtattatgactctgcgacacctttgtacattctacagccctactttgcacttctaacttctagtcgagagttgtggtgaatttacttaggtttcttttcattgaaaaagaagattgaag

SEQ ID NO: 45140 - DNA, 863 bp, Manihot esculenta
  Intron number 1 from transcript cassava4.1_023820m (locus cassava4.1_023820m.g) derived from phytozome v7.0 (chr-ID scaffold01579; pos 46802 to 47664)
taagttcaagtcttgagacattttttagaaataatgtatatatttaattatagcccatcggctcatatgcatattttttgatatcttactgacttgtagggagtttcttaagtccctttaatctagatattttgatgcagtctttcacacatgatcagacaccaaaaagagggaaaaaataatatgataagccatcttctatgtttagaagaatttgttatgcaatttgtttctctatttaacaagaattatatccatggaccatattagacatttcactgattcttagaattcttctttggcatcagtttccacatagtaatgccactgtcgctgggtgagcagtatcggttcaaaccgaaaaaatcgactgaattgaattaatttgaaattttggttcggttttttattcatttcgatttggttcggttttttattttaaaaattttagttatttcggttcgatttgattttgatcagaaaaaaattaaaaaaatcaaaccgaatcgatttagtgataattgtatattatttacaataatatagatatattaaatcatattaaggttaaaatatttcaattaaattttaaaatattaaaaataaagtgtaaaaaataaaaaaaaattattaaaaatttaaaccgatcaaatcaaaccgaatcagaccgatttgattcggtttgatttctgacaaaaattagtttagtttgattttcataaatactaaaattttaattttcggtttatacagttcggttcgatttaaaattgaactgaccgaatgctcacccctaactatcactctattgtacttatgcacctgaagtgtttaaatttagcccaattaaattcactcaattc

SEQ ID NO: 45141 - DNA, 809 bp, Manihot esculenta
  Intron number 1 from transcript cassava4.1_003999m (locus cassava4.1_003999m.g) derived from phytozome v7.0 (chr-ID scaffold03175; pos 394223 to 395031 reverse strand)
ggagagaccgatcccagagttggggagacttgcaggtttgtttctgttgggaagtttggacttggatttttatttttatgtatgtttgttgtgtgattaggatattgggtttattaatattactatttggagtaagtttatcataacataaaatatttggggtaaactttagcttaaattttgctgttgttagctaaattaggatattatgtatggaattcttatttctgaatttgtgtgaaattcagcttgatgatatcgaaatcttaaagtcaaaattatgcattcacgattttaattaaaacttctgacactgagtttaatgtatgttcttgaatctagatattgatgttcgtccaaattcattctcgtaatgcttatgttttcagatcttctcctttaatattcttgtctatgactatgaatttatgcacatattagttatatattactctacaaacacatgcaagtggacacatactttggctgctgatgcaatttcgagaagtgataaagaagtcttacatctgaatattgggatagataattgcagtccatttctttgaatgcattttactaaatgattatcaacctatagaagaattatgtgactgcattatagtagagaagtttatatatattaactattttctcttcagatgttcttaattgctgcattttaatatcttccatctcaagttatctccattatggccatactatgtttataatgagagtgcttatttaccactaaattaaatttatttcagtaaataatttggaaaatgctaggtatttggctgaggcaa

SEQ ID NO: 45142 - DNA, 590 bp, Manihot esculenta
  Intron number 2 from transcript cassava4.1_034251m (locus cassava4.1_034251m.g) derived from phytozome v7.0 (chr-ID scaffold05875; pos 1970866 to 1971455)
tctccagaattatatctggacaacgcacggtaagtttatttattattaaaatttttgtgtagcctttacatgctgcatattgcagtaacatatttttattttgtttttgcaaccaaatatttatgtatttatcaaccacactaattggcagtttaagcttgcttcttattttaaacaatgggataaggaatataaattactttggtttcagatgattgacttcgcatattgctgttttgctttgcactgttaatattggtataggcaaagttgcaatgacatttttgtcttaaggaaaaaaacttaaatgataatgctttatgcatgttattttacaatgaaacttttaatcagttcagtaacccatggtatgttgcatgcatttactagctttagaaattctgcagtatgatttcatagataagcctgatgtctgtatgttgtattatgtgatggcttttttacatggtactttatccacatcagaactagcaaacaaatttatgtgataggcaaagtcttctaactggttgttcctaattttgcattatgcagccaatatttcagagatatcctcgtccggagaaaga

SEQ ID NO: 45143 - DNA, 607 bp, Manihot esculenta
  Intron number 2 from transcript cassava4.1_032257m (locus cassava4.1_032257m.g) derived from phytozome v7.0 (chr-ID scaffold03175; pos 349679 to 350285)
actattcttcttcatctgaaactgtggagattaaggtaattacaaaaccactacttgttaatctttgattttgcaatatttcatgctgttactacacaagttattgttaccatctgatgaattacattgagaaaagcagtgattttaacttttatgggatacatattttattttctctaggaaactggaacctaatcctccacaattttttatttttaaaataaacactgagcttgtatgcatgtacgtagtgcctaggggtgcgagtacagccgaaatgaagatggcttgaatctttaacaaactaaaaacaaacaagagacgtcctgtgctctcgtcatgtttcattgtgattcttagccaggcgcggccaaaaatattttttaaaggtccctacttctacatttgtactatttttatctataaataataataataagtcttcttctaatattcattaataatagattattatagtgactttttatatccgcattttttaaaataccaagttgattttttttttttgcatttaatatgaatgattaaaaaaatggtatttttgtgttaaaatatagatgagaaaattaagtgttttgtgtcacag

SEQ ID NO: 45144 - DNA, 852 bp, Manihot esculenta
  Intron number 2 from transcript cassava4.1_014693m (locus cassava4.1_014693m.g) derived from phytozome v7.0 (chr-ID scaffold06407; pos 369277 to 370128)
ctactgcatctggacaaaaggaggagaaggttaaggtatgtaaatttatttttctggctgcttattaaacttttgactgtgcgcgcacatgggcatgtatgcctgtgatgattcttttgcgttggtgaaaaaaagatgtcttttatgcttggatgaatgaaaattggatgctggcatgttttgttctccactgctaagcttgattatgtggccatgaaagagactaagtgggataggattgtgtgggagagagtaaacattctgtgttcttccatttttggacattgaacaaacaagatgcttctggttatagtgtgcccatttatgttgcattttcaagtgacccttgattgttctttaaagagaaagacatggtgcttatcattcatttttcatgatgatattcaagctgcaacttattttatgattttttttttgaaattttcatgtgagacattgcatatttgtaaaccttttgattaactgtaaaaaaaattgtgctctttttttagtacttttcttacttaatgatgctgcaagattggatgattatcttacattactgatacaacaatgtggttaactttgtttaagacctgacttgatcatcaaggtttctggctttataagtgtgatatggaatgcatacattgaattgttagtgattgatatttcctaaagccttgtgaattataactagaagatgaagtttggaatcagcaatatgtctttatttagagagcagcaccaaacttcgaatattagttatcatttttttttttttttgcattctttgatggttctctctcacttttaggtgccacttgttttgtttggggcatctggaaacta

SEQ ID NO: 45145 - DNA, 842 bp, Manihot esculenta
  Intron number 1 from transcript cassava4.1_029722m (locus cassava4.1_029722m.g) derived from phytozome v7.0 (chr-ID scaffold11581; pos 1216206 to 1217047)
ctttttcttagtagcaaggtaacatgttggtcattgtaagaagctgttttgctgaagagccttggtgaattatcatcttctttggacttggtggcagggaccaccccataatcaaattgaataattctgtagagattctatagttattttgtatttaaaaaagaaaaaaaaattgcaataacttttttcccatggatgtcagttgaagtatttagtcaagttcgtttagaaatttgtatcagaaactattctggtatagaggaattctaagctttcaattttttttgtttggatatatatcttcagttgaacgattctgtttattaacatcttagtttatgcgtatatctctttatcagttttctgctggaggaataacttggattgaattacttaactacagtgcaaaagctatgaaactacaccatgactggtccactcttgtgttcaatgagaagtctttttctatctgagatggatgtgttttttttatggctctttcgatacttgccttctctcttgattgtaaaaagcactcatatcagtgtaaagggttttgttgtacttcgggaagaagcccaatgaatgggctacactgattctagcaataatttgaaaatttcttcttccaaaaagtttggtatttaaaccccataatgtaaattataaaccttccaaacgggttatgactaatattctctgagtactacagagtgctggactactaaattagttgtattctatgcccttaatttgtgaaggcggcatgacttctcgcttttacacttactgcttactgttatgctttatgcaggctacttttcagcccccgaaagtaatta

SEQ ID NO: 45146 - DNA, 655 bp, Manihot esculenta
  Intron number 1 from transcript cassava4.1_011592m (locus cassava4.1_011592m.g) derived from phytozome v7.0 (chr-ID scaffold05859; pos 165714 to 166368)
caatcgatccccgcaagatccaggagcactttgaggtatatctttcgaattccttgtttttttttaatttaatttccttttaattatatgtttgaagttaggatggattctaaaagttaatgccaataggaatcgcatattgatttcagtacttcgctgattgattttttgtccccttaactaaggaatgctttttgtttttatgttttcccgttctctttgatttgaaagttaagttagggccttggacatgaaatggcagaaaaatttctttcttcaaagttctgttgtcttgattggtttttttttttttaattattattatttattaggtttaatttcccagccttgtcttccgttttgttatgttgcttttataatcattgatatccctgtgaattgtgtttacaccaacaaagaagctaacgcaatattttgtggtttcattttaagttcctgtttaacaatttagtccacaaagtggttttggtgacttggtttgttttgattgtatatgcgtaatggtggtttagtttcgattttcactagtttgttattgtaaagatgatcaatttggttatttacgttaaacttttcacctgaaaattatgtttggacttagaattcagttgtctatttcaattgcaggatttct

SEQ ID NO: 45147 - DNA, 735 bp, Manihot esculenta
  Intron number 4 from transcript cassava4.1_012994m (locus cassava4.1_012994m.g) derived from phytozome v7.0 (chr-ID scaffold10424; pos 76622 to 77356 reverse strand)
gtttaaaaagcgcgtttctgtctccaaggtaaattttggttcctatttgaatgatgtattattatacaattgctttagaagtatgcaggttatgctaaatacaacagcatgagtaacaaggtagtctgactatttaattgagtcaataaatgcattttttcattaatcaaatcataaacagatgctagcttgtcgcaaatgtggacttgtggcgaatttgtttcttcttgatttcaccaaatgaaatatattgaagatatggatcagctttgatgatttgtctatgctgattgtccaaaattggcttaacagatttacttatatgaatgattgagcatacataagttcaggaaggatttctattccagtaatcatttaccttgttggagggtgtcacctttagctctgtattttaggtgtgggttatctcctgttgctattaatttatcttttggatttcatccaattctattggttatagtgaagattctgattatttggtagttttggtccttcactaatccatagacacaagatgttcggttgggtgcataaaaattttggcaaacatagatgcttttaagtttccttgcaagtgtgacttgtataatgaggttttctttggatgtgaagtgactattttctcttaatagcatatgctaatttgtctgttggtacccctgtttttggaatctttcaggtggttgcacttacagttgtgtcagtaggtgttgc

SEQ ID NO: 45148 - DNA, 316 bp, Manihot esculenta
  Intron number 3 from transcript cassava4.1_029211m (locus cassava4.1_029211m.g) derived from phytozome v7.0 (chr-ID scaffold06485; pos 95167 to 95482 reverse strand)
gagtatccttttttccttgtgtcatcagcggctggagtctttttcattttcctgctaattaaaagttttcttttacttggttgattttatcaaatatcattgtagaatttttctcgatgtaaaaaagtttaaatgaattgcttggtgcatggtgagatatcactgttttattttcctttgtttgttgtctctgtctatgttgtgatatctttgcacttaaatgttttgaagactgggcttttcttttcagtcttttgaatttggtgtcatttgagtggccttaatcttaatgatagagagcttgaatacaatctgg

SEQ ID NO: 45149 - DNA, 771 bp, Manihot esculenta
  Intron number 1 from transcript cassava4.1_002841m (locus cassava4.1_002850m.g) derived from phytozome v7.0 (chr-ID scaffold12455; pos 182647 to 183417)
cgcatttaaggtagcttttattattatatttttttttgaatatctactctgcttatcttgtatctttcgctagttttggttagattgccagtgattttgtttctctcttttctgtttccttcttgattgttctgtatcgtttctccttataggtttttcttattgggctgtgagtgtgtgttgggtactaaagtgaagtgagttttcaatggatattaagttatcccttgtgcttcttcgatgctaaggaactctctgaacgtgattcaatgtttttttggaaaaagaaaatcttctattttgcttctcttactctctgatcgtaactacctcttctttttttcccctttctctgggtttggtccctgaattgtaagaaggtttaatctccaaatatttatattttgttttctttttcactcacagcctctatttttgctggactatagtaaatcatcattagttgagaattgatcttcaattgggataccatcttcttattcctcttgttttagcttgttttagagtaaactattggcggtttggctcaatccaacttttttagctttgtctgctgcttaattctttttctagattaaagaacattttccgggtctcgcttttttctaattttcctcttattttagtaaaatcttaaatgggtttcgctgtttccattgcttggatttttcttgactgttgaagtaactgagctttcttagatcatttgtaaattttttcatttttgttgtgggagtttcaggttagaaa

SEQ ID NO: 45150 - DNA, 914 bp, Manihot esculenta
  Intron number 1 from transcript cassava4.1_006958m (locus cassava4.1_006958m.g) derived from phytozome v7.0 (chr-ID scaffold05280; pos 116768 to 117681)
ggttcaacatcctcaggtacctttttcttttcttttctcccttctttcctttcccttttcctttttgctttccttttttgtttggtagctgagaaaatgcgaggaattaaaagaattttcaagttaggtttgtagattttcgttatgtgggtaagtttctgcttaattcagcttagtaagttgtttgggttggtgtgagtctgcttgctcttttatttttctcaagaatgatttactactttgtttggtagctgagaaaatgtgagtagggaaattttttaaaaacaaattgtattattgacatggtgatttcttttattttgcaaaatacagcctcatgatatttttccctttaatttgttttaggaaataggggacatgtaataatcctttggatagtacctgagaaaatccaattaaaattttgttggatctttccttcttcaccttatatttggcgaagactacacttgctcggatatgatgaaacattttagctagcataaggatatcatttctcaaaatcaaatcttccctcgcactttctttttctagcttatggtctgtgccaaaatagaaatagcgtatgttacttagagatgttctacttacctcagataactggaaggtgttgtttgctcatatctcaaatggtagagaatgtgggatgtcttacaatcagtgatatgcagtttgttccaggcgtaatagaatagactagtcagttcagtgtactcaaataaatagtcaccagctgtaaaaaatttcatggttgtcgttgatattgtaatgttcagtgatttgtgtgaatgatatctagcaagctcttgtggaatatgtcttatatggtgtttaaatgaaataaattctggctttcagaaggattcatttgcgtaaactctcttccaatcaag

SEQ ID NO: 45151 - DNA, 606 bp, Manihot esculenta
  Intron number 1 from transcript cassava4.1_004515m (locus cassava4.1_004040m.g) derived from phytozome v7.0 (chr-ID scaffold08127; pos 238382 to 238987)
cgccatacccttcttcctttatccttaatcttcaggtatgaatgtgataataagtgaatgtctgcatttttctgtgccactgtattccttttcttgatcactggttgttagtatatatttgagtttattagtgaaaaagatttacgtgtgtagtcgtattgtatctccttaagatgtttctgatatcttcttttgcaattggatgctaaaattttgggtttctaatttataatttggcattgcaattttctctttgggtagtgagttgcaaattatgctgattgtaatgtgtacttgaagttactagttccatcttttcaatgtgaagttaaaagatgaacaatttgaacctaaaatctttcatttgggtccccttcttaaaattgaaagcttgtggctttatgtctggacagttaaccaataatctgaaattgctgcatgagcatcatacaatttctatttacttagattcgaataggattatcttcacttcataacaaaatcaactgccactgcagggttcttcatcatctattgttggcaaattatccagacattctccttgtttgttgtcttctccactttctaaaccttttcttcagatta

SEQ ID NO: 45152 - DNA, 631 bp, Manihot esculenta
  Intron number 1 from transcript cassava4.1_011061m (locus cassava4.1_011069m.g) derived from phytozome v7.0 (chr-ID scaffold01755; pos 118629 to 119259 reverse strand)
ttcgacgcaactgtcccttcgtcagtttctgtcaggttctctctctctctctctctcgctctatcctccatttttcttattttctttgcttcactttgccggtttttaagcatactttactgtatttttctggcccaaaatttgaagtttcttgatatttagcctggcaaacatggattacgaactgggttttacttttctacatggaaatagcacttgattttttgaattatatatcaaaaaattgaattccagaagttagtttcttgacctagttatccgcaaatggatgccaatattgattcccttatcacttctccttttaattttttaaagatctagaatgacgtattggtgaattaaacacaacccttttcgctttttgactattttgtttggaatattcagaaagtttgtttatttctcataagtttatgaagatgatttttcttaattttttatggtaatctaagtgtttgactaaagttctaaacaaattttatctcgttattttattgcattgtgagtaatatttgcagtaatcaacttgctctgattgttattgtcaagtaatgtgagaaattccccaactctaggactacttttgaagaacagtctcaattctttgtag

SEQ ID NO: 45153 - DNA, 959 bp, Manihot esculenta
  Intron number 1 from transcript cassava4.1_025514m (locus cassava4.1_025514m.g) derived from phytozome v7.0 (chr-ID scaffold02538; pos 550588 to 551546 reverse strand)
tcgtctctcacgggtaactcttttctcgatatctagtaattttgcacaatttgtctaattcagaagggctctaataccaattgaaacagtttgaccacccactttcaactcgacccaaaatagttaattcaagttatttaatagaattgtcgtattcgtgttaattattatatacaattcaaaattgctgattaaatagccgtattcatgctaattattatatacaattcaaaattgctgtattcctaaatataagacgtatctcgcatctaagtaagcagttgaccgttaaaaaataataaaataatatattatttttatcaatatttaaaattaaaagttctttagttcttcaaacttttgtacataaattttaatattattgaacataaaacaataattacattaaacggtaaattttaaaactaataaattttattttttaatggcatattttatagaattacattaggaatctaataaatagattaatatattaaaaaagagaatggccgaccacatgtgtttgtcatccccattgacgatcattgtcttccaaacgtagaaaaactgccaagttgaaaggcaaattatggaaagttaatgaaattgcatgagaaattgctacagattgctgtcaaacgtaattggagaaaaaaagttgtacttattttaaaaaataaatcaataagacaatcactagtaatcagcaataaaatattaatctcttttgttttttcatatttatagttttattggcatcccgtctctataaataccctttctacttttttttcaattgaaccaattaatccctaatctacaatctcaataaaattttaaaactgcatatatggccctttcttgctggatttggtcagcacgtttctcatcattgtgcctcatctctattcttcacttcttgtgcttcaacttggcagcagcagccattgccatcc

SEQ ID NO: 45154 - DNA, 742 bp, Manihot esculenta
  Intron number 1 from transcript cassava4.1_032211m (locus cassava4.1_032211m.g) derived from phytozome v7.0 (chr-ID scaffold08686; pos 710625 to 711366 reverse strand)
ccttattggttggtgagtttatgttgccaatggttaatttaccttcctttttctctttttcttttccaactttttatggaaatattgaatcctggttttagtaaatggttaggtagccccctgagataatggttttggaagaaagtagaatgatatttgaggttaatgggtttttaatttcactggcattattttgattttggggtaaaatactcactgaattttctcatggattggagtaattgtcagaagatgatttagaggaactgatctatgaatgtggagaaagtttgtcttgtagtctatgaacagtaaagctcatttatatttttaaccttgcaacttgtaattaatttctcgatgaattcattgtataaagtaggtaaagttctaatcgatattcttagaagaacaaggaaatgttcatgatgcttgtagaaaaatctgaatgcattcatacgagcgtgggggcaataaaaattatagaacacttaaccaaaatagtttggaaactttaggtaatcatgttatgtgcttttaattgctgaaatgtagatttgatttctggttcatatggttaatctattcgatatattatgtgcttcagatgcttggtgctaatttaaggcgaatactgctacacctttccttggttgagtggcaatgatctctatgttgcttgcttaggatatttttaccaaaatgaactcattcttcttttccactttatggtgttgcagct

SEQ ID NO: 45155 - DNA, 707 bp, Manihot esculenta
  Intron number 1 from transcript cassava4.1_008944m (locus cassava4.1_008939m.g) derived from phytozome v7.0 (chr-ID scaffold02590; pos 94321 to 95027)
ctgagaaatttgcagtttttgttcgtctttataaggtgggttgttagcagtctacacgttcttgctttctttttcttttcctggtttcttggtattctcggtggagagcttggaagtggtagggagaaaggaggaatttgttctcttgaatctttttccctaagatattaacgttcctttgtagtcttttgtctgtattctatgattttgatgtttttaaaagaaaataataaacatcgtccattcaattggttgtgttttatctccactaaaccaactatttggctagaactgaagctttgagttgttcttgtatgttattctcattatttagtttttttttttttttttttttttttcatatgatctttttagttttgattatactttacagtttaaattgttgagaatgatctgttctgcattcattttggtggttgtgaaaactaacagtttgtacttgtatagttattttgtacttgtatgtgtactgaagttactaaaatcagctttggatcttcatggaatttgattgcaaaaaaccaggaagaaattagattaaatttgataacaaaaattacagccagaatcaataggttctttttctgtttatctaatctttaccaattggttaattaaattttaaggaaatttgtccagctttgctaataaattttgggtgaaaattgctataggttgacaaaaag

SEQ ID NO: 45156 - DNA, 829 bp, Manihot esculenta
  Intron number 1 from transcript cassava4.1_031811m (locus cassava4.1_031811m.g) derived from phytozome v7.0 (chr-ID scaffold07902; pos 35611 to 36439)
ccgggtgcgtattcttcccttttgattgatttcttcataatctcgttatgttcaatgagacggaacatgtttcttattgggaaaatttattatttagtttatctaatttaaaaaaaagttttatttgatatttcagttttttaaaataattagctgacgtttaaagttagatcttagttaattgttttattttataatattataaatatattaattttctttatgattattctatgaaatgtttttatttaaaattgtaacataatcgagtcgtatacaaaattaaaagtacaattaaccttggtgtctttttaatttctttctttctagattatgtcggtgaagtttgctaccttggtttcagtcacttcaaaaatgtacggcagtgctcctactataatggtacgtaattttcttaaggattaatttgggtccgtggatttctcaaaaatcaattaaatgggtctgtcatatatatacttcactttttttttttttgctaattttaatttttcatgtactcaatgaagcttcttctagagcacctggtcaatcctacaaaattataagtgagttatgtctctatcttcatcttgttgatgctaatatttctttcaagttaagaacaaacttatgctcatgtctcttgcagggtcaatgccggctatacttgcttatattggtacgttctaatgcttcttattcttcaaattgtgaattctaagcattgacaacaaataatcaagaggactacatagattctactacaactaatattccatcatttgcatgttgcccatacaggactatttgttgcagcaagaagctt

SEQ ID NO: 45157 - DNA, 665 bp, Manihot esculenta
  Intron number 1 from transcript cassava4.1_012035m (locus cassava4.1_012035m.g) derived from phytozome v7.0 (chr-ID scaffold12794; pos 1523453 to 1524117 reverse strand)
ctttttccttactgggtcttcttcttcctttctaggtgccctcttctacctctttgcacttcgttttgttctatgtctgttatgtgctattattgctgcataattgaataagcctggtcaacctactttttctattttgtgttgctctgattatgttaaaaagtacacattttgtcaaaattgtggaaattttataatttaaagtgtttataattagaatggagaacacagagcagaagaggctagtatttctttccacgactgaattcaattcttggtttttcaatcctttatttattgaatctttagtttgtttctttgctttttcacatgggaggttcttggattttttattgactctttattgtctttccctgtaatttgaagactgtagagtggccttctgggcttagacatctcaatttagatcaaaaagtgttcaatgagatctagctaatttacatgtatctgatcttcttgatgtctgaattcttgatttatgcacgatgtctctgtgtaatcaatcaatgtgagcaaaaagcataaccaaatgacctctgtttgaatggctcatataaatggttactaatttgaaagtccagtgcttataatgctctaaatatgatttctaatcatgatttgccattaatttaggctcaagatcc

SEQ ID NO: 45158 - DNA, 429 bp, Manihot esculenta
  Intron number 2 from transcript cassava4.1_015419m (locus cassava4.1_015419m.g) derived from phytozome v7.0 (chr-ID scaffold03581; pos 1041717 to 1042145 reverse strand)
catttcaggaattctcgttagtttccttgcttgtccttttatatttctcgctattttttatgctggtgaaatgactggaaagagcagagagctgaacagaattttagctattagatcaatgataagaaatttcttggtcattacttgtctaagatgtttcatgagctttttttttccctcttccaattgtagagatttattttggattaaagatgagtaactcaacgaggttgagaatcagaaccaaaatatctgtgtggctatgggagaagatgaagtagtttgcaattttagttgattataattttttgtgtgagttgtggagcttcacctgatcaaccttcaagttctccatttgcttgcattttactttgatctcttttatgtgctgtagatttcggtggcagcagcaatatagacgcagatatc

SEQ ID NO: 45159 - DNA, 998 bp, Manihot esculenta
  Intron number 5 from transcript cassava4.1_017402m (locus cassava4.1_017402m.g) derived from phytozome v7.0 (chr-ID scaffold02855; pos 294330 to 295327 reverse strand)
ttagttctttggtcatcagctggtcaatcactgaggtaagtttgatgtacaaaagctactggtcattatcaattctattttttcctttatttatattgtttttgtttccagtttgattttggtttcctggaatattataaaggaatttcaaacacagaatagaataaaatgattatttcggacaaaagaatggttagttatgacactggccattagttttaaactacataggcccaattgcatgaaaggttagtgaacaagatcttgcaattgcatggaaaaattcatgtctttttttcttcaaaatttttcctgctgcttatgtcatttctattatgatataatcaggtctgtttccattagtgcttatcaagtataagcatatccgatcttattatcatggtccccctttaagaaaatagaaggaagtttttttagaaatgaagttttcaagtcatagatattcactgatgggctaagggtgtggttttttggtagaattcagttatttaggatattattatgtcttcttttgggaacattctctttcaagtgcatttccttccaagcaggatgggaaatttctattagttttagtgttcagtccgcaatgtgaaattatcatttgcttcattactgtctattggctgatcactgttgttctctgtttcttaacaaatttgatggagagttctttgcctttgttttatccaatcaaagctatcctaggtttagctagtcgcttgtaagaaatatttcaaaaagcacctaaagactaaacttctgtgtgtattttcttgtctgacccatttttagtttaggtgcccaatgaaccaaaagtaaagcaatgaacaagtcttttcgtgttgggttagttccgagattctcattgtgtgctgcagtgtgaaatatgagaatttcttcagacatctctgaatattatttcactgctcccatttgcagataattcgatattctttctttggcacaaaggaggc

SEQ ID NO: 45160 - DNA, 528 bp, Manihot esculenta
  Intron number 3 from transcript cassava4.1_022440m (locus cassava4.1_022440m.g) derived from phytozome v7.0 (chr-ID scaffold11784; pos 249555 to 250082 reverse strand)
agaacgtctacaaaaaggttctctccatttcttgtatattctctaatgtttctttcttcgaagtttttttttagttgaattttgaatatattttttcatcggtctaattatgattcaatcgaaagtttggttacggaagtcgaaataatattttgatggtttgtggcagctgcagatggctcggaccgatataatttgagattttattcgaaaaatatattgagattaggatttcagagtaattatgaaattatattatactacttcgttttgtaatttttgtccatctcaatcttaaacttattatctattttttttattaatatatataaaaaaataaaatagacaaaaattataaaatagagaatactaatttttcattttagactaactttatttccatattctccgtggacatatgcatagtgttatgggtttgtttcaatatttttttgctgaaatattttctttcttgaattttcatcaccaacagtggatcccagagctgaaacattacgctccaactgt

SEQ ID NO: 45161 - DNA, 417 bp, Manihot esculenta
  Intron number 1 from transcript cassava4.1_017979m (locus cassava4.1_017979m.g) derived from phytozome v7.0 (chr-ID scaffold07035; pos 743949 to 744365 reverse strand)
cggtgttaacgccgatctcactgcttgcggcaaaggtaagttgataatgtgtatttgcgttaagaaattagaattttgtctgggcttttaactgatttgaagcgaattggtaagtttttgggtttggaatgtctaattatctaatggattcagaataactagttgggatttgtaaagttttgcgctttgatcatttggggagaatatttgaagatagaaaaaagacagaaaaataaattacagcttgttatccctggaagtctcagttgtttgattgtaacaaatcaacatatatttggaaaattagagaatggagaatctcgaagttcatctattgtctactttcataattattttttcccccctcaattatgtgattatttttagtttgctgctaatcatctacttcatattcag

SEQ ID NO: 45162 - DNA, 731 bp, Manihot esculenta
  Intron number 1 from transcript cassava4.1_001150m (locus cassava4.1_001150m.g) derived from phytozome v7.0 (chr-ID scaffold10963; pos 173263 to 173993 reverse strand)
ttcttgttctatcagaagcaggaattctatatcaggtattactaatttatttgatacctatatttgtagaaaagaaaaccttcaaaccaacaactgtttaaggattaatccataacagtttgtgttatttgattgcgtaggtcaaatattttctaattctttactgttattttggcataggcagagcaataatataacatatatgtaaaacaaaagacttcaattacagtggttggaagtatttctttttccttttccccccatgtgtgtagagaaagtcagaaaattatacacacactattcactgatgatcatgtaatctgcaatttaaggtatgatacagatgcttgactctatctggttggaaatgcacttgaaatttatcaggactgttctgacaatttgggcttgactcccttctatgaaacatttgtttgatcgccattgattagccctatgccttgaccacagagattaaactagtttgtaataaacagacacttcacaagaggagtacacactggttataagtaacattcagaaattgaaacctgagtacagcatagataagttctgctattttatttacatatgttctaattaatcatgtaatctgaaatttaactttcattcttccaccattgtaaaatcctttgttggttgaaaatggatttaccttacgggccactgcatggcttgtattgattttcttctctctttttttttctcag

SEQ ID NO: 45163 - DNA, 837 bp, Manihot esculenta
  Intron number 1 from transcript cassava4.1_020663m (locus cassava4.1_020663m.g) derived from phytozome v7.0 (chr-ID scaffold07528; pos 208908 to 209744)
caaacaacgaaaagcctcatttttcaaccccaacggtaacaatttttgagatttgatagaggatctgataacacacacaacccttatatacatatacaaagacaagaacacaggtagagagattgattgaattgagagagggggagcgagaaccaatttgaaattttccttcttttcctctttgggatcttgtcaatctccttatacattgtctactttgcaaattattttaacccttcaattcttcttcctttcttcttcttattttctggaaatcttctcttttaaacgccattaacctctctatttttgttttttctcaattcttttttgcttgaagagaaaatttttatcttgtgatttaaaagtgtctttctattgatttttggaaaacgaaattagggctttttattaagtgggttcttgcctgttgttttcttcccctcccccccccccccccgggggttttcgatcagatcgtcagtgtaactgccctgattatgattttggactattttgggttatgatgatcagaaattgatttggagattcacagtttgatgggattgtgtaccactgtacctagtgtttaattaatgtattttggcagaagtaggaatcagtaactgggtctgcacattgaatctgcaaaactgaaattcttctgtttgacagaataagctgaagcacacacttggtggttggtttatctgggctttgtttacgtttaggggtttggttttgagttattgattcttatagtaaggggaagcttctgatattcagttttgcttatgagcaggttctgctttctctgttggcctagtggcaaacaca

SEQ ID NO: 45164 - DNA, 444 bp, Manihot esculenta
  Intron number 1 from transcript cassava4.1_009188m (locus cassava4.1_009188m.g) derived from phytozome v7.0 (chr-ID scaffold08359; pos 50616 to 51059)
aggtgcaacagcagcttcaccatcctctgttgaaggtttgtttgttttcttggtttgatcatgatagtgaaagctgtttgatctgttggatgcggtcttttatttgattttgagccgccttgttaattatttattatattgatcaatgatcttatgccttttcttttccgtgttgatttttgaatttagttggctcctgctgggattaaaacagaggaggtaagatcttttatcatttctgggattaaattttctatatttcttggtggaacgggaatggaaaagtaaataagttattgaattttggtattctgtgaaattgtagtgaaatagatgtttgatttctgttgttaatattccgagttgtgttgtcaactaaagagaaacacagatttctgcggccaatgagttaatatctaaattctaaattgcatttgtagtggt

SEQ ID NO: 45165 - DNA, 304 bp, Manihot esculenta
  Intron number 4 from transcript cassava4.1_017909m (locus cassava4.1_017909m.g) derived from phytozome v7.0 (chr-ID scaffold00185; pos 73528 to 73831)
cacttgtaagtagtaccacccttttttcttctttttttttttgccaaataagtagtaccaattttacttcagctctttagacaattttgatcaatattgaaacatgagatattgtcttaatttgagagtagaacaacatatcctgattccatttcaccaatgctgtatctgaaatatgttatagcatattcaatctcaaaaagtttccagaactgttgcataaaatgaatataggtgaattaaggacaaaatgccgttagatgcaaaataatctgagtgtttatttatgtttctcgcaggttgc

SEQ ID NO: 45166 - DNA, 944 bp, Manihot esculenta
  Intron number 1 from transcript cassava4.1_010364m (locus cassava4.1_007892m.g) derived from phytozome v7.0 (chr-ID scaffold10305; pos 155192 to 156135 reverse strand)
tttcaactgtgagttttcttggtttctaatggctctctttttcatacatttttgttctgttctctaatgccattttttagattattttattctcattctaagtataattgaagttctatttgttgagatttctgtaattttgccaaggaactttgcctggtcaattctgatggattaagctttttcattttcactcgggttacttccctcaacattttggattgaattctttgattccttctttgtttctgtttctcctctgtaaattgcatgttaatgattttttttgggtaatgaattaaaatggagcaaaattaggtcaaactgtgggatttcttgtgattgtcttgattgacatggggaattgtgagtttttcggattggctactttttcagcatgtatttatataggctattgggctctcatacttggtctatcacattaacgattggctaaatgcctaaatctagagaaaactagaaacaatgatattattgaaataaataaataaaattgagtgattttgttaacacattgaaattcagtgattaattttcgtgaccatgagcaaaaatcacctctactctagctttgttttttcctggctgtcataattattttaatgaactgctttctagaatcacgaactcagatatggcatggtgtttttttttttccctgttttgagtgataaatagatgacttcatatactaaggttcttgtcgattcttctggtgttgagaaattcatggaaatattctcttgaaattttggttttcccttatttaaagatctccttgcatttttcattagtcattaagtggttaaatattttaattgtactggattgaaatgtaaagggtacatgatttaagacatgaaggtgaacgttattcacttgcttattgagtatgaatagggttttggcactggggttgtgga

SEQ ID NO: 45167 - DNA, 210 bp, Manihot esculenta
  Intron number 1 from transcript cassava4.1_015993m (locus cassava4.1_015993m.g) derived from phytozome v7.0 (chr-ID scaffold11297; pos 69907 to 70116 reverse strand)
tcctctaaaccctctcctctcctttgggttctcgggtaaatttttttttttcatttcctacattttccctcttattaatttccggtttttttttcttctggattttgcattttgcagctgtagttctatttggcttctctgatattcacagttggtgtttactttcatttctttgattgcctatacgaatagattgtaccagttttgagc

SEQ ID NO: 45168 - DNA, 419 bp, Manihot esculenta
  Intron number 1 from transcript cassava4.1_023787m (locus cassava4.1_023787m.g) derived from phytozome v7.0 (chr-ID scaffold07528; pos 332039 to 332457)
cctttgtactatacggtaaaaccattattagttattccattttcctctttcattgtgcagaagaattgttatattaaatatttgtatctaaatttatgtaaaattaattaaaatgaatactcaaatctaaatataaatataaagttccgcaataatgaaaatgaaaaatagtgatacaaatacaaatagtattttgagtgattgtatccctctttcttctttttatagtagtaaaactttatctaacccgtgaatattaattttactgtcaaatcacattaaatattttataataatttttctattttttaatattgtgattaaaaatacatatgtattatgtgtttgtctaaacactatctcaataaatgctttgtgttgtaggttgtgccttctgctattctggctatactaatcca

SEQ ID NO: 45169 - DNA, 621 bp, Manihot esculenta
  Intron number 3 from transcript cassava4.1_023787m (locus cassava4.1_023787m.g) derived from phytozome v7.0 (chr-ID scaffold07528; pos 332723 to 333343)
tgcccactggatcatccaggttagttatgttctttttggtttttaaaattctcatgcataattagaagtcaggaataagttcaaatccgtctctttattttcattggaagccaaacatgcctattttaactttttaaagccaaataggctcacgattttagacttaagattaaatatgccctaacatactaaaatatcaatttttaaaggttttttggagtatgattctttattgttttatttttcatattctgtttttatttaattaaaaatattatatatttttaaatatttaaaaattaaagaattaatattttattattaaaaaaattaacattttagtatatgttaggatatatttagccttctgccttgataaatttgaatgcataatgaatttcaaccactaaggtagtattgccttcatttttttatctgtctcacaatattataggcgagggcgactttcttctataagaatataatgtatttagtagtttactaatatatccctagtgaatatactttgaaaaattaaaatacgttagttacaaaatctaaacatggtcgccaagtacatacgcaggtttacgagactggtgggaggcatctattcttgat

SEQ ID NO: 45170 - DNA, 952 bp, Manihot esculenta
  Intron number 1 from transcript cassava4.1_001442m (locus cassava4.1_001444m.g) derived from phytozome v7.0 (chr-ID scaffold06948; pos 414890 to 415841)
tctgttagactagaccatcgacgttcccgttgcaggtacgcgcttcatttctctctctctctctctctctctctctctcgctggttgcttctctcttttgctgtcatttttgttgcttaatttgtgttttttcgctcgatagttattccgtcttcctcaaaaagttaccatttcttgagaaatcgaagaaatgttccttccttttttttgcttcagcagtgatgcttaatttgtgtttttgctgctttcgctcgatagttattccgtcttcctcaaaaatttaacattccttgagaaaccgaagaaattttcgttcgttttttgcttcagcagtgatgattccattttgttcttcccagtgaaatttctcttaggggctttctttaacatcgcagctaaatatatttgcttatggggattttagcgccaaatccaaagagctggaacttgattaatactgtgtttggattttttgggcaactttcttcatacacgatagctacattcgctcaaaaagtattctttcttgattgtgttaattgcttcatgatggcatggtagctgaaaatatgctggaaggtgggtggatatgtcagcttaaactatctgtctattactacataaaatgactgaaagcaattcgggcaataaatgttctctgtctttctaaaaatcaaaggttattgcttaactgtgaaagttgagaatttgtggtttcatctgtgcatgtcaaaaagaattggaaagtgaataaacgcaacttggtcacattgaaatcaccaaaaaagagaaaaaagttatcactaaacctgataatttgagcatgagtcaattgcttatgcattcagattgatactgtgttttgtcttatctttgagtttaaatgatgatatgtattctctattgcttgttatttttcatagaattgatgcaataattaattgtaggttcc

SEQ ID NO: 45171 - DNA, 921 bp, Manihot esculenta
  Intron number 1 from transcript cassava4.1_001251m (locus cassava4.1_001251m.g) derived from phytozome v7.0 (chr-ID scaffold09788; pos 494387 to 495307)
ttgtaagttcctatctttcgtatttgtgcgcgcctccttgtgtctgctgattggatttagtggattgaagttggattcaactctttaagagtttgaatgaggtctaagtttctggtgttggtgtgtttgaagtgatagatccttgtatcggctattattttttatttttttatggctttatatgcttcaagtgacagtacttggattgttttctagtgtggagtggctggttgatgcatccaagtaaatgtgtgcttgcttatagtaatggagttctggtaaatgatgcaaaaataactcaaaagcaaaaggaactgaattttgtcagtactaatagttcagttgaatttaactggccttattcccaatctaattagtgtcagctatatggatcacttttttcacaattctgccccgttagtcccacagtgtaggtcagtgatattccgccccatataattatgcatatttaggggtgacattgtggtgactgccattgatgatcatcagaagatgaactcattagtttgaaattgattcctagtactgtggacatcatttagatgaaactctctcttatagcagtttttaaatcagccattgtgggatttacatatgtgattttgcttgaaatgcgcgccctctgtatgttcattaaaggaactactggagttgattaagtttattctagtaacatttctgttttgaagtaatttgtcttgtggctatgaggcatgggaagcagctgaagtgacttaactgctagttaataaaatcaggcctttttcattttatggttaccattttctacgctttgctaagcaatttaatgttttatgatccttttcccttcctctcttttcctgtttgtggacaatctgtttagggtgctggtaaatctgcagttctgaacagcttaat

SEQ ID NO: 45172 - DNA, 338 bp, Manihot esculenta
  Intron number 2 from transcript cassava4.1_031767m (locus cassava4.1_031767m.g) derived from phytozome v7.0 (chr-ID scaffold06890; pos 106423 to 106760)
ggcaaagtatctccacacaatttgagtcttcttcatcaccaatattgtttatgtttgttttttaaatgtgcattttaagtacaagaaggaaaacaaaatccaaattttacaagaattaggggagaaatagtgagaaaatgcaaaggagttcctctagctctgtaactgatgaacgtgagtgggaatttataagagacaatgagatatggaaattagagcagaaggaaaatgatatatcgcctgctaaaatgatatattgcatgcttaagattaagctatgaacatttaccatcttacttgaaaagatgctttgcatattgttccattttctaaggatt

SEQ ID NO: 45173 - DNA, 834 bp, Manihot esculenta
  Intron number 1 from transcript cassava4.1_001113m (locus cassava4.1_001113m.g) derived from phytozome v7.0 (chr-ID scaffold12794; pos 1623336 to 1624169 reverse strand)
caaataatcctggcaggttgattccgtccaataaggtatggaacaaggaaatgagaatttggttgaggaccaatgaagaaaagaatcttattttgtattaacacaaatttcgtttcattattattaatgtgtttaagaaatgtctagttttaaatttaaacaaaatcaagtgagaagtgaaaagctctactttgacgatgaatgtctgatattggcgtaagtacaatttgacggttattatttggaatgttgattcaatatagagcttcatttgtttaggtctgttattttgctactgttgatattgtttttttttccttgtatttattggaccttttgtttttcaaattagaattttctgtctttttttaattagttaaacaagctatgagcagtgtttaatggctgtagatagtagcttttcgaattggttgcaattttgaatattctaattgttttctgagaatgtaaacaaccaaaaacaatttaggaggctttcaattttcttagggaaaaaaaaaatcaactagcaccaaattttagtgttttttttgaagtttttctttagttatttgaattaggctagttatggttaatcacatctacgagcaattcgtagctttatcttattttgcaagttcaagtgctggttttattttcattccacaaaatttctccttattttatattttggttttgcttgattgaaaactatttgaagagacaaactctggaaagttgaaagctaaacttatttcttggacattaaacatcatgaaagctctcctgtttaccttttcaatgtacaggtgaaatcattcagaactacagaag

SEQ ID NO: 45174 - DNA, 606 bp, Manihot esculenta
  Intron number 1 from transcript cassava4.1_001514m (locus cassava4.1_001514m.g) derived from phytozome v7.0 (chr-ID scaffold10963; pos 492777 to 493382)
ggccccggattgtgagcttcgaggtcactttgtaggttagttgagtatatgatttttttttttgctgatattaatggatttaacctcctatctgcctgattactgttcataattatatgcttttagctctttttgaatatggaaagtgaaggggtggcgttagattctgctggaattctctaaacaactcattagattctcataaatgcttgggaattcaagcagggccgttaagacacctttttaaaagtgtaaaggatcaatatcacactatccttattatgctttttatctgttcatccccctctttctttttggtagaatgagtctttaatactcactcattggttttttcttcgttagaggacatatttttccaatgctacttctcccttcctcatgaggatatattctttgagttttgtcatcaagctgtgtgaagttgaattcctttgaagtcttaaacttatctttgtgcacttttgacaatatctccacaaagctgtgttctccttataaaactctcactgagattttaggcatggttcacaatgaataaattgatttcatcattttgtagggcactacttgagcgcatcagcacat

SEQ ID NO: 45175 - DNA, 371 bp, Manihot esculenta
  Intron number 1 from transcript cassava4.1_000118m (locus cassava4.1_000118m.g) derived from phytozome v7.0 (chr-ID scaffold04851; pos 466265 to 466635 reverse strand)
cttgtccgtgcacttccttcttaatgttactcctttttttttttgagcttatggatgttcagattggcttttgttgcaattttgtgatttcctatgtttttttttcttctctctatttttctttccttttgttttatttgtgtttttgtgtatttgttattgtatgcaaatgctgatcttttgctcttttacggtgtgtatgtgtttgtttattctgttgaatttttgtgaagtgaatgaattttgttgcttatatgggtaaatttactgctttatctatgcaagtgttttcaatttcaatgtaaatttggtttggtttgatcatttggtgctttattcatgatacagtggagacatacccatcagaagct

SEQ ID NO: 45176 - DNA, 131 bp, Manihot esculenta
  Intron number 3 from transcript cassava4.1_006351m (locus cassava4.1_006351m.g) derived from phytozome v7.0 (chr-ID scaffold05859; pos 426956 to 427086 reverse strand)
ataggtaatcaaaaaccaacatcaaattaatgtatataaatatttaaaattttattttcttttttcttgtaatttaatttaatagaaacttattagagatttcctctctctcttctgggtgttatgaagat

SEQ ID NO: 45177 - DNA, 560 bp, Manihot esculenta
  Intron number 2 from transcript cassava4.1_007119m (locus cassava4.1_007119m.g) derived from phytozome v7.0 (chr-ID scaffold10504; pos 231903 to 232462 reverse strand)
tgcttcttaaaggttggactttttatcgtttaaaatttggcttttactactcagctttatcccttttgatgctcaactattatccttatgagacgctttttcttttgtcttctaaaagcttttctctaccgtttgattgcactatttgtttgagagagaaacccataatgtatcatctatatgtaaacatcttaaaatttaaacttggttccatgaactatgaatttatgatgcttcttcttgatttaaacaattgtgttagggtcaatttaaagtctgtttggttttcactaatcccagaaggtgattaaaaaaaggatgcagcattctccttagttcatttgtacaagattccctctgcaagcaacagaattctttatggatgatactctatactgctgatacctttatgtaaagtgtgcattgcgtatgcagttgttgaatagtaaaactgaaaattttgttccttgacgattaaacaatcactgtttatttaaaatgtttatcctccttgagctgaccttatttgagttcattggcaactgcagacaagttaatag

SEQ ID NO: 45178 - DNA, 184 bp, Manihot esculenta
  Intron number 1 from transcript cassava4.1_007119m (locus cassava4.1_007119m.g) derived from phytozome v7.0 (chr-ID scaffold10504; pos 232982 to 233165 reverse strand)
gtcccgaatactttcaagcttttgcttctactggggtaaaagtctcacatttggttcttgcttttcttattgcttttgtttcccatttggattttggattttgattaatctttatggtgtttattcttcttgtggggtgtttctgtgatttaggaaccagcattggagaccaatacgagtctgt

SEQ ID NO: 45179 - DNA, 841 bp, Manihot esculenta
  Intron number 1 from transcript cassava4.1_005606m (locus cassava4.1_005606m.g) derived from phytozome v7.0 (chr-ID scaffold09692; pos 123357 to 124197)
ggaggtattcttttcatttttaaacttctggaacttctagttatataagaaaaagccattctctattgcatatatcctacaatattttttaaaaatttatcatccaataatttaatattatcaaaattaaatttattttaataatattatctcaaatttgatatttttttattaatgtgtataaccaaaatcctaatattcattaataaatattaatttttcactttaaaatttaaatataattattaataattaaaacaacaacatattatctaacaattttatattatcaaattatttatattctttttcataattatttaatctttaatttaaaatttaaatatatttgttaataattcaaaaaaccacttattttctaataattttatattatcgaaattattgttttacattctttattcagaagtatttaatatttaaatatgttagtttaataatcttatcttaaaaatttatttttttgtgtttatgtatatctaaaattcaaattttttaatttaaattaatttaaataataaaatcattatctaccttaaattataaattcaattgtaaataactgtaaaatctgggggtatatggaaaatccctatattcacctcctgtcttcccacttttatatatagtatagaagtatagattatagatatccttttaataattttaataatagatgtacttggcaagtgcttattaccaaacatgtcaactacttataagtataagcattttaaccagatacacaattacgtaaaatttaaatataagccctgcgtgtaagctaattttcataatttaatacaaattttgacagata

SEQ ID NO: 45180 - DNA, 886 bp, Manihot esculenta
  Intron number 2 from transcript cassava4.1_018473m (locus cassava4.1_018473m.g) derived from phytozome v7.0 (chr-ID scaffold08494; pos 316201 to 317086 reverse strand)
ttcctttacaccttcagaccttggtgtgatacaaggtaatgggctaaccttagtgcatctgcatcatacaattatgctgaatagtttgtatatatggtacttccatattggtgttacctttactataggcgaccctagttctttgcattaagaactgtgatgaacataataaacttcttatttatgttgagaggattttttttgttcttgatagtaatttattcattattttaatgaaatgcactcttaattaacatagatatgggtaagcattgcttttccatatttttaatgccaagatgtgcctgttataataagtagaacatattccctgagtttgctggtcattttgctgtttacttaatgaaatcctttatttgagcttacttaatgaaatcctttatttgagctattataagaaatgcttgtctcctacccatttaaaattcatggtaaattataatggatatggcatgcctgtatccaaatttgagcctttttttgaaggattttcccagcagatgattatgttttctgaaatgccttgattcatgtttgtaattgttttgtgattgtttttggattgattattgaatgtaaccatctctttgctgttcaattattatatcagtagatcatttatgcttctaattttggtaccaatgaatatggactctgagaaatttaaaaagcataaggagtcttgatttgataagtgaaaagaaatgttttattatcttaggtaatataaattgctatttgtaattcaccttctgtcttcttccttttgatgttatttcatcaaatttcttattgtgatggattatagttgatggcacaagatgctttattaaaatttgatattctctaattctctttttagtga

SEQ ID NO: 45181 - DNA, 429 bp, Manihot esculenta
  Intron number 1 from transcript cassava4.1_013472m (locus cassava4.1_013472m.g) derived from phytozome v7.0 (chr-ID scaffold09880; pos 415001 to 415429)
tagatatacatcccgctgtaaatcacagactgaaggtataatttctcttcgtttttcttttttgagatttagtgtcatctgaggagaacaatacttgtaaattggaatagctggttgatgatgtgcatagcttgatcaggtaggtagtcgggaattctgtattcctgacatttttgcattgatcaataactcatctttattagaaacttttgatttcaccgttcttgttggaattttcattatttttgcggtttatttggttttaattgatgccctgcaacgttttcttgctgatttatgttgatttaaagttctaattttggatgaacctaatgggttcagagttctaattaatctaattttggctgaaattaacgtcaatatcttgaaatattggataaatgtaggaaggtgaaaccattcggataa

SEQ ID NO: 45182 - DNA, 540 bp, Manihot esculenta
  Intron number 1 from transcript cassava4.1_022988m (locus cassava4.1_022988m.g) derived from phytozome v7.0 (chr-ID scaffold11581; pos 743348 to 743887 reverse strand)
gagtcttactattgcaaagttctgtaagtttttgtttttatagtgtttttcttgttgactttatgtttataaatgaatttgaagagcgaaaattaatgatatgcttaacttttctcttttgaattcaactatcttttaattggtgctttacccatttgctccctgtctcttccgatttattgaaaagtgctttttctattaaaatgttgatttttttttttttttgcctttgttacatatagctgaatacttgttgactggaagtattttgttggggtattctgcataagatgacactgtggtatacccagacacaataagcttttgttagattattatttctgtggcatcttcatgcatctggagaacttgcatattggacaattttagacctagggaataatagctagatggtacaatttcttacttggtgctagatgctacctcaggtctgctggaaaaagactaatctctttgattgctctggctttgaacttggataaagattatttgagaaaataggagccttggataaaccag

SEQ ID NO: 45183 - DNA, 456 bp, Manihot esculenta
  Intron number 2 from transcript cassava4.1_006155m (locus cassava4.1_006155m.g) derived from phytozome v7.0 (chr-ID scaffold03803; pos 107554 to 108009 reverse strand)
tagcaggttggcttcttcttcttcctcccttttttgtcttccaatccctatattgattcctacctcaatgcttaggtattgaaaactatgtttatgcttacttagcaatgctaatggcttataatggtgatggtaaagctactttaaaaattttgtatgaatacataactgttggttttttgggtgatttggtggatatgttgaatcaaaatggaataaaacttaatgttgaataagaatttatatttagacgaatagaacaaaagatctttagatttttcagtccatatattctggtttatttgccaggaaagtgtttgtctagttgttttgcctatacttttgcttaatgaatcatgtatcttattactcttctcctagcttgtcttccagtgctttttactaagtttgttcttttgattcaattaatcaggtttcatttgctggttgaatttg

SEQ ID NO: 45184 - DNA, 889 bp, Manihot esculenta
  Intron number 2 from transcript cassava4.1_011293m (locus cassava4.1_011293m.g) derived from phytozome v7.0 (chr-ID scaffold00467; pos 191880 to 192768 reverse strand)
attacaagtaagtttaagtttgcatacttttcttgtcccttcaatggagaatatggaacagaaattgggaggaattgacagtttaatattatgaagcctttatgtgtttggtgattacatatcatcaaggaaatgaaagttattcttggcactaagacttcaagctacagattcttccttttcattgaaactgtaatttctcataattcattctgtttccatgtttttttagtgccttaagattgcaaaaatttgggaaatgcaaaggaccacttggatgaaattattttctaattatcaactttaactttgtattcatatgattgaatgtgttcttgcttcattttccattgaaagcttatcaaaacactaatttgtggtttgatacatgaaggatttcttatttaattgttgtaaacagagtccttttaaactaattaccaaatataatctgaaagaggtgcaaaatgcttttgtatgactgcacttccttatattatgccttatattatgcatttcaatattttgttgctttctggagcaggacacgctctgatatcaaaccgctaatttgtggtttgatattgaagcatttctttattcaattgttataaacaacgttctgttaaactaatgaccagatataatctgaaagatgtgcaacatgcttttgtatgactgcacttccttttatctagcatattcaatatttggttgttttctggagcaggacaagttgttatattttcttttgaaatgattaccctttattttcatctttatttattttttaaaaagttgaagcctattcaaggtttgagtgcatactaacgtggatattgtcactatggcagtggttgttggggaaattgctaactttgcagcttat

SEQ ID NO: 45185 - DNA, 317 bp, Manihot esculenta
  Intron number 1 from transcript cassava4.1_014217m (locus cassava4.1_014217m.g) derived from phytozome v7.0 (chr-ID scaffold03581; pos 512216 to 512532 reverse strand)
ccaggtctcatttctgggttagtactgtagcctttgttacttctttatataacgtgtagatataaagtcttgaatctttttattatctatttattgaaatggggatcatcacttatcttatttggtctaattaattaatatgtttgttatgtaaaccaaatcaattacgaaaaatcaatttgattatgctcgtaaattggattgttgagcaacaaatgtacaaccgagtagttaccttgagcaaaaaattaatttgattaatttgatcatcaacactgaagaaaatgttggtgttgaaattttgcaggcgactattt

SEQ ID NO: 45186 - DNA, 808 bp, Manihot esculenta
  Intron number 1 from transcript cassava4.1_030029m (locus cassava4.1_030029m.g) derived from phytozome v7.0 (chr-ID scaffold05875; pos 1935519 to 1936326)
aatctgttggaggtacactctttttttacagtacatgtcactcttgttgcttatgtaagtatcagttatttggtcatttttggtatctgacactttatttgttgtattattttgggttttccttaaactttttatttagattgattctgggatttcttcaagtgggtcatttttcgaactgcgattgatatgaatgcttcgtttctaacttgatttcctgaagttctgatccttttttctgattaagtttaaattttggttctcgtattgacgatctcttattgtttctggatttttcatttttatgttattttttcctttgcgtgattggctcaagtataaagtaataattttcaagttaaaatttaatttaaatgttaagttgcaaagttgccatgctaaatgtaaatcttgattttgttgctaaacgtattcccttcttggatatgcttcctctgaattttaatggagtggtctgattagcagagatttcaagtatacaagagtttggaaattggaatatcgaatttctgattttattaatgtcatttacgttgcttgatatatatgaaatacagttctccttttgcattctaatttgcatttgttgcttgtaaaaactaatgtttggtttgtaggcaagtttgctaggtgcctgtacattttttttaatttattttttgaagtttatcttttaaatttttttatattttccttcttaacttagttttcatacttccattgatatccattatttctttttctatgagtaggatctctgaaatactggtacgagcggaataacgtg

SEQ ID NO: 45187 - DNA, 975 bp, Manihot esculenta
  Intron number 1 from transcript cassava4.1_005170m (locus cassava4.1_005170m.g) derived from phytozome v7.0 (chr-ID scaffold06688; pos 42261 to 43235 reverse strand)
gatcctgggtatgattttcttcttaactcttttatctcccccgacttcagtttgacaaaatctttaatatttctctttatttgtttttgtttgagctttcattgtgcaatatgtgatatgatggtgttgctaagttgggtttgttaatcatgttcaactggaagcatggttgacctttactgcttgacctattaattttgtgcaatcagaacttggcttagatgggttttgctttgttgcatgcttcaaagcttaatgagagttcttatgcactgtggaccatgaatttgtatgagttcaagatgaacttggattaaatgtaatcatgacctgaaaactgtttatcacttgtttgcattcttcaacctcttttgtaaagctactgaatataacatagtctggcaggcatctttatgatcagctatttatgcccttatgctgatatccattttttgagaagggttttagatgatttttcatttcccattgtgtacattactcgtagtgtaacagctacaatataatgtcttatttaatttatgtttcttttaattgtttgaagtattatctttcaatatcccaatggaagactttggatgcaaactatgacatctcctgatagtgctaattgcatggtcagggggcctcaactgcataatgaattttctttagtatatgtttcttgacttacacaaggcaataatccaagggtagattggaactttaaataaaagaaagttgaacgcatttcacttgaatttattggaactgtaagatttgttgttcatgtgagcttagagcatttttagcatttaatttgggacaacagaatatagcttttggtgttcattactggatttctgaaggtaacttagcaattccgtttgccttttgacctgcccatttgtgaaggtaaaatatttgctgattttgattcttcctttggatcggattggtgttgcaggcaagcaaagg

SEQ ID NO: 45188 - DNA, 538 bp, Manihot esculenta
  Intron number 1 from transcript cassava4.1_029301m (locus cassava4.1_029301m.g) derived from phytozome v7.0 (chr-ID scaffold08622; pos 18558 to 19095 reverse strand)
acatcagtggtagcttgccttcatgtctggctaacataacatctcttcaatcgttagatctctcttccaataattttgttggaaacatctctttatctccacttagagatttaacaaatctcaatatttggatctctcacacaatctttttcaaattccaatatcgttgggcctattttttaaccattcaaaactcaaatactttctaagtcagggtaacaatgaaatatatagagaaaaaactgaacaaaatttgaccccaatatttcaactagagactctttttatcgatggttatgcatgcaatgaagcatttcccaaattcctttattatcagcataatctacgagtagccagactgcagagcttgaaattgagaggaagatttccatattggttgttagaaaacaacacaaaactagaagacctttacttaaaaaacaattccctctcagggcctcttcaattaccacttcattctcatttgaatttgtcattcttagatatctcagataatctcttccacggaattattcca

SEQ ID NO: 45189 - DNA, 816 bp, Manihot esculenta
  Intron number 2 from transcript cassava4.1_018736m (locus cassava4.1_018736m.g) derived from phytozome v7.0 (chr-ID scaffold07005; pos 20568 to 21383)
tattttgaaggttcgccccttttctgctactgctcagttgcgctttgcttgattttgaggtttacaatttagtttttggtagattctgcgtttaaatagagcatgttgtcaagattgcgctttctagcttctttttttttcctggttagtgttcttgttgcttcttgatatggagtggccatgttgatttattatccacttataattagaagcatatataaaataaattgccagttgtaaacagcatgatttgcttctttagcattgttccacctgtctcccagtaaattctctaatttatcgcaggagggtatgctctaaatcaggtttagtgaaattaaatagcctataagaagtgcaaatgatcttggttttctagtatatctgaaattaatgaattgcagcagggtcatgcttttctcctttcataagttgcgttctttttgtttcttctaaagagcttacttctctcatgttatgcttccatgggttcttattggtgtttgatcgagttatactggttgacttcctgcgtagcgacctgataatatatgtgactacctggaaaaaataaagagagacaagtgaattcaaagcttcctcttgctttcattctgccttttgtgtatgtggttgttatgattgatcttgttgttgtgttggactttgatgtggaaagtagttcataattgtcgttagtacgttatgtttaatttggtactgttattattttgccttctgttgtctgcatttcccccattcttagggaggaaaattttcaagtttctaagtcctagtttcttgtttttgcagaca

SEQ ID NO: 45190 - DNA, 658 bp, Manihot esculenta
  Intron number 1 from transcript cassava4.1_003092m (locus cassava4.1_003092m.g) derived from phytozome v7.0 (chr-ID scaffold11279; pos 133121 to 133778)
atttgtctgatccatctcatagtcctatctccgaggtggggcttattatttttcgtggattttgttttgttattctttggtatgagttttggaatcttatgccatttgttagtttggttctatgagatgagtagcagcagttgtgtttgatttgttatgatgggttacttgagaagctttaagtttttctcagaaagaaaaatgaagaaatggagaaaatgaagaaaagtttaaagatcatgttaatagtttctttattgatcgatgttcctttagcaacaggacaatgattgaagctctttaaactcttcaacttgaacaaatgaattgttattttgattggggatcaatattttaaaggccaaatatggatatgcaatatatgatttgctgttgaataccaactctgcaatttgaaaaccttctactttggagttttgttcatggattgagctttgatacgtttcacatatgattcattactgtcgtaatgtagcgcaaccacagtgaagaattaatcttggatatggaggtgccaagttgacgatattgtatctaagcttagaccaaattggttatcattttttctttgggagaaattcatgaatctaaattggttgttttctgtttgttaattgatataattattttgtagagg

SEQ ID NO: 45191 - DNA, 791 bp, Manihot esculenta
  Intron number 1 from transcript cassava4.1_008822m (locus cassava4.1_008834m.g) derived from phytozome v7.0 (chr-ID scaffold02717; pos 238598 to 239388 reverse strand)
ttgcaaactactgaacgactccacctccaacccttgtaagcctttctccttgttgtcctctctttattaatgggatcttcagtaccacaattttttacttcaaagttgtagtctttttctcttttttcaacgtgattcatttatcataagattttcgatcgactgattggatgctgagcttggaaataagatctagttgatgaactctgtttatcatacccctcttttatatatatatatatatatggattgttccaatggtaccttagtgttgagattgctacgtcctcagtgagcagacagttgtttttgagattgcattgagtagcagtttgtgaaagagatgttataatttgttgatttctattaagatgtctggatgcgccatgacattgtatcattctatagtgcaaaagtttgcaattaagggcatttagaataatctcttttttcctctgtacaatttctctaccaagaaagatgattgattgcttgttggtaccaacgttcactttcatcaacttttctaccagttgcttgtaataaatttgctggctttggtattgacaaagccattggcatgtatttagctaattagcttgcattttatactaatatctttctttcttttttaatttcttttgtctctttgatggcttttctatatcttgaacagttaataaaaatccaaatgtttttctggattttgcacctgctgattcttgctataactagctgcatctaacagtttttcagacattgtttgaacagaaatattcatcttagaaaat

SEQ ID NO: 45192 - DNA, 768 bp, Manihot esculenta
  Intron number 2 from transcript cassava4.1_000988m (locus cassava4.1_000988m.g) derived from phytozome v7.0 (chr-ID scaffold03581; pos 987736 to 988503 reverse strand)
caaccgcattgcaggagattggctatacaatccaggttctctctctctctctctctctgctttaactcagactgattctctcgaatgccttccattagaatgataaatttgtctgcttacttatgttcttagattggagcaatttctggcaagaagggatttactaaaatcaacttggtaattattttctaatggaggttgaattttgtatgacaaagtaattagaggtcttcggaacaataggtagtttttaatattttctttaaaaagaatattcttaaaatctcacacaatggagacagagagaatgttgaagatggatatgggcaatgtttgttgttgggaaattttttggtcataaataggagtgtaacttgtcattattactttggggagtatgaaactgttattgattatatgagttacataggttcagagaagtatagatgaattgagtgtttgagaaaaatgtcttcttgaattacataaattttttaaaagtaacttcttgtttgtttgaacgaataatgtcttagcttaattttaaacttttcatatacctatgatagtatgattgtcttacttcggctgatactacatgcatactgactaaacgagttctttcaacaaagaacacttatgaattcttaagaaactagttaatatattcgtaatctatctttacaagaaattaattaatatatttgtaatctatattaacatcaaacttatagtaatttcttctttcacaggttttttcagttgaag

SEQ ID NO: 45193 - DNA, 334 bp, Manihot esculenta
  Intron number 2 from transcript cassava4.1_013986m (locus cassava4.1_013986m.g) derived from phytozome v7.0 (chr-ID scaffold04020; pos 20838 to 21171)
caagttgaagtgtggttccaaaacaggagagccaggtaccattcgacaacttttcttttttcaaataatttctaagaaacagtttcatgacacatgaaatatcccaaaaaaaaaaaggcccacaaagaaaagttgcctaatttccaaaaagatgaaggtatctatgcttaaagctcaaggtacaatcacttcaagatatattatcttcatctttaagaaggaacattaacatggtgattatatgattataacctgtttgatataagtcttaaatcatgatgagttaaaattatgtgcaggacaaagctgaagcaaacagaagtggactgtgagt

SEQ ID NO: 45194 - DNA, 720 bp, Manihot esculenta
  Intron number 2 from transcript cassava4.1_014311m (locus cassava4.1_014311m.g) derived from phytozome v7.0 (chr-ID scaffold05280; pos 407230 to 407949 reverse strand)
tgggtaagtgcataatcaaatatattcttttaattaaggtacaatgttggtggttgcaattttgttatatgttaattgtaatatcagttataaaatgattttagtttatgtatgaaatcaaatagagtatgcaatgtaataagatcatacaacacaggatttgaactccttgtgatttaatatacaagaatcttgaacgttagatcccttgaaaaccataaacatagaacacatagacgatattctgtactggatcactttgtgaaaactttcaataaaataaaattactttgactttttcctccttgtatagataactttgttaatcttcaaagtttccttttacacttctttgagtctcattagttattatcagtcaagattattatttacatggtgctccgtggttccatatatatgtgtggaaattaatttagatgttaattgatatgtcttctacagaaaaaaggtagggaaatttttaagagattcagaataattttgcagggtactttcttctgatggatctttgctataaaccatgaaagacatagttgcatatattaactttatttcataatgtgcagaaattgcactatatgttataaatgcagacagcattgatatgtcttatatatgaagaaaatagagggacactttaagagatttcagtataattttgcaggacattttcttctgacggatctcttgctggaaacc

SEQ ID NO: 45195 - DNA, 643 bp, Manihot esculenta
  Intron number 1 from transcript cassava4.1_015009m (locus cassava4.1_015009m.g) derived from phytozome v7.0 (chr-ID scaffold03299; pos 90017 to 90659)
tcggtataattggcgccactgctaccactttcgctgtgagtttctatttctcttctttgctttctttttttttttttttttttaattcaaattggttgctaaatgtatgtatttatggggaaattttgttgtttatcgtatgatgttatctaaattcttattggcaatcacaatcagaaagagaatgattaaaattagagttatatgttctgcaatgattatgttgatactgggtgtttggtatgtgattgtattttgcatatactcctacatgcataagcttacctaggccaaagattccatgttcctgattttcctattatggaattatggttcgtatagtgaatgaaataaggatggttcggaatacgaatgaactgaggatggtttaaccttcttagaagttatcaacaactacatatcccttgggccatattcatttgagtttacctcctcaatctatgctagccattttagatctcatgaaagctgtaatgtggactaatttttaatgccgctaaagtttgaaaatgtgcattaattctttgggttctgagaaagtagatttaattgttggtgaaccagctctgttagagaacaccatttgatggctgtagcaatctggcaggttggtcagctgcag

SEQ ID NO: 45196 - DNA, 628 bp, Manihot esculenta
  Intron number 2 from transcript cassava4.1_015009m (locus cassava4.1_015009m.g) derived from phytozome v7.0 (chr-ID scaffold03299; pos 90674 to 91301)
gtttaatactcaggtatacaattatttataaatgcttggccttgttgtgttgtaatcactattgacctaacatgatatttttcttgtcctaaaggccaattataatatcaagctaatttagctaccaacaaagcagttaggattatggttgatggcattgcataaagtacacaaatttgcattattttgttgtttctaaatcaaaggagcatatagatccatgtgcacacgtctgtaaatgtaagaatggtcaaatgcatggactataggaataatgtggaatatcaatttcttgattgcatcctgtgactaacaccttcttatttattatacaaaccactaatgctttacggcctttttgtataatttttttgcaactcattttcatgtttaatatcatctctagtgtgataattttaagaaactatcaggtttgatatctcaaaaccaaaaaggcttgcaagaatttcagtttgagtattcaatatgcttaaccctatatgtggtggaaaacagtctgtctttatagtttatatatatttagtcaacacattgctttttgtatgccattttgccagtctgattgcatatgcaattgcactttatagataaaacggtcacaatcatc

SEQ ID NO: 45197 - DNA, 767 bp, Manihot esculenta
  Intron number 2 from transcript cassava4.1_009447m (locus cassava4.1_009447m.g) derived from phytozome v7.0 (chr-ID scaffold07236; pos 27498 to 28264 reverse strand)
ctctctgaaggattgcaacttgcatttgtttgcaggtatctttcacattcatcaacaaatcatgcaccagaagaaaagatgtgaaaatcttcttcttcttcttttttttaaatctttctgattttttcacttcttcacatttgacaaaatgtgcatatttttagattagaaatctgggattctcctccaaggactgttactgccttggttctctagtatctgtgatttgctcatgtgggaaatgtaatgtatatctagtttgatggttgttgtatcattagagagacagagagagagagagagagagagagagaaggttttgtaaaagggtgcctttttgtgtgtgtgtgagtgttgcaggttttcatgatgctactttagtggcacttttgctcaactttctctgtctctcactttctcagttcaatgaaagataaacattttcataagttttttcttttgtcaaaacattttcataagttgaaaacctatgctttaaccttttacatataagaagcttaagttgatgttccctaccaagtgcttggcattccaggcaagaccactaggaagctcggataccaaagaattgcatatggattttaccttttattattattattattattatttacaattttgttatattgatagtgttttttatgagcttcaatctaactctttttattttctattttatcttttgcattttccctttcatttacttgttagattcctcatagaacaattctctgtgctctccttgc

SEQ ID NO: 45198 - DNA, 950 bp, Manihot esculenta
  Intron number 1 from transcript cassava4.1_009447m (locus cassava4.1_009447m.g) derived from phytozome v7.0 (chr-ID scaffold07236; pos 28305 to 29254 reverse strand)
cccttcatcaagttttgaaattagtggatacccaggtgagttttttttttttttcctctttttcttttatcttcttcttattataagtgtagacaaaagttcctaacttttcattatcatcatcattaacttcttcttccctcctcgagcactgtcatgtgtttggttgtcgagaaaagagatgtgaaaggaagaagtgaatacttggaatctcatcattcccattattctgaatccagagaaactcttgtaaaatttccagttgtagcccaagtttttcctcccctctttgattcatttctcagcaaccaaacgcattctaaaagttttttgtttcttgcatataacattttgttaagagacagaaatatttaacatttgagatctatctatttctcttttgtcttcatttcacattttgaaaatggaggtttctctttttccatacaagcacgcgcgtggtggcacgtggtgtatggtccttccactggtgtttaagacattccactgtcactttttacgcattctgctcatcatctgctttagctcttcacttgtcagtaaaagcttggttgaaatgactcaagtgcccttgaaatatcaccagcctgaattttgagatactgtctttagcctctgaaagttgaaaagggcacaatcatacatgtattgatttttctttttggacattaagcacatctaaaaagagagagacttgatttgaattacattttgcatattaccaaatatccatgtatttcctgtattattctcacgtatggagagaggttaataaaatatttgtatttttaaaatttttttgggtgtttggttaaaaaaatcattgatatgagctggtgttttatatacaatgtacaattattgagaagagttgacactatacacctgctcccatggtagggtctcaaagttggaaggtgagggccaga

SEQ ID NO: 45199 - DNA, 958 bp, Manihot esculenta
  Intron number 1 from transcript cassava4.1_002353m (locus cassava4.1_002353m.g) derived from phytozome v7.0 (chr-ID scaffold03175; pos 333036 to 333993)
aaggtactgttcatctgatcaaactcttgataatcaacataggaactgtcttttacatacgtaaatgaattaacattttctttatttaataaattttggaattgggactttatcctaaatgagaaatactcgtcacagaacaagtttacataaataattcacaattagattttttctttttctttttttttttgcttagatgcatgtctcgtgagactaagttttctttttagacaataaataatttactaattaaatataaattaaaaaagggaaaaaagtagagcaaatgaattttagtattcactttgaaatagtagtgcctttataattaatcttaattgatataccataattaataattatgttgattgattgattagaataatgatatttcttggcggccggcatcagtagatagaacttgacttggttgagggttgcccaattcttggggtacttccttattgtgagaaaaacataaaagataatgacgaatgagaccaaaggtgggggtggggtctgaggaagacgtgaaccgaaagaaactcattaatatatatatatttgggggttcggtctctgagtcaacagctagcttggctaattgtgaagccatgtgctcagcgtactgccccactctataatttgagcttccgtcctattcatcataacatcaatcttctctactctttttcttttctaagtatttagagacaaaaaacgacatccatcatggtaaggaaaaatatcagcctcaatatttgatatttctagtaatagaaaaaagaaagtaattaccttttttttttacataaatttatgttaaataaagaaagaatatttgtatatgatatttaacctaaatttatataatttctaaaattcacattttttttgttcatttgtaatattaggtgggtttttttgtttaaaatttttttgatattttcagaca

SEQ ID NO: 45200 - DNA, 656 bp, Manihot esculenta
  Intron number 2 from transcript cassava4.1_016560m (locus cassava4.1_016560m.g) derived from phytozome v7.0 (chr-ID scaffold06804; pos 21595 to 22250)
catctcttccaattcgattcctgcatttcgcagaggtatattcactacctaatgttactgaaattgcagtttttttcctttatcatatatgtatatcagtttgttttcatttgagggtaatacttgtatcatgagaacacaaatattcaatttgcgagggtatacaaccaggcgttgaaaatttcaagttacaagttgataatttatttggcaatttcaaagcctataatcagtaaaaagttgcatacgagtgtctgcaaactagtttgtttcagattaattcaagcaaaagatttcctcaattctagtatataaaaatttgccaacttttgctgctgcagcatacccgtctatggatgccatttgcctacctgtttcgtcctaaaccctagtgtaaatatgctgttgaattgatgaaggaaaagtgaccttcaataatatcttctgaatgcgtcttagaacttagaagacatattttcacttggtaatttgcattagatacccaaggttatgttattatgaaacctgtcacacaaaatatgttatttttttagaacttcatgttcttttgatgcctttattgtgacaattgtttcagttgctataacatgatgacaattgatgcagggtccatacctggggtctcatttgagcaa

SEQ ID NO: 45201 - DNA, 685 bp, Manihot esculenta
  Intron number 2 from transcript cassava4.1_013573m (locus cassava4.1_013573m.g) derived from phytozome v7.0 (chr-ID scaffold05875; pos 517244 to 517928 reverse strand)
ctggcaagtaagtgaaagatacttctagatagtttgaattttcttttcatatgaaaatgtaaatggctactgaactgaagtgttgcacaaatactaaattctaccctggtaaggatgcgatcctttatatggagtttctttttttttttatcaataataaaaatttaatctttctgacatcttatcatattaagtgttctttcttttataatttttaatgtggattgtgatggaatgtgagagtgaagttttatcttcagcttggtgttctttacttcttgcatcatatattaaatttggtttttctttaaaaaaaagttagagaattggaattttgcaattctttgactttttatggaaagtagttagttagcacaggatggagaggagggaatgatttaaattgtggaagctctttatgtgggattaacatacatattggcatttgcataattagattgctattgaaagtgatttctgaatataggggcttcgatttatgattccttttccttaaaagctcatatttaagaaatagaaaaaggatttctttctaatatgatcaacgaagaagttcctgctggatgagagtgtttactgttttgattaagtaccctacataaattgatcaagctttttctttgcaacttctcctttgcaggttcttctaccatagtgctcttcg

SEQ ID NO: 45202 - DNA, 937 bp, Manihot esculenta
  Intron number 1 from transcript cassava4.1_005137m (locus cassava4.1_005137m.g) derived from phytozome v7.0 (chr-ID scaffold02912; pos 156612 to 157548 reverse strand)
acagcttcttccaaatcaaatagaactgcacaacagtaggtattctctctctgtcgctcactaattttttaatttctgaaattgctggggattttttttttttttgtctccgtttaataacagtaaacttgtgagatgtaaacttgtaaaatttacttgttcatctgttgcgtttgtgctcttttcgtgatattgatgccacattttcttcgtgcttgttctctctctttcttgtttgctgctttatctattattttctctttcacttttcttatgctgtatttctggtggcttcttatggtacgctgttatactctgttgatacagtggtcaagacgtcccatactttgttaatggttgtagttcacagcctgggaaatttgattttcattatggtttagctgaaaaataacacgaaaagaaacctttttggttttttaaatggttgagtaaacgtagattgattctgctaattaatttacgagcatcaaattttgatggaataaattttagggacagagagtggtctgcccttgaaacaaaattaatggtggcggagaaatgcattcataggaatgtctaaccatctagttgcatagcagtgtggcatagggcaccatttctttagtctgaggggtaatactgcttattgaaaagcagttggatgagtagggagagagaagtttcagagcatatatttcacaatatgtttcctcgaactaatggattaatgctgctgatggaatttacaggaatcaacccttctgtaaattttattttctctctcttcttgctgatattcctagctttttcaaccccatttttgctttgcgaaacggtgagtttctggcaatctttaacttcagcgattaattagttgattttttttcacataactgcagctgaggacaaggatccatatagctgaagctgcccc

SEQ ID NO: 45203 - DNA, 428 bp, Manihot esculenta
  Intron number 1 from transcript cassava4.1_029870m (locus cassava4.1_029870m.g) derived from phytozome v7.0 (chr-ID scaffold05280; pos 323019 to 323446)
gtttgcagcaatatacatttacaagtaagattcatttaaaatcacctacagtaccccactttttgtccttcttttttgctttttaatcatttattgttccatctttgttctagaatactagaacagcacatacaacacacaggtccaggtcctattcaagcccttcggcaactgagagctcctttatggaagaagcaaacttaaaagtggttccttacagtgctgaagagagaaaagctaggatttccaagtacagagccaagcgtgagcagagaaatttcaccaagaccattaaggtaactgagacgcagattcattaaggaaatgataatcaaaatctaatctaagtaaatcccagacgtggttaattaatagcaatgcaatttcatgaaagaatattaatggggtctctgtttttttcttgtagt

SEQ ID NO: 45204 - DNA, 617 bp, Manihot esculenta
  Intron number 1 from transcript cassava4.1_007141m (locus cassava4.1_007141m.g) derived from phytozome v7.0 (chr-ID scaffold07035; pos 258375 to 258991)
acgttcatactgggatttggctacctcattgggtggtatgttttaatttcattcgtcgtttttaattagcccaattgtttgtgttttctgttttgaattaaaggagttgagtttctagagtttaaagtttttcattgttctaatgtgatgattgttgctcgattaattctatatgttaaattgctccaagaagcttggtagtttatttattacattaaaaaaaaattgcaaaagttttgatttgagttttctggacgttaaatgctagtgcagtagaaaatcaaagaaaaaggaaaattgaattttaagttccctgttgatttgaattttggagttcacatcctcagggaggataagttgttagttcgacaatggattacaatttgcattaccaattatacactaaacactatttgaaagtttatcatggccatgttcggtaagaaaaattagtaaataatcaaatagtgattgtggttcatgaaaagttatatcgcttaaggcttaacttctagctaacagtgttaaaaagctaaaagttactagaagaattagtattgctgaacgatatgtatatacggctaaaaaatcattattttctaaatatatgtgcagcc

SEQ ID NO: 45205 - DNA, 733 bp, Manihot esculenta
  Intron number 1 from transcript cassava4.1_003358m (locus cassava4.1_003358m.g) derived from phytozome v7.0 (chr-ID scaffold06688; pos 242386 to 243118 reverse strand)
accgttgagcccaggcaccgactctctgcttcagcgtcagtctctctctctctctctctctctctctcacacttgttttttgcttgctttttatgtgatctgatttattatagaatgagctccatgttcttgatttctgcttcgcaagttataatttcacttcgaaattagctttgttgactgtatagtaaggttcaaatattccgtttcactgagatctacttttttttatggtatgattttagtgttcaatcagttgttcaagtttcgattctattgcttgcttaggtcgttttcgttcaataattgctgctggattctgttatgtagtaatcattgatacctgattgtggactggaagagcattagttgaacggatgtatcggtcattgatgttttagtttcttcccagttcattatgcgatgtgtttatgctcaaaatgattatcgtgaatttctgtgattatttttttctacataatgatgatatttctgctaggtattttgctaggaatctaaactgagtagtgagaaaatgtggaagttaaggactgattccatgtttcagtccttctataaaacctccttgccgctttctactagtggtttccttttatctcttagatttgagtttttttttttatagcttttttttcactgcttttctaaaatatagttggaatgctttcttgctacagagaagagacctctaaaagaaagttcttaagagata

SEQ ID NO: 45206 - DNA, 560 bp, Manihot esculenta
  Intron number 2 from transcript cassava4.1_002678m (locus cassava4.1_002678m.g) derived from phytozome v7.0 (chr-ID scaffold06303; pos 76098 to 76657 reverse strand)
ataggaagtctacaaagaaaggtgcagtcgtaatttttcttaacatttcaatgtcgttggcgttttacttgatttttgtttttttgtttttctattatgtttagccttttagtcttgatttgtatgatttgtatgtgtttattagtgtgcttattgatttctgaatttagagagaagacaacggctttagagtccttgttttaaaattttcgatgttcatattatggttaatcatatgtatccatatgattaggaatcttttgtacgaaaattttccatttcatagttctgttttggggcttgaaggttttcacgaacatacatgcaagtttgcagctcaaatttgtgtggggaaaaatgagaaaagaaaattaatacaaaaaatggagctaacttcaatgttatgcctccatgactgctctgcatttgcgttgctcctatcatgttatgtgatggattccatatttttttcccgggacaccattgtcttattgttttcttggattttggaattttgacttgtaggtaagagagaagctgaagaagctgtagagaaactt

SEQ ID NO: 45207 - DNA, 482 bp, Manihot esculenta
  Intron number 3 from transcript cassava4.1_006010m (locus cassava4.1_006010m.g) derived from phytozome v7.0 (chr-ID scaffold05859; pos 328245 to 328726 reverse strand)
cagttattgttgggggtactaattactatattcaggtaaggaattcattaatcctataatttccagtggggtctggtggagcttattgctcacatatgttataaggcctttgtgccgcatgaaaaagtaaaaaatgtatactgcccgtgtctgctaacctgataatcgatgaatctacattccagattcaaacaggaaatccatatatggtactgtgctttatgagaccctgaccattcatgaagattgtggacgcgttgttgcaacttcaactgttttgatgtgtagttattttgaatactatctttgagtttctgtggttattgctgaaagcttctctgtacagatataattatttttttcttatgacaagaaattttctaggagaactggaaaccgagaaacatctttttagtacatgtttgcttatgttttgcccttgtttgactgtttccaggctcttgttagtccattcctattag

SEQ ID NO: 45208 - DNA, 1049 bp, Manihot esculenta
  Intron number 1 from transcript cassava4.1_033744m (locus cassava4.1_033744m.g) derived from phytozome v7.0 (chr-ID scaffold05545; pos 42890 to 43938)
gcgaaactgcagcttcagctagtaagactggaaaggtacatcttcttcttccttacagcttctagaattatagttacttgttaacgatttttcctgttttgattgattttgttttggttcgactaaattgcaaacccctaatttcaagaaatagtgttttttacttcttttatttcttcagaatcaattcaagttattctagcccctcttctagtttagttcttcttttctggataattactctaattttttctttctttgtttcgagacttcaaagagccaaagcctagtggggatttttgctctttgcttttcttgagtttctaaacagaatccagaaggcattgtattacccatattattgattgattgatttatgaattacagatgaaagatctgaatttggttggagctaatccagaaattgggaattaattaaatattttgttaatttgttttccatttaaatctgaggatacaataaagctctgtgcccaatatgggaaaacaagcattgtgttcttagcaacccggaaaagaaaattttgctgcaaccagttcacggttgaaatgaactctatacaatatacgatgattatgtttttatagtccagaattatagatacagatcatgaaattgggatgtagaaaacaaccccatatgagttccactcgtgaaatttattgtctggttggctcattcagtcctccaacatgctatatacagcagccatttattttgtggattttggaacgaaaagtaagagcctgtaatctatcggtgtgaatttcacctccagccactttctgtttttagttttttctgcatgtaaatttcttctaatatttttgggtaatgctttataatttcacactccgggcatttgaacttcatatttttgtttagtattattttttattaagtgcacaaatgcatcatccttcaaaagcttcatctgcattttgttccatttccatttccagattttacatttctgcttttgtatagtgcagaatagatcgccgaaaggggttggccaatcaacatt

SEQ ID NO: 45209 - DNA, 854 bp, Manihot esculenta
  Intron number 1 from transcript cassava4.1_001982m (locus cassava4.1_001982m.g) derived from phytozome v7.0 (chr-ID scaffold08559; pos 33021 to 33874 reverse strand)
gagaaacttctctgtctttgccttggccgctgagggtctctctttctctatatttttcaattttgtttatttactactgcttttgctgaatttctttcttttcatgccatttctggtttaccattttgttcagcttgcagtatttgcgctatttgcgatgttgaaggaatcttaagtgaaacacttgtttgatgcctgtttttaatatggggaagtttaaatttgaaattgattgattcatttcttttatttgtttatgtgcattttacttgatgatattctaaagtttagattttattagctgatgggatagagtaatcagttgcatattcatccataatttggctgcttatggtacaattttacttttagttggcgaaatgataatgatattgggctggaaagttggtttggagggtataatttgagagtgcaaactatacttctagtgctcaagttgtctgctttattatcttttcttcaaacataagcagtccatccttatcctgtatgattaaaatagcctttcatgtccttaaattgttagtcattaacaacaataaatacatggtactaagaataaacacatggtactcggtcacataattgtcctacttgaaaacatagggtgactgctctactgagcatccttgcttctagagctttataacttttgagtgatttcttgcagactcttgttaatgagagatgatccttcttttttttgttcgcttaacatttgtaagtgccttacgctgtcaataactgttctgtttcttccgtgttagttaacatgttctctttcttctcgctttccagaggcaaagcgtgcggtaccattgaaagattaccgc

SEQ ID NO: 45210 - DNA, 918 bp, Manihot esculenta
  Intron number 4 from transcript cassava4.1_017501m (locus cassava4.1_017501m.g) derived from phytozome v7.0 (chr-ID scaffold09492; pos 495002 to 495919 reverse strand)
tagtgctaaagcaagcttggaacaaaaagtaggacgtaagtattggtgaccttgacaacatggaatttacaagtgcttgttcctactaattttttcaaatactttgattctatatgtcatgagggttgcagaaaatacatggagacatcttatgggctctgcttggaacattaccaatgctgaaatttgtcactacacatgtttaattgttcctttaggttcaaatgtgttttgatgaaatagaggtttcacgtggcatttgaatttgctcaaatttttcaatctcatcatgatgaatcctgaactgaaagaattttttacttaaatagaggtacaggacagaaagagaaactaaaataagcagggaaaaaggaatatatgttacagtcacaagattggtgagaatggtaatgattatactatgagtagtttaaaaatccatgtgattttgaatttttttaagtttgtgaaccacatgcaatgaatctgataatgcaatcttttagcatataggttgtggatgaacgtttgatggtttgttgaatattcatagcattccaggagaaaattatcactttagcggataaaagaaaaggctgaatgagtgaatttgaacaatatgcctagaaaatggtaatgaaaaaaaagaacaatgtgctgtcaatgattgaaaatctgcttacctagtacattgaattgatggatatatagcatgtctttaacttctacatcctgtgttgctcttttatggtgaataattatgcagctaaactaccaaagctggcataaagtcttgtatatcttacgttatatatctgctaagtgagaatatctacaatatggtatgtggaatgtagaagttcaaatgacatgattcctatttcttttcctcagttattttcaaggtatacgacactg

SEQ ID NO: 45211 - DNA, 369 bp, Manihot esculenta
  Intron number 2 from transcript cassava4.1_017501m (locus cassava4.1_017501m.g) derived from phytozome v7.0 (chr-ID scaffold09492; pos 496169 to 496537 reverse strand)
catagaagaggttcaacgacactgtcataatctatgtaagttgtccttttcctcttccctttgtggagagtttctatcgtaatttttttttagaagtacatattttttcaataaataccgtcagctgagttgataagctctgatgttagctttcactcacactggaaaccctactttttagatctcagaacatcaagctctaatctaatggtgaaaagaataaagtaaactaaaaataaagtaatcatagaagacatgttctatgttattgcctttgtttcttgctatcttgttttgagtttgtaattccatggttttgtggtttcaaactcagtctcccagcaagagatagtgtccttgtataaaaga

SEQ ID NO: 45212 - DNA, 604 bp, Manihot esculenta
  Intron number 3 from transcript cassava4.1_021206m (locus cassava4.1_021206m.g) derived from phytozome v7.0 (chr-ID scaffold00318; pos 208906 to 209509)
ttgcccagtttgtaaggtgccgtatcggcgtagaggtatgtatttaaaatttgctcacgggaattgatttaatttgattgctttcagaaaatgggtttcgataaatgagggggttatcaaagttttgaaaagaatatttaaacttgcaattagagatgggaaattaatctgaaaagccgcgtctatatattgtagtttctttgggtgatgttgggtaatggaatttgataattaaaaacctaaataaagagccataatctttgccacttcccactcaaccaccctcttgaatctcaactttgtaattggtcttgaggcaatgctagtttttggtgttgttggttgtgcttacatcagaatttatcttaaagaataagggatttttgtgtttgttataattacatagtcagatgcttgaatgcgttaagaaatgcaaataatatatttgagacacaattggatgcatgttttgatatcaaaatgaatgaaaataagcaattgctttaaattctgtagccttgtccacatgcacggcaagaccatgtttattctctattccttctaagtgcatggttttgttgcagaggttcgagctgcacctcat

SEQ ID NO: 45213 - DNA, 510 bp, Manihot esculenta
  Intron number 1 from transcript cassava4.1_012151m (locus cassava4.1_012151m.g) derived from phytozome v7.0 (chr-ID scaffold10217; pos 152478 to 152987)
gcagaagcatccttgtgatagcagtttgagtactctttcaacagtggaagttcaaatgtgaagctactctgaaaaatggcattaaacattatatgccaggataatttgtgtgaaatgtgttgcagaactgacatgcgttatctctttcatatccagacccttcacgctgtctatgtaacctcatatccccaaaccttcccatgagattgccatgggtcagttaatctaatctgttttgagtaattgcagcccttagttctaataacaagaacttcttgattgattctcttgtgtttatattatctcgtgcctttgaggcttttgtgacataattgaaggccgtaaatttgtcttcttggatctggttatcaacaaaagagacactattttgtttgttgtgaccaatcaaacgttgagttttgttaactgtaaacatgctacagttacttgaatttgcataagtttcttaatcacctttacctttggttgtagtggaattgacctgtcgag

SEQ ID NO: 45214 - DNA, 575 bp, Manihot esculenta
  Intron number 3 from transcript cassava4.1_006734m (locus cassava4.1_006734m.g) derived from phytozome v7.0 (chr-ID scaffold06688; pos 120767 to 121341 reverse strand)
ggtatttattaaggtaaactttgcctcgtacttttagcttttgcattaaatatgcaaccacaggattttgtgtttcagaagtatgtatgtttttaatcatgcatttcttgtgaaaaataatttaattttgagacatttaataaaaattggaggacttgacatgggatagaattttccagcttaattagcattttgcaaattggtgacttgagtctgttagtggaaatttttcaataaaaaaaaaaaaagaaaagattgagcttttctgacttaattttaaccatgtggaattggctatcctcatatatgcctgagtagcatctgctttgcagcaatttaattaatctttgtgtgaaaaactcaaattacagcttatatttttgtatataaaatgtcactgctcttgagcatgtatggagttcccttcttatctgcttgtgattcattacactgcatataagaacactggacaatgacgtcacgcccttcttgattatatttatagactgaatgaatgacacaaattcttgctttttgcagaacaagcctttaattccaaaagtggctttgctttt

SEQ ID NO: 45215 - DNA, 951 bp, Manihot esculenta
  Intron number 1 from transcript cassava4.1_016293m (locus cassava4.1_016293m.g) derived from phytozome v7.0 (chr-ID scaffold09365; pos 330409 to 331359)
cacccaatataacaatcaagaaagtcttgattctggttagtgcccgtgccattgtttgttctttagacttattgaactcttatggcaagctgattgatttggaagttacagctactttgtttttttttctggggaatccaaatacaaaaacaattttttaaattgattttgcgttatcaatatgattttcataaacaacgacttgcatattacctcgagtcattcgaggggtttatttttggtttctgagaaaactaaaagaagacaataaaattctagcattggggagtgtgttgcgcttataacttgtatttcttggtctttctattattcttaaatagcagaatttgaagtgttttgttggataattatgttccaagcaaacgttttcacgccttggaattggattaataaagacacgagtcacatgacactgtaaaaaaagaacagtctccagtatttcccttcgattaaaattagagccattataatgaagacattttccgcagcaggattgggaaaaattttagagtggtgtcttgctctatctattctttccttcctttctttttttaatctcctggttacaattgaagtcgacacatatccttctagattgcagaaatcagactacgatgatgtgtttttgaaaatgtaaatgtgtaaatgggatgttcacaacgtgagattttattagaatgggctttccccatttctgaatgaggacaggcatattgctgatgttttatttccttgacccctgtttatcacttatgatagttatataaacctgttagagttgttatgttatgcgtatttgcatgagagtttgagccagtaaatataaattctagttctttttaatttgactagtatatatatttatgcaacttgtgtgaagaaggggttactactgactaaaaattgttccttatttatgctctggataag

SEQ ID NO: 45216 - DNA, 653 bp, Manihot esculenta
  Intron number 2 from transcript cassava4.1_007139m (locus cassava4.1_007139m.g) derived from phytozome v7.0 (chr-ID scaffold05875; pos 1218412 to 1219064)
tgcttctaaaaggtatattatttctctttattcaaattttaatgaaacctttacatatttggcttttacttctcagctttctccctttttgctccgcatttatcctcgttatagcccttctcttgtcttctaaaagcttaacaaagctttgaagtttttatccctactgttgattgctcaatttatgcggggaacaaaacacacaccggtctcatctgcagaatatgtatcacagaactgtgaaataaaagaaattgaagtaaataaaagaaatgaactgtgaaattatgatgcatcttcttgttttaaactattgtattaggctcaatttggtgtgagttaagttttcattgactgaccccagaggatgaaaaataaggttgtagcattctagttacttgtctttgcagcatttcccttgcaagcaacaaaatgcgtattgaatgatacttaatactgctaatgccttcatataaagcttcaaaatatgtatgcaattcttgaatggtaaatttaaacttttttctgtgacaattaaataatcacaattctgtttaagattcttatcctaaatggaagtgtatttcctacccaatttttcgtttattttgttcttatttgaagttcatttgcaaatgcagacaagttcattg

SEQ ID NO: 45217 - DNA, 738 bp, Manihot esculenta
  Intron number 3 from transcript cassava4.1_024763m (locus cassava4.1_024763m.g) derived from phytozome v7.0 (chr-ID scaffold11010; pos 319444 to 320181)
aagctcaggctgttgttgataaatttgactctcatgtaagctcttccttttgctcttgtttcttttttttttttttttttaggtggatcactatagtttttaatagagaaactgggttttgtctaatctctctgctatttgaatttttttatatttcatttgtcgtataaaattcattgtgattagatgagtaaagattctgaaaaaaataaggataaaggaaaaatattttttttaaaaaaatgtgttggatcactggggccaggatagagctttgaatctgagatcatcatttatcttgttttgttggaaggagaaggaaaatggatggaagtgaaagaaaatagaatacaggggacaaaaccagaatcagttgttattcatcattatacattcttcttttacagtatcagtattaatggtaggtccagttcttggctctttgcttatatcatcaagcagcaatatgacttgatcagtgctcatgtccacttcttaccagttcagcagattttaactaacctcaacaacttttcctgcctgattccgtcagctacttgggttcaaaattcacttgatgcttgtagggatcctcactgcttaaaatgctgagcataagactgcaatgagttcaattgctattagtcaatgctattttcaatgttaatggcaatttgtttttcgtgttgaattcttgctgcaggaattgtcagggaggatcattagggttgaatttgc

SEQ ID NO: 45218 - DNA, 724 bp, Manihot esculenta
  Intron number 1 from transcript cassava4.1_023002m (locus cassava4.1_023002m.g) derived from phytozome v7.0 (chr-ID scaffold10954; pos 250086 to 250809 reverse strand)
aattggagtttccaattgcgacccaaagccctcaggttacttgtttactttttcctttttttgtttgggggttgggggtggggcgcgggatattgaagctgatttgcgtctggctgtgaatttttttggtggctgtcatttgtttatgtctttggtggttgctttgttttcaatttgggagcttgatgaaatggctgaagtgatataaaatggtccgaaacttagggtttcacatttgcttttctgtgtataggatggctaatgaaagctgacatcctgctttcttgttgagtttgttagtctctttatcattctcagaattctcagttaccaagtgttatttctgtaaatttctgcataattaatatagctaccgctccttgtggttgttgtatctttcctttttatattttgacacctagaagcactgatgactatatgattttccatttggatgagttagatttcattttgtttgttttgatttcttcctaatattatagtcaagttatcgttatccatgaaatattagccaaattgaactacaaagcagatctgttagcagttatggttcttgttttccgcatattccttgactgttttgtaaagtttgtcaaaattttatgtttgtcaggaattttttctttatggaattattatatctctgaattaacaatctccttttttattattatttttttatttaataggaaattgtggattt

SEQ ID NO: 45219 - DNA, 741 bp, Manihot esculenta
  Intron number 1 from transcript cassava4.1_023686m (locus cassava4.1_023686m.g) derived from phytozome v7.0 (chr-ID scaffold08100; pos 360251 to 360991 reverse strand)
tacttcacagatacaagcaaaatcttccaacgaaggtaatttaaacagaaccctcgattttgaaggtattctagaagtcttaataggacatgttctattctgtagttttctcaagaaggccagaaattgattatgcattatcaggttaccttgggattttactttcagtgtaatgttaaaacggatggtactcacttcacaagaagacaatgaaaatttagcgcatcaagatgtgaaattagtttactagatttaaaataactgattacttgttacaggtctaatgaaatcattgacattagaagttttgttagaatttagttgaggaaggagatttttatagtgactatcatattcctttttgaaagattttctatctattcttcaatatatctcaaaaaagcatatagcaaatgctgtctcagattgaactaccaaattgaaaggaaatgggaattagcgtctgggagacctgaagagcctctttattgtcctcttgaccccatctttgcgaagaattatggaataattgtatgtaatctgtttaaactcattgagatgttgatttggattctagatacacaagggatgtatcatattccccattttgatcctgagattatttttttgcttccataaaacgactgtttctaattggataattcatttcttttcttcctcgttttctgtttttcatttctcgtaggcaatttatatccgcaatcttgaataaagacacaa

SEQ ID NO: 45220 - DNA, 643 bp, Manihot esculenta
  Intron number 1 from transcript cassava4.1_023300m (locus cassava4.1_023300m.g) derived from phytozome v7.0 (chr-ID scaffold08823; pos 115751 to 116393 reverse strand)
ctttcacctccctaactccttaggtaagtccatcaatctcatccttgtaaaatttttatgggttcaaaaaagggatgaaagaatatttttgtgagctaaagagagatgacatgggttttaaacaccttgaaagctttagtatgactcttttagccaaacaaggttggcacctcctcgcgactccataatcacttttacatcttttatgaatgctacataaggaagtaaatcctggatacctaattccttcccctcatgtcctttagttaaagaagacataatcttggaattatctggacttcacagctcattgaccaatcatcaaattcctagtgcctgaatatactaaaagcaaatttccatcatgagaaagttaacaacattatggccatctgtactagcttattcagacagcaggacaagcttgtttagtattaaacaaatcatggtttctaatcggtcaaatcagattattatattgctagaaacattcttagaaagacttcttccagagatgaaggggaactagaacctaatgcttactagaaagatttgtggaagctgcctttgccgcccaaactcgcaatttttctctggttttttcttagggaaaagctacctacagccaatttggttcataaca

SEQ ID NO: 45221 - DNA, 868 bp, Manihot esculenta
  Intron number 3 from transcript cassava4.1_013153m (locus cassava4.1_013153m.g) derived from phytozome v7.0 (chr-ID scaffold06548; pos 33390 to 34257 reverse strand)
ggatctgtggtaagtgcattatttgttcaatgagttgcagaatttataattctttctcttttttttagcccttgttatatggtttctgcatacttttgattcagaaggcggataaggaacaaaaggcacataactattagtagttgaagctactcaaaatgatgttatcatcacatattacatttgcaaggcaattatatccataaaagttgtgtatacgtcgaaggagcaatcatcttcagaaactagtgtgatgcatctaagtgacaatgataaattggtctatgttttacttttcatgggtagaaatgctgttagaagccaaagcacaacatatatatttgttgtacttgtagtctagttctttagagggaattttactgttccttgctggcaaatcttcataagcatggctgacatatattgttattctgtgagcatcatcagaatgtggtgcttctgattagttctttttatttaccttgcaagactaggccaaaagcttaaatttaccgggcaaatatgggcaatgataaagatatttaggagcccagcagatacaggaagtactcacgctgccattctatatcacatagaagttaacttcaaatgttatcttctgttgaccataaattattgaatgagaataggaaaaaaaatagagatttgttatgtgatttgattaccttgattaccataagcaggtgggtaattgagatacctcaaatgtcttttttgagttattgctttatggatagatcttaatttctctggtctgcctccttttatctttttattttcgtgtaaaacaaaggattcattttcttctttgtatgtatcttactggctcacaatgcagactgctgcg

SEQ ID NO: 45222 - DNA, 859 bp, Manihot esculenta
  Intron number 2 from transcript cassava4.1_019512m (locus cassava4.1_019512m.g) derived from phytozome v7.0 (chr-ID scaffold00321; pos 75870 to 76728 reverse strand)
ctgctatcacttgtgttgttacagccgtccctactgtatgttttactatttcaaactctttgctttttcatattctgtcaactgggattgactataatactggtgcacatctgtatatgagtggaagaatcttttattgaaaacaagacgcttggatctctctggtaggccgctccttgattccctcgagcatcaacaaccctaacttagaaggagatctaatagcctttcgagagagatttttttttttctctctttctaggtgttagatattttgcatcttataagttgataacaagataaggattccttggttttattgagtccatctctttcttttataactagacttagaattcatttgtttctggaaaaatatttttcacattttttattttattcttccaaaatacagaaaaatgacttaatgtttcattttaccaagaaatattttttctttgactaattttttagtgtgaatatttcctaaaacaaagggagcttttatgaaaatttgcgcaaatgggttgttaggcttaaccagatttaatgtgtaaataaatggatggagaacatatcagtttaattgggaatcctgcttctatcgtcttattgccttgagtgtccctttatcattatctcagcaacttggaaatcccagaagcagtttacaggtcttatatttttgcaatagatagttgtttatatgttgtttttattagggaaaacaaggtatgaacctttggtttcaaagagttgctatattctttctgctccttaaaaatttcagagttgatatattctttctgcttctgtgttctcagttgactgctgttcgtgtgattccttgggcaaaggc

SEQ ID NO: 45223 - DNA, 813 bp, Manihot esculenta
  Intron number 3 from transcript cassava4.1_018876m (locus cassava4.1_018876m.g) derived from phytozome v7.0 (chr-ID scaffold03363; pos 249837 to 250649)
aattgcataagcttcaggttggttcgtgccttagttcttttttatgattatttattgtaattaatcaaagtgcacgtaattattgtgtgcatatggaaaagagtttttaaaataaaaaagaaagaattgaaagtcagattgagctaaaaatgtgaaattctctctgcaagagtgtttgttatggcaagattttgaggtacgtggtggtattctacattgaaactcaagaataactcttttctttgggtatttcttgatgattggaatcatttttcttcattttttcatcattttgattacttccttgtcttgaaaaacaaccatagtctagttctttgattgtaaagcacttttttcaaatactgtatttgtatttgtaaatctgtaaccagagaccaatccagcaataatgactaatgttggaacatatacagtgcgtgatatggctgtgcatctgcttttgcgttgggtaactagttagtgtgtcattattcctactgaattatttgatagttttactaacaatctagaggttgcatcttaacataagaacattaagaattgtataactcaaatgggaaatatgggtctaggaatccctatactttgttttctcaacctaagtgtctagcgggcacagggttttaacagaatggatcaaaaggaaatatgaagcatgctttcatagaaaataaaattatttatcgactcaagggctctttcattcacaaaacacttgcaacaagctgattgtttgtttattgctgtcaacgtaaactatctttgtgtcaccactcgcaggtagaggaagaa

SEQ ID NO: 45224 - DNA, 459 bp, Manihot esculenta
  Intron number 2 from transcript cassava4.1_022969m (locus cassava4.1_022969m.g) derived from phytozome v7.0 (chr-ID scaffold12525; pos 383613 to 384071)
agcacttgaggggcttctataagtagtctttttctcacaggctatgttggttctggcagtaatgatcaccattcaacttttattggattaacgtatagataaatgaatttatctacgaagtgactttaaccaattttgggtaaaatattagaatagctttgactaaaagctatcaagaaagaaaacaaatcaaaatttggactttagaagcctgatcattaagaaggaattgctcatctgagctgagataaaacaattatttagcctcgggacctgattctgcaagattgcaaagaaactcacagaagtaagatctcaattgtgattcttatctttataactttcctgctaatagcaggctcctaggacgtgcaatttgggaactccttaaacacagatactttgttctttgttgtattttgatttcattagttgataattgattttaacagtacttat

SEQ ID NO: 45225 - DNA, 868 bp, Manihot esculenta
  Intron number 1 from transcript cassava4.1_001000m (locus cassava4.1_001000m.g) derived from phytozome v7.0 (chr-ID scaffold10305; pos 356380 to 357247 reverse strand)
tccccacgaatcctagacccgaggattatctcacggttggtgcaataaagttctaaattttaattttcaatttttggtgtcgtttgtattgttactggaaagtggaggcgcaggaaagaagaggaaaatggaggaatctgtgtttcttttggggattagaggtttattgatgcattctgtatttctgttggttactgtaaggccaagtaaatataaagctttcatctttgtaaatgatcttattattgtttttttttaataagaaactttacaggactacaaagaatgaaaattttgcctttgggagctgattaaaaaaatgaattacctatttacttttctttctgttaatgtccaatcacttgcatctgattagaaacgggttcttaaacgctttcaagttcctgattgtgcataagtttgccaaaagttagtctcctcaacatttctgctaaactatctaattgttttgagttactgcaaatgatgatcgctcctatgatcaaattaagctagttcttgtgacattgcagttctatgtataggttataaaacctgtattggctttcttaaatagagaagcttattagttaggcaaatggttgggggtaaaaaggtggttaatgaagtgaacatgttacatgcttacatgggcatagttctgccacattcttctgatgtgtttgaacttgaaacacttgaagacattactgatcagaattttttttcgatattactgtttctagtaccagtagctctaatcataatctgatgaatttgcacttatctggatttgtcctttaactgaattaactttttatggtttttggcaggtgttagcattacccttgccacatagacctctgtt

SEQ ID NO: 45226 - DNA, 1035 bp, Manihot esculenta
  Intron number 2 from transcript cassava4.1_012952m (locus cassava4.1_012952m.g) derived from phytozome v7.0 (chr-ID scaffold02538; pos 444369 to 445403)
cataggtccagttctcttccttcagatcgtgaaaggtcagttttgaagtccttaaatattaaatactccatgattattttttttaattgtttgattacatttaatagtttgtctttgatggttttttcgtttgattggtttatgtttgatgttttataactttgatttggtgacactgtcatcatggcatgagatttcatggattcaattttttgttggcatcttccaatatgctagaaggcttggatgtagtcatcatcatgccttggttttctgcattgccagtgttgatttccattttacatgtgctcattttcttaaaatacattaaattaaaatgttgaaatatgcatgttattagttttccaggtctatccttatgagaaaggaggtttattgatattgggatattggtagaaggtgttgggcgacaggaattgtaggactactctaatatctggtcgatgagatgcatggcaagttgttttgggttttgctttgtctccttagtatcactcagtgtgcaggaggtgtttcccctgtctattcacttcatgattactacaataatgcatcttactgatagaaaggaagaatttgggtgtgaaaaattctctagtttgataaatatttcgttgtaaaaattcaagataagtaagctctacttgtgcttctctcaagatgatgaacttcaaaagaagaatctttttggctcacaagtaatttggagactcaggaactgtcttgtaattctgaattcttttatctgtacttggttgcatgcgtaattttaccttgagtataacagaagctttgatgcctgtcaatggaaaagataatcattactatatctttggcatttgccatagatgcagctccactatccaaaattttaatttacggaaaacaatcaaagtttgttttggtgcggttatgcagattaatttctttgttatagttatcacatatggtttgagtttgactagcataatcatggcagatacttggctgaattattggcagagaagcaaaagc

SEQ ID NO: 45227 - DNA, 662 bp, Manihot esculenta
  Intron number 2 from transcript cassava4.1_005008m (locus cassava4.1_005008m.g) derived from phytozome v7.0 (chr-ID scaffold04305; pos 102607 to 103268)
agctttcaaactatctaagcttcaaagattggtatgtcattctctgttctacaggctttatttttctccaatccttgtaacttatattaattaatttagttgtaactgattgttttaaacttaaaggtggtcattagtaatagttatttgtcactcagaggaagcaacctgcgtctcttttgcatgccagaaaatgaaatttatgtgttgtacttgttcttaaagaacaatttttttactggctgctaattgtgtttaaccccgattttagattcataaatatactgcattaaggataactgaattatccgttgtgcttctaatatctactttcaatgaagccaaaaaaaaaaaagaagctcgatgcatgggaaacatggttgtatggttgattaattgcagtcacatatcgcgacacatttgtttcttcatcaccatggattttttcaagctttaataaagttacaagaaaggatatcatagttaggtcattgttttgtacgattgctaatggttttgagttttttctgaggtaaaaatgctacgattgcatttgttgactagttagtagttgttcattgaaatttagccttcctcatgttatattttgtaggttacataatgacctgtacttctccctgaaaccattgatggcaggttta

SEQ ID NO: 45228 - DNA, 710 bp, Manihot esculenta
  Intron number 2 from transcript cassava4.1_008044m (locus cassava4.1_008044m.g) derived from phytozome v7.0 (chr-ID scaffold02077; pos 74520 to 75229 reverse strand)
gaaggttagattattcctcagctttcatatgttgcttttacttggccttataatttgatctatgctatacaattctgtgattttatttcggaaagtatcttggttactgttttacaaattatgtaagcataattaactattaacagtataacataaataagatgcgtacaccaatttttgaaatttagggttgatgctttttttaagcatcatgattattaaggttttgtttggcattgttgttgaaactaccattgagacaagcactttttaaaatgtattagttatagagtattaaaagataatttgaaattaaatttgataagtttttagtcaaagaatactgaaataaacaaaacaacttttttcaaactgtgtcttttcacagcatgtatatatgtatatatatttctgaaaactggttaccacaatgtcaaacaagcactaagttatagttggaaaaggaaatgattatcaattgaacagttggtatcaacaatagactaggctatgtaaaatcttcccaagttaacttatccacccctatttagtgatgacattgtcccttaaatttccactagtcaagactttgagaagagtcgtcttattgcttatatataatttagctttcacaatttaaaaggtcctttgtaattcattagttgctttaaacttctgcagcatatttgtaattgatttgggatctgcac

SEQ ID NO: 45229 - DNA, 442 bp, Manihot esculenta
  Intron number 1 from transcript cassava4.1_008044m (locus cassava4.1_008044m.g) derived from phytozome v7.0 (chr-ID scaffold02077; pos 75853 to 76294 reverse strand)
attagagaaaatccctctggtaacctcgtttgtcttgaaccaactgttttttcttctgtttgcaatccgattcgtgctattttgctatttttttaatatatttatttttaatttcattgtaataatatttctttctctaactctttcgatgaatcatccttttcgctttaatcttctcttagacttttgctcaagcagaggatagaatcaatcatctttcttggaatggaaaactgggttttacttctttcggattcataacggatgctgcttcttattttttgggttggatttggttttgataaatatgtgtaaaacctggatctttcgattgattagaggaccttttgagttcaatgttactgttttagtatggaaaattttcttatttgctagttgagctaaggttgctcgcttttgtatttgtagttagggtttggat

SEQ ID NO: 45230 - DNA, 580 bp, Manihot esculenta
  Intron number 3 from transcript cassava4.1_007536m (locus cassava4.1_007536m.g) derived from phytozome v7.0 (chr-ID scaffold12114; pos 53888 to 54467)
ttcaatccaaagacaaagatatctcgcttgcaaaggtatctaagtttcctttattttttcctcttgtcgttctcattagagtatgattttacttagttttttgcccacacagtaggacccatgtttttcaattattgttttatttttatttgttatgtggtatctttaattaagccttttgataatgtcattattttagattcaaaatcacaattttaagttgttgcagtatccctccatttcgaatcaataaatttgcaagaattcaattcgttgatttcttttccatcagttctcttgtttggaatgagagaatttaatcccttttaactttgaaaattttcatttaaaaaaaaaaaaatgatttatcttgtataattttacaagaattcatttgaattcttttcttacaaaatggatcatactaaagaagtgtatgttttcactacttaattggtattttctgtcttcctctttcccttaaaaatgtctaactttactattttaatcacatggcgactctcgatttcatatatttgtcgcttgttggcataggccttgctgttcattgcagcagaag

SEQ ID NO: 45231 - DNA, 842 bp, Manihot esculenta
  Intron number 2 from transcript cassava4.1_029817m (locus cassava4.1_029817m.g) derived from phytozome v7.0 (chr-ID scaffold00185; pos 68666 to 69507)
atcaggtataatttcttccagaaaaaggaaaaaaggatcagactttgacatgtttcaggaaaattgaatccattgataatgtgaattaggttctattatgtaaggtattggcaatgagcatttatatgtgcaccatgtctacaaatttttatgctagtttgcatgtcacttggaattataattgactactttaccttgctatgtgagaaatgatgaaaaaacagagtcattattagataagacaaaaatcagagcagatgatactttaggaactctcaagtctcaacaactatgcaatgttaaatactattttcattcacatgacagttgaaatgtatcttgtatttcttctgtggtcacaatcaccaccagataacacgtgcaaacagaatgttgccagtgtgggaagaacctgtaatggcatagcgttagttggcagctaggatgggttgattgattgttttgaggtagtgttcagtcttcttttggcaggtgggtcggttaggaatatgcattctaacattgcccttctactctgtcgtgttttcttcaatattactattttggaagtttttgaacttcaaagaatgttgtgctttgaatgaggtcattatgctaatgaaataaaaatgcaactaaacaaatccgatatctccctattttccaaatccaaaaatgaacagttcaaagtttggaaagttgatatgctgaaagattaagtggatgattttttatccagtgataaacattatttaatcaatttggataaagatattctaaataagattgtcggctattgattgctagattggcgtgattaaagcagtcaagaacgccttagc

SEQ ID NO: 45232 - DNA, 722 bp, Manihot esculenta
  Intron number 1 from transcript cassava4.1_030798m (locus cassava4.1_030798m.g) derived from phytozome v7.0 (chr-ID scaffold05607; pos 12802 to 13523 reverse strand)
tttgccctattggatccgtatcacctcctgacaaggttcttcattctttcttcagccttttcttttcatctttctgatcctgtgtatatttggttcaagagattcaacaattgccaacgtttagtagtctctattcatcagtggatggaaaattatgtcagtgaaaagttcatttgtaaatagttgcatcagtaatacgaattgcccaattttgattttactacattaacgaaataaacatccaagtggatgaatcccaagggttagcctagttgataagtggttttccttctccttaattgaccaagggcaaaggttaaaattcaagtgcaagttacaagaggctatttgttttccttgagataagggtctacctttgaatcttcgattgaatggggaaatgtacttatgttgcaatagaaaaggaaataacacattcaagtgaacatgcaattcctttctgcctatatcacttttcgtatggtatgattcatttagatttcaattttttccaaaatgaaaattttctaaattaaaaagaattgaattttttcattccaaacaagaaaattgatacaaaagaaattaaagaatccttgattccaaatagagggaatgtatatggaagtttcttttggattttttagctgaagatatgtaatcttactttgatattttacaatgcagcaacaagccaacaagtattattttgttgttgcaaa

SEQ ID NO: 45233 - DNA, 761 bp, Manihot esculenta
  Intron number 1 from transcript cassava4.1_017455m (locus cassava4.1_017455m.g) derived from phytozome v7.0 (chr-ID scaffold05875; pos 859321 to 860081)
attaaattcccagtttcaaaggttagtttttgacgtctaattctctcggacttgtccgtacactcgtatttcgtttctgtttggttgcggacggtaattttggggaaagatcatgtttacagatatttgaatccttttctttagttgtttgaatttttcccagaggcaagttaatttttgagttcagtagttgaattttgtgtttcatcgggatgttttatgattatgaatacttgatactaaatagttagggtttacaaattctacttttataaaatcccaatgtacattgacgaatttaaaatgctttgtatgaattgtttgtgcttacattcattgaattgaaggcatccttgaacggagaatctgtgacattgtgatctccataattgggtgaagttctagtaaattccttcagaatttataataagcactatagatagccctcaatcttcaagaatgtaaaagaatagcagcagcataaaaatctccgcttattgtgtaggaaccatcaatcggaagagtttcaaggatattatacgtctatgtaaatgcagaatggtttgcccatgctatagattcttgttttctgttttagtttctttcaactagccaatctgattaacctattttcttgaatcctcaatcactccattgttacagtttgtgaatgtgctgtgctgctagaaaataaattttggttgcacatttgagatgtctaatgttggatcttgatgtggactgttgatcctgtttaaaga

SEQ ID NO: 45234 - DNA, 930 bp, Manihot esculenta
  Intron number 1 from transcript cassava4.1_029475m (locus cassava4.1_029475m.g) derived from phytozome v7.0 (chr-ID scaffold06107; pos 225966 to 226895)
ggtatgggtgggagctctttgattcaacttatagcaacttgggccccaaaaaaacgaaaaaacagtaatggcaacttgtgctgcggttttctgctggtaatggttatgggtgggatggttttatcctggaagtcttaccataaaaacaaatgatgtattgataacaaattttgataatataaataaaagatttaaaaaaaattagtatttcaattttaaaaaataatactcttttcttcttataatttttatttattattattattattttaaatttattatttactttttaaatattatatgatatataaattgattattataatttagtaatctaaataaaattaaaaaaacggaaggagaaaaaaaaacataaatagaccaataaaaaatctcctttactaacagtagtaataatcttttatcaaaaaaaaaaaaaaacaagaaagaaaaaaacagtagtaatcatccagattccaccattctgatttatccaaacatttcccaaaatctctggcaaaaagaaaaaaatcccaaaatccaaaacgcagcgttgcagttggcttctcaaaaagcttcgtcttctctcttgcagctgttgtagagtaggcaaaattgcaaagtgcattatttcctgaaaattccagctcagagagaaagtcctttccttatttcacgtatatctcgtctccattgcctattttttttctcttttctataatgaactgatatcattttattgaactaaaaagctcagaaggccaatctctttagatccaacccagctgcgatgctctgattcttgagcaacaacaagcaaaacccaatcctttttactcttaaaggaacggaaacactagagtttttaagagaatgggcgttttgagtgagtcgtggtgcttttgcaaaggagttggcaagacggagaga

SEQ ID NO: 45235 - DNA, 891 bp, Manihot esculenta
  Intron number 1 from transcript cassava4.1_010221m (locus cassava4.1_010221m.g) derived from phytozome v7.0 (chr-ID scaffold08359; pos 222946 to 223836)
ctaccttcgacctcgaagtgaaacctgaagacaccgtatgcttctttcattagttttttccgtaatctgtttgcactactgtataattcttgttcattagggtttcacactttcttaattgcttttccttgatcaatttttgcaattcaattgggaaggattggatgaattaagtgaattattgggatcgaaatgagattcgttagtgtttgctataactaccattaccacgtgtttgagttcgtagggttttaattagttagtttagttggctgcttagtaaattggtttatatctggacctttagggaaatcaggccggattagggttttggagtgtttttggttttgccagtttgtgctcgtgtagttgaaatttgaatggaaaatacgatgtatcatctgttccctgctctttttaattctttcggagtaaaataattactcggttagttttaaatttcctgccaataaaaacgtggaaagtccaattttatgttacttgggggattatgtcatgttgggggcaaataatgtgctgttgtagtgctgtaacacatgttgatttatagtcctgtgtattatctgcacctcagttgttgcaatatatacattcgttgaattatggtgttcatgcgtcatgatactaaatacttctttctatcggcacaaattgtttagtgtgcaattattcttttgagtacagattagtaaagtattaaggtgcaacagtttagaggttgtttcgattatatagttggtataatatttcatatttcttccctatgttgtatatcatcgtgaatgtgttattttcctcctttttccttgtgttttattctttaatttagtttcttacaagaattgacgtatatttttgcacagattgctg

SEQ ID NO: 45236 - DNA, 793 bp, Manihot esculenta
  Intron number 2 from transcript cassava4.1_023121m (locus cassava4.1_023121m.g) derived from phytozome v7.0 (chr-ID scaffold08359; pos 1088331 to 1089123 reverse strand)
ttaaggtaatttgtgcttaaacatcagtagttatcgttttgatctggtaaatcgtagatatatcattgctggactcataagttgaatttgctttttacgagcattttactattattagactgacacaagctgcaattgggttttgactgagctatttgttgaagccgcataatgctggctctcctctgaactcaattcgttgatgtttctgtctaattgctatatgtttttactaaccatgtgtgcttggtagcacttttggatttattaatgtgaaaaatgccaaaaaaaaagagttttgtttgagtttctattctgacatggcttaaaggttgatgcggcaggaagagagaaagacattcactctaaagaaaaaggattattaagggccatactggaaaaatgatacgtataaattcttgtagcttatgaattgcggttcatggatatcttagtattactgtctggatgtctgggtatcactctgttctcttatttaactctgggctatattatgttattatattgtttgctgctttatttattcatttttactttggtttctctttagcatgagtccatttgcttgatggaaaaaatgttagtatttgcttatatttatttttttacatcagaattgtagctcaaataaggagtctatgacttgcacttgcatcacaaagttttgttttttcattccatgtttttggattatactctctaaatggaggtaacatatatatattattttttttttatgatcatatgatgcagcaaatctcaaagctaaggt

SEQ ID NO: 45237 - DNA, 525 bp, Manihot esculenta
  Intron number 2 from transcript cassava4.1_027220m (locus cassava4.1_027220m.g) derived from phytozome v7.0 (chr-ID scaffold08359; pos 1853212 to 1853736 reverse strand)
cttctctaggcaacaggtaaaaaagtaacatgccatcaagcttaggatcacttgaacataattcaatttctgggtagaattttaattttcaatttgaaccacgatatagttttctttgttaaaattctctgtaatttcattttataggaaaaaaaaaaaagaaattgtaattacatatacaagttggcaagtgagtttattctccatttttattgattatgattgaaattctgatatgggaattcttagattaaaaaaataattaagtgcatgaaaattgacgcatgatattattaatatgaataaataaataaatgcaagattcatgaaagaggatggatgatcatgtataatggtgagagcttacgtctatcttgggaaaaaagacacagcctcttctgcataacattggtacttgaaataagtggagaaagattgctgtgacgacttaagtaatttgattttttttaaaaaaaatgtttttgtctaggtggtctgcaattgcgaggcacttgccgaagagaa

SEQ ID NO: 45238 - DNA, 223 bp, Manihot esculenta
  Intron number 1 from transcript cassava4.1_027220m (locus cassava4.1_027220m.g) derived from phytozome v7.0 (chr-ID scaffold08359; pos 1853841 to 1854063 reverse strand)
cgtaggagggtggcggaccttgcctcagaaagcaggttagattaattctttactcatcattaattgttattcttcatttcaaaatcaaaaactgttttctgggaaatgtaatgtgatctgcggacacacaaatcttcaggatgtgaatgtgagatctcaacagtgagagctttctgatttcttgagttggtttcttggtgatattaatgacaggtctccagag

SEQ ID NO: 45239 - DNA, 921 bp, Manihot esculenta
  Intron number 2 from transcript cassava4.1_016408m (locus cassava4.1_016408m.g) derived from phytozome v7.0 (chr-ID scaffold06278; pos 32029 to 32949)
ccagaggtatgtttattcattgttggttttgagaatgaacattgaacaattctatgcgtatgctactggagcaccaaaatagataatacttgcctggtatgttgatcagttaacatgaatcctggactattctggcactgtttaattattgtaggccaattcttctacttgtgcatatgataaaatctctttagatgctcctctttctgctacttatttgttcattttactcgcaaaataatgtgcaagaagctttccaaggctttcaatttttttgccaactactggtaaatgttactcaaattgtgttgtctaacctgctttacctagggattttcaaatatttttgatgtttttctttgttgatactcaaatcgagagggttatccaaaattcttaaagatgctaatcttcaactggaaaaagaaactgaactttgcttactgagtggttgaatattttatacactttcaactcaactagtgaatattctcattcaaacaggatgaggattatacattacttgtgtcagttcaaaaagaattaaaagtaaaaaaaaactttgagtgtgaaaatacatgatcttattagattttaaataactaacactgaccatttttgttctcggtgcaaaaacatataatggtaggaaattaatcatcagggagggccttagcctgcaatatttggctatttgcagtttggggaggtggcagagtttgctatattcgtggtgccccaaaattagagctcgattatgtttattttaaaacattattacactatgacctttggccactcattgggcaattaaattatatggatttgttacttccactactcatgcatattgattattaattcttatatctgttttctcattggcatttcctttcttctccaattgacagggtcatcagt

SEQ ID NO: 45240 - DNA, 815 bp, Manihot esculenta
  Intron number 1 from transcript cassava4.1_008444m (locus cassava4.1_008444m.g) derived from phytozome v7.0 (chr-ID scaffold05656; pos 238142 to 238956 reverse strand)
ctgcctccctctctctcactcgctggctggctggggtaagtttccgtttctttttgtttcttgcattttctctcattttcatgtttgatccggtttgaggttttgatgttgctcttggatgctgaaaaaagtggtgtaatgaggcatcgaaatggatttgttttggttgggttggccggagagatctaagatttgaaaatttcaaatttcacttcttcatcgtgcattttctcagctaccgactactgcatgacagttccgccttatttattttagttttcttgatgttttagagtctttttcttttttacacatttgtgttttattgtcagatccgctctgtttttcttttttcatgggtctggttgatattgtaatcctttaactgtcaatgtgcataaacccgtatttcttttgcttaatggaatctggtaaacttataactgttctgcttttccttctttgattggagactgaacggtgtttttgttgtattttaagctagattgaaattgccccgttttttgtctgatgggaaggtgattttttccagatatatatgaaaaagaaatggctaaatgtcttgcataccttttctatctgtagcttcaattgattattcttttgcatatttgtatagttcatgaaatcaaaattctgactgcagctatcgaataaacttttagcagaatctgtaatatcgaatctagctgttatcatttgatttttatcgttcattcaataatgggattttctgatttgatatcatttgtgatgcagaaacatatttctgaagattgcggaacagacgataa

SEQ ID NO: 45241 - DNA, 586 bp, Manihot esculenta
  Intron number 1 from transcript cassava4.1_007703m (locus cassava4.1_007703m.g) derived from phytozome v7.0 (chr-ID scaffold05859; pos 68494 to 69079 reverse strand)
aggtttgtttcttttgtgttctttttatctggttgctttcaggcacatttcactttttggcgtggttttctttttcttttttttctctgtctaattatttctaacgggtgcgagttttgatgcttacaaattcgcttgacatggtagtagcataagttctaatcaaccgaggaacaaattattgtttcaaatatatggattctgatctttgattctgttgtagaaattcttctacctattagaactgcatgattgggatggaaaatgtgacgatagaaagctgtaggaaaacataacagagttatctttgtatgcattagtgaagagtctagtgaaatgggtttgttatttggttctagatatgtaagattaatgctgagaaataacatcaagggcagtctagaaggtttgaatacatttgcagacatctttagaataaaattacgaggacagtttggtcgaacttgtcattgtttatctattattcttaaaattttgcagctgcatgttgaaagtcttgtgcttttctgctgtaattgctcaacaatgcttttctcccgtcgacaggttgtagaagtgaagtcaa

SEQ ID NO: 45242 - DNA, 646 bp, Manihot esculenta
  Intron number 2 from transcript cassava4.1_011211m (locus cassava4.1_011211m.g) derived from phytozome v7.0 (chr-ID scaffold01666; pos 150029 to 150674 reverse strand)
gattacacggtgacgttttgcccctcttccccaaggtaaaaatgctctcttcaatatttatcagcattttaactagattttgagtgtgtggttaatactccttgctattcttgagtatagaattttgggtagttgtctaaagataaagctaatctccatcttttgttttctttgctttgaagctttgctttttatgttgtcaagtgttgtctcagcactaatttctaagaaaaaataaatgtgttagtttttattttcatcttgtggagagaaattgcaacttgagactgagacaccatgaactggtgagagatttaaagtttagttcatttttactgggttggcccaagatttttatttatgaaggattttcttttatgttttgtattctaagcataaattgggaaaataaatcttggtgtggagccagatggtggcaaactgacaatgccaaagattcccttttgtatgattagtttaatttttctttctgtttgttaaatacttaatcatgttataagggaattacattggtgggttactgccaattttggcatttatgatgataaataaatattcttggtgagggaattgattgttttcacatgtgggatgcagccaaaaatcttcaagctattcaacacca

SEQ ID NO: 45243 - DNA, 456 bp, Manihot esculenta
  Intron number 1 from transcript cassava4.1_001532m (locus cassava4.1_001532m.g) derived from phytozome v7.0 (chr-ID scaffold08393; pos 59343 to 59798)
tgttcaccagccatcacctttgatcccaactctctgtaactctctctctctctctctgtgcttcattgaactcctaatttttcttctctttttgtgtagtatttgcatctggatatgatggtttagtttccaacttgtggaatttagcccgttttctcttgaatttatgatatttttgggtttctttttttaactccatttggtttcttttctaaacttatgtgtataaacctccccatgaaaataatcatagtaataacaataataataataataaaaagaaaacttccaagtttctgtatatctttcttcaaggtttaacgatgcctttgttcttaagtttaacttccttgagcatcaaaattgcactacttcatttttccttttttttttttccaagtgatgtgaattctcaaatatttactgcagtgggaaaactaccagcaagtcaagcca

SEQ ID NO: 45244 - DNA, 900 bp, Manihot esculenta
  Intron number 2 from transcript cassava4.1_001532m (locus cassava4.1_001532m.g) derived from phytozome v7.0 (chr-ID scaffold08393; pos 59856 to 60755)
tagaaatttacttggccatttgccatagagctaaggtgtcctttatctcccaaatgtcttttttgcttatgtggtttatgtttttagatacatgctgtttaatattggcgaacatttatttgtcttagttggcatgttttataggcttttttaatgcacacctgcttatgcgatatcagaaatcaaaatcatatcatattgcaaataattttatatgattggcatgtgacaatggcacattattcggattaaatggtagcattgagaattgcagctttgtccaagctttcaagattaatcatttacttggcttgtgctggatttggcaaactctgtctctaatatggataaggcggagaggttttaataggtagatatccgttgtattaattacatctttccatgagcaagggggaggttttggtaggttgttattctttgtgtcagttgcatcactttcatgagcagatcctaatgatattacatttggagtgttaattctggtcctgaacagaattaagagaaaacaaaaaaatccatgtagttgagcttgactaatttgaggctgagcttggttgggttagttccaaagggagttgaatcatgattatgattttaatttatttctatgaaccttttccatctggttttaggctttaaagttgaatgattcttcttcgtactagtggtctgaaagaattacatgatgtgatattagaagtaatacagcttttggtctttttggagattgtcatttgtttcccatatttggccttattatcattgcacattttcttttttcccagccatttgtgttcttattggagtcatcttaaagatctcatggattatgcttaacttgcaggttgaagctagtatcatcacaactgattgtgacta

SEQ ID NO: 45245 - DNA, 983 bp, Manihot esculenta
  Intron number 3 from transcript cassava4.1_015397m (locus cassava4.1_015397m.g) derived from phytozome v7.0 (chr-ID scaffold04305; pos 78408 to 79390)
tgagctcttctgtatcagatttgcgtctgttgagagtatgtgtttatcagatcagttctttatctcccgctgcttctaatttctaaatgttggtatcaatatctgctttcattttgtttttgaatgtattcaatcttcttgttctttttccttgtgcttatgatgtttgccaagagaactcttgggttttgtattatttgggtaggaaactttttattcgcctcgtttgccgagattactggaaatgattttgtatgtttggcaccaattggaaacagcacatttagctgttcgctaatgaaagtatcataacaaaattcggatctattacataggattagcgcacgcatgtttttcttgtcaagtatctacttagatgattaagtggttgtgttgatcctgtctatgtgcatacgtgtatgaaaaattagttttggttgaaagggaaggaaatttgttgctgcacattttgttgtttttcatcaaatttagtttcctgttagattggtttcagtgttattactattggcactatatacatacaaaatatattgttgcatgtgatggactatatctggtcttcgttttgcttgtattctagtttaatctattagatgccatatgtccgtctattgtgatatggaattaaatgagtcatgaaggattttatcattgtgaaactactgacaataacatgctagtaggaaaatcgttggctgctggctcatttgtggatgtaaaattccaaatgatagtagtctggaaggttgttatttgtggtagctgtttcaattttatgaatagttttccttaatttgtgtttgataatttctggtgtaactgtaatgagtgtttattaggtgtgtgtctaaatgagaaggttattcatctttctctctctctctcatagtgcaattggatttttgagtctctatttgtagtatgatgactgatttcatatcctattagattgcaaaaccttc

SEQ ID NO: 45246 - DNA, 1011 bp, Manihot esculenta
  Intron number 1 from transcript cassava4.1_028764m (locus cassava4.1_028764m.g) derived from phytozome v7.0 (chr-ID scaffold02431; pos 207152 to 208162)
gttgtgtgtccaccatacttgctctgcaacaacaggttcattaacttgatctcatatgcttgatattttgattttcttggagacacaattatgttgttgaagctagagggagatacaacttcttcatttttttttctttgttgatcttctttattctaactttctaaaagattaggcaacagaatgggcttggatcttatagagacttacgtcggcgagcttgattttaagcgaatgggacattttgtggtcgatgaccacgtgatttttgatgttctatttcaacctctctgctttttggagtagagaaacaaatttaactaagttatagaacgttaaagatatataaataatttttttttttaacaaaaatcttttattacttactctcatttgtatacatcattccatttgattaggaagagactttaaagtcattttctaataaaaaaaatttattatttagttattaattagtccatacatctctaaaattttaaaaaatttattaattaacctttattaattttataaatattaaaaaattttattaattttataaaaataactactaattaaattctcacaaaaatatttcaaatttatatcaacattgaacagctacacataacaaaactattaaatattagatttttaaaatttcaaaagtattttaatatttcaaaaccaataaattaactaataaatttttctacattatacaaactattaatgattttgactttctaatggaagttctgatacattttcaaacaaaaattaaaattcaattattgataaaaaaaaaaaaaccaataaatctgaataatttaattttatgtgaactgtaaatcggatataaagaaatacctttataaattccaagaaaaaaaaatattcacttagaaatcaatatagagagagaaaattacacatagctcttcttccattgttatactaattagaacagttgcataattgcaggttgcatctttgcaagcagagcttgca

SEQ ID NO: 45247 - DNA, 817 bp, Manihot esculenta
  Intron number 1 from transcript cassava4.1_010725m (locus cassava4.1_010725m.g) derived from phytozome v7.0 (chr-ID scaffold06980; pos 86282 to 87098 reverse strand)
cgctagcatttccagaaaacccatttcatcttcttgtaagttttctgtcactcttctttacttgattcgtttggaaactgaatctgtggtgagggctatgcttaggctgacctttaattcaattagcgacaaagcatgaagcaatcaccctaagtttctgaattggaactttttaggttctttgttcaactgaaactagatgaatacgcgggggaattgagctacctgggttcagaaacttcgtgcctggaaaaattcgctggttttttagtttgaggaaatttcaccgtttaggatagaggatgtgagttacttcatagactggtggtttttagaagtgaaatgttgttataattgaatcttttgtattttctagaattaaaggagtaatgaagctaaagggaatggaatagcatatagatagtataacatctgatgatgtttgtaactttaaccgaagacaagaacccagatgttctggggggtattttctgttgtagtatcaaagtagttatacagcaaaagcaatgatcatgagtatgattagtgtcatttgaatctgagtttggcattaggttttgttcgattttattagagtggtcatccattcaggtgttaaagccattcctcaaaaaatgaaaaaaaacgtattcatgctttgcaattcttggaatcaccatttgtatgttaatctaattttattttttatttgcattggatgcctttttccggttatagctacaataggtaagcaggtaacatgtattctattatatttgtagtaagatacagagggatctcgaggttgaattctgct

SEQ ID NO: 45248 - DNA, 987 bp, Manihot esculenta
  Intron number 1 from transcript cassava4.1_007187m (locus cassava4.1_007187m.g) derived from phytozome v7.0 (chr-ID scaffold03942; pos 482417 to 483403)
agtgtacctcatattttttggtttaacctttctattggttttgatttgtgtggttatttcttacgtcattttcatattctgaatgtgtttatttcaatcattaaacaatttgtattggttggctctgcaattttggtatgcaacattgttgctcaggtgtagcgtgtacttgtattataatgagtgatatttatatgggctttattgtgcttgtagttttcaaaaaatgatgcaatatctctctttgattgttagtttacttgatgtggaaaactatagattagtggttgcgttttctgaagagtattgttgttgcagttgttgacaggtcaattcacaattattggctctttcctgagaatggttaaatgtatctttattatctttctttcattattaaaaaaaataaagctgaaggtatgagttgtgagatagagtgatgctatctacagaatggagaaaagtgttacataactcattcatgtaaggtgctgtgtcattttgtgatgttgactgtgatgaggatatttaagtgtgaatagggaaatacttttaatcttataaatcagccatgcccatgttttctaagtgccaaaataggatcatatttaattttataaatcatccatggctcttaaaagcttactgaaggaagcatagtgcaactctagttacatacttgtcatgatgggtttctggaatcagcgcataggccagcttttactccatcattattggtctttcactgagggaagattcaaagtaataatttcatatgcatgtttaaataatcaaactgacatgcctgatcctatagacgcagtaaatgggccagatgtttgtgtttatttatgtagtgtttttggatatctttctgattattatgactccattttgtacttagattttaacatggtgaaagaacatcagatggactgcacagtgaaaaatgaatttttttcccttttcttctcctttagggtggac

SEQ ID NO: 45249 - DNA, 1004 bp, Manihot esculenta
  Intron number 3 from transcript cassava4.1_028694m (locus cassava4.1_028694m.g) derived from phytozome v7.0 (chr-ID scaffold02855; pos 116264 to 117267)
ataaaagcagctactgtgagcagacgtttacaactttaaacttcagtgaagcatgggaattctttctataagatattgaccaatgactagagacatgtaatttaaggaatatatatatttgcactggaaaatgggaactgcatcactacctctgtctctccctgtacttttctttattgcgataaattgtataggtgcatattatcttctttgaactgattagagaaataaccatattgaaaagtcatctgcatcattaaagagctcttggaatgatgcatattttgttttttagcccttgaattgaatgagttattgtattagttcttcctagtcaactccttgatttggtgtaattgactatgaatttaactccaaaaaaatgaaatattggataaatgggcaatgaaagtccaagtcagcaaggaaatgtataaaaagaattcacaggtgtattgtattattcgttgaggaaaaaaagaagtacaacttgaggaagaaacgttaattatcacattatttacattttcttattaaatccaagttatcatgaagtgagtgaccactcgcatcttgcagcactcagtgagcgtgtttaaggttgcctcactaggatacatttggttctagagattaatagcaacaatagacataatttaggggctttgaaggttttttcccctcttcaattctgaaattaagaaaacctttatgtgaaggaaggtgtgtttcttgtgcatgttgcttctgtatttgttaaagcttgaccttgtatcatagctagaaagaagactggattttaaaaaaacttatggttagcatgcaaataattttgtatgatgcctgtggttctcagcttacttttgttaattacaaaacatttctatacttgaatcagatcactagttaacttttagcattattattattattattacttattttgtctccagctccatatatctgcaggaataccttgttattgcgaaaaaccacggtcttca

SEQ ID NO: 45250 - DNA, 409 bp, Manihot esculenta
  Intron number 1 from transcript cassava4.1_012804m (locus cassava4.1_012804m.g) derived from phytozome v7.0 (chr-ID scaffold09880; pos 729927 to 730335)
aattcaccatctggtaaaggtatataaatctctccctttgcatcttctttctttaatactatattccacacaatatatgattttatttatttattcatttatttttttgaagaggggatgaatgggacaggagattattcttctttgtaaaaattactaattgatgcctataatatatcaaaattcattatttactcatttaattttaaaaaattatattaaaataagtctactgattatcaataaactaaaagtcattgatattttaaagaaaatgggaagctaatatttgttaaagaacaaggtagggaggtggggattttatgtgatgattagatcaaagttgtaatgatgttgctggatgtggattgcagaggtagtggggacaaagcagcacacagcaagaaca

SEQ ID NO: 45251 - DNA, 771 bp, Manihot esculenta
  Intron number 1 from transcript cassava4.1_014009m (locus cassava4.1_014009m.g) derived from phytozome v7.0 (chr-ID scaffold05779; pos 515 to 1285)
cttctcccatttctctctgaattcctcttggtcaggtcagtgtacttcaacttttgctctcatttttttcttgtggggatgctttttgatgctaatgggtgttccccatttctatttactggttaagatatttggttgtcatgttgtttcacaagagctgttgcttttggatgagctggtctagatctgctttcttgctttgttttgatacaatccattttgtgtggctgtggttttttattatttttattttattattgtttttgggggcaataataaagttgttttgtcttgcctctagtgaggaaaaagagaggtttgcaatgacattgaaatgagattttgatctctgtttagattcatggccttcatattgaactgtaatcttccattgcgacattgctcttagatcctctttcaagctttctatattaaacaaatttagaattatatgagccttgcaaaacaaaaaagaaagcattctttattttttgaccccatttttgctggtgatagcttatcaagttctggtttttgcttaatagttagggtcattgtgttctggatttccatggtacttgtacagattagaaaatgctatctttgtttgcaaaatgaaaaatttctgctcaaattagggatttttattttcctccattaatgggttttgcctctattagctttgttgataacctgagatatatatataatcactaatggcatttgagtcttgcaggaatttggagagtgttctacaaatcattacataaa

SEQ ID NO: 45252 - DNA, 646 bp, Manihot esculenta
  Intron number 2 from transcript cassava4.1_012165m (locus cassava4.1_012165m.g) derived from phytozome v7.0 (chr-ID scaffold02295; pos 104037 to 104682)
cgtttgggttgtttatttcgtaatcgttcgacaaggtggactttattctcatggctagtagaattttcttgtttaattcgaattgggttgctgtctaaattaagaaactgtggatcgctcttttgagctggtacttacaatattttcaagatgggtttctgaaaatatttcaagtccaatatttctgttatcgatgctatgcatattttagactgttcatcatcaaaattgaaagaagtagcattgtcccggtagaataattttggtcagtgacataaattatgacatgatagatttagttgatttgaatgatgatttgtttttggccaagtgactttgtgatctgcactaactgctaggatgtgattaaaaagaaaaagaagagttaagggattgcttattactgacaaattccaaggtatgaccacagaccagtgacaaatagtggttgttgttcattggaaggctgtggcagcttatgctccaaaagctatatgcttgcaccttgctatggttgggtgcatgctattatcattcatcacttaataagaatatgtatgtgaagaactattaaaaatggaagctgttttattgcctgagaatgaccttcaatttccctgttctgcagccattccatatttcattg

SEQ ID NO: 45253 - DNA, 1037 bp, Manihot esculenta
  Intron number 2 from transcript cassava4.1_000095m (locus cassava4.1_000095m.g) derived from phytozome v7.0 (chr-ID scaffold08686; pos 651329 to 652365 reverse strand)
aagcatcacccgtctcaaagtgaaggcctcttcaggttagatataattagttgttaacgagttatagtataaatattgaagttaatgctttgattgatcagttattttgtaattctattgatgactattattttagttacctaatatttttgtgattgtggcatttcttttgctgttgttgctgtttttgctttcttcttgatatgtgttctcaagccagtccacagttaaacccatggcatatgttggtatttttgtgtttttctcatggtagtaattgacacatggcacctatttgggtgtacttctatgataggagtttgaggtccattgcgctttttgctataaagtagttactaccttcactggtcccatcacccgtcttaatgggattcaaacctcatatctcctagtcagaactaagtagtcttacattctagggcgtttcctttcggatgcacatgcatttacttcatttatggtggagttctcatccacttttatgatggaatattgttaggtgatcaaaggtgaattgacaaagaagaagcgagcttgtgattttgtcttagtttaaggttaacctgagtaaactaaagagggaattctttgttgtgtttgcatttctggtgacccttgtttgacatgctaagtttctaaaaggcacctaacttttgcatcatgtaataattgaggatttattatacttaaattttgttgctaacctctgattttttcaatggtggttattgttttctattgttcttttattcttttccatttgtttttccagtgagatcaatgtttcaacgacagatatttttcattgcttataatctctttctctctctctttctctctctccatacatattctgtgtatctatctaattttattgcttaactagttatgcttatcaatgattatagttttgttatttgagttttttggtatcatattgggtgttttggtttagcatattttcctttggtattcatgcaggagacaacctacagttgagttcatctttgctgcta

SEQ ID NO: 45254 - DNA, 410 bp, Manihot esculenta
  Intron number 1 from transcript cassava4.1_001850m (locus cassava4.1_001850m.g) derived from phytozome v7.0 (chr-ID scaffold08301; pos 214162 to 214571 reverse strand)
gatatattatatagaaggcaggaaattcttgataggtaattctctttgaatgttgaatcatcatcttataatagtagaaaaataatacttataaagtttaaatgtcgttattaccaattactgtagaaaaacaaaaattttaatactccaaactaattaaaataataaagctaaaactataatattaagaaacaaagctcaagattattcttacactgaaacaaagcttgagaccaccaatttgaatatcatagtcacacatcacactctatttcttgggtcctccacgagtttgatacaagtcaggtatctcaaaaagaaaaaaaatgaggatgatgagagatttgaagacagtatttaatttccttttaacagggagaagctggttgacaagtgctcttaccctccat

SEQ ID NO: 45255 - DNA, 768 bp, Manihot esculenta
  Intron number 1 from transcript cassava4.1_026526m (locus cassava4.1_026526m.g) derived from phytozome v7.0 (chr-ID scaffold09195; pos 8683 to 9450)
cgcattttagtccaaacaatattgttatgtaagttttgcagaattcatttcaaattccataaaaatttgataggatttggttttaattataactagttccatggaattgaattcctagaattaaattctaatttctattcaaactaaacacaaaaaacatggaagtcaattgaattctacaaaattgtaagaactgaaattgaaccaaatataatgacaacacctattaaattatgtagcctgtgggaaatggatcttatcctcttaatcccatttctgtgatcttacttcttttggacatgttctttctaaatgctacaagttgttctttccagcagcttttactactgctcaggtgttcatttcagttactatgtgcaagcactggagcatgatatgtatattttagaatctaagggtgcatggttctctttttcaagtcttaatttcttgtgcttaaagtggaggctctacactgttcttgttctcataccatataccaatatgtcacatgattcttcaggaaattttactggattaaccgaatgtatgaggacatttctcttaacattttatttttgccatgtgatattggtaaaatgatgctgaaaacttgatgcattattctacctttgagattgaccctatcttatttatagaacttgaaagaatgccttcatgctactttaccatttttttctgtatataatggttctttccacctccttttcttttattttcaggttggagtacgagcaaaagcgagac

SEQ ID NO: 45256 - DNA, 475 bp, Manihot esculenta
  Intron number 1 from transcript cassava4.1_031282m (locus cassava4.1_031282m.g) derived from phytozome v7.0 (chr-ID scaffold07600; pos 1822 to 2296)
actgtttgggaggtaaattcccttcatttcccttttatttctaaatatatttctatgttttcacatgtgtttttatgtttttcagttttcttttctcggacgttaacattaattgttgatatgcttgcaattggtttctgggttttcaaggaaaattggatttgtgtttattttttatttgtttgaataggtgatcatctcaatcgttgctaatttttatctaattaaaggaaaatcccttactttgaatcttgctaatatatatttaaattcgcaattgctaaattacaagaggtttaaattgaaaaagatgcaaacttaaaatgcagtacacttgattttagttttttcctttctccaagcatggttagttttgattatgataattaatcagataataacatattaacagtctaattaatgcattaaactaaaaacttgaagttttatgcaggaatttattggtaataaagat

SEQ ID NO: 45257 - DNA, 689 bp, Manihot esculenta
  Intron number 2 from transcript cassava4.1_004904m (locus cassava4.1_004904m.g) derived from phytozome v7.0 (chr-ID scaffold06653; pos 36633 to 37321)
tccagaattttactggtgcgtgacatatttataggaggctcaacatcggatggggaggcctgataccatgtgataccatgttaaatttggatcagacctaactcaccccaaaagctagctaaggaggaggagtgcttatggcccatataagaggcacgttacccctttccacaattgatgtgggattcaacaagagttatcatacttcattgcaagcaatagttgattactggattttcaagctctgaaatcaagccaaaaccccactggctgcaagatgtcctgcaatgtgaggcgagttaaagttatgaaggcttgatatactgaaaccaaattcaaatgctgtcctggagagtccagtctagatttgttctacattatgaagtgtgttaatattatgcaggcttgatgtttgttcccacaatttcttgtacctgatacttttgggattaatgccaaccttacaacgcttttgagttgagtgaagtgtgaggtcttagagtattggttcatacttcataatttcatccacatggtggatgctaatgtttaacttcttattgataattgttcatgttgtcttttcttttcttctcagttgcatcctaggctgttaaactagactgcattttaggtggttaagtcaagaaatgtacatgtagcttatttgtgtttcccttcagctttgc

SEQ ID NO: 45258 - DNA, 312 bp, Manihot esculenta
  Intron number 2 from transcript cassava4.1_032008m (locus cassava4.1_032008m.g) derived from phytozome v7.0 (chr-ID scaffold03581; pos 1422857 to 1423168 reverse strand)
tggagtattaccttctcctgtgtcaccaagttgaagtataattcatcttccattacttgctcataaattattatcatgatgattattaatttttgtaatagttgaatactgacctctttcagatcattgtgctagttttgaatctttaatttatgttctctctctgtgctaatatggatggagttgatccatctcattcagaaaattttccccaaaagcaatcttttcaagatcagtttgatgttacataccttaaaaactgaagtatttaaacgttcttggattgattttgaaggtccaagcagaaaagct

SEQ ID NO: 45259 - DNA, 336 bp, Manihot esculenta
  Intron number 1 from transcript cassava4.1_028391m (locus cassava4.1_028391m.g) derived from phytozome v7.0 (chr-ID scaffold00480; pos 434693 to 435028)
gcctggagctgacacgcttagggtctacgtaccaggtttccttcttttctctgtcttattcaataaaagtataattttgtagttttttataaatttgatttcgtaacatttcctgcagaaggagaaatatatacacctgatagatcattgattttataaaaccgaaaggcttatatattacttttgatataacttaggacagcaagtagtttttccttctttttcttttttttcatatctcaagattattaaacagattattatgtgattaatattcgagtacgtaataaccattcaagtgtgtttttgtttgaataagggtttaaaaaggagcaa

SEQ ID NO: 45260 - DNA, 960 bp, Manihot esculenta
  Intron number 1 from transcript cassava4.1_010216m (locus cassava4.1_010216m.g) derived from phytozome v7.0 (chr-ID scaffold02259; pos 80923 to 81882)
gagagtcagctgcaaggtcacgggctcgcaagcaggtgatattttgtgatgctagtaaccatacgtttccagatttagaacataatttactgctattctaatttaaatgtgagtatgaaatctgtacctaattcagttgaagcacatgcctaatcctgatgctattttgagatattaagaattaaaatgatctagcagtgtttatctatgtaacaattagatgagatttctgctagtgtcctagaagcataacatgcattgcactaggaaaaacaataaccaggtagagtgaaaattttacctaccttattttatcaacttaagtaccaggacagttgagttgctttgtatgtagatgcattttcaatgaaacaaagatataagaatatggtttttatccccctaaatgtgtttttgcgtctgtcgcaatgaattttgtgaaacagcccctcttatcacttctttttggataattaataaattccacccaagattttggaaaaagaaaaagaaatacaatggcaagtttcatcttgttgtggcttcatggattttgctagccattaaccttctacttttatcatctatggcctttctgcatgccacacgttcatgaaagattatgcggcagaatggtaatgtcatagcgatctgacatgagaagagatgaaaggttttgagaagtcgaggtcatgagaagttataaggatcaggtttgttacaaggtaatggagcatttgttttaaggatgataacgtgaatctgaacctgtatttggccaaaatcaatgaacatttaaatggttcaatacatttgtctcgatgctttttctgaaatgcaactataataaatgattgtatatttatttttcttcatgattaatattgttgtgatattgcctctcaaataagctcaaaactctttattatttcttttttgtgctgctgttaggcttatact

SEQ ID NO: 45261 - DNA, 254 bp, Manihot esculenta
  Intron number 1 from transcript cassava4.1_008382m (locus cassava4.1_008382m.g) derived from phytozome v7.0 (chr-ID scaffold06548; pos 124094 to 124347 reverse strand)
cctctctctccttaacaacaggtacatttcttaactaaatagttttcctattcaaaatccatatttgggctaatattattagatttgactgaatttgagatcgacccagttgtttttatgtgtttatattcttcattcttttgattcttcgatttttgttatttgagatagcatgtgggtttttggagtttttcaatgaagcatgagcactatactcgtttaatttccagggcagggttgtgggaagaagtatt

SEQ ID NO: 45262 - DNA, 514 bp, Manihot esculenta
  Intron number 2 from transcript cassava4.1_003947m (locus cassava4.1_003947m.g) derived from phytozome v7.0 (chr-ID scaffold11297; pos 862297 to 862810 reverse strand)
gtggaagagcccgttgcttctaagaaagaatccaggtaatccattctgtgtaattatgtttatttcaagagaagttactgtttctgcaaaaggctggaaaatctataatctatcattttcagccatttttatttttatttttatctttatttttatttttgagatgattatgaacaaggaatcatctacacctttctgtcaaggttggattcaggtaacatgtaagaacgtactagtgccagttcttgaactggattatcctgatgataaggtggaagactgtgacatatactgataaaaagttacttgtacataattcatctgttcttctgcttattgttggtttttgttttttctgaagcaaagtttggaagttgtacaaaatttgtgttttttgatgcaatttgaaattcatgtggatgaacaatttcaatgttttcttcgctttgtataatgtgataataaattctgtattgaagggagaacgtgaaacaaattgagcaaagtgagagtg

SEQ ID NO: 45263 - DNA, 599 bp, Manihot esculenta
  Intron number 1 from transcript cassava4.1_000617m (locus cassava4.1_000617m.g) derived from phytozome v7.0 (chr-ID scaffold00248; pos 295236 to 295834 reverse strand)
ggtcaggtgggtttttgtttgttttccaattattgaagaaagtgatctaattaggtgctgggattattaccgggtaaagcgattgcaaattagttgctttgacattgtcgacctttacccttttccccatggagatgtattcaactgctgcacttgatatgcgaaatatgtatacactgtgtttggtataaaggttttctggaggtaagtaatgtttatgtttgaaaggaagctttttctaaagcaaggtaaggtttttggagtttttaaaactcagaatcttcacttttttaacccactaaaaattggagagttccggaggtctttcaccttccactagtttgcttaattttttttttctaataagaattccctttactccattcaaacacacaaatgtcaggcttgcgggagcaagcattctactgggtaatatattatagtttgttttttcttagtttaatagtgcaaagagattggtatttggtattacttttgtttccttcacttattctgctggtactttccctttattaatgtgaatgattcctgaaaattttggtttgatggatataatgttaacttgcataggttaagtt

SEQ ID NO: 45264 - DNA, 910 bp, Manihot esculenta
  Intron number 2 from transcript cassava4.1_030414m (locus cassava4.1_030414m.g) derived from phytozome v7.0 (chr-ID scaffold06582; pos 813742 to 814651 reverse strand)
atccagaagatctgatacttcaaggtttgcaggaggtgtgggcctacttattcttatgctccctttggaggggggccaaggatgcacctggggcatgagtttgtgcaactagagattttcttgcatgatattttgagaagattcaaatgggactttcatatacctaatgaaaagtctggatatgatcccatgtgcgacaccatctaaagcacttccaattcatctgcaaccacaacagtcctaggttccaagtgttgtatccatttattgtgtttgtaatgttctaatatctttcctgtccctttctaaagtaaaaataggacaaagacaaactcctacatgtgattgatacatttttattttattatttcattatctgccaatatctacttctgccactgagaaagaaaatcctacatcaattgattaagaaatatgaaggaataaatgcacaagaagacctccaactttgatcgggtttttattgaagccctcttacatttgtgtgtgtgtgtgtgtgtgtttaatcaatcaacatcctcaacttttttattaattgaaatatttgaacaatggattggcaccacgacccagataaaatgtggcaacctttaccttcccgaatcccaacaacacaacagcagaactaggatatgtgcctttcatcatatgtcaatcacttagcaacctaggagacagaaatcaaactggggtttcatgagtcggaggatctcagataaaagagactccaaaatcataaactaatatcatacacaaaatccagttccaccctatccgaactgctagttaaaattacgggcatcaaaggaaaaaaaaatggaacaataactataaagattaaaatcttgggctagaaaggaatcagtgagcagattatagctttaatcat

SEQ ID NO: 45265 - DNA, 681 bp, Manihot esculenta
  Intron number 1 from transcript cassava4.1_029775m (locus cassava4.1_029775m.g) derived from phytozome v7.0 (chr-ID scaffold06707; pos 69706 to 70386)
tcctccaggttcacaaagagagcgtcaccaagtacttttctatcaatctcttaatcttattctatttagttttttgatagagaatttgagatgatattcgttgttttcatttgaatttttttttattgcaaaactaacgctctgtttccttttgaagctaatttttttttttttgataacaaacagttagggaaatagactgctgtttgcgttttgaaaaaattttcaggcgctatgtaaatcatatgaggattaccagtaacgaattgggtttgtggtcaatttgcttataaattatttggaattgataatacttagattctgtgcgtgcttttggttctcgaggcattagtattaataagagaattgctggaagatttaaatctttactttgagagcatctgattccattttatcattgcagttgatcaatctaatgctaacagctatagttatcgattctcttaaaatatattggaaagttatcttacaagtggagagttttacatgtcttcatagcaccttaatggcccttttttcccactttttatcagtttttaccctatctttaatacttctttcaaaagttttgtgtgtttagttaatatttcaatttcactgatcttggaggtgatgaattgtttagggttcccaacgcaaagcctggaagagaatcaactg

SEQ ID NO: 45266 - DNA, 841 bp, Manihot esculenta
  Intron number 2 from transcript cassava4.1_015506m (locus cassava4.1_015506m.g) derived from phytozome v7.0 (chr-ID scaffold08359; pos 2131668 to 2132508)
tagcagcagagactattggaaaaaggttagttgattaaagaatctcaattttttagtttggattgttttgaaagtaaatttcaatcgtttaacgcattgcattttgctggggtatgtctcaattcttggaattgaaatggatggataacaaatagcgatatggcctgagacgtgtgaatacaggttgcatattgaaaaggggctttgttttgaatattgttgacacaatagtaaatggaaaggcatgggccgattgcctggtgaaatcgtaaaaatcatgcccagcaaaggtgcacattcaagtcttgggaaaatcacttaataaaaaagcccggtagggtaggattgcttccaaattctttctcccagcatcctacctgagggctataatcctctataaattggtgtgcttctgtctagtaatgtttaatcacctaagattcagcatatattatgttgcagccatctgtttttggccagttgtggatgccttgcatgcaaaattcaatttgcttataatcctgtttgtaacatgcgttattaaatccgaaaaaaaaacatgcattattaaatgtaacctggttatacaggaacatcaaattggggcttaaatctgtgtgcttatgatgtattggttcctgaatttattgagctattaccagatttgagtgaatttccagaatctcacctctccccctccccaaaattgaccaaaaaagggagggagaagaagggacttaagctagtttggatgaatctaatctggatgaaaatcaatattttaaatgttgtatcttgatttaaagttatctttgacgcaggggttgccctggtaagaaaa

SEQ ID NO: 45267 - DNA, 644 bp, Manihot esculenta
  Intron number 1 from transcript cassava4.1_003039m (locus cassava4.1_003039m.g) derived from phytozome v7.0 (chr-ID scaffold00435; pos 196237 to 196880 reverse strand)
tcgtcatcttcttctcacaagaatactgctcataggtatgtttcttcttcaaagaaattgaaaaacaaaaatttttgctaatttttaggttttgattaattttttttcggtgttttctttcatgggtttgttcgattttggctaaaagtttgaatattttgttttctgggttagcttgagttgactgttttaaatattttggtttcgggttttgtgttagaaaggttagtgatcctagaacaaagtcttattttggcttgtgtagcaggttgactataatgtttgcttgcttctcttgtgctaattttttgagcctctttctgtttcggaaatctctttcttttgtgttgctttacttctttcaatttggccactgatgttatctaaatcttatagatttttaggactttatatttttagatgctgctgttaaaattattatggtcacttgtacaggtaatgaattgtgttaacataattacagtttatacttttggattcttctcattttccagaaagagttaaggaatcgcttgtgtctatgttccaattgatattcacttgtgatcttaagtaactagatttcccaccattgatagagtggaagttgatatctatttgttgtgattatgcagaattagggt

SEQ ID NO: 45268 - DNA, 894 bp, Manihot esculenta
  Intron number 2 from transcript cassava4.1_015526m (locus cassava4.1_015526m.g) derived from phytozome v7.0 (chr-ID scaffold06278; pos 419649 to 420542 reverse strand)
gcatctgcagagcaacaaagttaaaactctactgggtattcttttatttttgttggttttgttttgtttcattttctttcttcacccccaatttgtcaaagaagagaaactgaacaggcacgctagattagctggtcttctgtgcaatttaattttcctggaaccaacttcaattccattattctagattagattctcttttatgcttattagtcgtgaaattgaagaagaattctttgggaagaagcagcagaagaatggggttatgcaagtatgtgtttataagagacattatgacttactgtgtgctgttgaatttgcaacttcttggttgcagaagtttttttattttccctcttctcctttagattataaaaggattgatattatagtctgtcagtacgcagcatctgtgtcttgcgaaagttaactcaagatctgactgatgaaagtctaatgccatttgatggtcttcattgctccgtgccccactttatattttttcccttttttacttttgcttgatatgataaattcctttatgaactctagaacactctcatggtttatccgatttggctgactaaaatatcaaattaactttggaccttgtccattcttgcgctttgaatgtactggaaattttgtcagttataggtcaggattgaggaagggagtatgtgcacatttgattagatttatttctttgctgtgagaggtttagatttgtttggtgcttgtatgaatttaatgtaactctcaatggagtgatgatgatgttaggcatgcattgtcttattccaaggtttcttcttttccattgtatatttgtatgatactgcactcttttaacgggttttgtttctatatgcaggtggtgtcccaaatcttgcc

SEQ ID NO: 45269 - DNA, 423 bp, Manihot esculenta
  Intron number 1 from transcript cassava4.1_019393m (locus cassava4.1_018088m.g) derived from phytozome v7.0 (chr-ID scaffold08359; pos 389955 to 390377 reverse strand)
tctctcacctaatcaagtctttagccctaaatcaggttttctttctttttttttatttaattattctcctcttccctttaatttcttctttatttctttcttttacttgaattagtttgctatgtctctctaattcgatttctattgtttttaatccttaataaccgccaatcttggacttggatttatgaatcagttttagcacctttgctagattttccgattcaatgctttgattggtgtaatttgttatttctttttgctgtagtgatgatgttgaactttttgctgtaatttactatccttaattagttgtttgacattttcgattctcttatttctcaagatattggtgggtttatggaaaaatttgataatttgtaagcaggaagcttaatctagctttctagggatacaaaggag

SEQ ID NO: 45270 - DNA, 492 bp, Manihot esculenta
  Intron number 1 from transcript cassava4.1_029718m (locus cassava4.1_029718m.g) derived from phytozome v7.0 (chr-ID scaffold03175; pos 170466 to 170957 reverse strand)
gatagttgctgggacgttttccggtaagttttctattttctttttggtttctcagaaagtttgatacagaataatagtcaactcggttgtgcctctgcttaatttctcgagactagttataatctcttaactcacagatttttttttcttttctggttgttgagtatgagaagatactgattattttttaatattatcagaagttttgtttctcgagtttggtatttttatttatttctgtttttagcttggcgctatttaggaattttagtttacgattctgctcgatatttaattttttataagcagatatattgatacttctattatgaatctattacagctgattgggagtagtaatttcttccccttctttttgtgttgttgcttttgatttcttctttatcctaagttaatcgtgttatttgcttatagagaaatttttcctgctcctgttgcagcataagcgtggagaaatatcctaataatccc

SEQ ID NO: 45271 - DNA, 1016 bp, Manihot esculenta
  Intron number 1 from transcript cassava4.1_011177m (locus cassava4.1_011177m.g) derived from phytozome v7.0 (chr-ID scaffold10998; pos 28053 to 29068 reverse strand)
aagacttcctcaacaagttagtcttctgctctgttttctagttcagaatttcttttagatttttctcactctggatctctgttcgtgtgtttttatttgctttattttctttgttatatgctgcttgcggagataaaaatgggatagatctgagtatattattcattgtagacttgttcctggctcggatctgtagcttcccctatgaatgattctttctatcaggggcggagggggggtgtttggtaggtgggggcgcctccccctctctccctaacttcatccaattatttatttacatatattattttaaatttctttacctggccattcaactattttagaaactatttttagtaaatataataaattttaacttttttattaaatctatcacaatttttattagtctccctaaatatttataaaaagattaaaattttaatttttgtcaaattataatctatatattataatttaattagaagtattaattttttttttattctcaaaaaaatacaaagatataattaaaaattaattattcaaacttatataataataaattacaatttgcttgtaattgttattttaaaattaaatgcaaattaattgagtaacttcttagacactatttaaatttacatgtgcattttttattttatgttttgctctctagtctcttcttattctatggttattgttttttttaccttcccattttgctttctctcttttattttattaaaattaaaaaaatagttgaaatataaaattagttatcccaaattctcatataaattttggaaattttatatgttctttattctttttccattcatgaaattacagttccttcaggtagctgcataagcagattcagggaatgatatattggattgctaacggatatgctttatgtttactgttattttttttattattaaattttctttaaaatcccacaagagtgtgctttctatttttaattttgtgacttaatttttctaacagat

SEQ ID NO: 45272 - DNA, 1007 bp, Manihot esculenta
  Intron number 1 from transcript cassava4.1_003632m (locus cassava4.1_003632m.g) derived from phytozome v7.0 (chr-ID scaffold08686; pos 343779 to 344785 reverse strand)
tggcgtctcgcttcagcgtccaaggtttgtcccaggtaccatttactgtttatttctgcttttacattactgtgaataatctttttctactttctgagtctttaggacctaagcagtcagtttgggatcacaaattccttgatttgttggatcaactgttatccttattagcataatagcataacacttctatgccattaatcagataatagttttcatggaaaaagtaactgaagtgctttagaccttctgctatgtgatggagaagtagttcttgtagtggatgttaaaatcatttgatacactataaaatcttttagttgggctcgcaggacatggaaccacaaatttttttatgcattatgagagcctcttgaccgttaatgtttaactattgcgtttatctatttacctacatgtttatcatggtggttttgctatcatagccaatatatggacattgctcgagtcaaactgtcagtgcataagttggagctactactacccatggccttcaacttcttgttacatgagtgttattatgtgcaattagatggaaagcacctgtctgtgaagctgatgttaagtctatgcctaggaggatcttactgttattactatcatgatctctagcaatcataatgacctgtccaaagaaatatggtttttaaattttaatgcctggttatttgctgcaggttgtttttatgagattttatgcctgaatattaattttctttttcgtttagtaaaaaagaaatagtatgcatatggttgccttcttttcttgcctttattgcttgaatcaacttcctaaacctcttccttctcattgactatttggaagaactttcaaggacagctgatgtcagaagatacttctcatgaaaattgtgttgattttgtgggccccaatgcttctggttcacctacttttgcttttaaaatttgcatgttatttagacttaccttttgattctttttttatatacttattataggtaaac

SEQ ID NO: 45273 - DNA, 633 bp, Manihot esculenta
  Intron number 1 from transcript cassava4.1_004699m (locus cassava4.1_004699m.g) derived from phytozome v7.0 (chr-ID scaffold03774; pos 58528 to 59160 reverse strand)
ccatttttcaataattctactcccgcaaatttcaggtacgttcctctaccctcagatttatttggttcgtcgaatatcctttctcgtccactcaattcttcgttcttcattcttctcgcgaattttcgttattagggtatgaaggcacataatttttttctgtgcttgcttgacgagaataagctgagattaataaagggaaattaagatttgatttaccttgtttttttttttaatttttatatctggcttaattgacagtggaatcaatttagaagtgagggtttttgtgtgttgttaccatttgaatataattggaatgaaactcttgcttgttttgaaatttttgcagtggattcttttcaaatagctgatgatgattaaaaaatttgagtaatgcttccttatgtatttggtgcaaacgttctatttgaaatgataaggaatgtagtaaataagaacgaaacggaatcgtgtgtttgttgagtgatcggcggtgattatgtatgcaggacactgccgttggtcattgttttttttaatggggcatgtgtaatgctgattttgagtttgatttaggttttgttttctttatcagggaattccttgattagtgtgcttctgcattcctta

SEQ ID NO: 45274 - DNA, 867 bp, Manihot esculenta
  Intron number 1 from transcript cassava4.1_002709m (locus cassava4.1_002709m.g) derived from phytozome v7.0 (chr-ID scaffold04165; pos 79845 to 80711 reverse strand)
aagcagggaggtgcccttcagagagagctcatcaggtaaaaataaataattaaataaattcactgaatatatttttttatttttgagctagttactgtttttttattaagcagagggtagttggggagatcacaaggcttgcatgaaagaaaaataaattatatatttaaatttgaatttcactgttaaaaatattgatgggttaccatataaagaatttggtaaatatttaattttttaataatttctataaaagggacaaaataattaaagaagatgacaaatcaggatgagaaagttggtaagtttctcagattcatgcatcgcctgaacagattggatatgcagggccagctttcattaaaatttgaattttaattgaaataattaatgaaaaataatataaaaaatagtattgtatcattaaattagtttttttttaaaaatgaaaattatttattcatattaaaaaaataaaattaattgcattgccaaatagtctaggtcacttgaggttagaccgttcatatatcccactaaaaagtcaatcttttcaggtgcaaaaatgaagatattaattagtgcaataatacatttcgtttcataatttttctctaattttttttattattttaaatttatagttaatttttttatattataataatatataaatcgattattataattttattttatttttaataaattttttaaaatatcttttaatatttaataaaatttaatatttttctctcggaatggaatctgggtcaaagttcatggctgcaaatactttttcttttagatatttattttgtttaatatgtaagcattaacctgaaaatttttatttcaggttcttga

SEQ ID NO: 45275 - DNA, 527 bp, Manihot esculenta
  Intron number 3 from transcript cassava4.1_016307m (locus cassava4.1_016307m.g) derived from phytozome v7.0 (chr-ID scaffold06761; pos 96200 to 96726 reverse strand)
gggctgggagaggattttctcttgaagaactcaaggtttgttgattttctttatcgatatacatgattcttatcatatgtaatctatttttattctaatatgtcttctgtagttcacatgctgttatttcataagtgttcttatgttttcgtatgtgcttttgaaaccattgttgacctacttgtagggtcttaccctccatatttgagctatgcattttaatgtttcttggacattattttagcatttcaactcaactggcattcatgatatggcaaatataaatgtgtttcctctaggcagaactatctacatggctatcacaatgcgaatacagtttatgaatgcatattctcattggcattgtacagttattaattctatagcatatacatattattatgttcttattaaattgttataattgacctagccctattatatttgttcatatgctgtacatttttaccaagtattgttacttgtttccaggctgcaggtattccaaagaaacttgctcctacaat

SEQ ID NO: 45276 - DNA, 811 bp, Manihot esculenta
  Intron number 1 from transcript cassava4.1_016307m (locus cassava4.1_016307m.g) derived from phytozome v7.0 (chr-ID scaffold06761; pos 97048 to 97858 reverse strand)
tcctgccgggtgctgcatttccacggctctgcaaggtttccatctttttcttttcctcctctttgcttcactcagtttcattagcattccgttgtttgtttacctagaaattggtattatgtaagggaagaaaatggaagatttgcttaggatctagtattagctggtacgaagccactgaatttaaatttgactttttttagatatctaggttttaatcttgccaattttagctctatttgttgggtaatcactttcccgtactagatgtttaacagggattcgtggtatgttttatttagcgaatcagcaactacgatctattgtttgaattttctcgtttaaaagtatatcaattgcattttttgtttctgaagtaagaaatttaaattatattagttaattagcggaaattgcataacatttgatgcgttcattattcatgggtttttacttcttctcttaattgcatttcagatgatggtcgatgatcctaatgcacttgttgttgcattactataaattcaaaaaaaaaaaatctttcaatttttatctttcctataaaaatggttgtttggtagcttgctggttacaaccgagaagaagatggttaaatgaaaatgttcctgaggatcaaaatgaacttgtgatgcacttttaatgtgtagggcattcctttaatgtcctacacttttttccactttaattttttgctgttaaatctatgacctgttctgttacatgccatgccttggcatttctggagacaagatttttgcatttactctcttcctgattttttaggtaagac

SEQ ID NO: 45277 - DNA, 366 bp, Manihot esculenta
  Intron number 3 from transcript cassava4.1_012409m (locus cassava4.1_012409m.g) derived from phytozome v7.0 (chr-ID scaffold12004; pos 341014 to 341379)
cccagcgtgtgtggattactcgcaactgtaaggttgtttctcaaacttaacttgggttgtagtttttttaatctgtatagtgtatatccaatatcaattcaagttcaaatatagttctttctataattgtgaggtttcttctttacattggcctatgatcccgctttagaaatcggatattaaagatataacaatcatatcttggccaattggttgagtgggaattcatgttcctaagtgtatctaatctaaggcagataaaaatctcaaagttaatgtttctcttttggtctattttattttatgctggactctttttctgggagagcagggattgcaggacaagataaaattggttcctgttga

SEQ ID NO: 45278 - DNA, 567 bp, Manihot esculenta
  Intron number 2 from transcript cassava4.1_006089m (locus cassava4.1_006089m.g) derived from phytozome v7.0 (chr-ID scaffold11297; pos 392912 to 393478)
tcagagaactactctgttcttgctgcaattctcccgtgagttttacttttattacatttctggccttttcccttttagtttctgtaagaaaatagctataggctcactagacgcatttgtaaaaaatatgccgataaaattaaggatggtttgttattctatttgatgatttcgagctaaattcatatgggaagctgaagtatcttggttcgaagaaaggacagttctttggttttcaaaatatttttaaatcaatacacgtgagatatgctagactttgcgcgtaccatatgtagaaatgaagggatgcattctaactttgctagtctattcaagttctaagcaattcttcagagttgaggttcatacttcacaccattgtatttgatactttgagttatcattttaccatatgtgatgcgctcatgagtcttgattttcctattccttttacaaataatcttgcttcttgatacttgatgccttgcaaacatatcctgcttatgcttaagaagtgcattgttcattgcagatttctatttccagctcttggaggactattatacg

SEQ ID NO: 45279 - DNA, 590 bp, Manihot esculenta
  Intron number 3 from transcript cassava4.1_006089m (locus cassava4.1_006089m.g) derived from phytozome v7.0 (chr-ID scaffold11297; pos 393488 to 394077)
ttggggccacatcctgtgctacgatatctatagaggtgcgcttttgatgaaattgtaaactgcagatggaatcttagttcatttataacccttttctattataatatttgttcttatgtgtattcagtatgacgtgtggcttcatggattaacaaatttgtaacttagaatttcttttttctgtatgaagaaggaacagcggttattttttgcctacaataaaattttatttaacactggacctgatgatggatgtgtggcagaaacatagtgtgctccagcagaaatggaacaaaacactgtgctaaaactattaaaattttgatttagttcatgcttccaattgtttatattctttgtaaattggttagatcattgaagtaaaatattagaaatatatttccttgtggtgcagattgaccactactgtgtgcttctccctgcatatgtgtgtggttttattattcatatgcatgcaaaatccatggatcatttagaattgtgattgaaatggtaaatattttcttctattctctaaacttattaatcccttttcttctcctgcagtcatccacaacaagtggaatttc

SEQ ID NO: 45280 - DNA, 736 bp, Manihot esculenta
  Intron number 2 from transcript cassava4.1_013663m (locus cassava4.1_013663m.g) derived from phytozome v7.0 (chr-ID scaffold10729; pos 42815 to 43550 reverse strand)
agttgggtttttggacggatcaagatatacaagatgtaattttcttgtagctctttcgatggaattttcctttctcatgagttaattttgtttttaatcttgtttaattattgaactactcatatatatgctgatacatatatattaactctatcctttctcttatagtgctagagaaacagagggtctttcttttctcggggcatttttgttgtgagctggggatgagagagagttatatggcatccaactgtcttcattaagtattttgaagggttgttaggcattaaccattggagttgactgtgtatatacgttacctttccacattaaaacaaaatcagaatagttagtgggtggtttgatgtaatgacaaagtaactcgtctagatcccaggttacggatttgagccccacatcaatctcccgtgtgtgtgtgtatatatatatatatatatgcttgttagatgtaaaatatacatcaacaccaccatttggtttgattccatgccaagattagatagcagatgaagctaaaaatttatttattgatcgcaacttcattatttgaattcatatcatgcatatccattatactccctatgattgatcgagagcagcaaaggaaatgacgtatcaaggtcaattaatgtataagataaagttgatgcttaattaggcctgtatgtggaaattgacagggagttcctgacctatcctcatttggtgacgtgta

SEQ ID NO: 45281 - DNA, 666 bp, Manihot esculenta
  Intron number 1 from transcript cassava4.1_017751m (locus cassava4.1_017751m.g) derived from phytozome v7.0 (chr-ID scaffold05859; pos 253748 to 254413)
ccaaggtaaatgtttcgcatccattattatgtcatgtactgcaggcatttgtttgtaatatgtacttttttgttgttgcttaaatgttgcaaaaaataaaatttgcttgaatcatgattctggttggatctatttgacattgaattaatatcgtaccggtgatccattaaggtaattgatcatcataccctgcataagcataaaattttttcttgtgatattatccatatctcagattgggagttggtttaactttgattttcttgcatccttaactgtatatgaggtcaagttgattgccttacctccacttagaaagaaatctatacaatatgaaattaaatttgtgaactttactttaagttttcttgatctggtatttgatcacgaactctctcttgtctgttttaaccatgaacgctcaattgcttatcagctatgttttctatctataatgttagccgcttgtggattagattatggcttaagaagagttctgtttcataatccttatcttctagttgtgttctatctatttagaattattcatctatgttgccagttcaatcaccgaaaacttgagtctgtcatttgtgcagaagattttttttgttcaagtttctgattaccagtctttctgcagatttttcgattttgtagatccaa

SEQ ID NO: 45282 - DNA, 677 bp, Manihot esculenta
  Intron number 1 from transcript cassava4.1_012638m (locus cassava4.1_012638m.g) derived from phytozome v7.0 (chr-ID scaffold11834; pos 132277 to 132953)
gtaaatttcagaagaataaattggctcctattgaggtaactttatatatattccttttgctttcctcctttgtggtcagatggataaatgacaagccctcaaaataggtctttttagtatatttatgatctgtgaattttcattggtgttagaagtagaagaaaagatagattgatagaagaactgacatttgcccttaaacttaagtcccgtgcatatgcatgctatcgggtgaactggtggaaacatgtgttattatgaagttcttatttcttcccaatttgtttgttacattacatttcggatgtcttcacctagttgtttttccagtactaattttaaacacatcctcagtttatgaactttattacccttgattgtaaatgaaatggaaaagataaggtagttaaggaaccataggcactttcacaattaactggaacttgaatgtggcaagtatatgtctatttcaactgttgataccttagagggacagactatttgggacagaggaagtagttagacatgttggcatgttttggtttttataaaatttactttatggttctataaatagttcattaagaattgcatctggcatgcaaaatttccagttaagataaccaccagccactattgcaggattgggcagatctgtggcagcctaagctcacagg

SEQ ID NO: 45283 - DNA, 708 bp, Manihot esculenta
  Intron number 1 from transcript cassava4.1_018985m (locus cassava4.1_018985m.g) derived from phytozome v7.0 (chr-ID scaffold06028; pos 262366 to 263073 reverse strand)
actccaccctctaataaggtaaaggcactcatttagaagcctgtgaagtagacccataagccaattagggtgttttgtttaaccaacaataactccaaaggaaaactttgattctaaagaatcaaccatctctccaaccaaatacctataacagtacaacatgactctgttgttctaagcctctttccaactcctaaaagctgaaggttcatttacggactactttcaatttccttcaaatttattaagaatagctgatagaaaatgtacacagaaacaataaaacattgcaataatgaaaaagatcactcccctttttagcagttagcaatatgtctatagtggatatgtattgtggagtcttcatatctgcaacaaaggcacattaataattattggaatgcttcatagaatagttaataattatgatattgtatttttgatgtggaagaatctcttaaggccaaaaatgaaaagttaatgacccttggagttgttttattttatcaattggatccgaaatgctatatatgggaaaaaggaaggtggtctaattcttatgtgcatttaattttcattttcagcacaatcagtgataaatggcctcaattaataatcaagtcagaactgttatttttctagacaataattaattttctcacgtgtatgagtgtaatgattgacagtgtgcaatttgttctttggagg

SEQ ID NO: 45284 - DNA, 660 bp, Manihot esculenta
  Intron number 1 from transcript cassava4.1_022119m (locus cassava4.1_022119m.g) derived from phytozome v7.0 (chr-ID scaffold00168; pos 10475 to 11134 reverse strand)
cgtcaatcaaggttttgaccattactttactcaaacatttggttaagaccagaaacttttaaagtgtttttctttttgaaaggttcaaataagtctatgaactttttatcaatcttcaagtaagtctagtttgaccttttggctatatatttggtggaatttgtggtattgcagcgaatatgtcaatcaaggttttgaccattactttacccaaacatttggttaaaaccagaaactttttaagcgtttttctttttgaaaaggtccaaataagtctcaactttttatcaatctccaagtaaatctagtttgacattttggccaaataaaaatctgaactttacattcagagttaaattaagacctaagaaaataattttctaattatagaatattattttttatattggtaataaatattatttctatttttaattataacacaataacataaaaattgaagaataaaaataataattttttataaaaaataatattctattaagttatcacttgtttgaactttaaaggtcagtgttttatttggtcaacagggataaattgaaagttcagggacttattagttctttctgcctttttattgccctgttctgtttttcactaacattgggaagcataatgttttaggctttggctgac

SEQ ID NO: 45285 - DNA, 1042 bp, Manihot esculenta
  Intron number 1 from transcript cassava4.1_022292m (locus cassava4.1_022292m.g) derived from phytozome v7.0 (chr-ID scaffold10397; pos 44723 to 45764)
agattcttgattttgaacgttataactgtgatctggtaattttcattatttccaatattactctctctttttgtgtatgtgttctaaattttggttcatcttcaactttcctttttgcccttttgcttatttttccattgcaaacctttaaaaaggttcaatttttcttttagcgatagataaaaaaaatgttggcaaattagtatgcatagatggtagaacggaaaagaaatagtttaattaagcaaaaactcatgtggccagcttatgtaaggatgaaacaaatagatgcagttattgggttcattgttgtatttagtaagaacattttactagaaggtttagtaatttgtgtttgcactagattgcataacaatgatcaatattttagcaaataccaattgatgaactttgtgaatatggtaggtatgtatgagcattattgtgctaaggtaatggttctattagaatttatgcaagatgaaaccaagaattttatgtaattataaataaaatacatatttcaagttttcactaccatgtacattagtgctaatggcttcttaaaacttttgttgaaaaattgggggcttctgcttatcaatattcatatgaatcaggttgtgtaagcacattatagtattgttatttttatgttgtaggatctttataatttgattcctttgaatgtgtagtttacttattagatataattactaaaacaaaaattacaagaaatagggatacaaaaattacaagaaatagtgatacatactcaatacactttttgcatgtctttcatctcttcgactgtgaagtcattacttttcttccagtaaccaacttatttctattttctaaataattctttgaggtaaattgtattttgtttcatttatggttgttaaacttttgaagtttttatttttggttttgccaattttgtaaatggttgattatataagtaactatgttgatgctctttttttttattatgtttttaatttgttcacagaataacatttctcgtgaagtgcaaata

SEQ ID NO: 45286 - DNA, 515 bp, Manihot esculenta
  Intron number 1 from transcript cassava4.1_005239m (locus cassava4.1_005239m.g) derived from phytozome v7.0 (chr-ID scaffold09365; pos 150227 to 150741 reverse strand)
tctccactcgagatcgtgcttccgggtccaaatcggtatagtttctttctttctcttcttctttttcttagttatcggtttgtttattggattttgtttcgtcgattagatcttgaagtttcccctaaattctggtttaattgtgtataattggttgctgtatttgggaaaggagatcaatttgttaactttttgaagtcataggatgaaaaaaaaatagtcaattgaagctggatggaatgatgcggtactgtgattataaagttcataaattgcaaaaaaagtcaaaaagcaagcaaacaataatcgatttttgtgttgttaactttctttttaagcggtttcacgaatttgaatgacaaatatatatgtagacattctaattcagccaccacttgtgtgctttgttatattttatgttttaaaaaaaaaaagattttttatttttgtgtaattgcgttttagcttcaagatgtcaatgtaaagttctcttacaatggtttttttgcagctcg

SEQ ID NO: 45287 - DNA, 738 bp, Manihot esculenta
  Intron number 1 from transcript cassava4.1_005107m (locus cassava4.1_005107m.g) derived from phytozome v7.0 (chr-ID scaffold06688; pos 245555 to 246292)
aaagttctcatcctcgattcccaaactgtaatctcttgctcatcttcaataaaatctcactagactttctccgatgctttttttttccattagttcgcttattttactataactttgtgtgggaattaagttttgtttttactaattttatttattgttcgatgaacaatatccaaaaacttagctcacagaggtttgatgctaaacgcagaccgaaatacttccctatgtgtataataagtaattgaatgtttttaaatggtagtttcatctgttcctcaggctttcaagggtaggtctaataggaaggaggaaataatgatgtagaattttgaatgacatatcccaatatgttatttctttaaattaaaagacagtgctattggagatctcatgttgatgttcctgtacccaaaacaatctgaaaatttgcaactcttatagtgtgttgctattgatgataaatctacatgaattcaaccataaaatcctgcatccaagcttctggtttgaatgttgagtaaggggtttctgtgctggatcatgcagctattaaaggatgagtttgtgtttttcaggtcggtggtgaaattagcatttgggaattgtttgcttgctttttctttccctttgtaacttggttaaccattccacaataacaggacggaatgtgttaatgttgttttattttaatgaatttcaggttagtattctaagtgttgtatattcacaatcgga

SEQ ID NO: 45288 - DNA, 651 bp, Manihot esculenta
  Intron number 1 from transcript cassava4.1_016429m (locus cassava4.1_016429m.g) derived from phytozome v7.0 (chr-ID scaffold00206; pos 334272 to 334922 reverse strand)
ccatcattctgcctcctctttctttcaagctcaaggtttttacccatttttcttttacctctgtttttgctccttgtttgtttatttcctttgttcctcatttctggacattgtgtatttgttgttttgtgattttgaagtttgtggcattggattggaatgtgtatttgttgttttggaatttccaattttgtggaattggatagcaaagcaacgaacttttttgcaatacttttattcttagctgttttgtttgatttcccattagcataatctaaaaaagggtttgtttcgtgattgtttccttcctgacttcattttggaacaacttaggattgaaatttttaattgcggatccatttatggaattggaatcatatttctaattgcaatttcaagatctcacttgtatactggtaaatttccgttgatattgggaatcttagcttttccatcaattttttgtgttggcttcttctgtgtttgtggaatttgatcaaattctagcttattttggcgactgaaccatgagcccgaagttgggaatgagtaattttgaggcctctttccgtgattattttcttgtcataaatgacttgtagtttttcatatttcattgattttgcattacttttcaggtgattagggcat

SEQ ID NO: 45289 - DNA, 791 bp, Manihot esculenta
  Intron number 3 from transcript cassava4.1_013295m (locus cassava4.1_013295m.g) derived from phytozome v7.0 (chr-ID scaffold04953; pos 157557 to 158347)
tttgttgggaaggtaaattcatgatttagtttctttttctttgtggttttgaaatcctattctaaaaagttttccatcttattctccacacccaacggtagatttttatgttatttgcttatttgtttgtatttttgcagactgatagtggcttgagttggaaggagcgttactgggtcaaggtaagtacttctttttttctatgtaaaattctaatttctatgtatgccgcagcggagcataattattggtctggcatcattttgttcgtatgttccattttattaaatattcagccataacatgcctacttctttggtgaatataacctttttctagataaatattttgtgaacttagtctactcgtaatttcttttgaagttcttcaattatcctaagtttctgattcatcaagggaagtctgtagcagttggtaatcttttatagtatttttctaaaattatcatgcgaaattgtctttgtttgattatttagtagtctgaatttgagcccaaacatttttcgctttggtaaacctagtcaagaaaggcaaacatgtagtggattatgtaaagatttttagggagcattggcatgaaaatgttttgatcaacagctgcaaaaattttaataaggagaaatgatacagtacttgggttagctgcttaggacataatcacttgatctcccccttttttgtgtatgtatatatatgtgtgtctgagtgtaatgttactgcagttggaatgtacagacctcaattgtgaacttattgttgtggcaggccag

SEQ ID NO: 45290 - DNA, 884 bp, Manihot esculenta
  Intron number 1 from transcript cassava4.1_025475m (locus cassava4.1_025475m.g) derived from phytozome v7.0 (chr-ID scaffold11581; pos 409051 to 409934 reverse strand)
aagtctaccaccctgacaaataccaagacctccatgtatgcccctaaattgtaaataggcacgaagttaagttttgttagttgcagtatcgatttttatgcccattgtttcttaaaatataaattttgcgtatccaagacgtattggtgtgtgtgtttggtggcagtgacagaaatggtggtgtaattatttgaggcattgcgggtttagttttttgcttaacttgttgaattatgtttcttttgcttaagctaagaagaatgattttaaatgtgggaactaatttcactaggtgcttaaagaacctggcaaaacatgtagaagagctgaagaaagtagaacgtttctctggcccagaatttatgtgctaatttctttggcttgtccaatatgacatgagcttattgatatatcatttagtagtcacctatgaattccaatagcgcttgtgtgatcataaacaatgaagttcatatatgtttacatgttcatgtattataaatataagcagtggagaccaccttatacatcatgtttttcttatggtttagtaattttaaatgttcatattcttctatactaaaagtggaaagacttaattgggccaattagttgactactgacagttttcacatctcccttcctgccatagatggttttgacttctgactctgtcttagcagacacatttccgccccttagaaattgacctgtaaatttggcatggcagtgaaatggtagaattattatgtcttccagatctgtccatgtagctctttgctccctaaaatgcacttattatttccttggattcacattcatagttttaattttagaattttgcctctctgtttcctttcctccttttggatgcttgtattcag

SEQ ID NO: 45291 - DNA, 946 bp, Manihot esculenta
  Intron number 2 from transcript cassava4.1_028290m (locus cassava4.1_028290m.g) derived from phytozome v7.0 (chr-ID scaffold12865; pos 45230 to 46175)
taatcacctgcaggtgactcatctactacagccaggtgagattccgatggaagctcctctatactcatccctcttttggacccaaattcacaatttgcccccggctatatgacatcttcaacgatgcaactgttgggcaactttgtgggtcaatatgtggattatgatacaactgttgttactggaagctgtcggagcttcatgccgatcagggtagaaattaatgtgcagttgccacttaagatgtcaaagcgtgtggtcatacatgccaatcaatcctttattgtgcactttaaatacgaaaggttgttaattttttgctttctgtgtgctagactgggccataatgaaaaattctataacaggctatttgatgtagttagtttgattgagccgaaatgatggggtccttggctaaggccgatggcaagacaaacagaggtgagcataaccaatggctacgggacagcactggttcctttttcactggtgaagatgctgcctgagcttttcatgggattggtacaaagcctatgtgtgttgaggataattcaatgttacaaattagttcggatgaagaaatggttgttctgattgatgaatctaagaaacgacaacttatgggggacgatgcttcctctccaagtttactacatgctcgagaggtgtcctctattactgttggttttcatgctaatatttctcaaatggtgggtcctagttttcagacatgccaaaattaatgatttgtttaaattggaactatctagaatttgacaactcttgagccggatatcattttttatataaaattttagtgcgttcgaataaaattgagactatacagatatttttaaattttgaagggcgtgtattaatggattagagagaggaagtggtttaggtgtattataaatatgtattttttctgtctctagtagggtga

SEQ ID NO: 45292 - DNA, 977 bp, Manihot esculenta
  Intron number 1 from transcript cassava4.1_004784m (locus cassava4.1_004784m.g) derived from phytozome v7.0 (chr-ID scaffold04251; pos 191015 to 191991 reverse strand)
ggtatgtgtttttctatttttcctgtcttcagatacaagtacaatttcattgcaacttaatcgattttctttttccctttctttattgggtttatttgatatcatgggatatgaatttagaaaaatgaaaacactggggaaaaaaaaacaccctttgttatgcttagtttcctttataatctgtcgtataaaacctcccctgttctgaaatcacaagatggaagcagtttgtttccttcttcttgtaaagtgatggttggaaagatgcccttttcgctttgcatagttccatttattcctttacatcggtggctcactggctaccttttttcagtactttttgcattaactatatccatcgaaacaactttgtcatcacaacagtcaacagtcaaggtcattactcacggtgtgccttaagattttaacttttcataattttacctgttcttttacttgcttgaaaattaagatttgttcgtgttgtccgaatgatgataataataatagtaagagtttgagagcacttgtacatagcttgaggttgtaatcccacaacatatttaatagagtgttttggctattgtttgccaactctttggcattgtctgcgcaactcgcccagtcctcagctgaatgaaaagaaattaagataaagctttttaaaaatttcaagataacgtttatgtggattccagtttggagaagtggtttcgaagaaaagtacttgtttattattagtgatgggctcagttgtcacttttccagtgaatgtgcaaattttttccaaattcaaccatattaattgaccctttttctaattataagggttccattttcttttcttctctctgccaatttgaatgggattacatctaatcattcttttaaaacttgatgataaccttgacgattaacttttgatgtgcttgatttctatagaaatttcatcgggatctacctccgacgccggtgtt

SEQ ID NO: 45293 - DNA, 877 bp, Manihot esculenta
  Intron number 4 from transcript cassava4.1_004869m (locus cassava4.1_004869m.g) derived from phytozome v7.0 (chr-ID scaffold05815; pos 341651 to 342527)
gacaagctgttcttagtaagtttgagttagcagaaatattcattattactatttgatctaaatccctcagttgtttggcttaatagtgctgtagaaagttttttgtttggattcttcagtattagtaagttagtacgaaataagtgaatgcgagagaattttttagaattttttgtctagacccgatctgtggatcagacacaatatatccgtgagacccacatgtaaaataagtggatctagataggagttgtcctatgattgtcattagcggtcatccaacatgtgcaagtcgtgccacttgccgcattacgattaatacaacttccaagcttaatcctctttgagccctacaaaattcaaatgtagggaccacatacaccaatcatgtagaatttaatataatatcctatcaattctaagaaaatcattcctcttgctgcaaaatttagaaatggctgtctgctacatgattcagcagcaaatatgacttgcatgtttccaaactgatagaaaaactcctttgtttgtatgaataaatacaggacatatgagttggtgctttttgtcttttgctcactattattttacccaatagatataaagacaatcttgcatatattgttcatgaactttgatctgatttatcagtcccaattgcacatgctgcacatgaaaatgaccaactaaactgcaagaatgcctcatgcctgtctaattgttcttgaactttatgcctctagaaataaatctttatgttactatagagttacattttcacggatcttattcgctatttgctaattgtaattgattaactaaaatcaagttcatttcatcatctttgaaatgggtaattctggtataaaatacaggc

SEQ ID NO: 45294 - DNA, 917 bp, Manihot esculenta
  Intron number 2 from transcript cassava4.1_032497m (locus cassava4.1_032497m.g) derived from phytozome v7.0 (chr-ID scaffold11355; pos 30674 to 31590 reverse strand)
atattcaaggaaactcatccactgtcagtctccctcttcttaattgcctatgctttctatttctcttattaattagggttttaacactcaatattataaggatgcatgcaatactgctaggtttatgcaattttctcaaaattaattaattatttttttgttttcttaaactcaaactaacatattttttatttttctaaaattaattttttagtttttcataaaaaaacatatttattaatttgttttatagtattatatatttgttaaaaattctaaataaatctctaaacttttgttcacaaagttcaaataaatctaaattaaatattttttttaaaaatatgtactttaccttacgattcaattatgttctgactttttaataaaaatattaaaattaaaaactttttttaaataaaacaaaatgaaaatcaaagtaaaaaaaataagtatggaaatagtaaataaattttaatatttaaaattgtacaaaataattttttttaaatcacaagcaaaatttaatatcttatttgataaaaagattaaattgggtttatttaaactttataaaagttaatgaaatttatttaaattttttattaaatatttaaaaaaaataaaaaataacaatgaaatttaccaattaaattatataaaaaaataagtcgtaaagtaccatctgactatttgaaatattaatcgtttaacaatgaaattttcgtttaacaatgaaatttcatatttattttttatttttttttgtgtaatgattcgttttatattttattttaattagattataaaaataataataataattaatttgaataagatataaaaacttgacaatagataattactaaaattaatgaattagcagctaatacaaaataatgtgatactttaggagg

SEQ ID NO: 45295 - DNA, 1036 bp, Manihot esculenta
  Intron number 1 from transcript cassava4.1_014079m (locus cassava4.1_014079m.g) derived from phytozome v7.0 (chr-ID scaffold03834; pos 145870 to 146905 reverse strand)
ctatacaagctgttgttgctatcctcttgtttacggtatgcttcttcttcttttttcttttgatttttttgttttaatttcgtcccatgatgatttgatttttattttttttttccatgcttgatcattattgtttatcttttgaattttgtttatgtttggaattttgattttctgttatctttgggaaagtggtgaagtggtcagaggatgaaatccgccgatcataccctgttctcaatattttttcatgtctgttttgacttttctgatcgagttttccatggatcagaaacttctgaataagcaaaaactaatacttttccccctttctgtgattaaaatttgactttctcataacacaactgttcatgtaatttcccttctgtaatactatgaattgagggaaacttccttttatttccttttgggaaatctgttcaattatgggaaacgtgtcttactatatgagttttgtttagccctaaatagctacatgccactccacaagttcatcaatagttaataagaggagaggctgaattatttagtacatattgtcaggaagcaatttaggtgtctctcatatcaggtgggagcctttgaatagcttgttttgttacctttcccaagtagcaaagggaagatcaagtaaatttatgtgagatgaataaattgacaaataaagggaaaatcttgcagttcttagtatggctgttggttgaaatcagagcatgaattaataaatttgagtaacatggagagtgattttggttatttatttcactgaaagtgtttttttagtactttatgttgttgcagaacttgttcatgattgagatttttacaattttagtttaccttaacctgcagccagctgttatcagatcttattttgttcatatgtatgcagctttatcatttttagtgatcttgatgttcattaagtcaaccaaagaacaattatagatattaagattaaatatgagatactaattttgtaaagggattttgcttttccaataggtaactgcag

SEQ ID NO: 45296 - DNA, 945 bp, Manihot esculenta
  Intron number 1 from transcript cassava4.1_005590m (locus cassava4.1_005590m.g) derived from phytozome v7.0 (chr-ID scaffold11361; pos 38645 to 39589)
tacatctgtgcagatctttggtaattcactttctgcatatcataattgttcagatctaaggcttcatcctccaattttcttgcttaagagtatttttgtttttgtttcctttaaatcattgccaatggaaggacccttgtttaactttatatctaagagccatttatgttgttgagtttctctttcagtgtttctggtagtacccttgatctgggtttttcgtttacaagttgctatgcccactcaagcgaagatcgtttatttattttctgcatattaatctatttcttacaaaagttttggttcaatttctacgtcttcaaccaaatttgttttcagggataggtaattaggtaatgctgggtaaatgaggctgctttgtcattgtggtggctttaagataattaagcttgagcaaatcttgggcgttctgccatgtgaaatctgtgataagggaagtggcacaccataaatagtgaaatttgaagaagcacgctctcatgttcctactttccttgctagctgccaaagggactcttaattgtgcattaatttgcttaatgcttcacttccttaacttctcgtgatgctcttattctttgaaccctgggattgatatattttgtctggtttcaactgtcatattcaattgactctggttgcttcatttcactgattattatacttgagccatgttcttggttcaagaatttttcatcgtcatcactgtatagtatgcataagaatatcatgagtttgaagcaagaaaattatgtcattgttcttgtttttgtgcataaccttcttgctgatttagaagcaaagactaccacaaagagccctcctgtaaccccccccccactctttactggataattgcaataattcaatttgtataactgtaatgcaggtctatacctgcagaaagttgctgcattgcaacat

SEQ ID NO: 45297 - DNA, 716 bp, Manihot esculenta
  Intron number 2 from transcript cassava4.1_020507m (locus cassava4.1_020507m.g) derived from phytozome v7.0 (chr-ID scaffold10821; pos 69652 to 70367)
gtgcattattgacagcttatccggaaacctcaaatgtaaggactttaattaaatttcaccaagtttagtgtctttgaatgatattattttgcttgtaaaatttcattctaatgggagaagaagtgagaaagtttgataatttcaaaaaaacttggcgaaagaggttgagatttgcaagttttcgtggtatgtttcaaaacccaaaaatgctctctgtgtgtgtgtgtgtgtgccttccctggtgcgcacacgtttgtgcacatgcatgtgcacgcgtgtataaattacgtaggttgggcattgtcttgatcacgtcagggaggggaggataatatgacaaccttgttacattcaagcaataggttggaaccctgttactttacagtttatttgaaacatataaaattattacacaatgaattgaattgaattgaattcaactatcaattcaaaacaaattcaattgagctcagtgcaactatcatttgaaacatataaactgttatgcatttatcatccaagaagttcatcaatagattgtattgtgaagcacaaagcgaagatgttcttcccttctgttagcatattgagttggttgccttcttttatgaagtctgaaacatggtttcaacaaggtcctttatgtaagcatatttctaacttcctttatgttttaccccatttcaatgcagggtacactgtttcaggcttatttc

SEQ ID NO: 45298 - DNA, 830 bp, Manihot esculenta
  Intron number 2 from transcript cassava4.1_016427m (locus cassava4.1_016427m.g) derived from phytozome v7.0 (chr-ID scaffold11581; pos 597039 to 597868 reverse strand)
acaaggctcgccgcttgggctacaaggccaagcaggtatgataaggatgtgtcctttagtcttgcaagcttcaagcaactaatttgattcaatgggaggatattcatctttgatgtttattatgcttgttagtgaagtgtttttctttctgttcaccatgaagtgtaaagggagatgcttgtgaacattgtgatttcctgagcttatccaagttctgtctgctaatttctaggcaacagtgattttgttttcgattattcagttcttgctggttaagtggtgtcttgattcatatttattcctcctaggtggggtgtacatgtatgatgataagatacttcctgagaccagctatgtcaacacagtccatcatctgaccaaagtggattctttttctggtcgaattcatttttgtctcgatccgatgcattcttatttggtagttttgttagtgataatttctcgttatgttgggattggtaaaaatgttatcgagttttatttgcatagtgttaaatctctattatgatttgttaatcatgttcagtttgtaactttgcctgtttgcatgactgtacagtcaacgacatagaatatgttgattttttacacaataaaacatgatagtggtattttactttcttatttgtcataattcatataaatcattgttcaacaaagttatagaacattttgactcctaaatttgctctttttggtcttcctatccttgttctgttgatttctgtgttgcattgcatgggtcacatgtgcgtgcatcatggtcttctgtttgcactaattgtggctaagtaaattcctccagggct

SEQ ID NO: 45299 - DNA, 1017 bp, Manihot esculenta
  Intron number 1 from transcript cassava4.1_010126m (locus cassava4.1_010148m.g) derived from phytozome v7.0 (chr-ID scaffold04251; pos 474162 to 475178)
ttttcttcttctcctattggtagagtttggccaaggtctgttctctcctctctgcttcactctggtttcacttctctttctttttgcatatttttctcacttcaccctcgctttctgggattttctcgttatactgtttagtttcgtttgtggaattttattgtcatttggttctgatagtttggtttttgtaatcttcattcctcgtgtgaaaatgggtttgaattctttgtttgagtcgcatgttattgcttgttatctattgatggtttcttggaagggggaatccatcagactggtttttttagtttctgccttttctcccctatctgttttgtcatttgtaggatttgattgcatgtagttgtgaatttgtggtattttgtcgataagatttgaacataattcacaagcttataacattgttttcatgaggtgtaacctgtgaagtgaagccatgaactcaaccaggctactatttattattcgagtcgaattagatttttaattgaacataatctattaagcgtccactcaattaagaaacaggagaatagttgttggagaattctcgaatctttcatttgccacctttattcctcttcaaatgacagctaaagcagcttctcgtgttcaattaccggggacttttgagtttttaccttctgggtgttagtaatcattcctgttgctggaatgacaaaaacaatttttaattttttgaatctcatgcatgttttattttcttatatagcgccagttgtattattattactatcctttttcttctcaactctcttcatggctatgatcttttattcgaagtttatttttctttttctcttcctttttctttttcttcccatcttgcagtgcaactgagaattgaaatttcaccattcacaaatgctctgtttgttgatatttttgagaaatccattatgtgtgagaaacctaataatctcatgctgaaccttttcagaatattattttaaggtacaaataatcaatccagaa

SEQ ID NO: 45300 - DNA, 373 bp, Manihot esculenta
  Intron number 3 from transcript cassava4.1_006538m (locus cassava4.1_006538m.g) derived from phytozome v7.0 (chr-ID scaffold03560; pos 39620 to 39992 reverse strand)
cttcaaggaccaagttccctcaaactactggtaacatatcattcatcaatttttgtggtgtgaaattcttctccggtgaccatgtgcagatattagagatcaaaatttatcttttctgggacctgtaatttacaaaaactttcttttctttgggaagattttctaactcttgaaatatctctttacgtagaataatggggtcagacttgaaggattgctggatttctttttctttgctaataaaaatgccttaacttttatgctgtggattttaagtttccggcagtagttctgtgaagacttacttattttatgatgtttcttttgtgtacttgcagttaaatcaactgaagctgaaaaggaattggagcaa

SEQ ID NO: 45301 - DNA, 849 bp, Manihot esculenta
  Intron number 2 from transcript cassava4.1_033949m (locus cassava4.1_033949m.g) derived from phytozome v7.0 (chr-ID scaffold07859; pos 50043 to 50891 reverse strand)
agttcttcaaggtattgcatttacagctttattgtttccataaacagtagtagcataataaaaatttgttagtatcagaagggataaactactcttgaccttacctttggaataataaagttctttgtaagtatgaatattttatcattgcatgaacaaacatatattcttccggagtcaggcgcttgatgaaatttaaaataattagaatcaggtagcagataaactaaaaaaagttaataatgcaatttcatgtgattgatgttgaggggaaaaaaattgtttgacattctctttgacctattccctgtgaaggatgcttgaggcctgctcctttatctgtcaggtcaggtctgtctactggacctgccatgccataatggcatgcctgattgacattagctttctgctatgctagttagcttggattcacaaacttttgcctgctgtttgggttgcttcatcaagtgaagtagtgctatggtcatgccttcaacatggcatgaagatgtgataatattaacttagatcaaggcaaagtttgttttttgcctgttgaaataattttgtatgcatttgaaatgtgatctcttcttgttgtgtcaaaaattatttaatttgtgtcatgttattgaaaattgtattttggcattttaaattttttttcctggcttgtggtgtactcatgttaaattaacacatcttttttgctgaatgcctgagctctgcaatgcttatcagggatatgtggttcttaatttcttatagttgttgtccttttgataatgctttttaattggaaaaacaagcacatttctttaatttatatactctattgtttttgcagat

SEQ ID NO: 45302 - DNA, 587 bp, Manihot esculenta
  Intron number 1 from transcript cassava4.1_008233m (locus cassava4.1_008233m.g) derived from phytozome v7.0 (chr-ID scaffold03363; pos 221641 to 222227)
ggggtaattgtcttctttgttccgttgatttgctcttcgttttgcttgcttgcttttagaactaaagggaatgaagatgaaacccgttgaattgaacacccctcgatttggtagatggattaattattgctggtaaatggtggaattagaaaatgtggaaattcatgatagaacacttcagctttttatctgtatcgcctttccagttgtcttattttgttcccttcccacttgcataggataattatgcttagaattgattttgttggttttatgtttgcattaattttatggtaactggataaagctgtggatttagagaaattcctgctgaaattgtacctggatcatttcaagtgggcatattctgtttatgttctttgtggattgttagtattaagatggtcatcaactgaaatagctcatataggcttctttgggcagaggtcactgtttctctggtctttctgctataagagtttattacttagaacttctatacctctctggctttgagtgtctatctccctttatattttgattagcttgtattataaattgttttaatggtgtttccagggagcagg

SEQ ID NO: 45303 - DNA, 614 bp, Manihot esculenta
  Intron number 2 from transcript cassava4.1_017884m (locus cassava4.1_017884m.g) derived from phytozome v7.0 (chr-ID scaffold02525; pos 29716 to 30329)
cacagaagggcctggcactgtaatgctttcttgttccctatgttttagttgtttttacatttaatttgatctaaatcttccctttggtcctttctctgaagttttgtttcactagatcacataattataaattagtttcccatttataacataaattagtccatgcacagaagttttgcttgcttagtcctttagccatattatgggcctcctttaatgctccactctacctctatctttggattcctaattatggctaccatctaaggtatttggtgttttcaatttcttagtgctttaggcgacacccaatacttattagttttgagtccatgaacagcgtggtaaatgagtttagaggcagctgaagcttcctggccctactataaatgtcaccactaacaacaatgtcgtcatcaacgttagaaacaaattggacgagagtcttcttatgcattggtaggactagcactttattttctccattgcaatcttgccgccaatttttacttcaagtgtgaatattattagagatttactgttaatgtatattgatttccaagatttgaacttaatgggtctaataggtctggagttcaacagagaagaagttc

SEQ ID NO: 45304 - DNA, 934 bp, Manihot esculenta
  Intron number 1 from transcript cassava4.1_028325m (locus cassava4.1_028325m.g) derived from phytozome v7.0 (chr-ID scaffold02477; pos 344408 to 345341 reverse strand)
attttgcagcagctcaaagaaaacggtaagcattgttatgtttttatccagtttttgttcctgcttttacatatttatacagcaagttctgttagataattggtgcatttggggatctttacttggacagcaacatttcttccttcattcctttcatttaacttgttttttatgcaagatttttcttatgcttgtcttaaatttatttacagtccagataacctgagttgactaaatattgtggagttccatgttactctcattggatttagagtttacctataggaaagactaatcaattagcctcctgcaaatacatctagggtgattggattgcaaaatttcaacccaaatcacattttggatcaccagagaatcaaggtctgggaaagaagttggtgtgatcattccttcaatttcatcttaggttgctcttcatccatctcaagtgacattttgttaggggttttccttttcattttccagaagttaccacgatatagtccagacagagttgctaagtgagaggttgttttgttgagattatgaggtcttgccttcgctggtgcccttgcactagttatgaatgtacgagtaaggacaagggaagcagatgttacaaagaaagaaagtagagaactttatgggtggaacggaaaattgatggtacaagaggacaatatttatgatccgtcatttctatatgcctttgatgtgttttttccttctgttattatgttatattctgcagataaaatttattcaaaggatttatggcatctacagttgccttgtttctccacaacatttcttcccactggtatatttatttatccccagtttctagtctgagtgctgtacagcatgcaatgaccttgtctattgtgtgacactgacaggccgtcatactcctttaaccccttcgccgaggtct

SEQ ID NO: 45305 - DNA, 723 bp, Manihot esculenta
  Intron number 1 from transcript cassava4.1_028028m (locus cassava4.1_028028m.g) derived from phytozome v7.0 (chr-ID scaffold10156; pos 41825 to 42547)
gtaaggaaaaaaaagtcaattttatagttaaaagttttggtgatagcattgacagatagaagattgataggaaaaagaggaacatgaagtacggaagatagcttaatattaggagtacaaacaacaaaacctattccatatataagggtaaatttgttgaaagggccaaaaggaaatattactttgaatttaatcactagagccacaaatttttaatgctttcaggaattgcttgctcaaacatgaagttgatctaaactgctgcattttctggggaacacatcaaatttcactctttatgttgacgtatattggacttgtgctcaattagtgtgtttagagcatgttcagagacaagtatagttcttcaaatcagtgttattttgagaaacttgaggagattttccaccatgtctgagcaacttaaaccattatgagtgttttttgatattttttgaccatgtgacaaacattagtcatattataatacagggtttttgttttctctttgtttatgggtcagctttgaattttaatcctgatttgtttctatgtaatgttgtgctggtatatttctacttcaaaccaccctctgggtgtagcttttccacaggcccactgcttgaagtttttagtctgctgcgtatacttctagtattgttaaaatataatcgcacatttttggcagatttgtcgtgtggaggacctccttgtgagtggcat

SEQ ID NO: 45306 - DNA, 843 bp, Manihot esculenta
  Intron number 1 from transcript cassava4.1_007783m (locus cassava4.1_007783m.g) derived from phytozome v7.0 (chr-ID scaffold02431; pos 228655 to 229497 reverse strand)
ggttggggttcgttcatcctctggttagttatttataacatttgggtccttttaagctttggtacaagttaattggtctaattgaaatgatggacttgtgcactaagtttaccagttaatgaatctatgaattttgtttcttggtggttgatctttggctttgccttagaatatcaaggagaagtctgtggtaggttggttggtttattagtctcattgcatctttgagggtttatgacattgagcttgtgaatacctgaagaattactcttttgatgaatggccaagggaggtggtttatttgagctgtaacataagaagcagtcttcttcatacacctccttttacacacatgcacacagcgtaattgctattttactaacttttgtggctaccagctctatgcgaaatcagtgtggttaccatatcaaattgaattacctgagacacttacatcagttatggtcagcagttgccgctagtcaactatcaatcagaatagatattcatgtgttctaatatatgtgaagtgtaaactgcttcattggtatattattgtgatttattatttatcaactcttgtttcatatgttttaaatgttatactttctctttggttatatagttgtcaataggatttgtcttaccttcacgaagtgatttgcgattaagttctgaatttattgtttgttcattcaacttaagcaactttgtgctcatctcttgctgtatcagttctgtttatgcttccctgaagggaggaaaagatgcataattttttctaattgctgttatttgatgtatgcaggaaaagctctctgttttggattttgtggatagaat

SEQ ID NO: 45307 - DNA, 824 bp, Manihot esculenta
  Intron number 1 from transcript cassava4.1_017480m (locus cassava4.1_017480m.g) derived from phytozome v7.0 (chr-ID scaffold12525; pos 157106 to 157929 reverse strand)
ttccgagttcttacacggccgacccagtttccaaggttagcttttgaatttatttttcccgtgcttctgtccatccgttggttatcctttctgtttgtttgatgtttaccgacaaatcgcgggaaatttgagcgcaaatttgtttgtgcagatattagaagctctctatttaattgtttggatttttattagaagcagcgtaatatgagcttgattgttggctttcatttgttagggatgatttatggtcttggatactttggtatgtggagttagggtttgcagaattctctttctgtgaaacccaactttttatattgacttgtgcgggttgtttctgcttatggttcactaacttaaagcatcattgaacataaaatctgttacattatggtctccataattgagaaacgttcttgtgaagtccttcaaaatttatcacaaacgttatacaaaagtttgtgtctttagccttcaatcttaacaaatggaaagggacaacagcatcataactatccccacttattgcatagcagccgtcaatcagatcagaagcttttcatggatattctacatctttatactttataatctagcttgatttgtccatagatccatactgtaggttattgctttgtgctgacgtttattttaacaacccaatttaattggtgtcctgttctcattaattcttatcacttggttggtttggattttagtttaagagatgtttctggtaggaaataaagcatggccttgttttggtttcacatatgaaatttgtaatgtggatcttgatgttggatgtggatcctgtttaaaga

SEQ ID NO: 45308 - DNA, 867 bp, Manihot esculenta
  Intron number 1 from transcript cassava4.1_012275m (locus cassava4.1_012275m.g) derived from phytozome v7.0 (chr-ID scaffold12262; pos 217300 to 218166 reverse strand)
tcatcttgcgtgaggttcgcggccattctgccgaggtatctctttctctttcattttctccaactaatgatacccatttcctcatttttgtttctctcatcaacattgcataattttacttgcaactaatgctgcttgattcaggataagttgatgtgtatgaatttgttcttatgctgagatctgtgccaatttattgggattaggattaatttttggcgtgtcggcaattcgatttcagttggcttctattggtgattaatgaatccagccccggagttttatatttttctttcctgtttctcattttattaaatagtagatttgggtttgttgggtatatgtagaaacaggaaacttggatacacttgagatctctttcatggattttgagtgcttagtgaattgtaaaaggctgttaggagataccactctattgtaattttagcacgtgtctggatacccgtgcacaaacacacacacactcagctgaatctcaatctagttgtagtctgctcaatttagttgtatatttttcagaatggtttgtaaatgttaactccttcttgatcactttgttttctcctttataatcgttggtctatgctgctgttgtttggatgtgcttcatggtgtgtttgtccagaccatctttattgccactctcatgacttttctttgacattctaatatcttctattttattgctaggcaaatcataagtgcttcgcttattttatctatgttcatgtgtttttctctctcctaatattgaatgaaaaaggatgtggagatctcattatgaaagcatattggtcagggggcttatggttgttataccttttgtttgtcaacaggtctacttgt

SEQ ID NO: 45309 - DNA, 429 bp, Manihot esculenta
  Intron number 2 from transcript cassava4.1_001824m (locus cassava4.1_001824m.g) derived from phytozome v7.0 (chr-ID scaffold05875; pos 456840 to 457268)
ggccctcaaagtagtggtatgcattcttcctttttctccattaatttgttgatctctagtttcctgtgtttccagtggtgagctttgtgctgtgatctatattttacataatcttgttgtgctataagttagaatagtatgaaatgtgcagcatacaaacacaaggttttgctttgaaatcagtcacctggacatatattcttgttaacaggtggcaaaagacattgctgacatctttaaatatgaataatgcatttccttttgagctcttctttccactctttttcttctagtttagttgagcttcagctttatcatgtttttcttccaactcttgtttgtttaaaaattacaatgtctaaagagttaatattattttctctggactgaacagggaaaagcactctgctaaaccatttgtttggtacc

SEQ ID NO: 45310 - DNA, 1013 bp, Manihot esculenta
  Intron number 3 from transcript cassava4.1_011103m (locus cassava4.1_011103m.g) derived from phytozome v7.0 (chr-ID scaffold12455; pos 263306 to 264318 reverse strand)
tgtctttcttcttctcaaattttgtatgtctctcgatttgctgaaccgaattttattcaactacatttcatggtttcaaaacgtctgctatctaattaattctattatataaaattgtttgtttaattattttttctatattcctgcatggtaaagcagcatgaatctgaaactaactatgcatgaatgaaaattttattaggcttccatcatttttttggtcatcaatcaacatgtaaaatgctcatgatattagaccagagctgcatgtgatagttaatgatgcaggggaactgatgccttgacctctgctcattgctgtatttgattaccttgctaaaatttgtcaccacccttgtctgattctaccctgtaacatccataaggaataataatttttgcaagcattaggcatatgagattgattataagcttaataactatgcatcttaagtggcttaaaatccaaattggtgtggacttacttattagcttagacttcatttggaataataaggagccaaattggtagggacttacttattagctttgacttcatttggaataataaggacttaattgtattagtactgtttcagcataaaagattatgaggcatagatttcaagaagttctgtaccctaggggttcagccaagtcatccatcaaaaccttatgtatgatgttgcagtggcaaagaaagaaaagtgaaaagagaatctttctgaatatatacacatacataactatattttaccatgactttctagtttcttttttattaaaatttttttattacttggttgtttttaagtgttgtatagcatggtaccttggttaggcctttatatcatctgcatcaagactcatacaatgaatcaaatttatgcaatgactacgttattgtttaattctttagtgaagctgaaaaatcccttcccctggagtatattttgaatagaaatatgcattttacaggtcagcttacatattgaagcaagagagtctgcccc

SEQ ID NO: 45311 - DNA, 859 bp, Manihot esculenta
  Intron number 1 from transcript cassava4.1_034198m (locus cassava4.1_034198m.g) derived from phytozome v7.0 (chr-ID scaffold08886; pos 113173 to 114031 reverse strand)
gcaccttacagacgagactctcgtcggagtttcaggtttctgatctttgatcacttagtatattttctttctttgtgctatacaagtgggcaatagtttccaaagaaaagtcatcaaatttgcttctggagatttttgttgtgttggattactgtcttgtttatattgagtgattaggaattttttaatccttaaatgtgaatctggatattcaattatgttctaaatgaatgctggtaattccatagaaccattgaattttactcatattgattggtcatggctagtaagttgcatcaggaaggtcaatgaggctattgcttcatataaattttgatagtatctgttctagaacactgaagtggaccttgtactgcttttggaatgtggttgaaggtttgtttctatttatgagtgggaggtgatctgctttgttttaattttcttggtttgttaatatatgggttagtagtttagcaagtttcttcttttcctgtggtatcagcaacaccaaaggaagaagatgtctttttattgcagctttttgttgtgaggaaaaaggatgatttgagcaatgtcaatacatgctaggaatatgaagtgaaaaatttattggtttatctatttttcttttaattttcttttctttctctcacaagacacaagcacatggtgacagaaggcaggaacattccaccgtcttctctttattcttcttatgtgatgctttttccaaagttactgatattcagaactattaattcaatggtctagacttttgttacttattcacaatattgaggttgtgttgctcttcttaccagccaaagcaatttgtgcaagaactgcaaacgacctg

SEQ ID NO: 45312 - DNA, 927 bp, Manihot esculenta
  Intron number 2 from transcript cassava4.1_005802m (locus cassava4.1_005802m.g) derived from phytozome v7.0 (chr-ID scaffold04137; pos 132551 to 133477)
ctcgtggcgagctctgcatcatctctgaggaacctgtgagcaaaataattatttccaatctcttttctcttttacattaacttgatgtattgggttcgttaatgattgtgtgtttcattttgctgctcttatgattgagtaattgttccattgatcagcagttcgaatgtgcttgttttttcaagttagattgcaaataagatgaaactaaaacagaatattgcttagagtattacgaaatccagccattttccatttctcttgaattttttgtgagcctcccttttgtcttttttttttctgtttactttgaaaattcaaattgattacaagtgttacctggcttgttacttcaattaagggttatactactttgatagtttgattcaactgcagattatttagataaactttttttttgttgttgttatattttcgtttgagtgtcctaatggaatataatacagtggggacatttgtttggggaaccaaaatatgctatgagtataacatccggtccaaattggctatggggtatagtaatttggagtctattgttggttgttttggcaagtgacaatagctgcctcgcatcgtgttatcatactcttatgaaggaaaataagttggattaattatctggtcctggagatgcaattgtctgatttatgtttggataataaaaaataatgtgcattggtattattcttcaactttagcatatgcagtggaaattcatttacatgagaggcaaataatgagatggaaccttactgcaaggctcacatgaatttgttatacttatataaatttcgttgcaagctttctgagttatggatgtgtatctaggaaaagcaagagatgttttgaacttccattaatttcaaattcttcattttctattggatttctttcaggttcctccat

SEQ ID NO: 45313 - DNA, 473 bp, Manihot esculenta
  Intron number 1 from transcript cassava4.1_018600m (locus cassava4.1_018600m.g) derived from phytozome v7.0 (chr-ID scaffold06278; pos 661121 to 661593)
ttacttctgagagttttgctatcttctgttttaaggtatctggctttgcgaatgatctttgattggaaaatatcttttctttttctttgatgatcacgtagatgtggttgattgtttctctggtatgatcttctatttagctctgttgtttgatcagttgcttgatggactggtgttgccagaaattcgtatttggttggaaatcgatatccatcaatgccctaaagcttagtgatttgtttttttttttgaaaatttcctgtcgtgttgtagtctatgttcgtctctttatgatcaaggatgagttgtttaatcagtgctattttctgtggtttacttggttatgaaattgattgggggttttatttgagcatattctgttaatcgtgctatttattgttgttttaattttgtgatgattggaactcttttttgttttcagtaatcgttacagttctcatcaagcaaaatac

SEQ ID NO: 45314 - DNA, 589 bp, Manihot esculenta
  Intron number 1 from transcript cassava4.1_023292m (locus cassava4.1_023292m.g) derived from phytozome v7.0 (chr-ID scaffold05596; pos 84851 to 85439 reverse strand)
ggttgaagcctgtgcaccggaggatattgtgagtaatagttgggggctaagtttttgttttctctaatgtgactttttagtgggtgagagaaactagtttttttttactactattggttttacttcaaattttctactcttttatgtccttatccttctcctttcttgcttttcgctcctaatggctgaagtttagaagaaaacagactgtggtttaggacttcaattagtatttgttgagttattcttgttttcttgccttctttttgcactgtgtggttgcctagaaaatatgggcaacgggagcccctttaaaagttgctttgcatggttctggtttatactttgatgttttaagcattcaacctgtaatattctgattattaattttatatcctttccctgtctttttcttttaattgactattagcttttgcagccagctgagattgttttagaatgattaattgatgttgcttttatatctgcataggatggtatgcatgtgtattgcctgcagtttcataattgcgttgtgaaaacaaatatgtaattagtcccatctcaaaattttgactacagatttgca

SEQ ID NO: 45315 - DNA, 939 bp, Manihot esculenta
  Intron number 2 from transcript cassava4.1_021140m (locus cassava4.1_021140m.g) derived from phytozome v7.0 (chr-ID scaffold09478; pos 11345 to 12283 reverse strand)
tcatttctcagatcaaaaagcagtaggtggaagaagtatgaataaaatttcacttaattctctgagtttacatgtaagttgagatcatttacttcctattagctggttaattaatataataaataaaattgattaattatttgttattattatacagtagcataatttttatctatttttttatttattttaaaattattatccacttttctttttaaattataataatatataaataaactattataactctatttaattttatcatattttcaaaataatttctcattaaatattattttttaaaataaatattcaaaatattacttaatatttaataaaaattaatgtattttaaatgaatataattaaaagattaataaaaaaatctttttcataaaaaaaataaaatgaataaaaattattaaataaaaatattataatattaataaattttaaattcatttaatttttaatacaataatagtttttcttttagaaatttacactatatttatagaacttttagaaaaaaaaaaaaggtaatatatatattgttattataggagaaaaataaaaaaaaattataattcacaaaacatcaactaagaaaaattcttactcacacttggatatgtacacttgtataataaataggttatacacctaccatttaaatttaaattaataactttttattgactagatgtgcataaatcaagttgtatataagaagtttctgtcaattatctccattaacaggaaagtttttgcgaagaaaatgagttagcagtatttgattcaaattgaaaaaattaatcaaattaaattaatttaaaattttaatttaatttaatttttttaaaagaaattaattatttcaattcagtttgattttaataagaaaaattaataaaatcgaagcgattagtgtatttt

SEQ ID NO: 45316 - DNA, 244 bp, Manihot esculenta
  Intron number 2 from transcript cassava4.1_009445m (locus cassava4.1_009445m.g) derived from phytozome v7.0 (chr-ID scaffold00952; pos 155988 to 156231)
tccctggtaacctttctgctgtttcttcttttcttttaataatactaacacttggaaattgaacgccttattatcaggattacagcgtattttgattttaaatttccttgtatcttcgaaaaactaaccagttaccttattatcctcacaagtcgttgtcttcaatttaagcttttcatgaatcttcaagtggataattaagattctacttattgtaggtcctgaagtggatcgcttggcagct

SEQ ID NO: 45317 - DNA, 336 bp, Manihot esculenta
  Intron number 2 from transcript cassava4.1_022363m (locus cassava4.1_022363m.g) derived from phytozome v7.0 (chr-ID scaffold04324; pos 458155 to 458490 reverse strand)
gatccttaagatctaaattacacggtgagtcccatatcctttcttttacttttatgacatgaataatcttgcaaattacaaatgctattgtaggaagtggggatgttttggattggaaaaaaagaatgaagatcgctatagcttctgcaaaatgattggaatatttacatgaacactgtgagtatatactactacatattcttacttgcaggattttaacctttgagtgtgaatttatttatttttgtttatattgataatttcttttctctcaaatatttatattttatattattttcaggtaaacctaaaattattcatttagatatcaagccg

SEQ ID NO: 45318 - DNA, 463 bp, Manihot esculenta
  Intron number 2 from transcript cassava4.1_023016m (locus cassava4.1_023016m.g) derived from phytozome v7.0 (chr-ID scaffold03410; pos 43170 to 43632)
gcacaaccatctaaggcctgatatcaaggttttctttttcttctttattagctattttatgtatgccatcttttcgatttcaatcaaagatatccagaatgcaactgtttaaaaatttttccatttaactacattcacacatagtttttctttagaatcatgcatgtagttgtgctcctcattacatgcaatatatgggttaattataatcatatagaagtgtttgtttcttgtttgaagttattccccaatcatattctctgcagcttttagacccaaaattcaagtagaaacaaaatctgttaggttaaagaataatgggtttatatctccaacaagaatcacgcatgcatgacatatcaaaatgacttggcatgtagagattggcatatagaataatgttgatgccagttcatttttctttgatatttgtttattttgcagaaggatatttggagtgaag

SEQ ID NO: 45319 - DNA, 406 bp, Manihot esculenta
  Intron number 4 from transcript cassava4.1_019329m (locus cassava4.1_019329m.g) derived from phytozome v7.0 (chr-ID scaffold04251; pos 65495 to 65900 reverse strand)
ctgtaagttgtgcagttcttgtaaccaactgaattctatttcctcacaagttattacattttgttttctatggaagataaatttatgttgcattctgtgtaaatagattttctttgtgcacaatttatcgtcataattggccatttgaatttattaggaggaatttttcagattatttttgttaatgaaattaaagctttgttaattgatttaggtttcaaagttaagatacgactttatttaatgtacttgccaatggtccagtgcttagaatgtttagttgttcagaatttgtttctacctaatatgacgtggtggaaaatttacccggtaaagtgtcttcatgaattcacatttgcttcttctctgttatgttttgaattcatatttacgtccttgcagcaat

SEQ ID NO: 45320 - DNA, 503 bp, Manihot esculenta
  Intron number 4 from transcript cassava4.1_012960m (locus cassava4.1_012960m.g) derived from phytozome v7.0 (chr-ID scaffold08301; pos 87855 to 88357 reverse strand)
gcatcaaggggattgtcttcttttgcttttggcaggtaaatatctaccctgctttcttgcttgtccttctgcatcttcctgggagaggttttgggaagagcttcaagggcatataaagagccctctaacagaacacaggggaaaaaggttcataaataatcaacctcacacccaccattcactgtactggtgcttaaattagttttgagttgggttgtttaaccaaagttccagaatttaatgaagtttggtaacttgttctgcgaagcaagcctaagttacagttccttgtgtagttctgtgcacctcagaaattatgaaagctggataatcatgatttatttgcaatctgctgaaacttcctttccaggatttgatctttcccaattatttgtattgttgtccatttcatttgtttggaaaatatgctatgtttcttgtttacaaatgccattccattatgtgcagggagtggtgcttgacatactagttggcttgggtat

SEQ ID NO: 45321 - DNA, 855 bp, Manihot esculenta
  Intron number 1 from transcript cassava4.1_012960m (locus cassava4.1_012960m.g) derived from phytozome v7.0 (chr-ID scaffold08301; pos 89194 to 90048 reverse strand)
ccgttttctcgttcactctaccttgatttgatccggtaagtttcatagtttaggggaatatgattggtgaccttctgcaaagttcttgtttttctggttctctaatctaaagcacaagaagtggaatttttttaccctgttcatgaacaaaagcgctcaagacatctttgtatttaggtgtaccatctgggacttgaactttgtgctgatagcagtgagcattcaaattgataggagggatattctgttgctagaagtacttttcttttacataatggactgcaatttcaattttcacatgtttcatttcgttctctattggactcatagctgtgatacttgatccattgatgatgttcaacttcaatattagcaatagcttttgcaacatcatatcttttgaatcgtaattatatggtataagttaatggatatgtattcatggggggatttcaaagcagtggcttaatgtgtaactttattttttgagctttttttggtgcatcttttgctttttgtagatcggagtaagataataaacatcagtaaactaaattctgcagttgcagtcttgcagaggcctgtttaggtgttttctcttccaaatgtgtgcctgtatattgctcaatttgtaattccttcgattgaccactgatcttatttaatcatgatgatttgttaatactgtttaacagagtcttctcatcttgctgttcaataatgtatataacctctttgaacaaacgtgtgcatgtatattgctcaatttgtaattcctttgttgaccactgatctatttagtcctgatggtttttaatgctgcttgacagagacttctcagcttgctgttcaata

SEQ ID NO: 45322 - DNA, 661 bp, Manihot esculenta
  Intron number 3 from transcript cassava4.1_014041m (locus cassava4.1_014041m.g) derived from phytozome v7.0 (chr-ID scaffold00321; pos 18931 to 19591 reverse strand)
acctcgtaagttttcttcatgctaaggcctttaatcagttgaaattactaaatatttatggtgtgagattgtgctgggagaaattggacattttccatgtactcctaggttatgctgtagtccctgttagaaaagtgtttatttattgacaaatgttttgaaatatgcatcttaggtttgagagctaggttaatgcatattgagcagtatctttgagtggttgagtacagtgttatattgtgaggtttgaatttacaattgttgaaattggaaaagagcatttaatgcctattgatatgcagattttcttttggagcttcttttttcaatgaaaacccctgccaccgatgacacactattatatctctctagtcccctactttttcagttttatcatgttccttggttctaaacatgtcctctctggtgctttggtcttaccaggcccttaacatatataaaaccaattaaatgtgacagtgttctgttagtaaaagaacaattattgttggcttactgcaatgtaaaccagagcctgttttgttggttcgctttgttttacagcttaactgtttgcaggctttaatgaatctactatagctaacttataatcattgtcttttttatgtcatgcagatagacagccacataaaacgtctgg

SEQ ID NO: 45323 - DNA, 299 bp, Manihot esculenta
  Intron number 1 from transcript cassava4.1_028435m (locus cassava4.1_028435m.g) derived from phytozome v7.0 (chr-ID scaffold05019; pos 172091 to 172389)
cacattaccaaggtgaagtttttgcttttttttttttcaaaaaagtatcaattttgggaagattctctctcattggaatttgattttacatcatggtcgcttagtagttagctcacacacactatgtgcacggattgctcaactcctctcgtttatcaatgtttctaaaggagatgagaaaatcccttgtctttaaagagaaaaaaaaattattagagaactgcttaattaagtttggtatttgatgatgcaggttcaatggtaaaaaattcttatgaaaaatgagggggaagagtgca

SEQ ID NO: 45324 - DNA, 716 bp, Manihot esculenta
  Intron number 2 from transcript cassava4.1_011171m (locus cassava4.1_011171m.g) derived from phytozome v7.0 (chr-ID scaffold09880; pos 38461 to 39176 reverse strand)
gctcaaggactaggaaggtatgccttttaatcttttccctcttccagtttgtattctgttgctctcacttcatctactttgagactagctatatggttttattttagaggggaggttttgatcttgaaaggctattttagcaaggagtataagatatacatgttcatcttaagtgtaccttctatattagcttcagaattatgtgtgctgtgcatagcaaatgtaagttttgcctgtatgaaaatcttgtttgtgctgataattaggttttgcctttttttccctttattttttttcgttttgaaggtttgagttttgttactagcaactaatggatcaattccccttggtggataaagtgattggatgaaccatttttagtattttctaaagatctttgatcattgccctctaatatctctacattgatagacttaaatatcagacaattgatctctttacgcacaagctaacaaggaagcaagacttgattgattacaatttccatgactagttgcttattcatctttctcttgtaatccttcaattcatctttccacttgtcatgacttgagctaatgtagccaaacttttgtttatcactgtaatcatgctatcggaattttattcccaccctatgttgtgtttttatatctagttgttgattagatccatgatggcgttattcaagcaggggcagacagttgttcttgtag

SEQ ID NO: 45325 - DNA, 936 bp, Manihot esculenta
  Intron number 2 from transcript cassava4.1_003839m (locus cassava4.1_003839m.g) derived from phytozome v7.0 (chr-ID scaffold10963; pos 728637 to 729572 reverse strand)
caagcgcaagctgaaactgtgaggcacacgtttccactctgattattttactaaaagcttgtgacgcctccagtatatctacatagctgaggggtagatggttggtcatgaaattgaatggtcatcattccaaaacatgtccctttcccccctttttacttgcttccaaggaaatttagatatgtattttggtatccttttggggtgtatgttgtgcttgatttgaaatatttaatcaaatgtctggtccgtcattaaatttattgcacattaacgtgtcatggactcatggcatctctcatattttcacttttctatcatctagcctttcctttttagtttcagttattagttgatatttgagttgtttgttagctttttctgccctgttagtggtacttcactgttgttcaggtagttataataactggaaggtgcgatggtatctagagttgggtaattctaaggaatgcattttttctgtgctcccttgggatgcttagtaaccatggttcatctcttttccctctacaagtacaagcatacaattactctgcctgatcttctttgctgaaggctcatgttctcttctcctattggagtgtgaaaattattgagcattacgaattttgcttttgcatactccatccctggtgttctgagtctcatggaattcctattgatgatacacctgtttattagattttgcaccttggcaggagaggcaaagggtaatatatgatgaacagaaaaagttggctcagcatcaggcacaaactaaatcccagatggctcgttatgaggatgaactggcaagaaaaaggatgcaggcatgtgattcctcattttgagttgaatgaaattatttttagtgtaggagtctaattggttaatgttataggctgataacgaataccaaagagcaaggaatcagga

SEQ ID NO: 45326 - DNA, 953 bp, Manihot esculenta
  Intron number 1 from transcript cassava4.1_032998m (locus cassava4.1_032998m.g) derived from phytozome v7.0 (chr-ID scaffold10963; pos 199354 to 200306)
gctcctagcaagctcaattccactgtattcatctttctctatctatatacctgcatgctgcttttgtgcttttctaatttctgcacttattgctggcctaccgatttttatgcttcatttgattgtaatgttagtgatcatgatttcgatctgttcgaatgctttcaccacctgagactgttgccagttagtgtcagttggggcgtcttcttcttctttttgaatgaataatgtgtttggattgttaaatcaacctcttttttgcaattacaaagacagtgccatacaagtggagaaggtgtcttttttgtgacttggaaccacagtttgctggagtaattgtttgaacttttcaaaacttttgttggatcataattgttgggacggtgaagtggcaaagttagatgctttgataattttagggtcagattttggtttccaagcgattctggttgtgaaacatgtttggagtatccgagacatgtagttttttcctagagatcaggatgaagaaattgtttattcttgcatttaaaattcttcaaatgctatgaactttcctcgtgttttataattccactaagtcgatatgcaaatgattgaaaggttaataggtcatcttttgagcttcaggttctgaatttggtttgacaattacaatttcgtttagaatttcccatgtattttatactatgaatcatgaatatataagtatcataattgttcttttattgcttctcaatcttgcaagaataatatgttgtttgattttcttacatttccccaccctacttcccttctcctggtaactttatttagtattcttcttcctctatttcctgcttgccagtaataccttgcagataaaactgcatgctttaagtataatcttggtgaaatgactagcatattgtgataattcttgctttctgttttataggattcttgtggaa

SEQ ID NO: 45327 - DNA, 770 bp, Manihot esculenta
  Intron number 1 from transcript cassava4.1_026329m (locus cassava4.1_026329m.g) derived from phytozome v7.0 (chr-ID scaffold11581; pos 1095748 to 1096517)
cagtctcttccaacatccagcaacctgcagtcaaggtatcaaacgataactctattctttataaatatataatcagaagaaaatttcattcaaccattgaaatttctttatattcttgttcttctttttctttagttttaattaatcttgtttttaggtggtgatactgtgatgatcaagtattcaaatacattctttttagggaaaattactaggtccccattgtagggcattagttagtgttcttggttttgaaaaatacacctctcataattttgaaatttactaattagtcattctattaattttaataattaaatgttaaataaatactgaaagaataaatagcatataattttacaaaactaaaagatcaactaataactttttttttgttcttaacggttaacactaacaaaaaaaattaattaataaaccttttaatatattttaaaaatcgagagatcaattaataaatttcttatataattacctttctttttaatgctatgctttgaaaaatttggtatgtaataatctgcaattatgatatgattttgtcgcgtctggcacagcttgaatccttgattgcagtagttgaaacaccctaatgtaagaataatatcttctgtttatgctcctgtatcaaacaaatttctttcctcgttatgtaatatgcatgaaattaataaggaaccaattatcaacgaaaattaattgctggttgcctcataggctgttgctgtccaaagaaaaccaaaagataaaag

SEQ ID NO: 45328 - DNA, 480 bp, Manihot esculenta
  Intron number 2 from transcript cassava4.1_018203m (locus cassava4.1_018203m.g) derived from phytozome v7.0 (chr-ID scaffold03221; pos 202168 to 202647 reverse strand)
aggtatgctacctggtctttacatgaagattattaatttttttttctttttttgactttcagaaagtcaaagaagtccattataatagctaattaggagtactgaaccaaaaaaaaggagtactaaccaacttaaactgggaaaaagataacaaacctagtagaattcctaactaatagtagacttcctaattcggtaatgaatataacttctatgtttagcactgcatcaatattctttttcataactttttaactataaccatgaactgaggagcaagtgaaacttagggttacttctcttaagtcaaagtatgataggtagattcacagttaaattggtttcttttagcaagagacaacatataatcgtgtgtatttatgggatagtcaaaaaattcattgctaaagttatgcctttgttacattttactgattcctagcaggagttccaaaactacacggttgcacgggatacttt

SEQ ID NO: 45329 - DNA, 964 bp, Manihot esculenta
  Intron number 4 from transcript cassava4.1_033812m (locus cassava4.1_033812m.g) derived from phytozome v7.0 (chr-ID scaffold10954; pos 245907 to 246870 reverse strand)
gcttatataaataaaaggtaaggaattttctagcctattcttatacaaataaattattttggactttttgtcagacagttgtctgttttatgactttgtgccatgtggcttcacataaaattgagttttggctggctaatatttgatcatgatttgcattatttggttataagaataaggtgaaatttgatgtgacattgaatttgttcattgaaaaaaagtaatacaaaaggatttgagtaaggattgttaaattggtgagagtcaagtcaaagtatcaaacttgaggcatgtctattctaacccaaggagagctaatgcaggaatataatcgagtttacaaggggtttactttatttatataacatattgtcatcttactaactttggcaaatttacaactgttgcccagtatttgaaactctaatattattcatcccttcatccccctctctcctctttttctttttctttttcttttttctttctctttttgacttgtgaacttccttccttatttctttgcattaatattgtcagtctttttaatcagaggaaattgagctgtctgtttaatgagattggaacgaagtcagttttgtatttgtgagttattgactaatgcttcatgcagtgattcatcaagaaaagtggctgatactcattgcttttattctttgttattgtgaatatgcatattgttttctcaattgcccataataaattattcacactagtagatgtaaatttgtaccatagaatttctgaatgccagcttagagaagattctctagtttataaggcacctcctaatgaatgctggtattaacaaaatccagtgtggtcttatttgtgtcttttgctttttgtttgttttgtttattctcgaaatctacttttgcattaaatgtaacttggacattggcaatgtctagggaaaaggaacaatacaagaacccagaaa

SEQ ID NO: 45330 - DNA, 744 bp, Manihot esculenta
  Intron number 1 from transcript cassava4.1_012418m (locus cassava4.1_012418m.g) derived from phytozome v7.0 (chr-ID scaffold06906; pos 126975 to 127718 reverse strand)
aacgacttgcttacggtatatctgatttcccatatgatttctttgaccaagatgactttttgattttagtgggttgttttagatcatgattttggagttcaaccaattgtctgttattgaatttgaatttaattcttcaatttcttgcttgaattttggtctactggtgtttggagctgggttagttttttgctttacggggatttttgttcaatttgaaattttaatgaatacccatgagttctttcgaagcttccaggagacgatgagtagaatttctgatgaaatttaagtataactaattgaactagagttctcattttgattctcctaacataagattaaagtgactttagtggccaatggctgtctggatgattttaatttcaatgagtttagtggccaatggctaaattctatagaatactggggtgatctttgctctttgttctttttcctgggataaccaagtaatggagacttctagttggatttcttattaattaattgaatatatttctaaaagaactgagagaaaaaacaaggaggatccttttctcctatcctttttaacatataatgtccattgggatcacaattgttttgttgactttttttttctcatggcaatttgattgttcttgtggatccaagaactgcagtaatttattcttctctcacctccttctaaagtgggaatttattttgtcgaaatatttttttttcaggattcatttgttggtg

SEQ ID NO: 45331 - DNA, 468 bp, Manihot esculenta
  Intron number 1 from transcript cassava4.1_018833m (locus cassava4.1_018833m.g) derived from phytozome v7.0 (chr-ID scaffold05875; pos 1688336 to 1688803)
caggattggagtttggagacctttcttgaccttcggtgagctttgagtccttttagctgttgctactgcttctgatagcttcacgccttcaccagttgaagattcttagttttgcctctcgttaagtttgagtttctcattcatttgtcatattcgattttattacttatttttgctttgatttaattattgtcgacattgggttttctgttttattaacttgctctctcagggagtttggttgtctttttgtttgttgactttgggtttctggttgttgctgcggcttatgtttgtctagataagcctgaactgttattggcttcttacatgtgagattttatttgagaatttgtaatgtcccctgtgtggtgaatttgtgaggctcgtctacctctgatactgtttcttcttctgttaataccaatctaaggaacaaaaaacttctttctcaaccagtcagaagct

SEQ ID NO: 45332 - DNA, 687 bp, Manihot esculenta
  Intron number 1 from transcript cassava4.1_006310m (locus cassava4.1_006062m.g) derived from phytozome v7.0 (chr-ID scaffold06791; pos 14396 to 15082 reverse strand)
tcgtcctctcgattcgtcgatacttttcccaaaaggtactctttgaagatctccttccagttttctttgtttaggtctctgtagattttctttcttttcaataatttttttcttttttggaggggggtggttgaaaattataataattataaggtagctgagatatctgttggatttgatggctttgattcagtgttttccacctgtgtttggcggattccgggagattcttggtttggggttagatatagtggttctttagcgttttagaagtctctctgtctctctccttaggtagagattgcagagtagtttttctttttatttttttgtttgggtaattttttttatacttcatagttatttaccggctaaaatatattttcttgttttgctggtttttttaatatagttaataaattaaagttggggtattgaatttgttctttgattttgttatttttaattgtgggtgtatggggattaagttgtgtgattgataaatctagggttttgatggaggggagatattgtggggattgataaatttgtgaaggtgtttgtgaggttcttctcttgaattggtttcaatttgggtgtgaatatatattcaaccgcacagcagcgacgaaatccaccaagaaaatgagctgaagtatgggagattctcttctcacagctttgtca

SEQ ID NO: 45333 - DNA, 553 bp, Manihot esculenta
  Intron number 2 from transcript cassava4.1_024717m (locus cassava4.1_024717m.g) derived from phytozome v7.0 (chr-ID scaffold12004; pos 470362 to 470914 reverse strand)
gttttcctcgaactgtcagacaagcggtgagcagttcatatgatctgttgtttttgaaatagtcaaacgtaattcctgagctgggaatgttttattatgatcagattattaacactattgttataagcattgaattggcgagctgcagaaccaagactttacctgcatttgattgtttattcgtgataatatattggctatttatcacgcttgtttactgtgactaaaatgaattggaggtttatcataggttaataaaataagtgttgtgtagatttggtgctttcttagtttgggaacaggtgggacttgggagaggagtgaggaaaagacttactgatattgatacttgacaaaagaaaaacatctatgattgattattattatttgcttgttggcatacactgtaaaacatattttacttatcatgtgattcttcttttttccccctttcctctttggacattttcatgtttccactgcttcagtctgatgtttatattctggttatactccaggaaatattggaaggagtaacagatattgacgtggt

SEQ ID NO: 45334 - DNA, 778 bp, Manihot esculenta
  Intron number 1 from transcript cassava4.1_019815m (locus cassava4.1_019815m.g) derived from phytozome v7.0 (chr-ID scaffold07528; pos 386929 to 387706)
ctttggtactggtgctattcttggacgtcttcaaggttaagtgtagaagctatctttttccccataattttggaacatttaatttgcatcaagttttaagttagacaatagatatggaccataaatcagtatgcgcaatgcctctactatctcctttgctttctccctcctcatggaggggcacttttctctggctttacatgaagttttgtttgttttattggtgatccacctatgaggttgaatatagaaatccttgttccaacatataaggcaaatccagaatttttccttatatagaggatgaattctttggattgggattgagactaagagaatttatgtaacagtccggctaaaattgacctaaataacttttggacccacttttcctttccatttggtccaaaatagttaacccaaatcatttagtagttttgagctggctattatataactatatcaattttagaaatctatcgaagttggtctagatccccaaatctagatattcaatctcaactgagctggaattccctgataaatatatattcaagatcaagaagaagaaaattctgcagtgattggctttgtgggtgcacattgagtggctttcaacttgatggcattaggcaatgaaaatcttaaatcgtcatcttttacttatctgtatcttcatctttttttatctctttggctattatagttaaaaaatattagttttctttttcttggtcttacagctggccaatttggtgccatccgttactcgatcatc

SEQ ID NO: 45335 - DNA, 597 bp, Manihot esculenta
  Intron number 3 from transcript cassava4.1_017224m (locus cassava4.1_017224m.g) derived from phytozome v7.0 (chr-ID scaffold00318; pos 273296 to 273892)
ctggcagaactaattctgataccagggatacagccgtatgtttgattctctaacatctctctttcttcttcatctttgttggagaaaatttataaaatgaaatggtaaaacataaataattgagtttaacattgaattggttataattataagtacttcaatcaacttatataaactcatagaaaaaatgaattctaatatacccaacactctttctaagactccatttattagaaattattttcatggtttgtaacccttcaaaaaattgatgactaaaaaatattttcataatcaaataaaaaaaattaagcattattttgagaatcttattaataatattaaattttatacataaatttattaatatctttgttttttattatggcaactaaacattaggaaacaatttattattttgaaaaatgtctttcatataatattttcatgtataatttattttaggctaacaaataaaggttaaacttagcattctttgcgagttcacttgaattgctctgatgtgtatgagtgagactgcccatgtttttgcctagagcaggttcgaatattaaggtcgctgtttcctccatttct

SEQ ID NO: 45336 - DNA, 916 bp, Manihot esculenta
  Intron number 2 from transcript cassava4.1_029285m (locus cassava4.1_029285m.g) derived from phytozome v7.0 (chr-ID scaffold06748; pos 422525 to 423440)
agaagtactcagacgaatctgcatatcctgtcacggtaagtaaaagagctttattgttttatccatgacggacaaagcatttacaatcaggggccaaagcaacatttatatttaggggccaaaaatatttactaacacagcatttatacatgagcaagatatatatttaataagtttaaatttagtacaattatactaagctaattacaatttaactaaaattagatttagtaaaaatttataaatttgaactcattaaattagataaattgaaatttcaggggacgactgcacctgcctgctcccatctaaagaatgagggttaaatgtagtattatattaaaataattttatattcaatctactttcaattaaaatttaaagagggcgacggtcctgcctgtctcttaggtcactggttttatctattgttgacctcagcaatgtgtacataatgctgcttatgtacatgtgatttgtttttgaagattatggaacttgaattgcgcttcagaagcagtgtttagttgttctcttttaatcatcagaatggaaaggaacattattgtgaagggcacgaaaaatttggttggcaatggttaaatgtgaaattttatagctctgaaaaagctgtggttgaaggtttaagaatattgtgaaaatggtggtgaaagaactgctaatgagtgtaaaatgcgagacttcaagatatttattaactttggattaaagatagaagaagtaatactagtagtagcatgcactaacttttgctggaaatatgtatgcctgtggttttgagcagtgagcatatctttattcattatttattccaattaaattttagaaactttaatttagttctttaattgtggttgcagagtcattcacatacaaggaactcctattttcttgt

SEQ ID NO: 45337 - DNA, 737 bp, Manihot esculenta
  Intron number 2 from transcript cassava4.1_016925m (locus cassava4.1_016925m.g) derived from phytozome v7.0 (chr-ID scaffold00318; pos 233319 to 234055)
aaaggtttaactatttctttctttctctttttctcgtcttcttcactaagatctttccaatgttttatgagcacatattatgatttccaaaaggaagtaagagttattaatctatatgaagcacgtaagcttcaactaagtgtatgcctggtttaataaagcctgaagagcaaattcctgccaatttataggctacgcatggaggccccaacggaaaaaaatcataaaaatgagtcaaagatgagcttcctcgtattgggaactagaagaagatctcgttgaactccaccataaaaaagaaaatctgcagacatcataaattttctgcagagagagtttgctacttctagtctttttgatactcttgttgagttaagtgattgtcttatgcaagtgaggcaaaatccaacaatttaggccagacgcttctctttagaaataagcaaaaagtacctttgaaatagctagatttgctttagaagtagcaaaaaggcatcattttccataataaatatagcaaaccaaactccaactctaggttaaggtggtgaatgaaacaaaccaaccagctaaattcatttcaaatattaatttaattatgagttttgatcattagtagaataattaggtattgcaaataattaatggattcctccccaagtttatttattagctaactatttttatttcttgaatatacaggagtgaagtcagtggaggtgaatagaaagcaaagc

SEQ ID NO: 45338 - DNA, 795 bp, Manihot esculenta
  Intron number 1 from transcript cassava4.1_006083m (locus cassava4.1_006083m.g) derived from phytozome v7.0 (chr-ID scaffold00467; pos 132355 to 133149)
tacagattttgggctttctgttttttataagccaggttggtttttgttcttccctttgattttgaagaaatgatggcttttgcttctcattagattggatcttggacatgggatttcttggattttgttgatgattgaccgtttgcaggattcacaacctgttggtattttgattgattaaaataatggatgatatttgggccttttcgttgcttttcttgtttgtgtttggctctttattttctttattttcctagttttgttcgagtagattacttagattcatttgcttagaggtcatgaaccttttgagtcatattcagatccaattggctaatgatcgtttggtgggatttcgatttgttcaagattgcctgtcactggttgctttctttcatttttataattttattccaactttaattaattttgattgttttctggttatgtttctctttccttttttattcctccttagaaaatgatttccttaatcaaaatttgattaaaattggtagaatttaaaatgaattctatttgattatataaaagatatcattgggagagaaatttataggatatcaaattgggaattcatttacaaataaattttacattgctaggatttctgatcaaacttaagcgataatggctgaaaatatctcgatttgtagaggtgtatcactgcaacggtgtcgtttgctgaactctcgttgattggttctttgctaagtattaactgttggttactcttgccctctgtactttttctccctgcaggtcaatatttctctg

SEQ ID NO: 45339 - DNA, 424 bp, Manihot esculenta
  Intron number 1 from transcript cassava4.1_023440m (locus cassava4.1_023440m.g) derived from phytozome v7.0 (chr-ID scaffold06582; pos 346549 to 346972 reverse strand)
agtgttggggggctagtcagcgcacttttgggtgagtgatatcaaaattatttcgtaacctatagtactgtttcattaaaatgtttaatggaaacttatacgatacatccagtatactaaaaaatactgcactgggttctcagacaaaaaaaggtctcgaattttaaaaaaagagtcccacccattttaaagagaagatgtacatacactgagtatatcctgttgcatatgaagaaaagctgcacatacactgagactatccagttttatatttgtctatactatgcctttgtgttttttttttgaaagattcagtgcatgtttgcattttctttccttttttaaatgtattttggtttttaataatgttgaagtcattaggacctgatgccttgttactttgtaaaaggggtgaaggagtttg

SEQ ID NO: 45340 - DNA, 825 bp, Manihot esculenta
  Intron number 3 from transcript cassava4.1_006748m (locus cassava4.1_006748m.g) derived from phytozome v7.0 (chr-ID scaffold02765; pos 190883 to 191707)
aaggagattcgtcaccttgcacgaactcttatagagtatgactatgagcttattgcctttggctcttttgtcttcaaaatgttcatctgtgctcctaacatattgtgatgtgaagtattcatttattgccatttgctggctagcatctttattttcttatgtttgctaaccggtgatcgatttggtaattaaatacttcgaacggtctaaaagtgttaagcttggaagtgttctgatcagccgattttaccatttatattagttttatatctttctttccaaccaatacaattaattatggagctgctgcttccattctagttttttttttttgttttgttactttgacatagtagtcctttcacctaagttagagttgcttcatatcggcttgttcggcttagtatatgaataagccaagttcttgactaccatatgtaggtggtaacatgtttcttagccaaaattcagtttcagtgaaagcatgaaatcccactgctcaaatataggtcttactgcagtgggtactagggaggacgaatttcaacactgttattccacagtgatatttcagtagttggtttctcttgagctcaaaactgacctttgtgcttgcggatcacttcactttcaataagcgtattgaaaagaaaataagtactaatggtttttgtatccgtttgggtgaagtcgttgagcatttaatgatgcgcatcattttcatttttcagttagttcttaacaactgcaattctaacttttggaatttgatttagatattaacttagaacatatatttagactttcttttgttggttacagtgg

SEQ ID NO: 45341 - DNA, 742 bp, Manihot esculenta
  Intron number 1 from transcript cassava4.1_001108m (locus cassava4.1_001108m.g) derived from phytozome v7.0 (chr-ID scaffold02538; pos 514708 to 515449)
atagagaaccttctgattctttggtggattataaggtatgatgtaagcacctaattttttgcttggcattgatcagaccatttccctctatcagttgtaatattttaaattgttcaccgtaggctttgaaaagtttgtttttctatagtcgttggctatttaattgaaactttggtactttaggtaaagttcttcaacaattcttttacgtaatgtgtcttgttcattgactttagttcagtacttttgtttggactgaagttggacatgggtacatgtcaactacaggtttattcgagcttgaacataggctaaagctgccattggagtggcatcatttcatcctgccttgattgctcattttaatccttctttattaatgtgctatcaagtgattatggtttttgggactcttgtagccaactgtagtattaactataaggttggtgtatcattttttgttagctttccaacgtgtagtatgctaacgaataatgaagcttcttggagagcagttcatgtcactatagcttttattatcacgaatataagattggctttttcatttgtaatgaatgagtttaataggcattttttctttccttttgttcgtttgctaatttcttttcttcctatgtatatttccttcagaatcatgcttcaaatgcttgtcttgcatctaatttcttttgaatatctggattaaggttgacccctcgaaacctgcatcactgacctggca

SEQ ID NO: 45342 - DNA, 566 bp, Manihot esculenta
  Intron number 1 from transcript cassava4.1_013061m (locus cassava4.1_013061m.g) derived from phytozome v7.0 (chr-ID scaffold08368; pos 57155 to 57720 reverse strand)
tccttttctccttaagtttcagaaatctttacctggtatgatatgctcctttggttttcagtcttgcatttcctttctctttcaagttttgagtgtttttttaatccatttggaactttcgcaatctgggttttcaccttcaatggagtttccgattcctgtgtgtgttctttttactgtgaactgtttgaaacacttttagctcaaactcaaaagcagatgtgaagtactgtaatggggtctttttattattaaaagctatgattgtgaaaatttgttaattaaatgacgcaatctgttctagtggttgtggattgtctactcatgaactcaacaaagtcttatctcaactacttggggttgtccactgttctctagatgattctctgcatatggtgctaatcctagcagatttgaaccttaattttcctattttttcactacccattagcgcttatattttgagaattaaattcaatcttcgtctaagctttgatgagtttaagttaaaattgaacttcgaattcactctcttttgttgtttgcttaaggtttgttgattaaag

SEQ ID NO: 45343 - DNA, 979 bp, Manihot esculenta
  Intron number 2 from transcript cassava4.1_015413m (locus cassava4.1_015413m.g) derived from phytozome v7.0 (chr-ID scaffold12120; pos 41547 to 42525 reverse strand)
ctctgttgattccaacttcttttctggatttaagagtaagaatctgcacgtctatttttttccatcggcaatttcaagtttatattttccctgttggtttactgtgtttgatgtgaggaaatatgtctattatagcaaaaaattggattttttaattaaaattttgaagcgctgtgttcgtatcagcatcatctgtgaacctttggatttaatgaaaagaatgggtaaaaatttaatctagcaattagaatgcatgagctgatatgattaaatggaggtatttttagtaatatgatctagattggccaggaccatgctaataccttacccagcttttgaaagtgctgctgggaagatccgcatgggaatgcttgaacttccttttggtaaattatccaagaaacaaatatgatggctgttgaaattgtctcttgatttatgatgtcctaggcagctgtctgatgctccttggtctaaggacaagctggctgtttctgttttgtttggatgattgctgttgtgtatggctaatggcttcacattgtctaagcaatccctgaatagctttgaatttatggtgtctgaatgtcgtttcctttgaaattagcccattgatatattcatcaagcagatcaaagctgttgttccttttttctgcatttgttgattaccttaatgacattattttcttaatggatagatctcccaggaatcagcctttcacatcaaattaacttgcatttggacaattcatgaatgtctccttttttgttgatccccaatttcttaatcgtttctctggaaatttaacttcacaagaaacctttatgtagttccaattttacatgcgagtgaatcaaacaaggtagacaaatgctgatgataatttcatctcccctggctgagtttcacttgtgattataaatctatggttgtgatttttattgttgggattttctttgcagatcaatttcttcgc

SEQ ID NO: 45344 - DNA, 420 bp, Manihot esculenta
  Intron number 3 from transcript cassava4.1_025101m (locus cassava4.1_025101m.g) derived from phytozome v7.0 (chr-ID scaffold04324; pos 394230 to 394649 reverse strand)
ataatattcttctcgacgaaaattttgaacctaaggtgagttaattttataattaataaatattttatttatattactgttctctaacaaaaaaaatatcattaaataccaaaattttatttttaaacagtattgaaaaattatgtgaactcattaattatataatttgattgttgtaattaattaataaattttggttctaactttttggtttggccatatatcttataaaaaaattaataaatcaatcttagtaggtttcttatcttttttttttcatgatttaaagttttcttaataaaccttattgaagtagggaaaatagtgtaatttatcaaattaaaaaagtaataaacttattaatcttctcaaatcatttgtttagataacagattttggacttgctcaattttttacgga

SEQ ID NO: 45345 - DNA, 503 bp, Manihot esculenta
  Intron number 1 from transcript cassava4.1_009695m (locus cassava4.1_009695m.g) derived from phytozome v7.0 (chr-ID scaffold05929; pos 50490 to 50992 reverse strand)
gaggcggagatttgagaataaaaggtgtttaagaattcttgtttatttatttgtagttttctttgttaacataattgatttgttagaatttaaagataaacgtagattgttccttgtgttctagaattacaaagcagaaaaaaagtgacaatagctagggatgttgaggtagattaaatgttgggaataaaattgaaaagcttgtccaaatgaagtgcatgtgatttttttttttttttggccagagttaagggggtattggggtaggtggatttggagggttgaaccaggaacctccctagttcaactttggtgcagttgcccccggttaaaccatgattgcaagcgcatgtgattgattgtgatgaaaatgtgcttttggatactgtaggcattgtaggattcttcagtttgcattttcttctgcactttgattaaccaaatgggtgttgttggatttatagttaacttttttcttgtgatatggagccacagaagcacag

SEQ ID NO: 45346 - DNA, 870 bp, Manihot esculenta
  Intron number 2 from transcript cassava4.1_020235m (locus cassava4.1_020235m.g) derived from phytozome v7.0 (chr-ID scaffold12455; pos 617679 to 618548)
cccgcaattccgcttctgggtaatcttatcttatttaatttccactgcttctataatgatgatgggtatttgtttcttatctatttttaattatgtgaattttagctttactcaaaaaataataatttttttggtaagttgcttaataattagctgttgctgtagactgtagtctattttatatgatcactcacctaattgtcctttgaagctaagctttcaatttcaactgtgtaactgaaacttttgctaagttctgaagccactcaataacctagcaggcatatgcgtctgaactcttccatttcttctcatttgtttggcttaagtgaagttactcaatgccaatgagttgtggtaacatcttattgctgtaaattgctagtggcatttcttcattaaataaacaaaaaatggtatagtgggggttttcatgagagtaaagtaaggtttaacacacaattgcctcccaccaaagggcatgcatccatccagccagtaaactatgccttggtatgaatcgtgtgaatttggtcctttgatctggtactaaaaaaactagaatagttttgttttgggatatttggattaaatagcgtctgaggttgatctgtcactaatgaccataatttcatgatagttttagttatcatcggacttcaaattctatatactcattattactctttcagagatacagtggcttttatcttgtcagtacgcgtggaaatataaacacaagtttatttagctttaattgattgcgcattgaactgtaatatggagtgatggatacaattttcgtgttcatagatgaactttgtgttcttggcagggagaccaaggcagagtgaaggaaaaaaaaaaaag

SEQ ID NO: 45347 - DNA, 363 bp, Manihot esculenta
  Intron number 2 from transcript cassava4.1_027490m (locus cassava4.1_027490m.g) derived from phytozome v7.0 (chr-ID scaffold02581; pos 39529 to 39891)
aagagaagaaggccactgaaacagaactggaatctgtaagcctctgctggccttctctgccgttttttttgcgaagaacctgattttgctatgatgcttttgaattttcaaggagcaatccgtaggggatttctctgttgagagaattttaagaaaaataccctttatacctttgaatcttcaaggattcagactttttttaaaaaatattatttctttaaaatctctctttatctacattgtcaaaacagaagaaattctctaatttactcttcgtcaaactcacttcttctattttatgctatagtgtgttgtttggcaatcatttttcttaattaacaaatgaactggtggggtgcacag

SEQ ID NO: 45348 - DNA, 852 bp, Manihot esculenta
  Intron number 1 from transcript cassava4.1_024380m (locus cassava4.1_024380m.g) derived from phytozome v7.0 (chr-ID scaffold11349; pos 128826 to 129677)
tgcggcatctgtgccatcggctgtcttcccactctgtaagggcctgaaatttttatgttctttttgtgtatattatgtttatttttctttctgctattttttttttttttaagaaatggggagtttgaattgtgctaatttctcctcgaaaaatgacgctaattggtaatctgaacctgtgtaaagccaattaaatttctttctcaaaggggacaagcggcaactttaaattttttgctggggataatgaatgatataaatttcaaaaacaatttaagctttcagttttttttatgcatgccgaaataaaaggacatttgaacaatgaatatttagtaaaattgccgctgaaagtagaattttcttcagtgattatatgaggcaaattattcagaaatcaatagtgactagaaaacatgatttatgagcagtgtagttgtgtaattagagatattataatggtcttggcatcagactttgacaataatgtccgtggtttattggttaaagtcctgaaactctgtatatgcaattgctctaaataattgatcatgcattttaaagggttcatttgaaaattgcctcaattgatgtgtgggttccaattctttcaaatgatgtgcactttctacttggtatgcctatagtcatttgactggtgtgtatgtccttatcttctatttcgttgcaacttcatctctttgttactcttcactcttgtttgctatgtttgctttatgatgagcgatgacttaaagtagaatatatgttcgctgtttcacctatttatcaatttagcgatgctggttaatttgctgcttttcttatactgaatatggctttctcaggacc

SEQ ID NO: 45349 - DNA, 730 bp, Manihot esculenta
  Intron number 1 from transcript cassava4.1_015011m (locus cassava4.1_015011m.g) derived from phytozome v7.0 (chr-ID scaffold10954; pos 45649 to 46378)
cgttcccttcccgtcttctctccagatccaaacaggtatttccagatcgagttatccttatccatgttttcatccctttgttcattgaagcataagctcatttccgtggattagtagtgattgttttttattcctttgtacttcgtttggttcccgagaaaatgatggcagcccaaggaaaaaattagtggaactaaaagaaatgccgaatctaagtcaaagtgactgcgtcctacaatgttattgttgtcattttgaattttggattttgtttttactagattaaagatggaaatgaatctgattacgtgtattggtattgttggtctacccatataatttgggattaattgtatttacatgagagtttgtaaactttttatatgagtggctctgaagatgctgtatttaacgtgtaaaatggaagtaattcctaaatgcatagttttttcgttgtaaccatggttccatgcttcgatcctgtgaagattgaattgggtccatccaagtttttattatggttttatcgtcttcttcactgccattcttagcttaatcgatatgacaaatagtatgcaacataagaatgattgatggggttgtattaaattgcttttctccttgtggggaagaacagtgatttatgtttaccactatgatttatcttcttaatttggatttggttaccctagttattcttttttttttatctgctgaattatgcagctgt

SEQ ID NO: 45350 - DNA, 848 bp, Manihot esculenta
  Intron number 2 from transcript cassava4.1_015011m (locus cassava4.1_015011m.g) derived from phytozome v7.0 (chr-ID scaffold10954; pos 46437 to 47284)
caaaaaggctgatcctccagctcttaagggaggttagtaaatgtgaatatgtcattagtattaatatggcttgtgtcatattgaaaatgtgatatgaaatgttaaagttttgtatcttatgattgccagtatttccaatttgttatgttggaattaatgaaatttaaactgtctgctgcatagatttcgaacttgtacaaccgcctattaatattattgttattattattattatttttctaaagattaagtcttcactatttttgtatattttttagacatttttaatgtatgcttcatttgtaacttgctataacttctataacattttgaaaaacacacattttagtttgtattggtgtacatgtccagttgcatttgttcctaggtgatatggtgcctagcacaaagaatgcattgtgcttttgactgctctacctttacaaatatatttttgcatgaaattggattccctttttgtgtttcgttgcatcaagtatgctttgtttacatgctgcacatttgcatcgctgagctaggttattgaagatcagctattaaggtgaatgtttttcttatttatttgcttttggtttcatttgttagagatgcccagttgatggaatcttactgtagatgctgatgttaaagattattttatgttggcccatatgctaataagtatacctttattatttaggaaaagagtaagacatgtgctcgtcttcattctttgatggatacatgattgtctattacatctttgtgggtgcatttatttccaaaagcatgctttgatgatttttgataatttactgataaattatttgtctttgagctgcaaagag

SEQ ID NO: 45351 - DNA, 329 bp, Manihot esculenta
  Intron number 1 from transcript cassava4.1_026622m (locus cassava4.1_026622m.g) derived from phytozome v7.0 (chr-ID scaffold05875; pos 1100698 to 1101026 reverse strand)
tgctacccctaccactcctgggactccattgtcacgtatgtgttatattcttcttttcttttctattctattcttgattaattttccgttcaaaaatactagggttcttttcattttaatccatcttgaaagatttaactgccttttcatctgtttgtctatgaaaaatgatgaattatgatgatatttcaaacatcacaaattgaacgaaaaaatggaactatatattttcctatggtttctcaccaaccaaaaacatttattatcatttgaaattgtaattattgcatgcagctgggacaccaagcgaggaattcaagagattgacg

SEQ ID NO: 45352 - DNA, 773 bp, Manihot esculenta
  Intron number 1 from transcript cassava4.1_004332m (locus cassava4.1_004332m.g) derived from phytozome v7.0 (chr-ID scaffold04716; pos 239396 to 240168)
gccagaaacccggaacttctggccttcgcaagaaggtttttgatccttttaatccaattcttgatttgttatatttgtgattccatttcatcgaatttcagtttatattcagctctctatcttgtgattggaatcagatccgttttgctcgattatttattttattttattttgctttgctgatggcgcctgagcaaatgcttttagatcagtatgcatgaatgtgatctatgcattgaatccattatgttcctgtattaatcgattattatttattttgtaattgaatcctatgattcccaatcgatttgctttcctgtggctttgcatcttctaaattttagtagttgattgctgaagcaagattttattatatcgttttcttttctgaaattgacttgcaccagagctctcaacaccatgtgattcgtttatcattgtacattagtttgaatgatatgattccatgttcgatgtatgctgttgaagaggagtggtaaaagatactgttcagattttgtccctccaaaccataaccgtattcatttctccaaacgcttagggagccagtttgaaccaagtcaatttattgagttatactttgctgcttatggtttaaaaaaaaaggttagacaatgggtgatggaatgtgaaatgtctattctctcagaatgtttcctttgatggttttgcttcatctggcattcctggtttaatatggtggctgtttcttttcaggtgaaagttttcattcagcctcattacctgcaaaa

SEQ ID NO: 45353 - DNA, 1020 bp, Manihot esculenta
  Intron number 1 from transcript cassava4.1_011597m (locus cassava4.1_011597m.g) derived from phytozome v7.0 (chr-ID scaffold10963; pos 334474 to 335493 reverse strand)
ctgatcatccatttgcattcccttcttggcaacaggtaccttccatgccctgcttaatttacttgccttttgtttggcagatttcttagcattaattactggtggcaatttctccatttttatctcctgccggcttctgatcagagagaaactattttagttcttgctgtgtacgtagtcccagaaggaaacaaaatagtaactctacttttgtctaggagttctcaagacaatttttttcaacacttattgtgtaaattgcattattttcagacgtacacttactaatcagtgcgacagattccatccacaggaaaatagcacataacgtaaattgatggcaagaatgaataattcttgtttaaattataattaaaagaaaaggtaggacattgacatctgagtctagttcaagctaattctcaatataagttgatatattcaaacagtatcaccctttatttgaaaagagaaaaataaataaataagaaataaagtgaagttggatctctttctcacaacacgtgcatctattttcaaagaccaaaacaaatatatatgtgaagttgaaatattaatttagaataattgaggtattgtttcgctttcacacgcaattatgtaagcacaaactgtcatatgtaaagtctgtgggcatatactgatttggtcagttctatacttcccttgaaggacttaatttgactgggacattaattaatttgttgttgtctgtatgagtcattagagttgaaaacaatccatgggtacctatcccatgttattgtttaggtttcaagtaagcacccatgcagttttattaacacataaaaaaaaacaagtgagcatccatgcatttttaatctagtggtgaagacccaattgctccgagtctccctttcgcgtgaatcatgaattaaatagagcatattgtttgaaattacgatggaacttaattattagtctttgtgtttgtatttcaaaggtggtctcagattgcggctcgcttgcctggacgta

SEQ ID NO: 45354 - DNA, 477 bp, Manihot esculenta
  Intron number 1 from transcript cassava4.1_004233m (locus cassava4.1_004233m.g) derived from phytozome v7.0 (chr-ID scaffold11866; pos 4349 to 4825 reverse strand)
gtggcttggtctcttccacagaaggaaacatcactgtaagttttaacttttcttaccagattccttatgatttaattttccttttgaatctcaattttcctgtattattttctttttattatcattttaattagttttcacaatttgcatacttggatctggagattgttttttgggtaatttttaacccaaggaaacagagaccacaaagctgaagtggataagtaaaatcaaaccacacattctgtagaatgacaaaacttatgggcacttttctttttgttctgtagctagaaaatggaacaattgggatattcttctaaaaattcctcttatctgagtcatgaaaaacccagattttactattgattactgaattttttggttactgagccttaattatgttgcatgattttggtgaggttgcagtatctgaattaatcaaatgctgatatgattcaaatgctttatgatcag

SEQ ID NO: 45355 - DNA, 661 bp, Manihot esculenta
  Intron number 2 from transcript cassava4.1_017333m (locus cassava4.1_017333m.g) derived from phytozome v7.0 (chr-ID scaffold07575; pos 34516 to 35176)
atacttgcaaaaggtacatcttgctttgctattatcatatcctgaaatgatgaaccttgaaacactttttatctgtacctcaagagagaaaggattagcgtcccctttttatacatttgatatgaagttcaagccctggactgtggtcgccggctggggatttattatgcatgggtttagtgcatgctttcttagacaacttctgtattaaatgcaggctcagagtgcgttcttttttctttttttttttaattttttttattcgacatatggttttcatatctgttttatttgtaacattgtgcttgtgtgttgcatcatcattttcctactcaaggtaaatgaaagtatttttcattttagacgatcaatatttttgtggttcaggattgtgcgggcacctctgaatgacctctgtttagctcaaagtgaaacttctaagcaaattggtctgcatgaagatgctcctgctgtggagtcaaatgtacgttggtattttctttattgctagtataatattctcttgcagcccctaaatgttttgatatgcttatgcctgtagggtccaacttcatcaattaacatggaggaagtatccaagtcatctgagaatgatgttgcggatctagatcgtgacacaaatgtttctcccacaagcaaa

SEQ ID NO: 45356 - DNA, 752 bp, Manihot esculenta
  Intron number 2 from transcript cassava4.1_033716m (locus cassava4.1_033716m.g) derived from phytozome v7.0 (chr-ID scaffold07859; pos 221905 to 222656)
ggctgaaaagcatattcagaaactcctactacttggtactcaaaattcaaacttttttctgatttattatttggcaactatccatagtagtttgccaatgttgcagatttgagcttaaatggctaagaaaagcatgggcaaaaaggggggggggtgtcataatgcgtgatttcatggagaggttcattctcacaaatgaaggaacaataattaataactcaattagttattgggtagcctacaatgttacctgaggacttaaatattaatttccttggttatgttagtaaatactatttgttctttgcattttccatattaaagggcagcacagagataatgcaatgtcaattgattatcttaaatttctttctgctcactttcagttatattcttgtgtgcttcatgctttcactgataaaactccgttttaccatcaatatattgacttacaaaagttctcattttctgatggttgatggaaacttaaagggcgtgtgcttgtggatgtaagcctggacatggattttagcatctttagtccttgaactttggttctacctgtttgagatttagtactgcaatgcttgtatattcatttattttctttgttttgacagctttcaagagcattctttttccatttcaattattttaatatttgttttttccttcttgggttgttataacatgttgtgttcaactttcatgatcaaggagctggagattctgggaagtccacaatatttaag

SEQ ID NO: 45357 - DNA, 484 bp, Manihot esculenta
  Intron number 1 from transcript cassava4.1_021163m (locus cassava4.1_021163m.g) derived from phytozome v7.0 (chr-ID scaffold08359; pos 298106 to 298589)
gttagatgacgtaaattttgtgtaacattagcctttgcaaacaagatatggatgcttcatgaggggtcataaagcaaaacaaagcatgggacaagctgtgtgggaaatgaacaaagctcaaaaatgaagttaaggatagtaatccaaacgttataaccaaaacctccttttaagcctaagcagaatcagattcctaaatgaaagtgaagaatttccagcagacaatccaaaagtagaaatacaaagtgggtgtctgattcttcaaattctcaaaaatctaacattgctttctcgttattcaaccaatcattgttccaatgtctattcacgacttcacaccagcgaaggcaaggaaaacagcattttcatatagtttctcttcatttttccttttctttcccacctgccaaacgcactgaaaagaaattaaagattaaccctgaaattggtttgtggttgtgatgttttcttgtagacttgttgc

SEQ ID NO: 45358 - DNA, 749 bp, Manihot esculenta
  Intron number 2 from transcript cassava4.1_014203m (locus cassava4.1_014205m.g) derived from phytozome v7.0 (chr-ID scaffold03115; pos 55912 to 56660 reverse strand)
gtctttcctctttcttcttttgggctctacctaaggtaatttccttcacttactttttgtaactatccagactatttagggttttatttgacatggtagaaatccgttcccattggtaaaactacaggaacaatttctacggggaactccttgtgctctgtatctctatttggggcattggagattttttttttctcctgatttatgaatttgagacttgagtaattgataatctttggtacgttttatgttatttgagctgttcatttttattttgcgaccacaatattgggatacaaggattcaggtcaggaataatttcctttgttgcaatagggtaatgcgtttgagtatgggtaggcgaattgaaaagaatgttcctaaattagtatggtgctgcgacgctcttctatcatctatctacgaactgatagcttctgtcttgggaatcatgaaataggtatcaaggcaaactagaatgttgaatcatccgtattgaaatttgaaaaatgatatattgtgatgtttgcgatatatgttttggaaacttaaaagttcgtgtttcctggagcagtggactagaatggttttattcgttgaattgtatcgttagactctgccatcggatgttttttaaaaattattattattatatttttaaccacctgctttccccctcaatggtatggattattcttaggctttttcttgtattgacccatctttggccatccttgcagggagctctt

SEQ ID NO: 45359 - DNA, 927 bp, Manihot esculenta
  Intron number 1 from transcript cassava4.1_008092m (locus cassava4.1_008092m.g) derived from phytozome v7.0 (chr-ID scaffold10305; pos 828129 to 829055 reverse strand)
gcttcttcctcctcgtctcaatgtaattgctttgattaattttttgaagtttttcttcttctcatagtgtttggttcaattctacgagtaaattacgtggagttcaattgaattccattttggtttgatataacttataatgcataattcaattgaatctcatataatttttgtttaatttaatttcagaattgaaatttatttgctctcgattcccatgttaaacccccccccccccccaccactacccttaagattaatatatatatatatattttttctattatagaaaaaatcttatttggcaataataataataactaaaaatataaacccaataacaatatattgataaaatcaaaataaattaatatgagagttggtatcaacatatacttgcacaatactcacttgtgtaagagagtttctattatatccaacttattcaagaaaatctcaaaggtaaaggtttaaggtaggtggttggttatttaatatttataaaataatataaaaatttaaaaaagtgtaattatttattgaaataatttttaataatttattttgtaatcattaatttttttaattatttattaatttttagttatttatttaattaattagtaaatatatgataattgagagaaaatgttttgttataggcattttagtccacaaaatattgttatataagttttgtagaatttatttgaaattctatcaaaacttctaagggattggttttagttataaccaattccatgggaattgaattctaatttctctttaaatcaaatacagaaaacatggaattcaattgaattccacaaaattttaggaattggaattgaattaaacatggtgtttgttaattttcattatgattttttacagtctacttgtttgctttttctcttctcacttagg

SEQ ID NO: 45360 - DNA, 706 bp, Manihot esculenta
  Intron number 1 from transcript cassava4.1_033922m (locus cassava4.1_033922m.g) derived from phytozome v7.0 (chr-ID scaffold03803; pos 188089 to 188794)
agttctgcagcacttctaggtacgtacgatcggctcttaattgtcatattatccatttctttatcttgtggaaaatttatgcagttttttttttgccctattttttgatgcttttgagataatatggccttgattttgtagtcactttgtgttgttcttcgatttatggtctagattactgatttctgtttttatttgattttttttttctaatttttcccattttctgttaagaaggtttaaggatctttgtttgagggttcttttcgttggttaactttgtcttttcttgtctagttggtgattttggcgtctatttcttggaaatcagagtaataattaagaaaaaaccccacttgttcctatatttttctaggggaaaaagaaaagagaaaacttcttgtggtttctaattgcaagaatatatgattttgctatgtctgtgatgagtttcttttctgagatctataattcatgcgtagactaaaaagctcctggattaactttttttttttcttcttgtttaagttccataaaatcctagtctaatggggaaaaatggtttatatacttacagtttttctggtgatggtggagagatcctaaaggaaaaaacaaaaaaaaacaaaaaaacaaaaaaaaaaagaagaaaggtagtacgtctctaaagctgcaaacttcccctcaggagttcagttgacaccgc

SEQ ID NO: 45361 - DNA, 759 bp, Manihot esculenta
  Intron number 3 from transcript cassava4.1_008257m (locus cassava4.1_008257m.g) derived from phytozome v7.0 (chr-ID scaffold07992; pos 72473 to 73231 reverse strand)
gtggaacagccaccggctttcgagggtaagggcgatatcaccttcattgttattaagcattgatttaatttggagcgactctgtagttcagttggtttgtaaaatgggattttgcgccatggagcttgtggccttttctttttttttttttctttttcatttctgttctgttttttgtattagcttttgcattatatatatatatatatatatatatatatatatatatattatgtgggatattcttgctatataatcagtcaattgtgttaagatctgttagtataatgttaaaatggggggaaaataggtgtttaatacagcagtaatgagcagcatgagacagaattgcttgtgccacagaaatgcaaagctttggagaaacagaagatgccatgaattaatgtggattatttaacaagttctgctttaactctcattcttgtattttattactaggatcaaattggataagaattttgaatgtggtagaatattttgatgattataagacatctaattaactaatcacaattttcacttctcgacctcctccttccttttgaggatttgagaagtatttcttctttagcagacctggtgtattttcctccacactatgttcttgtttaagtgagacttttgtttagcaggttactcatatgtatcacattttttggcaattttttgtcaagatatattcatataatgtccaagtgcaacattatttccaaatgatatcatgcagacaaatattgg

SEQ ID NO: 45362 - DNA, 1068 bp, Manihot esculenta
  Intron number 1 from transcript cassava4.1_011506m (locus cassava4.1_011506m.g) derived from phytozome v7.0 (chr-ID scaffold00069; pos 240036 to 241103 reverse strand)
gtcctggcttcagaaattcaaaaacataagagcaggtaaatcttgctactttattccttatattgcaaatattttaattaatttgttgctaccctgttctttgtattttaatttttcaagggcctaaaaatgagagtacttttgttttttcaagcacgagtttggatttgcctttgaaagttttcccattaagatttcattattgtgcaatcaagtcctcaattttgattttactattgatcatgtttttttcatgagaaagttgaaactagacccataaataagccttaatttggaagtaggagggctaagaagttctatttatttgaaattccttataaatttgtttgttcttgatgaaaatatgtagctttgagagcgttatttgtatctctctcttattttcttaaagaatagttagatgtcaaatttagccatcgtcttcccatatgttcaatagttcagtggttagattcctgtcctggagggcagtcaatcaagggttcgaactttactttcccttcagttcccttgaaccaagagaggagacattgcttccaatggataggaaagaattgcaactttggtttctttgacttgaatacgtggaattgaattttagccaacttgagaaactcttatgcaataaagttagctattgaagtagctgctatagagaggtctttgagcataatcactccctttattcctgttaggtattgtgtcgagcgaaattgatgagctggaaaatattgaatgggtaaattatccattagatggaacaagtaggtttgaattcacttggtaataatgtcaaaatttactgttaatacttgttgcatgacttaaaaactgggccttatttgttgaggcagaagtgtcctgaagaaagttcttgatatcatatataagtatacgcatgcattgggcgactgtttgataatggtcttattttctgcaatgttttgttgcttttcttatgtttgctatttgtaatattcgtgatcttatgcctatatattacacaaaccaggctgtcgtccgacgtatatcgggtagaggaacaat

SEQ ID NO: 45363 - DNA, 691 bp, Manihot esculenta
  Intron number 1 from transcript cassava4.1_007330m (locus cassava4.1_007330m.g) derived from phytozome v7.0 (chr-ID scaffold11328; pos 36620 to 37310 reverse strand)
gttctttgactactgctgctgtgagtttgttttcttatgtgtttttgctctgtttgcttgctaagaaattgtgagagaaagaaaattaatgaaaaaaggagttctgttagacttttcatgacctgagaatagttgaaacgatatgaggaaatgagcttcaatagttttcttttaggaatgttgttggtgctacttattattttttattcattgacctcttccgcgaacatgaatcgaattaattgaagacgaccaagcttccttttaagtaatttccagatcaactcttggaatttcttgctcgactaagcttacatttcattgtaagcgaaggcaactatagttctataaacattaactggatttttgtttgcgtccataactttgttgtttactagcggtaagcgctctggaagatgcctcatcaaatttattgtctggattgctgtgtttttaatattaattggattccatgacttgacttggtgtatagcttagaattgtatggtacggaggtagacatcttttctctctcaaaagtgcaaagtgttccctcttttatttttttattttttttaatttttattttaaaaaaaattttatataatagtcggccattgtagtttatctaatttgtagacattcaactattctaggacaagctgaactctcctgtcgagcttctcactag

SEQ ID NO: 45364 - DNA, 218 bp, Manihot esculenta
  Intron number 3 from transcript cassava4.1_013020m (locus cassava4.1_013020m.g) derived from phytozome v7.0 (chr-ID scaffold04324; pos 330545 to 330762)
ggaactgaagtgtaagatttttttatgtttttctcttcccttttgtttgacttaattttgttgacattttattagattccactatgaaccgcttttacaatgttaataagaatagtatgaaaaaaagaaccgagaaaattcaaattttaaatttttaccaaagattttctttttcatgaatttacttttaatatgaaattatttttataattacagtt

SEQ ID NO: 45365 - DNA, 715 bp, Manihot esculenta
  Intron number 1 from transcript cassava4.1_001904m (locus cassava4.1_001904m.g) derived from phytozome v7.0 (chr-ID scaffold03395; pos 287142 to 287856)
acccctcaaaagtttcagacttttttctcaaaaaggtaatcatcttcaaaaccttaacaatggctgtcgtttcttggcgttgaatattccaaaatctctcttttttgaggactttagtgggctgttggtgttctgcatgtaataatcaaggtgtgagtggattgtaactgtagctcaatggatgaatttatattttaatttagatagatgaatgatattgaagaatgagtagtggaataagaatcttttcttccgtttccctctacccctgatgttaaatctttatggggcatttggaacatggggttgtttggctctgcagattattcgatcctacaaaaaaaacatttgattgacgtgataaagatacgggaatacaagtactgtgatgtttgctcatcgagtacttttatctgatgtttttctttataatcatgtttttctagcacttcagaagtaggttagagagaaatgggggtcataaatggttcatgatgatgcttaatgttgaaaacatttaaatcgtggactaaactcatgtttttgattcgcaacatgctgtcaaagttgtaaaattggtggagggagaaagaaattgcctttgcataatattcatatatgttagtattcaattattatttcttgaaatctgaagtctttcctatatatccttttggcagattcagagagggagtgactattttctttagtattt

SEQ ID NO: 45366 - DNA, 346 bp, Manihot esculenta
  Intron number 1 from transcript cassava4.1_026814m (locus cassava4.1_026814m.g) derived from phytozome v7.0 (chr-ID scaffold08359; pos 1048454 to 1048799 reverse strand)
ctgctagaggaaggtttgctttcttaaaatatttttttaaaaagaagaaattgattccttaaattttctatcctgttctgttttgttttatgtggtgccaaaaattaaaactaaattcttgtggttgtacataataggactttcttgttgggtttagctcgctttaatgtgttttttcatctcttgtggataataatgtatatgcagatgataggacaatagtgaactcttcataaatttgttttcgtttctcaaaaacttttgaatgttgcttattttcctgtttatagatttggtgtgatttctgataggctctgggtcagctcctgtgctttgcgagctgctt

SEQ ID NO: 45367 - DNA, 824 bp, Manihot esculenta
  Intron number 1 from transcript cassava4.1_031104m (locus cassava4.1_031104m.g) derived from phytozome v7.0 (chr-ID scaffold04851; pos 58943 to 59766)
gctttaatcgccgactcctttgttctatctctttcatatcctttcatctgcattctcattttcttttatctaatctcctaaactccagacttagattagcattttcttttcggaaatcgggtgttcattttgagataaaatttgttgtccaatatcaataccgttgcattggtgaaattcagaatttgtgtaacagaaatagaattgattaagagttgcttaatttgctgccatttatcgtgtgtttagtatcactttaatcaaattcaataatgaaggaaagcaggtagttgaaatgcgatttaatcgggtaatttatcttagcaacactttaatcaatctcttaaagttcaattccatattttttgtggccttaactaataattactcctcacgaaaatattcgtcctggtcatattgctctgaatcttattcaacgtcggcatgcaagagtttctactggagactcgatttctgtgagcaggtgcaaattgattatgtctcatgccctgcttatctttcgccattaccggttgctaattatatattattcttctcgtaattcttttaggtttattcctcccgacaattttaaccttgcattgctgacacttgagctggaatttgtgaagaagggtactaagaacgaaaaggcacgcaaacctggaatttattctatttccttattttgtgtctactaatttggagcttagggaatggtgattttatctatcctgggaaatatttaacctcagaataaagttcgtataacttcttgaatgtaggatagaaggaatgaatgacttgtgttgttctgtaggtgg

SEQ ID NO: 45368 - DNA, 336 bp, Manihot esculenta
  Intron number 1 from transcript cassava4.1_023461m (locus cassava4.1_023461m.g) derived from phytozome v7.0 (chr-ID scaffold05875; pos 634876 to 635211)
atcttgtaaagaaggtagctgtctagtaccactcctagtttgttggcaataatacacactcaaattgatcttcaattggcacaatggtagcaagcatttgtgtttttctgtcttttgcctaagttaattgggaattattttattgacaaaaaatgggaattattttattgacaaaaaatgggaattatttttactttggtttgagaattttgtgatgctattcattgattactgcaattggagatgacaaaaatcaaattaattatgacacttgtagtttatgttatttatttttattcaaatattccttcttgaatatgggttgtgcaggggcac

SEQ ID NO: 45369 - DNA, 404 bp, Manihot esculenta
  Intron number 1 from transcript cassava4.1_008432m (locus cassava4.1_008432m.g) derived from phytozome v7.0 (chr-ID scaffold11279; pos 404623 to 405026)
cgtcaacatctccaagatctccgagccgttggtatgtttcagtagtttgcatgtgcgtttttctgttattaccagattcgtattttaggtttttgtggtttaatgttaattaaagatgataatgcaaatagccccaacaatcatactgttctatgaacttggtgaagtattctttattttctttgcaattcaatgaagaaagtggataaacagcgcattattttctgagctgtttgatttcttcaaaaaaaataaataaataaaaaagcctgcaatagttgatcttagtatgtgcttatgtgagtttttgttctttcttgaaattggtagtatattgttcatgaatatcgaatttcttaattttgctaggaaggcagcttgaagaatctggagttcttaacgat

SEQ ID NO: 45370 - DNA, 427 bp, Manihot esculenta
  Intron number 5 from transcript cassava4.1_024320m (locus cassava4.1_024320m.g) derived from phytozome v7.0 (chr-ID scaffold08302; pos 53941 to 54367)
ctacaattctcttatcaataatctcctttccagtaaaattctgaatcttcctctcattttggactccctttctaatattctgttatttatgtggtttgaattttaggtatattttcttataagccgaatttttatccgacctgaaaaattctgcattgcaacccatattggctagtaaaaaatgggagtatgtgttgggagtggaggattataaataatctatctaggattatgagaaatttcaaaaaacacacatagaattttgagagttttgagagtttgtttgaactacattaactttcttatatctctttctataagattgtgattttgagtgcgtgtttgttcctagttttgtacatttatctcaacatattctctgtattgatcaggcatacagccccttgtgaccctattccactgggac

SEQ ID NO: 45371 - DNA, 416 bp, Manihot esculenta
  Intron number 1 from transcript cassava4.1_005656m (locus cassava4.1_005656m.g) derived from phytozome v7.0 (chr-ID scaffold07859; pos 10393 to 10808 reverse strand)
tctgcttctcagagtcccaagggtaaagcaaacaacttgttcttctttattttctgttttgttcataaattttcaaatgggtggtgtgcatgggataattatttataaacactagatttcgatgttcaaatgcattccccatcaaaattgatctgttttgtacttgctccattaaaatacaggggggacctcagcttttgttgtcccacagctttgatttgcacataccatatcataaatcctgtttctcttctttttattttgtcccaatccatgccagtcagtcgcttacaaggctgtcagctatatctatttaattatcatgaaaaaaaaaaaaaaaacttaacaaagatttttctgtctctttcttttaatttgcaggtaaaaataacagtactggtgatctgaattctgat

SEQ ID NO: 45372 - DNA, 979 bp, Manihot esculenta
  Intron number 1 from transcript cassava4.1_023473m (locus cassava4.1_023473m.g) derived from phytozome v7.0 (chr-ID scaffold05875; pos 591228 to 592206 reverse strand)
cgttcctcactcaacgctccaacatcgaccttaaggtttgtttatattcactattcttgccatctttcttttaattcctttcccctaaaccactgcattgtttagtttttgcttttggaagattttgaaagtctccagggaaatgatgttaaatttgcttttgcctgagaatttgatgaatttagggctttacttgtattagacgtggaagccttcaaatatatgcggctaaaacgctatgcttgtgcttggatttacttaagtcacctctgagttcagtagttgcgggataataagttgctaaatgattttgattactaggctgcggttgtaaaactaggatttagcgttgtgaattgacaattaggtcattgtgagaggcagcaggctttttttctgttttctgaagggacaattcagcttagaaataacggaagtattggttggtgttttacaagcagacagcagctagagcagtttggtggagaaaagtggtaggattgtgagtgctcttccttttgactgttctatgcaggggcaagggttttatttttgaagaaagtaggatatctatttgtatgtttcaattagaagtagaaattaaaggggttattatgttaatgtaggtggaaagagtttctaataggtcttagtactgaaatgaactggctgaaatctttatgctgatgcttattctagcattttaattcaattcatataatcgcaacttggaagccctgacaaaaatttcaatttattcactctcttttttttcccccttgttctctattaatgtatcttgtgactttatgcccatttcttctgtcaaactttgttccataatagagttcttgatgtttcttgctggtgggattcttgtaagttaagctactttggttgctattgttggtatagcaaaagttcaggggaccctgcttgctgttttgctgtctcattcatgcttgtatacacaggacaa

SEQ ID NO: 45373 - DNA, 836 bp, Manihot esculenta
  Intron number 2 from transcript cassava4.1_022667m (locus cassava4.1_022667m.g) derived from phytozome v7.0 (chr-ID scaffold08359; pos 1874244 to 1875079 reverse strand)
cttctctggggaacaggtgaataaatccatccatctacacctttcctttctctgcttcacttttgattgcattctcttcaataattgacttcccataaagttatcaagatcctgaatcagctttatttttcattcccacttcaattccattttcacgttctactatatatatataatcaataccacttaactttcattttcgtggaaaaaaatttaaattttagtttctttatgtatttaatacaaattcaatcttataatatgaaaatagattttacaaattaaattaagtggtaaactattaatacaattagaaaaagcatttataattttcaaatcttatttaattagagttactcaattatgaaacttgaagttttcagaaaataaattaataaatatatttacatggctaaccaaatctgatttgtttggaaaatgactttaaagtaactggttttattcatgtccttggtcgggtatgtgctatgactttttcaattttaaattaaaaatcataataaccaaccacaccataacacttcatattttctttataataaatatattacatcaaaaaattcataacaaatatcttaactctgtataatacatgtaaaatattttgaccctttgaaaatttcacttggaagtattttctttattcttgtattatttttttatatttaacatgtagattacaaaaatacaatactttgcctcctttgaaaaagaaaaaaaaaagtgtattgtactatttttgaaaagggtacttaacccatagtgctatcttatggccaggtggtccgccatagccaggcatctcccaaagcgaa

SEQ ID NO: 45374 - DNA, 905 bp, Manihot esculenta
  Intron number 3 from transcript cassava4.1_022633m (locus cassava4.1_022633m.g) derived from phytozome v7.0 (chr-ID scaffold08801; pos 176036 to 176940 reverse strand)
tttgtgggtgttggaatatttcaaccaacagtcttgtacatttagtggaaaaaaatccatatcgctttgagacttaaagatattaggggatcttcccatttgtggttttttttacgatgaagtcgttcctttagctgaagaatggaaagacatcaatcaaagtggcaagcctatctacctcacagtcaaatatttattttttgcctttcacaagaagtctcacaagcttggcaatcattatgagatgaaaaattacagactagattaagttttaatttcatgttactttaaggtatgtagaactttctaaaagagacaataagaagagaaccgattgtcttcaaaaatctacaatccatcggggatcattgacaagaaatctcttcgtgcaaaagggtggagtaagttatttttcgaactttgagttgatgctaaagcttaggaagaagtttatttgactgttttttttttacttattggctttgccaagatgctaaatacattcgctctaccaccttcaaggtagaaaacatgatggtaactggtagacactttgcttagcagttctaattttagctagcatttaatagatttctacttgctcttattcgagcacttgcactgctacttttcaagttcatatatctatggatgacttgttgagaattttgggaatcatcatcaatccaagagagactcttatcctaaaatgactatttttgttggagaaagaatggtaaaaaactttgaagattcaagtcttacaatcttttcgataatcctcatcaatggattagaccttcatcacctttctctaatgataggttgaccttgtttagtgattgaaatttatccattacttgttgtgagtactttattgatcttaaattaagctacttagcctc

SEQ ID NO: 45375 - DNA, 611 bp, Manihot esculenta
  Intron number 1 from transcript cassava4.1_022633m (locus cassava4.1_022633m.g) derived from phytozome v7.0 (chr-ID scaffold08801; pos 177158 to 177768 reverse strand)
cattgaagttggtcagtcttccaccgaaaaaagtggtacacgaagaaacttcctacaaattattgcgcccgccgtgattgctttaatttctctcttttttccttttttaaatattcatgcattgtgcgattgtgatttcttcccaattcagggttccccccctttttttttttttaatttttctgcacaaattcttggttcattgcacaacgttttcaagcctttttataatttctatatatgattatttttaagtaactttttacttccctcatcaaatccaatttaatcattataaataatgaaaactcgcaaaaaaaaactatttttattgtctacaaatttgccattagttcttttgctgttatatgacctacatctgttaactaccacaaagttggagtttagagataccatgtaaaaattttgactacaatctttctatcattgtcagctttaaggcatccttattacaatattcactatactctagcaagccttcaactcatgatttgatgcttttgcaacatcgcaattataaagaaaaaatatcatgaaagttgttttttacatttttctagtgagtattattacatggaaggctattgaga

SEQ ID NO: 45376 - DNA, 804 bp, Manihot esculenta
  Intron number 1 from transcript cassava4.1_022140m (locus cassava4.1_022140m.g) derived from phytozome v7.0 (chr-ID scaffold05280; pos 719957 to 720760 reverse strand)
ggtgtcaccttcgaccaattcccctactatctcaggtccttaatcacaatttttagtcctcttcttcttcttcttcccccccaccccaaaattttcatttcatgacatgctgtttttgttttaactgtttgaatagttgaattttggtacatttgctaaaccgtaatatgcatatgatgcttgtagataccgtaagggttactgcatgaactggtggacgaaaacaagaacagggtcagagcagagcttaaatgattaagaaaatcctgatataaaaaaatttgaggttacggagatacgagtccctgtttttcttcttacctttgtttgcgcgagtggataataaggaggaaagaaaaatatatattgaaaacagaagagaggaggaagcaaaataaacacaatataaacaaaatttcccttggatccacatgatatgaatctctccaatataacgagacaatgaatatacgacgaagaaaaatcaaaataacgaatcattccttttattttcctcccatccaaacaataggaaggaaaaaagtgatgatattttatattttcttctatctcactttcaccccaaaacagggcgttggcattaaatatacacctttggtgattattataatcgaaacaagttattttatgtctgtttggaggttgattttgttttttctcgtggctactgaaacttttatactgtgatcagtggtctcctagggtcaaactttgctttctctgatatccttcttgattgtattaacagcgagcagaccagggctttacttacaagtgctgcct

SEQ ID NO: 45377 - DNA, 419 bp, Manihot esculenta
  Intron number 2 from transcript cassava4.1_013149m (locus cassava4.1_013149m.g) derived from phytozome v7.0 (chr-ID scaffold12794; pos 759109 to 759527 reverse strand)
tactcaaggaggctataactgaagagcgctttgaggtaccgattctgcgattcatacacgtttctggatttctgttactgggaaaaaaaactacaagttctgaatttcttttaacccattttcaatgtgttgaaacaaaaactagattaactgaagggtgggtatggaagttataaagttgcaggaaaggctggtcattccatgcagttatcttgaattacaataatgtacgagagcatgcatacttctatttcttgaatgaggtggcttcacgcatcatcatccatatgtagctctaactttttgatatagggactgatcagcaaaaccgtgttataaaatgtgactgtattattcttaagttgttcctttttctccttcctgatgatcttttttccatttggtaattcttggccagg

SEQ ID NO: 45378 - DNA, 838 bp, Manihot esculenta
  Intron number 1 from transcript cassava4.1_011027m (locus cassava4.1_011027m.g) derived from phytozome v7.0 (chr-ID scaffold04099; pos 129282 to 130119 reverse strand)
tttctcaggtgaatatgtatttcttttttttccttaaagttggattttcgattttctgtttggttattgagaaaacaagattaatcaagagagaaattagatttgacgctttaggattttgtttaatcgagatttgagaaaggaaattccttacttaataagcctgattggcttgcatgtttagttctctaatttagcgaatcaaacgtattgtggtaaatacccttccgtttgtgctttctttcggactttcgatcggaagaattcatgacaatgaatggaaaatctctagttctttttgccacctgtttggaatcaagaatgttacaagaattcaattcaactgattttctttattaattcttttatgattggaatgaaagaattcaaatctttttaacttaaaaattttgttaacagaaatcgtgtactaatgaattcttttcctgcaattatttttccccaaacgaattttgaagtttttgtttgttctagcgtgaaagtaattacctcaagttaaacctataactgcattagtctaacggagaactgtaatgcgaggattacaaaagatattgaaatataaattaggcttaatgcgggaaagctagatgatacaattcacttattgctgctacctgttacattacattatgtcgctttcctacatgtttggatgggaaaatgcgtcatttaggcaaatagaatgtggattttcaattgaagaatgtaaaatgcagatttctatggttcagtttgattcctttttgcaatgtcaaacgctaccttggagatgactgataattgtgttgatttttgattatatattgcaggattc

SEQ ID NO: 45379 - DNA, 935 bp, Manihot esculenta
  Intron number 1 from transcript cassava4.1_016339m (locus cassava4.1_016339m.g) derived from phytozome v7.0 (chr-ID scaffold05875; pos 1513478 to 1514412 reverse strand)
tcgcagctcagctcgaagctcagaagatcctcgaggtaggcacttcattcccctcccctcccctccctctctctctctgtgtgtgtgtgtgtgtgcttttgtatttcttctgattagtttctagcgggatctgaagttattttcagttgttatgccgtgttaataattgttctctgatattgttttgttctgcttttaatagatctaatatgttaatgttacctttttccccatttttggttgcccagaggttagactgggatcactatgaaaggggatttggaaaaattcaaaatggacgtggcatcaaaagcaatacaaaaagctgaaaaaatagttaaattcgtttgccatttgttgattagtgtgtgaatgttgttatttggcgtgtttgcttcaaacattaatgtagatactggaagtagtttacagatgatatatgtacgtgggttgtctctacgcggcttttatttgttaaattatatgtgatagagtcgctatatatcacaaaaatcctctaaaatcatttaacttacgatagaaaactttaatggtaaatgtgtttttggcttgtgcagttctagtggttgagctttatggataagcaggccttgctattagacttgaccaagtgaaaactctctatttttcatttatctcgcgatgctgcatatgaaatctgtttgagtggttaatcaccctcatatgtagtttacatagagtaatgcggttcttgtattctcctacacttgctcaacctgttgtgtacgtcagttgttttggttattttgcacaacaggggaaaaatgctgatatcttgtgatatagaatacttacttttcctcttgattcttctcaactgttctttaatctaagggctactaattgcaatgtttacattgttatttccaagtctgataagcctgtggtagagg

SEQ ID NO: 45380 - DNA, 829 bp, Manihot esculenta
  Intron number 3 from transcript cassava4.1_025003m (locus cassava4.1_025003m.g) derived from phytozome v7.0 (chr-ID scaffold12794; pos 337540 to 338368)
agagacgtgtcttgcgatggagtacgactgtgaatttgcttatggttgaaggtgcatagaaatatgggtcacataaattgatgaagttgaagtaccgtccaatttctaatggttaggtttctccaaaatgtgatatactaaggattcactttgatttattgggtttatggcgcacacatcctaattttgccttattatatacattaaataatttaaggtgaaaattaccatgtataagacagtggcaagtggcaacatgtagatatagaatcctctgttcacagatggagacgattattcatcatcttcttccatgattaaacaaccctgtcatggttgggggaggaaactaatatagattgaggcagaacttgatgcaagagaaaaaccattgttgttttctattgcataccagctcgctacaggattaatgtgactagagaaatgtctatcattttagtcgttgaatgtaatgtataattttgagttaaataaattttttgtagtgttttgcatagcttaagaattttgcggataagggcagtataaaatgaattatacagaagtaacagattgcaaccttgcagcaaagaaaagaatgtgcccagataggtaatggaagtagtcattgtcttgtcccttaatttttggttggtttcgttttatagtccacacccctcaccccctccttccccttccacctcctcaaaaaatgtttttcaattgttatcactgtttatcctttctgcactctgcttctagatgatgatcctataaatgaatggtgattacaggtactcacctaacataaaggaaataaaggtgctag

SEQ ID NO: 45381 - DNA, 136 bp, Manihot esculenta
  Intron number 1 from transcript cassava4.1_028416m (locus cassava4.1_028416m.g) derived from phytozome v7.0 (chr-ID scaffold00821; pos 365713 to 365848)
cttcaggtttctgcacttatattaccgtcttttgtttctccttctataattcttttgaattatttttttcttcaagatctatatttgcatctgaactgaacagtgaggatttgttctttattcaaaccataggacg

SEQ ID NO: 45382 - DNA, 889 bp, Manihot esculenta
  Intron number 1 from transcript cassava4.1_003070m (locus cassava4.1_003070m.g) derived from phytozome v7.0 (chr-ID scaffold03542; pos 43069 to 43957 reverse strand)
tctgggcttgcttcaccttgacctgaattggatttgtgagtcaattcttctttctctttgtcgtgatctgatgcagttttaattttttgttgttagtttatgatccaactcattatttgttgtttatctttagatctgttgcttaatgtgaagtattttttgttgtgttctggtatttagctttgattaattcacatttcttgcttaattttacttgtatctatttttttaagaagctagaactgggaatgttattgcgaatcacattcgtgatacttcccttctaatggattttgaaaatttttttcactctttttgttggatctgtgatgtgttttgtattggatctaatcatttgggatgggatcttgatgtattgtgcttcactggtaatgtacatctgtgctgatcattgttctgctgcaatttatttagattttgagtagcctgcaaatgaggagtcaatgttgaaattttaactttttaaatttcttcatgcgttttctttttcctttttcccaaggaatgataagctctgaacattacattaaatgtttgattcagttggattgtctcttttcttctcttcctctgttgctgaaacttcttttttaaaaaatgaggttttcatagttattttattaatcagggtgcacaagcttctctcttgtcctcagtccggcctattatttattttcttatttcctctggtatgtagaatgacagctgtgccacttgcctattatttatttgcttgatattgggaattgtggaccctcatttctcttgtttactgcgtttttatatatatagacacttattttagatggatgcaatcagtactgagatatagttcctctgttgttttctttgtagaaattattttggc

SEQ ID NO: 45383 - DNA, 706 bp, Manihot esculenta
  Intron number 5 from transcript cassava4.1_010864m (locus cassava4.1_010864m.g) derived from phytozome v7.0 (chr-ID scaffold09492; pos 170602 to 171307)
ttggccacaggaagttgggacaagaccttgaagtaacttctctctgtaattgatgttttcattgttctattcctttcttttcatttgacatgttggttaaatgggtcatcacatggtcagttgtacgtttcaaatgttgttctctacgtgtgccttgttgttgtattactactagttattattgaatagcataaatctcttcaaaactaaaatgcaatgtgttggttgtacaatagagtactctagaagaaacaaaaggtaaaacaaattctttcaagatgaagtaagaacctttgatttgtgaagcccataaaagtcaatattagtaagattaaatgaatatagattttattttaattttcttaaatttattgtagtctaaatgaagcagacattttaaacattggtttaactaagtaaaaaggttaaaagcaatgcaagtatctaatttcaatttgtttgcttattgcttggcataagagtaagttttatatttgatccttagcagtcttaggattggaaaccagttgacctgtcacagcgtgttgcagtttttgttatatccctttttttttggtttcataaactcatcaattacttgcaatgcctctggtgatattttgcaccatcactttttgtctcaagtatatatgttttttgtctatatttaggtactgggatttgaggcagccaaatccagtgcaca

SEQ ID NO: 45384 - DNA, 482 bp, Manihot esculenta
  Intron number 1 from transcript cassava4.1_007360m (locus cassava4.1_007360m.g) derived from phytozome v7.0 (chr-ID scaffold06028; pos 249444 to 249925)
tgacttgactaacttagacttagaaaacttgcctggtacgcttctctctctgtgattctctctctaaatacctgtaattattttgtttcttcaccacttcgggcttccattcatgtatttgctttgttgagtttctatctatgtacgttctgattcatcacttcacttttgattctgaatacttactgtcacctgcactgtttctgttctgttttctgatttttctggttgttcataatggttttgtttgtggtattgatcaattcttgatatagacatcggatgaatttgtctaatttctgataagatttctgggtatgaaaatatttactaattccttagaatcctcatcatccatgaaaagaatccctgtatgtctatctatttcagttatctaattaatatttatatttctccaaatattttctgataattaattttccccaatttcatgtaatgttagagatttcggattctgatcc

SEQ ID NO: 45385 - DNA, 877 bp, Manihot esculenta
  Intron number 1 from transcript cassava4.1_013485m (locus cassava4.1_013485m.g) derived from phytozome v7.0 (chr-ID scaffold04851; pos 756308 to 757184)
gactaagaggtcatcgcgattatctactcactcaggttagagttttttaagatacccattgcttggatttctgttagattttttgtttcttgatttgaggatggagcttcaatgtcatttcagttgtatcgttgtcggtggctagctctgttttggatctcttactgtttggtttagatcaaagtgatgaattccttgctgaagtgtagcggccatactttccatataataagatgtttagtctctatgcttgagattttgcaagagtagctgatatcaattgtgcttaagtattctcaaatctggtttgttagacaaataaaataaaataaattgaaaattcgagtctcttgtgtagtttatcttgaattcccccattttctgaaaaaaaaaaaattaaccaatttagtatatgcttacacaagtacttgattatatatgttcatattctttgtggactactgagtaaggttcagaaagcaaatcattttgtcgtgttatttcagtgtggatgtaatcaaatggtgactaatattgatccttacatgttgtaactcaaagattttgcaaagtgtgtgaaagagaataaatttttgaagactttacggtctactgaaaacaggacgatttcactttagtgtttcaagtagttttaggtgcaattaagtgttgttcaacattgtatgctatacatatttttggtttttatttgtgaattaagattgttcagatcctttacctttcctctatttcccggtaaccaagtggaaatgtaaacttgtggttgatgatggagatgtgggaagtcattcattgaaataaatgggtgtttctctggtcaggtgaagtttcattgcctggtgggaaagctgaggag

SEQ ID NO: 45386 - DNA, 500 bp, Manihot esculenta
  Intron number 1 from transcript cassava4.1_007075m (locus cassava4.1_007075m.g) derived from phytozome v7.0 (chr-ID scaffold06748; pos 194606 to 195105 reverse strand)
actttcattctgggatttggttatctaattgggtacgtttttaatttaactcatcgtttttgaaagagctagttgttttattttatttttatgaatgaaaggagttgattttattggagtttaattttgcttgattaagccgatttggagtgttactccaacaagaagattccttgattgctttatttatcatattttctttcaaaagttctggattggggtttctgggcattgaatgcaagtagaagtgaaaatcaaaggaaaagaaaagctgaattataagttttctgtcgatgtggattttggagcacattcttagggaggatataaagttcaatgataatgttcggttatggattcatcacttctatttacttttttaaattattgttctaaaaactgttccggcaagttaattaaatatggctaaacaaatcatcattcttgaaaatatgcccttctatttcagaattcttgactgttggtttccgtttgtagcc

SEQ ID NO: 45387 - DNA, 971 bp, Manihot esculenta
  Intron number 1 from transcript cassava4.1_013918m (locus cassava4.1_013918m.g) derived from phytozome v7.0 (chr-ID scaffold10963; pos 236361 to 237331)
ggggctccaccaagacacttggaaatttcgtgaaggtctgttaatttcattttgccttttcaaatactgggattagttatttatatacattacatgagattgatacctttagaagagagaatcagctatgttgatctgtcggtgatttttattcgattttttttttatgttgttcacttggtttagcattataaattgcctagttgattcatcccttattgaaatgagagtagctgaatttgttattacttttttcattctaacatagtactgatttttttttctggagttagtaaggaggtttaaattcatttctaatttgacgtagttacgttgtttgttctgttcttatttaagcttatatttataattttgtattgtttaattgttgaaaattgctgaaagttctgaaattaatagttcttgttttttggttagaaagaaatgaactttgagtttttattttcatcagtataaattatgttatagtaatttattcgttcgctaatgatttattttgcttgcttgttttgtagtgctcacttgaattatacatgatcctgcaatgcttttcattattattattattattaatttattgaaggtgcaaattcttgtagttttaccttaacccagtaaattttactacccatatggatttgccaagtcttctttttgccggataatcctgaatgtcccttgctctggataactgtgctgttaattgttggttgtaatcctttttatggaggtaaaacgatattttctgtcttgctgatgttaaggaaaaaaaacaaagtgtgttctttttggtgtttgtgatggaataggtatttttcttcacaatgataaatgatgcaatggttcttcctttgaataattacattgcttatgtgcttgttatttgttggtttcattcatctaagtgccatgtcaaatgcaggccacctttgattgtctcctgaaaacct

SEQ ID NO: 45388 - DNA, 710 bp, Manihot esculenta
  Intron number 1 from transcript cassava4.1_014531m (locus cassava4.1_014531m.g) derived from phytozome v7.0 (chr-ID scaffold12525; pos 361723 to 362432)
ccgcagaggtggtttggttaaagctctcactactggtaagtgcgaactcaaatttctttatcttttcattttgagtttgctacctttgtttgatggaattgtgcagtcttgaacttttcttggtcactcttcttcttcttcttcttctttctttgaggtgggtcgttccttttctcggttttggtggtagtaatttgtctctcttactatggtggttttctttttctaatggcagttacaggtcataattttactttgttttcaattttcccgagaaaatcgagggccttttttctgggttgtgttcgagttacttgaccagaattgctacaggtgtaaactggtatttgcttggctgctgagaaaatttgaggaactggaaattagaggaaaagcgtgaattacttctgattctttctgttgtattttctaggaagtaaaaaaccactttaagtagtgtagtgttttttattattttgaagtttattattattattgttatttattttctgaagtgcctctattttttttcccgcttgcataaaatcttctttaatttgagctaaattttcttagctacaaatattgaaacaaaggttaactgattgaactgtagtaaagtcatcggagcaagagagctttttgttcattgaaattagggaatgcgcttgtttcaagagtgatatttattttcggttttgttcttgcag

SEQ ID NO: 45389 - DNA, 709 bp, Manihot esculenta
  Intron number 2 from transcript cassava4.1_019588m (locus cassava4.1_019588m.g) derived from phytozome v7.0 (chr-ID scaffold05859; pos 389889 to 390597 reverse strand)
cacagctgaggacttgaaggaaatcctcggatctggtactttctctcactcctcctcactctcaatgaatgtttacacttgacttaatcataatctgctcgttattgagatataacctgtttaattaattttaccgctgttgcttatctttacatgttttagtttttgtttaataatcttttcgtgatgaaaaccatgtattatctctgccgttgttcttggagctctgtttgattttgttgtaattgtggcttaatgatgatgtgcatgtgtgaggtttaatgatattgaataatttatctggaagacgagaatagtttctgatggttttatattaaactgctttttgcaacaaacttttgtggagttacaataccaatttttgttgtaattattgaataatttgcttattatgtctcatacttctatatgcagtgcccacaataattgtttatttacccaatccataagtgatagtttttgcctttgttttcttaaaatagcaagcattaaacaaatatctgaacaacttcatgtttctgtaaagcaaattatcctgatctttgcagtggcaactttgtagagtattactgcattttatcagtgtatctgtgcattaacctcaatgaatgataatgtccagaacacattaaggctttggaaggatgttataaaaaaaataattttgttcatgttgcagttggagctg

SEQ ID NO: 45390 - DNA, 783 bp, Manihot esculenta
  Intron number 1 from transcript cassava4.1_004521m (locus cassava4.1_002969m.g) derived from phytozome v7.0 (chr-ID scaffold05501; pos 74297 to 75079)
tttggatcctacggattcagagagttcaagaggaggtgagtcgattttatttgtttatgtatttttctccgatgggtgttttattttggtttgggatattgtagataaatgatggattttaaagtgggcatctgtgatgttccttttggattgcaaagttggggaaaacttgtttttggctttatcagatcccttaatctgttcttgttttcactcattttttctcttggcatgtttctggatgtccaaacagctagttcgtatgttttgattttattggtctgtaatatatgtgcttaaattggtattttgtttgtgggtattttgattcatgctgttttagtgttgatcattgatttgtttatgtatttgattttttctctaattggttttgaatttgttgtctaatattctttttaaatatttcatagctcaaaatactctctttgaaaaaatagaagatggatttgagttgtataaagtgaagaaggctttttgaactcgttgccatctcttttgtaaaattgggggttaaaggtttttagaagctgacttttaagcattattctgaacaaaattctgaagctcttcacttctgacacatggtgagcaattaaggagtttaaacttttaagtagctaaaactgaagaaatggtattgccatttagttatagtaagtgcatttacggttattgagtttcctttagcttggtgtgataattgattacaggtttaatatatttttaggtgttttccacttattctttttccatagattgagt

SEQ ID NO: 45391 - DNA, 1013 bp, Manihot esculenta
  Intron number 1 from transcript cassava4.1_019212m (locus cassava4.1_018993m.g) derived from phytozome v7.0 (chr-ID scaffold01508; pos 297246 to 298258)
gctctcaaactctcccaaaccatttccgattccaggtgcttgttctccgcttcaattaggttgtcatgcgtactattgatgctacccatgtccacccagtttccaatatttgtttattgctgtgggtctcacttggttaagtagaaagtcactttctttagtcatcaatggtggtgaacatgaatctgggtgtgtgctgctgtgtttcaattttcatggaataggtgcttttttaacagtcgtaggtttatattcaacagagtaaagggaaaatcattgcctgccattcatttacgggcaatcttacactgatattgtttgttgattaatctgtgagagcaccctgattggtccttgtttcctcagctatgaacgcatttctgtatcaacacattgtcatactagataatttaagttagcaacaagttatgatttgttaataagatcgtgtggttctcagaaactgactgttaacagaagatgttgatgcctaatggtgtattttcatgaattgtgtttgttggactgcatttgacaattgaattggtacatgtttctagattgaggcatagatggattggcatgtctgtagctatttaggatttgaacatcaaaggccaagatgactacttatccatgatgtgcatcactgcattgtgatggttttgatttctagaatcttatacctttgctttggtggaatataaatcagattttttttttttataattccaagtaatttaaagaccttacttcttatcattataagtttatattaaggtatgtgaaataaacatcagtggacctgaccaagcctaaagttgcaatttcagatacaaattcttcttttgttgagctagttggacgccattttgtggtagacagttagaacttgagagtatttctaccagtttggcctaacaaattctgataattcaatggtgttaaataatgataattgagtttctctttgtcaatggttttaaatcatatttcttcattcaggttcaaga

SEQ ID NO: 45392 - DNA, 781 bp, Manihot esculenta
  Intron number 1 from transcript cassava4.1_001941m (locus cassava4.1_001941m.g) derived from phytozome v7.0 (chr-ID scaffold12525; pos 842136 to 842916 reverse strand)
aaaaggagaagaaaagtccattcagcttctgagaggtgaaagctcggctgaacaatcttgccgacgatggttgcttcgaggaagctcgaggatgatggcactaatcatggtgagtgtacaccttacacatacaaacttattatttctttaaaattactgattcagaacaataacatcttaaattttaagtgtttcagatagtttatggactccaaactgttattaaaaaaataaaaaataaataaactaaaattttaaattaatttaattcaattaattttttaatttaaaataaatactccaaaagagcaaaccaagaaataagatatcaacatgcctccttgttataaagtcaaactattacttttcaatgattgcaaatcttttaagcttaaagataatttaaatttaatatttcctccatcttaaaaaaataataaaaataataaaaatttattattttaattatattaattatattttcttgataatttatataaatataactataaatttatttttatgaataaaaaaattataattgactctatgcattgactctaaattatgccaattaaatctttttcatttccaataaaaataaaaagagttgacttcttcttataaagtcaaaatctaaaagaaaagtgattgttagtcgctaactcgttgagaactttaatcttttgaacaaatggacttgaaaaaaatattaaattcatgattgtgttgttttcttcttgcagtgaagttacaatacttcctctttctattgcttcgc

SEQ ID NO: 45393 - DNA, 429 bp, Manihot esculenta
  Intron number 2 from transcript cassava4.1_013033m (locus cassava4.1_013033m.g) derived from phytozome v7.0 (chr-ID scaffold12794; pos 1835495 to 1835923 reverse strand)
tgcttgtagtggtagcttgaaggtattaatatttgctgtatacttcttttctataaatgaaaattgggaatatctagggtctcttcatatccatcttgcctcttcttctccttttagtgcgtcatttgtctcactgtgtcaatgttatagatatagtaatttgttttcaaatttagttaatgcgtgcaagcatggagaaacatgttttcagatttgaattagttttttattttggctatgttttaaaaaatattatggccatgaaacattatcaccacttgttggtaaaagtttgatatgttttatcctcctttatacaattaggaaacttttaatattttattttatatgcttaaaggtttcctctttaatcttatggatttaacaccaaggctgacaagctttactttcccagtttgcccacaggaa

SEQ ID NO: 45394 - DNA, 900 bp, Manihot esculenta
  Intron number 1 from transcript cassava4.1_013033m (locus cassava4.1_013033m.g) derived from phytozome v7.0 (chr-ID scaffold12794; pos 1836178 to 1837077 reverse strand)
acatcccattttcttttcttgtttcggatttccaggtaccttttgaattgcttcttgtttatttatgaagatttttttttttggattttcgtttgagtatgatattttatttttagggttttgtatcgatgattgaattgaattgcaatgggaatgatatctcttagccttttgtttttggttagattgtgaagtttttttttgtgagttttttgcttggttgctgattaaacttagggaaaatgtatcgatggactaaaggtattttctttattctctgtatataaaaaaaataccagataaatagaagtatatggaactaattgattgagtatagctatcaagattttggttttcaattttatatggtttttttcctagcatttctttagcttccaaacaggcagataaaacgtgttgacttctagagatttgcatattttttgggttgtctgcccttcttatagcgggttatccagttaggtttattttcttatgatgaagctaatgggctttatatttcatgattagataaatgtagggaacatatattcatgtgctttacgtttggttgctccgtaaattaaggacaagagagtgaaattatggacaaaagaatgaagcagatagcagaaacttcaaatgtctattatttgatttagttgcaatatggaatttctgagacaacgagaagattttctaatgaagattatcagcaataaatacaattatgacatcttaatctaatctgttataccctggattggagttcttaaagcttacggcttggcagcttgcatgtgttactgcatttcaattaaacgtccttgcttgatgtttgacattggataaactatcttattctgatgcagtgtgtcaggggtttccaatcaaatacca

SEQ ID NO: 45395 - DNA, 1015 bp, Manihot esculenta
  Intron number 1 from transcript cassava4.1_017177m (locus cassava4.1_017177m.g) derived from phytozome v7.0 (chr-ID scaffold05884; pos 105329 to 106343 reverse strand)
acatcccttgcaacttttgcaatattgttcttgcggtatatctgactctcatcaccatcatcatcatcttcgttaatgggatctgtctttttgggttcttgttagccaagtgtttttttttgctttgttctgcttctgctgctgctttctctcctttcatttatatttaaccagagagaaagaaagaaacatatatattagatcctgataaaagcttactctgcacctctgatgatcagggcctcgtgctatttttacagtaaaaaagagaaattctattaattttgcttccggggtttcttgtttttgttacagtcaggtctccatccttgggacttttcttttttcagaccttaaggtcctcaattgctgtacagaccactgagaagagagattattggtgttcttttttgtgtaattttcgcgtgaatagaagattattggatgtcaaaacacgcatttgctgataaatcttgatgaagacacaacaccttcaccacaaatatcctttctctctctctatgtgtgtatactactgcaccatcaacgctcagggaccatgtttcttcagctgataagtgaagaaaatgaagaactcaagctctatttttcttcttctatacaagacacccaacccaagaacattaaagaaagataaccagttctgcaacttttgattcttgcctttttgtttacttcagatgtttcacccagttttagctaattaatacaaccctactagaaattttcatcaagtaaaaagtcatcagttagccaccatacccactttctcaagaacccttcttctttgcttttgatctttctcttccctggatcaacagggagaattgaagaaacaattttcgattggatgtttatcgactttcatttcttgttcattcatatgtgtcaagtattcgtacaagaaaattcataaaatgtagagatctagtccttaaatttcttggaaactagatcagtattgtagttaatactatgtgcaggtgagtgtacc

SEQ ID NO: 45396 - DNA, 580 bp, Manihot esculenta
  Intron number 1 from transcript cassava4.1_006825m (locus cassava4.1_006825m.g) derived from phytozome v7.0 (chr-ID scaffold12794; pos 586085 to 586664 reverse strand)
ggatccacctcagtgtatcattccctcttcagttccctccctctcttattctctagctttgatttttgttctttttcacctctgttgtttttgtccaggaaatggtggaaattgcaagaaactgagactggtttttgaaaattttacatttaaaaatgcacataacaagacaccctttaatttcttgaatttccatcactgggtattcaatgaagatccaaactttatggtgtgttgtttagagcgttaatttttatttactagatagttggatttatcttgcttccagttgattttggttttgggcatgatattgtagtgtttctttttatttagccggatttcaatcaagtttccatgttgtgaagttgatcttaattattagcgaatctccaatatcttttgttggactactgttattagaacgaaattggtccattagtttggataccaataatctgctgtatatatatattcaagaagtatactgtatgttttaggtgtttgaatagttgtttaggtgttgcttggatgataacttacagggttggagttcggaccaacattctacaaaattctc

SEQ ID NO: 45397 - DNA, 895 bp, Manihot esculenta
  Intron number 1 from transcript cassava4.1_014372m (locus cassava4.1_014372m.g) derived from phytozome v7.0 (chr-ID scaffold06407; pos 102066 to 102960 reverse strand)
gtgctgtggaaaaagctgaggtatttggttataacatgttattctaattgttttttcgtagaataatattatctcaatttggtggattttgtgtaagaaattatgagtttggtcctggtgctttatgtttttgccttgatgttgctaggattgtggactgaatctgtcaaattgctttactaatgatttttctttctgtattatttttctgaaatatgaatttaaagaaaaacagtgattttgaactaatctgtgttctctcagatgtatttttgttatactatagatatgttattttgtggaaaagaatttaggattttctgttttgattaatccaaaaaatcaatggggtgttatgtttaggaatgataacctaaaaattttgcgattgtgttaaaaatgtctaatatccagttctttgtaaatatcaagtgctaatttgctttatgcttttattttttccattagtggtttaaaaccagtaatgctggcaaaatttgatagagatgcttaaatgtcgtaataagaatgattggtattttacttgtcctttgtttatatatctctcggctacaacctttttgtatgattagatagaacaaatgatgctgcttctccaattaggtcttaatttgctagaccatttcaatttgtttatatctatgtaagaagagatgcaaagggaagggattattattatcatttcaagaattctagtcataatgggtgaaatttgaagttccaaaccaaattccaacttgacatgataattagcaggtagtatttcagcgaggattgaggttctaaattctgaatatataatcttgccaagatagtctggtgatgaaaattgagataattcattaatcatcttctcttgttttctttataggtt

SEQ ID NO: 45398 - DNA, 983 bp, Manihot esculenta
  Intron number 1 from transcript cassava4.1_014399m (locus cassava4.1_011152m.g) derived from phytozome v7.0 (chr-ID scaffold09880; pos 95304 to 96286)
tggcctggtatgttcctctctaattcacgtgtttattatgcgtagcttgtgctctgttggattcgtgggtgtctttcgattgtatttgtggaaacacagagcaccccttgtttgttttgtgggtagttagcttttcaattgattttctcttttttttttttttcctgtgtatgaatagttccgctaaagaaaaccatacttagcaaaatgagccagaacccagtattgggttgctaatgatgatgatgattaattgatagtaaagagttcgagtgccttctgttcatgagccaacttgtggatcttatattgcattctttttaatgcaaaaactgaattccagattgtattatgtcgataacaagttttgtgcaattccagtgaccttggaataaatatttgaaccgtttaactgctttgtctccacagtgaatgctccttaaaactttgcttggcaaattagattactagatctgtttaaaattgaccaactttcttttagttatttgggttagtgcctcttttgttcttgcattccttctcttcattctattcacaaaccttgttacatatagttgctgtctgttcaattgtactgtttcagagctactgcataacttaattaattatttgtgtaatatcagacttctcgatttcttttctgagggagttgaatttttgatattgtgtcagtcatagcattttctcacgtgttgtgatgttactgggaacataatgcttcatgttttttcttgggtgcagtccttgtgccattgacttcatatggtttaatttatctgttatattggctaatggtggatcttaggcggccatcacaattgaagctttcgcttttaaatttttgcccccgttatattccaccttttaaatgcaattatacgggtgcttttctttattgtaaaatattcattatgaaatctacaggagaggcacactccttaaaagtggagaagatcttattt

SEQ ID NO: 45399 - DNA, 795 bp, Manihot esculenta
  Intron number 3 from transcript cassava4.1_015257m (locus cassava4.1_015257m.g) derived from phytozome v7.0 (chr-ID scaffold06751; pos 4748 to 5542)
gatcttcaggtatgtttccattggctgactctcgcatttgtttaatgatctgttttgttggtttgtttgagttggcctatttacagcctattatattaaaatgtccttttaatagttgttttgtgctctggtaacctacccgggcagaaaggtgaagggagttgttgggagggggagggggggaggggaagagtggggaactaccgctgaagaagattactcattaatctaaggttcacacatttcagtgtcttacatccatatttttgagcagagtatatggcaccccatcaaatatgtcaaaacaacttaaaggctacaattttgtgctttacagcatgcttggatgaaggctatagcttgaggacttgctgcttaatggttaatgtgatatgctaaagtcctctgaaaggcatgtgttcttatacgtgagcacagagcataatccactaattgctcttgtattataacgacttcttgttagactgtttggtagtcgtaggactagtagctagttgcagatagatgcactactcttttggggcccaaatggtgcatttacatccattttgagcacatattcaaatgggtttcttttattaacccttgtgaaagggttaatttgctaagtttcactagaatgctgctgatttttccccttacattatataacttgaatgtattactatcctgctaaagttattttgaactcataatatttacaaaattacgtttaatatcattttatggtgaacaacagattgggaagctattgtggatcgtgctcccagtgaa

SEQ ID NO: 45400 - DNA, 806 bp, Manihot esculenta
  Intron number 1 from transcript cassava4.1_019496m (locus cassava4.1_019496m.g) derived from phytozome v7.0 (chr-ID scaffold00492; pos 226120 to 226925 reverse strand)
tcacgtaaacaagaaataaattacgaatctggtaagagaaactttagaatagctacacagactaacatgttgctcagcaagtttaatattaagcatgaaaatacagttgatttcaatgtcaccaaattggttatgtggatgaattccaacagcacttgtcaaatctatgtcagaaaataaaaggtaaacataaaatgaaaatgttgacatgcatgagcccatgcacagggaatttggaggaagacatgtaccaatttgcaaaatttgatgtcattagcatcagcctccatatgcagcttggaaaaaataacgcagatagccatgcgtatacttttgttgtcttttcatgcttcttcaaacagctactactactactacttacaaactcaatctatactcatcattctcaaaatgtgattctttttttcctgaacaaaaataatcagattcacgaaacaaatcccatgccagcctttacctaactacatttacaaaaaatccccatcttcctcttcaatatcctcatcctcactgtcccacaacaagtaatcctggtcctcttcttcatccacttctgaaaacactgaaatcttcacaccactgcaatcagaccttgctcctgcaagttcattaaggaagttatccatatcactctgtaaacaagccatattcccttcaaaatgtgtcactgaaaagaccccatcattctcttcccaatcctcacttctatttgtactcttgggcaccaaatcgttttctgtaatctctccattctcaaccccaagccagggtacccacaaatccgc

SEQ ID NO: 45401 - DNA, 151 bp, Manihot esculenta
  Intron number 1 from transcript cassava4.1_034158m (locus cassava4.1_034158m.g) derived from phytozome v7.0 (chr-ID scaffold02080; pos 25324 to 25474)
ttgttaggtgctcattacgcgagtgccatcacaaggtaaggtgagcttattcacttttgtttcatttttcttttcttaattgattaatcggtgttttttgattacccatttgcctaaacttgaacttttgttgatggaaacgggtgttaag

SEQ ID NO: 45402 - DNA, 516 bp, Manihot esculenta
  Intron number 2 from transcript cassava4.1_034158m (locus cassava4.1_034158m.g) derived from phytozome v7.0 (chr-ID scaffold02080; pos 26056 to 26571)
atcttgcaagcttgctttgcctttgtgggcgaaaggtatggctccgcatgaatccttctacacttttttctcgtctgttcttcaaacttcatatccatgcaatttactaaataaagaacaaaacgcaaaagaaaaatcgcgccaggtaggggtcgaacctacgactttctgcttaggaaacagacgctctatccactgagctacaggcgctgttattgttaagtaaaattcatagtactatctgttgcatttctttgcgtgcgtccatgtcacagaaatcaaagacagatacaaagcaactaacaacagtaaacagttttagctttgcgattgctttgcttagaaatgaagctaattattcattcggtagttgtgctttgacgtggtcttgtcctcttcttttttttttttttattaaattatatatatatatattaggtatccctagacatcatcatttcttagtacaattttataaaattatttattaataaaaatattggtttacaggtattg

SEQ ID NO: 45403 - DNA, 622 bp, Manihot esculenta
  Intron number 1 from transcript cassava4.1_006831m (locus cassava4.1_006831m.g) derived from phytozome v7.0 (chr-ID scaffold00492; pos 218531 to 219152 reverse strand)
gctctgtctaccttgaaggtaagcttcctcttttttttctttagcctagttcccaagtttctatgttatgaatcaagttcttgcaatgaagaacatatagcttcttgtaaatttgtgaaatgtagctccagagattaatttgcttctgtgaagaggcactagaaagtggacaacacactaataaataattctccaacctaagttatctccactaccagtgaaaggctaatgaatatgtggtccactacctaatctaaatcattacctatggagtggagaagtattgtttgtttaaacggtaaatcaaatgcttacactatgctaaaaatttaatccaaaaataatggttggaaggaatctgagcatgatgctgacccatttggtcaatataaattcgaacccattaatggtggcatgctacattgtttcttggagtagttatcaggcgttgaccgaaccaattatgtgggttgattcaaaaaaacagaatcatctaactagcaagccaaattatagcagtttaatacaattataatatattttcctcaactttcaagtaattatacacatgggtatttgtgttacagggacgaaattggtgtttgaatcagagaaaggagaa

SEQ ID NO: 45404 - DNA, 580 bp, Manihot esculenta
  Intron number 1 from transcript cassava4.1_005154m (locus cassava4.1_005154m.g) derived from phytozome v7.0 (chr-ID scaffold05859; pos 58302 to 58881)
ggatacgcagggatcggtatgtttaggtcttttccccccttttttatggtcaaatgatggcgaaagatgtatttagtggacgagaatttggtggaaagaaatcagtgatcttttttaaaagttattttgatacttttggattatcaatctggttggttggtgacagagattgggaaatgaataatggagtgaaaatgacacttcttgtttagtttgtagggtgtgggggaaagggtttaatgaaatataaatggtaaattgtatttatggcgttcacatgtcagtaagaaaaagaagaaatacacactcgtttgttaatgtatgagatggtttgttaaacaattaaaggatcatcatataccattgctgttttggatcaaacttaagtcgatgttttagtttttaagtgatgaatgtttcaaggttcattgaagttcctagatgtagtccttctacattttgtactccattaaggtgctttatttcttttattttttttgtctgatggattccggcacttcccattagttttaaccgtttatcactttaacaacataagaaattcattgtttgtagcgtt

SEQ ID NO: 45405 - DNA, 871 bp, Manihot esculenta
  Intron number 1 from transcript cassava4.1_002800m (locus cassava4.1_002800m.g) derived from phytozome v7.0 (chr-ID scaffold07005; pos 79836 to 80706 reverse strand)
caatatagaagaagctgaattaacccttcgtgaacgtggttctttgaactatgaggtttgcttcttctggcactgtagcttttaactttgcttacttccatatcaatctctctggttctgagtaattccgcttcttattaagttgacatcacataacaaacttcagaatcccttatctcttcttactttcttattaaaccttggaagaattaggtattgatgtttgattaatttttttcaggtttttatgtcactttgctcttctttttctttctttctttttggctattggtgatgcaagcttttgtttaagaatcatcagatcacgagttcacaacattttctcaattaaaccctaatactctaatacaattgttttgaatgcattgactaacaccaaagctttgaagaacctatttgaccagtccgcttagcgctacttaaggccatttctactgttggatcatagttgatcatgtctttagatagcattcagtaacatactctgagtgactagttttgcaataaacatctccaactcaagaacctaaagatctgatgagcacctaaaatgttattcacatgcttggaaagaacaagattggttcatgcatcacaacccttgcgttactaaaaccctgcttgagctcaccagaatccgaagcattcctcttatttttcttagtacattgtttttcaaattgtatgcggttggtgctgcattaaaatcataacatatgccttcttcctcaacttgccaattagtaatttaccaatcttggttgatggactatcgtctcgtttcttaatcagtagcctaaaacaagtcaactttgtggatttttatttcatgatggttcgtcttttttag

SEQ ID NO: 45406 - DNA, 238 bp, Manihot esculenta
  Intron number 2 from transcript cassava4.1_023145m (locus cassava4.1_023145m.g) derived from phytozome v7.0 (chr-ID scaffold06278; pos 462162 to 462399)
aaaacaaggcattttacaataaaagaaagaaagaggtatatggaacccatgatctgtctgtctagctacatatatataatacaacaaagagaaattaattttcatcaggaatttgaattttgatattatatattttgttctttctttttttctttttgtcttctaaagcgatccttattcattctccaagtgttttttcttggttcagctcgaacttttgcactcaaaaataaaccac

SEQ ID NO: 45407 - DNA, 723 bp, Manihot esculenta
  Intron number 1 from transcript cassava4.1_023936m (locus cassava4.1_023936m.g) derived from phytozome v7.0 (chr-ID scaffold00999; pos 310401 to 311123 reverse strand)
gacgaacaatacaaattggaggaaggccttagcaagtaggtagttggtttttgggatgtgttttttccttatttattttctagataactgctacatatattttatgtgcttatgcacatgctcattgaaaatttttatgtcttgtaatactgttaacgtactagccaagatggttcaaatccattcttcctataaattaaaagattaagaattaaataaagtaacaacggttttactgtgttgttgctgattttacgtttttaattaacttggggtagatattcaaccttttttttttttccaggtgagatgttttggacttgtttaggaggggatttatgtgatatttccttaggtcaagaaagaaataaaatgtggactggccaattattaactgcacataaaaatacttgctgcttctggttttatgtgtataactatacataatatggtgatttgctcagatatcctcgtgaatattggcaattgtttttcagcctacttgattttactaccttataagatttatatttccatggtgatgttgaaatgactgcttaccttgtttattagccttggtatgaaaatttcctttgattatgtcttttatttacactgcatgtttgctttcctactgggctaagtttgatttacttttattctatattttaatattttaattttcactcactcataatttgttttgaacatgtagttttgctg

SEQ ID NO: 45408 - DNA, 566 bp, Manihot esculenta
  Intron number 2 from transcript cassava4.1_009166m (locus cassava4.1_009166m.g) derived from phytozome v7.0 (chr-ID scaffold07402; pos 43166 to 43731 reverse strand)
gtctgccacatcacgaaactgaacgatatcagaaggtaaacaactctgtaagtatatatttccatggaaatgaagcttttctttaaagggtatttcttgtttgtttttggtgaattatatcatctttgcttggtttcccacatcataaaatatgggttctaacttaaatttcaatctctccagtaaccctagttcttagagatgaatttgttatgtcttaacttggatatgcagtgacttgaagaaaaggtgtctttacttcttcacaagttgcaggtgcacaatctgaaaaagtactagaggataaaagataagaaaattggcagaaacaaatacttctgacatgatgatgagttgagagattcaaatcttgttgttatttaattgggattttatcatatttaatgttttctttctctgtcttcacaaggaaatttatagcacagccatgcatgaaattcaaattcaatgaaatccttcagctatatatatttatattgaatgcttctttacatcattgaccttctccaggctgagatatctctttgccgagtttataaaagagc

SEQ ID NO: 45409 - DNA, 715 bp, Manihot esculenta
  Intron number 1 from transcript cassava4.1_002023m (locus cassava4.1_002023m.g) derived from phytozome v7.0 (chr-ID scaffold12794; pos 2132403 to 2133117)
aagctatatttagggatcaggtatgtcctgtctcaagttttagtacaaaagtaaaatttttatctttttatatcacttcaataatcacattccacatgtaatgtcaattaatttgaatatgcctcaaaatattttagatggtttcgtagttggttacatcttaatgttccacacaattttcttgttgtgctattctcaaggctatctaaaactattttatatgaagaataataaaggccagtttaagacaataatttatagtgggcaatgggattatggtgcaacttattttaagtttctgaaagagttcaccatgtattttgtattggtgaatttacaataactctagctgcttcacacaaaagatgaatttcctagcactatgctcgggttgcaaaataaaaacttgcccatagaagtatcaatctaaaatagtattcttcctacaagggttggctcctccagtgcagtgtagtaaacacaggtggagtaatgagcttgaaccttgagagccttgcttcaattgaaaaataatgcacttcttccttttgtcatccaaatctgacctaacggacaaatttggaccctttatctttttctgattcttcaatttatatcttccattataagtaaactttgatattaattggttgtgactcaaaacgtgttaccgttattgaaatgtgtataaattgtattttggctgtgtagatcc

SEQ ID NO: 45410 - DNA, 258 bp, Manihot esculenta
  Intron number 1 from transcript cassava4.1_009128m (locus cassava4.1_009128m.g) derived from phytozome v7.0 (chr-ID scaffold08886; pos 52727 to 52984 reverse strand)
ggttctaccttgttgcttctcaagcaacttccaaggcaaggaaatcgaacttttttctttttaatttatcaggttttcttggcaatcaaacatttcctattttctttctctcttttcttttcaaatttcagttttataattatttatttattctgtttcctctattaatgtaattgtgaatatttttcatgttaatgaatgctagaaattgattttctatcctgcagaaccttcgcgggaaaaagcagtaaaaaacct

SEQ ID NO: 45411 - DNA, 345 bp, Manihot esculenta
  Intron number 1 from transcript cassava4.1_023797m (locus cassava4.1_023797m.g) derived from phytozome v7.0 (chr-ID scaffold09692; pos 89919 to 90263)
ggaaattcaattttcagtctgatttgcggcctaaggtgagttttgattcttttttcttttcaatttcaggtatattaagattatatttcattagtttattggttttcaagtttagatttaataagaacatggtttgatacctatcgatgattatacttttgattattaagcttttacatcctctttgcattcgttctgattgttcgttctcttgtacaatttatttaatatgtttgccatttgttcattttctttgtgtttcatttgaaacttttttaccattgtgcaaaatttaatccatttggagtattttatgattattttcttttttttttcatgtcagat

SEQ ID NO: 45412 - DNA, 368 bp, Manihot esculenta
  Intron number 2 from transcript cassava4.1_028097m (locus cassava4.1_028097m.g) derived from phytozome v7.0 (chr-ID scaffold05280; pos 133168 to 133535 reverse strand)
ctccaccaggtttttggatttcacttcttcgggtaagacagtttttttttcttctcttcttctggtataataatggctgctagagtttcttactattaaccattttaatatattttttaaaattgataaatcaaccattgagtttttccatatcataaaaattaagttggaattttttcttaaaattttaatttgttagttccatactttgaacttgaacacaacaaaggtattgttgatgggtggtcaaatttgacttcaatccaaaaattaggttttgaaatttgattcttaatttgagaattatggcattgaatatgaaagatgtttgataaatgatgttttggccattttgttgttgatgacag

SEQ ID NO: 45413 - DNA, 266 bp, Manihot esculenta
  Intron number 1 from transcript cassava4.1_010210m (locus cassava4.1_010210m.g) derived from phytozome v7.0 (chr-ID scaffold04890; pos 163768 to 164033)
tactcttggcgacctgattcctgcaacttacccaggtactttcacgccaaatagataatattaaaattattttattttatatcaacccatacacagctaagagttatctatttatggaataataaatagacatctgaagttttgatgtgttgagaatttttttttctttggattggactctttccctatcaattgaagaaagaagttttttttttttttaaataaagattggaattaattaattttggatggagggtacaggttta

SEQ ID NO: 45414 - DNA, 468 bp, Manihot esculenta
  Intron number 3 from transcript cassava4.1_006853m (locus cassava4.1_006853m.g) derived from phytozome v7.0 (chr-ID scaffold01508; pos 289901 to 290368)
cagagctcttccgatctcgtaattctctctcttttgccttctttgtctatctacacatatgggcgtgcgttattgtatatgaatctctatttctatatgtgtgtagattgcattctggtctgggttaggtagttgcgtaaaactgctgtttcgaggactgggggatcattaattttaatacttatttagcatttaccacctccttaaaatattatccctgacatatttgaattgggtaagatttagaaagtccttgctgtgtgctagatggtacacatgctgcatatagtcacgttagggagaagtacacattaataatttttgtcagatgttctgagtttttattgtttgagattttctgatgtatggatttgttttcttgatcttctgttaacggtggttttatgccttttgtttcttcttggacgtataggaccttcattctcagctaaaggaattgatcccaga

SEQ ID NO: 45415 - DNA, 600 bp, Manihot esculenta
  Intron number 1 from transcript cassava4.1_033268m (locus cassava4.1_033268m.g) derived from phytozome v7.0 (chr-ID scaffold05116; pos 173740 to 174339 reverse strand)
agattttcgtagtggacaaggtagtactactctcacattgctttcccatccacttctctttacttctgttttgtctgcttcgtgctatgaaacttcgaattcgcttgctatcaattcttactccacttttgtactcattatattatcaggctcaataaatttggactctgcctctactttaattgagcagcttctgttaaagctcaataaatgcatactcttcctcccttttaatttgcactcattatcctatagactatagagtggtccttatcttgatgtttcttgtttccacaaactttccttctcacctttctttttctccttccacaactgccgatagtacctccacaaatttactgttgacagcaactttttgccaatatttctattcgaatgcaagattctccaattttcttctatggaattttataatctgtttgatgcatttaaagcgtttattacttgaactgtgtatgttgctattaaatgctatttgttcttttcttcactttgattcatgatgtgttcctttcgtttttattttttgaatcaattcggttggtaattttcttgtaacttgttgcagaaatttctcgc

SEQ ID NO: 45416 - DNA, 1016 bp, Manihot esculenta
  Intron number 1 from transcript cassava4.1_009285m (locus cassava4.1_009285m.g) derived from phytozome v7.0 (chr-ID scaffold06582; pos 751498 to 752513)
ccaaattttccattcaattccatttttgggtaaattttttttctctttatttctgtcgatcttatttattattattattattttttaattttctgctcttgccttgggttcttgatggttcctgctctttctctgttaatttttctttcagaatttttaatatttttctctgtttgcgtgtcaaattccaatacttaaatcatcttgctcattcatacatggttgaggtgtctgagtaattaaaggataaactgataaatatctaagagcttgtttgggtctaacattggaagctctgcttctgtggatccttccagatctttctggggtttaaatttgtgggcttggtatgccgacctttgatgaaatcataaaagggtctctcttcttgtaattatacttgtatcttgtattcctctgctatttggagattctgagttaattttatcgtatattcatttggtaagaactactcaattctctgtttctttcttttctttatttgcaatctcattaatggttttcttcttcaaatgaaaattctcttgtctgccaacttgattaccttttttttttctttggattggtgtattttaagatgagtattcttgtttctggatgaaagttagtttagtttaggttctttttaattttcagctggagattatttcctctgtcctgtgattttctgattgatggatcttgaaatttatcactttttgaactggaaccatgagctgttttgatttttcaagagacgtatagttgttttccagtcccatatgattctgtgacattttctgctggtagttcaaggtttcctttgatagcggaattttgtattggtattgtttatcagtagttgaatctgaaggtagttgcaaaattttcatgccacttctttctgtgtgaattcaaggttggagtggtgtttgccttcttttttaaaaaaaaaaaaaattaattaattctattaccttggctatgacagagatcacaagaaagaaagagagaga

SEQ ID NO: 45417 - DNA, 1049 bp, Manihot esculenta
  Intron number 1 from transcript cassava4.1_001972m (locus cassava4.1_001972m.g) derived from phytozome v7.0 (chr-ID scaffold12794; pos 512404 to 513452)
gcttcccgaaccttccacaaacgccactgccaaaggttttcatttgatgatttgtgttcttatattaatacatgcatataagtcgatttcgcggctcgttttagttgtcacatgacttactaagcgggaacttgaaagtatccatgccatcggtccatcgaggatgatcagtaaagatattaagagatcagttaaaatattgtaaattaaacctaatccttggattgattttgtgaagtttcttgttgatagagattataaagctagtgctggggcatgctttattataaaaataagaagattcctgcagttttacagttgtctgagatagatttttttcttgggataaacagtaaattttggtttcttagtagatcaagtgtttgtttattgaagtttgctattcttcattcttgcttgaatttgtttatatgtattgtacaacggtcagtgatctgaaatgaacctcaacaatagccaggtactgtgtcatttgatgttgaagattcctatttcttcctgtcattgacctctcctgatttccatttccatataatctcattttaaaagaaaagaaaagaaaagaaaattccagctctataatatgaattcgatgtcaaccaaagtaacattactgttcaatttatttggatgtgacatgacgatatatccatcctcacagagctttccttaaaatttggcaattatacgataaaaattatttccttggccattctagaaaaattaatgttgcaatgccttccatttctcttcatctattgatccttcagctttataatcttcttttttgttaaggaaaagaaaatcctagcagctttataacatgaatgtgatgtcaaccaaaataaccttactgttcatgtacgatgagaatatatccatcctcatggatctttctgataatttctcaatgatattttgagaattctttcctcagtcggtcttgaagaactaatgttgcaattcctttcatcttcacttggttgatcctttaattttttgtgtgttattcagcgggcatcccagtg

SEQ ID NO: 45418 - DNA, 864 bp, Manihot esculenta
  Intron number 2 from transcript cassava4.1_020630m (locus cassava4.1_020630m.g) derived from phytozome v7.0 (chr-ID scaffold05280; pos 334769 to 335632)
acgaggagagaagcagctctaatacttggaattaggtacgtcttttctcagaaaatctaggttgtaaatgaattcatttcataaatttattaaaaaaatttaaaataactccgtattaggtttagaaatgtctgtttatatgcatgaacaagctttgacggtcccataccaagacgagtatgattgttgttgatgttgccttacctaaactactatttgattagctaattgattccaggttcttttgatgtttgtcttttatactataacctgcacgttggcatatgattgttgtaggccattttgcttttgtaaatattgctgaataaaagcgcttatcatttatttcccatagttccacatgccttttgtcattggtgtaatttcccgagcgtgaaatcaatcatgttgatattgccttgctccaagtagcattggagataagcagctcttaactttgtggttgatagagagtggttaattcatgaatgatttccagctccatatgaatcaaaggagttggtactagaaacatacattatatccttactttcagacgttagttccttaaatcagcatgcctaccttgtgaatttggccaaaacctgacacttaagtattccaaaggaggagatacctccactttatccttgtacgatgctgagcttcacagctcttgtagctggaaattgatgtcatcgcctttgttactatcactgtacattttcatttctagtttatttgtaagaaatagctgttcttcaagtctcccaaatgcatggtgcaaaataaatgtgttcaacctaatatgcctcttttcctttgacagagaaagtactccatcagacaaggttaggaagctca

SEQ ID NO: 45419 - DNA, 690 bp, Manihot esculenta
  Intron number 2 from transcript cassava4.1_024038m (locus cassava4.1_024038m.g) derived from phytozome v7.0 (chr-ID scaffold06890; pos 133204 to 133893 reverse strand)
aggggctgctttggctcttttcgaacctcagcctcgtaagtcccgaaccgccttgcctccgaacctcctccctataaatatgctcctgtctcatttcgcgtacgtatcgctcgctcactggtcccaatcaacgctccgtaatcaccgcaatacgcttacgtattaaaggtatcaaagttcaaatccgaaccttcttcgttatgcaacgatgccgttttgcttttctggtttctctcactttttttttggttgttgtttggcatccgtttgactgtttgatttgaatcgagttcttggaaaatagttcttgttgttgtttggttgctgagaaagtttgagaagatggaggaaaatgaagtgaaattttgtctctgataatgttatggaggttaaataagacgtgattgaattctctcctttcttaattttcttttgtttagttttgtttctttgattttcttagctatgcaactgagcttgctcgtcttgattggtttatgtttatgatctggtgtctgtatgagatttcattgtgcgattatgtttctttttctcctgttccggcaattactgttataacagctttacgctatttgatgaaactctgtttgattattgacatggctatggagatcactattactaatttgattgagtgctatttttcgatgataggaccattttgctttg

SEQ ID NO: 45420 - DNA, 560 bp, Manihot esculenta
  Intron number 1 from transcript cassava4.1_011194m (locus cassava4.1_011194m.g) derived from phytozome v7.0 (chr-ID scaffold00206; pos 310959 to 311518 reverse strand)
ttgcacctcttgaaaggactaaaatactcttgcaggtgaagcttcctgctgatttttcagaaatttgtggattttatgtcaatgggtatttcctttggattcaagtatttgatcacttgataatggatgcgtttctttttgaactattttttttagttaaattgctctgtacttttgctgaaaatatttctcttacaattaattaaacaaaaactacttggaaggtgtttgatatgattcattttaccttttggagcttgcactcggtcatatatgttatgaatgtacaagatcagtattggttgagatgcttgattttaacactcataattatgttgcttgttctgaatatctgaatcaatttcatgtcgatgtgaaagaagattggatatggaaatctggtgctactttggcatatccaattagctgtatggttattgctttttccagaattctctgtttctaagttttctgatcaaatttgtgcttctgtatagttctcctaactttctctttattttgcagacaagaactgaaggatttcaatctcttggggtgtc

SEQ ID NO: 45421 - DNA, 544 bp, Manihot esculenta
  Intron number 3 from transcript cassava4.1_015720m (locus cassava4.1_015720m.g) derived from phytozome v7.0 (chr-ID scaffold02717; pos 9581 to 10124)
tctcgaggaaagcctgatcgtgtgtacacttacgggtgagccttgaatctgttcccctagtgtagccttactttagagcatcactgctgtcatgatattgattcataattttgattttattttctttattttagtcttttgaatttattttaattgttaaactcttcttaccaggtacaaattttttacatgataaccaagtaaaaatttcttcaacctatttctataggatagagagcaataaaaatattcatcacataaaacttggctaaatttctgtaaaaatttagtaatagtaacctttttgaaatttattaaaaaataataataataaagttggatgattttttttaatgtaaattagaatttggtcatcatattgatatttagagagtttggtcatcatattgatatttagtgaattaaccttgaaatgtgaattttcgttcaagtgttagttgtcttctttattataaatgttaagctggtattctcttattgtttctcaggtttgatattggcatcctggtttctgtccctcggg

SEQ ID NO: 45422 - DNA, 965 bp, Manihot esculenta
  Intron number 2 from transcript cassava4.1_022042m (locus cassava4.1_022042m.g) derived from phytozome v7.0 (chr-ID scaffold04269; pos 127278 to 128242)
gccttgcaggtggtggcttcaaggacaccttactggtaaatactgctcttgtttgatgcttttttggtgaattgcgattcactatagaagtcgagttgaaatgcgaatttaaagttagttgctagggctaaagaattgtaaatgattgaagtttctggcttctttgtttactcccttttcgatactgggttaatctaatatctataataatacccttcactttagctacgttagaaggagaaaagatttcgggttagatgcaatccttgtgtgcaattgccaatttgaatagttaagatctggaatggttggaaattgttgaattatatagcacaagtttgtccagcattttctctaatatgcaattaagaataaaatttagtagtgatagtaaaattgatagtgcttcaactttatccagtttctatttattcttagactttaacatttttcattcaactgcttaaccagatttataatttctaatcaagtgttagtcttagactttgctgttgtgacttttatcttgtttgaaaacaatatgatgtttttattgttatttttagttttcttgttatcagggaattaggttcattaatagttaccatttttgagtttttgttttattcttcgttccaaattttaattcttgaacttgagtttaatgttaatatcgcttttcactgaataattctggccaaatttgattagaaagtattaacttctttaaatgtttcaatgcaaaaagataaagcaaatacgtagataagcaccatcaatgatataaggtagctttttggagggtttagactgtattcgtggctaagaatagggtttgatatgcgataaggcttagcattgggtttggttttctttttaattctgagtcaatttaattggttttcattgcagacaattgcattggtttttttgttgaaatcctgcagctctaccagcagagagta

SEQ ID NO: 45423 - DNA, 663 bp, Manihot esculenta
  Intron number 1 from transcript cassava4.1_012308m (locus cassava4.1_012308m.g) derived from phytozome v7.0 (chr-ID scaffold06683; pos 355995 to 356657)
gcactacttaccgtaaggtactctttatcttctttttagttcgatctactattgttgatttagatttacgatgttctagctattttctgctattgatttgggaaggaaatgggtatttgtagttggatcgagcttctttatgtgcttgacatgcttttagattagtgatttcccctgaaatttttggatttttctctaaaaaaattggcctgggtctttgttttttgctttattgcgttctatctctatttcttgtctgattttagtctctgttaggccaaatgaactggatgggcttgtagttatagttgtcttatgtctgctgttctattcatgctctattctaattcctttctcttgaagaagagattgcattggaattgtatgctaatttagaggtggtccattcgcggggattttaatttcagaacttgaaagatttaatgaatgatcgattagcttttgatcgagcaaagaagctctaattgttaatctttctttctttgaagaatttaaaaacccatggttttgaaactttaattgctctgcaggtgttgtgtggaaactcttaacttcttccaccacaatttttgatacccctttcgtattaatggtaatcataatctgatatggtgccaccatgtttggtttgttgatccaggg

SEQ ID NO: 45424 - DNA, 811 bp, Manihot esculenta
  Intron number 1 from transcript cassava4.1_016529m (locus cassava4.1_016489m.g) derived from phytozome v7.0 (chr-ID scaffold11069; pos 395991 to 396801)
cccttcgtcgagctctaggtctgtaatctttacctccatctacttcattggctattcatttttctttgtttagcattatagctttagattttggtttaatttattggttggtttgtttgtttctgctgctattggtacttcttaagaccctagggttcttaacgatccaagcaattttagctgaattagacaaaattttctgtgctttgagagatttatcaatttatgcaagttgcatttttttagtacaaggtgcctgctttttctcgttttacttgtctagatgcatagttagaatgtggatgcattgaagtgagctggtatataagtactgtttgtgaggcctacggtaatatttgatgatttatagcagtctctgttggtgatgactgatggatatggccactgagtggactacttcaattaatgcacaaattaatgtgtaattatggcaatgacattggagaataagggtcaccactttatgcagaagtgatgttggtgggattgtatttctgcctcttttcctttgaacacacattgatggaatataacttcttcctggtctttaaatgatataggaggactgaaatttttatcttatgtacctgcccagtcatcactttttatttcaatgaattcttaaatttcatcttatcaatcaagaaaaaaaatctgaaaacaaatgttttcttcttaactgctggcttggtttgttattgttggtaatttaaatgcctttgcagttataagtatgcctttttagctgatgtttttctttctggtgcagataacttgaacggtaacattg

SEQ ID NO: 45425 - DNA, 366 bp, Manihot esculenta
  Intron number 1 from transcript cassava4.1_031817m (locus cassava4.1_031817m.g) derived from phytozome v7.0 (chr-ID scaffold02658; pos 792498 to 792863 reverse strand)
tttcgacgactccgaagagttcaaacctccctctggtaagctctgtttatttgcaaaatttttagtgttccttgctttactggaagtgcccttcttattctttttgtttcggatctttgtagcctactagtctagtttagaaaacaacgaaaaaaaaaagatatttgagttttaaaattagtaggtagtcgtacaaaactcgatcgagtcgattcctggacattttgtttctgtcattattttggaacatcatgtaatatgaattataattataatatcatagaattattttcctctcttcccatcattttattgttattaatttcacgaatatagccaatttctatgttatttcagttgcatcct

SEQ ID NO: 45426 - DNA, 982 bp, Manihot esculenta
  Intron number 4 from transcript cassava4.1_012759m (locus cassava4.1_012759m.g) derived from phytozome v7.0 (chr-ID scaffold12211; pos 264098 to 265079)
aggaaacttgccttgaagacaaggttagccccatgttctgctgaaatttgtttcttatttctataattaattgtttatgagcgggaatttggtggactgtactagtgcaccagcttttttgtcctggcaacattgttataggctgaagttggagtttagcaacactttaggtacatgctatatttttcctgaaatttcatgttatattgtacctttgggttgttatgacatgataatcaaatgcaatttatcgcatttatttaaatataagttgaatataatagtccatgaacacatgaatatctagagtgaatgaggttgtttttccctatcttctttaatgatagaatcatagaattgtattctttctcttacactgtccatgtggcaacattgaaatctcgaagagcttctgcatggtccttcctctggaatattatcattgactcttgacctaaccgcctttgtgtatggatcctgctgatttgcattttctttccccgtctatctactttgataatggacatttaacaggaattgaataagagtcgttttcttaagtgattgatgcttatgctgaaagatttagaagcatgaagttgttgtggatttcagacagtataaacatattgtacttacagttgttccagacaataaaataggtttgcatggctagctctttatacatgaacttgattcataaaatatggcactcagatactgtgaaattgtgccccttttttgcacaaccaattattagaagaatatccaagttatgctaaaaattgatttcaagtatgagttggacgtgctttgagttatgaaactgagaaaatttgagcttatttcagctatgcattggtacattcagctgcgcttatgaacacattaacttggcctcactaggttggattgctactcaatgtgttccttctcatttttaccccgactatcatattggcttttttacagagaaaagatc

SEQ ID NO: 45427 - DNA, 610 bp, Manihot esculenta
  Intron number 1 from transcript cassava4.1_019049m (locus cassava4.1_019049m.g) derived from phytozome v7.0 (chr-ID scaffold07036; pos 93796 to 94405 reverse strand)
gatttcacagccccagaaacctgcttttggctctggtacgtttatatttctaataaatttttgctttattctcttatgggttactgtttggttgatttctgatgaaaacttttctctatctcacccagaaaaagaaggaaaaagatcatataatagaatttactccattattgctgtgcttttctttcattatctattcgattttcattatttgaccaaacgaatacaactgatcatttctttgttttcaattaattcttctggtaccaaacttcgagtgggcctttttgtttcttcaatctcaagttagggtttttaattcctatttatccaagtcttcgaccacccctttatttatctctagtcaaaaccagaccatctttgctaatatatcatcatttttgttttttctgcaacagcaatcaaaagaaaaccgacttttttagtttttacactttcttgctttttctctggtcattgtgaaacgccccacaaatcaaaaagggggttgattcttgatttgtctttttcttttttagcagattggattatttgattttgattttgattcacaggtgggtgaagttggagaactatcagagatatttca

SEQ ID NO: 45428 - DNA, 450 bp, Manihot esculenta
  Intron number 1 from transcript cassava4.1_013392m (locus cassava4.1_012057m.g) derived from phytozome v7.0 (chr-ID scaffold03188; pos 9102 to 9551)
gctggcactggaacggtgagtttcttcttcggcaatgtgtctctctggatcttgttcgaatgctttcaaacactgttcaattttttttttctttttctcccctctttctgtatagctaatcatcttccttattttgcttacttgatggaggaattttgaggtaatcgttactaaatatcacagaataactgaacttggaactttaccatgctttgttcatttatttcatgtttgcttcggaaattaaaagtaatttgcttgaaaatgtggattagaagaaacaagatcttttcaagattgattactattctgattgtgttgatttttcttttcgtttttctaacatgataaagcattacggaatcttctgtctggccatttattaattgacatttctctttggttttgcttgcagttctttgttggtgggaattggaagtgtgtaagtag

SEQ ID NO: 45429 - DNA, 869 bp, Manihot esculenta
  Intron number 2 from transcript cassava4.1_019234m (locus cassava4.1_019234m.g) derived from phytozome v7.0 (chr-ID scaffold07891; pos 105071 to 105939 reverse strand)
aagtctgatctagattacatatttcagaagctaaggtattttaggttctgctcttggttttggtcaattattattgtagttgctgttgtctaatgaatgatgttattagttggctcactctccaaattcctgtatggaatttgtgatttctagcaacaactggttatgtatttaattggcagttcaaaattttctaatttaatagccaagattagagatttatgcaatcgatttgaatgggtattgaaaatggagagttggtggcaaccttggtgcgcattactggagctgctgcagcgccagaactgaaagaaaatagagatggaataattgaagggtggtgcactcacagtaaaaacagaaagagacatgttggatgtaaaaaaaattctaaattcttgttctatttgcagcatcagttagttaaaaatatctgaagagtaatttaagaatctcagaaatggctgattcaagtgagtctgttcatgaaaatagcatcattttgattgcacgtttgagtccagcaaatatgaaatcgaagaatttatattcatagctttctcactttctctcattctatgggagcacactagaaatctttcttctaggtaaccaaaattgtgacctaggatagaaatcctgtaacaccacataatgtgacaaaggacaagatttagatgaagtagcaaatggtgttttcacttcttctatcagatgttcttatgcgcttagttttatttttttgcctttcttttttttctgattttgtgttcgagttatgtcctatttaacttcctctttgagtcttgaatttgttgccatttggagcatgatcctcctccttttcctttgaatttctttttaggagc

SEQ ID NO: 45430 - DNA, 491 bp, Manihot esculenta
  Intron number 1 from transcript cassava4.1_026172m (locus cassava4.1_026172m.g) derived from phytozome v7.0 (chr-ID scaffold03747; pos 76832 to 77322 reverse strand)
aaggcagtggagacaacgaggggtgcttcttggcgatgaggagggcttcttctttggtggtggcaatgatgaggagaacagtgataagctggcgacgactacaggagaagagatgagagagatcggcttgagggaaagaggggaaagggtagggagaagagaaaggaggataagggtatttttagattatatttttctttttttcctttgactaggtttagatcattgacttaacagaatttttggatgaaaaggactttgaatttggacggaattaaagtcgagagactgaagtgttgagttctaaaaataaaaatagagggataaatccgttaattatgctataccttagagatgaaaaaataatttttcctataatatatgatatgatatataatatataacatgtaatgtccaattcgtttctttttattttgtaaattgatctcttcgtagttgacctttttctaatagaagtcgtttttcttggt

SEQ ID NO: 45431 - DNA, 620 bp, Manihot esculenta
  Intron number 1 from transcript cassava4.1_024496m (locus cassava4.1_024496m.g) derived from phytozome v7.0 (chr-ID scaffold02605; pos 66857 to 67476 reverse strand)
tcctcactatttgattgataacttttataataacggtaataacttacactattttccttagttttccttcttcttttctttatcccctcttcctttctctgccctttttggttgtttatctgttctgagatggctttatcttctgtttgttatccgagaaagtgctggaaaagctacagaggtgtttgttttttattttttatttttggcaatcaaatggaggaagttgcctgttactgttactagttgaagctcacgcttgcaccggacacgtgtttaaccgactcaaatctcactaaaaacaagcaagtcccaattttctgtttggttgataagaaaagtgaacgaaagtatggattcgcatacaaattcatgagggttatctgagtattcaccattcaaatacacagtttctttctctctgtgttcaaaagatatccttttgacagataccttagtgaatcatcattttaagcttcaaattcaagttatatctttgtggagcattttcagtatctaaagagtctttatgtagctctcaacttttcccgagtcaccggattaacccgcttatcacttttgcaggctggggaagtaccaagcaggaagctcaagaagca

SEQ ID NO: 45432 - DNA, 645 bp, Manihot esculenta
  Intron number 1 from transcript cassava4.1_015461m (locus cassava4.1_015469m.g) derived from phytozome v7.0 (chr-ID scaffold06683; pos 264586 to 265230 reverse strand)
cgatcgatctttttctgtgtgattatcttaaaaaggtcagaaattccattcttaatttcgaatagttttcattttcattataataaataattttccttttgaaaatcttgatttaattttgcttgtggatgatatctttcatttgttaattattgccttgagcttctagaagtaaatagacgtgagagagagagagatatctgaggatttggtggtttgaatttgttgggtttttggaattttggttctaatttggaggcttgaaacttttgttaggaaacactatttcaactccaatgaaccgtttggttattagaaatgataaagaatctagaattctgatagcatcagtctgctttggagatagaccataagaactcgttgccatagtaatatgttctatttctgtcagtggctttaaggatacctttttatggacagttcctggattatagattatctttaaggtttccaactttaaatatctgtagtgtcctctggattgtgcttaggacgatttggttatagggttatagttttcaattctgcagtcttcaaatttgatgccagattattagtcattgttggtgttgatttagttttatatatgatttataggcttttgactggggtaataatcgtgag

SEQ ID NO: 45433 - DNA, 349 bp, Manihot esculenta
  Intron number 1 from transcript cassava4.1_001858m (locus cassava4.1_001860m.g) derived from phytozome v7.0 (chr-ID scaffold04269; pos 204841 to 205189)
attacttcaattgccaagcagttgtaagttctgatgaatattcccctttcaatctctttcatatttttttgatttttttggtacttttgatgtttgcttcttttctctccctttttctttttctgattaaaagtttgatcatccttttttaaaggctgtttcccttctttttgctttactttttaaagaagttttgatttggtgattaaattgttctcccagaacagcaaacaaactgagtgatcttctttttaatgatctcttctgcttaggctctcacagacacaccacaagcacacgagtgtataattcaccatttcactgtttttgctttggttacaggtgagag

SEQ ID NO: 45434 - DNA, 649 bp, Manihot esculenta
  Intron number 1 from transcript cassava4.1_009414m (locus cassava4.1_004982m.g) derived from phytozome v7.0 (chr-ID scaffold01945; pos 674043 to 674691 reverse strand)
tcgatcttaatactgctcaggtgagtgtcatttcttgtttcgagtatgcaagttgtattttttgttcttttgattggttgctgaggaagtggagagaatgtcgaagaaaataaaatcagtgaggtgggtagtcttccttgatctttgttcaaggaatgcagagttcatttaggcttgtgaatagagaagtctggtgttttttttttcggattctgaatcattgagagaatagttttttttcccctgatttctttgtcgttccaagctcatcgtaagtagttcttttttttttttttcttttctaattatttcccctttttaaagaaaataggtgctttccctactgtcaatggaaaagtttggaaattgtaaatcaaatataagttgctgtgccgtaagtgaaataagtctttcataagttttgagcctctcacttgttctgtgtatttctcactgaccaaactaatgccaagtatataagcatgtattcgtgtattatttctttgatatttgtaaaaatcaacgacttgtagtctagatacgaagtttgtgatagattgtggctaaagagtgtgcctgaccatatatgtttattaaatttaaatgttgaccagttattcaagctaggacctgctcaattagtttgcat

SEQ ID NO: 45435 - DNA, 404 bp, Manihot esculenta
  Intron number 1 from transcript cassava4.1_012061m (locus cassava4.1_012061m.g) derived from phytozome v7.0 (chr-ID scaffold08873; pos 30135 to 30538 reverse strand)
ccaagactgtgagagtctcagaaaagctgttcaaggtttgtctgtgcttatttatcccaaatacatatagcttttcttttttttgctttatttctcgtccgagtgtttttaatctaccatgtttctttgaagtaattctgtgtgtattattacggatatgaagctatatcaggtctctgctcttttctccttctgggttcttcaaattaattgattttcttatcaaattcaatacttctacccataacttccccttgtgaggataggaacttaaaagattgatagtctgacccgatttttaatttatgctttttatttaataggccaaaaatggactgaatattttctatgtgaataaattcttctctctctctttttttggtttttaataggattaggaacag

SEQ ID NO: 45436 - DNA, 715 bp, Manihot esculenta
  Intron number 1 from transcript cassava4.1_020641m (locus cassava4.1_020641m.g) derived from phytozome v7.0 (chr-ID scaffold03735; pos 95186 to 95900 reverse strand)
agcttggattggtagcagcaggttctctcatcatctcttctttcttcaccaactgggtttttttttgcaaggtctttctagggttggtttagattctaatttgattttaatttttttaagaggacatattcagattcttggcttgatttagcaaaagagctctttatgctccttctactgctttttaatccaatacccatttatttttttcaggattttccccttgtaactgaggtttttctgtacatttccatttacagaaacattctctatcttggggatacttttttttccttctttgtcttcaattttttatgttttcttctacctttacatacagtactagaagaaagtattatttttcttcttctgcgttttctatttacaggtaatttttttttatagtttctttgattgatcttgttgaatatgctttgattgtttccccctttctttggtgggttaggtatctggatcatttcctatacagcaagatctgtgactgatttcttgtaattgatcatcactaactattctcaatttattttccttctcaaccgaagctccgattgattttcaacgaagcatttgtatcttagttgattattgtagttttttttttggtaacttttaggtaaggaattactgcagttagatctccttactgatactcacaaaacttccctctctttggatttatggatactgtaggttg

SEQ ID NO: 45437 - DNA, 610 bp, Manihot esculenta
  Intron number 1 from transcript cassava4.1_001199m (locus cassava4.1_001199m.g) derived from phytozome v7.0 (chr-ID scaffold05494; pos 110924 to 111533)
gttcagagctagaaactatctgcaaagctcttgaggtctcttctttatctacctcctcttcttatgtcttaaaaaaaaaaaaacactactactggatgggatctataaaacttaacttgatggaagaataatggaactgacacatattaatacttgctctaatccataatgtctaaaaagcctacaaattcccttttatgtccctgagcatttttctcatgaaaactcaccatgccagctttcctcagtcaatctttagtttgagcatgtactcctctttgttgtacttgatacatgtgatgagttgcccaggcagtaaaaatgacactaggcttcgtcctttcggtttctcaggattatgctacttttatttgcaaaaattttcctttatttggttattgttactactttctttgatgctttcttttccctatgctttgacttttctatttagataacattagaaaatgaagctttcagagtactaatggttattactttacttttgtaatctgactcatctaaccattttactttaatggatatagtcttagtttgataacatttttttccaggcttttgatctaaggagttctcaagacttctgccc

SEQ ID NO: 45438 - DNA, 794 bp, Manihot esculenta
  Intron number 1 from transcript cassava4.1_003266m (locus cassava4.1_003266m.g) derived from phytozome v7.0 (chr-ID scaffold07195; pos 198717 to 199510)
agctcgctcaagctgctcaggtacttctttctgttttgatcttaatcccaaggtttaatactctctctttctctgtaagctgtttttaagtgttcccttaaattctcagttgcaaattcaattcacaaattttttttcgggttgtccttttggaactaattgtaaagtgaatttgtgaatcgaactgggaaactaattttatgggcaacaaacaaaaaactaaaaagctaagaggcgatttatagagatttgttaatttcggtagagatttgttaatttcggtgaagaattgtaaatttggattgatgttattatatgtcaagttgagttgattaagtggtggattacagtttagagctgaatgttctttaattatatgtaaaaatttgcatcctgtagtgtgttccctatcaaattgttgactttatttttttggtggtgacctgtggtctcgtgagactgaaggcttgtttttccttgacaatcttggaaaataaggggatgaattagctcaaggatttagttatcaaccaaaatcgcagcatttatgtggattctatggatgtttaagtgttaggttgtgattgacatagcattactctctacaatctggaaaagtataacttaaaaagggttgtaactttatataattttggattttgtattctccaacttgattaatgaaatttaagaaatttgttctttgaaattttattaatctggcctgcaattttgggtatttgtaaggataattttttttaatactctctttgattctttcctcatcacaggac

SEQ ID NO: 45439 - DNA, 1051 bp, Manihot esculenta
  Intron number 1 from transcript cassava4.1_007990m (locus cassava4.1_007970m.g) derived from phytozome v7.0 (chr-ID scaffold06158; pos 506716 to 507766)
tggtgttttttgattgagtctattaggcatcagtgagttttatttttcttaatcttgcgagttctgttttcagtttatgtttttgtgaattttgagttttcagctggattttccgacttctaaagctgtaacttttcttggaagacagaatgtagtttgatttttgagagtgggggagaggagaagaaagttcatgaagatttaagttttttatttttttgttcttttgatttattgagaagcaatagtttaagttggatgattttaaatttttaatagctgaattgggtttagttggagagacttggttggtagcttacacttagagatatttcattttttggggaaaagtttctgcatttgttttcagcaatcaacagaaagagaatatacctttggaggtgtttattagatgattatttgggtttgtgtgtgttttttttctttctttctttctttgtattgtttgaccatgcttttggacgtgcaattacttgtttgttgtttcaatcagaacaattatttttcattgagtgttttacgaagtctcaatgtcattttgatggtccgtacataataattagacatgattattcattgtgtatgcgcaaatagacactccctcttgaaatattaaggctgcttgttaaataagcattgttaatgccttggatctataattttgatcttttttctgatatatgaggcatgaaaaagtagcaaggaaatttgcttttggtcttcttttgggactttctggtagttttcttgggaactttgacataatagcagctattttaatgtaaatttatacttttaataggcttcatgatataaggtggattttcctcattttgtaattggatttcattagagatcagccgattggggaattgttggatccatttatgtgattattaattgtttgctcattttgtttctttttggtctggaagcttggtagaactgttttatatttgtgttattccccctccgaaattatttatttacttatttattattttttcagctcagcacaagtttttgacag

SEQ ID NO: 45440 - DNA, 465 bp, Manihot esculenta
  Intron number 3 from transcript cassava4.1_017247m (locus cassava4.1_017247m.g) derived from phytozome v7.0 (chr-ID scaffold00847; pos 2310290 to 2310754 reverse strand)
gtataacaacattaagttccaggtctgggatttgggtaagtggctactattttacgctatacacaatccattaatctctctataatctatatgctctgttacaattgatttaaaatataataaaggaaattggcatcccctgtattcaagtaacaagtatatatgtaatcgaggattcaaagtgatctaatttagttctcctttgtaatccttgctgtacattgaccattagcttttatgtggatgtaaggtccgcaaataatgttcatcattcttctcatgtagattgtttactgataaatttacatttaatcaatgggaagtcccattttagctggcttttggtttatgaggttaggcattatcgacttttttcttttcgccctgtgatcactctaaattaaatcggttttgtttgcttttgaaacaggtgggcagacaagcatcaggtaacattgttacttc

SEQ ID NO: 45441 - DNA, 934 bp, Manihot esculenta
  Intron number 1 from transcript cassava4.1_018184m (locus cassava4.1_017889m.g) derived from phytozome v7.0 (chr-ID scaffold06591; pos 28582 to 29515 reverse strand)
tcaccaagcgggctgtcggtgttgaggtcaacaagcaggtataaatatggaaaatttttcttgatttggtgttttgcttcttgaaagcaatgaagattggttattaacttatatgtattttatgcttatgaattggggttttctatctctttttttcctgggttttcattgtcattttgattggtgtgtgtttgatcattaggtttccgatgtatgtatcatacattatgtaatagtttttcactccttttttcaggggagatgatagctaatttgtgagaatctagttattttgatcatgtgggtgatgatgctactttgattaaggaatttggttgaatgttcatgtgcttgctattatatggactggttgtagctctttggttgttgggtttgggctctgacttcgatttacttcattttgtttggtattgtgcaactgaatggtttcagctttagacactatgtgaggggaagaggttactgaacccttgttttctttctttagaaggcatgcactcgaccggcgtgttctgattattctgcccctggtacaaatgttcagattttatgggtgctgttgtctggtttcatccgtctcagttaatgctagtttaactcgtagacttttgaaattttgccttggtgttcttatgtttggtttatagttttcagttctgttgttaattgtcatggatgattatttacagcgtctgagactaaaggatttgcttgacattagagagcaatcaagtaaatggcttaatttttaactgaatcagtttttaaccttaggttattgcttcatgtgtgctctgtttcacactgacctgtgtatttgcattctttgattgagtgtttaagctgcgaactataatgatggatattatttgcctattataggtgggtaataggattatcaagaagaggatcc

SEQ ID NO: 45442 - DNA, 476 bp, Manihot esculenta
  Intron number 1 from transcript cassava4.1_016721m (locus cassava4.1_016008m.g) derived from phytozome v7.0 (chr-ID scaffold07893; pos 68785 to 69260 reverse strand)
ttctttcaggtacttgctgtttttattgtctgcttttgctctttctgttcttattatgagtcgctagctatctggttggctttgttttcatggagcttcattgttatgtttctgcatttctagacgatataatgattgatgagttaaatatttctcgaaattcaatgtattaagtgaattatactgttctttgccccttgcacacccttttatgcatttatgcaaatgtcttgtaattttcatggagcataatggaatattgtatactgcgataacccactactaaatgcgttcttggtggttcaagatttctggcgttctcctttgtttgaaggttacgtttagagtaatagctggttttgaaaccttagggagttccagagaagcaagtatacttcttgtattcatgttgggtattgaaatgtccttggttttgattgtgttacttttttgcatgtttgaaggcagagggaaca

SEQ ID NO: 45443 - DNA, 646 bp, Manihot esculenta
  Intron number 2 from transcript cassava4.1_029807m (locus cassava4.1_029807m.g) derived from phytozome v7.0 (chr-ID scaffold11661; pos 59125 to 59770)
ccgtctcgccttgacgattaccacactttattgaggtaattcaactgtttctgtgacagccttacttagctaatagctaatgtcttttgatatgcaaattttgatgatttctgataaatcgcatcactgtttactggaagcaacattgtctaatggatagtattctatcggtgtccgaatgtcaacgtgctgacgtcttaaagtgatcaattcggaactgaagactatactttgcgtgattagttatttatttttattaaatgatggtacaagtgcaggactagcaagtatttgtgttggacattaacaagtaattaattaattaattgtgccgtagtgcttgtattcactgaagttgtaatataatgcagagcatttacaagtttggatgctgtttgactgtctgctttggcatgtagtgccaaaattccaagaattagctgtctttctttttgtgctgccgttaatcaagaagcttttattttttttcaagcaatttccaatcgataggacaattctgttatagctatttctctctggacttttcatatttaaaaattatagttctaacttctactaaaatgcagaggactgaattttccttattgcaggtttctaaaggctcgaaagtttgatcttgataaaa

SEQ ID NO: 45444 - DNA, 312 bp, Manihot esculenta
  Intron number 2 from transcript cassava4.1_032895m (locus cassava4.1_032895m.g) derived from phytozome v7.0 (chr-ID scaffold11356; pos 53153 to 53464 reverse strand)
ttgctctgcgaacaatccgtcaggtttctagaaaggtaaataatgcctaggttctaattcttcctttttttttcttgtcgtttagatgacatcaaaatgcttaagatgtttgttctttttctgatgtgactttatattatagttccttccatcctacatcatatgattgagttttatacacgcaggtgtttccacatttgcatgacttggacctcagatttcatctcagatatttgcttccaaaaacccatgatgtgcaatgatatacattgctttgattaaatataaggtgcttttagcaactgatttatc

SEQ ID NO: 45445 - DNA, 706 bp, Manihot esculenta
  Intron number 2 from transcript cassava4.1_010962m (locus cassava4.1_009099m.g) derived from phytozome v7.0 (chr-ID scaffold10045; pos 234655 to 235360 reverse strand)
agaagacgattcaatatttgattgggtccggagtaatttctttgctaattatttatttaaagcttctcgtagactttttgcaatgaggataaatgcgcttgcatgctacttttttacaaggatttatttagatttggtagcaaatgaataatgctgcatgttcaattgacccttcatgcatagtggtgagcatcggtcaatctggttcgaagttgaacaatgctaaaagactcgtattcttggaaatggaactgatcaagactaaaataattatacaccaaatcaaactgaaatgatctggttcatttgttgattcagttcagttattttggtttgttgattcagttcagttattttggtttgttgattctgtcagttattttggttttcttccatggaatccaaactgaaacgcccaaaaacatcccaacctcgttcatgcacaaaagaaaatttatggacaccaaatcaagatgcacttcattaatatgctagtttgcctttgttttgataaacaactcttgaagaattaatgatgcagattcattaagtgggcacccgttgttttgttttttgcttttcgctatatttgatcccaatgcttggttattctctctccgcctttctttttccccaaatataatgacatttttatttatattacttcgcaggatccacgaacagaaaacagtccataccttgggtt

SEQ ID NO: 45446 - DNA, 490 bp, Manihot esculenta
  Intron number 1 from transcript cassava4.1_025401m (locus cassava4.1_025401m.g) derived from phytozome v7.0 (chr-ID scaffold08873; pos 77615 to 78104)
tctgtgcgacaggagaattctggtaatgtttcttatcatttggcatttttccatttgtatttaagtatatgagaaaaatgccttcttttttcctcctttctgccctcaatgaaatgacaaaacttagattcatatggccctctgacacgtttataaacctatcatggtgagatgttatcatgaggcttattcagaaactaaattattgttgtgtgatttgggtagccagatgcaatgatcataggcctgttcttgagagtttattctgaacttttaataaccttagaatggataaatttgtttaagtcttaatatgtattagttctaaaattaaatgattttgaaacctcttctttttgacatgattaattactttcggtaattcttcatttatgatattgtaataatcattctaaaaatgtttgctgtatgtttgatgcaaacttgggtttttgttttttgattaaatacattgctttcataggagctt

SEQ ID NO: 45447 - DNA, 715 bp, Manihot esculenta
  Intron number 1 from transcript cassava4.1_024129m (locus cassava4.1_024129m.g) derived from phytozome v7.0 (chr-ID scaffold03393; pos 14681 to 15395 reverse strand)
aagaagaagctaagcgcttgactcatatttgggaagtaagtttttgcctttttctgatactataagcaaagaacaatgtgaattttttttcaataaaagtcctttaattatccttttcaatataaaatttccatttctggttaaatttgaatctaaaatcttctagtaataatctcaatttaaaaactatatattctgagattctaatcattgaagttgatgttctgagattcagagagggtagggtttacaggcgtgtgagtacttttcctttttccttatcctctagtaacgtgtaaccgccatcctgctacagcatcacctgtctctgtcactcaggtccgtatgtacggacataccagcagaccattcttgtcaggcgaccatttaatttccctacggtggacctgctttcctacctcccgtggcttttctttgatggatcttggcattgggtcaattcgacctgccttagtcacgagctggatagcgcgctgatggtcggcttgctcagtagagtctattgggctttgagtctggtttttctttttaagatccggactcagttcggatgccagaaattcagccgtcatcaaaagtatataaaagaaattgaaaaaaaatgcaatttaattttataaaacttaaaaataataaaattttacttggtaaattattattgttatatcaggagcttgaagtgctggttgatcca

SEQ ID NO: 45448 - DNA, 1009 bp, Manihot esculenta
  Intron number 2 from transcript cassava4.1_015819m (locus cassava4.1_014161m.g) derived from phytozome v7.0 (chr-ID scaffold03252; pos 196581 to 197589 reverse strand)
aacagattccagcttacggaggaaccagagcctgcgtgagttttcgtttcctaaatcttaatcggtgcttcttttcattttttttcctctactcctctggactttgttattaggctttaattttttttttcttagtttgagttaattgatattgtcgtggaactcgcggtcttattatagttctttacgttctaatgaagctttctttcttgcgttttttccctttttcgtttcattctcttatatttgtgtaaaaagagtcaatttttcttttaattttcatttcattctcttatctgtgtaaatagtcaattcttttacttttgagcttgatgggtaattcagggattttcgttttctttctcaaataagcggagaaaaattacttgggtatggagtttctgtgctttaattggttttgtcagtgaatatggtatgagatagctcttagctagatgacactgtttttttattctttttatttttattttttatgcttattaaacctatgctagtatttttcccccctcttcttggccgcatttttttgtgaaatgaagtaatttgattgttccaattttgttgggctaaactaatttacagaacatcgatatgtatatatttcttagaccttggtgcttttctttttcctctttattgaccgcagagagctcttcttttctaacaacaaaacaaaatttcttctctctctatctctccctaaggtctctaatctatgtttgagttgtagttcagttaacaaacttcttcagaaaattagattcttgcttgcaattagcagtggcccttttgtttgctttacgcataatgtgaaaatagttaccctttgtgctgatgtaactatcattactggctaatttaatttgtgaaatttgatgtgttttcctgttctgtttaggtaccatacatgttcttggttgtgcttaacattaatgagtcaatgtctgattgcgtaggtttccaaaaggggttccttgggttcgctatc

SEQ ID NO: 45449 - DNA, 436 bp, Manihot esculenta
  Intron number 1 from transcript cassava4.1_011479m (locus cassava4.1_011479m.g) derived from phytozome v7.0 (chr-ID scaffold00325; pos 629093 to 629528)
attttaggcatcctcttgataaacaggtgtgattagattatttcggattgtctgtttctcgattttggtgcaagttgttatcttttatggtttctcatgcttctactctgagaaaagttgtccatgcggagtagatgtggtttttgtctctttggtttagtcgggaagtttccaactttaatttgagattatgattttgttttgtgtatctgatatcttgactctattaaaaaaatatggggaaacatttatttctttttccatatcaattctatatagttttcggtttcttggctgctattcttacctcttcccgtacccccttgcatatgagcaattctgggtgctttttggatcactagtttagtcaatttgatcaggtttactttcttttttgctagaacacgctgctcttgagggcaattccaggattaaa

SEQ ID NO: 45450 - DNA, 768 bp, Manihot esculenta
  Intron number 1 from transcript cassava4.1_001424m (locus cassava4.1_001425m.g) derived from phytozome v7.0 (chr-ID scaffold02196; pos 250378 to 251145 reverse strand)
gtgagttcatgatctactgtcgtttcgttatccacttccagttttattgccgttttgaggttcactttcgagttccagtacgacttagatctggttggaatctgcattgatttgatactattgcatagtcatgtatctaactgtaaggattttttgccctactcgcgtaattgggaacatctttgttttattgaattcaacgcgtgattgtggaatcagttactctctgattggttgagaagaatcagggtttcgctatgtgctctttcgtttctttgcaaccaagcagagtgggaaggatttggatacacctgagatctgttgtttgctgtgcgcgaattcaaatttgcttgtttgttaaataaatttatataaatgttgattgtttgagtgaattccggaggtacgtttggttgttgagaaagtaacaaatatttggaatctgttaatggttttggttttgattagctgtttctagattccaaatttggttacgttttattagtttctctgtggccaaatggtgattttgtttcttagaccaatttgagatctggtgtttgatttggaactaatgactcattttcttgtcttggttttgttttgcggtaacagcctctcagacttgaaataaaggtattgttatacatttcattgatttggtttcattttgtgttgttggtctcattactctttattgttgttcctgacactggtttgacattgtaatcagaggaaacttgctcaaagatcagaaagagtaaaatc

SEQ ID NO: 45451 - DNA, 758 bp, Manihot esculenta
  Intron number 3 from transcript cassava4.1_007724m (locus cassava4.1_005115m.g) derived from phytozome v7.0 (chr-ID scaffold04457; pos 391700 to 392457 reverse strand)
ctggaggtctgcaatcactttcagttttttaaaatcattctatttgtttaaacttacagctgcctgcttcttttcgccaataatcattggtaattgagcccttgctttggggttccctacaataatatgcataaaaggccactatttttttgtcgggggtggaaccaaataattttcttaagggtttaaagttaagaggactatgcagtgatagatttaaattgttgaataatctttagatttcacaatttaatgatttaatgatctcaaatataagaacattaatcaaatatccatttttgtttgagaaattacctagctaactttccttttgtttgcatcatctatattagtttggacatggggtaattacatagtttgcttgctgttaaagatcccttcaatctgggaagagaaaaattagtcgtagttttaaaatagaaccgtcagctacattctgtttattttagatgaagctactaagtccttctatggcattgaagtgttgatctttctccctgttatatgtgcattatgcatgcttgtagatgattgacatgttaataataaaaaataaatcaactatgatacattatctcttatttttaattgttttacctgatacatgtacaggttttctctgttttcatcatgacatctttataaagttagtttgaattttgtggacatctgaatgaattttctgtaaaacttaatctataggattgggtcctggaacacttgttggttctgctgca

SEQ ID NO: 45452 - DNA, 487 bp, Manihot esculenta
  Intron number 1 from transcript cassava4.1_005515m (locus cassava4.1_005515m.g) derived from phytozome v7.0 (chr-ID scaffold06715; pos 281791 to 282277 reverse strand)
aggctagaatcccaagtagtcccttcaactcatctgtaggtacattttcctcaattatgcatatcaagtctattaaaaaaaaatattatgcatatcaagtcatggcctattgttctgttttattcagtattagtgcttaaatcttccatggaaaataaaatattgtgcttttacaggaaaataaaagttcaactccaccgccaagtttgaggaatggaaaagtggtggcttccctcaaaatgggtggagaatcacagaactcctccaactcaaagccggccccagagccacagtctcaatccattaaatctgcttctgataatagcacaagtctacctataaatttgcctggaaagttaagcatacttggcaaggtgaactcaagattcctagcacttatattagattaactatttctttgtctctgtttgctaaatttttctgcctaacaggaagctgtgcagcagcgagaaacagcccaaaagat

SEQ ID NO: 45453 - DNA, 639 bp, Manihot esculenta
  Intron number 1 from transcript cassava4.1_019095m (locus cassava4.1_019095m.g) derived from phytozome v7.0 (chr-ID scaffold06383; pos 85497 to 86135 reverse strand)
tacccccttattccagatcattcacggtgatacaggtagacaaatttatttattggggctttttttgacatggaatttctgtcagatcattctcggcgatataggtataaaaattgatttgttggggcttcctttttgaaatggaatttctatctcttttgattgttttgatgtggtgagcatgaagtttagttactgaatatacactgatagtgagtaaatctgttaaaatgctttgcttataatgctgtacacacctaggatgcatggttctgtcacgagaatatgagttttgagtgtgtgcagtgatagtttcttgctattattttactacttagttgtcccaacaatgattcagcagcagattaaaggagtaatgctcgccctagcccctcactctcactctcactctcactctcattctcttggtatagtgttgatttaatatatttctgtttatttgtgttgatagtttgttaatttgatgttctatgggtatgggcttgctgatatgtattttttttttttcttttggcttttcagattagtgtttaattcctcatcattcttcactgctctaactattgttattccgtctgtgcaggttagtgggtttaggaattgactgttaattttatt

SEQ ID NO: 45454 - DNA, 803 bp, Manihot esculenta
  Intron number 1 from transcript cassava4.1_015326m (locus cassava4.1_015326m.g) derived from phytozome v7.0 (chr-ID scaffold01945; pos 52720 to 53522)
ttgattttcgaaagcagtaattctatagatttgaggtatggatttcgaaatttttcactaatgtctcaacgtctgatagttcctctctgctctatgaaatgttagggtttctgttccattttgaactttttattagtttcagtttgctcatagattgattggctggagattattaaacttgaaaattagtggtgatttgtgaagtttagatagtattttgaggtttttggatctggttggaagctttgagcattcggactcacttttattgaactgaaatttcgtaattctcaaatatgacgaattttgctgcttaggctgttcatgctggtttcagttttatgcttcttctttttgtatcatgaaaattgatgaactgctcatttggaattgtttgctggtgtagcctatttaattacacaggatattggaagcttacattgggtaattaatgttaataattttttcattaagatttaaaatttcaaatggggttaggaagtggaagtcttataatggatgcataaaataatttgtatactggaaattacttggacgagtaatagtgggtcctgtactgaatcctgtttgagatctcaacacttttttttttgttggatttttttatcaactgtagtggtgaagaaggattagtttagcatgacatcaatgcaacataattttatattctgcagtcgccagagtggagtaatcctttgcttagtttgaagtgagtttcttaggttgtaacttgtaaatgttttgcaggtgtaggcgttcatcaactgtcatttaaaacattt

SEQ ID NO: 45455 - DNA, 735 bp, Manihot esculenta
  Intron number 2 from transcript cassava4.1_030717m (locus cassava4.1_030717m.g) derived from phytozome v7.0 (chr-ID scaffold06715; pos 57892 to 58626 reverse strand)
agcttcaaaaggagcttcgaaagattgaaaaacaggtttttttgctttattaggggttgctgagatcctaattgccattgttccggttgcgattttttttggctcaatatagcctttttcctttatatgatcgttagctacttttatgtttgaatgtgtgtatacttttctgttacgtttatgggtgttggagattttgtatccatccttgtgaactactttaatcactttgaagttttagccatcatggctaaattttttttgttctttcagttatatgtataaaatttcatcttgattttctttttaaactcgaattatcatttgggacacaatttgacctaaggaatgctgctaagaatcgaagttttacccggctggagatttaggaacctggggattaggatgtcaatggtcaactttcaagaagagacatgttgtgtaccttagttttttgttgtttaatcatggactttttgtttggcttcttgctaattgattgaaacctggtggacattagctaagtattatgctcttttccatttggtagatgtaaaactgtctgaaaaattatttgtagtgactgaacaaacttgagattacaataatttaatagctaaagtatgtattctacttttttgtgtacttgtaaacaagatggcatgctccttcccatctccattctcttccttgctccacaagtggctaattttttttcctcttaatttcaggtct

SEQ ID NO: 45456 - DNA, 457 bp, Manihot esculenta
  Intron number 1 from transcript cassava4.1_019129m (locus cassava4.1_019129m.g) derived from phytozome v7.0 (chr-ID scaffold00847; pos 2072288 to 2072744)
aaaacctgcttcaggatttcctgggattgcaaaaggttagtcttttgggtctattatcgaatcttccagtttgtttgttttgtttaagcatgcttaattgttatctcattgtagtgtgctggttgggtaatctgtttactgttgtttgttgtttccttgttttcattgcaagtagctatgttggttatcttatggttcttattctgagtaggttcgtggtgagctttgtttgctgatttttttatggttgcttttgtatgctgaagagaaaagaaattgatggtgaattatttgtattattgtttggtttcaaagtttgggattggtaactcaccacaagttaatactcaccgttttaatttcagagtaaagaatctgtttctgattttctttgtacatcattggtttctgatgatattttcttcaggattttgtttcaaagaagagaaaattgcag

SEQ ID NO: 45457 - DNA, 496 bp, Manihot esculenta
  Intron number 2 from transcript cassava4.1_009892m (locus cassava4.1_009892m.g) derived from phytozome v7.0 (chr-ID scaffold07485; pos 70261 to 70756 reverse strand)
gggtcaccaccaagttgcttattagacttcaggtactcattttacatttcttctcttttcttttttcttttttaggtctaaggtaaaagaattaatatcaaaagatcaaacacagttcctgttttttgttctttatatcaaataattgaacagtattgcattttatggtttttgttatacccagaaaggcaataactttggatgcagattaatctctaaaatgatgttagtttttgcttttttatatgccagcttatgtatgttatgtatttatttctctcaattgcccaaaaaaagaaatcttattagcttatcgttgagaattttagtttcagttagtgtatttcaatctggcatatttatttttaattgatacttatgcacattttctgaaaatataagtcaccatagcttttgcagtaaaaataagtgcttgcatctgtgtgttcttttttgtttttgctaattttggttagctttatcactcttattcaga

SEQ ID NO: 45458 - DNA, 942 bp, Manihot esculenta
  Intron number 2 from transcript cassava4.1_013839m (locus cassava4.1_013839m.g) derived from phytozome v7.0 (chr-ID scaffold02978; pos 216274 to 217215)
gttgtgttttgagaggtaagatttgtagaatctgggtttttttttgcactctgtgatgcatttaatttttgtttattaatcagttatggcttgaacctgaaacattatttataactaccttttcttgaatagctatcaatagtttaaaaaaaaaaattgcccacaaacttttcccttttctttgcaaatcaatgaattccattttcagagctgtttgtctgggctcaggtttgcaagctcatttatgagcctttccagactgcctcttcatttcttctatacagctacaaaatattatgctgtggaagctgagcaaaatggtccagtctctttgaattgagttgatgatagcgaagataatataaccagctcgaatacactgcaaccatgttccttttgcttatattgcagtctggttttctttgcttgtcaaaactagaatgttgctgatagatcgttaagcatgggtagcctgagtggacctgcctttggataatttatagcctattttcattgataaagtgcagtctattatgattgttgttgaaatgaaacagcaataaagactaatgggaatgcattgttagagtttctatttttagttcaagtggttattataagtaatgtattttcctgtttttgcctcttctgttcaaatatgtttggaatcttaggcccatgatttgaccaatcaatttcttgatgaagatagtgaacatctaattaggtcatagatgattctagatcatatcgaggctcagcatttattttgagtcttatgttttatattggggttgtcctttaatgaggataaaacatacaatagaaatttccttgtgagttccatgtccatgtggtccactttatgtgattgcttacagttatgtggttgttcttgttgggtttgcttacagttatgtaaattttctttatggacaggtg

SEQ ID NO: 45459 - DNA, 752 bp, Manihot esculenta
  Intron number 1 from transcript cassava4.1_032091m (locus cassava4.1_032091m.g) derived from phytozome v7.0 (chr-ID scaffold01027; pos 153640 to 154391)
atcacagggtaattagctttttttcatgccttttaagcttgttgatggctcatgttgggacttaaggaaaaagggggagggggtagggcgctgctttttggacaaaaactccaaatatttgcattaatctctgattttatccatatatatgaattttggaccaatcatctaaaattttcaataaattcagattcaatttggggagaatttgatattttcatgatgattttgtgatatgagattcaaatgttctttgttaagcatttttaaccacatggctcaagtttgatgttgccaactggtctatcaattttagatttttataaaacttcttcaaagttgattggtttagataattggtctacaatggaaacattggataaaattacaagttgtggcgaaaatttgaatttcttgtccaattgccaaaagaatatatttcatgttgttcttattggctctaacaatagtgataaacttggcaattgatccatcatacttgcagatttaattgaccaattggcaaattgcacctagtgtactatgcatttattgttaaattgatccttagtagtaaccatctatttgagttactgtaatattttgacaagggaaaaaagccatgcccttacagttctaggtacatacaaataaaggaaagtagttaatgcactttgacttggcttcataattggatgctttgaccatgtattaatatgtttctttattagcacatcacagatattcacaga

SEQ ID NO: 45460 - DNA, 402 bp, Manihot esculenta
  Intron number 1 from transcript cassava4.1_012193m (locus cassava4.1_012193m.g) derived from phytozome v7.0 (chr-ID scaffold09354; pos 49050 to 49451 reverse strand)
aacttggtgaaggtggattcggacctgtctatagggtaaatatctccctttaattgggtatttgagctaatttcatattctgtttggttacttttgaaaattagtgaatgagattgaacaaggttttatggcttgtttgggttttgagttcaggaagagagtttagtatcctgtgttcatttctgtccacctcttagtttagtgtcctgcataatcgatgtaagaaagacagacaatctctataattttaacaaaattctaacataaaagtctgcaaatttcaccttagcttgattccttaatcttgaataggtcatagttgatagatattttagcaccctaagaatgctataattgcctttctctaacttgcaaagtgatttaattaggggaaattggctg

SEQ ID NO: 45461 - DNA, 918 bp, Manihot esculenta
  Intron number 1 from transcript cassava4.1_019327m (locus cassava4.1_019327m.g) derived from phytozome v7.0 (chr-ID scaffold00847; pos 397356 to 398273)
tcctttcttttgtttcctatctattgcttttcaaggtatacctgattagaaagtgaggtttcagagagacagaaacatagaatgtactttttatcttttactgtgttttgattgatgggtgaatatttgttaaatgcagctcaaagacagaaggtgcaatcaagtattagcgagaagaaggtgtgtgtaatattaggaactttaacacattcctaaaagatttaatgattttaaggttcaagtactccgttgcttgcattacatactttgttcacaatttgcttgctgtggaagacaaactgttggactcattgattttgtactctgaactctctaagattttatgactgttagtatttatgtattcatcattcttataaatgatgacgaattaggtcctttctttatttagttcaaagttgatattcctttgattgttggtaatgcttgatccacatttcttttttgctcaaagctgtctttgccgagcacatttttgaggaactgacttcttagcctctgactcgctgatcattgactatagagaatctaagtttttcttttctatcatcaagggaataaagaggcaactagccattgaattggagagatcaagctggagagatgccatagtctgcttatgttgatacatatatatttaattattgatgtatattaaaatctatgtacttttcactcttgtaaattggtttctggcatggcactgtaaatttgttaccataaatgatatgatatcatgaccatttatttcagagactggtgagataaatgacctacaaagtgaagatgttggtcggttcattactttctcacaatagcatttgtccaatttgtgtgttaattaacactttcttgttctcaggtatccaaattttacagtaaagccgaagtatctct

SEQ ID NO: 45462 - DNA, 562 bp, Manihot esculenta
  Intron number 1 from transcript cassava4.1_024866m (locus cassava4.1_024866m.g) derived from phytozome v7.0 (chr-ID scaffold10045; pos 46547 to 47108 reverse strand)
tgctgctgccatatccaagattggcctgttgggaggtaattaattcatcaacttattcatctaataatcccattgttaattcttctctaatatgtatggaactttcgagtctccatccctcttgtagttgaaaatcaatgaaagggttgctgtaattggcttgttcggttaggtgcattggtgaatatttttgctaaatgctaagacaagacaattttcactatcccacgtgacactgactatccacaagagtggaaaatgttgatgcagtgatgatctatgaacagtaggttctacgtcaatgtcacaaatcctatgtttagataacatagtattcgtattattgtttggtttagtattgaatagtgtaatacacaaaatttgactcgttgatattagagtatgatataaaaaattttataaaaaaatcgtagctatggcatgcatgaatatttcatctgtaacgtggattattagttgtaatttatgtttttctttttgtaataagccgatatatgtaatttcttgcaggtgaaagaaaattgtaagctgctagcagaaa

SEQ ID NO: 45463 - DNA, 518 bp, Manihot esculenta
  Intron number 2 from transcript cassava4.1_025652m (locus cassava4.1_025652m.g) derived from phytozome v7.0 (chr-ID scaffold07543; pos 141376 to 141893 reverse strand)
cagttgccttattcttgggaaaagctggttgtaaggtcagtgaagttcccttatttcagagctcttcgctttggtgttttagttgaaatgcttcttactcaactgcattgttgtagtgccggaagtagttatttgtttgtttatttatctatgtacaaaataggcatatgcagaaaatcatcatctctgtgcattgtaattttcaaatgtttgaagtttgaatgccttttaatagtgtggtaaaaagttatttgctaatatggagttatgcttgccattgtgttttatctggtttcttgaagatggacttaatactgaattttcttgctgttagttcattatattctgaatagttttctaaagtcttcattgcacattactgttattaactgtattctgaatattgtaaagtttaatgtgtatttattaattttttattacttctaaattcgttattcataaaatttatatgttgccaagcttaaaattgaatttgctattacaggtgttggtaaatt

SEQ ID NO: 45464 - DNA, 828 bp, Manihot esculenta
  Intron number 1 from transcript cassava4.1_028667m (locus cassava4.1_028667m.g) derived from phytozome v7.0 (chr-ID scaffold03750; pos 88422 to 89249)
tggaggatttgggttctttgtggagtttccaagaggtggggttctctctatttttctccttctctaatcccatgagtttcttccaattctcttaactcttctatgaatcttcaatctcattcgttttctgtttgctggatgctgggtatggttattggcaatctggtttttttttttcctgtttgtttaaggggaatggaaatcttcccattggattaatggtagcctctgatggaattttgctttgtgttcttcatcttcaagtttaagggttcttgtctttttttttttttctttcgtttttcttatgttttcctaacaattcccatacaaaacgaatttacctcatttggtgaaaaatgggtctcaatttttcaatttctatcttgtttttgtgctggagaatgtaaacttgttttgtcctgctaggactggaacatgcttcagttgaaactttagggtacaaattgtctgtattgatagaaacttgtgatatttcatgacatgagttatgtggggaccaaatccatgtcaatttttgttttaatggggggtttattagtcatattctctcttttatttttcttgagtagagaaaaattccaaagaatcatcatttgacttgaaagacttgtgatctttcaatggtttatttggaatttctgttggtgaaatgtgaatgagatcctttgatttttatagaagcgtgtctggttttgttcttaaggtactgaatgttcttatagtgtttgtgaaaaattgtctgagatttacagtattttatagctttcaaacttatgaatctgtttttgaatttgcagaactttg

SEQ ID NO: 45465 - DNA, 808 bp, Manihot esculenta
  Intron number 2 from transcript cassava4.1_019029m (locus cassava4.1_018517m.g) derived from phytozome v7.0 (chr-ID scaffold07351; pos 527166 to 527973 reverse strand)
gactcttctaaaacttcctgtttctcccattagaggtaagatatatagattgtaaaggatataatttggctattttcccactttaagttcataaacttaatggttcagttcaagttcaattgttcttttctatttgaacaagccaaacagctatttgcttgagagcttgattatttaaatggggatacactcttttgctttatgttcttggtggatactggaagtaatactgatttgaattaggcactatatcaatttgagagttaagattccttgatcgttgcaaacaggggaaataattatcggatttaggcttctggacactaacttgtgaagttttaggctggattgagaattgatttttggacatatttttttagctgtggctgctttgggggaagtccacaatgatgagcagaacaaaccaaaaagaaaaaaaatctagaattgccttttgatgaataactttttatttccagaaactaagctaatggtatttatcaataagttctagattggctgcatgtgaattcgaaatgaatttcaagaaatttggaaaccagaaatctagttatgtggtgttgaagctgcacagttattatagatgattctagcaatttattttcctttttttttttgttaagaatcatgtatcttaactcttcatgcaagtgaaatagtgcagcaaggaacctggattgaatcccctcttcatccatgcttttcgacttttattattttcttcctcatcccttgataatcatgcattgtagagagacaaaatcaagtgcatcttgttgtgaaggct

SEQ ID NO: 45466 - DNA, 792 bp, Manihot esculenta
  Intron number 1 from transcript cassava4.1_031394m (locus cassava4.1_031394m.g) derived from phytozome v7.0 (chr-ID scaffold06609; pos 329638 to 330429 reverse strand)
ttacttctcgtgcttccaatcttcttggatttcaggttggttcttgcttgctatttcttctttttaacagtaatggttggtaaatatcctggttttatatgtatgtgtcttgttttctactcttgtattctctttaagctcgatttgattgtttcactgtgacagtactggactgaggaccgctttttcgatttcttgatgctaaagttttatgtttatagcttgaatctagtggtatttatggataccaacttctatattggattggtcacagtgaaacactcaaatccaagtataaagataccaacttctatatggagtggtgatggtggcgattagtgctctctttgttagtaaaagaaatcaaaaataaaaattattaaaaattatttactggaaattcagtgttaaatgaaactggaattgtgattttctgaaccaacattaatcactgctgaactctaaacatcatccaaagtattacatgtcagcctagttttgatcctaaagaaatcacaaaaacataattgaaatcactatcgggttcaatttttctgtcttctttttagttagaacttcatctgctcaatccttagtcaagctattttcagcttactaaacggatttgagctcctcttttataatcagtcaccaaaagcctaataataaggacttgcttatcaatttctagcaccctaatgtcccagcggagatactactgctcttgattgttgaatgatctgtttctattttgcagtggcctgacaggaagcaatctcttgttataaaggt

SEQ ID NO: 45467 - DNA, 484 bp, Manihot esculenta
  Intron number 1 from transcript cassava4.1_012279m (locus cassava4.1_011948m.g) derived from phytozome v7.0 (chr-ID scaffold04457; pos 835819 to 836302 reverse strand)
ttcaaatttggatttaggtacgtcttcttttggattttcttatttaatcttttttttttccgttgcaactcgaagaattatgatactaagaacacgagcaagcatgtctcctttaggtctttatcgcataagattgatagaagttcctgttattacttttttcctcctccttcgatttatgcagctactgtgagagctgtattgcagcttctccttgtataataaggatctttctttgtttttttttggtcttttttccaaatagattatacttgatcttgaatttcggttggccaatgtgtgaaatgcctgattggctttgagcctttgctatgccaagtagatgtactactgttggttttctttcttttctttcgctttcttggtagtatagctcaatatacagctaaattcttttcgtcattattgactttcgtcattattgacagtaaaggtgcttccatctcaagaaatccacttgctg

SEQ ID NO: 45468 - DNA, 169 bp, Manihot esculenta
  Intron number 1 from transcript cassava4.1_030285m (locus cassava4.1_030285m.g) derived from phytozome v7.0 (chr-ID scaffold07100; pos 132247 to 132415 reverse strand)
agcctgttttcgctgttgttcaggttcatttgatttgatgccattccttgtctcgccttctcgggtcttctttagatgttgagatcatgttgagttttctcatctcttttttgtttctttttaattattatcattatgtagattggttcacatcaattcaaggtgagca

SEQ ID NO: 45469 - DNA, 837 bp, Manihot esculenta
  Intron number 2 from transcript cassava4.1_008128m (locus cassava4.1_008128m.g) derived from phytozome v7.0 (chr-ID scaffold06715; pos 53499 to 54335 reverse strand)
gtcgactgtctgtgagtcttttacttgtttaaatcatctctttccattgacaattttgcgaacatgtggcatgcctgatagttacacacataaaattgttaattactccaatttttacttaaaaataatcgcattgtcgagtcggtcttcgcttttttggaagtcgcgtttgcttctaatttgcttagctcggttatgcttggtcttcttgattgtacttttgaactagttggctgtgagtaattgattgggaaagtaaggaatgctcgaaggaagaatttttgcttctgagaggagattaaagaaacccaaagatagatgagtgacaaggaatcatcttattagtaagagaatttttattttatagcctagctcatgtacttattatatagcatttagtaggcaagtaatgaactgagaataaatatggcccatctattgcttttcttttgacaggaatttatttttacctaattctctcctttgagttttaggctagaggtggtcagcaccagttgtgtggtctctaatgcttgtctgatgccataaccattttctagttgtccatatttggttatcaaatttgtgatgttgtacccttaatgggataggtttcaatgctactcatatatttttatggaatgggtagcccaaattaataatagattgcaaaaattgactacacaattatctttcaattgatactctgcttaaactttacaatatttctagaagtttgtcattgaattttgaatatgctttcttaacttgtttgtatgcgtagtcactatctctctctctctgaccccttccatgttggaactgtggtgataatag

SEQ ID NO: 45470 - DNA, 823 bp, Manihot esculenta
  Intron number 2 from transcript cassava4.1_026661m (locus cassava4.1_026661m.g) derived from phytozome v7.0 (chr-ID scaffold07391; pos 75956 to 76778)
ctgctggaatcctggatatcactggcagaaactttgtaagaatctctattttacaacttatatttaattttgcattcattttcccccaatcttttatcattctccaagattaatttcttgcttttataacaaaattcttcttcataaactctcaggtctccaacgtttatgctgccgtccatttttgtctgtagttttttatttatagtttaaagtttttatatgataattaagagaattaaatcccttaaattataataaaatactccttaatttaattaatttttaaaaactggaatggatgagtataactttagctagccagtatctgccccatagagcaggaatcttcatgtagatatttactgtacttgtcttagttaactttgacattttgggcccatcaacggttgtgcctgtggcagacattgatagcactttaagggtaaatttacccagtatttccaattaatttaaaaagttatatataataaaaaatatctaaatattcaatggattcagtttaaaattaaaaaattaaaaaattaaaaattaaatttcatttaatattaaaaattaaattaaaaaatataaaaattaaactgtagaaaattttttaaaaaaatcaaattaaatttaaaaattaattaaattggtcgcttattattaataagatatttatacatcttacatggtttttcacgcttcaaatatgtgtcagtaacggtagtgtatctggttgaccaatttaaataataaattatatatgcataacattgatttggtttgatcaggtggggcgcataccatttaatcaacagat

SEQ ID NO: 45471 - DNA, 824 bp, Manihot esculenta
  Intron number 1 from transcript cassava4.1_016468m (locus cassava4.1_015447m.g) derived from phytozome v7.0 (chr-ID scaffold12498; pos 89255 to 90078 reverse strand)
attttctttcggctcgtcctcttttcatcgttagggtattgaatttgatgattattgattatgttttggttgtctacttgatctgattgataacatcttatcatctgagatttttatttattctccagttgtcttgttgtttaatcttgattgattatcatcgatcctctttgtgatcatagatcctgtgccataacatctatttacgtatcttgatttatgtttttaagatttattgatgattgattttagggattgatctttcttttgaattggctttggctttttttcaaaaaaaaagatccttcatctttttcttggtatttgtttgatttttagatttagatttattcttgctttttttgataaaggaataagcattgatttcggagagggaataatgatctgatgaagcagatgcgctgttttctatgtttcctgttttatgtgaagttttaagacgataaattgttctaggatgctcaaaatttaactgtagtttgaatcttgcttctgaagaatttcagtggcagattttgtgacagatctgttatgtatcttttgtgaaagaactagcatagactgtacaataagcacaagttgaattctccttttgagattgaaagggatcttggccatagctaatattattatggactctgcttattggttcacatattatcgttattgctatgttcaatttgttttagaacttcatattgatcgccccaaactttattagaaattgactttccaagtccttgagcctttgttattaaggctttaggctactgctgatattctgttttctttctgcctaacag

SEQ ID NO: 45472 - DNA, 834 bp, Manihot esculenta
  Intron number 1 from transcript cassava4.1_022677m (locus cassava4.1_022677m.g) derived from phytozome v7.0 (chr-ID scaffold02196; pos 162783 to 163616)
gtgctcgctccatccacaatttcctcaagtccctggtacttccctcttcgttctgctttctcttctctttttacctttaagctccattttcagtgatgtctttgtttccatttaaaattgcatggaatcctgtattttacctctgttttcagattttttttccttctttttcttaagaatttgtataaaattttttccaagttatgctccatttttaggcccattcaattttcccccaattttgatgcacttttgtgttttatatgtttatttcttagcgaattgtagatatttttacttctttgctattttattttatttccctaaggcttatttagttgccgttccgagaaagtgaaactaacgttttcaattaatttagcctaacatagatttccttggatttttatagagttttcttctgatttgccgctttttttccgctgcttcctttctctctcttaagaaatcatagattttttgtcttaattctgagttttatgtgtagctttaattaacgtactgttacatgtcatttgggatggtaattctatgtggttattgcacgttcctgggaaatcagaccccgcagtcagatgtttttaagcttataatttaggttttgctcggctgctgagagaaaacagtgaacttcagtatattatgctacttccctttgtatgggaagagctgaaacttcagtttttcatttaataaattcaaatggtgactgttctgaattaattatttcccctgaaatttttgcatttattaactttatggtatgtttaactttcagcctgtacgaaatcccgacaagcttttagagcaggc

SEQ ID NO: 45473 - DNA, 998 bp, Manihot esculenta
  Intron number 1 from transcript cassava4.1_013057m (locus cassava4.1_013064m.g) derived from phytozome v7.0 (chr-ID scaffold00935; pos 97482 to 98479)
cgtcgtcagtacttttcagtgaggagtgaagtgaggtgagctttctaattaaaacttgaaatttattcgtcgactatacttttaatttcgtagaatgctgcgaagatgattgaaacctttgattgtgattctttctctgttgcttgaatatctgctagaattatgctttccttaatggattttctgactagcgttttgttgattggcgctgcgtcgtcctaggccaataagttaataatgctgttacttgttcatagtcgttgttgtctgcttcagtttgatggatctacttttacctagttcctatctagtaccaaaatcaccatcatattatcatgtcagacgttttggtttgttttatacctgtatgtaggagagatttgcctctggtatctatttgtattatttatttctgtaaaatacatgatttatttaatgaacttggagttatagtgcaagtataatttagaaacgctatgtatgttagttcgaatttattcatgatttatttgatttcctagacttggatacacacgcatacacactagttcttctgatcaagtacccaactctttcccctttattagaatttccatcaaaaaaaggagaaaacaaatggatttgataaagagatttgtgtagatttaaggtagtatgcaggtaacaaggattcagatttggtgtggacatgggtagcaaggtgtgaataactgattattggtaatgggtacagtttgcgtggatgttaatggcttgggtgcatatagaaattttggaggtaacctacctgcttttcattcctttgacctctgcacctcttgggtataaagcttgctgcattttcaagcagcacaaataaaggcagtgctttaacatatatgaaatagctttcattgaagctatagtctatttgttttatgatagtataacttgttcttttgacttaaaatgtgtaagctaaggtcttctgtatttctcctttgtttaatatagttcag

SEQ ID NO: 45474 - DNA, 906 bp, Manihot esculenta
  Intron number 1 from transcript cassava4.1_011801m (locus cassava4.1_011801m.g) derived from phytozome v7.0 (chr-ID scaffold02421; pos 1171515 to 1172420 reverse strand)
gccggcacaccctttgcttctaggttcttgttcgggtacctccctccgctcactccatgagatatgtatgcttgtgtgcgtgtttgtatagacatatatagatacatgagctctttgtgatacagtggctattgctacaattgatttttgggtattgggtgttcacaggcatgcattagataggttatggtaattgattttctaggtcttttatgcaatgggagtttattcagcatatgttatttagtttgattgctcattatttactggcagaactatggtttgatgaagaattgctgctggtacgtctagagactggaatgtgaataggttccaaatttgagcttgtgataagtagattactatagcagctattgggattatttttagaatcatcttatggtaatgattttcatattgaattaccaatgctcaatgcctgtccttattgttgggtattgtagtataggttgggggccatgaacaagcctatgacactttgcttttgaaataggatattacgtccattgattgcgtttgcttcctaagttatataaactatcttccttcattgttctcaagtcactagtagcttacaattgatctatttgcagtcgtcactagttcattactttatacttttagcactaaaatattatctctggtttgcggtcattattttgggaaaagcagggaaggaaaagactagctcggaattttgagcctggaacttctgcttgaaattgtttgatgttttcctttccatctttcttcatttcatttgttcttttaaatgtttggcagtaattgtataaatatatggctttttcttaattttatctttggccacatattaattctctccatgccatgacagatattctgggacacgagttgctcattgtg

SEQ ID NO: 45475 - DNA, 847 bp, Manihot esculenta
  Intron number 1 from transcript cassava4.1_009905m (locus cassava4.1_009905m.g) derived from phytozome v7.0 (chr-ID scaffold04740; pos 153702 to 154548 reverse strand)
ggtatgcctctttagctctcccaaagataaatcgccatagctctttctctttttttttttttcttgggtaactgttgctttctgccagttaaagccgtcacgatttggagctttgagcaaagggattctagagagagaaagagaaagagagatgagaaaaaacattgcttctggcgttttccatgtcccaattctcattaatgtaatgcgtgcaagatatgctcaaatcttaaatctttagcctccaccactagctatcgcctctccacctccttaatgaacttcctccaccccttctcctcatttcttggtccttaacggtttttattgtctttaagattcttcattcttcaatcacctctcattctctctcttcacctcccccttcctctctctgtttataattttttatgatatatatgttgcttttccttatttattaagaatacccatcaccaccttttatcatttattttctctttctggtttatcctagtttgataaagattcaaaagctttaactcgttgctgtctttctctatctgggtttcaaggctttcaaaaactacattttgtgctcatctgggatgattctgtcagcagttttatttctattcctttgtatagcttaatttgttttatactgaattgggtttggtgagaagtgtgcgtcttgtttgtaattttattggatatgatctgcttgtcttcttatttggttttcaaggatatacaatcagggtgttcatagaagaaatttgaaagcttgacaggggctgcaaattaattcactggtttgattttctttgatttgattctttttttttgttagatttgaattgaagcc

SEQ ID NO: 45476 - DNA, 693 bp, Manihot esculenta
  Intron number 1 from transcript cassava4.1_021551m (locus cassava4.1_021551m.g) derived from phytozome v7.0 (chr-ID scaffold07067; pos 5847 to 6539)
gcaccgaggaaaacgcacttcgatgtaatccctgtttattttgttttcttttattttttttaatcatcttcttagttacctgttctagttgaagtttgaatatacaaaatgacgcttttctggatggaatttgatcaacttatctttgtgaattgtggggaacttctaaaacgacgtttagcaacattttataatctgttgcttgtgctgtttaagtgtttgataaaagttccttttttttcggtgtgtgttaaaagtggttttccccccactgttgggttaatggagcctggcgtcgtgatttgaattatgtcataaacaatgatatccagcaagctttagcgggtaagaatttttcgaaacaggtaaatctacactgtacccacccaacaatcctaagatgatatgcatgccaaaatcattatgagtcctacttaaatattgttggcttgccatttagctgttgggtatacacgttggttcttgtaaaatttttgaaaacaaaaaatgaagggaatgttgatcgactaagccttcctcgtcacacacacacacacatatatatatgctgagaaaagggttctcatttgacaggctaaaggtgctatagatttatccttttgagctttttcaatagattcgcttctgaatgtttttatgccttctttgctcaagtatgttttaatgttgcag

SEQ ID NO: 45477 - DNA, 414 bp, Manihot esculenta
  Intron number 2 from transcript cassava4.1_024257m (locus cassava4.1_024257m.g) derived from phytozome v7.0 (chr-ID scaffold01624; pos 63851 to 64264 reverse strand)
ccacagttcttgcctacggccaggtttcctatcacttaatattattgtttttgtgctcttgttgcagtttatagtgataatttttggttgtcttgtttagatatttgtatattgtgaatgaaccgtggtatgttgtttgttcaatcagacgggttccggaaaaacttataccatggggacaaattataatggggaagaaaataatggtggaattatacctaaagtgatggaaaatatattcaggagagttgagacgactaagggttccacagagtttttgattagagtatcatttattgaggtaaacattctacaattaatctatattgttaatcatcatagttgattggttttgctaattacttgagatgccaaacagatattcaaggaagaagtgtttgatttgcttgaccc

SEQ ID NO: 45478 - DNA, 995 bp, Manihot esculenta
  Intron number 1 from transcript cassava4.1_028789m (locus cassava4.1_028789m.g) derived from phytozome v7.0 (chr-ID scaffold03484; pos 255879 to 256873)
gaggtatacaattgctcattgttattttcaattctgcattatatgcacaacaattacaattatctatttctaaaatccatttttaatacatctttaaattttattttcaattttatgttaaatttagaaacatattttaatctatttccaaaattattttttattatagactttcattcatttttaaatttcattgcttttttcctttttaatccattgctaaatataatataaaaatttaatttcttttcattggaattcaattgcaaattatatatatatataaatacacattttatttccaccgaattaaaataagatgtgaatatctataataaattaaattcatccggttattttgcttcaattttgtatttactaatcttaattttttttctttatgtgtagtctaacttgatttcatctctaataatatatatattgctcatttgatagacttaaattcgagttctcatattctaatctcttactctaaaaatttaattttaattatagtcaatgatttatattctttacagttatattaacatcagttaaaattattttcaataaagttaatatgttttaatttaataatattcaaactatttgtaaaattaataataagaataataataaaataatcaaaatttgggaagaagagggtgatgaattaagtttgcatagtggacccgggttgggaaatctttacatgatgtgcttagtttccgttttttgtttggaagccaaataacggcattgtcccatgattatattttggtatcttctcctcttttgctactctaaaaattcttccttttcttcccttacacattctctcttcaatccaaacatgtcttcaaataaaacccatcaacaaatcccttcaagagttcattccaattccgataatctcccttttctctgtccaaaaaaattgagcttggagacacataattcaagctccaatagcctcacacatatggagacaccag

SEQ ID NO: 45479 - DNA, 530 bp, Manihot esculenta
  Intron number 1 from transcript cassava4.1_019190m (locus cassava4.1_019190m.g) derived from phytozome v7.0 (chr-ID scaffold08515; pos 34536 to 35065 reverse strand)
aaaggaagagttgttggaaaatggttaaaaaagatatagaaaataaattaaatatgagcagaatattgcttgaggcgtgataataatcactgtcgataattcgcctacggctgcgattcaacaagtcttctgaattacaagtaacccaggagcaagaacagcatcaattattaattacccagaaatagagaagaagcaatagagaagtagagaaaaaagagaagtatttagtttttgtgtgtgatccagaataacataaatgcactgctatttatagtgcttaacattatttaaatccacaatataagataaaaatattattcagttaagataaagatttaagatatccacaaaatcaaataaataatctagtttagttaggataaagattaaaataattttaaagtgaaaaaaaatattttttttcaaacttaaaatctataacttatttcaaaatatttttatgattcttttgaaataatttgttaaatatcggacaagagttgcagttgtaaaggaatcctgagtca

SEQ ID NO: 45480 - DNA, 634 bp, Manihot esculenta
  Intron number 1 from transcript cassava4.1_014099m (locus cassava4.1_014099m.g) derived from phytozome v7.0 (chr-ID scaffold06609; pos 449796 to 450429 reverse strand)
acaaattgtgcaattgaaatagaagtgactagaaggtaaacaatctaagagtagtacgtttaatcaaaagagctgtcccattctcattgttattgatgaatatgccctgttgtggatttcctaagtccttaattttatattcttatttgtggttagaagcaatggtatctgttttggacaaaaactgaaggacccttcatcatgaagttaattttttttttattgtgccctttttggtcatgttcttctttttactcaattgattcaattctccatttttcttttggagatttttgcattaatatactgatattctctgcctctagtagaattgatcaggtagctaggctatcattttaacatattatccacttgcactttgtcaagttaccatgaaaaattggatgccactgaacttgactgtcctaaatcgtaagaaaaccagtttgattctcatgcataatgctatttttgttccaggtctccttcataaaattgttaatggtgctaatgatagcaaggggagaccttcatggtatgagttaatggttaatgatgaccagttttcaggtttggtttctgtaggcatagaatgtgattctgctttctcaagttacttgcctttgctatcaaa

SEQ ID NO: 45481 - DNA, 581 bp, Manihot esculenta
  Intron number 2 from transcript cassava4.1_012320m (locus cassava4.1_012327m.g) derived from phytozome v7.0 (chr-ID scaffold04718; pos 45313 to 45893 reverse strand)
tctcttccagaattcccttacgggtatatttttggtttattatttgacttgcagcaaaagtttcatgcttattgttaaggaatattttaaaaaataattaaccaacgcttgaagcttggatacttgatattaagttgacagttgcatacatactgtgctagtgttgtaataagtgttgaattttctcaaaagataactatatttgttggaaaatctgtagtgaaacaatgagctgttcaactgaatacttgcctggcatatattagcaatgcaatattgcatttgtttttgtgattgaaacatgctcctgtatggggattgagcctgctacgctcattgctacctctgttactccgacttttcattttgcctgttgtacctatatcgactgtgattgggatattgccattttactaaaaaaatgattttagtcttggtaatttactctgtagatatttatatataagcttccatactgttgagaaaccactgaagatgcatggtcttgtttggctttctttgaagggacattgtaaattttgacaaacattcttctttaatctcagttattaacaatgcag

SEQ ID NO: 45482 - DNA, 973 bp, Manihot esculenta
  Intron number 1 from transcript cassava4.1_012320m (locus cassava4.1_012327m.g) derived from phytozome v7.0 (chr-ID scaffold04718; pos 46656 to 47628 reverse strand)
aatttgtcgtatattctgacatttttttggaatccgtaaggatttgtctttgttcattttgttactttgatgtcactggagggatttaatcttctctgaatctgaaatggtgctcgctttgatttctatggtgtaattggctagttgggtctatttctttattgctaatttttcaattttttgagattatggatatatttttatttaaaactaggattacgggtcggattagttgagtctgattgatgctttcttcctacttataattagatgtaaaccagttttggacagagatcatttttttttagtgctggatatcaatcattttggcttttttgtatatgtgcttttatattcatagtgagagatactgtcagttcatgggttcccacgattgtgtatttgtagttttggacttttctccagctcgtttgctcatcttcttatcgctttatctttttgtttctgcttctgctattgtagttgtttccttcttaactctccctgtcctgacctgcttgttgtatgtttctcagatttcatctatggttcctgccgttcagttcaagccctttgtcttctatatcatctattgtgttgtttaacttccattctcactgaccttgttagctgttgtatctctcttccgggttggatttgccccaaatttcgattttgattttgagtgagaaacatttctttcaaaattttccttttggtgcccatttctgtgtagcttactttgcttgatcaataatttaagtggggtaattgaatcttatctgtttttccatgtagtctcctttgttcacgtctgttaatctttgcaatcacaattcttcttcttgatcagcaggtttgttgcttctggttcttcatctttttgatgaccaatttagatttcttgaattattgtcaattcactacattcatttggctgcaggttattattctccctatcagttttaaagaa

SEQ ID NO: 45483 - DNA, 965 bp, Manihot esculenta
  Intron number 1 from transcript cassava4.1_013314m (locus cassava4.1_013314m.g) derived from phytozome v7.0 (chr-ID scaffold10689; pos 53248 to 54212 reverse strand)
atcttggttagtttattctacccgagctttgttcttgatggttctgtttcattgccacttatcttccctttgttatgataacttttcagtagaaacattgttttggggttgattgttttagattataattttgattgcatttccatggaaatctgatacaaagcggtgttgattgttttcagtcttagttatgtggtagagaacgctgtaataataattgggccatgaaagatctcatcaggatatttaagaatacttggttgtgttataatccatttgcattggaagtgatgaagcagcctctagtttattaatttaggatggatctggatctagattctagatacaatccttttgaatttgtttttgttttatattatatgattgatatagcttcaagattgcaatgcctaacatgcgcaaaaggactacctctattttaactttttatgttttattcattcaatggagtggacccattcctggataatggagctagtgtaaacatcaatttttttgtcacaacaataataaataaataaaaagttttggtaaagaatcacagagattcacaaaccttgatttggaaggtttgtgtttgcttatatagactagagattctgataaaggcttcatttggttttgctttggttcaacttttaaatatagaacaataattccatggaatagcagtgttggctaattttaataattaagtattatatggaagagatacttcctaaattttgtagaatacttgttccatggccatggaataattactatattcccacactgttctgttctgcaaacccaaagaaacaaaagactagtatttgcttattattaactccctctggatatgttttaactaggtctgcatccatctattgtgtgaatagaatccaattaacttggaaggtttattgttttcttgagttcccccaatttttctgatttcaggt

SEQ ID NO: 45484 - DNA, 814 bp, Manihot esculenta
  Intron number 3 from transcript cassava4.1_015215m (locus cassava4.1_015215m.g) derived from phytozome v7.0 (chr-ID scaffold07351; pos 435755 to 436568)
tctgggctcgcttgcagtcattctcagcttttcgtagatggggtgattctgagcgggtactctttctttttttcttaattcatattcttttcaccctggaagtattgatggaggattgaacagtgcagcagagtactcattttccttttgtattcttcagaggcctctagcacgacgagtatggattttgatacaacgagttgagggactttacaaagctgcttcatttggcaacctgctcatatttctttacacgggaaggtatggtttcgagcatggtttgtgaatctaattttccaaaagaataacttgcacaaaaattaagccatgaatgttagataaaactggtttatacaagatgtaatattcacattgctgaaaagagagtcagttaaaattagtcatttattgttcttccgtatggattaatttggtctattattgtgtgtgtgtgtgttttttttggggggatctaacaaatgcctttatcgtgatagtggtgatctctgacaggatttaagaattggtctagctgatgtttactagtggataccatttatggatgcatttgaatggatgactatttatatacttattttgggacactcaagtcttgctttagttatttgaattaaatatctgcactttttgtgaatttgattgatgaattttatattatataattttattgttcagaaaatacattactggaaaggttgttcagttgatgatctctctgggtttgacaaatctccattttctgtcttgttttgatgcagatttaggaacctcattgaaagagtcttaagagcaa

SEQ ID NO: 45485 - DNA, 824 bp, Manihot esculenta
  Intron number 3 from transcript cassava4.1_016990m (locus cassava4.1_016980m.g) derived from phytozome v7.0 (chr-ID scaffold08873; pos 383202 to 384025 reverse strand)
ggataaagaaggtaagtagcgagctatttgtaaatattttgaattctaaagccactttcctccctttgtttaattttggaatttttcctccgcttttggatgcgagttatcgctcttgcttcgatgcttctcttaggaaattgtcatgtttgtttcttgttttgttttatgtgcgattgttggtccaaagggttgttgctgatttattgtagaaatgctttgccaagcggcagtgccctaaacaaatttatgttatatggttcatattgtaggtctaactggaacgatatatgttttggttttgacccacttgttaactgcagtcttcttcctcccatgggaggactgcttgagcatttatagttttggtattgaatgagatcgtagaaacaaataggttgactgtataataatttagctgcacctaactgttgcagaatcaagagaatgtacaataactcaataagaaatgatttgcatcaaactaagtgactttcatagacgctagtcacttaagtggatatggcctatgaaagattttttatgttttaaccaactgaaattatttgcaaaattaacttggtacttaaatcaaatgaccttaaaaatgacaaaaggaaaaaaaaaatcctagtctcgcatctaaattgcaactaaatagctacagtttttgcaagggaagttttatatctactgtagagcaaaatttggtgttagaggcaaatgaagtatctagttatttgttttagctgttgtagacatattgatgtctttgctgaactgaatgttgtttcccgttgcctttgagtttcttgcagtttcaa

SEQ ID NO: 45486 - DNA, 488 bp, Manihot esculenta
  Intron number 2 from transcript cassava4.1_008943m (locus cassava4.1_005712m.g) derived from phytozome v7.0 (chr-ID scaffold12086; pos 176338 to 176825 reverse strand)
gaagaaaaaggtaagaattgcgcatgattttttcttctctctctctctctctctccctcccccaccccccgcccttctctcctttcaactcccaattcttacaattatgcgtgattagatcaagcgatatcatgtcagttgaagatatatgatttattttctgttttcctgcagtgatggatgcttctgatttttgtgcaagtgtagttaattataaagaaaaacatttatgctattgggtaaaggttgaaatatggagtcctgtgttaaaacaatatggatctatattttgacttattaacccattcctttagcagctttagtaagaaacttgtctatttttgggtacctttatggttcacagtttattgaaatttcatcatttgcatagttggttttgtttgtttattagatgctgatatgatatttgactctatttccttttttctttggcagtgagaagagaaatcaaaatcctgaggttgttt

SEQ ID NO: 45487 - DNA, 298 bp, Manihot esculenta
  Intron number 1 from transcript cassava4.1_026709m (locus cassava4.1_026709m.g) derived from phytozome v7.0 (chr-ID scaffold00847; pos 1377424 to 1377721)
gctgtggtttcagtttcttcaccaaggtaaaggtatgatcatttgaagttttaaagcttcattatttgagttatgattaaattctttttttagcttttcttctatcctcaattttagactaacataaggatttcattaaaaataaagtaataaaatcaaatgatttgatcaaattttaaattatgaattatattatatgctatattatattacatagattttatttattatgaattatatatttgtttttttaaaatctggagggtgctggacaacaaaattgtgggaaaaaatttct

SEQ ID NO: 45488 - DNA, 698 bp, Manihot esculenta
  Intron number 1 from transcript cassava4.1_009971m (locus cassava4.1_009971m.g) derived from phytozome v7.0 (chr-ID scaffold07520; pos 999916 to 1000613 reverse strand)
tgacaccagctactggaacaactttcagtgggacggtagagtcgcagcttttctttttctttttaactttttgtaatagtattgattagaactttttgggctaaattgaaatgctgaagcatatttcactagaacccagtgattgtttcttaattcatcatgagggttttcttgttgtcagattaatttcgttgtagaatcagtgttagatatgctgatagtgacgtttttaacctttaacttattatatagtgaatgaacgctagtgtagaaaaaaagaaaagaattggaaaaatcatgtactttctttccttcaatggggcattatgcaaaatccatcagttaatgcgttgtctgagctgtacttctattccctctctccctctcacttgtgttgtgtcaaattggtgcatgtttcttcttaactgagtcttgtttggttggggataaattcgctaaggaaatttaagttcccaatgttaatgttaatgtattcagcatgtttggttggcattttggcattttgtcccaacttctcaggattcaaagaagctacttaacttatgggagtaagttgtttcctaaaatgtaaaaattcctaggaaatagggagtttgaaccaaacaagtccactttatttcccatttagtatattcacagcatctgctttatgacgatgacagacaggaaactgaagg

SEQ ID NO: 45489 - DNA, 726 bp, Manihot esculenta
  Intron number 3 from transcript cassava4.1_019519m (locus cassava4.1_019519m.g) derived from phytozome v7.0 (chr-ID scaffold11106; pos 621272 to 621997)
tccctcaccctctcaagtataaaatcattgttagggttagtattttttctctttaatgtatatttgcatgcattaatatatttgtgtttgatatttttaggttttattggaaattgagtggttaatgggtttatggtttagcttcatcaaaatgaattttgagtgtgttttgaatgaatttataaatggtataaagtgctcaatgtgatattgggttctcatttgtgtgcaatttatctctatatcattacagctactggattttgatgtgattatggcttcacattctaatagaaaatgaatatgtgccttgcaacatattcaaatttgtaaaaatgggatctttttggttaagctaattaacaatttaagtttagaagctagtaacttgttgttcatctatttttgcatctacttttgcacaagggccggcttgtgccttctcttcattgctttttttatttttcattttttttattgtgtattgaagaaaaaaaaacccttgtatttggcatataaaggagcatccattagagggtaggtctaattgtttaacattgcaacttcatggaggtaagtgagtagcttatatgatgcatgggcagatcctatcatcctttagtttaaaacttgggtaactaggaatgtgccaaatgtattgaagtttcatgctttaacctatttgatatggttttgtagatccatacaactagccagtcttcgcca

SEQ ID NO: 45490 - DNA, 800 bp, Manihot esculenta
  Intron number 1 from transcript cassava4.1_009528m (locus cassava4.1_006966m.g) derived from phytozome v7.0 (chr-ID scaffold04718; pos 14723 to 15522 reverse strand)
agaaggagcttctcattaaggctaagcaaactcaggtagtgattttgtatggtttgttcttttttgggtttgagttttagttatggagcttggtttttatagcattagttccactttgaaggaagaactattggattaacttttcgtgctgtatcgggaatactgaatctggaagtgtaattgtcaatattggtccagttattctgtaggaatttctaaaataagttactagatttagatgatatgaaaatgctacgcatttttttggctgaagaaaagtgtataaaacaatagtttgtcttagttggacagaactataactgtgatgtggtcagtgtgtacaagattaaatggaaattagatgaagtttgtaaatattcattgggatggatagtattatggtatagatcttatgtctatcataattagggaagatgttcaaaaactattggttgcttgactctccttaatttatgttcgatatgttctctgaggaatatttaatagcaaaatccatgcaatacttgcgctgacaagatctttaatgaacacacctttcgtgaattgtggtacttacatagtcttacatttggcgcgaatgctttctggtcggaattgatgttgtaattattgaatgagaactctagtagcaatgtatcagcgactagctctagagaatatgctgactttctactctcaacacattgtttcgattgtgtaaatcaaattttggtgatgttaaatggtttgatttccttggtgcagaaacctgatcttgtgggattggctgaatttctcaa

SEQ ID NO: 45491 - DNA, 550 bp, Manihot esculenta
  Intron number 2 from transcript cassava4.1_009214m (locus cassava4.1_009214m.g) derived from phytozome v7.0 (chr-ID scaffold01865; pos 32138 to 32687 reverse strand)
ctgcaaaccgaaggttatgtttatatattgtggttgaagttgtagtagtcatgaactaattctctctatttgtgaaagttatgaactacttttctgtctctagatcacatgacattctggttcttgctgtgttgttgccgatttgatttaaacatctctatctgttttctgttttatcattagaatttgtgatttctcctaaaccatcaatttttttatcgggtctttttgcataacattttcgataatctagtataaactcattcagtaatgcctctctgtttgtgatatgtaacttgtctatatctcttgactacattattgaagaaaaacaatgttccatctacgttttgctaacagtttctcctttgctttgggagtaggatagactttgttggatattttaatctctgtcctcatttgtgtacttctatcagttcatctcttccagtgggataacgaatctccattcaaagtgggttctcttatttgttgagaaatctaataacatttaagggaaatcttggtgtttctgcatgttgcttgcagg

SEQ ID NO: 45492 - DNA, 934 bp, Manihot esculenta
  Intron number 1 from transcript cassava4.1_000790m (locus cassava4.1_000790m.g) derived from phytozome v7.0 (chr-ID scaffold04457; pos 457233 to 458166 reverse strand)
tcgtgtcaccctcatagtcggcgagactggctgtggtattcttttaacttcttttttccaagttttagtttttttctttgggacacggtttttcccgttgcatttcgttgtttaagactatgagacgatgtttgattgcggaaaaagcacgagggaactgaaaagaaaagaaatccgggctgtgaattgtcatttagatgatcgaataaaacaaaatcaaatcgaacaagtttggaactggtttcgttcccaaaacaaaatgacaatctttttggtggataaaatatttgctgtttgtctctaccttaaaatactttataaaagaatcagttagtatacatttgctattttgcgcgtaatctctctctcttttttttttttttgtggttctggggaatcttaagagtaaggagagagctggaatcgaatgaatttcccttagtccagtttttttgggacttgaaatttatagtctatggaaaatgaaggtttcttgttgcctctacttcattattctatcttcttagtatggattagtttcaggttgattttattaattgtattacctctgagttagagtttcaaaagataaataataataataataaaaaggtttctctgaccttacgtgctctcctttggcagctccccaaaatgtaggcaaataatattacaaatttttgtttgagaattgaagtgttcattcagctgaatcaaattttactttttggtttagtttatttagcataatcagctttgggaatttctgaaaaatatgaaaacttatgtgtaaatgcaaggtttcttattcacttaattgcattaattattctaaactcctacatatcattagcctctgactgataatcggccattctttttccaattatattttcaaggaaagagctcccaaatcccacagtttcttctggaa

SEQ ID NO: 45493 - DNA, 442 bp, Manihot esculenta
  Intron number 1 from transcript cassava4.1_005434m (locus cassava4.1_005434m.g) derived from phytozome v7.0 (chr-ID scaffold06609; pos 335993 to 336434 reverse strand)
gaggaggtaatgagctattttctggtttatgtttttgttattctggttaatttttgcgtgttgttgatattccaggtgggttatatttttggtgattgctgcggaaatttgtgtgcttttcatttcggttgattgaaaagtgtgttcttattaattatgtttgaattattgcccttttaggagcttgagttgatgattgaaattgtatatttctttggttataatgctaattcaatttttttttctttttcttgggggtttgaggggtggggtggtggtggtttgttggttgtcgaggatgtgaggttctacaatttgtattgatgtcggtttttcctgattggcttaaactttttgtgatcttacttctcttctgacacccaaagttgtctcatgggaatttgtaggttgaggggcaaactgaggaagttatcttcgatca

SEQ ID NO: 45494 - DNA, 885 bp, Manihot esculenta
  Intron number 1 from transcript cassava4.1_013787m (locus cassava4.1_013667m.g) derived from phytozome v7.0 (chr-ID scaffold03252; pos 184435 to 185319)
tatatacaagcttacgaaggagaggacttgcgctggtaaaaagaggaaaattttagttttttttttcttttgatggtaattgtaggaattagagagaaattcacgacgtaacactaagttttggaatttcttactggttttgcctattaattttgattttgattttgatcgttttatgttgggtttctttctttgggttgtcgggtgttgtgcataaatattggctttttttattttaatttattttttgttttacatgaatgcaaacttctgaagaacagcgaaatcctttttatacccttcagctagttagctttctcgtaggattctcttctatgagtggcgagctatgattttttatttttttgtgaacttaaaatttcaagttcaattctttggtggatttgtgcatattcagcttgttggtgtgagtgatctctattgaattggatgataaaaagaatgtgcaatgcaaattttttggattggttgcttaggatgggctataattggcatcgtcttgcttagtgcgagtacattctaatagtctcatcgacttattccttctggattcactgtagtaggtctgagtccaatgataggggcaaaagccttttttttttagtatagcctattttcatcagattttgttttagtaaggatccttctggctaatcttgtttagcttgaagtgggtttttcttacttgaagtctccttccagcaaactaacggaaggattaattgacacttcaccaatctcattaattgacaataagggttacataggtctttattttgttttccttgaaagatatcagttctttcttgacaatccattcaatgatttgcaggactatcactcaagtcccaggaattgacagct

SEQ ID NO: 45495 - DNA, 1013 bp, Manihot esculenta
  Intron number 3 from transcript cassava4.1_004443m (locus cassava4.1_004443m.g) derived from phytozome v7.0 (chr-ID scaffold08799; pos 559208 to 560220)
tgactgcggcactctcttctcaaggtaaccatatgctaattaatcaataatcatccattaattatctatacgtataattatagtcataggattgctacaaacaaaaatacgatgagaacgctgaaaaaaagatttgggaactgatagttttggagaagggaattaagagagagctagctaattgggggtcggctgcatttctttttcttctttcagatcttttgttttttctcagttccttgctcttttgctcgtatatggcaggactgcttacatgtgaataacctgcgaaactactacggtagtggagggctgttctcgagagaaacgaagaaaacgaggggggacaaagaaaaggcaaaaaaaaagaaagataattttctttctcaatgagaacgccctcctccatctcgtctctctattcaagtgttgttgtcacagaatgtcaggaaggatagtgtttctgagttttcttttttttttttttctcgtgaggtgattatgttaatggctttgttcttctgggttggctcagctctcccagctaattcctcccatgaataacgttagggttgttgcgtagagaagctcccgttctctcgctctctccctctttctcagtacccgtaagtaactcaactccttctcattattttctttccggagagaatgttctacagtctcattagtttgatcggagagttttgcgttgattgaaaagcaagtttctgaaatgcgctagcttctgatttttcatcgaactagtatatattttgcactacatttattgaagagccagttcatgaattggcatttagactttcagtgtcttcggtcgtgatcacttttagttagctcctcctcctccttcttcttcttcttcttcttcttcttcttctgcttttatgccactcccatcttattcttcctcttgaggcaaaataataacgagttctttttcattataatttgttgcaggcgtgacagtttcatcactcatagggcattctgcg

SEQ ID NO: 45496 - DNA, 813 bp, Manihot esculenta
  Intron number 1 from transcript cassava4.1_001695m (locus cassava4.1_001695m.g) derived from phytozome v7.0 (chr-ID scaffold06881; pos 42175 to 42987)
tctcctaatagacgaaacaaactgcacagatcaaggtataaatttctttcctctttcactttttagtaattcttttgtttctaactacttgaatttgttgcttaatattttctttttcatgaaactattgtgcttctgtttactttgttgtctccttttagtggatggtgaatgaattttggttaattttattggtgattttgtctcttgcagccttgtactaagttttttggtttatactctccttctctcccttaatctattttatgttccaaataaaagaactaggaaaatgctgaattggaagtatcttttcattcactgttgaaaattttaactgttatggggtccttttgttctcttctgtggggttttccatagaaattgtctgcctggaaatttggaatttcctatttgatattcttgattttctgtaaccaaatagtgtagaactctttttttggttatatttttcttttgatcttttccttcccatttactaattgacatttgtctcaattgatgggatttaaataaggatatagcgcttgaattggtgaatatttactttttatttgtctatccataattcaactgagtgtacttttcaagctttgaaaaaatctttctcccaagtgtacttttgattatgcttcacactgccagttatgttaatttttggccttttcaggaagatggccaagctgaaagaagcttgacaaattaagcttttgttaactttttttttttaaccctactttaggaacaatgggaattctcatcagagtcctgaatcttatataacccgagttc

SEQ ID NO: 45497 - DNA, 680 bp, Manihot esculenta
  Intron number 2 from transcript cassava4.1_016370m (locus cassava4.1_016245m.g) derived from phytozome v7.0 (chr-ID scaffold04457; pos 48326 to 49005)
actatcgaggtacaactcttgtgatttgtgaactcagttttttttttccaaggatttatattgactggtggttcaatgtgtaactttttgaatttagttcccagtataattggttgcgcctacccggttgttgaggaaattgagagtataaagaaaatgagtattttccttgtcctatttttcctcttcctattgttctttttttccctatgtggttttagacttcattttgcaaggcattgaaatttttgatacatcttgttcaaatctttgaattgtattcaattgattggaaagttttgaattcaaggatccaagcattgcatcatgatttaattaataataataataataataatattaaaaaaaaaaacataaaaaaatcttgtctagttctatattcttaactaccacaatgttatttccaggaacatatacagctgtcagtcaaagattaagagcagtgttaagtcaattaatgatatttatccttttttcttctttatgttccaattagaaataattatctgaaaaaatactgtgttctttattctcagggtttttgtttgagttgtatgttctaggttctttttatgtatttttattaataaattttagattgacttgactgcttagatgatgaagcaaaggcacaaggtggagagggaacaaaacattgg

SEQ ID NO: 45498 - DNA, 563 bp, Manihot esculenta
  Intron number 1 from transcript cassava4.1_028495m (locus cassava4.1_028495m.g) derived from phytozome v7.0 (chr-ID scaffold04177; pos 57803 to 58365 reverse strand)
gagcggaggacttcacgccgtgtcaacgatttgcagtaagtcactttttcttatcagctttcactaatttgcttttgaagtaatggaagttctagaactttttcgcttgggatttgtacttatgtagtccctaaagatgtaatcttgatgctaggatttctacttcacttgctaagatggttctttgatatgacctgctatgaatttagtttgtagacctcattaatcgtttgtactctggttgatattactactgtttgatggtgatggtactagtggacagtttgcacaaacacatgtagttatagaatcatgtcttcaatttaatcaactaccaaatggttctatattgagcaaaagtaggagtattggattggacaagttcaaaaaatataaaagttcatcagtttataatgtcattttttgtcagtgttattattatgattttggatagtattctatttcaaaaaatttgtaagcaactccataacacatttaactgatttcttctttcttcgatatatttaggtatcaaataggcctccgatatactggtggtgctc

SEQ ID NO: 45499 - DNA, 893 bp, Manihot esculenta
  Intron number 1 from transcript cassava4.1_000382m (locus cassava4.1_000382m.g) derived from phytozome v7.0 (chr-ID scaffold04443; pos 84653 to 85545)
ctgtcctggattctggtgttaaggttattatttattgttccttcacgcaattcgtaccgaatttaggtttctgtttggtcaaactttggtttcaacttccttgttgctgctttcttccccagcatgaaatgcctggattttttttaaggtttcttgtttgataactaagatgcctgtgtcggttttactttaggccttatcttgatacagcggaagtgttagtttcatttatttatttatttttaaattttctcattggtttctttcttgtaaaacatttttacctttaatcaaatttaagtttgtttttatttgtgaattctgttttgaattcactctcactttctttacttgagtattcagatttctgtcaaatttaaaccctctgtaattgtcaaccaatgcaatttttttgcttagtacctaaattaaattggaattttggtctcaagaaactaaggactatatggggctatcatcatctctccttttcttttaccaattttttttatatcttccgatgttattgctttgagctcaaataattttggcttcctagcattagaatcctagttgattgtgtttttgccacttcttttcccttttcattttcacaaaatctcaggttattgtgagaatacgaccaataaccaaagatgaagaggaaggggaaacgatagttcaaaaggtatccgatcaatctttgtcaataaatggccatagcttcacatttgactcagtagctgatgcacaatcaacacaggcaagatctctatcataaatatctctgcaatattgcttgatgatttttattgggaaatgctcaaagcttttcttttcccttctttttttccacagctagacattttccatcttgtaggagcccctcttgt

SEQ ID NO: 45500 - DNA, 257 bp, Manihot esculenta
  Intron number 2 from transcript cassava4.1_007641m (locus cassava4.1_007641m.g) derived from phytozome v7.0 (chr-ID scaffold09507; pos 8231 to 8487 reverse strand)
aatacgatcatttggtttgtttatttcctttaccaatttaatctttaaaagttgtggattatttaatttgtttttagtgctgctcttctctgtttgattgtcttttgctacttttccgtctttgtgatgaagtacttctgttttcaaatttattaaaaagcttatttgtgccattttcctcatgtgatgggggtgtgcatgggcatcacggtggttgcttgtgcaggacaataagataacagatacatctgctgcag

SEQ ID NO: 45501 - DNA, 797 bp, Manihot esculenta
  Intron number 4 from transcript cassava4.1_006371m (locus cassava4.1_004253m.g) derived from phytozome v7.0 (chr-ID scaffold06701; pos 394683 to 395479)
gcactgttattggtcctttcagttgacttcttctggtagtctctagaatctcaatcatttactgttaagtgtggtttaggaactgcatcgcattcctttgtttctgtaatattgacagtcaaactgaatgagaaacagtgaacctaattgtttaaattttatactgggtgttagtatttcttctggaaaaaaaataatagttggctttggtatggaactaaattctcatgcagcagttgtccattagagccaaattagaaactagaaagcaggagcactaagtacattgtttttgataagcaaaacagaagttctttagtttcttctggctatggaaattgttatctttcttgtttagtggtcacatgtatcaattcaatagaagtagttgtggtagctgtgatgggccgagaatagagaggtgtgtgagatggtgaactaatggctgagaaagacagacaatgagggtggaaagattaggactggattgtttgcttaaattatcagtcctaaatactaaggagcctcataaagagttgatgtcctaccaacaatgtaacttctaaattcaacaggtccagaaggcaatgctgcttcacaatcacaatggactcacattttgcagataggatagagattgttttaacttatttttctcctttagatcttttttttaactgatatacaaatatttgacttcatttttacatgaatttggatagtactaaaaatgtttctttatgcttattttggtggttacaggattaggctgtgtttggtgatatacaaaacattga

SEQ ID NO: 45502 - DNA, 958 bp, Manihot esculenta
  Intron number 3 from transcript cassava4.1_012145m (locus cassava4.1_012145m.g) derived from phytozome v7.0 (chr-ID scaffold07104; pos 36894 to 37851 reverse strand)
ctcaaactcggcttcttagccttgagagagaaaaggtctgttttactgttggttgacttgcttgcatctgatactctgattccctctcaatgtttttgccctctttttttggcttagaatagttgctgcttcctgctcttcttcttctactgttagtttttcatgttagatgctcccttgatgctgtttaagaataactctggttggttgtaggaacttgcagccttgcacctttgttagcatactgaatatgctaggaagtaggaagaatggtgtcattaacttttcattgtggatagtggaatcgatggtcttcaaatggacactatcttgttattcttccgctgaagtgtttaaaactttataagccaggcttatttgtctcaaatagacagtatcaacttgtcttaaaatctgacaaacttcagttgaaattaaatattttgaattggatttgctaaaagaggaaacttaatgaattaaactggtaaaaaaccaatcagattaacttgtattaactgttattacacgtacaaaaaaaaaacttgtattaactgttcatttcgaaaagtgccttgcagtttggtttattgaatgtgattgctcctagaatttattacttgtagaatatttattttgctcgtcccccatacccttacccctacctgtatgctcattggggcatttcctttttgctctcttgtatgttttctttttatattagttgcatcctaatatagaacctaggaatagtagtgacttagctataatatagagaggaaaaagactaggaaaatacagcggtggaaattttaattgtttagctcttcttaaaataggtcatgttttcactttcctataatgagtggcaaagctcatctcatttatgtgtgatgcttcaaagtttaattgaacatctgcagggtgtcctgcgttctcaattgcaatcagctaacga

SEQ ID NO: 45503 - DNA, 426 bp, Manihot esculenta
  Intron number 1 from transcript cassava4.1_005133m (locus cassava4.1_005124m.g) derived from phytozome v7.0 (chr-ID scaffold06715; pos 211753 to 212178)
gttgagttggctggtggtgagtgagttagctcatgcgtttctgtctttcttacttattatcttcctctgttctcgcttctctcacctacaaattaatgtgaccccatctgcaaatcaggataagaattgataaattttattaatttgtcaattataaagaaaacccagaaaagttaatgtcgtttaactgatatagtatctagattatttttgactctttccaaaattattggataattatcagaaaagtaatttggaagagccccactttgttagatagtatatactgtacagaaagcaagagagagggagggggccatatttttatatataataatatagagaggtgaatcatacggcactaaaaaaaatctcgcacactcccatacagagagagagagatagagcagagagagagagtgtgtt

SEQ ID NO: 45504 - DNA, 982 bp, Manihot esculenta
  Intron number 2 from transcript cassava4.1_005133m (locus cassava4.1_005124m.g) derived from phytozome v7.0 (chr-ID scaffold06715; pos 212223 to 213204)
tacttctgcttctgcttctgctctgttttcaggaggtgtgtgagaatctcctcttccctttttctgcttttatttttgtattgaaaatcagagaaacaaagtccaaaagcaaatcgtttaatgatttttcttgtgctttgattgtttgttgcaccacctataggttggttattggaaatcagtcttccccctattagaatttacagtctttgatgttcttttttctgcttggttgctgagaaaaaagtggtgggagggaggaggaagaaagtttacttctcatgaaagatagaaaaaaaagaaaagttttggccaatttattgtttttttcaatttcttttcaaaactgaaacaatctgttttcttgggtgtaaataaaaatcttttgatcataattatatctacctgattgtacttgttttccaattatttttagttggcagtttatttcagtttgccgggtccattgaatatacaagttcataactcaaatctttttgtggctcatagttcagattcaaaagtacttgctcagatctcttttctcgttttcaatctgattgtttatctcttttactggaattatctatattttctttcttacttcattaccatttgggaaggaagaggaactgcctcttttactcttgggacccatcagtgtggtgtatgtgggcccctgcctgtggaaatgtggccatctatctcccataattttttgttctgtatatgcatttatcttgctgatgtcgatgaatcctatcttgtgattgttccaatttttttgttgttttttcactagtcaaaaatgggggcacctttaatgtgtgcattagaagtaattcaactgccttcacaattgtatttgtttcttgtatagttggttttgactattgtattcgtgacttcaatattattattgtttttttaaaatgtatattcttcagggaggagttcaaaccttggtagaggaatcagcaga

SEQ ID NO: 45505 - DNA, 726 bp, Manihot esculenta
  Intron number 1 from transcript cassava4.1_007862m (locus cassava4.1_007820m.g) derived from phytozome v7.0 (chr-ID scaffold12091; pos 63358 to 64083 reverse strand)
attatctccatagctgcttcgctcacaccggagaggtagcaaataaataaataaaataaataaataaataaagagtagtgacatatatgtagaggcttgtcttgtccttgacaggtaggattaacgagttctctgttctcgtggattgacttgatcatcgagaattcatgaaccaatgtttatgtagtatgctgtgatttgcttttcacgaattgaaagttagttctttgtgtgctgatgaaagatatgttcttgtattgttgctgtgtcctatctaattttatttgttttcttgtttcatgcatttaccatttgttttgtgtcctcattgtagtcttcagataaaatatcctaatactgcaagttttctacaagtggatggtattggttgtttgagtgtatacgaagtgcagggcagttgcaatagaaataaagctttgtggatgtgtcccatgaattaaacatctttatgtttatctttatggatttttatgggttacagatggatatatgattatttcacattttgaaaaatctattgttctgcatcatgggtctcatgcattatttactcctaacctgcctttgccttcattggcgtttatttttgtgtttgcaaattacaagcaagctttgtccacatttattagggaaaggattggttgagttactgaatacaatttgtttgcaggttgtttctgtgaaagtaattcgtaataagcaaac

SEQ ID NO: 45506 - DNA, 754 bp, Manihot esculenta
  Intron number 1 from transcript cassava4.1_007672m (locus cassava4.1_007672m.g) derived from phytozome v7.0 (chr-ID scaffold07520; pos 2748632 to 2749385 reverse strand)
atactcgatcgtctgtacgtagccgttatagattgttgctttgtactcattattttttttttcttatcattttatcataatgaataactgccgctcctttctaaatctattgttttcgtttttttatgaagaaattgctgctttttttttttgaattaatgtcaaaatgttttgctcttattggtttctatgtttgcataggttattgttcgatgagatcaatacgtgagtcgatgctattctgacttgtagcgtgaatatcgacaaaggatccttcttggttttctaatgtttccttagtaattcacacgtgtcctgctggtgcggaattatgtgtttttgctttttataggtgtcagacgtggtgaaattgatttttgaaccatttgggtttgatgcctatagatttactataataatattaattacatatatataaatccatgggataaaagaaaatgtttcgtgcacgtcttgacatttattcttttggctaaattgggaaaaaaatacttgtttcaatttcatctatttggggtcgcgacattttttacttcgttagcgtcagtaatacaattgtttcctctgcaatacccaatcaaaaattggcaaactactgactgttaccattgcctgtcacttcaaagacttactcttttgctgttttttagtggctccctcaagctgggagtaaaatatctgaagctcttattttctttaattctgaatttatttcttttcgctttccagaatt

SEQ ID NO: 45507 - DNA, 666 bp, Manihot esculenta
  Intron number 2 from transcript cassava4.1_023202m (locus cassava4.1_023202m.g) derived from phytozome v7.0 (chr-ID scaffold04760; pos 27308 to 27973 reverse strand)
gatcaagggtctattacaccaataggaggtaaagttgctgtaatttttttgaattaattgatcttcataatctctctttattttttttgttaaaaaaaagggtgtttgttttcatttaaccatcccatagcacatgttccaaatctgtatttctttttgtcgctaggctcaaggctttgctttttctcagtaatgcttgttctctttccctttgccattcaatttaatcatctttttattagcttaaagctattgcttttcatgccccttacatttgaatggtgatgcatcgggactgaatgtgacccttgctgcaatggtaaaagttgcttgcgccattatgaatcggaggtcaaatgttttagcatgggaagtcttgatcactaaaacatcctagggttttgcaaacatgcatgccttctgttatttggataagcaggattttgatatgtgcaaaaataccctgttgcggagatttaacggaattcctcttgatttttggacaatttcattttttgtgtccaaaactctattgcttgacatatgtagcttcagaaagaaaaagggaagaaaagaaaaaagattctttcatttgtgaactagcacatctaatttcctgttccactgttgcggtacttttgcagccagcctccactcctgagtgcg

SEQ ID NO: 45508 - DNA, 710 bp, Manihot esculenta
  Intron number 1 from transcript cassava4.1_003619m (locus cassava4.1_003619m.g) derived from phytozome v7.0 (chr-ID scaffold07520; pos 1729114 to 1729823 reverse strand)
cgggcttctctctctgccgcccaaacacagcccaagtgagttctcacctatatttgtataagatcggtttgatagtgtttgggtaattctgtaaacttaaattaatatggattgtttcgaaattttcgattttcgattgtcaatactaataaagttcagttcttgtatatattgctactcatgtttaatgtgcatttcgttttggaagcaacttttgaactaattttgtgtacgcatatgtgcatattggttgcgtgcaatttggttttgtagtcgtagcatcccttagcttaatcaatatgtccttttttctgtacatttgtttatattgggccaaaaatctgaagaacatagcacgagaagtattcatttcattggtactcgtatgggtaaccaattgacattgaactaaaattcgaagcaaagttttgcttggtaatcggtagtacattttataaggcgagctctcagtttttcaagatcagtggttctttctttccagcttttttctgttatgatcgtctactgtggttaataatgttctgaaaggttgtatgctggattttaaaatgttctttgaccaaaatttcattttgtaacaataaagggttgagttgtgtgaattagaattcatatcctaaattttattttcttttcctttcttttttttcctagccttgtaccagcttcagaagtttctcctgattctc

SEQ ID NO: 45509 - DNA, 222 bp, Manihot esculenta
  Intron number 1 from transcript cassava4.1_013384m (locus cassava4.1_013384m.g) derived from phytozome v7.0 (chr-ID scaffold06158; pos 327903 to 328124)
cttatactgaggtattaattcaaactgagcaagacaaaaggggaaataattgatcctggacgttttttttttcttgtttctatgaaatttattgattgggggtttgttggatgaggttatcttttgtttatttgtgttcttcctcttttgttaaggcatagattcagaaaatttaatgttttattcttttgttgaaacgctaggcaattactttgtgcccta

SEQ ID NO: 45510 - DNA, 485 bp, Manihot esculenta
  Intron number 2 from transcript cassava4.1_000711m (locus cassava4.1_000711m.g) derived from phytozome v7.0 (chr-ID scaffold07543; pos 263592 to 264076)
aaaaggtacaatttcaattatagttattccttaatttgatgcattcttcaacaaattttttttaacgttgagcattctgcagacgtgataaaaaaaaaattaagatcttgccttctataatgaaattggattggattagaactccagtttatggaattgaactttatgacatcaattcagcttgaagtatgtaaaaagagaggaaatccaatagaagtatctatgcctatgaacaaattccattgcttgagctccttgacatcaaagctttgatgtttttcagattcattcttgcagctcttggggttacagattgacaagacattgatcctgtgcgaatatttattttttaatttttgccatacttgtgaagttcgtttctttctgtagaggttgtctctgtcagcatgaagtctaggtatttctttgtagactgtaatgatgggttgcctttgaactgcagaatttgacaggatcagcaacca

SEQ ID NO: 45511 - DNA, 616 bp, Manihot esculenta
  Intron number 1 from transcript cassava4.1_011880m (locus cassava4.1_011880m.g) derived from phytozome v7.0 (chr-ID scaffold06484; pos 53864 to 54479)
cttctcatcttcgtagccctacacagacttctcaggtactcgttgtccttatatattgttgtatgcttttgcttgataattgggttttaaacggatcagtgcctttttgcttttgtaaaactaggagttttggttctgatgacaatgcaaataacagattgaaatttgttagttgaggttttgttcaataatgccctagttcagagtgtcacgtaccgaagggtgctttggttggggaaagcattctgcccgtgacaagagaaagccttgtttggtgttgatatgctgtgttatgccctacactggatgtctattgttagatattcactctatgaagtttatggatttgaacattttactggcctacaaatgaattgaacttcctcaaaggaagatttattgtaattagaataagatggaagttttgaaaatagaagcgagggttcatttttcttgtgttgcattattaaagttcttcagaagtaactgcattgcagagcgaaaatgagagacaggttctggtaatatgtttttctcttttttttttccttccgttgaatatatgtactctaacattgtattgcggtggtggcagccattcgccttcgccacattc

SEQ ID NO: 45512 - DNA, 534 bp, Manihot esculenta
  Intron number 3 from transcript cassava4.1_013583m (locus cassava4.1_013583m.g) derived from phytozome v7.0 (chr-ID scaffold04043; pos 817085 to 817618)
gctctcaaggtaaaatttttcttcttcacgacgaggattctatgactattaacagagatatatatcatagacattctccttttaagtagtcttttttataaaaaaaaaaatctgacattaatgtgtttgctgaatcataagtataataatgtgtattgacaagggatccaactacaaactgggttacttttttgcatttacttgcagcaactctttgaattttaagtcttctcataattcaagtccaagctaaaagggtaatcatactttcaggggaaccagatatagttatgagatgatacagttgtacaaaataagatgcttaaattggcaagtgcaaaatgggatgcactgaagaaactaagaattaacatagtttgttccaaatatgttttattagaatgatatggttctgctagattttctttctaggtgtatttaaaacctatataaaatgttgacctagattgtctattgctttattctaattacactggcattaaagtaatgtcacttccctttgactggtacagt

SEQ ID NO: 45513 - DNA, 940 bp, Manihot esculenta
  Intron number 1 from transcript cassava4.1_010165m (locus cassava4.1_010165m.g) derived from phytozome v7.0 (chr-ID scaffold11341; pos 356918 to 357857)
gcttcctaccaagcctcttcctccggctcaggctggtgagcttcgatttgctttctatgttcttcatgattaagtttcattttcgactttattttatcgtgtcggaagtgatacgttcaaagaaaagctttggcctttatttgggtgagacattttgttctctatttttttaattgatttggccatttgggtttattatgtggtgaataaaatgcctgtttgaagctctagctgttgatatattgatttaggttgacttttgttgtttttattttagtactatgtttgggctgctgaataaatggaaaaataaaaaatgaaaagagaagatgataaagtcataattcttcttattgttttcatctttgttgcctttgatttgaatgattgtgtttttagttctcgtttactttgtgcttatgctattcaaagccgcatgaatactgttccatattaaggagacaaatatccactctatttctactgcttttatagaattcactttacctaaaccaagcatgcactttatgggagattcgtttgctattgcaagtgtggtttggtatgctttaataatttttgtctgaattttgtttagcatgtcttagccccagaatacaagacaatctgcagaggcaggacacaattagattgaacgaaaaggagttaaaatgtctttatacaagtttgaacttttgaaaagtgggctcatggtcaactttttttgcacaatagctagcactatttctggaagaaatttgctgaacattcacattttgtgtgtgtatatgtatatgtatgtatatatatatatatatatatatatatatatatatatatatatatatatgcatacatatgaatatggtgccttttccactctaatgtgttcatctcatgaatagtgagggaagcaaagactgaaggtgggcgtggtgga

SEQ ID NO: 45514 - DNA, 860 bp, Manihot esculenta
  Intron number 3 from transcript cassava4.1_012372m (locus cassava4.1_012372m.g) derived from phytozome v7.0 (chr-ID scaffold03602; pos 43775 to 44634 reverse strand)
ctgtaagaatttgacaattcctattctcttcctctaacacacacacacacacacacacacagcttccatcaaacttagattgaagtcatagattaatactatcttgatggttctgttttctttttcggtgctggtagtattatggttgttcaacgtgttcaattgacattccacaggggcattaagggtttttatggttgattgtatatttaggagaaattattccattcaactgttgcatgtagaattgatatattttgattattggttatgatagaatccatatagaactactatgagcaatggttataacaaaccttgtacatgcaatgattgcattgtgaaatttctcatattttagggcctaggctcctttcatgggaaagctttaataatgttaattggaaacttctggatgactttcgaatgattatatctggtatggccacaatcaaatccctgaataaattatggttccaaaatttttctggattatagagatatgtaaactatatttaggcccatagctagatttattgttaacttaagtcggacaagccacttggatatttgatcaacgttctaagagaagtactgtatctttgaataagaaaggggatatgggtttgcttacagttgctattagttgcgacttttaccagtgtggttgtttctttctggtaaaaaaggcactcaatgaatttgagaatcacatgtactcttgttttccatatattctcattctagttcttctagccattgttcatttaaagttttcatgaccatatctaatgtcatttttgagctaacatctgggtattgccttttgctacatgtgtaggcagctgtttcttttgttc

SEQ ID NO: 45515 - DNA, 1045 bp, Manihot esculenta
  Intron number 1 from transcript cassava4.1_013801m (locus cassava4.1_013801m.g) derived from phytozome v7.0 (chr-ID scaffold04043; pos 791620 to 792664)
tcttctgtcgatccatagtccaaaatcttgtaagggtaactttctccactcaatttcttctattttctttttgtttacctcagtgttttagatctctgttttttttgtttttcctctttttttttaaaaaaaaatttttcttttgtttttttgctttatctgattcgacggattactgtgtttttttactcgatctatggagattttagcgatctgagatcttcctgcttcttgatttggtttgttttgcaatgtggaaatagtttagtaacagaggggagttagtttttaggtttctttgtttgatgttgtgatctatatggttcctgagcaagtaggttgctgatggggcagtgaaagcccacaatagtttgactttggcatttctttttcatttcattacaagaaatgtggcttttatttattaggttgatgagaaaatgttggagagaattaaagggattgatagttgactttggtttctatattacttattcatttatttacttcagatcatctaaataaaatatttgttgttctaaatctaatcggtttggttgtagagaaaatcttgaaaaaagaaaaaggaattaaattcttgatctagaattcttattgtcgttaccacatgtcaaaaaggttgatgaagaatgtggtcatcaatgaagaaatggaagaaatgtcactttgtacagataactaaagcaccgtttgattcatgtgattaaagaatatctgattgtacatttttgtgtttgatgctagtatgctatcatagttggaattgggcttttggttttctagagatttttaaaaatgaaaaatattcacaaacagcgatgtccggaagaaattaagagaaacagattaattttcagagtgctatgtggatggttgggaagtcgattgatgaatgtttgtttgtttgttattcttgaattagatgttgaaatttggttccagttggtaattttggatcatgctaaagatgcttgtattgggaattgtcgtgcagaagttacttttttagtttgatatagcaagg

SEQ ID NO: 45516 - DNA, 446 bp, Manihot esculenta
  Intron number 1 from transcript cassava4.1_012079m (locus cassava4.1_009400m.g) derived from phytozome v7.0 (chr-ID scaffold11425; pos 396498 to 396943)
aaggtagtatttttatgctaaactcagtcttctttatttacgatttatattttttttccctatatggtgtactttcatgggaatgcacgagtccctgtgtaatttattccatttcgattgcctgaggaaatatatttaatttccatgaaattaagttttttttcccccctcccccctccccctcctgatggatatcgtgaagtttgtttttcggttagcaatttctccatttaatggccttcacaaattgagattttttcccagtttttgtatcgaattttgatctaaatggatttgcttcactgcagttacaaatggggtagttttgttttgtcttaatttcgtaaaatatatatatatatatatttatcaactaaacatttacagaactctctgccattttgattgtttttttttttttgtcggaaccattttgatgtttaggt

SEQ ID NO: 45517 - DNA, 596 bp, Manihot esculenta
  Intron number 1 from transcript cassava4.1_006757m (locus cassava4.1_006757m.g) derived from phytozome v7.0 (chr-ID scaffold06749; pos 30461 to 31056)
tctccttcctttgtcctgcgttctcgatttcaacggttagtctcatcgaattcaatcgctcttctatggttgttgtattactggtctgattttctgtaatttagtgtgtttgtgatgaattcgttttctttcttagagatctgtgcatgtaaagttttttttttttcttttctgtctttcagattttctcggcacccaaacagacttattgatttacctgatcgatgtattgatctgtatattttagctttaaatctcaaaaatttggtcaattttctgtgttcgtttccgtcgaacgcttcatagataaatttacaattattttccttgctcttgcaatctatttattctaggttttatttgcaaatatctggggaaatttggccccttggctttgtatttcccccttttttcctaattagatctgggtaatttgatttcctcaattatcaaggatctctttttcttttttccttgtcgtttcaatgattggctgcttgctaccttaacaatgataatcactttgtacgttattatttaattgttttattgaatgggtgatgcaggttgaatttgtttaggttgggatttgtaag

SEQ ID NO: 45518 - DNA, 381 bp, Manihot esculenta
  Intron number 1 from transcript cassava4.1_006635m (locus cassava4.1_006635m.g) derived from phytozome v7.0 (chr-ID scaffold00325; pos 720188 to 720568 reverse strand)
ttctcctcttgctcccaaacagccctttgtcatcggtgattacctattcttccttctgtcgcttgatttcctctctactgtatttttttctctttatgttgcttttgttttcggtttcatttgggaatgcaaactgatttcgttgttttcatggtcgaacttcaacttcattaagcttgcttgatttttatatttaataaaatgctagaattatgtagtactgctctctagccgttaattgaactcctccttagggttttgtttttttcagatttttgttatgtttgtagacttgactttgattattttttaatgttggggttggggttttcatgtaattgaataggagtatctggaggcacagcttcgggtaagactaca

SEQ ID NO: 45519 - DNA, 777 bp, Manihot esculenta
  Intron number 4 from transcript cassava4.1_031174m (locus cassava4.1_031174m.g) derived from phytozome v7.0 (chr-ID scaffold09092; pos 80509 to 81285)
gctgaagagttagcacgccggctgggaaaagaaaggtaacaaggatctcatggtttaatttttcttacttctgtatgaaaaatttatgatatatgcagaaactggagttctattgcatgaaggggccaacatgattaaagtattggagttggggctgtttggttaaaggagttattatgtttacaatgttttattaacataataagcttagatttgttccgatatggaagtccatattaagagacaattaatgcatttaaggttttgagattatttggctttcagaatttctagggctattacttcctcttaatcagtctatggatttgtttcatcttctgttttagcattttcttccttttcctttgttttgtcattgaatcttcataatcatatctcatgtgacacgtcttgctgactgaaaatctaatgatcagtcagggaccaaattttaattgcaccttcaagcatattaaagttcttaactcatttttttcttgtactttaacggctagaaatcttgatgtattttcttgtcaaattagttgaatcggaacaataatgacatgaaaattattatgagtgtcttcagtaataactctttctagatttatactactgcgtcatgctgtatactatggccatgtgtttctttcagtttcaaaggccaaaaatgcttatttcattttccattccaccaatatggtttatgccaaaatactaaaaattcatttgttgttatgtccttttctttttttttttccttctttgttctag

SEQ ID NO: 45520 - DNA, 998 bp, Manihot esculenta
  Intron number 1 from transcript cassava4.1_002567m (locus cassava4.1_002567m.g) derived from phytozome v7.0 (chr-ID scaffold00847; pos 1178779 to 1179776)
tgtacgaaagttctgcttccatcaccaattccaaggtatgtaaaaaagttttctactttttttattcttttaattacatgcacagttggtattggtctatttttcttgcagaaaaaaatgaagtggaactatttgaagtttatgtttgttgacttttgcaggtcttctacttcgtttagttgataattttttattaaataccacagtcaaggcttccaatttcagtcacctcagtttacgggcaacaaatgctattaaagatggatatgatagtccttagtcctctaagcttcatttgtttatgaacagagttttcctttacgtcttgagtttctctaatttttgtgcttgtgaccctatactcttgtgaattactgcatcatacacccaaatggaggatagaattcagaattggtccaatgcttgatgcgtgcatgtgggtgtttagatctgtggctgtggcttttagggtcttactacaccatgatgctaaggcactggagtttcaattttttcgaatggagggaagtccatcatgtgattaatccacatttttcttatgaagctacctaagaaactactaataatcctaagaaactactaataatcttttagttttgcaaacgagttgtattttgggcttctatccttgtattattttcctatcaatctactctttttctgaaaaaaaaaaaaattcccaagttcttgtattcaagtaaactattcgttagtcagtagagaattttaagttcttacctaaaatgtcattgacaagtttattgcacatgctcaggatggtgctgcaaattaatcaattggcacatttgaaagaaaatctagatcatctccattttagaaactgaaaatacctttgaataaagttcgtattatttgctgctttaatatgcaggtgcatctgattttttttctttcttttttttttttgtgtttttctgatagggatttgttcgtcgaatatattcagtacctgatct

SEQ ID NO: 45521 - DNA, 759 bp, Manihot esculenta
  Intron number 3 from transcript cassava4.1_010170m (locus cassava4.1_010170m.g) derived from phytozome v7.0 (chr-ID scaffold04343; pos 85380 to 86138)
tgagacagcgtgttgagaatctaagggagatccaggcatgtatttattgttgaaatctgattttcattttgctgattatttttattggtgtataatctactttgtttgcttgcatcttgcatgatatgaagttattaatgatcaagttagagaattctttcatacgagttcccacatttgtggaatggaactatagctgtttgttgtgcatttaatgttgttggctatatgacatatattctgatgaagcctgccctctttattgtcaactgaacaatccactcttgtatcataattctgatcgagccttttgattctcctatacgattttagtgcacgttttcaatcttctgaatttattcggagtctgcactggttattttctaggatggttggcttcttctttactcagcatacagtgtggctattgatctcaaaactcccttcccccacccctccccttttcaattccattttattatacccagagcatataaatgcagtgattagctttaaggggtttagtagctcctagaacttttttggaaatatttgaattataattctagctgattgtttgcaaagctagggaaattcaacttactttattaattatttatttattttttgatgctgcatgtttctccatgctatgtggtcttgatttaattagatatgttctgcttcctgtacgagcacatgattagaaaacctatatttgttcaaatatgtaaaaatttcttggtttacagagccaac

SEQ ID NO: 45522 - DNA, 705 bp, Manihot esculenta
  Intron number 3 from transcript cassava4.1_017682m (locus cassava4.1_016444m.g) derived from phytozome v7.0 (chr-ID scaffold11425; pos 290978 to 291682 reverse strand)
attcaaaacttgtattttgggacctgggtggtcaggtatgtaaaattcttgcagaaaattatgtttcagaaaatatttgcataggtgggtctttatgtaggcaaggaattgagtgcttgcatttagtctcatgtataaaaaccttcatggctaggtgttgagcccactccattcttttcatggcacattacttggatctaggttgcaaaggtattcctggctgtgtaaaatgctccagtaattgacccaaaataaagggagccgtaaatcaaaaggctggactaaatttttgtagtctgaactgcggttgggaaaatattatataactgtcatataactttgacaatacagaagtgctatagtgccagtttagactaaagtttaggcctgatatagtgcgctataaagaacttagattaagctcagtccattgttaaacaggcactttgcttgctagagtccaattgtaagatggcgctatacgacataaaatacatgttatgaattatgcgataggttttgtttctaatgaaagaaaagcatgtgtaagctcatcctagtttcactagaagcaggtacatggtacaagatttgaattagatcaaatgattttattattggtgcaatcgactttaatttcagcaactgaagcattttttgaatatttctaccaggctggtcttcgctcaatttgggagaaatatt

SEQ ID NO: 45523 - DNA, 1029 bp, Manihot esculenta
  Intron number 1 from transcript cassava4.1_017682m (locus cassava4.1_016444m.g) derived from phytozome v7.0 (chr-ID scaffold11425; pos 292114 to 293142 reverse strand)
ctcgatcttcttttctctcgtctcaagcatcaaaagtaagaatctgtactagcggatttgatttctacagcaattggtttattttgctttacttacctactgtggattccaactttcgttttcctttatatgtagcagctgttcatgatcagttttattcttgatctggtaatttctgtgcgttgatgagcagctgggcctttcccagttttcatgcttgtcttcaatttggattgcgggtcacatatctttcaatgattgtttgagatgagatcttgatattttttttctctgactttctctatcacatctaaatacttcctataatttttgaactctgatttgtcgccaacacccactttttaataaacaaagatcgagagaggaagagataatttgattattgctgaagttttatttatttatttatttattttttatggggtactgacttaggatgattctagattcaatgttcataaaataaaagaagaagaaagatgttgattatcttttaaccatgcagtaaattgttctcttgctacatttcccttatctgtttattaaatccttgagaagcttgacataatgttggataaagtagaccaaaatgtgatgcaatcacaaatcactctgctgctactttttgtgactactgtactaaagtagcaaacagagagtagttgtgtgtgattgtgtatccttaccaccagcctgaggacatgggaatagattaatggaaagattagtaattgtaggttctgcaatcagtatctgttgggatagcgttaatgccaataaagaataataaaatggtttatgtcagatgtctatagcgtgtatgttaaactttttagcctttgaggagtgttagacaaggccacagctgagttcattgaacaagtagatggagtattttgaatggacgctattgtccacatttgtctgtgttttacttatttctcatatctgtatactgtattgttctcttcagtttcaggattgttgagaaataggcatattggagtt

SEQ ID NO: 45524 - DNA, 1016 bp, Manihot esculenta
  Intron number 1 from transcript cassava4.1_000603m (locus cassava4.1_000603m.g) derived from phytozome v7.0 (chr-ID scaffold05230; pos 177661 to 178676)
ccgaacgcgacatcgagcaggttctctctacgcttcttcttctttctctctccccatcgcttccttgcttttcctgtctactctcgcgcgttattttttttttttaaccaaagttgggatttttttttgcttaatttgggttggattttgtcaaattttattcttctgtttatttatttatttttcattttctgcataataaaattatagccgtgaattacctgacagcctcgttgccaattttcgttttctttttttctggtgtaattgacgcatatttagatacaaacaatgtatttttttttgggttggttcgcttggattttacaattataattttgaattgctatatttgaggatgttttgttgggggatcatgtgcagccactttgcataagccctgtttggtgcaaggaacaatttctctggtttttagttacagataaatgcctaatttattgtcctaaccccttttcttttccttcggaacttttaattgcctatttttagcaatttaaatggtgcttcaaggtttatttggagagaatatacatttaaattgggaggaagtaaatacactgtggatcatccatcatgctaaatagaatagtggccatctatttggacataaagtgttctccccccccacctttcatttttttgggtgttattatcaaataataggtcttatgatttttaggttattgtacgaagcttgattttattctatatcagaggtttagcaagaagttgaaatttagagctgcaatgatgcgccactgtaaattgtacccatgagaaatctccttttgcttgatgctaatctgctggaggtttcatagttttcatgagtttgctgtgcaaaaatctgtgctacatatttaactaaatgacattgcagcattgttttttgtttgatgtactctacatctcaatgtacttgctctttttgttataaattatattttctaacttttgcaggcattaattgctctgaagaaaggtgctcaactttt

SEQ ID NO: 45525 - DNA, 988 bp, Manihot esculenta
  Intron number 2 from transcript cassava4.1_019936m (locus cassava4.1_019936m.g) derived from phytozome v7.0 (chr-ID scaffold03000; pos 156671 to 157658)
gaaagaagagcatgtgagttctcttttcatctatgcaatttttaccattcggtgatttagtaatgggtcaaaaaatcttgatattgtcttctaaatacagataattcatttcactagactcttgcatatgctatatttttcataaaaatacaatttggttattttgctatttgtaatccatttcctccagtttttcactgtttaatttgttaaattcctagttaggctttgtttcactaaaaagcaacttctatgtggaaaatgttcttagaaaattaacctttttttttttaattttttggttgcatccttaaagaacaaaggatgttaataagattcatgtatccttaaaaatgacttgttttgttcactttaccaggaaaatatattccaaaatccagtttttcagagtgcctcaaatgctaagaaatgcaaaaattgtatactgcaaaacaaaagaagccttagtttgagtttgttttgtagagttgaacaagttgtcacaattgcccaaatattattacttaaaccacattttgctacatatatcttgtgcacaaacttgatatagtggttagaacataaaaattaagaaacttgttataatatgaaaaaatagaaggaatcattcaaatcttgaactagagcaaccctattaactttcttcgttttggtttttttttccccttaaccctatgtttggaattaagaattttgcaagaattcagttctattgatttcctttctaataattcttttgcttagaatggaagaattcaatttatttttaattttaaaaaaaaattattttaaaagaagttgaaataatgcatgatttttacaagaattcatttgaatatttttcttgcaaaatgaaccatgccaaatgagggtatatgattatatatgttcaatcttatgctttttcactttgattttattttcatctacagtttgtgattgtttctttaactggctggggattact

SEQ ID NO: 45526 - DNA, 675 bp, Manihot esculenta
  Intron number 1 from transcript cassava4.1_024391m (locus cassava4.1_024391m.g) derived from phytozome v7.0 (chr-ID scaffold06125; pos 68076 to 68750)
agagtaggtagtgagttaattaaggtttgggggatccttggcttaaccgagatgataatttatttgttgaaacaccttgtgtggatgggctggaatatctcagagtttcaggtttaattaatgagcaaggtataggttggaatgtaacttctcaaaattgttgctttctagtgacattgcttgtgtgtcaaatattccttggaatatctctaggtagtcagatgttatatggcactatacacagaataggttatattttgtaaaatctgggtatcacttgttagtatggataaaatggaagaaactttgaaaactgtagatgccaccaaaagtgaaaattttttttgtggcgggttagtagaggtattctacctactaatgtattatggctctaaaaggagttaatattactaccgggtgtaaggtttgtggaattgatgagaatgatctacatttcctttttcattgtcctatggtaattgagtgttgaaagatcttagatttttcctattctagatcaaaatatgactaatagttatattctaactcaaactatattgggtttgtctaatatctctttgcagggcaagacatgtatgttgttatggaatccagagattgttcgggcaacagagatctatttatcttattagttaagtcttcaatttcctgtag

SEQ ID NO: 45527 - DNA, 781 bp, Manihot esculenta
  Intron number 2 from transcript cassava4.1_012783m (locus cassava4.1_012783m.g) derived from phytozome v7.0 (chr-ID scaffold04457; pos 634730 to 635510 reverse strand)
caaatccttatatacgttggtctgctgttaactgtatttacctttgggcaactgttagcatacaagttatattttaatgttctcatgataatatgaaggcacatgcatgtttacaaactgtaggaaaacagccatccatttcaacattgtagtaccttgcttcatacatttgagagaaataaagtttgaaactcactgcaacaaattcagaaccttggaattacttgcatatttattttttggtatctaatgaacttgtgctatttgtttgtttcaacaatgggctctgtttgttccatgaaaaataatcgatatatatagaaatatttccagtaaaaaatttttttcaagaaaataaattattttccattgtttagttgcaatattaaaaaataaaggaagatataaatttatgcatagaaagtttaatggtgttaataaacttatccaaattcaaaaaattacttcctcttttttgaagagagagtcattctccttaaaagttggcgtaattttttgaccaagaaaatactttacattaaccaattttctcgaatacctcaaatatcaaaaaatgtggaaaatttttttctgaaaaatatatttatgaaacaaactaagcctaagtgtggaaaaaaaaattgataggccagttgcaagcaagctttctttgcttctgtttatcataatattcatttattctacactttcagttctttaaagcaacaattctgttctattaacaggaatattggttcagctgccattgccaaagcatatt

SEQ ID NO: 45528 - DNA, 669 bp, Manihot esculenta
  Intron number 1 from transcript cassava4.1_014665m (locus cassava4.1_014665m.g) derived from phytozome v7.0 (chr-ID scaffold11341; pos 417591 to 418259)
agatctctcctgtcgtccagacccatcttaagcaggtattttgtcggaattaattgttataaatgcttttgtttgtgagtttttcctcctggggaaattgataaaggaaattacgattgctttaaggacattttgctctagatatgtttatggattggaacttagctgaagtatatgcttgaagtagtcgtatattttgaattatttttgggtttagggaggaattttgggtatgcttctggcaataactgacggtggtaacctatgatttatcgttatggttgcggtttatattcgttgcattcagccttttagttacagttgaaggcgaacgaattgggatgtttgattcttgagaaaactgagtgaagaatggtagacaaaaattgaaagaagatcgaaataaaagttattatggtattatccgtgttgaagtagaggagtcgacattttattaaccttttgaacttgtttctatcaatggatgattttatttttggtagtgttgcacgaattctttgagtctctatgttctacgtttttgcgtatcaaagataacttattctaaatttgatagggcatataatggttttacattgcatttgcatatagtttgattgctgttctcactgccttcaacttcttgattttgcaggtttatttgacgct

SEQ ID NO: 45529 - DNA, 512 bp, Manihot esculenta
  Intron number 2 from transcript cassava4.1_008948m (locus cassava4.1_008948m.g) derived from phytozome v7.0 (chr-ID scaffold05899; pos 10412 to 10923)
ttccaattttgacttgttcagaggtttgtcgtctttccttttctcttttattttctttgctttcattttttcatgttgctgaaggctaatatgccctttggtaaaatcagagtttcccctgggaatcaattcttgtttattatgaaaaaattcaattccgttttgcttaaaaaatttctttcttaaagaaattttttaagaaatgaattcaaataaattcttgcaaaatcatgtaaacttttttttttgaaataaattttttgaagtcattccaaacaagagaataatttttaaggtaagaattcaattgaattattgcaaaattttagattccaaattgagtgtaaaagaaattgaaataatttctagttttgtaaggattcatctgattattcaggaagttctgttttttttaattggtcatttgtattgttttcaaagtaagtctcatggtttttttttcctttctttttgaaggctattgaaagactaagagaaaacagagaaaagca

SEQ ID NO: 45530 - DNA, 738 bp, Manihot esculenta
  Intron number 1 from transcript cassava4.1_018891m (locus cassava4.1_018891m.g) derived from phytozome v7.0 (chr-ID scaffold06158; pos 242000 to 242737 reverse strand)
gatttcacagccccagaaatctgcttttggctctggtattttcttctttcccctttaaatatcatcatcttctcttgattttcttgaggttaatttatgggttcctattttattcgctttgtgggtggtcccttggctgatttctgctgaaaccttttctttcatctctgaatcataagaaagaagaaggtgatggaggaggaagaccataataatgaaattattctattattgctgtggttttctttcattttctattggagtttttcattatttgaccaaatgaatacatctgaaaccagttggatttattcgaaaatttattaatttctcagttttcacaacattttcttgctaacatccttgaagtagaccttttttttttttttggcttcaattgctttcttcaatctcaagttagggttttaaaactcctgtttggccagacttcagcaatagatcatcctttttgtttgtaatgtcacagcaatcaaagaaaacccactttttaccgacctttctttgttgctttttgggcttttgtcacataaccacaaagcaaaaagcaagaaaccaaccaaaacagtgtttaatttttatttactcttattttatttgctttcctgttcatggggttaaaacaaaacttgatatgtacaagatgaaatgagctaaaacaatagtgttattaattgatacccaggtgggtgaagtaggagaactatcagagatatttca

SEQ ID NO: 45531 - DNA, 641 bp, Manihot esculenta
  Intron number 1 from transcript cassava4.1_002766m (locus cassava4.1_002766m.g) derived from phytozome v7.0 (chr-ID scaffold11584; pos 61225 to 61865)
cccttgcaaagccaattgcggccactggttttgcggttcagttctcattcttcttgttcttcttcttactgttaatcgtttttaatttgatttgataaggttccgaaattatttatttatttatattcgtccctttttgcttcaattttaaactgcttttattaaggtccaactttgatactttgttgttgggagacgataaaatataacagaaggaattttgctgtcaaaaagggtctccttgatgaaaaattcggctggttatggaattcaatcatttatactttgcatcacttctgttaattcttcagtagctaaaattgggctagacgagggttttgctgctctgatttatagtatccacaattatacattactgcctttcctttgttttgattccacaataataattaagaatactactttatctattgtatttaagcgtctggtttgttcaattgagctactagttcatctagctaatctcatttattgttgatttttcacgaatttgcattattatctccatgcatatgtgggaagttaaattatctttgcaaggttttaacattaatcatcctgataatgttgtttctctttgtgcaggcagttgcattctgcagtattggaattattcagca

SEQ ID NO: 45532 - DNA, 377 bp, Manihot esculenta
  Intron number 1 from transcript cassava4.1_006168m (locus cassava4.1_006168m.g) derived from phytozome v7.0 (chr-ID scaffold10689; pos 343446 to 343822)
tccgtcaacacctctccactgtaaccaggtctctctcactctctctaattcggctctaagatttgcgttttattgttacgtctcgatttccctgattctaaatcgattgatgctcatctgaatttgcttttttatttttattttttggaactcgaagtagattcgttatatagaagggaaagaaaagaagctgaaactattgttttggaattttctgcttattttgatcccttatattgaattgtttagcttcagaactctattttgtttttttttttaatgttagcttgaagatggaggattgtcggtgttaactttgaaggataaacagtgtgttattgtttaattaaagctgatattttttcatgggtgcagat

SEQ ID NO: 45533 - DNA, 790 bp, Manihot esculenta
  Intron number 2 from transcript cassava4.1_006168m (locus cassava4.1_006168m.g) derived from phytozome v7.0 (chr-ID scaffold10689; pos 343877 to 344666)
aagggtgcactcctatccacttaaacttagtggtaattgtttcttttttgtgatgtttggattgtttacaccattattttcttcatttaaagctattaatcctacagtgtctaagttgtcattgttggggaaaagcagaactgtttgcttgatgtagctttactgattagcattttcattttgatgattggattttattattttactattattattattgttattttctttctttccatcttctttttctactactactaattattattattattattattattattattatttgggagggggggaggagtgcattatctgaattactttagctaaattagctgatcctcccactttttgttactgattactgagagatcatactgttgatcctgatcctgagctttagtgcgtgtacttaaattattaacctgccgttacgcatgaagcagatggatatgaactatcaaattgattttatttactgtagcagcctagcagcattatatggtgaacaaatttagtgtttgaacttgcttgatgtttttacttttcttgagagataatgtgatctgttatattattgcttaccatttgtattatcactgtcacattctgtatgattggttatttgatttctcttcattaccttggtttgcgtgttgggacacggtggttacttgtgcttggttttgctggactattcacttgcagaataagagttaataccatgctattaaaattgaaacaaagatgtgtgctaatctgcttttgccttttcaggcgagac

SEQ ID NO: 45534 - DNA, 977 bp, Manihot esculenta
  Intron number 2 from transcript cassava4.1_021312m (locus cassava4.1_021312m.g) derived from phytozome v7.0 (chr-ID scaffold06111; pos 25147 to 26123 reverse strand)
caaattattcagctttcattcggtaagtgcttattgaattattttggcaatggcagtcaattccatctcattttaattgtgaatgtgcaacattggtttaaaattaatctaaaattaaaaagtgaactattgtctttgcagtttgcatatctgttaagtacatttgctatgcaactatacttttgtccgttgcatacttgcattttgttgtattcatccactttcattgtgttttggttttgaggatatggattatggagccatattgtaattcaataacatgaatattatgcttatatatttttgtcaaacctttgtgagcaaataatgttaagaaaaaaaaatattttgaaagatgaatattgtcatttcttagtaaaatttgattccgaactaaaggaggggaactttaaacgccccaaatgttggaatgtgagaagatcgtattcacaatcacacctcaattattataatgttgattgaaataaaaattttcttatatcattataattgaacctttttttctgaacaaattaaaaattattttctgtgcgagtgacaaaaatttccaaaaactacatgccttttcgatcttaattgctattcacttcacatggtattttcattcatgtcaaggttctacttttcatgctttaagagctcacttatgagtgtcactttttgaaatatgggataatttgaaatgtgagattcctgtgtacaacaaatactggaacttgagattgcttccttcatgccccataacaattgaaccaaatggctccttattgccactgtgaatcagtctagattttcaggctatagctctctctctgtccctccctctccctttttcttttttattttttttttccaattctttgaaatatcttgttgatgggtaattttggaatttgaaagatctttgtttcttgcttaaagcacttcgaaagagatatcagatttagagggggagc

SEQ ID NO: 45535 - DNA, 780 bp, Manihot esculenta
  Intron number 2 from transcript cassava4.1_007903m (locus cassava4.1_007903m.g) derived from phytozome v7.0 (chr-ID scaffold11170; pos 286961 to 287740 reverse strand)
ggccattcttgcgattgcggccgtgttttctcaaggtttcttcttcatccattaccaataatgttgatttacaaatagatctcatcaccatcttactctttttcttaattatcattggattttgactgattgattctcaatccagtttttaattaactactgtttattgacagttgttgaacacggttcccaaaaatcagttgcagtcgtttctttttctttccctgtttgtttcaaattctttccactgtccacaactcaaaacagttcaatgctcaaaaacccaaaagcacttcctcatttctgattatatatatatatatatatatatatataggggaagaaagacaatctcatctaattgttttctctataaatgattggcttcagctgtcattaccatgatgtttctattccttgtagttaattaatataatatatctatatatatatatatatgtacatgtatcttctacttattcaatcccacattcgatcgcatccactgataatatttttttatggatatttgtgctttttttattcatttaatatgcgtttatgtcttgatcctccttattactttgtttctaatccaccccttcatcaacaaggacacccagatgatagcccttttgagtaaattcttgctctagtatcatgacatcaatttgaataatttgctgttataattgaattgattcattggttcttgtgttttgctctctttctgatattgtcgcagagttgagagttttatagagcatcaagacacttgca

SEQ ID NO: 45536 - DNA, 997 bp, Manihot esculenta
  Intron number 1 from transcript cassava4.1_009146m (locus cassava4.1_006126m.g) derived from phytozome v7.0 (chr-ID scaffold09980; pos 54780 to 55776 reverse strand)
tgcaagtgagctttttttatttttctacaacgccattagttcatcatttctccactaaaacttcacttcatctggttcaaaaacttggggtcatatttcaacattagtttcttaaatttatctggagtactactactctattttcttttgaatcttagtatagtatatatgtcatcatgcattttaccaagtacatatcctctatccatgagaataaattgggtatttagtcttatctcttacattctcaaagcagtgacatacttcaatacgccttctatctctatttatttagtcaggatatattacaatggaaaacctttttctcccaactttgtaagttctaatttcaccactcatctggacatactgtgatggtagagaaaaagacaggcacatcgttgaatctgctacatgtacttgtcatgcttctctccgtcgtgcttctctctctcttatctgttttttttatcccttttgcatttcaaacaatcatctgtctaattaatcgtgttcttgctctaatatggcatctcaaatctccccttgaagccttatttcatgagccactaacaaagatttggacaatgttttcctccacctaacattctaactatatttgaggaattatagagtttttcattctactttgcgactccatgtttgttgttgacctcacaagtatttacagtttggaaaaccaaactccttgtatgtggtacgaggaaccaagttgttttcttcttttcttcttgaacacgtcctagtcaactctaaagcaaatatatgttggatttttttcatgctcatatttataattactgcaagttttaactcatttatcctgaatatatattttttctcctcattaaatatttccttatcaaagacttggagggcctgtattatctagaatgcgttgtttcttgcattttgttaaatgtttccccaatgttacacaggtctgttgggagaaattcgcaaggtacttcgaagt

SEQ ID NO: 45537 - DNA, 148 bp, Manihot esculenta
  Intron number 2 from transcript cassava4.1_014532m (locus cassava4.1_014507m.g) derived from phytozome v7.0 (chr-ID scaffold07520; pos 2284065 to 2284212 reverse strand)
ttaggtgcatagtcttctttccctttcttattatatagtttttgattttggatttttcaatttcgtttcttagaaattaaccctttttttaatattaattttaatgtccttaaaacccataggacagtggaagagttcaagaaaggac

SEQ ID NO: 45538 - DNA, 521 bp, Manihot esculenta
  Intron number 2 from transcript cassava4.1_007384m (locus cassava4.1_007384m.g) derived from phytozome v7.0 (chr-ID scaffold02307; pos 191802 to 192322)
gtctcactcggcacaatatcgccagccatctccaagtacatatctcttaccacattcttttattgctgtgtttttttttttttgccatgcaatttttcattttccatgagagaggcagttccctcttgcagaagaaatcactaaggactggattagtttcctcttgttaatatgcattttatttccaagaaaatagacaaacataaatagttatttgattttaaaagcagaacttcaataaaaaattgacttctttttttaatatatacgatgaagggtattatgaaaccaaattttcatacttcttcatgatatatttaagataaataatatcatatagtggttctttgcctttgaattttacttcataaagaagagatcaatctttaccgcttatactaattccatttgggtaatgagttctaaaatttgaattttagccgaactttatttgaagctaaataaaattttgttgaatgtatgcagaaatatcgatctcataggaagcatttgctagcgcg

SEQ ID NO: 45539 - DNA, 752 bp, Manihot esculenta
  Intron number 1 from transcript cassava4.1_028890m (locus cassava4.1_028890m.g) derived from phytozome v7.0 (chr-ID scaffold04269; pos 148514 to 149265 reverse strand)
gtaagtagtcagcactcactttatgatgagtatttgttcggttcagtttaataaatagttagcactcactatagagatgagcattcggtcaatttgatttaaaatctctagttcggttcaataagtagttagcactcactataagagtgaaattggtcggtttggttcaaaatcaaattgaattgaataaaccaaaaattgaaattttagtatttataaaaatcaaatcgaactgattttgattagaaatcaaactgaatcgaatcgatttgattcagctcgattcgattcggtttgatcagtttcgatttttaataatttttttattttttatactttattttagtattttaaaatttaattaaaatattttaatcttaataggatttaatttctctatattattgaaaataacatattattatcactaattagttcagttcgattttttttattttttctaatcaaaattgaataaaaccgaaataattgaaatttttgaaattaaaaatcaaatcgaatccaattaaataaaaaatcaaactaaaattttaaattaatttagttcggtcgattttttcagtttaaaccgaatactggtcacccctaatcaggagcggtaaaatacatatctaagttgcccacagttcaagcttataatatgaaatctatgaagagctgatcatcatttgaactcatattctttttattttgcaggaaatatttattattttttatattttgagtttgat

SEQ ID NO: 45540 - DNA, 694 bp, Manihot esculenta
  Intron number 1 from transcript cassava4.1_003491m (locus cassava4.1_003491m.g) derived from phytozome v7.0 (chr-ID scaffold00847; pos 1917464 to 1918157)
aaaataaagtaagcttctgatacttttgaagataacactgtgttgtcttgtattgtaatggttttagtaaatatacatccagctgcataattctattttcttgacacgagttgattgatggaggtctagaacatcttttattcttttttatgaattcactgataggatattttatttgacatgttgattatgggacgatgaactcttagtggataataatctattttaaagtaaccttctacagagacttcaatgtttgaataaacatccaatctgcttttcgattttttgcctatatcaaatgttggcatatgcttcttgtccttggaatggagttccgtctcatatattgatttgtactcctagcttgtagtctagtggcttgtttctctagcatgcaactcatcccaaatctttggccacagtactttgatgagaattagacaaggaagttttcttatttgtcattgtatttgatatttaagcagttcatggaaggcatctattacagttacttgaggcttgcatgttgttggaactgttttgtaaagtactcattgtttgtgtaggcttttgtgtgctggtctggctgttcatcttgcttctcaaatcccgatgttgttgagatctgttagcttagctttgttaaatttctgcaggttgaagaaagcaatccagctggagaatcattgga

SEQ ID NO: 45541 - DNA, 573 bp, Manihot esculenta
  Intron number 1 from transcript cassava4.1_001649m (locus cassava4.1_001649m.g) derived from phytozome v7.0 (chr-ID scaffold03750; pos 1103579 to 1104151)
cccaagcagatcaaagtctggtttcaaaatcgcaggtaaagattagaatataagaataaaagaagaagcgatcgtctctttggctttttaggcatttgtttcactgaattcttatgaagttttagagtactggattgatggaagctttgaagttttgaagttttgattgtaataagttttgatgccaagattgagtttttttaagataatagattggctaatattagtttcagctggcatgttgtagaattttaggtcagtgaaagaataggtcacctctgtacttgggtttcatttctgaagccagtttaatgttgcttttaggcaaaagattagttttatcaagtgcattaagtctatgatttctgatctaagatcactgatatcgagaatgagtattttcttccaattggaattttttttatagaagtcttagttggcatgtaaaaaatggttatgattggatatggagctaagtttgttttgaagatgaattggctttttgggaagctaatatcaatcatttctggctgggcaggtgtcgagagaagcaaagaaaagaagcttcaagac

SEQ ID NO: 45542 - DNA, 1026 bp, Manihot esculenta
  Intron number 2 from transcript cassava4.1_001495m (locus cassava4.1_001169m.g) derived from phytozome v7.0 (chr-ID scaffold09489; pos 60390 to 61415 reverse strand)
agtgaaaaagttgacccagctatcctctccttttggtaagatcatcaattcatcagtcgatcaccatctattattttatttccgctcaaaatttgcagggaaaatttatctttttctctttaggtgctgatttttttttcttatatatatatttcaaacatttctaaagagaatagatgaattagtatcccatgttattgaataataaatataaataattcataatttctaatgaaaaattaatagacattataataaagaaacacaacaagaataggaggattaacatctgttcggaagacagcaacattacagtttattatctgatcatcaatgtgcacctgagtaagagttgttgccttcatcagtttatgattttaactgaaaattgaggaaaaaagtatataattggaaaaaaaaaatcaatccatctgtatgaatactggttttagatggctagttttttttttttttttttttttttttttttacgagaattaaactttgttcgtcaatcaaagcttgagaaacatctatggataccagaggggcggctacgggaatgtcttccacccaaaaatgaaaaagcttttcaacattgagctaatatagggtgttagaacttggcagtgataatacaagtacaaaatactctttcatttcaaataaacctatatagattaatcctaaaataatctcaattatggataggattattatagttcatataaatgacaaataagaaatgggggtgctagagatccaacagagagttgctttctttcatagttttctccaaacaaaatgatttggattgtattatacccatgtgtcatcactttagacttgagcttgtgagccacagaaggattgtcggatgttggaaatgcttccttggatgtgtaacaatctgttcaaatatcaaaattgaaaaaataatctatttgaataatttaatctttgtaccttattatcttctcacttgagtatttgttgtttaatgtttatttcgtcaataatatagac

SEQ ID NO: 45543 - DNA, 1007 bp, Manihot esculenta
  Intron number 1 from transcript cassava4.1_007747m (locus cassava4.1_007748m.g) derived from phytozome v7.0 (chr-ID scaffold07810; pos 25332 to 26338 reverse strand)
gagttgagtgacttcaatcgaaggtgaatctcttctctaccagactgccattgtgacttgttccgtctcccctttcaaaggcatgataatttcctctttcaatttatgagcttcctctgctactgatttttctttcttcttgtttgctaaaaagtaaaataaagtaaaattttctgttcatctgttatcttattgttgtgaaaaactgaatctgtttatgccaatttagcaatccgaatcagtttcttttcaaatttacgcacagaaagagcaattaatccatccccattgcactttatatatgtgtattgtggttggtgtccgatctgctagttttcttggtgtgatgatatctgcttcttcaactcttttgagattgtttggttcaatactaagggggagctacaattgaatttctaatagaatgcagatcttttcattttgaaaaaactccttacaactctttcccttgattgctttctttggtttttgcttctgcttttgattttttagactttacccactttagtacggcctctctaagatagagattagattgaacctttcaacaactcgaattatttttaatcgcaggtgcagttttttctcccttatggaattggagctaaatttgaagctttacctacttcatgtttcagtttttctcttatctattgattcataatagctcatttaaaattcaacagcaatgtcgattttctgctgtgcaattaaatgattttcttgtttcaatgataaaaacatgatgtgcaaatcaatcaggtatagcaattttatgctgtatatgagtttctttcttttgtttttctttttttaattttgcttttcaggttcaataccatcttgaaggttagtgagagttttgaaatttctgctgacgttcttaaacattttggactactaggattgagagaaggtgagttataggaaagtgggctcattccaagactgttaatgagactgctatataaaagtgaaggcgaagt

SEQ ID NO: 45544 - DNA, 576 bp, Manihot esculenta
  Intron number 3 from transcript cassava4.1_013358m (locus cassava4.1_013358m.g) derived from phytozome v7.0 (chr-ID scaffold11069; pos 332166 to 332741 reverse strand)
caattctttggagtccgaaagagatcatgtaagtttcatcatgttgtcacattcactgcttagaaacagagaattaggaatcaataatacaattatgccttttaattttttggcacttagctatcttagttatgatcttacatgatatttgattaatgggtacataggtcatttgtattttttggaaaattaaattacccatttaatgaaggactaaaagcatagggtattttaatcattctctaaaattaagggcaaagtttttattataagtaaatagaatctaatatcacatgggtgggatagagtttctatgaaagttagttgcattaaaagtagattaactaaatctagttgtactaatcaaaggacttaatggtgctttttttctgatcacacactttcttttgtaacattttgcatcattggggaaatgagcaaatagacaatgaagatagcaacttccaatttcaagaaaaaagaatttaataatttatggtaggctgctggtaggtgaaatgtcttgttgtgcctttgatgttaagttgatttgtattattttcagattccttgttg

SEQ ID NO: 45545 - DNA, 811 bp, Manihot esculenta
  Intron number 2 from transcript cassava4.1_022683m (locus cassava4.1_022683m.g) derived from phytozome v7.0 (chr-ID scaffold02963; pos 7608 to 8418)
cagagagcattgagttgcagaaaggcagaaaactagtcagtacttttatgtggcttactttattctaggacactaaataagatttcctccccatgtttttcttcctagctcaagattattttatcttctatgccaggattgttcatttggtcattcagttgcaccctgctcattttaattacttgatattgtggatttttcttatcttactatgtttgaacttgaagtgaaattctttgaacagatacgataataatatttcataacctgcaagaattctaattcatctcctttgagcttctagtcaagcacttagctttaacatttggtgggattttgctacctaatactctttgcattggcagaagtttttatttgacaacatcatatttattatgtgggcctttcttgtgatgtgaaaagatctctgactagtttgtccggtgcatctttggcgctattggaaaaccattaatttttacagatgtggacatgcattgtgaattatgatattgcgataatggaatgatagaactaatcacatttgaagtgtattcttgttttcattttggaatgggatgcacaaagaccattatttggagattattgaacttgcttgaactttgaagctatctttggttaaggtgtcttctttttattcgagattaacaaaatatttaacacattgcttttgaggtttcttggttatttccttttttgttttcttgattttcttagtttaaaatgatgctcatgttcattgggttctatttattattgcgtcaggaaaccactgaagccaaacgtaaga

SEQ ID NO: 45546 - DNA, 709 bp, Manihot esculenta
  Intron number 1 from transcript cassava4.1_006082m (locus cassava4.1_006082m.g) derived from phytozome v7.0 (chr-ID scaffold01052; pos 6850 to 7558 reverse strand)
ccagtcctcctcaaaggtttggtcttaaagttttgagttgaattgtgcattttcaattactgatgtttagctcgctgatcagtttttcttagcaattacctggttctttctgtaactgaattaaccgcaatgttaaggacttggtgagctgagcacagttactcattgaaagactagaccttttgatatcagaagcttgtgaatcatcattatcctttattgaaatgataccactggtgatactaggatctcattttgaaatatctttgcatataattcaagcaccatgttatagcattatcccatcactgattttggtagcacataactgtgaattttaacttgatctatttcaaatgtttctttcctcaataaaccacctttggtggcaagtctttttcttttttatttcctcgtgtctctctcctttttttttttttgtctatattcgtctcttcttgctggaatgttacgtgatgggcattaagttctaaagctatcatcccagtcgtttcaatttcactactgaaattccatgtgttatgtcttgtttaagtaaccttaatcttcttgtatactgatgtcataaggagatcttttcccgtctgtgtgaatgtgtttatccttctgcaggagccttaccattttcattctatgccttttaattgtttcagtcaccaaagcacaccgcaccaccaagcagagcaaa

SEQ ID NO: 45547 - DNA, 450 bp, Manihot esculenta
  Intron number 1 from transcript cassava4.1_003180m (locus cassava4.1_003180m.g) derived from phytozome v7.0 (chr-ID scaffold12946; pos 600785 to 601234 reverse strand)
aaggtatgtattgttgccttaattctcagatcttgattctttgtggttttaagagctgtgtgtttgctgggaaaatggggggaaatattaaaagctaggattcttaatcttatgattaatgccgtattcgttatctttaacaaactcttcctatataagtttagtatcattaggctaaattggctgttgctagatttggtatataatcaaatgccaagtgtcgagattttaatttatcttccagtagtttcttacttgttgttggtgattgaacatacctctgaagtttttttttttatctaattaaagttttcaaagcaatgtacaaattgggaaaacgtttagattttggtgtccatattcttgtttcttttttcttgtttcttgtactcattagaaactagactttgcacagttcgggcgctaacggcattcaaagaagctatatat

SEQ ID NO: 45548 - DNA, 929 bp, Manihot esculenta
  Intron number 1 from transcript cassava4.1_031712m (locus cassava4.1_031712m.g) derived from phytozome v7.0 (chr-ID scaffold11635; pos 272246 to 273174)
gggtactatagctgttacttttttactatctttgctactatatttgaagtgttgtggcgtctggtttgggaaactttctgagcttttatgcggcttttgtgatgatgtttttgtagtttttggtatctagcttttttgtgctttttatgatttatttgaggaattaaggtgggtttcttctgggtttagtttgcaagaaactgggaaatacttaatgcttacttagcttggaatttttctttttcagctgggattccttcaaattaactgaaagcgtatatttggtcaattttgttgatttgttgaagtatgattatatgtagcaacaacgttttactttataggaattcgtggacaaacgatataattcaagattgtcggaagatcgttctcattaaaagaacgtttagcatgatgatgatggtatgagctttaattgttcaactaaggcttaattttaactttcctcgaggtctcaccaatgtgaaaaacttgtaggttcttggcatatcccagaaagtgatgttgtggtttatgtcgaatactgttgtgatatgaattactctcttgcattgggaagaaaccatagctataaataaatttaatgaactgaggatcttaactgatatctgaagaagaaagctaaaaagcccaaaaaaaaaaggaaacaattgacaggctttcacccatgttgttcgttactcaagtcgtaaatatgctagtatcttaagctatatcgttcccttgccatagtgatatctggtgttaattgtccaaaagtttgaattgtttttatttatttatcatatctgaagatgcactattctatccatattgttgaaataaaaaaaacttgtgaacagtttctgttaatgcatctttgtaatcagaaacgtattcatagttcgcatgcacaaccttttgcaggt

SEQ ID NO: 45549 - DNA, 871 bp, Manihot esculenta
  Intron number 1 from transcript cassava4.1_000786m (locus cassava4.1_000786m.g) derived from phytozome v7.0 (chr-ID scaffold07087; pos 168417 to 169287 reverse strand)
cacttataggtaagtgaatctctttttttaatcttttatttatttatttatttgcagttaaattcttgatcctgtcagtcataaactatgtgattcaattatggtggaaatttgtttcttacagtttgacatggatacagaagttttgaataacaaaatttgctttaaattttgcggtagtttattggttatgttgaagattatggagagaaggaatacacgagaattatggatgaaggattcatgaaaaaaagcttatcgattctgtataggcctatttagcgaaagaatgctgttactaaatctctggagctgtctgctatttagatacatcctcatgatcaataaccttgtttaattgaaggtaggatacagaatacaggtctttgattacctatggtggtatgtccatctatattcttttgggtcgtggtaaagggttttttcagaggaagtgctgttagataagtattcaagtaccatcttgtaaggccagattcttatggtatatgctcttttttcaatcaattttgtgatggaggggaagtggattggagattggggtttggaccctctgttacattaaaggtgctttccctaatttggggtttctatgaggggaaggaattgggtttattattttactcgatgatttctcaaatcacctttatgttgaagtctctatttgttgtgagtaccacagccatgcaccgtattttggtggcattacctcatctctttttgttcttgatttatacttgataattgttaaggagcatagtgtccttacattaaaaatgcttctactttgttgactacagatgcaaatgctttttccatgtcctcattgaaattaatatttgttgcagga

SEQ ID NO: 45550 - DNA, 488 bp, Manihot esculenta
  Intron number 3 from transcript cassava4.1_025472m (locus cassava4.1_025472m.g) derived from phytozome v7.0 (chr-ID scaffold00337; pos 27521 to 28008)
tggccccatcatatcagccatctctgtatcttctggtgagtctttgcttccgccctttatacagttgttgaaaggcaattattattgagttagatttcaatgttgcatcacatattttggacgtttagtgcatacctgggcctccctgaaggaaaagcacttggtgagttcttaaactatggtttgaggcccattaaagtaagcctacacttctgtcttctcgtctcatcttgctgtttcctaccccctcctctaaacttccttggtttggtaattttgaatgaattttgaagatgggcctactgaaatacagtaatagttcttttagttcagtggtttatcaatggcatctatctagtcacactggtggtctggggttttatcctcaattccccatccctctcttctctctctatttgttgcaggtaatatagtttgttgtttgattggcagatctgaaactttgttcaagtgttcaaaagaaggga

SEQ ID NO: 45551 - DNA, 474 bp, Manihot esculenta
  Intron number 4 from transcript cassava4.1_007120m (locus cassava4.1_007120m.g) derived from phytozome v7.0 (chr-ID scaffold10797; pos 207276 to 207749 reverse strand)
tggaatctttctttgctaagtttgggaaggtatacctaatggcaaaactcttattctgaggctttataaactttgacatatggacttctgttagatctctggtcatttatgacttattgtccttgatataaatatactcttaagatttgaagggttgcattgccatgtaaatttcatctttaatatttgatgtggttgtttatggaagattcttctttgatgaaaaattcacccgagaatatcttatattattgaatattgatagattaatttatcctaattattatataagttcagcatcaatataatatccaaaaatttttttagtttaagaaaaaagagagtggagttgttatacaaaaagccttttgtgtttgtgcctatggttttgatattgtttcatattcatttactattattttctggtttgaattcttttggtattatagcttaatagtgtgagactacctcgtc

SEQ ID NO: 45552 - DNA, 614 bp, Manihot esculenta
  Intron number 1 from transcript cassava4.1_018445m (locus cassava4.1_018425m.g) derived from phytozome v7.0 (chr-ID scaffold04457; pos 549571 to 550184 reverse strand)
gtttcttgggatcgctttctgtgacctaaaaggtaactttctcatccacattcaattatcttcccccaaacatgaaaattaatttcatgaagtctgtttacgttgcttttctttttaagttgatggggcatttggttctattctttggtttttcttattacctccttttgtcatgattcatttggcaagaaataaatccttacatgcatgatttcattttatttataaatgacaattttgtaagttagaaaagaaataattttttaccttctaaattccctccatccgtttggtataaaaaatttcgaaagaattgaatttaaatgattttttttttctaacaatgaactttcaaattcaattctttttaccctaaaaaaatgttgaatcttgcataattttacaaaaacatatttgtttttttttttctttcacaatgaatcatgtgaaatgaaggacgtgaaatttgatagaaaataaatgaattgaattgaattctggtaaagtctttggttccaaacaaggggattgtatttctaactatgctttatccatatgctgaaactttgttcattgcagcttcctctttctctacttaagactgcacagggcca

SEQ ID NO: 45553 - DNA, 910 bp, Manihot esculenta
  Intron number 3 from transcript cassava4.1_015509m (locus cassava4.1_015509m.g) derived from phytozome v7.0 (chr-ID scaffold11106; pos 690510 to 691419 reverse strand)
gcttaagcttacccaaactcatcctgatcttgcaggtacttagttatagttttgtgatgatctgttgatctttcattattgcttttagtttttctgtctatgcttgctttgtagatttctgaacatttaacttggtatttcttctgattcacatctattaatattacaacttactaagttcttgtctttttttttttatttaaaaatcctgtattgctgagggattacgtttgatggtttctcaaaactttaatctttagcttgatgtgtgaaaatcaagtgaacatggagatctcttcggcttctagtcattttccttggatattagtgaacatagtccttataaaacactagtagaggataacttgttttatttgaagcattacagagttggtttttgtcgatgtcgggacatgaaaatatttgtttaaagttagctgtgagtttatactgtcaacatgtgtgcttgcttctatctatttgtttccatgcattgggcatgtgtgcatagcagtgacaaatatcccattttattgcaacttctaaggaaataataatgataacttcactgcttttactgtagtgaattaaggagaaatttcccaaatatgtagttcagaaactcacacctaatggtgtgagtgggaatatataactttaaaataaagtatgcaccagcatttatttttcctgtttgttttgtttcaaaagtttcattgtgctttctaatttttatgatttcatgtcttcttttcctatttgccccttgtgtatgaactatattgattccaatgcttgacactgtaaaccagtagattgttgatcaagtggtactattcaatttttgctccatgactctaaattgtgtgttctaggactgaagggacagtctaataagaggcttatttca

SEQ ID NO: 45554 - DNA, 254 bp, Manihot esculenta
  Intron number 2 from transcript cassava4.1_012422m (locus cassava4.1_011650m.g) derived from phytozome v7.0 (chr-ID scaffold06158; pos 480738 to 480991)
gccccttttgcctcctaaattccctcacattccatgtaagattatttttatttggttacttatagtatttttttaggttctgatcatatttttgattttcaagaagattaattattcttaataacgtttacgtgtttattttatttttttatgggcgtgcttgaatggttgtgtttttcatcttgtggagctttaaaatgatctttaccccttaaattttttaataggaaattcttttgttgcgacaggcactg

SEQ ID NO: 45555 - DNA, 506 bp, Manihot esculenta
  Intron number 1 from transcript cassava4.1_014326m (locus cassava4.1_014326m.g) derived from phytozome v7.0 (chr-ID scaffold07520; pos 1166585 to 1167090 reverse strand)
tgccaagcttgctgagcaggcggaacgctacggttagagtctctctctcgcgctcatgtgctctctcttggatttgcgcctattttattttgaaattcaagttagatatgattgaatttgtgtgttctcagcttgatttcgcttggactctgtgagacttaaggattatagttgagttttttgtggtaattgtgcttcgtgttattattcttttgataatggctgagtaactcaatttgactaatttaagcaggcttcactcagccagatgttttaagcttgacgaaaattgatataatttcttcacattttaatgcttttttatgtgtttgtatatgtgtttgtgtgtttaatgttgtcttttctcaggatctgtttggtgtagtggataatcgcttggagaacttttgtccaaattctttactgaaagtttatgacttaaattggtatcttaactgttgtttgcttgatcaaaagtccaatttaatacttgaatttttgcagag

SEQ ID NO: 45556 - DNA, 490 bp, Manihot esculenta
  Intron number 1 from transcript cassava4.1_015672m (locus cassava4.1_014786m.g) derived from phytozome v7.0 (chr-ID scaffold03245; pos 13775 to 14264 reverse strand)
aagaagccgttcttgatcctcaccgttctctccaggttcatatattacaaatccaccactgactttcactttaatgtctcctttttccatctgttatgtgtttcattcctattgttatcgacattcctaagaaaaattgtcaatttgaaaggaaaattcaagaaaagaattttttatttggtacattgcatgttgggataatttgacttttaaatgaggattgaattgctagggttttctgattttatggatgcatttcgacttaagtagttatgtaaaactttcgcgccggggagattgatagaagctcccagttttttatgtcgctaaccaaaagtggggcttttggtgaagctgttttcttgtgtttaaatactgaaatgggcattttttttttattcatttcaatctgtttttgctggcctctcatgggtttctgcaattaattcatgtagtacgcttttgtggcttgtaagcctcattgtgttat

SEQ ID NO: 45557 - DNA, 1002 bp, Manihot esculenta
  Intron number 1 from transcript cassava4.1_006108m (locus cassava4.1_006108m.g) derived from phytozome v7.0 (chr-ID scaffold01745; pos 24360 to 25361 reverse strand)
aagatagatccgcatttatcattccaaataaggttcgtcatccacctccaactgcactctctttattcaattttcaattgaatcttgatttagttgttgcctatttgttggtgactgaaattgctgatgcttgatgaaaccacagcttatatttcttcatatgtttgacttcaaagccatcctcattctcgtatatttttagaagatattttcgcttcatttttccaaattctcctagataaaccctttattcggtcaatgataaatggaaactttccagaaaggctttcacacaacttggctgtgagattttggtagatggtacttttaaattgtcaagatgcttatcattttcgttttccggtgagattatgattagcaggctccagaggccttcttcttcttcttcttctcttttaaatttcccattgccaaggaaaagaaaaaacaaagaggaggaaatttccccagtttagaacccagaatcagctggctataagtgcaaaatatgatttgaaaacatctggtaaacaagctacctggaaaaataatatcattactgtaaatcaacttttttattacgcctgagattaccgatttcattttctagaaagaagggtatcaaatcacaattgaatccgaaaaagtacctcaatttttaggtagataaggtggtctgacatcagtgcctccaatccattacagccaaaatccataattgcgatagtaaaaatatcttccgcataataagtgaatttttacccttttctatcaatttacagaaatcagtaggtttttggaggacatgtattttttttttcctcttctcctatggttattcaatcattcctgttatcacattgtttgatcttcggtggcagtgataactgaataggatggtcaatcacacgactgttgatctatatatttgtccttttttttcccttaacaaacaatttcaagctgcacaagattccgattatcacctttgtataattttag

SEQ ID NO: 45558 - DNA, 662 bp, Manihot esculenta
  Intron number 1 from transcript cassava4.1_031510m (locus cassava4.1_031510m.g) derived from phytozome v7.0 (chr-ID scaffold02658; pos 939727 to 940388)
gctgattcgtcctcattgccagctattaattcaaggtaaatcaattagatttttccatttcatttattgtaacatgcatattccttgttttgtgctgattataaagtaatatggcctgctaatttttttgtgatttttattaagcaatagttcattagtattttctgaaactaagagcgttcaatctctatgtgcactcattttcttgttgtaattaccattaattgggtccaaaatctaaatacatgtcctgattctttatgtttatttatggtaataacacatactataataatttatatttcttccattcattctatctgttaaaattgtgatgcaatgttccaaattccatttatctgtgctttgattgtctaacataaaatcaggggatagcaggcctaattctctagtatttctataatatgcatattatttgttatggatggacatcctcttttcattccttatctgggctgatatcaagtgggaagaggtgttgttttttctttaaaatagattatagtcaatttagttatcttcaaagagctatgccattctcaacattctagatggctaatttactgtttatgatgctatagctcagtcagtttctgtatcatgcaggcggccaccatcactgtctgcatacaagttgaagt

SEQ ID NO: 45559 - DNA, 867 bp, Manihot esculenta
  Intron number 2 from transcript cassava4.1_029847m (locus cassava4.1_029847m.g) derived from phytozome v7.0 (chr-ID scaffold02658; pos 1044101 to 1044967)
gcaagttactggaaagtcggggtggaatagatccagtaataaccttcttaacttacatatgatcttggtttgaatgcgcacttaatactatctcctgcgtacatttttattactaatactgcttattatatattcagattatttatctctagccaaaaaaggttcacctaatattcccttagagaaacttttcaaaaacttgaaaagtaataatgagagatggttactcaaacctgtgtatacacacctaactggagtgtccatttggaaatttcaaagagtgtgtactacttactgatgaattttgcaacaaaaaaatgtggtatagccctttgttgtggtgcaattggtacagttactaacttccattgatatctttctcacttggtcatcctttgttaccatatctgccggcagaataaactcagctacactcaaatgtacactcctgttcctgtgacttgatcttaagcagttagtgcataatggcacagagaagttatgcttgataaaagtttaaccttgtactattctttctaatgtatgtcagcagtcagattggtataactatttctcaactatatgatgccaaattgacagcgtgtgactgctttttcctcagttttgagtgataattttgtttccatcttctatgattcagatgctaattttattaagtttctggcttttgcgtacagtaacggttaaatgagagtaatatttgttcagttagttaatgtcggaactttatcattttgctgggtgcctagatctagtgctattggattattagtactttatttcattctttcttgggttaactgagtcattttggttgggacaggtaggacttgattcccggacacc

SEQ ID NO: 45560 - DNA, 919 bp, Manihot esculenta
  Intron number 1 from transcript cassava4.1_021285m (locus cassava4.1_021285m.g) derived from phytozome v7.0 (chr-ID scaffold11998; pos 601764 to 602682)
tattgttattatttctctgtctctctctcttgctggttctttttgagggtaaagaagatgagagggtggaaggatatatgcagggttgagaaactgcaagactggatatgagagcttggtgcaggcagcaatggatgcttcacaaaaattcagcctgattcaacaacgtgaacttgtgcttcaagctcttgatacagccttccctagactaatccttgacctggcaagttcctttcattcattattcttgtttttttctctactcttctcttgaacaaggaacataatgatgcaaattacattcatgaaccccttcatctaatttcctaagaggatagatctactaatatcaccacatgatattatggtaaattaagagcacattggcaagttcatttcatttattattcttgtttttctttgacttgatgattgataaaaaatggctttcgcatactcttcgtcattttatatgattatttttcaagaaaaaaactaaatgaatttttataaaataattgaaaagtaaaataaaaaaaattgataaaaaagaaattaattaaactgaatttttagcataattcttgatttcaaatgggaagacagtgatagtgatctgaatcattaatcaatcaattgcagatttgtcttcatatttctaactatgcgtgttcattcatgaaaaactgtaaaaataactctacaatcagaagcagctgcaggtctcaattgctttatataagttttcaaaggccatctatgtctatacataatcattccatttataggcagtgcttttgaagttcatttcacagttacatcatgcttagaatcaagagttttaagaattccatccagttaattttttcaaacaaaactgatatgaatttcccgttgttgattgcagataaaggcagtg

SEQ ID NO: 45561 - DNA, 639 bp, Manihot esculenta
  Intron number 1 from transcript cassava4.1_024524m (locus cassava4.1_024524m.g) derived from phytozome v7.0 (chr-ID scaffold02610; pos 29304 to 29942)
gcctacaggttagtgaatttattataattgcaaggtttaatgtgcaacctgcattttgtaattttatggaaatgataataaactattatcttttcttatgttgaatgtctaacagatataataaatacatatatatacacacaaacttaattgattgagttgttctggtcaagtgcaaacagggagagcaagaaattattggcttgaagtagcaaattttcagccttgaaatgaaaacttcattggttgatgatgtaataatcagggtaattcaaagttttctgtagcgtaccacccaggactagctcatttggtcggactatggtcctgctcatgacacctctcgctgtagtttgttcctgaaaaacaatgctatgagcagaacacaataaataatgtcttttttccagagaagataagttaatgttgtagcaataattatgtatattgcacgaaatgtaaaagtgagacaacttaagattttattacaagcaaggactgcgctagctatcaactagaaaatcatagttcatttgttttgttgtatactgttcatttgacctcttttatacaccagttgctagagttcatcatctgttgtcatttttaggctttgtatttttatgtgcaaatcaggat

SEQ ID NO: 45562 - DNA, 791 bp, Manihot esculenta
  Intron number 1 from transcript cassava4.1_010970m (locus cassava4.1_010970m.g) derived from phytozome v7.0 (chr-ID scaffold11425; pos 591757 to 592547 reverse strand)
gctgccaatcacactacaggtgcttcttctttgccttttgtttccatttctttgctattttatcttttggattcttgatttattttgtttcaggatatcgatgttctttcattcattaataattgaatcatgtataggacatgcctgttttatgtttcaagattgttttgtttgtcttattttctgattcttgagcttatttcattagatctttcttcatatgcttcgagttctgttctcggttttgcattataagttatattcttattttgctcgacgaaattatgccattcctggtgctttgtgcattggttatttgaattttataatattgcacatttcacatgattagtagctttctacttgttatcagaggtttatcagataccagtaatttgggatcaaataatgttgaaaattttgtttcttggtcattagacgtcagtattcttggtagggcttgtagattatgcaattgatccagaaatggttgctttagttgtgttttaccaacgcctctttctccttcgataagaaaaaaaaatgaactgcatgttctatgttttttttttttttttacagcattagattagattttatagataaatttactttttaaaagtaaatttatgagataaactggcatattgaaaaaagaaaaattctgccttggttcaattctccaagcataattgcaagccacaacattattgtttacttcaatttggtcaggattattgaacctgtttattcatagtttgtactgacgtaaagcgatggaaaatgtgcag

SEQ ID NO: 45563 - DNA, 946 bp, Manihot esculenta
  Intron number 3 from transcript cassava4.1_017192m (locus cassava4.1_017192m.g) derived from phytozome v7.0 (chr-ID scaffold06916; pos 1003942 to 1004887 reverse strand)
ctgctcggcagttaaaggtacattccaagaattggagtaaatatttaattgccaagatgagtaatcactccaaaaatgaagtgattatacaacatctatttcatttgactaaaacttttctattttagtgggggaatggattttgactacagatgtgatccccaacaaataatgatgatgaaatttcaaaattgtatcactttttagaagttcgggtttgttttaggctatgttactcagatctcaggtacaagtgttaaaaatggatacatatccttgtattttacttgtcaatttttcaaatagaaaatacaaggatatggatctaaatttgataggggctccagtagatcatcaaatacataaatcaaataactattttctgaaaaaaaggcaattactttgttatccatgctcttcatcatgagagaaaatagtgctctattgatgttgcttttgtttttagagatctttgtaactcatgtctgactacataaatatgtgtcctacacatactccatgtcatgtgccatgcgtatcacgttgaacggcatggaaaaatgaagagccggagtctcaaaggttttggcaaatgtgatacacaaactgatttgtgtgagttgtcatttcgaagggattccatttggattcttactatcatatggactgtggaatattctaggctagaaaaaaactgaagagttgatatcaactcgtaaaaaggggggggggggaggaacatgtatgtaaaagttgaaaaaccgtcctgcacaagcgcaccaggattgagcaaaagaaaattaaccttttatggggattctgaaaactgcctagctacataaaaaattctatttacttttcattttacattttcatgatgtattaagatgatgctgtcccatcaattccagggaggttcagtggatctgttcgttgtaaattccta

SEQ ID NO: 45564 - DNA, 685 bp, Manihot esculenta
  Intron number 1 from transcript cassava4.1_020405m (locus cassava4.1_020405m.g) derived from phytozome v7.0 (chr-ID scaffold03741; pos 140891 to 141575 reverse strand)
gagaaagcgcattgcttgtttttgtgtatgtctcttcattgcccaattgatttctctacatcctcgtttgagtgataatcggtttggacttttgatttcttctgttttatatgtattcgctcttcttgtttttttttctctctctatagaaaatctgacattgaaactgccttttctttttcaattttcattttaatatatatagaaaatatttgaagttaatgaagcctttgtaactcttcctattttcaatataaatagattattagtttagaatttttcttaaaaaaaaaaattgatatatgaacaattttttaagaaataaatcatttaaattataacttaattaaaatatataattcgactattaaactatgaagttaatgactatttaattcataatacttgtttatacgatttgctcaaatctattaattaatttcttaatatttttaatttttacaagaaagaaatgttaatttataattgtttaatgagtatatatgtctatagggataaagattttgcctttttttcctattgaatctataatttcattcctttatttttttgtggtagtggattaattaattaatgattatataaaataaatatttggaatataatgctttttgggtgtttgtttgtaggccctttggtggtgttaaactaaagacaacattga

SEQ ID NO: 45565 - DNA, 422 bp, Manihot esculenta
  Intron number 1 from transcript cassava4.1_000191m (locus cassava4.1_000191m.g) derived from phytozome v7.0 (chr-ID scaffold07318; pos 134015 to 134436 reverse strand)
tcacaaacaccagtgtgctatgaagctgtcagtaatttgtcttgctaaccatatctagcttatagttatgttttattttatgagttttcacaatgcaatattctgtttgtgtgattgtaacattggagcacacgtgtagtctgtttttgtttaaaagatcagttgcaaatagatttgtgatttgatcctcctctgcatgattgtaattgtaattttgtatctatataatactggtcaacctttggtaaggaacactagaagtggttgacagtttcatgttacacatattcagttcactgtttaagcatatctgaaatcaaatcctattgttcttcaaagaatatctatccttctctgtgtctaattttttttccccccaatttatgttcaggccacaccagtgaacattatcgtaggttctc

SEQ ID NO: 45566 - DNA, 582 bp, Manihot esculenta
  Intron number 2 from transcript cassava4.1_021834m (locus cassava4.1_021834m.g) derived from phytozome v7.0 (chr-ID scaffold03597; pos 69467 to 70048)
ataggaatattgtccttactcgtatcaatcctgaggtataatgtgcttgatgttgtttgcttgtttcaattgttcttacactgatgagcttctgtgaaatttgtctatgttttgatgatatactggtatgattgcacaaattccatttaattgaaaataatcaagtatcttgagatagagagaaggatgagctccatatcactattcattattttgaacttggaaacctttacattcttgatgtttttatatcaacttattttcctgtagccttaatgagctcataaagattaagctaagtaacaaagaaaattattcaggttggctttaccttcttctggtcttgtagagattaaacttagtatgggtaccaataacattgtatggtatttaatatgataaaagacaaagccattatgtctgagtccaaacaagtgttgccaagtcttctcacttaaatcatagttgactagttaagcatgtgtggttaactgatttgtaaagcaaatagcattctcttatgtttttgcttgttttctctatatagattcgtgatactagtgtacttgtgaggttgaggcc

SEQ ID NO: 45567 - DNA, 810 bp, Manihot esculenta
  Intron number 2 from transcript cassava4.1_001907m (locus cassava4.1_001907m.g) derived from phytozome v7.0 (chr-ID scaffold07520; pos 2616464 to 2617273)
aaagagccaagcaacgtattcaagaggttcagaaggtaaattatgtccctagttaatcttttgttgcacaatttgtttatgatattcttttggtgtgctaaactattatttatggaaggaaaagaaaagaacaatatacactgttatctttcgaaatcaaaatggcgagatatggttgagttggcttgaatgttgaacttcatccgtcagttatctgctgcaataaattttccacgtgcggatgttaataagattgtgactagttccatgtccagttaagagcagttctgaaatactgatattgaactggcttggcctctgggttttgattttgcggacaaaaacaaatgaagaaaactgaatgacaaaggttccatcaatccaatggaaaatgcttcttttagagtgtctctatttcctatgaaagtatatcttgtttgtttcttgatcagaaggcccatggaaaaacttctatggatatattaatttcacacttagggatggccttacctctctccctctcttttcattttttttttttccctggaaaatctctcaatgtaactaaataaagccaaatggaggttgtgccatcacaactaacaatgaggctaagggatatatctttgtggttgaaaactgattcaaattgctgccttagtgtaataaggggaagtgagttaacattattttatttttaatttttttggaggctaatggttccttgtctacttaaataaaatgatagacacatatgcaggtgtgcagaaactgagtttaaatattggaaattatcatttcaggaaaaag

SEQ ID NO: 45568 - DNA, 772 bp, Manihot esculenta
  Intron number 1 from transcript cassava4.1_015920m (locus cassava4.1_015920m.g) derived from phytozome v7.0 (chr-ID scaffold04043; pos 248597 to 249368 reverse strand)
ttggtagcataggagagaatttgaagccacgtgaggtatggatggtttctttgaacttgatcaatttaatccaacctgtcttgcttgctcatcttgtacacatacatggccgtcaattaagagaaacttaatcaattgataatggtaatatactaagaaggttctatgttaaattgcatctcataactggtactcagagcttattaccaacttgttgccacatcttaggaatagggagatttttacaagtagccataatttatccaagttaaaatgtttaaagaaaagagttgtctccaatatgtatatatgtaattatacagagtataattaagtattatgtgtgcgtaattatatatgtatgctttgagaaatggcaagcattctgggtaatgaagatgacataattcctactctcaacctccttaaatcataacaatggacacaatttgacaatcaaagaaatgggggttaagtcaaatcctagtgcctaaattatggcacaatttatggcatgaatcatcattttataggtacaagtgggtcacatttctttgggaaatacaacaatttttatgaaacgttacaaccaccaagtgtttggttgtcctttgtgccagaatcagaaagtgacctacaaacatcatgctcttagggaaattcccctgattagcaactaattacaaagtacttgaaagcattgttaaccctctgttttgtttatataaattttgcagaagcgagtgagttttagtccagaaggaggagaaat

SEQ ID NO: 45569 - DNA, 527 bp, Manihot esculenta
  Intron number 3 from transcript cassava4.1_017098m (locus cassava4.1_017098m.g) derived from phytozome v7.0 (chr-ID scaffold04457; pos 318091 to 318617 reverse strand)
aagggcaaggttggtctctcttcatctctcccctagctgcttggttgcctagaaaaatattatttatatatttaatgttgtaggaaaagctgacctcagtcactatggtgccaatggttgttgtatttagctaggttatgacccttcaggcgtctgcttctttttgtgcagactcgtgaaatatttaacatgcttaatggtagaatttctacatgctatttagttgcttgagaattttccgggaagactagaaagagaatttgaacttcaaactctgggatttattttttccctttgaattgagaaataattaagcttgctattgattgaccacctacatgtttttggcttttgatcacattgtgaagccggttatttcgtttgctctagtttcaacttttttggcttttttgtttcttcttttgtttatatgtaattattattactttgttaatgattattgatccaatatattttggggttatacaccaggaggataagattgctgtggttgttggtactgtaac

SEQ ID NO: 45570 - DNA, 715 bp, Manihot esculenta
  Intron number 2 from transcript cassava4.1_022703m (locus cassava4.1_022703m.g) derived from phytozome v7.0 (chr-ID scaffold03087; pos 5688 to 6402 reverse strand)
gttcaccttcactttttctttcggatattcaactggtaatttttgcattgattcttctttacaatatttgattagtaaaactcgtggttgaatatttgatttgctttattgttatgttgatttattgatgcactaacatgtttttaaactctgatatgtacaatgtttttgaattttatgccctttaaaagagagattgacaattcagatctgatctgcctgcaatatgttacttctttgtggggaactgtatttcaaaaaatcctgtttcatcactgaatgtcactctcatagctgaatatctttgcaggctttgtagttgctttccttatgtaaagcaattgattatcaatgccttttcgcaatattttatgttgaaacttggaaagcaactataatgtctgtatcttaatttacatcttaatggttagttgtgaccagcacaacttttttattctcgattgtgatatgataatgtcaattgttttgtctgcctgctgtgatcagaatttgttcagcttcgttttattttcctgcatggtagtgcttgaaactcaactgccagcatttataatatcaaaattaataaatgacgttcagcttcattttgttgatggtgtcttctttatacgaagacaactcaatttctgtttcttttgtcaatcatttacaaaatctctatttcaggtgtggaaaaagcttcaaggaattggta

SEQ ID NO: 45571 - DNA, 931 bp, Manihot esculenta
  Intron number 1 from transcript cassava4.1_007216m (locus cassava4.1_007216m.g) derived from phytozome v7.0 (chr-ID scaffold01313; pos 13838 to 14768)
ttatttctatacagctcgccaaagatcttttacaggtttattatttttattattcttttaacttgatcggtaaattaattataatattaattaatatgttaaatagtgttggtattgtaaaaatgagttcatattttaaaatatttttatttattaataaatatttatttttaattttttaaatatttttaaatttcaaatataattattttattttataagattttataatcgttaaacacttttgcctgtgaaatttatttttgttataataaatttgatattaaaatttaatattatctctgattattatgatattgtatagatttatttagattatgtctaaatttttacaaaagtttataataattattttgtccactgtaaatagaatgcataaaaacacatatatttttcactttatttttttacgatactttctggtaaaaaaattaaaaataaatttttattattttaatcctaaaaattaagatttcagaaaaatatgttttattataagaaattgcaaaataaatttttaaatatcatatctaatatgattcagattttatcattctattatattttttcaacaattttaaaaaattattttatctttcagagaagcacaataactaaaaatgaagaaattgaagtaaaataaataaaagtgatgccaaaactcttgaacaataatgaaaagtctactctgaactaaaagatttaaattattggataaaaaattaaaaataaattattattattttgattttgaaaattaaaattctaaaaaaatatattttatcgtaggaaattataaaataaattattaaaaataatgtccaacaagactgaaattttattattctatcctacattttcaataatagataacctctattattcattgtgtaggtccatccagactcat

SEQ ID NO: 45572 - DNA, 840 bp, Manihot esculenta
  Intron number 3 from transcript cassava4.1_010392m (locus cassava4.1_010392m.g) derived from phytozome v7.0 (chr-ID scaffold00847; pos 2079533 to 2080372 reverse strand)
gaagattctgtgagtaattgatttagcatgttatctaaatatcataagcgttgaagtccttttactattagtggcaactttgatcctacatacatatctatctatacatatctctctctctctctatatatataaggttgtgatggtgttaagtgggaatctagaatgtatgatgttatatggttactgctgctgataaactttgttaggcacagtctcatttgtctttgactgtgataggaaactaatgcattgtaaagttcattgtaggctctatgagtttatcatttcaataaaaataatagactgccctccttaactaattaggattttcgaatcagtttagcatatgattaagttgtctgattatcactgtgtgagatatctatttgacttatttatcattgaatttttcatttcaaccctttgtgggctgggaaaggcggtctccttatctagaaaagatacaaaaatataggaatacctaaatatatatttgaagcttttggaaatggttgctcatcatgatacagccttgggaaactgtacttgattcacaatgccaaaggcagtaggacaccttctgctaaaacgtctcattaattgatcaggcatatcttctatttcccctttttcttaaaattatgttctatatatatttaaatctttcttttaaagattgggttattatacataaatttgttatttttgaacattattttatgaatgtttgttctatgttctgtattctgatatagacaatataaacgtgtcctttttggtcgccgcattgcattacatattatgttagttattataatttttttgtttttgcttagc

SEQ ID NO: 45573 - DNA, 791 bp, Manihot esculenta
  Intron number 2 from transcript cassava4.1_010392m (locus cassava4.1_010392m.g) derived from phytozome v7.0 (chr-ID scaffold00847; pos 2080481 to 2081271 reverse strand)
tgataccaagctccatacgcagcctagttgggcaggtaaaagtgggcagcgaggtttatgaatctatttgcaaatattgtcttattcatttttgagaattgtctttgctattgctggtttagaagccttcttttcatggaaagttaaagttttgtcttttattattattattttactgcgggttcaaattagcatgtggtgtttgtatcttgtatttctcttttatttaagtgtcttaacatcttgttttcagttattctctctgatttgaatattagattgttccatgattgcatttcctgtgtttcttgtaattactttattcattttttatattagatcttgatcggtagtttttgtagttgggatgtcgttttgtgtttttaggtgtggatattttttcttgtaaccatccggtcatccaaattgatcctgatttattttttatttttattcttgcttgtttatgattacgatttgatcagcaaatgacataaccatcagttttggttggttgaggaacctttggaatagaaacgtctttgagtttgaagcttcaatcttgattttgaagaacacagaaaaaaaaattgctgtagtttgacttcagtttctcactaaccaaagaaaacatctaggctgcaatggtcatgggagctattatttgttctggcaataagtagcgttttatgtttgggtttctggctgaagttgttggacatcgttctgttactttgctgttttcgccctcatccttgtcactgcatccttcctttgtatttcagattgag

SEQ ID NO: 45574 - DNA, 965 bp, Manihot esculenta
  Intron number 3 from transcript cassava4.1_005430m (locus cassava4.1_005430m.g) derived from phytozome v7.0 (chr-ID scaffold07917; pos 31151 to 32115 reverse strand)
cgtgataggcctacaattgtttcagaactttcgaagtaaagtttttgagcttatggcttgtatatagattattgtgaaagttaatgctttttcttcttttatctgttgttcattatggattttcttctatattgttaaccttttctactcaccgtatgttgtttgctgatatttataatctcttggtagatttctagccctctgtatgaaattgaatatgtttatatagaatgttattttaatgttgtatgaaattgaacatgtattgtacagataaaatacagactagaggtccaatagtaagagtgaaatagaggttcatatggtagtgtgaaccttcagatatgtctaaaacttcggagaactttagctgagttgttagacgtttttttttaaattttttttattacgtttcacagtttggtaatatagaagatagtttgcaagatatctgctcaagatttttcatcctttgaaatgttgggaaccagatatagatgaccatatgaaatgttatagaagtatgctaaaaattcaaatggatttttgtagagaaagacagtggagggactatgggttgtgatgcaaaattctgctagggtcatctccttttttggcttgggtctgaaattggaggtttagaagtgtgaaaccgccatgcagcaaagactcccttctgttatgtttgacgcttgtttagcaagtttttccatgtaaagagtaaggaagcatgctatttgtttgaggatatagatcgtccactttcctatgaactttatccttttatgttatgcaagttgattttgttggcttttttttcgtgttgcttattttgagcctaaagggtgtttatagacctttataagttagcatttttaagttggtaacaatttatggctggcatctaatgtgccactggttgttctgaaggtataaaattattaaagctggatcagggagaagcc

SEQ ID NO: 45575 - DNA, 921 bp, Manihot esculenta
  Intron number 1 from transcript cassava4.1_010245m (locus cassava4.1_010245m.g) derived from phytozome v7.0 (chr-ID scaffold03612; pos 21087 to 22007 reverse strand)
ttttccctgcggttacgcctcaaaaagtaagggtttatctgcctagcttttctcttgagtgaatgcatgtgcctttgtactgattttgatgtcttatttgttgttgatgatagggtttttaatgaattggattgcattttgtggtttatttttctttcaatccattgggtgagaggtggcggttctgagaaatgaggtgatgaaggggaggggattggagctgagtgccggttttaattggtggattatttcttgtgggaaaacagtggcggatttgtatctaaggagaaatgataaattcaaacacttccaattacttatccgactttgattcgacttctttgtttgaggtgacaatgggaattcgagaaaataaaattatgagcttcatggtgctaatattatgatgttttggcttatggagcaaggatactgttaggtgtttgcacctaattagcaaaaatataaaagcaggagaactttcttcggttcatcccacattgtaatggaaaattttaaatattgcacacgcacgtactgcacctcatgacagatgaaaattggtcatttttgtagtacaagttgtaattgctttgggaattcttttgcaatcaacccaattattttcccctttctggtaaactaggtgttaatagaaaagagcattgagggttgcaccttcgggaatcttgaatggctataaatctgttcttattttgtccactagtaatttcatatataaatttttctgggcatatcgcaatctcgttttaatgattattgatcttttttttctctgagaaaaaacatgtgcaaagtgtggccaagcctatgagtcatctcatgtgcctttccgtgtcttgattcactggagtgcatgtgacaggtgcaagcagtgttattacttctaggagggacaga

SEQ ID NO: 45576 - DNA, 439 bp, Manihot esculenta
  Intron number 1 from transcript cassava4.1_030554m (locus cassava4.1_030554m.g) derived from phytozome v7.0 (chr-ID scaffold03750; pos 603578 to 604016 reverse strand)
ccatcctccgtctcaacttctcgcctctccagtcggttagcccttctagtttttaaataattttctattgttgttctatttctttatctgcatttcatttcaaacactctgtttagggttttttacttcctttattttctatggtttaatttgttttgctggttcatttcgcattagtaatttctatttccgttaaacaaataattagtgactatttttaaatggttcatgaagaattagattttgggtatcattgtttgatttgtgggattttatggttatgtttgaaagtataggatttatgtttcataggtggaaggataattggcagataagattctaatggcggtgaaagtatccttaatgacatagaaattggcactaagtctcctattctgttgcagagagtagaaagggaacagacgatacgtgtatacca

SEQ ID NO: 45577 - DNA, 814 bp, Manihot esculenta
  Intron number 5 from transcript cassava4.1_002405m (locus cassava4.1_002341m.g) derived from phytozome v7.0 (chr-ID scaffold03735; pos 69186 to 69999 reverse strand)
tagcaccggagtgttcttctgttggacatactattgtaagtatcctgttatgtttttcttttcttttttatttttgaaatattctcataaacaaatgatgattattttagtatatggcattaggtggcttcccagagatggaattatgaatggtagtggccctaactgctctgaaataagttttgataagtagatttgcataaaggaaatgcacaaaaatcgtacaaagaagccttgatgtagaacatgttaagtagtctgctactccacctatgcatactttcggggcagtcgaaacttgaatgatgggattcggagtttcaatttaaagaaggaagagtcatactaggaatagcttaggtgatgcatatggttagagagggactgtacctattgaaaggataaacagtgacactgatttctgtaagtgtaaaagataactctgcatcttttattggattaaaaataaataaaaggatattcttgttagggttttataccctaaataaattaaggcttaatgacttgggattgctctaacttatatggataaatttgctttcttttattttcaaatctttctaagtaaatgttgtttattaactcaaatatcatatactgggttgttgaggtctttttgttattaaataaaacatttccattgttttaatccctttctatcaattgtagttgctgttgttgtttttctcatcctcagaaatgtcatggttgaattgcttaacaggatggaatttctgagaccttaattttatttgcaggatattttaaacaataaagttattgttttccccga

SEQ ID NO: 45578 - DNA, 1013 bp, Manihot esculenta
  Intron number 1 from transcript cassava4.1_002405m (locus cassava4.1_002341m.g) derived from phytozome v7.0 (chr-ID scaffold03735; pos 70800 to 71812 reverse strand)
ttctccgatcaccaagtataagttccttgagtgttgtaagttctacttttgcgttgtattttttttcttcgaatttcaaagcctaaaaaagaattgtgtgtttggtttgcttgatggattggtaagtgctggaaaatgggtactgaattttgatcttttggtgatgagaaattgtgggaaaaggttttcattgcatgcacttgagggagcccactgtactaggtagggacgtgtatctgtaagtgtgaaacacacttactcgtggagagcacaccttttgctgctcaagccgctctttgagatgagtggagtgagtgtgtttatttaaccttccgcgctgactttgtccgaatttttgattttgatatagagagtttgatcattggattttgagggaaaagaactaaaccaatggagaatgattaaaaccaacttgcataatgcaattacgtggctttcggcctctgttgttgtttatttttatgaagtgttagatttttcctcattatttaagttaatccttaataacaaactatggcataagcaaactaattaatccagagtggcattcttaattgaatttctaagatgaagctgatgattaggttaattatggtttctggaaattttgagaaaataaataagttaatttgacttctgatgagtttaaaatattttagttgttaaagtttgaaaattaacaaaagattatctgaattaagtctttcaatagatttcagtttctgtcgaagatggtgctgaagttaatttcactcctgatgaaaccaaaaaaagggttcagttcttttggaaattaacaaaaaaaaaacctgaattaatgctggacaaactgttttggcctgatgtttgaggaaagaaaatggaaaacacaggtcgaagccatctttctcctttctatgccttttggttttttattatggcttaactcttgtttgatggttcatgatttgaggggctgaactatattcttcattttactgtgtagttgcagg

SEQ ID NO: 45579 - DNA, 732 bp, Manihot esculenta
  Intron number 2 from transcript cassava4.1_013507m (locus cassava4.1_013507m.g) derived from phytozome v7.0 (chr-ID scaffold10045; pos 315212 to 315943)
ttagaagctgaaaagaaggtatatttaatgctttatacatcagttctattctattgtattattacttggtgatctgtctttattatctaccaaacagattaaacgggacaacatgaaatcctttagggattccttaagcttctcatgctggaaagtagtgaaagctgttctcataagcataagcctttgcctatatcctccatctttgataacttttctgtcaattttaaaatacagttttcagctcaatctcttaaagaaaagctattattaatcattcctttttggagttgaaatcaacattgtgttgatggggcaatggtaacatccttgtatcattggcaatagcaaatggaaggtttgttgtcaatttagctttattctttctatggaaattgggtccatggttttgtgttttgtatttgagaatccatgtttctggaaataaatttcttcacattgtcttctactggtaatacttataggcaatgtcaagtgattatgctctttagttgctagggttttgttgtgatttctggaatggtggttgttttcctttctatatttagttgatcctgaataagccctatctgccaaatattctgaatttattacacctccctttcttcccaaaacttctttgagctttctcatgggaattggaggtttcactggatatcctctcattgttatgcaggagagagcagaatcagcactgcgtgctcatagtag

SEQ ID NO: 45580 - DNA, 534 bp, Manihot esculenta
  Intron number 2 from transcript cassava4.1_010181m (locus cassava4.1_010181m.g) derived from phytozome v7.0 (chr-ID scaffold09335; pos 91100 to 91633 reverse strand)
cagaatagagcaattggaggcagaaaagcaagctggttttggaaaaggtgatcaatgctatcttgaaatgttgcatttagtcgtataagcaatgaaattatgaatttaataactgatagtcttgctgtttatcttctttttatttgaaatctcaaggatgtcatatttgcattttatcataagaaattatatacctatttgtttgtgtttgattatcctttttggttctaatttaacatcaaatctgaagtaattggttgtgcccttgagaacagatttcacatagtcattgaggtgattgagcataaaaatttgtactctggattccctcaaccagtaccagggttaattaattatttctaacagtttggagatgtagcaataattttatttttcatttgagaacttctagctcaagctgtttaggtttttagtacctaaatttggttcagctgctgaagtcaagtaatttctttgatggatatacttactaaaccagataaacaatctttgtgctgtgaattgctgcttcgg

SEQ ID NO: 45581 - DNA, 515 bp, Manihot esculenta
  Intron number 1 from transcript cassava4.1_019304m (locus cassava4.1_019304m.g) derived from phytozome v7.0 (chr-ID scaffold06649; pos 7149 to 7663 reverse strand)
atctcagacggaaggaccctgacctgtattttctcttcttatttgcttttttttttttcctgataacgtgagaaagaaaaagtatatgaaaaatacgttttctttttttttttacttgactatactttgttggtaacccaagctagaatttgtttgtaagttatttttcataaataagttactaggatccttaggaaatttgattgatagaagctttcaaataaacagttctaccctccatagcatttgaaataaaaacgtaatgcttaaaataagtttgtgataaaaaccttagtcgtttgaatttttattttctgtttagttgggacaatggaaaaaaaaagaaaaaagaagatgaaactagagttgaaattctcagttttattgctgctttgatttcttaaagctgaagaagtttagtgaaattagccaaactctgcagttaccaaaattgaagaactcatgtatgatgttaatcattctttattattacaaaatatgcagttacaagcgta

SEQ ID NO: 45582 - DNA, 814 bp, Manihot esculenta
  Intron number 2 from transcript cassava4.1_010982m (locus cassava4.1_010982m.g) derived from phytozome v7.0 (chr-ID scaffold08757; pos 490809 to 491622 reverse strand)
gggataaggatatactgagaggtgtcagcttcaaggtgccttttgttagaaattgatgcttgttctctttctatctaatggttctttcttttattagcatatattcttacaactgttatgcacagcatattaactcttgatcaacattcttgtggtaaatgtcgttctctgttctgttcacaattcaacttttgagtgatattgagctattgttttactgcttctgcttgtggtttgcctattgcaccaaacaatgtaaaagaaattatggtaacaactggttttcgttgagctaaggcctttcatgtgagattataaaatttgattcaaagttacataataaactaacgactcttttgaagaatgagcaaggaattaggaaccaagtatggctgttagatatacctattgaattgttgtttaatgattacaggctttagggaaccaatccctgaattgtccagtggaggggaaggtttcaacatttttctgtactggctgtgttattattttggtcttgaccttgtgcacaatcttgagttgcatccagctctttttagatgtttgacttggtttatgaggtttataatgggaaaagggaaaagtaaatcttattttctttgtttcaatattattagtcaatagttcaaccaatgtgtttaatttgcattcctttgcaataatttttagagccactattggaaggtgattatttgatcagttaaatcttgagggtgcctctgtctttgcttcatatttggattttccctctttctttacacgtatattttctctccacttgtatagattagac

SEQ ID NO: 45583 - DNA, 778 bp, Manihot esculenta
  Intron number 1 from transcript cassava4.1_015803m (locus cassava4.1_015803m.g) derived from phytozome v7.0 (chr-ID scaffold12086; pos 165805 to 166582 reverse strand)
gaggtaaattttttgtcctgaaaaagggaaacaataagcaccttattttgtgaatttctattctttgttgcttaactattgttcttcgctgatcggcttgcacttttatggaattttatttatttattttttctaattttgattcacgttttaatttgaggtaacttttttacggtattaaactgaggcccaaattttctattctcctgagggtttcaaaaattttcccgtttcggatctattcgcccctttctatttggatttccattatctttattttatatttacgagcactagcaattctattatatggtagagcaagtatattcatctgtagcacgtgctcttggtgtgtacttgaaattgacaagcatattcagctgaaagttgtcttggttaagaacccattgtccttctgtgcttagcatgtgtcggagatattcatatttaagtgttaatgcattcttaaaggatactataaaagtaagtggaactttaaaattatagcaatgcacggttgcgtataactcataagaacatgttcaatatttgttgccaatggcagaatttcttagcttcaatttagtgtatctttgtataggttctggcgttctgcatttgtgcttatgcaatgcacataatatcatgtgcatattattttttttattaaattttgatgttgattctgtcataacaaagacattacatggttattttgatgtgagaaactgtgactcctgcagagaaaaagaagcaaaagctttctgaagttagaact

SEQ ID NO: 45584 - DNA, 512 bp, Manihot esculenta
  Intron number 1 from transcript cassava4.1_009218m (locus cassava4.1_009218m.g) derived from phytozome v7.0 (chr-ID scaffold07520; pos 2432880 to 2433391)
caccagaaactgtgcagataaccttactttatattgtgagtttctctttattatgtctttctgtttcatgtgattgacatttgagttccaaatcctttttatttgtttggctctaatcaactcgagaattttgtacctgctggaatgagcatttgtgtggttgatgactttgaagtgtgaatgtagacttagatttgacctcctttctatttttgccattcaccccaagctgttgtatattttatctgtttaatctcttgggagcactgttagcatagggataacttttattttgctgttttaagtggagatggatatggttttctgattttagattttcaggcatctatttttcttagtttatttgattgtttactgaactgtagatcgattcttatctcttcaatttgagaatctgttgctgccttccttcagagaagtgttctctttatagctctttcagttattggtgtgtaggaggggagactggtggagtttattggaaggagtgg

SEQ ID NO: 45585 - DNA, 507 bp, Manihot esculenta
  Intron number 2 from transcript cassava4.1_006391m (locus cassava4.1_006391m.g) derived from phytozome v7.0 (chr-ID scaffold03386; pos 193923 to 194429 reverse strand)
cactcttcgaccttcttatcttcattttcgaggaggtatgtttggttgctcttctctttatagtgtctcagatagttcctggggtgtctacatttgcattttgaggcaaaagaaaaagaaaattgaattgttttctgggaaagaaattatacagctacaactcagtagttttattccagagattgtttctgattctgtagaagttcatggaatgaactgtttataaaaatcttttattattattattaatgatattgaagatacgttgttgcttatgggtatgaacatagctgtgtaaaaaactgtattttgggtggtttcatagcaaaagcttttgatttttatgtggtatcgcttcttgttgcgatggaaattgattgttggatttcctctctcttgtttggaacgttgtaacatacatgtcctacaatttattgtcatgttattattttaaattttctaatttttcttctattagggttaactttgaacagggtaaggtgtgcc

SEQ ID NO: 45586 - DNA, 823 bp, Manihot esculenta
  Intron number 2 from transcript cassava4.1_008284m (locus cassava4.1_008284m.g) derived from phytozome v7.0 (chr-ID scaffold02891; pos 138684 to 139506)
gatacgtgtctcgctgccgcacctgcatcttcaaggtaatttatttatatatttgtttatttttatacctaattatatttctgggttagagcttaagccttagaggggaaaaaggaaaaagagaaaaaaacctgtgtggtggaacgtcaagtcgtattgattacaagatagctggcaacgttttcttgtggctctttttggtgaaaatatcttttaagtattttggtggttatgaggtcacttagtatttagcaaaaatagacaaggtcatgaatgaagttggattattggctttgtctggatgtttctggctcttctttcagcttctaaaaccactttaattttactcattcaatcgtgggtaattcgaaattgagatcttttaccctagatttcaattctgtattgctgtgttgttaatttccttcagaacttgatgtcattcatgtaccagcacgtcaaataataacagttgtcgaatcttctttgtttccttatcaagaatgtatccatttttacacgattgatcattttcccttttaacttctttcttaaattgggagaattttcttaaactgtggtccttttagtacaatttgttttacttcaagcagtaggctaagctactgtcaacagaataaaagaatatgcttttggatgggaacaacttttaattattgaaggttggtgattgtttgtaagggcagtgagcctttagttttctattattaagattggatgagtggatgctgtttcatttgctatatcttttttgatgctgttccatttgggatgcttgatttgatatcgggtatgtacaggc

SEQ ID NO: 45587 - DNA, 615 bp, Manihot esculenta
  Intron number 1 from transcript cassava4.1_011529m (locus cassava4.1_011529m.g) derived from phytozome v7.0 (chr-ID scaffold08473; pos 15859 to 16473 reverse strand)
ggatactgataatttccatttttgtgtacaagtacgtcttgattcagttctttcttcgttattcttgtttctcttcttacgcgttgaacgtttccatttttagcggtcaattggggtcgttaatagctttccagtttttttttttgccaattcaattagttgcgttttgttctattaatttcatgacctagttttagctttctttgattagtaaattcatatatgttctagatttgaactgcagcagatacatacagataataagccttgggaacttgattgtggatttggttcataactcaaaaatggacaatttcactgttgattagagctgtgcctatcgatttctgatttgggtaccctctgcaatgttatatttcctggagaatttgttttcacctgtctggcttattgtgatcttcaacaaaacatgcaaatatcaaccaattctgcagtaaccattgaaacttgtcttgtttgtttatcccaaaacagttttttttttttacatgtacaaggccgtgagcgatcatcatgaactgatgcattttgggatgttgaatactagttttatatttccatatattttgatctgtatcagagatttggggatat

SEQ ID NO: 45588 - DNA, 943 bp, Manihot esculenta
  Intron number 1 from transcript cassava4.1_023624m (locus cassava4.1_023624m.g) derived from phytozome v7.0 (chr-ID scaffold07351; pos 97076 to 98018)
ttgtccaatccgatctctgctctcttactcgccaggtaaagttcttttcagaaacagaaactcttaattttgaagggttcagaaacatttgctaatgctgtgattacttttgcaaatatagtctctctagtctcagctaccgaaactgaatgttggagttttgaatatcttagctacttgatgattttactgatttagatgacatcagtgatagtttgggatccgttgtcttcttttccgattacctcaagttattcacatatcgtattagataattcagtgaaaacttttagttggatcatgattctgtgtttgattagatacaatgttgcttcgattgatgatgtttgcatgtgttatatgtagaacctttctatagagaagttagaaaaggggagactgggaaaggaatatgggacctatagagggatgtcgtgaaaatttgaggtggtttctgttatgattggataaatggcaattccttgtttcttgtcttctatttcaatagaatagaaaagactggagcatgcgccatggaaataaattccttgaattgccttatttaccggtaatattcttcatgtgtgcgtcaaaaccttatgtgttcccctagcaccagtttcatttgggcagcaaattaggaaatccaggtaggggagcacgttggaaacacagattaatagattggttaaatgatctgactttattttgaagcttataaatgatcctgtgacggtgccataaagtgtagatgtagtgcatatttttatagacctgaagaagcagaaaactgtgcaaatctcattggcaaatatacatctgttctttctttgtaagaattgattaaatgggaaccagtttgctttcttccagaaacggcaaaattttatgtgaatgaaaatgctccatgcatgcataacaattttattaatttgacagattg

SEQ ID NO: 45589 - DNA, 419 bp, Manihot esculenta
  Intron number 2 from transcript cassava4.1_002187m (locus cassava4.1_002187m.g) derived from phytozome v7.0 (chr-ID scaffold07351; pos 536924 to 537342)
gaagcgtaagtgccctctcattttccatattttcttggattttaatatgattaatatttatttatatatatgctatacatttatgaataatcaatacttgtatgtatcatataatcaattttgaacttaattttggtgcaattggtattaggcattttgcctaacaatatatgtatttagtttttctatgcatgggatttgctaactcctgtgtttttctagggaaaatgaattaatttttattaattaatctatataaatataattattgcgagctataatttttgcccttggttttcatggctatatcaaataacacacacacaaaaagaaaaaacattcttttcatgttttagctctaaagttgattaaaatatggcattaaatttataggttctttaaagagtccccacatcctg

SEQ ID NO: 45590 - DNA, 577 bp, Manihot esculenta
  Intron number 1 from transcript cassava4.1_015188m (locus cassava4.1_015188m.g) derived from phytozome v7.0 (chr-ID scaffold07520; pos 2445471 to 2446047 reverse strand)
tttctctgcgatctttaccttcttctttgctttaggtttgtattatttctttattctgagttttctttgacattgtgtggatgttcttcggaattcttctttttaatgaaatttgtgtatttcttaattgaatgggattttgatgcttggatccgtttagtgttctcagatgtgggttctaatttggtgtttctcttgaattattttctttgttgagatttgatgtatctttatgttccatgtgctgttttaattccaggcttgatatgtctttttaaagagacaaatgatatggatataattgtcttgtagggttacaattgtgtttggaaacatttccattttatccaaaaaagattgggatcattatctttttatccatcttcagcaaacgtgtactattataagtgatcttgttgggttccttggaattaaagatttcagccttcattccctttgcagttctctttctttcattattttttgtttttaataagtaaaaagcatttgttgtctttgatcatttgtgctaaaggaattgactttattgtctgcagtgggcaccttgttaggagcc

SEQ ID NO: 45591 - DNA, 877 bp, Manihot esculenta
  Intron number 1 from transcript cassava4.1_019352m (locus cassava4.1_019352m.g) derived from phytozome v7.0 (chr-ID scaffold02658; pos 1040894 to 1041770 reverse strand)
gttgaattttgtacctcgtggagagtgtaatccaggtgcgttcgtctctagggtttcggattttattgtgccccaaaagatgaaaatggaaatgaagatttaaaaatttctatggaatgaataactactctttgcgacagatttgtttctaattccaaatttccaatatgctgaacaatttactgattagtgaaaggggttagctttagtggctgagtgtgcaatttaaatatattgttatgagtactcaaaacattaatttggggtactacttgtttgcaatttggaaatagaaaaaaagaattttatggaattgttacacaaatatgcatgttcccgtccctttttccatttcttggaattacatttgaagttaaaaaaattgtaatgtgtttcttctattccttgtttctgctccatagctgaaggaaaagacttttggaaggatgttaagcaactcaaaagggataggaaactacatatttgtaatgtgcgtatggcagcttcttttcttatgtagtcattgagtggcattgctaaacaaactgtaaaatattttctttggttgcaagattttatacttgtattaggctggtgatgacagtgatagaattgaaatagagaatatggtggtgatattgattaacaattgaagatgacaagggaaattgtcggaaaaagtaaaaattttagttgctcattgtttcagtagaaaacttgcctttatattgccttttatacttccagtcatgaccaagtgggctacttgatggtgttttctattaaagatctaatgatttctatgtcctaattggagcgttggccatatttttatcatgcaggtttaggagaacaggttaactccagtaaaccagca

SEQ ID NO: 45592 - DNA, 610 bp, Manihot esculenta
  Intron number 3 from transcript cassava4.1_018179m (locus cassava4.1_018179m.g) derived from phytozome v7.0 (chr-ID scaffold10689; pos 142571 to 143180 reverse strand)
ctgatagttttcgattacaagctgttggaggagaggtaggagatgaattttcttttttcttttttcttttttcttttttctttcatatttgctataatttaagcaatatttccatatgggaaatctatatttcagttagtttcttttatatattgctaattaatattggaatttagaaatcattattaattttattttaccatttatcttctttggtgtgaggctggctctagcccagtcatctcatgttataggtttgcattgcttatataactattaatgaagtcatgtactgtctttgtacgtaccatgtttggccaccactcaagtagcctctctctctctctgcaataaaaattcagattaatccgtttttgcattttaattttaatactataatctagaaataatttatccgatttgaaaaaaaaattaactttttttcttatatgttttcagaattatttcgatttaccaaaaataaaaatatgatatgtaaattgaatttacaatgtattgaatacataaatatatgaattttattttatatttgattctaaaaaataacaaatttcttggaattgatttggcagaacgaagaagaaggtat

SEQ ID NO: 45593 - DNA, 741 bp, Manihot esculenta
  Intron number 2 from transcript cassava4.1_000434m (locus cassava4.1_000434m.g) derived from phytozome v7.0 (chr-ID scaffold09277; pos 157798 to 158538 reverse strand)
tttccacaaatctcagcctctgtttgtatctggaggtgtggaaactgtcaaattggctttagcattgatttatttatgctgattttgaaccttattgcttgccggaatgactggataatggatcgctcgtgttttgttgtttttagttgaaatcttagttactgatttggatcatagtagggctgtatttgttatggaagttgtgatagagtttacactagatctaggcgatttagtttaaggttagtcgaattctgcttgttcttttaggcggtagtcatttggtaatattggtgcatcaataaaatgtttcaacttagcttcaagaacctgattgtttcacttgactcctaacgtatgggtcttttgtttttttctttctgttggtaccaggtatatagattcaaaatgccatttatagttaacagctgtaggtctactgttttaagctattttaaatctggatctaatactcatttcttttcctgtatgctagtaaacactaatgcgttcctttttgtcaagtttaaatctaaagatgagttaaatatttgagtctgtcttttgtagttttagatcaagtattacttagtgtttgaaactttctatctaaatttttttagcagcccatagattgacaagcagatgttgatttggaatattattgaaatggagtatttatttacattatcttctaatttttttaaacctatttcttggttattgattgttgtgcaggtg

SEQ ID NO: 45594 - DNA, 924 bp, Manihot esculenta
  Intron number 1 from transcript cassava4.1_015486m (locus cassava4.1_015486m.g) derived from phytozome v7.0 (chr-ID scaffold11001; pos 247704 to 248627 reverse strand)
ctccatctgcgctttttgttccttctcccatcaaagtacgcctccctctctctccctctctctccctctctctccctctctccctctccctctctatatgtatgtatgtatgtatattcgtgggttgccttcgtatttttgtagtacttctaattcaaaaatcaaatctgtttagcaaggttgcccatgttccttggttgacttcaattataccctttaggttttcagggtaatttttttcttctgaagtttaattttggtttgagcacagctttttccctcttggaagatctattcacatgctattaacaatgtgggagctaaacatttgtagtttttaatctgtgttgtcccaaatggtgttctttttggaatctccagctcaagtactttgatggaaattaagcagttgggccagtttgaatatgtttcgtgctaactctccaatttatgatctcatacactatgatgcaggacattcttaggcttgtttacttgcacaacagttagaacactgcttatcaaataataattcattaaattgaagtgaaaatgttagatttatgcaagatggagtttttttagtataattacagtgtaggctcgattgcgttggttcctccaacaaatttttgttttacatttatgaaccatccagctgctatatagctcgtagttgagcttatttttcttaggtcatatactgttgcaatgccaatgacattagaatatagaaggaagaaagtttaattttaataaaaaatatcttattatttcagctatgtattttttatggtaagttcacaaatatattaaaaatgcttttttttctctttttttaatttttgaattgttattgctttttttcttttttgctaattgaaaataggtgtgtgacttgagaaaattgattgctgaaaataa

SEQ ID NO: 45595 - DNA, 539 bp, Manihot esculenta
  Intron number 2 from transcript cassava4.1_010740m (locus cassava4.1_010755m.g) derived from phytozome v7.0 (chr-ID scaffold02658; pos 723583 to 724121)
tttggaaattctaattaacagatccattgcttttggtaagtttttctcgatcgatttgctttgctcgttctgaatatttaataacctaaatcaatttcttgctcttgtttctcttggttttttatggtttaatttaacaattggaggcatgaattggaactctttatgtccttgtttcgctgcttcttctagaactgaatagattctaatctggtacaattgcagttgaattttgatttgctgtttctctgataagaatttgaagtaatatttcgtaagactcagatggaaggactggagttatatttttattattcttattctcttgtgggtgatttcatgattttttttcatgatggtcatgtgttgctagtgttcgcaatcattcaatatctgcttgcttacagccaattttcctgtatatttgtgtcagttttggtagattttatagatttcttctttattcatggaattcctgtgcctttttgcaatagtttgagttatttagttttgctgtcttctagcagttaacaatcaag

SEQ ID NO: 45596 - DNA, 498 bp, Manihot esculenta
  Intron number 1 from transcript cassava4.1_019156m (locus cassava4.1_019156m.g) derived from phytozome v7.0 (chr-ID scaffold08873; pos 388185 to 388682)
cttcattttccgaatcaatttaccagctcagccaggtgtgttgatttattcacttttcatcatctaccatgctgaagatttgtgctggcaaatctaattcttgcttcttgattttcatttattgctaacaagtttgaatatttggtttgtggttcctgaattagcattcgaagttgttctatattgatgcttttatacagtctgtatgggaagttttggttcgtgatatacgaacatccatattactgaaagtttatacttaaatgaatcccaaattgattctagaggatgttcttgagtgttatatgaacatgtttacaaaccttcctgtgagctagcttttgagatagggttaaaggaagtcatatcattttatgtggtttaccaatttggtcatttcatatagactgacggtttgaatttttatggcaataaacggggagattggttctgtttttcatatacttctttttttttttcaatctcaggttatttact

SEQ ID NO: 45597 - DNA, 565 bp, Manihot esculenta
  Intron number 1 from transcript cassava4.1_025029m (locus cassava4.1_025029m.g) derived from phytozome v7.0 (chr-ID scaffold07827; pos 53752 to 54316 reverse strand)
cagcaactgttgagaccattgcaaactttttgcaggtaagtttctgatttttcatttctttcattcaagtcattgcttgtttggactctggggaattttaagggagtgttcgttgacctctttcatttttatttctttgtttttgcattggttatctattcgatttatttctagaatttgttggaaaattctgagatttttttggcatctgggtatgtattcttttgccattttctcacacttgcacgtgtaaagatatgatatttgataattatcagcaaatttgtgatggtgcataactttgcttaacaaccgtagaatgcctcttacctatccatcaccttcttttctcattacggttaattacttttaaatgactggatttcatttggctaagctactcttgagcattatacaaggtttggtatcggattgctttgattttgctaataatgacattatgttaatatcaattgactcgatgaaactccttgttcatcatgtgtttttctaatattttgatgtctccttgggaaatatggtctataggaggttggttgcaatc

SEQ ID NO: 45598 - DNA, 949 bp, Manihot esculenta
  Intron number 4 from transcript cassava4.1_024014m (locus cassava4.1_024014m.g) derived from phytozome v7.0 (chr-ID scaffold01426; pos 26739 to 27687 reverse strand)
attgggatctgaaagatcatttcaagctcttgaaggtatatgttttgaatttaattgatgtaatattcccattggcaagtagcagttaatctaatagacatactaatgcagctttcccaaattaagaagtgttcatggagctttacatggagagatgaaaacaaaaatgattgaaataaatacatatttaagctggttatgaaacctatccataagtaagataagtgtaattctaattcaaaacccaggttgcatttaactatatttacaactaagaatatttgtttctattcacttttgttaattatgtggcttgaattctggttatgttttcttatgggctgaattgtgatttgtcccgaaaagttccgtgtttcaaccccaattgtatagaaaatgggaatcagtgctggagggtatgaatattttttttttccttgccctgtatgatgtgagatttcgagaaatacattgagttagggttagggttgtaagagcatcaaatcacattaaatttcttgtgtcttttcttttttctatttttctatgattgagattcatcatatcacattaaatttctcgtgtcttttctctttttctaatattgtgatcgagagtgtgtgcctagtattttgcatttgttttaacaactctgttatcctatattttttaaccttgtacaaaattcattatcggcaaatcttgaagtggttaacttctattgcattgaatttggaaatttcttagttaagaaattgaattgattacaagcaatttaacatcttacatatcataggaatattcaattttttttttctagaaaaaaagcccctcttttagagtaatcaatgatgcattgtcttcaagttgaaaagtttaatattttttcagagtaaaaaactcagatttctccctactcttcaaaatcattatggattcaggagttgca

SEQ ID NO: 45599 - DNA, 742 bp, Manihot esculenta
  Intron number 2 from transcript cassava4.1_025121m (locus cassava4.1_025121m.g) derived from phytozome v7.0 (chr-ID scaffold09576; pos 5242 to 5983 reverse strand)
ggttagtttacaaaaggaataacaaatataagtttgaactatcataacttcagtcctacatatttgaatttaatcttttggatcagcagttctttaacatccttgatgcacctggagaatttactcttctacatgatcatagtgaactatagttttaaattgctttgcttagatgtgcttcacaaataaacgtagtaaatggtccagttgtgcatagcaaaccaagcaatgttatcttgcaaaacgaagtcgttcttgctatacacaaattcactgttccgttcattaaaagctcttcaaatttatagtgtaataaatgtgtgtccagttttttttttctaattttcgcttcaactgtttgattctgttatccctttttttcctaaattcgttttgtttagattttgtacaatcctgccactcgtttggaagccgagactacatgccttttattccttcaatctcctttttttttttatgaattgtgggattccatctttgtatgtctctaacttctttttcctgcaaaaatataatctttaggggatgtttgatgttaagaaaaatagactaatagtgacctgctattcaaatggcaaatttgttttgcagtttgtcagatggcaagctgcgagacattctgattccaatcaagtgttttctctttttgttttactaagcaagtaatcatctcttaagtgctaaccagatctttgcgtacttccaaatcacagtattctat

SEQ ID NO: 45600 - DNA, 992 bp, Manihot esculenta
  Intron number 2 from transcript cassava4.1_007397m (locus cassava4.1_007397m.g) derived from phytozome v7.0 (chr-ID scaffold11179; pos 146699 to 147690)
tgggacattgctcttggctttcttgctcggctcaggttacatcacctctattgtcttttgcttctccacatagtttgggcggcttttgtcttgcctatctcaattatcatctctatatggatttggaatcgtatatttttgttcacataatttacctaatgaacataaatataagcaattcttattaaggataaggtggaattggaacattttcctggtatattttgaaaagtgtttaagatggtctttgaaattagaacaggcgaacaaagtattgtctttatatgctagctaatacgtacattagagattgatgacaaagaagttgtgtgctctgagcagtgtattactgggaatcaaagagtctgacctatgtatcctttttggattctattattctaggctagctgatggaaccaataggatcctagtgtttgagtggaggtgtctgtgagttcaaggatgttaatgacggctcacattatgaatgactagcatttttctaagtcctgtaagtttctttattatgtttatgtgatttttatctcaagctctttctttttaatttcctctgttttcctctatacaattagtctataaaacagctgtatttgatgacaatgacatcttctaagagaataaagagctatacataacattgcataaaactagtcacataaaatggattttctcctttggtatgggagcttttactggaaaatgactctttgagtacacgcacctcgcaaaggaaccataaagtctgtgtggttggctctaaatttaatagctatttgtcgtctccgtataagataggaaacatctggctatttttccacataattaaccatttcattctgtaccttgtgcattttctacttttattttcaaaaattcatttatttcatttatatgcttttctaccattattattgacttgaattttctgcgtgacagttgcaaccatacttggaactacagtggcttttcta

SEQ ID NO: 45601 - DNA, 410 bp, Manihot esculenta
  Intron number 1 from transcript cassava4.1_018560m (locus cassava4.1_018285m.g) derived from phytozome v7.0 (chr-ID scaffold11998; pos 1553044 to 1553453)
agattgttgacttcacagcttctctataccgagaggtcagtttgtgttcacgtatggagatttctatatatgatcgaattttctccttgttccaatgggaagtctgttcgtaatccttgtttatcatgattcttttttgcaagaaaaaatttcaaataaaatcttaagattatttttaaattatcaaggaaagaaattatttgaattgaattcttatcaaattttttattctaaagaaaggtaaaaatcttttctttgttggtatggaataaaaatttcatcttaggtcttttgggtttgtgatttatttggatattcctaaaactgaatgaatttcctagggaataatttcttacataaaatttttttgagtttctgctgatggatttctgttggatttgagaagggat

SEQ ID NO: 45602 - DNA, 909 bp, Manihot esculenta
  Intron number 3 from transcript cassava4.1_009735m (locus cassava4.1_009735m.g) derived from phytozome v7.0 (chr-ID scaffold07413; pos 171763 to 172671)
gctgtaaaggtagtagcttaagaatctgcagattcgatactgatcttgttgggcctttgctcttccttttctctttttaagataagattcgttggtaaaaaatagatttgctactattgagactctgatttttcttcatgtttcaggaaatatcatgcaagcctttccttttgctttttgaataggacaagatattatattttgtggaatattctttactgtgcttgtcctatcctatctcacaatttcttaatttattattttgtacaaaatatttctgaactatctgtctactttgtcgtgctctcttaatcgtccatcataattaacccagttcgttatttattccaaaagcttcaacatttcaggcatttaaaattttatttgtgcaaggctgatccaaaacttcagaagggaaaaaatctatcctggcctttgttttgctaaaaaataaaggctgccccctcacctttacacaaaagctcactttaccatctccattttgtcttcatcctatttactccaaatttcaaatgctggaataacttaatccctgcaagtaacctgttatataattgaagattgaagggtgatatgcacttactctcacgttgtatggatcaatttatttgcaactttttgtaaaaatgtgaaggggtgactaaaaagaaatgataatcaacatcattgcatactaatgcagcttctatagtaattggcaatcctacattaccatacaatagtgtttttgttcctaacttagggtacttaagggattaaagggaattttgtttcaatatgttatttgacgtttcttctttattcagtttgaaccttttttggatacaagattatttgattttgttgcttgtaggcgatttctggtcctgcatctagtgctgacacaag

SEQ ID NO: 45603 - DNA, 775 bp, Manihot esculenta
  Intron number 1 from transcript cassava4.1_004141m (locus cassava4.1_004141m.g) derived from phytozome v7.0 (chr-ID scaffold10689; pos 647410 to 648184 reverse strand)
ttaaacgtggggtaattttacttctaattgcattttactgtcaaattgcgggaattcaatggcttaagtgaaatgggtttgttgttttcctccgtttttgttgagtactaatttgattgttagctaaagttgaaagttgctgggcttttggtttttcttgggatcattagagatttcagctataaagatattttgatcttttctttttccaattttgttcgttttcgtttttaactgttttcactcgagttaatggagaataaggaaagtcaagaactgaagattgaatagaatttagctccaaaagcacttcaaaggaattatcttctttttctgttcaatgggtagtaattaaaggcattgatttgttcttctttatgactgatacaattgtctaagcattattgaatttttgtactcaaatgttttttaattagcttaacgaattcctgcgtctccgtaagcatgtttttgatcggcttatgaacttgtccttgttcaacatttgtatatgatatggatttatctgtcatttaatagttgccatggctaagagtcgtgttgaagtggatcgcatattagtttttaagtgcagttataagctagaaatgttttggaaaggacattgatcattgcctttcttttctccttttatgtctaaattatgtagttgtccatttgattgcagctttctatctctttaacaacttgaatcttcatttttgttattatttttattaaccttggtgatcatttattgggtttcaggtgcacc

SEQ ID NO: 45604 - DNA, 607 bp, Manihot esculenta
  Intron number 1 from transcript cassava4.1_017726m (locus cassava4.1_015471m.g) derived from phytozome v7.0 (chr-ID scaffold07478; pos 27595 to 28201)
acaaggtttcattagttcatctaacaaggaaacaggttctatttcaagcagagcccactatttctacagtttgaataaaacccatattttgttttcttaggattgtgatcaaattggattatttttggtgttctaattgtaattggatatttaatttaagtgattttgaaatatgtacgaactaattaattttttaaaaattcaacaacttaataataatttaattttttaataagaataaactactattttgttcctcacttctgccatgtttagtcctcgactccatgtttggtagagatgagtcaaagcttctttggattatagaagtaactatgaaaaaagattagttataaagtagttttcaaattctaaggttgcacctcatgctgaaagcttacaacttccagagctcactttttgctgtctccactgaatggatcttccaacaggaattggagttagaaagaaaagaagtattcattggtttattttaaaattatttctcaagggaagacaaggtgttaggcaggctcaagcttgaaaattaatgcaatgagaatctgttgcaggatatttgcaggatctggtttacaagctgagcaaa

SEQ ID NO: 45605 - DNA, 500 bp, Manihot esculenta
  Intron number 1 from transcript cassava4.1_021573m (locus cassava4.1_021573m.g) derived from phytozome v7.0 (chr-ID scaffold07520; pos 2869289 to 2869788)
gacaatttcgacaccgttgccgttgttttcaacaagttcgatctttttccctctttactttttctttctgttcacaagtagtagcgttattctttaggatgaggatggtcgtacgagcctaatttacattttctttttcataaaaaatgatttcgtattcgtttttcccatccccccctccctttaggcattgattagctggttaatgtataatttcggagtcatgtatatatggacatgttatcctgcttcgctttttgtttgacttggttttttgctttgcttttggcatttatttgtttggtgattgcgatgttgatggatttttttattttatattttgtgtgaacctattgtacttaccaagatcatcaagttactagttagtatatgtttgcatttagcattagaagaacaagagtttttatttttttttattgattaatttttacaaatattgtgcaggtcaagcagattcgcaaagctacaaggtgtccaat

SEQ ID NO: 45606 - DNA, 903 bp, Manihot esculenta
  Intron number 1 from transcript cassava4.1_032578m (locus cassava4.1_032578m.g) derived from phytozome v7.0 (chr-ID scaffold03722; pos 36370 to 37272)
aagttcgtagcaattcggttattgaagttgtggttggacttgaaccacgttaagtactagaattaatcaagtttatcttagtcttaattaagactactagttttattaggacaaaaataaatgttagatgctactctttttatcctatatgtaatgggaaatatatatatataaacatatgagtggtattcatgaaataaataatatttttcccacttttcattcatgagaaattagaaaattttttttcccacttttcaatctatctcaagcttaaatactaaatcgatttgctaattcagtcactaatttcttgaaatgggcaattcgatatgggtttcggctaattggggatggcccaagttatgggcaatagcccaaagaagataatagtggctgcagcagcagcacaacgtgatcctctatattccaccgtgagcagacgagcgtcgcccattttgcggtgtgaaaaatctctggaactggaagcttcaactgttatctggtctatcatcttctcaaaggagtaaatgttgccatgaattcactgacagcatctcaaaagaccaatacccacttggagcacattcactgatataaataactacattcaagacattatatttgttatcaaatggatgctggaaggactttgctttcttctccccaacatttcctcgaagaacccacctcaagagttgtctctcttctcctggtaagatatagaatcattgcaatttatgaaatttagttatagttctataatccgttttagttcttgtctcatttgattttctgccagacaacagaaaagataatgcctctgaattccaagatggtcaattggctcaaggcattttggatttttaattatttttctcttttctgttcttaagtaagcca

SEQ ID NO: 45607 - DNA, 628 bp, Manihot esculenta
  Intron number 1 from transcript cassava4.1_010130m (locus cassava4.1_010130m.g) derived from phytozome v7.0 (chr-ID scaffold02978; pos 224576 to 225203)
atcaagtccccggtgaacgcggtggctccacaaccgtaactacctttttgtcacagctactcttttgattcaaattccttgagttttgcttaatttccatggttctgcagagatttctgctgtttaaatatgcattgctacaatatcactcttttctcagctatatttattctttctggcttttcgtatatttttgcatacaagtttgcgcattttgctctggtgtttttaattacttcgcacatgtgggctcgaatatcagagctttaatgagggaatgtagctttcttactcagtttgtatcactttaattaaaaaaaggtctcctaagtcttaattataattaaatattaccattaatgtctgcttgtgatttagctgaaatttttttgttgaatcccaatgccatctgaactttaaatgtcccattgttacggttgtctgtttcttctttataatattttaacccctttttttttgtttcattgtatgcataatggtctttattcttgatcagatggtttttttattttttgttatttttattattatatttttgtttaaaaagaattaaatttttttgggttgtgcaggttgcaattcaagagcttcagcgcattttgggaaa

SEQ ID NO: 45608 - DNA, 550 bp, Manihot esculenta
  Intron number 2 from transcript cassava4.1_023666m (locus cassava4.1_023666m.g) derived from phytozome v7.0 (chr-ID scaffold10797; pos 172786 to 173335)
gaagcgtacgtgtgctctctcattttccttatatatatatgtatattgaataatatttacagttaattaattttttgaattataaataggtgcaaattcaggcaatagacatatatagtgtgcatggatttggtaattgctagttgtcgttttgctgattttagagccaatctgttactctttctgtatttcttagcatttcaaatattcagaaatataaattaataaagcctaagtctaagaaacaagaactatataaattttcagtattgttgaaatacttaataaatttccagttttgctagggaaaataaattgattattattaaagcatatacatgagtgtattacaataattagcaaactttgtggttaagaatactttagcatatgatgtctacagaatctatttttcataatttaaagaaaaaaaaaaaaagaaatgcatatttataatgtgttagtgaataaaaaagtggtttgtgttgaattaaatcaattaatgcattatattaaatatgcaggctatttaaagagtccccacatcctg

SEQ ID NO: 45609 - DNA, 369 bp, Manihot esculenta
  Intron number 5 from transcript cassava4.1_032853m (locus cassava4.1_032853m.g) derived from phytozome v7.0 (chr-ID scaffold11106; pos 185354 to 185722)
ttacaatcgagttattaacgaaactataagaaaaggtgaaatattaaatcctttccttttgggaattcagaataatgcatataaattttatattagacaacattttcaaaatggttatattaaataactatgtgcctttaaaactttttttccaagttaagataataaaataccaaaaagttattgaaaattttgaacagcaacaactaattaaataacataaatgttgtcccttagttccttaattatttaagaaactctatcttctagcttatccgcttatgcagttagaaaattatatcaaaaacctaatttgttttgttacaaaattcaggtttggaaccttttgttactatttttcattgggat

SEQ ID NO: 45610 - DNA, 663 bp, Manihot esculenta
  Intron number 2 from transcript cassava4.1_010634m (locus cassava4.1_010625m.g) derived from phytozome v7.0 (chr-ID scaffold00772; pos 307979 to 308641 reverse strand)
tctggagttttatcaccatacaagttcaagcgcaggtatgtttgatgcatcttactctttatctatgaaaatttacagaaatggtcttttccaattgactgtttttgttgtctcatgcctatgtcctgttatataacgtttggtttcatttttcaaatactaatgtcaaactttgtgttttcttggcatcttatgaaataacacatgatgtaaagtgatgtgatgatatagacaacctggaatataccacataagttctcagaaaattgttttagattcagattgcttaagataaaagaaaaacaaaagcttcacaagtgatgtcccagattatcttgaatcactgacggaatgaagcccctttttcaaaaataatgttgttatgaaaaaaaggtttcctgcccaatactgatgttccaacaagtaaaagctggaaattggggtattttttttctctctttacaataaattcttactttctaactgttagtactcagcatcatatttagaacagcagcattcttatggttcatcaaaggcctagattcactgaggatggtatcactcctttttgaatttcattttctggtctatcagtttgataacttgtattaatgatttactagctaatcttgtaaacgcttttcaggactactggggaag

SEQ ID NO: 45611 - DNA, 469 bp, Manihot esculenta
  Intron number 1 from transcript cassava4.1_029478m (locus cassava4.1_029478m.g) derived from phytozome v7.0 (chr-ID scaffold07506; pos 1639 to 2107 reverse strand)
ctactagtgaaggtgcatgctacttcaagttcagtgtctttaattacaacaatgtctttttattcttgaagttaaatgtaaatcaaagcttttaattcaggaatcatgagactgaaaatgctttataacctttcatttagccagaatttgatgattataaagtttatgcattaatattgtgcttctagtgaaataatcctcaagcaaggaagttgcatctaaagccttaggattcaattcattttttttctgttccttgtactgaaagttagatctctttagaagcacaaatttcacaagtggaaacatatgcatattatgaagaatcttgatgtctctttcaatttattactgagaatcttgatgtttctcggcatgaatttcagtcttgctctttgtttgcaaatttttgctgactttttttactgatgcaggattgtcattcacttatcaattgttgtatctgctt

SEQ ID NO: 45612 - DNA, 976 bp, Manihot esculenta
  Intron number 1 from transcript cassava4.1_012725m (locus cassava4.1_012725m.g) derived from phytozome v7.0 (chr-ID scaffold04457; pos 1306302 to 1307277 reverse strand)
ttactttcaaaagccttcaattctctcactaacaggtatctctttctcgcctctcctcccatctaccgatctttttatgcgcttatatgtgtgggtaattagctgatttgtaatagtcggtatctttgttatggagggattgttgatgctttgttgtttttggccgatttagttgttgatttgaaatggtgattttgtttgggaattaggacggatctatttgcttgttatatatattggtgtgttattatgaggtctatgtaagctgttcagatctccagatcccatcaattgatgataaaattaagcaaaatcaactttcagcttcaaatatcacttgtcaactattgaaaaatataacttaaatgctcatatatggattttgaatgactgatctacatacaacaccggatcaaataactgatatagaaaattgaagccttgaaaacttaaaaatttctcttattaccttgaattagaaagcagatctcttgcacttggttatgtaacagcattgtttcagctctttactaggactgcgttttcacttctattgcattttcccctgctcatagttgcatatctgtcaattcacttgatattgtatttgtttcatattaagacttttatggtttcactttaactggtgcatgtcggtcagtgattaaaatctatttatatgcatttatgttatattttttcactcgatgattattgatatttgaggtaaagaaaatgttgggtttgctagactttatcatcaattgatgggatctagaatttgatacggaagccagggttctgttaagtgtcataacacatgattttgtgatttctggtaattgaaagtgtatggtaagaagaaaattggaattctgaatttttatttatttatttattttggcgttcatatacaggagaaaggtacaatcttaatataggagctatctgaagtgctgtataatcaatagagaaa

SEQ ID NO: 45613 - DNA, 796 bp, Manihot esculenta
  Intron number 1 from transcript cassava4.1_017898m (locus cassava4.1_017898m.g) derived from phytozome v7.0 (chr-ID scaffold06158; pos 185522 to 186317)
actctgcaccgtacggactctttctttctcacgcgtgtgtgttcacacactcgcattataagcttgtttttctagatcttgaagtgtggttgggttattgcactttaacttgacatttttgcgctttgacttagagtttttggttcgttattcactcgtaacgttacttgaataatggagaggggttgctttttttctttcttttgaagtcgtcttcttttttactgtgttttttatttaaacaagccttttcctcaatattgacggttcatgacctagcttcgatcatgttttcctgtgttttccttcgcatgcatgtcacgtttatgccatttcttaccaatattggagattagaagccgaggctgattcttagcttgtagtttgctcgtcgctatgtttcaccaaactatcttaatcttggcctactcgttactttggcgtatttgattgaatccgactgttttgagtttcttttttttgaaatggactgttttgagtttctttatagttcacaatacctaggttttttctcgttgtttttttttctcctttcgcatcttctctttttgttctttggcttcattttctctcccttatgggccatattcttttccctttattttgactacatgtgatcttgttaactaggctggatttagtgatccttgtgcgatttccattttatgcttgtacttttgcttcaagattttatttagcgagtttttgatgctgtagctgcttgaccgtggtttgagcagggtgaagactgtggggaccggaatctctctctgct

SEQ ID NO: 45614 - DNA, 650 bp, Manihot esculenta
  Intron number 1 from transcript cassava4.1_016061m (locus cassava4.1_016061m.g) derived from phytozome v7.0 (chr-ID scaffold05494; pos 249260 to 249909 reverse strand)
gatctgggtttggtgtcagcgaaaaggtacttcagtttgggaagtttttaaatttttggttggtttcttaggttttcaaaatttcgttaatttttggttttggaaaaagcgcgaaataatttttttgaggaagatttaaatacggtttttttttacgcgattaaggaactccttgaattgcgggcctctgcaatagaaactctagaatttcagtgaaagcggttgacttagtctggtcatttcctttccttttcgtttccatttttcatggaaaatttgttggttattttgatttttgaaaaaattattttctttttttttcttttttgtatttgaatatattctgtctcttatgagctgaaataataatgaatttttgactgccatatctaataaaaagcataaatttgtcttgtctttagttattatttcacctttttttctctctcttttatctataattttccctttttggcgccttgaaatcaatcctactttcccatttcatagctactttgctttgcggttcttcacctattacagttatataaaaatgaaatttatttttgttctgctattttctgttattttcttaaaaaattatatatatttcaggaagagaagtctgttgctggcgcaaaccccacaaa

SEQ ID NO: 45615 - DNA, 1023 bp, Manihot esculenta
  Intron number 1 from transcript cassava4.1_015968m (locus cassava4.1_015941m.g) derived from phytozome v7.0 (chr-ID scaffold06916; pos 44732 to 45754)
ctattggtgtcgagttcgccactagaactctccaggtacacatccaatattttctctatccgctgtcttcctttttctctctgcatgtttaagacgatctgttcatctactggcgtctgaatcgtatttttgttcatcggttaacggaatatttgatggttattcgtgtgatgacgaaaatgaaatttcttagatgttaaggatgaatatatttgcaggtatctttattttttttgttttgatattggctattggtattgcgacggcgattaagtgactctgaccagttgcataatggagttgactgtgagatattagtgagtgagagaaattcttcggattctgcaaataataagccttaattgaaggtcaggactgtggggctctatgctataagagagagtttgcatgtactctcatactgttaacagtttcatttgggagatgcagagttttgatgaagttttcaactggtctttgtgcaatgaactatcattaattaatttgttttgataagtaaagtacattattttccctcaaatgcttcaacagtaagttttggatatctaggatcttcttatgtggaacttagttggttgttcactttagttgcgggtgtgtgattgactgatctttcgttaatatggccaactttctcatggtcagaaactacaggatccattctagagactaaatggattttttccaagtgatatttgcaatttataaaataattacttggttctttatggtaatctgctacatggcattccatcctctcaaatgcaatgtccattaaggatctgaatgacaattgacaccttgcatctgggtatgaactaggtggtgaatgcttatgtgggagtgggtatcatctatgttgttcagattcgtgctaacaaggctatagctgatctataattttttgaaagtcttgtgcagagatattgcaaattgatttagatatatcttttccccttttcttatatatatatatacatatgttttttctattgcaggtgg

SEQ ID NO: 45616 - DNA, 507 bp, Manihot esculenta
  Intron number 1 from transcript cassava4.1_011224m (locus cassava4.1_011224m.g) derived from phytozome v7.0 (chr-ID scaffold02973; pos 52581 to 53087)
atttatcaaactaggccacttccagttctttttcagtaagttttctctctcctatttttcttacagtcttgtttgaatcttgattcctgttggtgggttgtgtttttttttttttctttagtttcagttctggtttctttcttttggcttttgttgtttgatcaaggtagatatatacaggaatcttttatgaataacagggttctcttggtataagattaatgagtttcttgggaatttctggtcttaattttgcatcagcaatggtgaatttggatggatgaagtcaagtttgggttgaaattcttactcttgtataattgaatattttgaattggcaatctggggaagatctgtctctgcacccaaacaaaagagatcttcaaaatcaacattagttggaactgtattggatgtttgcaattccaataagtgtggagatctttttggaaccggattaatattgctttcgtgttgtagccaacatgtttgttctttttcccagca

SEQ ID NO: 45617 - DNA, 463 bp, Manihot esculenta
  Intron number 2 from transcript cassava4.1_014626m (locus cassava4.1_014626m.g) derived from phytozome v7.0 (chr-ID scaffold12946; pos 421740 to 422202)
aagcaagcgtcagcagttttctcctgaattcaaaggtttcttctttcttctttgttttttattaatttcttgccttcattttagggtttagttttaattctgtcacagttattttttgcattaacattgacgtgatgaataatataaattacttcctcaagtaattttgaattagagatactcttttaatttggaaaaaaagaacataagaaaacaaaaattggtgggattaaagctatagcaatcggttttcagatgaaatcctctttatttctgtataagcattgttaaggaatcatgtcatccgtctgacatggaatggagagattagtgtcattaaagaaatgaatttaaattggcaattgctttttcaccatgggcaaagaaagcagtcgctgcttgtaattcctttttctttttctttccttttttttttaatattgtgatttcagaaataaatcct

SEQ ID NO: 45618 - DNA, 741 bp, Manihot esculenta
  Intron number 3 from transcript cassava4.1_009230m (locus cassava4.1_009230m.g) derived from phytozome v7.0 (chr-ID scaffold07520; pos 782029 to 782769 reverse strand)
agtggctttgccaactttataagccaaaaagcgaggtttgtggattagatttttaattattgttagagcttatttgagcatgtccatctcttgtctggagtcttgatgacttgagttgtgttggagaacttcataaaagctttgccctgtgtgagcacatttttgtaatgaagtattacatgaatctgttaaaccattcaaaggaaaacaaacttgaattaagttttagattaaaattcgggtgtaatgttgaaatggatggaaaaaaatatttatatatttgactataaacgtgaaatttgttaatgtagttggtggcattgcatttctttatttatttcatttgttgaattctgtagtaatatttgctattcatttgatgttagttttgtttgttacacttggaagatcttagctttaaatgcttgaagacttggtttattttaagatgccaaaaaagcaagaattaataaaatatggagaaaatatgtgatgcaatagtttgtgatttatcctatgaaaacttgtgcccaaaacattaatgtttttcaaataatgcaaaattcgcactttaagttattacaaggtaagtttattcaaaagatatataactttgctaataaacagtcctatccaatactttgaatataacttgacaatttatcttgctattctattttttatgcttgctgcatattatatcaaattatcttgcccaggtttcagctttcttggaaatcc

SEQ ID NO: 45619 - DNA, 415 bp, Manihot esculenta
  Intron number 2 from transcript cassava4.1_009230m (locus cassava4.1_009230m.g) derived from phytozome v7.0 (chr-ID scaffold07520; pos 782890 to 783304 reverse strand)
ttggaagattctcctctcacctcaagattggcattgtaattactattttgtgcttctttttttattaattgcttttacactaaaattatattctcttctctgaaattctttattttacttgattgtttaatgtgtcagttgtttaaattttagattatgttttgattttcaagtaaatgaaaagtggaaaaattagggaaaagtttaggttgttgtcttatttatgttgtatattcatgtgcttattccatatctttgttctgcagtgatgcttatctgagattaaactagttttaatgtcaattgtttcctagtcttccgtcctccaatatattttggttttgatgtttcttttggtaaaaaagatagaaattttaagcttttctcctctgtacttgtcaggttggattaccaa

SEQ ID NO: 45620 - DNA, 306 bp, Manihot esculenta
  Intron number 1 from transcript cassava4.1_004893m (locus cassava4.1_004893m.g) derived from phytozome v7.0 (chr-ID scaffold12086; pos 187976 to 188281)
gcacctcagtcaagtaggttttggtacgtctttcattttatggttgtccgaagttgaagtatgtgcataaaggcaataattttttgtccttggattttgcaagtttcttcatgttttagggggtggtgccaagtgaagcattctcaaaatgcaaacataaatagaaaactattctgtttgattggtttaccaatggaacaaaaaagtttaaccattggcttcatgagctttacagctaggcttaataattgactttaaaattttgttgcaggagttcgccaagaggaagcttggtttgattcagtc

SEQ ID NO: 45621 - DNA, 1033 bp, Manihot esculenta
  Intron number 1 from transcript cassava4.1_024359m (locus cassava4.1_024359m.g) derived from phytozome v7.0 (chr-ID scaffold11584; pos 103422 to 104454 reverse strand)
atcttcgccaaaagatcctcaaacaggttccgtttttttttccaactatgatttcctttttaggttatcaattttgtatttaatggataattcatatttcaatttcatgaattggtttccgaattttggctgtcttctcttctagcctggtgaatgtgatttttatcggccaagatttcattcatgtttcaatcttcttctttttcctcactccaaataatgaaaagaagatgtcaaaataggatatgcatcaatttagactccatatattttgtgaaaaataactttgtacatgaaaaatgtatattagaaaaataaagcatcttataagattgatgtatcggaaacctgggtgtattattagaattcacaaagccattttctttaaacattatagttttctatttaataaaaagaaaatcaattaatcagtaagtgtccaaaacgttgaaaaaattatatatataaaaaatactttcaaatgaggcttagtgaaacgaaattctggtaattgagatctgttttcacatgtgcacttggggatgagggaagaatgaggcaggtattcaaccaagtcactggaatttaacaagattgtttaccgaattattttttctaggcaatttgctttatcgttgtcttttgtagcattattgtttacctttggcaaattttgattacatttagatggtgatcaaaactagaaatttacacttcttaaggtagaaattgatcctgccatattaaaattcaacaacttttatataagcattcattactatcaactatgcttatctatttttgtaaatgcacaagtgaataatctttgctttggaaatattttcctttccttttagtttaatgtgcaaggcctctctttcttttcaatctaaaatccgagtgcaacattatgtcaaaatatttgttcatttataagacttgcagttatactttgaagtgccttctgaatctagtgattttttgtatatgtgaaacaggtggagtaccagttcagtgatctgagccttcttgc

SEQ ID NO: 45622 - DNA, 672 bp, Manihot esculenta
  Intron number 3 from transcript cassava4.1_006600m (locus cassava4.1_006600m.g) derived from phytozome v7.0 (chr-ID scaffold10899; pos 164840 to 165511)
aagaagaacctcttggttctgcttcaattgctcaggtaacgtgtttcatctgagtaatctgcatgcaacagaagtagaaaatgttgtacctgaatatgtggcatgttttagtgcatttttctcttgaaggtagcatgggaaatatgaaaaattgctgttgataaatgatatctgctataacaaaagttcattttatgccagtaaatattgtcatttttaagttgaagcgtttgcaattttggaaatggactgtagtttggtattttttcataaaaaatagtttcttcttgtgttaatgtgcaggaaaaatggtggttattgatagataaatttcattgctcatatttcttaagtggatgcttagagagatctttttgaaaatattttgataagctatccagtgcctttactgtcaaaagtgaacagaacggatacatcatgggatgattctggtccttggagtgtactattagtattagaactcccctaaaacttcattttgaagtcttgtctcaatgctctatgggcagaatgttgatctcataacatttgatggaattttaaacaagaacgcgaaattaactacttaaaatgaagctgtttgtaattgacatgtattcttttaaaatcaaattaggttcatcgggcgagactgaaaggtgataagagtga

SEQ ID NO: 45623 - DNA, 959 bp, Manihot esculenta
  Intron number 3 from transcript cassava4.1_004086m (locus cassava4.1_004000m.g) derived from phytozome v7.0 (chr-ID scaffold07660; pos 47581 to 48539 reverse strand)
actctgttcgcaattctgctgccttgcctatcagagtaagggtttctgtggtctcaatgcattttgttctgatcaagttatgtgtgttttgcatatatgttgtatgtacatacaatatatggtggagttttaaacaatgtgtttattttgttgggggatcttgataatagttcatgatcaggcagcaatgatgcaaacttttggagaggaacaatctgtctagctgcattagctacttgcttcctagtctctctttgtatgtaacatgcagaaaaacaaaaggatcggtacatcattgctttaagtatcacaattgtactaatgatagtatagcggaaaattggcttggtttggttgcaaaagaagcgaggagactttgttatgaccaacacaggggagagaaatgaaaaggaaaaaggtggggggcgctgggagtttgtgcaccccggtcccctggcaacccatcagaaaccaatgtgtatgcagttgcacgcactgctgtatcttctaattatctcatatatatgggacagccagctactaatctaacgcccaaatacctgttttacatgctttctcttacttttcctcatcctcaccgtcttgggctcaaaagattcatttttgaggaagtaatttaattctttttgctaataatttgttgtttctcaatctcaagttgaattgtccctttgtttttcattttttaactcctgtatattgtattgattgaacaagaggcttcctttgctttattctggtttaaatttgtgccttttttttataatattgacaatttttttcaggcgttattagataattatgtgatggtgttatgccgcgtttttaagaagcatttgacatcttcaactaggccttttcttttttctttttttgttttttgggaaaataatatattattcataagcttatgctgttataattttccatacagaatt

SEQ ID NO: 45624 - DNA, 788 bp, Manihot esculenta
  Intron number 2 from transcript cassava4.1_023299m (locus cassava4.1_023299m.g) derived from phytozome v7.0 (chr-ID scaffold02541; pos 53955 to 54742)
aagaattaaggacaagagaatcacagtaagttactgacatttccttaatattaattcccatacataggaatagtgttctataaatggttgtggcattgaagtgctagctagtccagtctatgatctataatgcacaacagacatgtgtataagtgatagtaatgtttcatgacattccttgacaaggccaacaaatccctgaaagtgaccctttcaaagtttatccatgtaatgttcatgaacattttcttcattaataagattatgttttgtacaccgtaatgtaagtaaaattcctattgagatttaatagaaaatcttgattatattacattgcatttcggctactaagtgtcggagagaaacttatttttctcttaaaatatgaagttttctgagacatgatgcctttgatggctgataaagtttgcagactatcttttaatattcttcacaaaagatattatattaatgaagctaagcatacggacgcgatgcatcatgccatatgcacactttttggtccaattctagagttcttttcgtttatttataggtcaagaatggagattcgcttggactaatgaacggctcagcacgatttggaaaattcttcaaattcttaccaactcctattcagcgaaagtgcagcagcataagttccaaagagactaggctttggattgacaggaaataaagtttaatcagctgaaagattcatatctaatgcaaatcaaaaacttttttttgtaggtgttgtgtttgtttgggcgaattcgagatcaaag

SEQ ID NO: 45625 - DNA, 804 bp, Manihot esculenta
  Intron number 1 from transcript cassava4.1_010027m (locus cassava4.1_010027m.g) derived from phytozome v7.0 (chr-ID scaffold04796; pos 381423 to 382226)
tgccacttcccagttctccttatccattagaggtaagcttttaagctcaatatgcatctatttctgagaacccagatcaagaaaatgtctgttgggaccaaataattttattaaaagctcattcatcagtgtttcttactgctaagttagttttcactccatttttgttggatcaagaatataaatggaggtggcaagttctagcttttgttttttttttttattattttggagctgtatttaagattagatagtctaatgatttttctttatagtgtgattttctttgatgaggtcttaattcctactcaactgtggatgtccatttccatcttcttggtcttaactacagttgacagatagattggaccacttcattgatggctctttggagttgcaggtcgagccacaagtgaagcacatgatatctaactctgtcaccaatgagtctcgtcagagctaaactcaatcgaaaaattcttatatgcacttatacacccaatcaattagaaattaaaatttttagataagattcttttaactttagataatttgtggagttagaaaggaaggatagcgtcaaagttattattttagcagcttactataaatagcagaatcccaatatggccgaaactggcatatgcccaagtgaaaggaaaaaaaaaaaaaaaaatttcaattacagagttttcaggctgctgatgtcattttatattatttgaaaaaaacttaacgttacatctgtattgatcatgttctactttgtaaaactgcaaatttctaatgcaggattagttgaaa

SEQ ID NO: 45626 - DNA, 752 bp, Manihot esculenta
  Intron number 1 from transcript cassava4.1_012805m (locus cassava4.1_012805m.g) derived from phytozome v7.0 (chr-ID scaffold10469; pos 178457 to 179208)
tttcgctaaacctctctctacaactgctacttcaggttcagctatttatctatctcttggtgattctttacttttctgcttgcttttggagctgttaattttaaactaattctagtggaaatagaattcttacttcacaatgtggaaatggtttataagagaattggacttgcgcttcctacgttttataacaatttcttaagtaaaggaatcggatcttgaatttggtgcttgacctaaaatcaaatgtgtgggtgatagagatgatggtaggagaattggttttgtttttattatattgggcattttagtgtggggcatatatatatatatatatattgcaattgcttcgaaagcaattagaaacgttaccaaattggtttgggtttttattcttagtttctagagaattggattttgatttgaaacatttttattttaggtcaatcatggggattatttaagactatgaactagggattctaattatgcagtttgacttgattctgtgcagggtgcttgtaattacaatttcttcatgtgatataatcatttaaggaagatgtgctcatgagattcttgctaataccttatattaagtgcaaattagataatgtttattcttttctaaagtagttaacaatgcttcaatcttattttccatttttctgtgtagcttaaatcaggtagatgcatctgttcttgattgttgtatttttcttttttgggcatttggacaggtgatctaattg

SEQ ID NO: 45627 - DNA, 648 bp, Manihot esculenta
  Intron number 3 from transcript cassava4.1_001115m (locus cassava4.1_001115m.g) derived from phytozome v7.0 (chr-ID scaffold12265; pos 42911 to 43558 reverse strand)
gcgacctagcacctcgacatactaaactcgagcaggttgcatttaatgatccttgcataaggtttctttttggcattttgtatagtagcacttttctctttgtttcctttagctgcaaggacttgagacaaatggctagaaaatcttggatgtgtgatgtctaagtgtgcaaatttattattttatcactaccctgacaagttgaataaaagtgatggtcattattttccttgcatttttttttgtccttaggtttttggtcctttgtttgaatcttgctgcgtttcttgtatgggatggtttgcttttccataatttccaattttaaaacctaattgatatccttactacatgccagtccacacatttgacaactgtgctaaaacttgttttggccattgatttattatatcttgctaagatttttttttttggtgtgtgtgatcagcgacacatatggtttatagtttgttttcaaaatagttttggatttatcatttctttgtttgcttatgggcatataaagaactgtgatgtatgcttttcttctttgaccatttatgttttgagagatttaggagtgaaatccctgagtaagcacagatctctcatcatttacatttttgttggtttaacagattttgcttg

SEQ ID NO: 45628 - DNA, 771 bp, Manihot esculenta
  Intron number 1 from transcript cassava4.1_015012m (locus cassava4.1_014744m.g) derived from phytozome v7.0 (chr-ID scaffold03252; pos 73166 to 73936 reverse strand)
cttcattttgaagaagaaggggctgaagcgagctggtgctgctggaactcgagctggttttgactttactttgttaaatttttagctttttttctttttttaattgggtagtaatcgtattgctcatttctggttttgttcgttgaatatgcttagatgatctgggtttggatattattgatttaaattatatttctattgacccttttttagtaattaaggagtgttttgattgtgcgtttgaggatatttcttcctattgaattgaatccacaactgcttgaaattccatttttaattcgttaacttggttgaatgctgtcaaggatacttctaatgaatgggatatcagtaatagcatcgtataatcttgtgtggaagtactgtgttggaaaatttctgtattttgttgaagataaaaagcaaacatatatgcttctttttgggattgttatttctgtttttgatttgcttttgccttgtgaatactttatgcctttatgggacacaagtgttttgagtttctgaagcaaatatcctacgtgggtgcttgtcctttgtgggtttacatttttttgtacttaatttgtaggcttttgctgcctccttgaaagtaacaagaactccattattaattagaatgtttgtatatttgagctttcagttgacaaaaatgttactgtgattatgcatgatcctttatttataactgacctatttttcctaattaatgcaggcgtgggaggttatacctacttactggagccgcta

SEQ ID NO: 45629 - DNA, 1025 bp, Manihot esculenta
  Intron number 1 from transcript cassava4.1_010579m (locus cassava4.1_010579m.g) derived from phytozome v7.0 (chr-ID scaffold04043; pos 645284 to 646308)
cagacgagtgaagatcgaggatctcctaatttcaggtgactcgttactctgaaccctaactaaccttctaaggaaatgctggagactctgcctagtattgaattcattaatgcctttccaagaattcgtaatgtttcgcttcctgtcttgtggtagttacttggtaccgcaaaagtgatgtgtggtatgataaatatggtgctttatgttattttcttttgctatacaatctcagcgatcaagtagagcatgaatgagaatagagaagtggactggttctttactttgggaccatttatttagcagcatttctgaattagttactaatcttatgactagttgcttgattgttaaggaaattgaggcaaaagaaaccggggtgaagtgtcccgttctcatgcttttaaatgtttgatttagcttagcatatgaataaaacgaatagaggaggaaaaaggaaaaatcttaaataatcttaaattgacctgagctagggaaatggttacatgaaatttttcttgagagtttaatgttcagtcttcacttaaaaaatttatgtactacatgcctgaggttcaatagacacaatggaattttcctatgtccctaaaaagaaagaaagaaaaacacagagaggcacacacacacacacacaagcaagtacttgcttaaaatatagtttaccaatttgcatatagaacagcaatgtgcctatttcttcacttccaatttgatttcacttaacttctacattttaacttcaactctaaaggtctaaatcctgtttgatgctgcaatttttcactctctgttatattttttcatttattatttgcaaatttttagttagaaaatgtgttgaatttggaatggaattattcattttttagcattttattagtttggatgatgtgttttttttttctttagttgcccttagtaaatcaattttgattcagaataatgatttttttttttacctttttacaggcacactccattgcagataatccatattattggaa

SEQ ID NO: 45630 - DNA, 1037 bp, Manihot esculenta
  Intron number 1 from transcript cassava4.1_029735m (locus cassava4.1_029735m.g) derived from phytozome v7.0 (chr-ID scaffold12946; pos 273731 to 274767 reverse strand)
caaaccccaaattcacccttatttttttcacataggtatgtttttctcttctctctgtgttttgcgtgtgtttgacgcagaacttgctcatttcagttggcgtatgatttatacgtttactctttcgcatttcaattttgagttattaaaatttagtgctgaattgttattgatgttcttgttctcgttgatgcattccaatgtgattcaggttcatttgatgctgtttacagtagtttgttttgatgattacctacttctcttcctgttctcctttttctgtttttaacgtgttttcaatttttagtctttctttgccttctgtgttttctggttatctgactatgaatgtgcttatggtatgaatgaggagtataaaatttgaacggactgcaggccgttgatattctgtctagttactttttcaattgaaatgattcgagtacatggatgattaattatgaaggtaaacttatcctgcaattgtgagcattagaatatttgacgttttttgttttctgtgtaattcagtatggaactctacgtgcaattagattattgatgttaagattattctctctgaccgtatcccagtcattaagaactaataagaataaggacagcaaaaattggaaaacacggcaagtatttcacttgatcagccttcgaatcgacccgacatgctctcctattgacaaaatccaaagggtaggaaatgtccaaaattaaatgattaatctgttttaccagtccaaaattactacgattgcagctaaaatagctttttaactaacttttgtcttatgttacaatacaaacaacggtaacaactaagatctaatcccaaactagttggggtcagctatttggatcttttgttttttgtctttcagctttgtttgacctcaggtccacatatccaaaacggtatatgtattcatgcttatgcttgctcttggatgcctgaatggtagttaattgtttctctgtcagttgtaaattgtaatttaaatgatggatatgtattatttgcaggt

SEQ ID NO: 45631 - DNA, 516 bp, Manihot esculenta
  Intron number 1 from transcript cassava4.1_014044m (locus cassava4.1_014044m.g) derived from phytozome v7.0 (chr-ID scaffold02526; pos 236484 to 236999 reverse strand)
aaatcacagtccctgctcaatccacttttggtaacttttcgttattgaaattctatatcaatttcattgttttaaaagggtatttgatgtcatttgataaaatgggtacatctcattttgtgctttggcttcttggtttttgatttattgaattggatcgtgcccatcaagctagttagtcttagctttgatatcaatggtcatctgttgcgcaattcaatcaaatcaggtcattcttcaatgggtatcaaacgggcgtggattttttgctgatcatcagtgtatttatttaatcattcttgtttgagctccattcttgcactgtacactcctatgccctttttatcatgacgagatgttccatgaattgttggaatttttgcttaattgtctacgatgtttaactttggaattggatcgctaaatgggataggctgccacactttgttttcttcattctgggggttgatgatcaaattgctgctgcttttgtttcaatgaaaggggatttgaaaa

SEQ ID NO: 45632 - DNA, 764 bp, Manihot esculenta
  Intron number 2 from transcript cassava4.1_002047m (locus cassava4.1_002047m.g) derived from phytozome v7.0 (chr-ID scaffold08799; pos 580826 to 581589)
tgcaattacaagaaagaattcctggaaaaggttcgtgttgtgtatgtactaagttcaggactcttaccatgctttatttgcattattcattccatttatttttctttaaatagtttatgttgttcagtgtttcttgtgaaactgcctgattttgcagacaaatactgcagcagagataatttcatagttagatggtgtaactaagtgtgccttttatggaaaatgttgagaaaggaagaaaatgaatcgattgattaggattacaagaataggtacaatataatatatgtataggaaaggtagaataatcaaatctgttgagcacgcacctaagcatgcttttgcttcctaacttcctaactgattttggcgtcaactttatctcctgttaccttttttttggttcatgggactacattatatctgcttaagtgcttaatcaatttggtgttagatagccttcatcctgccaatgtcttgaatctttatttatgtctcttttatctgatgctaaacatgattggacatgtttattttattttaattttttattgcttgtgtagttgaggtggagctatgagctatcttatttttatgattttatcctctgttggattttactactcaacttgttttcctcaaagaaaaaaagggttttctgaattaaattttttatagtataaaaatatagactagtaatcccagttcatttgtttattcattgtgcagaacttaatccgaggcttttggaagcttcccagttt

SEQ ID NO: 45633 - DNA, 735 bp, Manihot esculenta
  Intron number 2 from transcript cassava4.1_009086m (locus cassava4.1_009086m.g) derived from phytozome v7.0 (chr-ID scaffold03079; pos 211264 to 211998 reverse strand)
aaaaatattacctagaacaggtgagaatacttgctgctaatttgaattagttaaaaagatatttagatcatgtatgagtttcagaattttttagaaaatagttgattaggcaagtgattgataattcatacttagtttctttgatattgagtttaaatttcagtttggccagtttagttctatcagtagcttgccttacccagctttcttgtgtaatacctttgattggactgacgaaataacttaagatactgtggatgggataaccatcttcagaaacaaggtttttatttttttcccaaggacctggtgaggtgagaggttctgtaggatatgccaaaattgttagtaatgttatcttcatgcaactaagttgcttgtgggttcgcacagtggctttaaaactgttcccatctagaagaaactatcaagcattgacatcattataaacgagtgataataaaaaactttgaaatgcttgatttccactcctggatccataacatggagacaatagtttccatcattgtccaccattgatcagtgtccaagaagaaatggttgatcctctgtgccatgaagctaatgcagttaatttgctggaattgaaacctgtaatcaacaggactagggaatagggacattcttaagacttataatgattatgaaaaggagaaaatgaaatccttgcgtgaatgtgagttatcatttcacttccttctcaataaaagtata

SEQ ID NO: 45634 - DNA, 1066 bp, Manihot esculenta
  Intron number 1 from transcript cassava4.1_009755m (locus cassava4.1_009755m.g) derived from phytozome v7.0 (chr-ID scaffold09335; pos 158096 to 159161 reverse strand)
ccttcgattctttctctgatttgttagcttttcaggtacgtgtttttgaaatttcatgagctgctttgtttcttcatttaattatttctgcttttttaagttggttttgttcgatgcttagttcttctatgctagatcttgtggctgcattggtgctctggtaaatatatgttcagtgtctcttcgttcttttttcttttttcctcaaatttattttatgtttgttttgggagaaaggtttatgctttttggtttttgtatttgtttgcattttttcatttattttaaatgaagatcgcttgaatttaaggattttagagttagatttttttccccttaatctgttgtttggttttgctggaaaactgaagtaaaaattcgaagctgaaatttcatgcatagaattataggaagcagaaaaatacagacaacaaaaaaggaaaagaaaaatctaagactcagttttgaaagggagaaaacgtgcatagaacgcagttgacctccgtctctatgacacgcccatgtattcattagcgaacccacctgacgagaaggtgcgctttatcaatccccggtacctgaggtggtgctcgtgatcgtaactcgccataactcgagcatctagtgaatgcggtgatttgaaccgaatcagcaacgcagggctacacgcgaagtattatgcatagatgttgttttggtcttaaagaagaaactttgtcaaaaaaaggaaagtgaaagctagagaaatggacgttatggtctttctctgtccctgttttctcttttggtcactgttctatacattttttccgaactgcaaaatgtctcataatcgattggattattttttttttgtgggtattgtgtgttatatcatggcagaacatgatagttgacgttttttggataatcgaatgccttttttagtatattttcttttgattctatttgtgggcttagcattttatttttgtattatgtatctggggaatgaagcaacaaatttgacttttgatttggttcattctaagcagttagaacctaaagagtaatttgtgaaggtgtg

SEQ ID NO: 45635 - DNA, 713 bp, Manihot esculenta
  Intron number 1 from transcript cassava4.1_016971m (locus cassava4.1_016124m.g) derived from phytozome v7.0 (chr-ID scaffold04450; pos 235568 to 236280)
atcgagattgcttcatctcaaagagtgaattttaggtacttcgtgtgtgctaatctctgttcacctcaatcataatctaactgaattggtaataccatatatggctggaattccaaattagtttgttataatctttctttatttggagattttatttggttttgtaactatttttgtgtggttttaaatgtcatggttcagcagatttacgagtgctgtcctaagagggaaaagttgggaaattcctttgcctccatttggacagggctggtaggggactctcttttctaattttcgtttaaatctggaagaaccaaataagtaatgatgatacattagtaagttaggcaacagactctgtcttactattatatgatactctaaacatgacgaatatgaaactcgtgattttgaatggtgttgagtttctctgactgttatattagagattttattctcgtctatctcgagcatcttgggctagaatttttttatctgaaaacatatgttctcgttggttctcctaagtgtcccaagttggtattcagtatgcattaaaattccatttgaagggcttctaaagggacaaagaggttaaatttgaaggcattagcgaaggatggtttatttacttctgttatgttttcctactattgtgtggttaatggtgttattttattctgcaccgtgtaggtttgagtctgtgtacattg

SEQ ID NO: 45636 - DNA, 944 bp, Manihot esculenta
  Intron number 1 from transcript cassava4.1_004381m (locus cassava4.1_004381m.g) derived from phytozome v7.0 (chr-ID scaffold03750; pos 706436 to 707379)
tggtttattgtgattattatccactttatcaatttgtaagtttctgaattttaatttataaattgaagtcgaatctcagttgtcttgtcgaattttattaattttgatggaatatgatataatgagtgtttatttggtgctgaattcggttgttttataagctgaagcctgtcctctgtttttccgaacaaatagtgatagtacttctacgttccctcagtatttttgttgtcctgagtattgccctgaatacatatttctttaaatgttgcacttgaatgtgaattgccttggtcattttacttttcaaaaaatcaaagaaatattgatgggtgttgaactgttgcagtatggccattgcaaggtttgccagtattgtttgatcaccatctgtaatttatgctttgaaatgaatgagaaaatagagccacacatacacccacacacaaagacataagataagactctctgagtttgaaaagtttagtttgaaagagcattttatgattatcctttcaataagccctgcctgatcatagattgaataagagtttgatttttatagaactgaatgcacttgtgttggttttgaataaaattggaaatatgtgtaattttgtgaggatgcacctgcttatctcatgttgttttgtgaggtgggatttctttcttattccatgaaattgaaagatataaaattgtgcgacttacctagtaacccttggaccaagcactatgagggtgttattttattctttttcctcattttttttctcttctatgctctatctgcgtagagtttctgtgatattttgtattttcttccttttaggcttcaaattgcaattattccatatgcagaactgattctgagaccttagagtatatttaacactgttgattgatattttgagtgtgtattttgcaatgcaggttattggaag

SEQ ID NO: 45637 - DNA, 1013 bp, Manihot esculenta
  Intron number 2 from transcript cassava4.1_021098m (locus cassava4.1_021098m.g) derived from phytozome v7.0 (chr-ID scaffold00752; pos 28747 to 29759 reverse strand)
cggcaggtaattcaacaaaatgcaccttccagagtgcctggtttgaaaattacatcaattaatgatcgtgtcagcagtccgtgttgactttttgagtgccgtcagatccactatatatacggatttacatgaacttgttgtgtagtatgtaatttattttggaaaataagttcctactgaaattatttggcatactcaaataacttatctaaatgcttaagagtgccataaacatgaaattacatgttgtagttagatgttacatatgcaggtaatattttgcttgattatgaatatattactgtttatagtcacatattgatgtatgtgttcgtatatttatataaagagttgctaatgaaacttacactagtactacttactcgtgcattagtattagctctgttgccagtaatctaccaacatattacatgtgccaaagtaccttcttgatctagtttatattttgacttttgatgcttggattgcctttttaaggctactaatcaatgcaatgtcagcatagggtccatatatcagttgttatgatagtcatggcttcttttggattttcgacagaaattattatcatgcaagctacttgttgaatagagatgaaacgacatttgtaatgctcattgcagatatcagaaatgttatgggtgttgtccacttatagtgactgactgcttttcagtttgttgttacattagaaaagtataatcaatgtttaatgaatgaaattatgtttctattagttggtaagctcctttggtttacttgtattccctttccaggtgcaatgttccctcagctttgtatgggactagattcttcttgttacctttctagttgattccaaattatcaatgcgatgtttaagtttgagactgcttattggaactcttctgaatgtgatcaaaatgttattgacacacaaactctctgttgaagttctgaactcaagttactgtctccttaacagattcaactctacgttttctttttgagca

SEQ ID NO: 45638 - DNA, 571 bp, Manihot esculenta
  Intron number 1 from transcript cassava4.1_016545m (locus cassava4.1_016545m.g) derived from phytozome v7.0 (chr-ID scaffold03219; pos 15847 to 16417)
cagttgtggtgtcagagtataagcctgttcctgatgtagactatctacagatgtgtaatctttccattgcaaactcgtattccaacgtttctattgttccttaaactgatactctttttgctgtcaacacaatctctactttactttgatattttggttttggctttggaaaaaatttaatcgtgataaccaattatgctgctttcatgttaacactggaatgtcaatatgacattaaatatctgatattagcatttattgtagatgataattttccctgtcttcttcgtggaatgtcaaaaaaaaatgtcagtttattagttcaattctttgtgacttcctttggatgttgcatccctaataaatatatcttttaagctatgccatgtgactggtgatttgattgcatattgagtcgcaacttttaagtgtcaattacttccaacatgctttttcttcctttcatatatctaattctttgggtctttcaatctgtactcaacaataagttttacatgcggacttcctttttgcaggagttattagccattcaacaacaggggcctagagc

SEQ ID NO: 45639 - DNA, 934 bp, Manihot esculenta
  Intron number 3 from transcript cassava4.1_009011m (locus cassava4.1_008942m.g) derived from phytozome v7.0 (chr-ID scaffold04450; pos 24759 to 25692 reverse strand)
gaattaaagcttccccgtgaaggtgctgctttctggtatgtaatttatgcagaggcatccaaatccttctgttcagttttccaagttttcttttccatgtttgtttaggtttattacccattaatcttttatagattattactagttttcggtcaccgctaggatttaccctaactaggagtgctggtatatatatcctatttgtagtcttaattgttgagatctagttgccttaataattgtatttggcctttgctagccttttgcttaaaattgttaatggtcataactcctgatgttgctgatggttttcaatctgaaatataactttctagttcatcagtttcaagttaccagtcaatttatatacctttttccttttctcatcttctcctttttgttatttgtcaccacagaaaacttttgcttttgtaaatgacatgtgcctttcagacctggatttcttcatttatatatatatatgtatcgttggcctttatatcacagggatcaaatattagtgctgacttggtttgtaacagagctaaatggctataaaggatctatagagcccacctcaagtagtttgaaattaacgcttagttgtcgtgttttttttttttttttgcttttgtagatcatatttactattataattgaatatgatgatgtcattatatcaccttttcaaatctccagttcctatttaaattatgaaagatccagttgctccctctctaaatcactttgcattggatgcaattgaaatttagttagtcttcttgtatatgttgattgatttttcattagaaattcatttcatatgtgtttgttgtaatcatgtcaaacgtgccttatttttcattcccatattgatgggtgtttttccttcttatcagcacacaggactgctttaaggcttcttggagctctc

SEQ ID NO: 45640 - DNA, 769 bp, Manihot esculenta
  Intron number 1 from transcript cassava4.1_000569m (locus cassava4.1_000569m.g) derived from phytozome v7.0 (chr-ID scaffold06206; pos 133046 to 133814 reverse strand)
ttggtctcttgccttccacctctgatcgccctgaggtaaattgtttgcggaagaaatgtagtttcgttttggtctaatttagttaatcagcatatgtgggattttgattagctatatttatttattttttaatcctgatttttttggactgctctctgattagagcttttagaacttcattaagtaggttcttagcactcaaaaaattctcaaagtgccactgataggagttttttctttttaatctgggttttcttattcactagtcttgttttttctttttttctgttttatttcattctaaagtctcgtggaaatcacccagtaaattgtgttgtcattttattagaaaccttagtcgaggtaagtttatctggaaattgatcaattttagggcgtttttctggttgctatatttagtagaattttgtgaatgagatcttaactctgacaagatgtgagttgagttcgtgaaattttgcatttggattatgctgcaattgagggtctttttggttttgttttgatgcttgtgggttttcgaccctgtatttgcaacggcttagacttgatgcatctaagtttatgttcacagtttaacagtttagatgattgtgtgggtactatgatgattttttccaattgtcaattacgtccttaatcaacttatgcaactctagtctgacgctgacaaagttagcaatatcctgacgtgacttgttttcctttaataggttcctgcacgagctgcagctgctgccgcagttgc

SEQ ID NO: 45641 - DNA, 814 bp, Manihot esculenta
  Intron number 2 from transcript cassava4.1_018180m (locus cassava4.1_018180m.g) derived from phytozome v7.0 (chr-ID scaffold06816; pos 84603 to 85416 reverse strand)
gctatgtaagttgaatcgtgccttccttatgttttgtgaacatcacttggtaatgtgttgcatctatgtctgtatgtgtctcagaatggattggtgaaaaggttttaagactacttgctttttgattgagactctttccctaattgttgaaatcaaaagtactattttggcgaatgaaagcttagttttaggtggggctgaaattcactggagtttacttatgctttgtctggatttggggcaattggtgagaaaagaaaagaaaatccaattttttaaaattctcttggagaagagaagagaagttgtatttcttttccccttaaaatgagcccaaaacctttggtgggaaatggagagaagtggagagaattaaagattatttgtgttgaaaatcacttggtgggaaatggtgacaaaatggagagaattaagattatttgtgttgaaaaatcctttaatgtccctttagtttaaagtttctcttcttaaaattgtaaggggatagtagtcatttttcatctttttctttaaagagaaattatatttatcttctcttctaaaaaacctattcaaacaatgagaaggaagttaaatttctatttttttcttttctctttatttctccttcttagtttctcctcatttcccccatacaattaaggatccaaacaaagggttagtggagaataaatgtgcctctttgtcctacctgtgtgatagattatattctgtgtttaaggttaatgcatctgagcaagtattttttacaattgcaggaacttgagggtagggcattgagggtgaattctgg

SEQ ID NO: 45642 - DNA, 545 bp, Manihot esculenta
  Intron number 1 from transcript cassava4.1_013067m (locus cassava4.1_013067m.g) derived from phytozome v7.0 (chr-ID scaffold04075; pos 28516 to 29060 reverse strand)
aagaaaattgaggtaagttattattattatggtaattagttagttaattaactaattaattatataattttgctgttgattaacttttgaattgatgtacaaaggacttgtggaataattaattgattaattaaagagatacccatcataatttcttagttgaattttagaacaagatcttcatcagttgtatttatcaaggtgaaaatggagagttagttgatggtcaaatgattgagtagatagaattttacctaatagaagaaggtttctggctcaattttttctaattttgtacttattgcactgagaaaaacacagttaacttttccacaagacaagtgatttttgaaacttgaagcactataatgataagttatgctcaaatgataaggaatttttcctattggcttatttctgaagctagttctttctactatttgttttttttttttttttttggtagataagaagactccaataccactgaactaaattttgtatgcgcagaggaagctggaggagaaaagggcaagagcccttga

SEQ ID NO: 45643 - DNA, 607 bp, Manihot esculenta
  Intron number 1 from transcript cassava4.1_009797m (locus cassava4.1_009797m.g) derived from phytozome v7.0 (chr-ID scaffold08151; pos 18998 to 19604 reverse strand)
aaaccggtaaattttctactatacatatatactttatttctgtccaccaatgtgtcctcaggaaaagggggtgtgtgtttggttgggaaggggatatgttcacttaaatcagcttcgaattggtgtgatgattagaggtgtaaagagctcaaatttttggttcttcaaaattttttttctagctggagttgctggagtttctcttttcgaactcgggccgaatgttaataaaccgagtccgcttttatggagtctaatttcaaatagttcacgagcaattcaatttatttactaccaatatgtgtcctcaggcaaaaaagagggggttggtttggttgggggaggggatatgttcacttgaatcagcatcaaattggtgtgatgatttatgggctgttttatctgtgcattactctttttttttaatgggttcccacttctatgctgatcggcttgtgataaacactttgtttagtggaacaacctagttatgccgtctatcacttttgtgttcccccttcctctttctcgtttttttttttttatttatttatttccctaaatttatttggcaggcacaaagtttaaatacaaacctggaatcttg

SEQ ID NO: 45644 - DNA, 332 bp, Manihot esculenta
  Intron number 1 from transcript cassava4.1_004588m (locus cassava4.1_004588m.g) derived from phytozome v7.0 (chr-ID scaffold11998; pos 484674 to 485005 reverse strand)
cttatactgctagagaagaaagcttgaagagagaggtaagattttgggatatgaattttgggaatttctgtgaaagctcattccttgctgttgaataattattaataaaatagaaaattgaattatctgatcatgttcaaccgcttaaaccaatttcagtttggatacaatttgcaagttaaccgaaaattcatctcttttttgtggttttttttaccgcattccttttgtgggaattgtctttaatgcttcttatctcagtattttcttcgctttgacagatttcaccaattttgaatgtttcaggaggaagcaggaagactcaagtttgc

SEQ ID NO: 45645 - DNA, 903 bp, Manihot esculenta
  Intron number 1 from transcript cassava4.1_005536m (locus cassava4.1_005536m.g) derived from phytozome v7.0 (chr-ID scaffold06701; pos 387239 to 388141)
aactgaaagcgagctcatctatcgcagaccaagaggtacatatattacttcagtatatatgtctgttttaacttgtattcatgtgtgattgacaattacgtttgtttagtttatttgtttcttttgatctcttctattggcattttgattttctttattgagtttttctgggatataaatagggatgtcttaaaagtcaaattccgaccgaaaaattcttgggtttgtctttgattgttgaattttttccccttaaatatgaatttgttttttttttaaacgaaactgctctgcagtgaatgtttcaggtttttaacgatttccttttctggtttatttattggtgaagtatcttctgttcgattgtcaatgatctctgcttctggtgtttatggattgtgtacttttctgaattcattctcttataaatctagcagttttttttgttaatccgatttgtgtgtaataaaagtaaaccttaatgtttctccttgggaattgtgagaatttttttctgtttattaatacttattttaaccgaatcaaatttgacgtgactttcaagatgatctcagtgatatctgaatccgttgaaagctttgctgttaacggagaaattgcggcttttttttccaaaaaaaaaaagttagagattaaaatcttacatctaatataaacgatgatgttaaggcttaataccgcttgatttcttttattgttttaaacttgcttgtaagatacaaattgcttatttaatttagcacaatctatgatatattaatttccggaatctgaagttcttttttttttttttttccatttttttaactgtatctcctctgaaatattccacttgtgtgctttacagatttttgcattgtataagaaaggcagataaagccc

SEQ ID NO: 45646 - DNA, 725 bp, Manihot esculenta
  Intron number 1 from transcript cassava4.1_009885m (locus cassava4.1_009885m.g) derived from phytozome v7.0 (chr-ID scaffold00708; pos 438958 to 439682 reverse strand)
tttgtgatcatttgttcaggaactttcaaggtctgttattattcaaatttgattaatcctcttcatttttatatggattcccactcccctgtccccctttttagttggattcttttgtggttttgaatcagccacgtttcagtaaacttttgtgggttcatggattggaactgttagcagtgatttccaatgaatttctttatttcttttccccttgagattttggaaggcagatttttggttgagcctgttatgagtatcagataactgttgagaatatttccatgcggattttgttttgattgaataactgttcaggcttcagagtatcagataactgtacagctgaaacttggaaaagtgtggttaattacaatttgctctatttcagcacataggagaggaatttttggtttcaaaaagttaccaacataaccttttacatagtttttttttaattactttttcttcttctttatgcactaaaggactgaagcgtattgaagttctttcttttgaatgctaagaaaatgctaccaaaattcaaaatgcttgaaaacacctgctacagaaactggattcacaaaaaatattctgtcattccctttcttaggaaatgtttcttgttgttttaactttgaatgaggagctggtcttgttttggcattcttaggctttgtggttatgcagccatatcagctgaggctcaaggagttgtgactgct

SEQ ID NO: 45647 - DNA, 1049 bp, Manihot esculenta
  Intron number 2 from transcript cassava4.1_030948m (locus cassava4.1_030948m.g) derived from phytozome v7.0 (chr-ID scaffold02242; pos 123463 to 124511 reverse strand)
tacaagaaattgctgatatcttgtaaggagcaaatgtgagttcattcttcttctatttttatgcctttattcgtattttgtgtaaaattagaacttaacatactatcatagatatccaattgttagcaaatattttgttagattatggactcatttgttacctgcctttttaattaaaaaaaaaagtcaaattcttgcatcaattcataattttatataaatatttcaagttgaaccagtttgttaaaatttttaatttttattgaagtaaggttaaaattgaaactgcacatagatgtttggatttttttggttatttgacttaaatttaaaaaataaaataaaatctttggatatttcaaaattgagtacaaatcactcctcgtcaatgtaaatatcaatatgttttgagtgcagtaataaaactgattgcagtcctaagagaaaaactcaggttggatatttgtagaagacattattgatagaaacaatcataaatcctaaaaagattaatcttctgcaaattgtaaaataaatttggaatgatatttgatgaataaaaaaggaataaattttcttaattgataattaaaaaaattacaaggacatgtatgctaaaaagttgactcttttttgtttgcatacagcttcttcctggattagtgttggatttcactcttgtatctattggaaaagttcaatttagccatccaaaattttcaatttaagctccaaaataaagaaacccaaaaaattaacctatcaataaatttagcccaaaattttttaattttagcataaattgagctattaactaatttagatgggctacatttaattctttcaataaataaaagaatataactcaacatatagcttttcttttttttgctttctagctagactcaaatatcaactattaaaattggcctacttgttttgttttgttttctttattctgcttttctctcttcctccacatcatgtggctgcttatgaatatgggagtatttcacaggcctctgtttgcaagtagcttactcagcgtc

SEQ ID NO: 45648 - DNA, 408 bp, Manihot esculenta
  Intron number 1 from transcript cassava4.1_020339m (locus cassava4.1_020331m.g) derived from phytozome v7.0 (chr-ID scaffold06876; pos 11499 to 11906 reverse strand)
agccaagtaagtacaaaaatgaagctagagattatatttttgtttgtgaactttttttgaaactgaaatacaatggaaaatcaaataaataaattgctaagcacacagagtttcttaatgaatagtgtattataaattataatcactgatcagcatgcataagagatattgaattttttgttaaagaaaaacttattctcagcaacccttttttgaaaaaaattattgctctgaaaattcaatcgttggtacatgattttatttctgtcagagcttgattttgatataaatcaaacggaagaatttatagtttaattatatgatagctactttgaatgttaaaaaatttgtgtttatatgttttgtgatacagatagttgaagtacttaaaggagataaagaacccat

SEQ ID NO: 45649 - DNA, 486 bp, Manihot esculenta
  Intron number 1 from transcript cassava4.1_012476m (locus cassava4.1_012476m.g) derived from phytozome v7.0 (chr-ID scaffold10097; pos 228990 to 229475)
tgtaagtgtctaaaacttgcaacaactttggtttcttggagattttcatgttcattcaaggcttcgtttccttttacactcttagagtatcaaaactacttttctaattggtcttagtctcaaaagtttaaatgtacaggtaatgagccaacattgttgctcaagggtcaatatctttacctgaaacagaagtctaattaaaaataaatctttaacttaatgctggagttgctaggcccaatagcatatgaaatgaaacataaatccagtccaacaaatcagagtactaaaatgaatttggcaggtggaagttatttttattggaagagagggcgccagttctcagacctgaggctatatgtccagctgccatcttgatttcctaaatacagtttgactcttctaaatttataggccatattaattatccttaattcttatgttcatgaaggtgatcgaagggatcagaaaactcttgaaaggctg

SEQ ID NO: 45650 - DNA, 303 bp, Manihot esculenta
  Intron number 4 from transcript cassava4.1_017341m (locus cassava4.1_016199m.g) derived from phytozome v7.0 (chr-ID scaffold06606; pos 10839 to 11141 reverse strand)
gagttctgctaggtatttcacatgatcttccatacttaagcccaatgctattgttatttgttatgtataatacacgtttctggtgtcattttagacatggagcatttatgtctatgctatttttcacattgattttgttttgcttgattgattatatttctattaagcttgatttccaagtcaatattagggtagctttgttaaatgaaaaattgaattttcttttagtttttgtaatgaatggctttatttggttttaatgctaatgctatttgattgtgacagtgagtcagtttacattgt

SEQ ID NO: 45651 - DNA, 421 bp, Manihot esculenta
  Intron number 1 from transcript cassava4.1_026544m (locus cassava4.1_026544m.g) derived from phytozome v7.0 (chr-ID scaffold09798; pos 39514 to 39934)
aacacgatccgaagcctgaagctcggagtatttctgtaagtataaccatttatttacattgacattcagtataatgtggtttttttggaatgcacttaaagtaccctgttcagtttacatataaactatgccataattttggagtatggatggtttagccagatttttttctatactaatcatgggtttttggtgtttctagttgttcctcaattgggtttggtgatacaatcatgatttttatcctccaagttgttaatctatattaatctttgtgatctctccagttcttgaatatctgttgctgcttttttttttaattggattttgcctcttcttgaagtcaaactactaggttctacttctaatcagaatgtatttggcaggctcctagaaaaagcacatcaagtgataggttggt

SEQ ID NO: 45652 - DNA, 541 bp, Manihot esculenta
  Intron number 2 from transcript cassava4.1_005015m (locus cassava4.1_005015m.g) derived from phytozome v7.0 (chr-ID scaffold01945; pos 473598 to 474138)
ctttggagtttatttctcaaaagaggttatttcctcttcaatttttatcatttctttatggtggttaagttctaattggactaacaaagcaaattttctttgtaaaaaattaatttctatctctaagtcactggatatagattttagaggacttgttcaattagtaaaaggtcacatctttttgcatttaattgtagaataattggtgagagtgcatatatgtaacttttaattctgtcattgtgttggtgacttttaattttcaaaaatttattatatctgatatgtaaagcataaagctgacaatttgttatatatatcttagaatgcattatgtccctacacacccataagttattcttgttttgtcaacaatttcatttcataaggtttagtttgtggatatagctatcttgaatttggtttacttttacattagcttgcccatttattgcgagccactatgccaactatgcaatccttttgattttatgcattttgaataggccggagcaatcagagggcacatcagttcagcctg

SEQ ID NO: 45653 - DNA, 836 bp, Manihot esculenta
  Intron number 1 from transcript cassava4.1_008554m (locus cassava4.1_008554m.g) derived from phytozome v7.0 (chr-ID scaffold03168; pos 78089 to 78924 reverse strand)
cccctttgccaaaggtatatattgtgctttggagtattagtgttgaaggggtaattgattttccttttctgtagaaaatctcaggtatcctgcagttggatgcattaacagtctttatcagtaaagtgattcaaattttgggttcgcaggcaaatctgtttatcttgtcaaatatctttactctttagatctctacctgtgaaatggcattatattaattgtaaaactttgaagtttgttgggagatgatcttcttgtccaactccaacacatattgtttgaatgtttggacttattcaaaagccagggttttaaaatttctcaataattttgtttttacccctccatttgctgagattgattcatatttgttgtttctctgggatggtttaacaaccatcgaattggagattttagtccatcctatcaaatggaacagcttagttgatcagctaaactttgcaaaaaaacccagtcaactgaagctttactagtttttgggagaagtcttcatttttggtgatggagcttatcctgcacattgcgagatatactttctcttttctctttcagtcaagtgtccagtttttattatttttttttttctgagttcttaacaactctttgaactttcagctttatgacatcattcttgtcaaacttcaacgaagttgaatgttgtttgcaaataacaatatttaattaaaatgttaaagcatttccttcacttgtatatgcttaattgttattatgcttatatttcttaaggacctttgcaaacttcacattattaaaatgcagttctgctgtcctggaactaaaggtcctgcactttg

SEQ ID NO: 45654 - DNA, 264 bp, Manihot esculenta
  Intron number 1 from transcript cassava4.1_006057m (locus cassava4.1_006057m.g) derived from phytozome v7.0 (chr-ID scaffold03651; pos 393078 to 393341 reverse strand)
ttgcctctgaattgaacctggctgttctcaaagaggtaacacaatactcttctgccatttcgtttgcagttttatggaattcatttgcaaatccatagtttaaaataatttgttaagaatctgcagatgaattctaaaatgttattacagggatttgattaattgtttattatgtgaaaaggacttgatgtaagaatgctgatttgttttgtacaaatggctaatgcaggctaggattttccacttcaattcagaagttctaac

SEQ ID NO: 45655 - DNA, 506 bp, Manihot esculenta
  Intron number 1 from transcript cassava4.1_013600m (locus cassava4.1_013600m.g) derived from phytozome v7.0 (chr-ID scaffold12118; pos 333697 to 334202)
tcgctttcgccactttagcgaaatctgcatcttgggtactggttatctctctcaattgcctctattttgtttgattatttgctttttgtgagattgagttgcttaagaagcactcctttttttgtgtgtgtgttgatgttccagtttgataacttgttcaaaaaatctgcactgagattcctgatttctctctgcttctgtttataagtgaattttatagcattacaatcgtggataattaatggactgatgtggttaattttccatagtctgggcttgaaagagaaagtgcactaatgtttacaattttctgatgcatttcaaatttaaattcgtattagatgtgaaattctcttgaaacgtgaataataagtttaaagggttttcttgtaatgaggaaatttgtttacttagctgaatacagaccttataatttagaagaaagttgttgtgttgtttgatatatcatagcttcgaaaagagttcagcagtgaagttgagtctgc

SEQ ID NO: 45656 - DNA, 681 bp, Manihot esculenta
  Intron number 1 from transcript cassava4.1_000127m (locus cassava4.1_000127m.g) derived from phytozome v7.0 (chr-ID scaffold03735; pos 443984 to 444664 reverse strand)
ggagggagattttgcagcaaatacatttgcagcaggtatttttggactccattgaaatgtttgatttagactagttttcaatgcctaggtcattgcacgtgtggtttgattttggattctaaatttaattagtttgtgaatgtgtttggctcgcctcttaactgcatgtgtaagattacgctgctgctgtagtttctacagcattatcaagcttattttgtaattgacaatttgatgattatagttacaactctgggaagaaatgtattatctgacagttgtaattgaagctgaagttaatacgaaatagcataacaatgaaaagccacactatttagagggatataaagctgcccccctctttccttttatttgtccttttctttttggccttttttaatctatatattaatattggaaatacatttaaattgattggtataatctataacttttggtgtcaatttagaagtttcaataaacttactctaaaagtggtgttaatggatctacctacatcctccttgacaaatttctgtttgtctactttgaacaaattctaatcataatattacaccacctagggaaattttaagacttcttttaaatgtcgatagattttggtcattttttcctttcattccaggtaatagtcttgattggagagacaggttcagggaa

SEQ ID NO: 45657 - DNA, 930 bp, Manihot esculenta
  Intron number 3 from transcript cassava4.1_005064m (locus cassava4.1_005064m.g) derived from phytozome v7.0 (chr-ID scaffold05005; pos 202296 to 203225 reverse strand)
ttgccaggcggttagcaaaaacccacaattgggcggtatgtgcatcacattgataatattctctgatggattagctgtgagtggaaaagcttgaagcaaatgaaaactgttctgttgcagattctcattctttggtcctagaaattaggatcccatgaatccttttcactactcctgttcatgttcaaagtactcacatatttatcagaattgcttgatatgatggaataacattaggtatagaaaatgtataaatgctggaaagtggctggacttcttctcattcttaaatttaataagttgatgctcactatgagctggatctggactgtcattgaatgccgaaggatcctctgagtaataatttgagtgtgacacgttgatgtaagcaaagtgaacttgccaatcaaatttcatctggacaagatatacttgatggctttggttgtctgtgccttttatatattatttatgaagttttaattgctccatgctaggaatgaacagtaatagtttttttctccattttcaaatgaacaacaaataatattttggtaatatgtttttatcaaatttgtacattatatttggttgatatttctttcatctgccattatgtccatctcactctaaaatagggtactgcaatccaggtttatagtcagtgtaactttgaacccttcagatcatgtcagttgtagtttattttctcttttggttaacaattcaaagcctgtatatcattggctttattgctattttttatttttgcaaattgatgatttgttggatttcatgttcacataatcgtgtcatccatgcgcacacatctgcacgtgtatctgtctgtgcaattcattataatattcttgcctaattgttgattggttattaggttgcattgaaaactttaattgttattcaccgtgc

SEQ ID NO: 45658 - DNA, 683 bp, Manihot esculenta
  Intron number 2 from transcript cassava4.1_033597m (locus cassava4.1_033597m.g) derived from phytozome v7.0 (chr-ID scaffold03219; pos 528698 to 529380)
gcttggattcttcgtatttgttgtcattggatcatgtaaggctcatgaagttgattgctttcttcgccatcgatttatgttttctttggcttgctataattttctcccaatttcaaaattcttttggtggcttttctcaatattaaattattagaagaaaagtttaattgactacactcttagatgagtgtgatttgtcaagtgctgctaatatgcctaagattgaacgttcctgtagtttgagaactttgacttggaggtatattcagtttgtaacatgcaataatatagctgaaagattgaatttggaaccaaaggttgctggtggaaatcagatgtttagagaactgctgcattctagtgccaaatagccatctgtacaaatatacaaaatgaaattgaaaaatggggcagagaaagcatactaagtttgtccaacgaggatttcttggcagttgtttctggtttagtggaagttagaaaactagggtgtcattccaatttttcataaggatttcgagttgctgctcactttgatcaaaatttgtttaccgacaaaagctatttagtttattgcatcttactgtgcttataaaaataattgtttccattcttaatgattccattttcattggatgtttgtaacagctctattccagataatcaggacagctacaagtggg

SEQ ID NO: 45659 - DNA, 969 bp, Manihot esculenta
  Intron number 1 from transcript cassava4.1_008110m (locus cassava4.1_008110m.g) derived from phytozome v7.0 (chr-ID scaffold06513; pos 18420 to 19388 reverse strand)
ccacagtctggctcgcttgggacacgcaaaaatctgtacatttttctctatacaaacaagcttttatatgtagtttcagttttctgtgttctttgaggtcgatcttctagcaatttatgtatttctgcgatttggtacttttatctgcattcagtggataatatctttatttaagaaagtggaagacaaagtgcttattgtttcgcattggttgtataatacatccgttttgcttgctcgctcgctcgctagctagcgtactgttgaataattcatttttcttaaccaagatttagctagatgaggtagattttgatattgttcctaactgtcgtgtatatagataatctattttacataaaaaacgatgaagtgaatgtttctgttttgattaaatttcattgagttagtgctgattttgtgtaaatatgggaatatatttcgtttcaattgcgaccagttagttctagcacattgtgacatgttgtcctgatagtgtacattgtttcgtggcaagcatctgttacttaaatttcctttagttttggtgtttagttttgggagtttactgctgtttgatcatagtggtagtctcttgtgctgcatttggtttctctgagattgtgaaaattgaagtgaaatcgttggatttttttaaaattttcttgtacctacatttgattgaaaacaatgggtctaatcagcttggttgacttcataagtttatcctttgaaaatgggaaatgcttaaaagaaatgatgtaggtatatctttttctttgcatttgcattttatcttagtatctggatgagaattcagttgagtttagtgcttcgcattttcatatgcagtatagctaatttataaaaatgcagcaacttttactgatggacttttttgcctgcttctttataaagattctatcttgcatgataaaacttttatttacttgctaaaaatgcagcaat

SEQ ID NO: 45660 - DNA, 924 bp, Manihot esculenta
  Intron number 3 from transcript cassava4.1_019281m (locus cassava4.1_019283m.g) derived from phytozome v7.0 (chr-ID scaffold06701; pos 515464 to 516387)
tcacattactactaggaaatctccttgtggtgaaggtatgtaccaaaagactaagtcatgtttaaactttaatgtaatgtcatatcctaagaaactgcgtggcatacagggttaaggaaaattcctttgattttgacccctttttttgttgctatatattacatgcatatctgtatttgatgttatgagtgtttctccactgctatgtcgtgttagtaatttgaacttgttgcttaagataaaagaaaatttgtgatgtgggactaaaaaattgaaagaatggaaatgcttctctccttctcggtgaatggagttttgtgatcagtgatgctgcattatgcatgcaaattttgtacatggatcataattttgattcgctttgatacagtactattgatgtctgatattgtcagttatacacccttggtctaccgtacaacttgtcaagctaaatccatctttttgtctgtttaagttggattttaatatgttagatattttgcttcagttatgcttgttctttatcatggtgatttatattaatttttgagttgcattttggtattttgttgttcttcttacttgattgcttttttcctttcagcactatacatgtaaaatatcatctcacagttaggcataatcaaatcacacatgtatgctacatcattcatccttgtgcattggcagttcctaacttattttttaaacttttggtgggaaagtactagtgccaaggtgtgaattgagcatgaatttacaagtttatgggcatttgatttttgattggttacatttctatttcacgttcttggtttttgaaattattagggtctttattgctgtttagattatgtattattagagaatgtatcacaccatgaataatttttaccttctgttcctgtttgcaggaaccaatac

SEQ ID NO: 45661 - DNA, 954 bp, Manihot esculenta
  Intron number 1 from transcript cassava4.1_034135m (locus cassava4.1_034135m.g) derived from phytozome v7.0 (chr-ID scaffold03454; pos 281942 to 282895 reverse strand)
gcaagtcctttatcaggttatttgttttatatttctttttcttttttccctccccttctgctatttggttgaccagtttatatttgtgttttgataatctgtttgcttgctgggaaaatgtggtgaacggttttaatgaaagggaaaacatgatttctttcgttaataatatgagcgaaacacaggcatcttgacgttttcttaatttcgatagacctcaatgccttcagataacagaaaaaggaaaaccatcattttctttctggtaattcttttcaattctacgtataatttgccgaatgtttctttgtcctaaataaaaatcaattttccttcattttctgtggctgcaatgtggaacaaatgtaatttatgtctctcttcctcctcattataaatacatttgaaattgttgcatctgtttgctattgattatctcgatggtggtccaaactattgtgctgctgataaggatgaatgaaattctggtaaaaatcttgtatttttatgttcttaaattaattctaaataatgcagaaatgtggtgttcaggaaaccacctaatcagttaagctgtgatgaatggagctggcattcggttttcttgccaatttttctgtaaaaaatacaaataaagcagtttttcttccccatatggccatgaacattctattttactttacaattaattcctgagttgaagtgaatcagttttctctattgcctaacaccctctatgagcaaagctggtgttgtggcatgttatcaattgaatcaaaatgccataccttttttttattggaaatgaggttaatactatgcctttttgctataatgagttctcgaaagcgagtttgttttcttaggaaacctgaagcaattgatggttttatctcttccatgacatttctaattgtagatttgaatcaatcactttccaaagaacaaaagaat

SEQ ID NO: 45662 - DNA, 603 bp, Manihot esculenta
  Intron number 3 from transcript cassava4.1_013039m (locus cassava4.1_013039m.g) derived from phytozome v7.0 (chr-ID scaffold08799; pos 601251 to 601853 reverse strand)
aggagtgacctgggtagacaaggtatatacatatatatatatacaataaattttatgttctttgtccactatgttcaactgccatggcctcatccctgtcttaagttttaatgtttaatatattcatctgaatcatccatcgttgtttgcgtaaatgcattaatggcagactttgtattatactttcctctaatggtttttatcgatgtttttctgaatcaaagatttgtaattttcacatgtataacgtaagttttggaaagtaagagtctcacttcatttattatctctccattctgctcgagtttatgccaaaagagtatagatcagaataatcctgtatctctttcagatcgtctaatattagcatttctgatgaaacccacaaccttaaattgtcgctctagctgttcttcatgttctcagtatgaagccatgttaacttctcccattgacctgcttgcctttactctcctttgcacgtctgcaagtgtaactcattaaaggcctagtacttctttaacttaacatctttttgtatggctgtgtttggtctctctcgtgacagatagaggctttacccatcaaagaagacgatctgtc

SEQ ID NO: 45663 - DNA, 581 bp, Manihot esculenta
  Intron number 2 from transcript cassava4.1_007938m (locus cassava4.1_007293m.g) derived from phytozome v7.0 (chr-ID scaffold07041; pos 91398 to 91978)
cttgtttctgggcccaaacttgaaggtctgatcttttagtggaatatcatatgatcgaattgagcaatagtgtcgtcatatgttatcagaggttgtactggtgcagggaaccagttgatttttctgcaatttagttttttttttagccctttttttgggtgtgtgtgtgtgctctcacaaatctataagttttggaccatgcatagcatcccaatgaagtcatttgagctaatattctgttatactgagtctattcttctctacctaaacaagctttgaactcatgctcctatttcctcaattaggctacagacaattttctgaaataataataccaaaaatttgctgccaaattctatatagatatcatagaagtagcagaaaagacaattaccatgataccagctcttttttttttgtatgatatcattgaatttaagtaaatatttgattttttccacttgtcgtgactggtcgtttatcaataatgcatattaatttgtaaccactaaccagccaagaacaaatgagttcacatcaaactctcctgaaattttttgcagaagctaaacaagaatttg

SEQ ID NO: 45664 - DNA, 1059 bp, Manihot esculenta
  Intron number 2 from transcript cassava4.1_011195m (locus cassava4.1_011079m.g) derived from phytozome v7.0 (chr-ID scaffold11267; pos 34652 to 35710 reverse strand)
gataatagacaggaaagacattgaaactatacagggtaattgaaattatatatgcgactttattacttttaattagtgacttttcattaaaattataaatttgcaaaaagttatttttattttcaaattttacttaagtaataatataaagtttacaaaattagagatatgactattttttactgttttttgaaaatattaacacatgataaattaaaatgcataaatttaaggataaacagatgcatgaatttaataatatatataaattttggataatttatactcagcttttcaaatttagagtttgttacactttgctcctttatctttagtatgctaacataaaaatctccatctttgaaattacataaaattcctcatctttacatatattttctaaaaattccttaagccattttccattcatttattagatatattttctaaaaatttgtcgtatacttagatactttcgtccattttgcgttagtattttacgaaattactatatagtcccttaatattataactatttccaatttcattctttaattttgaaattattcatatttcattcatctactttatctcttttctcttctttgtcatagagaagagacagatatatagatggagggagtgataaagaaagtgagaatggtaaaagagataaatatgagggataaaattataactaattacaaaattaaggaatgaaactgtaaataatgacaaaatttaaaaattaaatagtagtttatttttaaaaactaacagcacatgacagaaggattcaagtgtgtggctgaagtaaaatcaaaagatacactaatttcaaaatacggaatcaaattgttattattgatgcaattgagggagtaaatatattaaacttaaatgtatattggattcatgttgtttatccaacccatgattaatagggttgtaaacccaactagaactccatatatcaatttatgtctgcttatatatttgtataacatttctactgcacatacaggaaggcctactactagtctagaatctctacttggc

SEQ ID NO: 45665 - DNA, 804 bp, Manihot esculenta
  Intron number 1 from transcript cassava4.1_011195m (locus cassava4.1_011079m.g) derived from phytozome v7.0 (chr-ID scaffold11267; pos 35718 to 36521 reverse strand)
aaacaggtaaagtgtgtatgtatatagagatttaaaaaaattaagggattattaacaaaactattcatatagtttagaaaatttgttaaaaaaatattcttaacttttgatttcgataaatagtttaattatttcatctattttttaagtatttcttaaaaaatttcatcagttaaatttcaaataattagatagcaatttaattcttaaattttatcattattgatatttttaaaagtgaacctccttttattatggcattttaaatttttttcttaagtattagtggttaaatggatagaaagactaaagtatttaactttaataaaggtgtattatgttgagattctaaaagtactggattagcttatgaataaaggtgtaggtatatacacacatgtaccaggttatgataaaatacattataaatttaattgataaaaattacacttgtagaattattatttttttttgcataactttttttacatgtttcttttcttataataatcttttaacaatttttattctattttttatatttaattcattcaaattattattggtttgcttttctttatcctaaatattacacatatgcacaatcattatcattttttattttaaaaatgttctttcatattatgcaaataaataattttacacgtaaatatatttggtcttttgctgaaatttgataaaattataagctattttatttttttaatataatcgtattttgtttcattcatgaattagtttatctcatgcagataattggagttcttgaaggaactatttcgc

SEQ ID NO: 45666 - DNA, 889 bp, Manihot esculenta
  Intron number 1 from transcript cassava4.1_013628m (locus cassava4.1_013628m.g) derived from phytozome v7.0 (chr-ID scaffold07478; pos 340028 to 340916 reverse strand)
gacaagcaggtatgtgctgttggttaattcataaatttgaacttgcaaaggtcttgtggtttctttcttgcatgtttattttcccttcttgtttggatttggaatttattttaaatgatctaagacttgtacaaaatcttggtagcacaagaagtgtatttggtagactggggattatcaaatcaagtcaaaattttgttatagataaaattgataaattggaagtgcttcatgcatgctttggtggaagctttatgaaatgaagaaagggttatatctagttggttctatatgcatacttcccatttgcattactacccctgatctgtgtttagattggtgtatatgaaaattcttaatgttagctttacgatcctactgagtgggctggtgtgggagctttgtgcaaggtccaaagcgtgcctcccccaagatataagtatgcgacatagcacaatttcaggttatgagaatgatgagtttccattttaaatatgaaaaaagcttgtaaactcagtgaattagcttttgccttccctggattggttgtggaatagagtttacacttcactgttctcgtactccttttgaactgaatatctgcttgcattttcccctctcatcttgggttctcctctctctttttctccttcccttttgtgcatttctttgtatgaggaaataggtaaaaataacaaaatcatattaatgagttcagatcctttagaagccattctgaattaagcttaattatcattcttgcatctcttctcccctgaagatgcatttgctctttcaaggagatgaaaaaagatgcttaaaaattatttactaacatagacctgtaatctcagagttacaagttcctggtggacgtgccgaaggagaa

SEQ ID NO: 45667 - DNA, 484 bp, Manihot esculenta
  Intron number 1 from transcript cassava4.1_018136m (locus cassava4.1_018118m.g) derived from phytozome v7.0 (chr-ID scaffold01624; pos 102717 to 103200)
agaatcagaaaaggtaatgagatctttcttgtaattgacacgaagttaatgggtttctgctccatttgggtgaaaactctagagttttgagatgtatctgtcagactgatcaaatcggagttttgggtacttagggttttgaatgttttggtggatcacttactttaggaaacgagctacgctgttcgtgttcttatcaggagttaatggggttaaatgatagagcatttgttgtttagtatatcagtgaagttattcttttcgttttcgttttcattttttgagagtttaagaagtggatgcttgtgaaaccttttaaatgatatgttcacatgattctattggaggattgtttaccatcgctgaaaaagtgcggatgttgattctaatatgtttctttattgtctatgaagttgatgattttcttatcaagggacttgtttttgcttcttaaattaggttgtttgaaacaaagctaaaagct

SEQ ID NO: 45668 - DNA, 592 bp, Manihot esculenta
  Intron number 2 from transcript cassava4.1_011684m (locus cassava4.1_011684m.g) derived from phytozome v7.0 (chr-ID scaffold04024; pos 253294 to 253885)
ttctgctggagatcgcaaggccttgactcatccaggtaattggcagaagcatatatgtatacgttatttcttttttcctagaagttggagaatgctcactttgcttctgattgtttattctatgttttgatgtaagagccggtacaaagtgcaaaaattgataaattaggaaagaacatcttttatgtattaagttataaaatcaattaccaacccagaaaagttaagattgaattgcgagtaaaaatccaaaccaaaattgggcttacctactattctaggattgcctatgtctgtttatgtcctttggtgagagtgcactgataaatttctctttggagtaactttgtgtttaggaaagataagtgatatcttaacgaagaatataatttacatgtggagaaatgaagactgtttaggttgaaaatttcttttataggtttcttgatgcctcttcaaagcaaatttcttgtatgcttgtcatttcttgaaaagtcaagtaagatgctcaattctcttttttctgtttagtgatgctatgtttactatgcctgcagagataacagacaggcagctcaagaatagcgacgat

SEQ ID NO: 45669 - DNA, 869 bp, Manihot esculenta
  Intron number 1 from transcript cassava4.1_009662m (locus cassava4.1_009662m.g) derived from phytozome v7.0 (chr-ID scaffold04043; pos 1094146 to 1095014)
gatcaattagccatagtgtatgttttaatttctttgcttaatttagatatatgcattattaattcctgcctgaaatcaattgataaaggtctctatgtgggtttctttcttttttcccctttttcttgatgaatctctggatgtatgacttgagctatgttaattacttaattagggacaagctctgttaaatatagcatgattaattaattgtagccagctagtcatatacatgttacttggttgtacatgtcacaattgcacggatacaaggatcatattctacttttttttcctttaaattctctatattcaaataaaaattccaaaaggtatacttttatgatattttctgcactttagagcagctctttttcccttttcctttacctttctcctctaaaagggaggaatctaatggcacaagtgtttatagcacttatctttcttttccccttttcttccaagtcattatttggcattttgattctgcattatatagtaaatggatgtggattctactttttggttcagatagaaacagatgaaggtttaggtactaaataaggtaaaatttgcaaattatggatctttgactagatgttttcaggagaattctatgaattactactgttccatttggctactattagaagatagattaaagaaaattattaaaactgtgttccttgagtttgcaaaggtatttggaattctagattcttttctcattactgttttatttgcatatagcatgtgattaaggaaaataattagaaatgttgcaaataattcctcaaaaccgaatgagattctaatctaatcctaaacaattattttatttctgtaattaggtctccatttcatca

SEQ ID NO: 45670 - DNA, 530 bp, Manihot esculenta
  Intron number 1 from transcript cassava4.1_009847m (locus cassava4.1_009847m.g) derived from phytozome v7.0 (chr-ID scaffold08287; pos 16780 to 17309 reverse strand)
attccagagttcttcttctttttttggccttttttgtgcgtccttcaatcttatctttttctctctaatttttgtcttttcttgtctctgtattgctctcattatcagccttttcctttctttttctttttcttttcaggttttataattcaaagctgctgtggaattcttctcagagatctgacaccagagagaagcaaggtatccaatgctgaattttcagtttctaattcatttttagatctctagcttttttacatgtaggtcccaatttctgttcatccataaacggacaattttccagggaaatttgtcatttcttgcgtttttttttctccttctctgattttgatagcattggattttggtttcattctctctcgtttctgtgagaggaaagatgtttccgattctggatttcctctctgaaactaccttattaattttattttcttgagatttgtttttttttaaatttcttggaagttggtattatttcttattgtcttggaatttgaaactatcttgtc

SEQ ID NO: 45671 - DNA, 528 bp, Manihot esculenta
  Intron number 2 from transcript cassava4.1_031587m (locus cassava4.1_031587m.g) derived from phytozome v7.0 (chr-ID scaffold11223; pos 24763 to 25290 reverse strand)
ttctatcatccttcactctaccatacagaccagatgtaagattacaattggcaatggattatttcttagtttttgctgcgatgaggagagattttttgctttatttaaaaaagttctggttggagcatttgaaaaatatttcattttggaaaattgatcacttcaacttgttaataccagcatttgcttcaataaaaatatcaatgaaaaagagttcacatgttgatcgcaaaacattttgtggcaacgcaagagtggtacaaacatatcaaatttcaagtgatgctttttttgtttgcgacaaacatgtcagaatgttaatcattattctaatttattctattttcggtgtatatatatgcatttcatacattatgtcataccaacaagaaaaacatatagcccttcaaatttgtatgtgcttaatctagtttagatgtatgttcttagattttttttttacaagcttggcattctaaaaattgtgttcgataaatttgaattttctgctttcttggcttgaggtca

SEQ ID NO: 45672 - DNA, 539 bp, Manihot esculenta
  Intron number 1 from transcript cassava4.1_024100m (locus cassava4.1_024100m.g) derived from phytozome v7.0 (chr-ID scaffold06683; pos 372565 to 373103)
ggagggtggagcagggccgtgattgtgaggtgcgggagctttgtttccagagttatgcttttcttgtttgggttttattggattagggaaagctataggattctagagcaacctcagaacaagtcttttactcaggtaattttcacaattttgtcatctactttatgttctagggacgcggcggaaagaaaattgattgatttgaattcttgcataattcttgatagtaaactgagggaaaaagaaatgaattctttcattccaaagaagaaaattgatagaaaagaattgaattgaattgaattaaattcttgtgaaatctatgattccaaataagaggatatgtttgtaatcttgtgcgaatcattctataaaatgcaatttttactgctgggacttattctctggttatggattctgtatccatcgcattcaaagaaaccacggctggaaaaagaacaaaaagtctatgcttttgtcagagttctgaattgattcttttccccatttcattttctgtttcttcctttttgaacaga

SEQ ID NO: 45673 - DNA, 640 bp, Manihot esculenta
  Intron number 3 from transcript cassava4.1_019094m (locus cassava4.1_019094m.g) derived from phytozome v7.0 (chr-ID scaffold12498; pos 98999 to 99638 reverse strand)
gtccgcaagagaattgattatatctctgctgaactgtacgtttttgtcacttggcttatttctgtggttgcttttaagttagctatggattatgaaaatttttgatgccgtgatcaaccgtccctttcagttgacaatttgcagcataaagttcttcactgattgtactttctgctagttttgtgtgccatttatgggggttggtagtttctagggttaatggtcattgatggaaactgcagtttttccttccattttgaattcagcttttactttcatttatataaatatatataaatatacatatacacacggtgcatgattcatctgtttgccttttttggtggatggggagaaagggcagggtaatgtcattgaaaaatccatctcagataaagatctgttgttgcaatatatgcaaacaaactaaatggatgcagatctaatgacaattttcatttctaattttctggtctataagtttaggcacttgtgctgctaactgtcgttcattttcctcttctcctggcatcgttattcatatatatatgtatgtatatattgttacagttattctcgtgttgctgctgaatatccttttggcatataaacgtttttctgtatcgcaggaagagacttg

SEQ ID NO: 45674 - DNA, 515 bp, Manihot esculenta
  Intron number 1 from transcript cassava4.1_015601m (locus cassava4.1_014737m.g) derived from phytozome v7.0 (chr-ID scaffold10849; pos 40004 to 40518 reverse strand)
accgccgaatcgccattgaatccctttggtactctctttccctccactgttcttactacctcattttaaagaaattttcttttcaactctgggaaaattatttcctggatttttttttaattgtttttccttcttgccatgtgattgcttttaaaaagaaaaaaagaaatctctctttctcgcgctttcagaacagaaccaagttctacttccttgcccacctaagtttattgggaaaaagggtctgagttcaatcggagataaaaaatgaaaatttcgtgatgcaagctttaaatttatatttttatatagtttttattgcttaaaatttctgggtttgaaaggcatggacagtaattgtaaagaaatcctctatcttctccatttgtattatgacatgaagcttcaattttgcttcgactttcatatttgaacagtgcgcaattacttttagaatagtggtttgaacatcataaagcttgggagtaacaatttgtttggttttgcagttgtcc

SEQ ID NO: 45675 - DNA, 795 bp, Manihot esculenta
  Intron number 1 from transcript cassava4.1_009783m (locus cassava4.1_009783m.g) derived from phytozome v7.0 (chr-ID scaffold03602; pos 92982 to 93776)
aaacaaaaaacctaaaaatctagttttatagaaaggtaattttgtgtttggttcgaaattttctcttctcgcgcgagaaaattcctggcatttcctcgagaaaatttgctggtctcatttttcattatatcagtgctttttttctcctttttttttggttttcatttcgtgcttcagttctaaccaggactgttaaatttgctatctattttgttaaaattaatggattacgaaattgaattgaaaatgtggtgatcgttatcacgatttttgttttcgggtcagaatttattctaaatgaatgaagcatcatcatcattctgcattggtttataactcaatgtactcagatttcgttttgtacgataacagcaatgactcagtaatccgcaattactctgtgattgcggttagctatgtgatcatcacgcactgccaaggcgttatattccaaacttaccttctaattctaaaccagctttgttggttacgtatgtggtgatgtattctaatcttccgaaaaggcacattgcatttttggcatgtattcgggattgggtgtttgagtgcattgaatgggaaacgaattgttttaactttaaagtatgtttttgtaaatatgcatttgaatgcattataaactgggttgtggcctttgaatcattgaatttttgtctcaaattctgcatcaaaattgttttgatgtcttgaggtttgtaggttataatgataagatgagaattagttatatgcgttctcatataaagttgtcatttgtttggcaggcataacgaa

SEQ ID NO: 45676 - DNA, 604 bp, Manihot esculenta
  Intron number 2 from transcript cassava4.1_030659m (locus cassava4.1_030659m.g) derived from phytozome v7.0 (chr-ID scaffold07036; pos 40458 to 41061 reverse strand)
aggtcgatttcgagttctttttgaaggtgatcacctttcacttacatcaattaatttgctctagatttctagttcagattcctgtttttatgcttgtgtgagagagcagattttatttttggtattgtttgacacgtgaatcaaagcgatcttgaacccgcaatttcctttgtttttcgtttgtctggtgttctcgatttgaattgttcgtcaatgccactgggtagcaagttatcaaatccaacattggctgcttggaaatgaatggaagaacagaattaaatacttgaatcttcaatctgctggcatatttgtttcctgtaactcggtttcttcaaaaggggcgatcagaacgcaaggttctctttgcctcataaaaaggagaacttctaaccaatcaattttgtgtttaaaagtttttttttttatcactttgcaatatcttcctttagtaaatttggaacattatttgtctgaaaaatgattagtgaaattagtacgtcaagtaggatattatgcattgtgtagcctttagaaataaagcttatatttagtgggaggttaaagtggaatttgtaatcactacaggtatatttgaaacttc

SEQ ID NO: 45677 - DNA, 386 bp, Manihot esculenta
  Intron number 1 from transcript cassava4.1_002607m (locus cassava4.1_002607m.g) derived from phytozome v7.0 (chr-ID scaffold00847; pos 961986 to 962371 reverse strand)
ggctctggctggtctcaaacgccaccaccgtattggtttgttcaccacgcttccactttttcttttggtgcaaatatccttctttttttacctttgcatgtgctgtaaatggcccgaattgagcgtaacttggcttattctttggtttgagtttctgcatatgtccgtaaattttcttatctacatgttatatgtttgggttttgggaaattttggtctcggaaatagctattatttagtcttcaaaataaaagcagggaaaattctgttttttttttctctgcttgtcaacaaaagcggtgcttaagtgcagaaattaactgagatatcggcgctcgcttcctttctcagctataggagtatctggcggccctgatagcgtggcg

SEQ ID NO: 45678 - DNA, 669 bp, Manihot esculenta
  Intron number 4 from transcript cassava4.1_017263m (locus cassava4.1_017263m.g) derived from phytozome v7.0 (chr-ID scaffold06039; pos 209119 to 209787)
tttggtattcaggagcacattgatcttggaattaagtaagttttatgtggttgattatgtttaatgtagctcgtatttattgaagttgcaagtgcgttttctgtttatgatggtgatatgaatgggctttgatactcgttcacttttgcactattggtcctaagctagaatcagtttgtcaacttagatagttgggatggttgcatgaagtataggtgttgatttggtcgcatgggtgttagcatgcccaatgctaccgtgtagagtcagaacctaggttgatgaagttggaattgcaataaacttggactcttcagttccactgtaattctcatctgcttattatcttttcttatccttctatggatccagttttggggttcatcgcaaatttattggtgttgcactattttattgccagtttttcattcttgagaaaatgggtatatgcaactctctcacttttttacttttagggatcattcatattatggagtcgttgggaattggtatgccttctgtttgattgtagttaccatagattttgcactggtgatgttgaaatggagttaaaaggcttcgcttttctctatctcttccaggatcaatgctttgcttttttaattgaacttgaaaactgacttgaatcctttgcaactattttcaggt

SEQ ID NO: 45679 - DNA, 563 bp, Manihot esculenta
  Intron number 1 from transcript cassava4.1_022710m (locus cassava4.1_022710m.g) derived from phytozome v7.0 (chr-ID scaffold11039; pos 25607 to 26169 reverse strand)
ttctccccgagattcgtgataggcgcaccgataaggtaacctctttctctttctctttctcttattctctatgtaatgcttaagttgatacacctacaaacaattacagaactagagtctcgagttcaaactccagaacctcacggttcaaagcaacgagtgagtaactgaagaatttgaactcgagacttcccagctttgtagtaaatgaatagtgaaaacatatatcgttattagtctaataattgcactcttttagagtgtttgaatttgaaatatgacccggaaatcaagggatagtttttttagttaatgttcttaccattgactaattaaaactgtcttaaaagtagcacaatttttgcaaaagttggtgtagaataatcctgtctcagcctcagtttgtcaatgtgaatagccacaacattgtagagacggtggaaacttgagatttgtaataaaaatatataaatgcatttgctacaaattgtgtccaataatgcttaggatttgactttgctgtggcaggtatcagcttccaaggtcctacaagagacctgcaa

SEQ ID NO: 45680 - DNA, 914 bp, Manihot esculenta
  Intron number 2 from transcript cassava4.1_014393m (locus cassava4.1_014393m.g) derived from phytozome v7.0 (chr-ID scaffold03468; pos 29073 to 29986)
taccgcgctggaatagtccccgtcactttccgccggtgagtgcatctccgcttttgtttttgcttacacattctgggtcagattcccgttcttttcattctagcttttaacttaagttctcggctacttaagttgcttgatagtgcttaaattgaggttttatttccgcgtaaatcactgtctacgtattattaatccatttttttatataaaaaaaattatactagtatattaatttgttttgacaatagggatgggtatagttttagtagcattttatttttctcgggaaacgaacagcgcctcaaaggaactaagcatcattgcaaattgctggcagagaattgatcctcttgttgctttcttacccatacaagaaaaattattcttaagaaaaaagaatgtttgaaatggataagaaaattactaaatgaaaaatatttttgtattaaaatagaaaatgacctttttatcatgagaatttaattaatttttttatttataatattgtaattaaataataaaaaataagttaaaaaatataaatcatatgttttattttatattttttctaaaataaataagctgtacaattatctcattgatccaagggaaaatgatagggtacatttattatatgtagtacaattaccagcaaacgcactgcatattatgaaaagacgaagataaccttaacctttcagtagatagacttaaatgatgataagcaatctggtaaattcatattcccgagaaatccagaaaagggtaaaaattaatcactccaagtcccacgcgtgttggatcactcaccagacggaaagagaaaaaagcccccatctatgaatttttctttcttatgggattggaaaataattttaatttacattttttttctggatttgcaggatacc

SEQ ID NO: 45681 - DNA, 395 bp, Manihot esculenta
  Intron number 1 from transcript cassava4.1_011854m (locus cassava4.1_011854m.g) derived from phytozome v7.0 (chr-ID scaffold02805; pos 14388 to 14782)
ctttttatgtaagttgcaatttgtttttctttataaaattatgttggctgagaatcactgcttgatacatattcaatctctaatctagaccgttcagtcatcttgctggtcatagatgcaaccgaacagttaaatccattgatcaaaatgacttactttttcctttgactaggaaaatattttacacggactaaattttttgagtgtctcaaatgtcagaaaatacggaaaatgttttcctaagaaatgttttctgtgaaacagagtctatatctctttctgtgaatctaggttcaaaaagctatcttcaattgttagttatatcatgatattcttctttaatgattgtttgatgatcagggctgtgacatctgctgggtcctctgagctaattg

SEQ ID NO: 45682 - DNA, 673 bp, Manihot esculenta
  Intron number 1 from transcript cassava4.1_009646m (locus cassava4.1_008084m.g) derived from phytozome v7.0 (chr-ID scaffold04116; pos 234503 to 235175)
ctacatttccagcccctaaggtattatttcctttcttttttcagttgctgctgcttcagttgcttgctaccaattctgatttgatgttaggatttgtatggttgcattcgttcttttgattcgacttctggtaagtgacaaggagtagcaagcaatgttaacaatggataaaacccagaatttagtttcttcagatatttcgtagtttgctgatctgaatgaggttaaccaagttaactaagttagtaatctggtcatttcgcctgattggattagctttgtcaccttgtacaacgaaatatttgcgcatgggtattttcttttctcattccagacatatcttatttctttgtgagaatgggatgatctgataaagaaatgaaatttaattatgatattggattttgtgatcattgttgcaatagagttgtaagggggcgtttacggcagccaatgcagtttattgcagttgctgtagccttctgtcatatcttaggaagttattgcagtgctcatttttgtttatattgatttgtaccttatatttcagagtatgataatcttagcaggtctgaaattattaagtaattcttgtttatgttagaacttagaataacccagaagtcttgttataatagggagaagctgacaaaggaaagaagaagaagaaggg

SEQ ID NO: 45683 - DNA, 372 bp, Manihot esculenta
  Intron number 1 from transcript cassava4.1_000774m (locus cassava4.1_000774m.g) derived from phytozome v7.0 (chr-ID scaffold10689; pos 525250 to 525621)
gatcccattcaaagcctcttagctgttggaactctgtgagttaatgaattgctgtttttgtttttttgctttataaaaattcataattaagtttcttagtttatacttaattaatctaactgctgtttggttttctttgattaatttttgtttaagaatttaaatgtagatgctagatagttcagttggtatcatttcacaggttagggattaggaactggaagaatcacccccttgtgtaaatgtgaatggtttgaatttgccataagtgatttagaatgattggaccagatgaaatgtgcacaactgaagtcttaagtttcttttatttgttttttgtccctgaaaaatccatttttacctcctgtaggg

SEQ ID NO: 45684 - DNA, 797 bp, Manihot esculenta
  Intron number 2 from transcript cassava4.1_017831m (locus cassava4.1_017831m.g) derived from phytozome v7.0 (chr-ID scaffold10045; pos 71744 to 72540 reverse strand)
agcgttaccattattggaccgcctgatacgctttagtatgtgttgttttatgcaacttgatagcttgaagttattttctttactttcttttttggtgattatgtttgattagatagtattgggggaggggtaaaatttgttgctctttatagttgtttggaaatttgattaattttgttgaaagtgagtgatcttaattcgatatgtgcttgttttagggttttaggctgatcattgagttgatattatcataatatttggttgttgtggctttttttgagaactgtatgaacataaattatttgatgagtttgagaatgattgccttaaccagaactaatatcagttttgtctcagctttcaagtaggatgattgattcgagttgggagctggtgaaagcttgtttttcctattcctatctgttggttttaacttgtgaaccttgttctcacaagagcttctctttttttctttttggctgttgggttttgaatatttataaatggtccttatttgtttggtttctagagtgtcttcatggaagcattggctgtttaattgctttgtgattagtcggttctagtatttcattttcagtgccttgttggatttggaaaagctgcatctgtgtgattctttctattatcagtatcactaattaccttttcactattctgacttctgggtgattaactagagcagttatctggtctggtgtagaatcatggaacaatgatcatttcctcattatgttttttcttacaatcttttgatggcagtgaagggggatttttta

SEQ ID NO: 45685 - DNA, 548 bp, Manihot esculenta
  Intron number 2 from transcript cassava4.1_013443m (locus cassava4.1_013443m.g) derived from phytozome v7.0 (chr-ID scaffold11425; pos 393801 to 394348)
agatattggaatcatatttcatctgaggaatccaggtaataataatatctattttttaaaatgatgaaaattgagagagtttattggcctaatatttctgtaaaatttgaatagctaaggaaagtgacaactattttgtttatttagataatcaattgtgcaaatttgatcttattgcctctttgcttgggatttggttggcattaatggaaatccattttgaaaattgcttcattttgatctttaattaatagccccctattctaaacaggcttacacttgcacacaagcatatacattgaccttgtatatatatatatatctatggttgtcattttcgcttgtagtctggcttaacatgaaacgaaagaaaaggaaaattcagattaaaaaacctgctttttattgttgaacggtcagaagaatcacataaaaaatttgaatatatacgtcgcttgcttgcttgcttgatcaactaattaatgtagatagtgtattatttccttgacttattgcaggtttaataaaattgcatatcttcaacaaat

SEQ ID NO: 45686 - DNA, 893 bp, Manihot esculenta
  Intron number 1 from transcript cassava4.1_031240m (locus cassava4.1_031240m.g) derived from phytozome v7.0 (chr-ID scaffold01608; pos 211248 to 212140)
gcatcccagttagtcaacctttcactatgactttttcattttcttttataattagcttgaattctcagtttagttgctgaaaaaattttaaaaatcttccgtctctctctctctctcttctttttttttctctttctttttgtaatgctaatgtagtgagaaacagaaaacctaaggaaaaaaaagtgatgaatttagctgtagcctatacttcatggttcatagtttagatattgatctttttttcacttgcatcttttgcgtattaaatgatagagttaaatattgtgtagatataaatataaggctaaatataattttttttaaatagtttttcatcaatcatagtttctgaatattgaagcgaaattggtctcgaacagatgcaaaaaattatgaattagttgacctcaattagtttgagattaggacttagatgttgtagtttttttcatccgttaaaaaccaaattcattttgtaatatatttatttaaagtaaaatctgtaccagttaatgagaatcatttttaattacagcatatgaagtcagctgcggctggggcctagatgtttactgatccaaaacaaaatattagcttgtaatcacacttaataattttcttctatatttcatgatattttctattttatatttctgctacattggatcgaattgaagagcttgaaattgaattttattgcttttgttttcttgttatttgggaagattttgttcactgtcgatcttctgtttatgcctttggatatcaaaactgactgtaactgttaaggttacataatcaattctcttaacaatatgaaactgatgctattctgtgtttatcaagttttattaggatcatagaaggtacttggcggagcgcgagtttga

SEQ ID NO: 45687 - DNA, 575 bp, Manihot esculenta
  Intron number 4 from transcript cassava4.1_014329m (locus cassava4.1_014329m.g) derived from phytozome v7.0 (chr-ID scaffold07478; pos 711409 to 711983)
ctgtgggtccaattctaataatcagggtatgtggagacgatttttagttgttaacttgaatagtttaattcatgctccatggagtggtttgtgaagaaccccagtttctgtttttgttttgccatagctgcttttgcatgaaaactgacattttttgggcagtgaaatttgatatacaaagagtttgccattttcttatatataaatttatgtacactagaaattgggaagaagaattttaccctgaattgatctagaggataaaagcatatgagtcttgcattaagagtttgcatgtatgtgcgttttccaaaaaaaaaagtagcacctatatatgcttttgctttgttattttgatgccagtacacataatatggattttcaagaaataattactatatatacaagtggcttaactgtgctatcttcaaaagcaacatttgtattcacacaataaataaagaagttggagatcttatttcacaatgttatgatgcaatcgtgtttcttccatcttccactattcagtggttcacatgaagataagtattgttattgtttgccatttgcagcac

SEQ ID NO: 45688 - DNA, 742 bp, Manihot esculenta
  Intron number 2 from transcript cassava4.1_014945m (locus cassava4.1_014945m.g) derived from phytozome v7.0 (chr-ID scaffold04457; pos 1415127 to 1415868 reverse strand)
tttcgctgtcggattaacttgtgctttcaccagcggtaacattacttttcagtttgtttttgctcgtttcgttttctttaattttctaatttatttatttttgtttaattgttttttaatttgataattggcgagatttagaagcaattttggccattgttcgatttttttttaaattatatttctttgtcatttctttgtcatttctttggtactagcgattgaaaggaacccatcttgtagctattctaggttcagtgtgctagagagatttttcaaattcttgtagtattcaaattctatccttgcctgaagtccagtaagcatggccaatggccgtggtgcttatgtgaaaatggctgctaaaagattgcgagcccctcataattgagaaaagttttttcttgattaatttcaaattttctgatgccattcaataactaatacttgtctgtctcaaggtttcaaaaaagttctgctgagcttaatttctaaattgtaatccagtatatgaaagtcagtatatatattgttcctttcgtttgttgtcctggttggtaaacaattgccttgctgcttctgctgatatgatttgtgttttacgattctgttatattctcataattttgagcatccttttggacaatcttctctcaacctattatttctaactttatgaaattgaatgctgtttcatttggcaacagggaaggttattctggaatcagttattttgacaact

SEQ ID NO: 45689 - DNA, 485 bp, Manihot esculenta
  Intron number 3 from transcript cassava4.1_016509m (locus cassava4.1_016509m.g) derived from phytozome v7.0 (chr-ID scaffold00847; pos 1168263 to 1168747 reverse strand)
tacagggtaaatcttaatctcagtccatgatgctcttattattttttgcctcttttgtttttgagttaccaatgatgtcaaaaattggcctccattgattcccgtagttggggaaaccaggattgtaccacctggttcctggtggtgaggtcccccaatgcctgattgaatgactagtcagcaatgtaaaatggtagatggagagagttaagagagaagagatgacagagtgcttagaccctctctcccaccttccatgaaattttaaagagaccaaaaaaaaaactcttccatttgtctttactgttgctttacatgaatgagagagcaggagagagagagagagagagagagagagagagagaaaacagagaagtgtgaggaatattattatatgtgtgtgtgtgtgtgtgtgtggaacattgatgctattgtccgtttccatggcagtttgctggatttgacccatttgagagatcaaccta

SEQ ID NO: 45690 - DNA, 468 bp, Manihot esculenta
  Intron number 1 from transcript cassava4.1_016509m (locus cassava4.1_016509m.g) derived from phytozome v7.0 (chr-ID scaffold00847; pos 1168965 to 1169432 reverse strand)
tctaccgatatacctgattatctctcggctgattggtatgctaatcggctatcagattttctttcgaaattcttatacttgatttctaatagctcgatcagaggatcacgtctgttttacctcctcagttactttaaaattcaaatttgtgtttaactgtatgatcgatttatatgcatctatcgtcaatattatgaaattactcatatctcgggttgcttgagatgcagcaagcaactttgtatcaggtaataattttgacagaattttttggtggaaaatatgatctttttgcgttgtttgttgtcaaataggagaaaattatttgggaaaagaaaaacagaggagttggtttgaaggaatttgtttatgaaatgcaactccttgtttgatgttgtacaagtgactttgcattttactatttggattgcaggcttgaatctcgtaggaagagaccttttggcccaa

SEQ ID NO: 45691 - DNA, 177 bp, Manihot esculenta
  Intron number 3 from transcript cassava4.1_011604m (locus cassava4.1_011604m.g) derived from phytozome v7.0 (chr-ID scaffold08959; pos 9205 to 9381 reverse strand)
gtattgtcgtacgtcttcttcatagtttaaaacatatttctatgcgttttttatttttattttttataaaaaaagaaattatccatagtttcaagaattcaaaaggcaaagaaataatttgataacaaggaatttatattgggatgaaatctacagttagggggaccaagaacagaa

SEQ ID NO: 45692 - DNA, 842 bp, Manihot esculenta
  Intron number 1 from transcript cassava4.1_002350m (locus cassava4.1_002350m.g) derived from phytozome v7.0 (chr-ID scaffold04457; pos 100925 to 101766)
caaattttttgattatcggtatgtgattttcttgcccttttctttcattttctcgacaaatcaattatttcaatctcacgcgcgagtaaagtttgatgcgtttctgctttatgagaatattactgtgatttctcgtgagaattttgttttctaaggttttagtttgacattttacatttttagtcgcgttaggattggattgagatagataaatagatattgaaccacgattcggcttcattccggatccatgtgtttaaattggaacttttctgtggaaaattgagtacaaggaattgggagaatctagggtttaaaaggaggtggagggtggtatttgtgcaagaagttagcccactagtccatcacaagtacatttatttgattacctgttaatgaattctcattcgtatgtctattcggggtttaaagtgctagccaaaggtttcagttgtgtgtaccaaatatgagcgtttgctatgcatgatgatcatgaaaattaggatgcgtgattcagcccaaaacaacaaccaagaaagaaatgtatcctttctttgtgataggctagaagatcatgggttcaaacttgaatgaaaataacagctgtcgtccttcaaatttgagtaaaaaggaagagaaaaaaatgcataacacaacctaatgatctttcatttgtgtacaagtattttttatctttcatttgcgttcctttgcagtacaagtattttttatcttcaaaatttcaaaaatcctatgcaggactgtatctgcagtgtcgtttatctaaattggaaataatgtccaaattaacagatttagtgaaagaaacatctgaaagtggt

SEQ ID NO: 45693 - DNA, 454 bp, Manihot esculenta
  Intron number 2 from transcript cassava4.1_027957m (locus cassava4.1_027957m.g) derived from phytozome v7.0 (chr-ID scaffold06916; pos 762627 to 763080)
attcagtcgtaactttctacttgcacaacttagtctcattaggtttaccatgctcccttcaaacgaagcgaatgctatataacatgtggaaaattcttgtctacagtggattaagagatagactcatgacattgcagctttttgaatttcattcaaaaatttgcagtgaaataaaaacagaaattttagaatgaaataaaaaaatatgcgtaatgtcattggattgagtcgcatatgaaaacgtagacctagccgaggcaagaaaatttctaaacttgcaaggaaagcaaattatatgaattctgctttggaacagagaaaataatgaagaagagagaaagcagaggacaaacagaaaaaatcatcaacataatttgtgactttgctttctaatctttcccctttttattgtcatgcagaggaaaaagaagatcttgacctacattaattgctg

SEQ ID NO: 45694 - DNA, 728 bp, Manihot esculenta
  Intron number 2 from transcript cassava4.1_011242m (locus cassava4.1_011242m.g) derived from phytozome v7.0 (chr-ID scaffold02658; pos 1074773 to 1075500)
tgggactgggaggaagcaacaattagcttcccttggtaagatttctctggaaaaattgcttgctttgctgttgtatcagtctgaactagttatagcttgttggaaatgttatgattaaaagaatttcctctgtgcattcttttatgtaccattttctaaatcattatgttgcatattttctattgtctatcgatgataagtatgttttttaaatatcaacattacaattgaaacatgccaggatctgttgaaactcttcattttcaagaactcagaggcaatttacatcaatggtataaaaaatctgctagatttgttgaacagatttcacggtagaataaacagttgatgctaatgaagaagttattgtttaggaatacaatcttttgaatttaaagcatgtttaattacttggtcaatcctagcaaaagattacttgggtgaaactctcatgagtagccgtagtaccaattatatccatacatacacttatgcactattgtcatcataggtacaatatttgtgatgtatttaattatttgtttcttttggtaacaaatacccattttccttgctcaaaacacctagtaaaggttgcatcttttagttccaaactcctctcacttttagtcgtttgcgagcttgactctgcctaggaaatgggaattcgctggtagatctatcttattggtgttaatgatacaaaattcaattgttttgctaggtga

SEQ ID NO: 45695 - DNA, 448 bp, Manihot esculenta
  Intron number 1 from transcript cassava4.1_025403m (locus cassava4.1_025403m.g) derived from phytozome v7.0 (chr-ID scaffold07520; pos 1018942 to 1019389)
tgttaccggttgctccaaccgcaatagtgttggcggtcagtacgtttcttctgttactattttatcttcaatttcaattgctgcggcatggagaaatagcttaattttattatcattaatggtaaattggctacattacctgctctgtttatctaaattgttcccttgagcattacttgcgggtaacaatgctttctgtaatcaaaataatttgtctgcatttgagttttgtgcagcagtgaaactggtgctgtaatgtgtgggttgttgtcatatattggctgttcagcattgaaactggtggctgctatctgagctgaccaggttgcagacaagatggctgtggcaataatatgaatagcacatatcattgatttttcgttctcagtccatttgtatttcgcatgttacagaaattgctgctagagaaactttggagcacgttata

SEQ ID NO: 45696 - DNA, 707 bp, Manihot esculenta
  Intron number 1 from transcript cassava4.1_016226m (locus cassava4.1_016226m.g) derived from phytozome v7.0 (chr-ID scaffold12946; pos 41297 to 42003 reverse strand)
ctatctgagtcgactcagcggaacccgctctgaaggtaatcatactaaaattttctcgatatcttccataaataaaaataattttgattaaaattcttaatttttatttgggttaatgtagttctgctgtgagaaacaatggatctctcatatctgtgaaactatttctatatgtctatcttccataaatttgattctttcaaagcagaaggcaagaacaaatttggagtttgtagctatttttatggaatttatatatcaaagacatgcctcacctgtgaatttaaattcttttcagatttgaattgattgattcaccgttggtaggttagaaagtgctggaattagaaaggaaataaaaaaatgaattgaaatttatcaatttgggattttatagctttcaattggactgaaatctgcagttgttcgagcttcatttctcatatacctgagtttgttgtgtaattcgcatgtgtgcatgacttgtaatcatgtgtatgttaacaagctaaattaaccatgaaattgaatcaggctcttacaatttagctgaagattttggctacgtttgaacccaaaagtagattttggcaactgcacatgtactcatgtggatatgtattatgcgttaaagatattaattcagatggtgaagttatgaagggtttctaatgtttgaaaattttttgcttaggacattggcagag

SEQ ID NO: 45697 - DNA, 759 bp, Manihot esculenta
  Intron number 2 from transcript cassava4.1_007486m (locus cassava4.1_007486m.g) derived from phytozome v7.0 (chr-ID scaffold03741; pos 448336 to 449094)
ttggatctgccaaaccttccctaagtgaaagaaaggtctctgcttgagagatattatgtttttctagtttttgattctgctgttaaatttcatttcttagtcaacaatgtagtttatgttatttcaaatgttctcctttttcctttgatgaacatcaaatgttaggttaactgaaatttggcatttgtgcatgtcatgaagcattttatttatcctaatgattgaaattaactttaaaactatattgatgggtgcttctacctcagatccacctattgtttgatggatgtgatgggagttttcatttgtgttcaggcataagaaaacttattctagtggcagtcttcagcattttagctttggaacttgtttcccattggaaagttgtatagtgtgattgactaaaaagtcaattttcatttataagatggttgaagtgtaatattttctgcaattaaaattttgaagtaatttattccacagtggaaatgtaatgaaaactttgaggcaatgttccatctgcgatttggtgctatatttttatgttccacaagtgttatctgctaacatgccaattgtctaggctgaagtttacttctcagcaaattaagttgcatattccatattgtttttgttggcatttcaatgaaaaaccataacttgatagatgaatattattttccatgtccagttgtaataatcaaactcatacttatttttgcaggaagtgccacaccatctggttgatatattacaccc

SEQ ID NO: 45698 - DNA, 807 bp, Manihot esculenta
  Intron number 1 from transcript cassava4.1_017985m (locus cassava4.1_017985m.g) derived from phytozome v7.0 (chr-ID scaffold11341; pos 818188 to 818994 reverse strand)
gggattggctctgtaagttttccatttttactcctcttctcttccataatgtaactagcttcagatctgtgcttgttatctagcttttgctactatctgctaatttgattttagctcatttgcgctgctctcggacctaattggaatggatctgcaaatgggttgtgtttgcggtgagctgaaaagccagaaaatcatgaacttcctgttggcctttgtttcttagattaagttgctagtttgaatttcctcacaggctagaataaagctaagtagagaagatgtctatggttgctaaatgagaagtgcagaagcatgcatcttagaataaagcatggattttcttgcgtttattgattgctttgcttaaccaactcagatctaaaattatgccttttgcttctacagcttgtgtgctttattgaactctcttgaattttctgttctcgttacttaacaaaagtgcttacttttactgtttgagccatttattagttactttttggtgattctgttcaatgccttttctttgaaatcaaaagggttggattgggtttaggatccaagtttaacccaatgaattgtcaaattgcctaatttcctcacttcaccattttgaaattcagtcttttagatgaatggtatagcttctactacaatttgcagatccttaggccccaacctatactcacttcaccaaacttaagaacctgcaaaactccacttagcttaacaattttgtttgtaaatgctaaagaatttcttgaaatttaaagctcatctgtgtacttttcccagtttttgtgt

SEQ ID NO: 45699 - DNA, 489 bp, Manihot esculenta
  Intron number 1 from transcript cassava4.1_009378m (locus cassava4.1_009378m.g) derived from phytozome v7.0 (chr-ID scaffold10689; pos 67457 to 67945 reverse strand)
acctaagccttcaattgttcactgctccctcccaggtaaatcttttttatttgtttttttttttctttgattcatttcatttcttatttgcttctccttgaaatctgagtgttagcttattgttctaaaattccttgttttttcattcactctcttggcaaccaaacactgggctttctaatttggtttattagacctcaattggagcttatttttcaccctgtttagtttataatatgttccatatggagtttttacatttattggtagtttaattagtgtaatcttgcaatctagatgtgaatacccaatgtaatacaccttatcaagtaatctttggttgtgatttttaattcatgcgatgacctttttaatctcttcttcctccatcaagttttggatttgttaagaattgtttgtttttctaagcttttcttcacaatttctaatccagggacggtggtggaaccgaaggctgcctccgtggct

SEQ ID NO: 45700 - DNA, 196 bp, Manihot esculenta
  Intron number 1 from transcript cassava4.1_012430m (locus cassava4.1_012430m.g) derived from phytozome v7.0 (chr-ID scaffold07520; pos 730540 to 730735 reverse strand)
ttttctgtctccgaatttaacaaaggtcctttaaggtttgtttggtttcccggaaaactcaccactatgaattttatagtttgcttatgaacctttggatttcttgttgtctgatttattatttaatgccttgtttttttttctctttctttttcttcccttttgatttcgactgtgtagtcttagggcttagcaa

SEQ ID NO: 45701 - DNA, 484 bp, Manihot esculenta
  Intron number 1 from transcript cassava4.1_014595m (locus cassava4.1_014519m.g) derived from phytozome v7.0 (chr-ID scaffold06916; pos 1664017 to 1664500)
ctagcttataaggccgctcaggtgcgttgtcgtttttagcctttcatttttctcgctcggtttgtcttgttgttattgcaaatttgtttagataaggctgaagaaagatctgcaatctagtatctgggggttttgaatgaattttcaattggattaagagtctatttgataactttttaaactaagactttaccgcttttaattgttactcaaagaacgattagtcttaacccggataagtgtagttaatctttacttttgacccaggattctgattcatttaatagtgagtggggcaaattgggggtttatttcaattcaaggagttgaattttggacttcaatcgaagaaatgaagggagaaaaaaatagttgaattctggaagattatgtgagaaatagaaaagtgtttgatccttattctgatatcttgcaatttattcttgtaggatatagcacttgcggatcttgcaccaacccatcc

SEQ ID NO: 45702 - DNA, 1037 bp, Manihot esculenta
  Intron number 3 from transcript cassava4.1_022675m (locus cassava4.1_022675m.g) derived from phytozome v7.0 (chr-ID scaffold03219; pos 377678 to 378714)
gttgtccttatcgacatttcaggtaagttctcaatctaatttaatatctttgcggataagtattaggaccagcagaaaaagaactcaacattacaggtgttagtgactagtcattttaatagttagcattcctcaattttgttttctgttgtgattctcagatgtttactttctgcctccacctattgcagttctcctccttggggaacatccaaaccacggataacaattaaggaatatactatcttttgggcatttcattaacaatttctacagcttatcggggactagagtacttttgaaagaaacgacccttgcattacaatataattagaagttttttgttctttgtattatctgcgtgcagcgcctttaaatttttctatcaacttctattttacactaagcctcgtggcaattgggcctctaaatcaaagacagcatgcaaaagtccttcgtttcttaagctggcttaatcttctagatccaaatagaaagtatctaattatgcttattgcattgtgtttatggtattttttagaatccgtggatgcagactttgttgattggattagttattccaggaatttattagttattcttttacattctagattattttcttaagctaaatcagagaaaaagaatttactactagccttcattttgtttcacataaaatatttatattttttaaaaaagtattttttatatttttaaatgtttaggatactcttaaaattttatgaatggaaaaaaattttttaattaaaataaaaattaagttattttaaagaaaataacttctttcatcactttttaagaattctattaacacctttatatatattaatattaaacaataggaattaaattttataaaaaatattttttaaatacaaattgttttttacaaaagagtttaaattaatgatatatatatatatatatatataggctcaaatgttacttttacttgattgtacttttcgcatgacattgacagtgaagataacttgagggctgcgctcagtaga

SEQ ID NO: 45703 - DNA, 550 bp, Manihot esculenta
  Intron number 4 from transcript cassava4.1_025907m (locus cassava4.1_025907m.g) derived from phytozome v7.0 (chr-ID scaffold07520; pos 1825846 to 1826395)
gttcaagaggtatttttaatttatatttatgattttctacatacatacgcttttgcaatgctatttttaaatttagaaaaatgctattcttggattattatggataaatattactcttttttttgtcaaaattaataaatatatttttctattttttaaaatcatgatttctatgttttgattatatcatattgaaggtcctacatccatattttaactaatgtatctttttcaatatgataaagtcgaaacacaggttaaattatttatttttgaataattgaggggcgtgatttttgagaaaatttaaaaatgaaaagtgtttaatctataaatatattttagttacttatttaataattaaataaaaattaattaaaaaaattagaaggagaagcctccagtttaaagaaaagaaaatataggcagtaaattattgagttataaacacaaaataacgtacatattaattttgatataatttttctcaataattaattaattgtttgatgcagggattaatagaggaaaaattagtggcatcattcaa

SEQ ID NO: 45704 - DNA, 670 bp, Manihot esculenta
  Intron number 1 from transcript cassava4.1_012365m (locus cassava4.1_012333m.g) derived from phytozome v7.0 (chr-ID scaffold02978; pos 27058 to 27727 reverse strand)
ggtcgaatattttcctggtaagtcatttttctcccctttttttgtggctttgtataactctagaacaaatagagagctttggccggttgtgcaattgaatatttttcgtaattggggaaggaaagaaattaaaatagttaaatcaattgcttttggatcagctttggttcctttgttgttactagtagatcctctgtttttatttcagaatgattatgattttgattctctgttgttatccctgttctgtaaagttgtttcttcctaattttgagcttcaatatggttatatgctaatttaacttgatgcgctatctttttttttttaatttttggtgggtctctgtttattccttattttcagtgttatagttctctgaagtctgaatttttcttttggtttattgttccttattatgatcccttttttttctcatatgatttttcttttgctctcttttccttatttgaagggcttctgtttcctaaatattaggtcttccttctctatttgcatgtatatgattttgaacattctgctttctgtgatctctatttttttttctccctcttttctttttcttgtttcttttttcttgtgtttggtttatctagatgttatcaatccattccagaacagttttggaggatttcagtgaggattaagcat

SEQ ID NO: 45705 - DNA, 358 bp, Manihot esculenta
  Intron number 1 from transcript cassava4.1_006318m (locus cassava4.1_006318m.g) derived from phytozome v7.0 (chr-ID scaffold04718; pos 63105 to 63462)
aaagcctccacggtttccgttttgtcgacgctcaggtattttttacattatctgtatttctttctatacatatcactatgtaaaactctctttgcatatgaattcttagcacatatagttttcgctctattattttgttcaagtatgcaattagttcatcttttagggagtttaattaatttttgcactcagtgagagcaaatgcgggctagaagtgttaaaattatggtgttaaagtgacgattgggagaaattgtttcttgatgaactgttggtcaacctgggttgacggattgtcagagctaaataacgctttacttaattatttgaatattgcacaggacatcaagagggagac

SEQ ID NO: 45706 - DNA, 384 bp, Manihot esculenta
  Intron number 3 from transcript cassava4.1_006318m (locus cassava4.1_006318m.g) derived from phytozome v7.0 (chr-ID scaffold04718; pos 63875 to 64258)
ggaaagaatatatcaaggaaggtacactttcaaggtctttagtggcaataaggtttttggtctttttaattgagagaccttttgctactttcaatgctgtacactgtataaaattggtatttttgtatgtcatatcttttatgctcatttgaatgcaataatttggttggcaatttcaaagcgtttgctagggtctgttgttgttttcttccatgattagattaatctatgcatgtctgcttgataactatattcatattcctgtaacaatatgatcactcggtgagttttacacctttaacccacaattttgaatgtgagtttgtgagtccttgtggttggttatttttatttatttatttattttttgcctgtaggttcaac

SEQ ID NO: 45707 - DNA, 889 bp, Manihot esculenta
  Intron number 1 from transcript cassava4.1_000348m (locus cassava4.1_000347m.g) derived from phytozome v7.0 (chr-ID scaffold11069; pos 62618 to 63506)
cttagataaaacactacacacacacaccaggtaatactaatctgctcttcaaaccctaatacataaagccctagacttgtacggtgcttactttcttcttattctttgaagtttttttttttgggttcacctaatttgaccttcaaattcgtacaaattgttcagatctgtgctgctggtttctgcttttctttagtttgtgggtcatttctgtttttcaaggtagggattctatatttttggggaaaaaagtttacttgggaatttgaagtttctctctctatccactttgttaatttcttattgttgatagtgattagggcttttgtttcatttttttaaaaaatttgttgtgctgtaagttatgtttcagtgagatctgagatggtgtttatgcattttattgactgaaggatttggatttttctttttctttctttttttgtgattagtttgcagctttgctgcttgtagcagtggttttaatttgttttgagtttattttgaagttggttttgtatatattaattaatatcttcagggatggggcactgtagttgttgatactagttggcttgtgtataaggggttttaatggttttctgattctccaacctttacattgtttctgaccttggataaatctatgcccaagtcctttctatcatatgctggctcgtaatacaaccctattgcttacacatttctttttttccaagaagcggtggtttggcttcacatctccgctttagttgttgatcttgtagtttcagtctctccatctagtcttttatgcagaaatattacttttacttttttttttattcaggggactaatttgtttactgaatcaggaggggacataagtggagacagaattcaaataatt

SEQ ID NO: 45708 - DNA, 559 bp, Manihot esculenta
  Intron number 2 from transcript cassava4.1_000348m (locus cassava4.1_000347m.g) derived from phytozome v7.0 (chr-ID scaffold11069; pos 64257 to 64815)
taattggtgtggtcactggaagagaccttgcccaggtatttacctatttctttgaggatactataccaggtttatatgccttctttccatagtttggccacaaatattccctaggaagtttcatgatttctttattatttaatggttttaggcaggttaggctgagctatttcttcttcttcatgctgtaaattagtaaaatttgaaagtgaaagataaattggtgcaagtttacgtggaattgttcatagtacactttacaactcttgctttttactcaggtcaaaacgtgtgttttttactttttctatgggtagaaacacaattatactatttatattcaggagcacatatatgcatagatctaatatgcttttcacttgggtcaaagcatgtgcatatgaattcaaagcatcagacttaattttatgatagttggcatctttgttgtagctctttttttttttggttgtggttgtttggttggctggttggctccatctttcatttgaagttttattaaccatttcctttttgcttttcaataaatagatttgcc

SEQ ID NO: 45709 - DNA, 775 bp, Manihot esculenta
  Intron number 2 from transcript cassava4.1_013906m (locus cassava4.1_013906m.g) derived from phytozome v7.0 (chr-ID scaffold06334; pos 49549 to 50323)
agttcagagatccaaaccttctactccgaagcgtactaaatgttacttacgtttttcttgttttactatcctgttattatttcatgccatatatttggatcggattttaactggttatacttgggagcattatcatttatttcagatccgaaatgttgtttgcaatgtatttcattttatccttcatcgtgcgggagatgctatatatctcatgcatttcttgttctttgatcagcaaaccttacagtttattggtcgattcatttctagctgctaagtttttctttcttttttttttttttgtgaattactaagttgagccttggtggtttttatatgcatattgtgtttctttatttaactgcaaaacttaaatgggtccaaaaatattccgttttgaacaatgcatttcacgcagtcgaatcaaactacagcatatgaatattcttcccagcagggaaagttctattttttcttgtttggactagatccataatacaagttaattttacttgagagagagggagagaatggaggacctttccacgtatacctgttaagcaaatacattattttctatttcagtgtattattattgttcaagaaccatttcatctgaaatatagaaatgatgcatcccgactttgtcttcctttttgaactttgcaaatccagatcttaggggtaagttatattttgctaggtaatctttggtacaaaaataaatgaattttgtgataacgttgcaggaggagcaggtcggaactttagggta

SEQ ID NO: 45710 - DNA, 925 bp, Manihot esculenta
  Intron number 1 from transcript cassava4.1_016742m (locus cassava4.1_016742m.g) derived from phytozome v7.0 (chr-ID scaffold05002; pos 8298 to 9222)
tagtcctattgctaactggaagatctctactcctggtgagttcaacctttttttttttagtttcctatattttgaatttctcattttagttgatccttgtggttttgataagtatttgatctggtttctattttgttaagttgaatttgtgatgggtttttgaaatttcttgatatttgtgtttggattcgcaatctcgaaatagcattagtcatattatttgaaattttgatcaaacctaacattttttttagatattcacctttatgaatgcaaattttaaaatttgaatctaacatttgaaattcaaatttaacttcaaattcattaatctaaacagaacctaggtggtgaacttggtaataaaatgtaaatgcagattaatgctttgatatttgatgttgcctgggatatatgatttaattttggaggtgattattgcttgggatctttaatttggatcaaatactagatttggaattgagatctgtagttcttggggccgatctctgttttagcgaattgttccttttataatttcttttatgaattgattgtgaattgtaggggctcagtttggaaattcaaatgaatactttgaaaatcatgaatggttttaatttcttttaaaaatgtttttttttcaaattaaaaagaatagaatttccacctttgaattgatagaaaataaattagttgaattaattttttgcaaaattcttaattctaaaaagggtttccatatttggtgatgatatgacaagaacatagaataaatgtcatgttggtttcatcataattgaaaatttcttttaacagataattcttctgtagattgaatacgaaagggtatcaatcatttaagttatttattttttcaactgatccaggtgatcatccggaagacgttaaagcaaggctcaaa

SEQ ID NO: 45711 - DNA, 910 bp, Manihot esculenta
  Intron number 1 from transcript cassava4.1_010047m (locus cassava4.1_010047m.g) derived from phytozome v7.0 (chr-ID scaffold00109; pos 219597 to 220506)
ccgttttcttcatcttcatcgctgtcatctccctggtaatctgccatactctctccgtgtgctctaattcacttatttggatttcttccaatcttaaatgtggaggatttgcttgcttcgttgattaaatcattccgttaagctctcattcaatctcaaagaatcaaaatttattgattattcgttaatcataattcccgtttttgtatagaccatttgtgattaaactcttttaagtgtagtaaaagatgttctttgtgcagtttgatgggtgatgaactctaaagtctaatcctgtgatttattacctagatattacgtcaattatatatgtatgtatgtagtatattgggtggagaactagccatattgtgtacttgcattttgctgactgtccttgtttcagtgctgtttctggatgtattatggcccaaatatagtttctgaaaagagattaccttatagtttcaaatatgccatctctagcacttagttccttttgtcattttattgcacttttcatgaagatctggagccttgaatgaagcttttgcattttataagaccaatacatccaggattagacttttgctcttttcatatatgcttactgttgagttagagatacttcagaaattttcttcttcatcgttgaccaggagtttgaatctaagaaaaatagtaaactgcactggcgcactggcatctctgtggcattggctttttgttttagtgctcgagagaccatgaaaattgagtttgttctttcttaatttgctggtttctttctgtttcatcatgtgttggattcttataagctggattgctggagtatctgttccggaaatttgtaatgttttatgatcacatcacagataataataccatcatcctcgagtattcagaatag

SEQ ID NO: 45712 - DNA, 955 bp, Manihot esculenta
  Intron number 1 from transcript cassava4.1_008820m (locus cassava4.1_008820m.g) derived from phytozome v7.0 (chr-ID scaffold06916; pos 1239381 to 1240335)
tcgcccaagtgttgaaggcagaatcaggttaactcctcctccaatgttaataacaaaaagaaatcttttctttggaaaaacgaaaagggagagtggttgcagggaacttcgctgcactgcataaaagtacagacaaaaaaaaatcttacaaaagcaaaaaaaattcgactccactggggatcgaacccagaatctctggttccgtagaccagcgccttatccattgggccatggagtccttctgttgtggagtaattttattatttataaaacgaaataattattgtgctggctaccccattgcctttttatttcttaatgaaccgttgcaatataaatttgttagatgaattaaaaacaaaacaagaaggttggatcaatttcacttaacgtatatatattaaagaaaaattccaacaacgatgtaatgtttatcctctttatgtataatagtatagttttattttttgcttttttcgtgtaaaattgattttgaatatttttaataatacatttttatatataaaaaaaattatccatttaccttgcattatagcaaatttgttaaaagaaactttgggtccacttaaatatgtctccattaaacatatagctgtaataaagatgaggaaattcatcgaatgcttcgaatcaacaattgattaagactttgaaaattccccaaaaaaagttgactttgaagaggaaggtcgtatttgcacagaggaaagaactagacagtccaagaaaagagatggcgatcgatgttacctagtgaatagtccatctgctactcctctgatataccagtctctgtgtccttacaattcagacattagaacctgacgataatagattgagcagaagatgagaagaaatgatcaaattctgctggacatcgatgaattagccaagaccataagagaaaagttggaaatcttgcatcctttatctg

SEQ ID NO: 45713 - DNA, 366 bp, Manihot esculenta
  Intron number 1 from transcript cassava4.1_017534m (locus cassava4.1_017534m.g) derived from phytozome v7.0 (chr-ID scaffold04457; pos 1256965 to 1257330 reverse strand)
tcgggagagattgaataattccccaatttgaagaggtaaaatcaatgatatatctgctggattttgtttgttagtttgttatggatgagctttgaaacttgtatattaacggagaaattgataggtaatgaaaaaatttacctaaattaactttcattaccttgtcaaaatgccaaaactttaatcattcaatggttctattggttccttctttttttttttttttcttgtttatcttcaatttaccagtttcaattttcgggtgttgtgtgaaatactgtgaacaatcaaaatcaaaactaaaacttacatctaaactatatttatgtagttttcaaatccggaagttcaggtgctgaccagagg

SEQ ID NO: 45714 - DNA, 965 bp, Manihot esculenta
  Intron number 2 from transcript cassava4.1_004958m (locus cassava4.1_004391m.g) derived from phytozome v7.0 (chr-ID scaffold05782; pos 60512 to 61476 reverse strand)
tgctcgatctagggtttggtgtattcaagccagtggtaagctattgtttgtttgctgataaaaatgttaactgatctcgtatgcatttgtatgctagagagtttgcgtttgtctgtttgtgtgatttctataatggtttatttgtgctaaaatttttttgttggcattcactcttttagcacttcggttatgtcgagtattagttggctttggcatttattcttttgaatatagtgtgctgtgcttatgattgggttactcagggatgcaactttggatatatatgcttaccttagttaacatcctattttggtaactgacttgaatcaaaattaattgttaagtaatattaattgggataactgagggcagattttaagttcattatcccctaacactgcagtgagagcaaatagcacatcggctagatttcttgggagtttagaagaatcaaaaataggattggggaagtgctgtacatgattgagctctctctctctctctctctctctttgtgctttaaccatgtcaaagtatattgttttagctcttgaaagttgttagctacagattgttgcttgcttccagtcatgtgcctcaatctgagattgatcagagccagtctaattgagtaaatgtattgattttcttccttctttataaactttctgcagttttctgatgatttgtactttgatttatgtgatgtcgcaaataaataccagggctgttgggaaatgattatcaactttgttcaagtagttcacttgtcaattgtgttaagccttattttgatttgttgttcagtttattgttttcttgcattttagttgtgtttttcttctgtattgcattaatgcatatgcaagttatgcaacatgtttcatttgtcttaatatattgtatattactttcttctcattttaatttcctttatcccatttcctctatccagctattctgcc

SEQ ID NO: 45715 - DNA, 838 bp, Manihot esculenta
  Intron number 4 from transcript cassava4.1_016602m (locus cassava4.1_016602m.g) derived from phytozome v7.0 (chr-ID scaffold02196; pos 326287 to 327124)
ggttcaagaactgcaaagacaaggtgagctcttgtcatctacgccttcttgaatagaatgactgcatgcttttttttttttttttgtattgatgattgtaaaatgcatttacaaatgcaataaatctttgtttccagcaatctttaattgtttcatattcacatttccaattcttatggatccatgatagcaatcagatcctaataggtctgtgatgatgtaaacatctaatcagaatgtagcttgttttagtccatgacttcaacaacatcaaatagatgaatatgcctgatgcacaacactgcctgaggtacaaaggccgagtataattgataaactatataatgggaagtagtcttctcctttttttgaatgtaaccgaataagtcgacagtgaggctcgaactcgagaagtcctccatttcttatacctttaggatgaccaaccaagatagcctggattgcctgcacaatactgtcattaagattcccttctcttgagttaaagctgtattttcctgctcttcaattgcactaattgtgctgtcaccaaaatctgtaatgtttttatcctagtccctttaaatcaagtgagcacagtggactcttattcatcctgtcaattatgagtcttttctaatgaatctgaaacttttttcttatttttgttctacataaatagatggcaggaccttctgtcatatgcttattttctactttcaagtgtgatttttgtttataataattttttatccgtagttgatttgtgactcttaatattatctcctatattactgttctaggaaatcctaatttggttatagcattggtggcaaac

SEQ ID NO: 45716 - DNA, 784 bp, Manihot esculenta
  Intron number 3 from transcript cassava4.1_002282m (locus cassava4.1_002282m.g) derived from phytozome v7.0 (chr-ID scaffold03079; pos 88954 to 89737)
tgcagaactgccgtaattggaatcgttttctggaggtgctatacttatcctttttatcatgagagagtttccataagctactgtggttgccatctagtgatgcaggatagatgcttgtaatatgtccactaaggccaaaatatgaaatcctaatgagtaatgccttaagaatactcgaaagtaagaccataactgaggtcttttcttacagaaaaggaaaaataaaattgtgaagccagtgtacataataaaacatgaagacaggtactattgtgtactaaagctgacaactgcaaaggacacttttgattgccaaaattcctttctattgttttttaggctaatagttttattagaggttttaagtcataatagatgtcaccaaataccaaccaccttatacctttagtcataagtttggatattcatgctggacatgtccatgggaatcagataaaagaaaactttgtttaatagttgaatcttgtctctaagtgttttctccttggaatttattatgatgttgacattattgaacgaagatcaagtgtaatcgtcaatacagtagtgtctatatatctttaacaacatagatggcgctgctgaatatttatttcgttaaagtttttatgagattagcccattgttgatttttggtttcatcactttcctcttggatacatttcttagcttgcatacatagaggtttagtttggctgcttgcacataattcttgatgtcagaatctgatttctagcctattgtttgcatgtgtagatacact

SEQ ID NO: 45717 - DNA, 614 bp, Manihot esculenta
  Intron number 1 from transcript cassava4.1_008811m (locus cassava4.1_008811m.g) derived from phytozome v7.0 (chr-ID scaffold01945; pos 68254 to 68867)
atatctctcagccacaagaaaaatttctctttcaggtaaattcatgctatagtgtaccattgcaatagtatcatgtgctttgtcccacaaggatatgcttacttttttttttttttcatccgtcctaagttataggccactctccctgttgaggcagtaatttatttattagatttctaatatactcttatttattgtgttgaaaaagtaaaattcatttattccaagaatattggaaaagacaatataaaatttattactttaactatattaactgtattttcttaattcatgtgaaagtaacttaagcatatctttgtggaatgaagggagcattactttttggcacattttttttattttgtttgaaagggaaggagacttattgtgggcatttcagtcaaatatttactagattagtttgtaaagttttatgtaagcaatgattttgatcttgtctcaaggatctttttctttctcttttcctcttcctcttggtcgaagacatcactcttggttggtatggactgttcattacattaggtacttataattttgtgatgttgattactgttgtaggattcttctttcagaaaggattattctagtggaaa

SEQ ID NO: 45718 - DNA, 584 bp, Manihot esculenta
  Intron number 1 from transcript cassava4.1_016504m (locus cassava4.1_016493m.g) derived from phytozome v7.0 (chr-ID scaffold12075; pos 100195 to 100778 reverse strand)
tagtcctattgctaactggaagatctctagtcctggtgagttcatttttagctgattatgttgtttctgtgatgtttagctggaatttttgatgggcttttggagttcgtcaattgaattttggtatatggattaagctagctctttaaaaacaagatagataagtcggttctataaaatctgtaatgaaatttgagtttagattaatgttaatgatgacttctgctttgatctttgatgttgctttggatatttgatttaatggtttgtagaggtaataattacttgggatctttgatttggaagaaatgctaggttttggaattgtgatctctaattcttggggggatctgttgtaaatggtgggctgatttcttgatggtgataagattgtgaaaaatattggtagtaaattcaattcaatgattgaaggtaaatatttaaagacagaacaaaaatcatgttgttttggtcataaattgaatggttttatattgataattcttgtctagattgaatgagaagggcatcaatcatttaattgattttaatttattcaacttatccaggtgaccatccagaag

SEQ ID NO: 45719 - DNA, 947 bp, Manihot esculenta
  Intron number 1 from transcript cassava4.1_004003m (locus cassava4.1_004003m.g) derived from phytozome v7.0 (chr-ID scaffold11994; pos 222592 to 223538 reverse strand)
ggagagactgatcccagagttggggagacttgcaggtatctagatgtgtaacttcgcttatgttgggtttttatgcgtttttggctgtttattctgtgaattgaagtgactaatatgtttatttggagtaattttatcatattgtgaattatttgggtaaattttgagcttaaaatttgctgctgtaaagctaaattaagaaaatttcgggcatggaattctgattccttaagacgttgctgtttctatatttgtctttgtccccggctgctcttcctttctttccccctacttttgcttcttgcacttgcatagacgaattggccttttttttccccttgttagaaagctgtatttgtgaacttcaagcttgatgatatggaaaactgaaactctacagttgggcatccacggattcgattagaacgtctgattatgagtttattatatgttgttgaatgtagatgtttgtgtttgtctatctatacaataattcatgtttgtcgaatcgatgtacttttaactccgtcaaaaaataaaaaagaagtgtatttttatgctaatatatatagttcaatattacactacataaacatgcatatggacgcatagtttgctgctgaacaattttgaggttgaagcaagaagattggttttgagagatttttgttaatctgggcatcaaatagaaaaaaatttttggtccatttcttagaatgtatttccaaatgattagaaactgaagaagaattatgcgacagtatgatatttaaatatattcactatttttgctccggcaattttagtgatgcatttattatcctccatctcaagttatctgcatgataattataatagattaagatgagtgtgcttgtagccttgtgttcaaaacccatttttatgtaaaatttaatttggaaatggtaggtacctagctgaggcta

SEQ ID NO: 45720 - DNA, 444 bp, Manihot esculenta
  Intron number 1 from transcript cassava4.1_024870m (locus cassava4.1_024870m.g) derived from phytozome v7.0 (chr-ID scaffold10797; pos 122145 to 122588 reverse strand)
ctcctgctgcaaagtaagctcatctaaccaactgccaatattggtttctttgatgggtggttttggtttgttactctgttttttgccttcaccaatctttttatttcagacaaaattgtgggagagggaagaaaacaaaagtacaagtccttctttacactcctccttaaatttattgtcttctgctgacatttaactttctgttaagttgtcacttctttttgtgattcttgccgttatgtttttcacttctgtaatatgaagaatctttagaattcccatgtggtctcctgaaaattaataatgcatgcttctctagatttatgaagcttttttgggttcaatttatgatttacctctttctagtttgatattacttttcactgtagcacttctcttcaccagtccagtttcaattttctgcaacagggcacaagtggtagg

SEQ ID NO: 45721 - DNA, 768 bp, Manihot esculenta
  Intron number 1 from transcript cassava4.1_016353m (locus cassava4.1_013707m.g) derived from phytozome v7.0 (chr-ID scaffold07520; pos 66816 to 67583)
cctagcacagatctattggttctcttctacttcaggtatttcccctttatatggtttcttcttttgtgttgtatttgttagtggcagattttgcgatggaaggttagattttggtttgggattaccgtgtcaagagggcctttttctttattgttggtttagtatgtcaattttaaatttattttcaacacacaatgaaggtccttttctggatcatattaatataaaatacatgtctaagcatcatcatgtctggatgcggagaaaagtgcagctcgggacgatatttttcttactttagttgtataatgttttttattgtctagtaattactgtttgattagcgtttttagggtaccacagtaatttttgtaattgtttagtgggcattaatgattcagtagtaaattcgtgattctgctttttggtgaccagtcgtatgttgggggagtaacattcgtttctcaatgacttaattgttgtgttcttttatcgttatatgatgtttcggttgataataagcgtagagaagatttttaccagtgtttttatggaattaattgtattgtttggtttttgtaccggtgaatgttgatcctttattataagctccatatggttgtgcacataaagttgaattttgaaggctgatggggattatatgattttattattattattatttagcaatgatgttaataatttgcattccatccttcacgactatttgcaggtctactcaccagttttatcttagaagattgtgct

SEQ ID NO: 45722 - DNA, 872 bp, Manihot esculenta
  Intron number 2 from transcript cassava4.1_016353m (locus cassava4.1_013707m.g) derived from phytozome v7.0 (chr-ID scaffold07520; pos 67759 to 68630)
ctcggccatcacaatacacaattgccaaggcaagctcaaaactgtggatgttatatgcatgtgactgagtacctgatatgcttaagaaatccaactgcaagaggatctctaattatgataatatcaaaatacagtggatttgttgtgtaatttagttctcattcatggagaagctcattctggcctcagccaacaaagcattgttgcacattgcaattttatcattatcctcggggattgtctagtacttgtgggttatattcaacatgtattggggatttatcgcagatctgatctcacaaaatcgcgcagaaggttttgttggggtctgcattagttgttattgctaattattaccattgcttaccaaggggcttcattagttgattattctggagtggatctctcaccaccagtagcataacaccagttcactattagactcccatgtaatccgtgttatatagctgtagttttgatgtacgtcttatttagacggggagttggtgatggatcctcttgctccgtggaattcttcgacacgagatcccagttcctctcctagttcatggtgtttttgcaaaggagcttccttcgcttaacttcagaacaggagttctcacacatatctaacaccagttcacatatgcagtggtttgaattctttacttctgtcatcagttggctcagtttcctggagtttggctacatggttacttgagctttttactaatctcgattttctctaatcttatcgtagttttgctgagattgatgttgaagaatggtgatcttgttattgttcataagttgacatgttctatttgctttcatcagcctccacgcagaatcaggagtttaccttggcagta

SEQ ID NO: 45723 - DNA, 557 bp, Manihot esculenta
  Intron number 2 from transcript cassava4.1_019222m (locus cassava4.1_015380m.g) derived from phytozome v7.0 (chr-ID scaffold07520; pos 2296456 to 2297012 reverse strand)
ttcgcaaaaagatgtaattagcttttcggtttgtttaattgctactttgatattagtatacacttactgcgttgtaatatgaggaaatcagttttagatcgatcaattggtatttgtagttattttctgtggcctgtgctcagtgaagacaatcaggaagtaattggccatgaattgatttttttttccttttgcacaactacggaattctttagcccatatatagactagcctgcctgttgaatagaggtttatagaacggatcccaacttcaaccagtgcataactcaaccgtaaaattgtacatcagtaggtataaaatgtgttgttttacatatttgtgagttttatgaaaaaaaatgatgattcagtttgtagagtgaatcagttagttgagtttgattatgaagagaccattgtcacaatgtgtgtagagtgagagctaccttcttctgctctgctgtccatttcttttgacaaataatagaggcctcccttttttcaccaaaaaggtatgaatgaaatttctggtgtttattgttggcagcgagtattcc

SEQ ID NO: 45724 - DNA, 942 bp, Manihot esculenta
  Intron number 2 from transcript cassava4.1_029287m (locus cassava4.1_029287m.g) derived from phytozome v7.0 (chr-ID scaffold06606; pos 17043 to 17984 reverse strand)
tccacctggtatgcctctgcatttcaattcttgatatcccctactcaatccttaattaactatttcaaactctagatcttatcccactcaatcaaaacttattaacaatttggaatatattgatggtaacaaagtcctataaataatccaaagcatagggctggtttgttgatataagggaaatcaaatttcttgactgtaggtgaaaatatatgttggggtgctcatactcataatgcttccaaagtagaaaggtggaaaaaggaagattggttttgtcatttttgacaaagtatttagaacaaaacaaactcttctaaaagggcaagaaagtataaaaaatcattaagtccatgtgatttgaacagctaggttatttgtcctttgctagaatcaatatctctatgaaagtcaagaatattaatcaattaatccttccaaaaataggaccaatgctgtgaaaaaccaaatgcctcattcactggtaacatgatgagagaactaatagacaataagactggcatttgacttgtattggttttctaaatgtctcattcattggtaactggatgtggtcaatgatttttattttctcaaaactgtactcttttagttattttctgttaggataacaatattattatatgaccccaataaaaatcatttgtattattattaaattagtaatttatattcaaatttctatataaattttagaaaaattaactatttaaattatgggtaaattttgaaaaatatattaaaatatttttgaaatattaaaaattttttcataaatttccctaaattttaatttatagaagtcctttttataggcgtctattttcttctaaataatcctataatggagtgctctaattccatatgctacattttcatgacgcaggcagggggaccttattaccaagtgaagaaagggag

SEQ ID NO: 45725 - DNA, 878 bp, Manihot esculenta
  Intron number 1 from transcript cassava4.1_002132m (locus cassava4.1_002132m.g) derived from phytozome v7.0 (chr-ID scaffold06683; pos 291848 to 292725 reverse strand)
agattcgcagtcgttgctttcgaggtgagttgttttttagggggttttctttaaaaaattgtttgttggtgatttaattttatgtgattcatttattcttctggcttaggtctgtttttggaaatgggagattgagggttttagttgattgaggaatgcagtaatttctctcttcgtttggcttctgaaaacttgtgggagaaatctaggattttgcttcctcagtgtaaacaacaagtgattatcagatttaaaatattttgtttttagtttattttaatgctttctcggaaagcaaacggagcataggggtttatgtatgtggggtttggtccaattagcaaagccccgttttgataattggtagtgttatttgctttttctttttgttataaagaatgtgccaaaggtcttctgtttggtcaccatctttccattctttccttttcttaatgtttccttcttttgtttttggaggttacttttgtggaactattcattcctgtaatttttaaggaaaagaaaaacctttttatggcgatttaaaatgagctgggcatttttatgtatctgcagcttcagtttagcgtgaaagggcttttggggcgagtataaattatagttgcttcataaatttgtgttttaactcagttaagctcatgaagtccaaagttttcatcttttttccttttcccctggtactgtctaggtgaatttgatgtttgctagatctgttgattttgtagcaaattttgatgcaaaaattgcgttttatcggtagatgtgatggtcctttggtttgcaatcatacaaactcttgagagttgtcaataacttgtgtttatcctttccctgaaacagattgcgctgttatttgt

SEQ ID NO: 45726 - DNA, 805 bp, Manihot esculenta
  Intron number 5 from transcript cassava4.1_027056m (locus cassava4.1_027056m.g) derived from phytozome v7.0 (chr-ID scaffold03750; pos 453542 to 454346 reverse strand)
cagggccacactccttttaagcagctggtgcataggtaggtatctaaacttattaaagtcacctagatattgtgtcatcgaagactataaatttattgtgataaagattctaaaagtttcaagtggagttattagtgtaatcaagttaattaacatcaccaaataaatgaatcgcatgaattatgaatatccaaataatttttttcttcataaaaggatattttctacttgttgctgtttgcattagagaagaattctggattctttctgggactagccatatgcccccaggttcattgaatctatgactatgaattacctccccttggccaaaaccttgtatgcctttgttttaacttgacctgcacatctaggccaatgtatttgctattatgttgtgcttttatggccacaattgggaagtcaaataaattcctacagttcactcctattgaataaccaaattctagaaatcctttctaatgctaataaataatgtaggtaaagtgggttttagtcaggaaatcaatgtgcataataaatggcatgaggaaaagtttatgcattagcctgcttgtgccacaagcattgcatgggaatatgttcaaatgctgtaatacattcatgtggatggtagttacaattactgtgaaatgctttacatgccaaacaaagatgtagaagttataatcacttgaattcaaacgagggaaaaaacccctaagaagatttatgttttaattagttatattttcattactttatctctttgattacatcaatttggctttatgtagatttgaga

SEQ ID NO: 45727 - DNA, 901 bp, Manihot esculenta
  Intron number 2 from transcript cassava4.1_010968m (locus cassava4.1_010958m.g) derived from phytozome v7.0 (chr-ID scaffold07520; pos 2028229 to 2029129)
gtcctccacaggcaagtatcatctcatcatcacatcttattattcattaatcactttctctcactagcttttatttgacctaagtattgggaactccctctcttttccctctttcaagagtctataaaaggggtttgttaggaatccattactatcagttactgtatgaaaagttttaaattaacacctgtctcctccctctatctctctttttctaagggacattataattagctcttggaaaataatccttctgcgcacccaacctaacacaacccacatcaattctcaaacgcattagattcttagtttcttttcgattcataagaaataaaactcatgacatgtaatatttctgttcatgcattgatgagcaccgtagccgttgaatctcacatcgcttgatccttcatgaaaagagataatatgactcttatatgagctatagccgattctttccataaactagtttttaaatgagttaagtctagtccaaatttaaaggtagctactagctggatatatgaattcagaaagaaggatggcttccaccatcttttaagtcaaaaagttagctttctcgttccttttctcgtatgggattgtctctatctctttcgcccttttctttgtcaaaggaaactttccaattcccttctatcctgttcatcaattacctttgactaatactctccctgcatatccatcaaagtaacctctctttaccaaacaaaaagagacttaaaaaagtccaacttgaatttcatgcgtaaacctctttatatagttaatcaaactttctgagcttgtaagaatttagaaatcagattaaatagaaaaatattttgatatgtataattatgttaatcaaggttttggtcaagttactgcaggaagaagg

SEQ ID NO: 45728 - DNA, 432 bp, Manihot esculenta
  Intron number 1 from transcript cassava4.1_028871m (locus cassava4.1_028871m.g) derived from phytozome v7.0 (chr-ID scaffold10575; pos 83439 to 83870 reverse strand)
tagagttttacctttatctggtagatattttcatccgcacccctattcagtaaataagttttcttgatcaatctttttacagaaaacctcttcatttttccttgatctttgcatcttctttatgaatgaaatcctctatgatgttttatcattgacttgaaacaataaaattgattgtatggcgactgctaagcatttgcttgattatgaatagtgtgaactgatagtagtagtatcttaagggcattgttttttgaatcataatattcttgtagaattattttctatccaaaaaaaaatttggttaaaaagctaatatgtcaatgtgtactggtctttttcatctaacaaggatactatttgaaaactttaagctgtttgcattcatttgataagatttgacgcaaactggtttgatgtgctgcttgcagg

SEQ ID NO: 45729 - DNA, 651 bp, Manihot esculenta
  Intron number 1 from transcript cassava4.1_008170m (locus cassava4.1_008160m.g) derived from phytozome v7.0 (chr-ID scaffold11378; pos 97206 to 97856 reverse strand)
tgtaaaccctattcctctctcagtataattcctaagtaaatgccgaaaattttctgctcctctcgtatattatcgttgattttcttcttcttcttttcttcttcttcttcttcttctaattaaatttagtgacccgaacgttgattttggtgttccagactctaattatccgcgatctgttttttggtagtagtgttttatggtaatctgttttgtatgatttgtaagaagctcaaggcaaacctaggataagctttaaggtcttgtttattgatgcagtgtgctttgttactttagttagtttacctctttggatatgcatttggctaatatggaaactaggatcagtataataatgtagacagtcgcttttttacttgctgctgatatggaaattttgtgctttgatgcttattgacactgactttatgtacttagcatatatatatatatgtatatcagctttctttgagcaaaaaatttgcactttctgtttattttctttttattttttttttatagattttgctcacttcaaatccatatgttctagtgatttgaagttttcctgcttttttggaatacatatattgattcacatgatctcctttttcttttcagttgccacaatttggatttttacccatttaa

SEQ ID NO: 45730 - DNA, 619 bp, Manihot esculenta
  Intron number 1 from transcript cassava4.1_002164m (locus cassava4.1_002164m.g) derived from phytozome v7.0 (chr-ID scaffold02605; pos 118331 to 118949 reverse strand)
agacttggtttaacagataatccaggttttggttagtattccaataatttttccttctcttttcctcttttctaatggctttttctttgattccctcttatttcttaatgggtgtttgtatgttgaattgaaagcactgttttattagcagttttttcaaaataagaagccacccaaattaagtagagagataattgtttatgtggctgttgttggagatccagtttgttagcagacgaagattagttgttaatgtatatttatttctataccaggaacttgaaagagctagtgagttgtgaatgccctgtttttgtctgcgttctttaatggatgaagccacaataaaattttaaacggtcttagtgtagttgccgcagtgcaggttgaagaagaaagatccaaaattttctctaaattttaaaaggaagtgagagtttttattttccagggcctatgtaaggtgacagagccactaatcaattatggattctgcaatttttcattcattgctgatttttttcccctcctttttgtattctcataagtttcctagaaattggttcttttccctgatccttgcgtgtttgtcttttaactgcagtgccacttctgtatt

SEQ ID NO: 45731 - DNA, 721 bp, Manihot esculenta
  Intron number 1 from transcript cassava4.1_016259m (locus cassava4.1_016259m.g) derived from phytozome v7.0 (chr-ID scaffold11356; pos 16012 to 16732)
aaattgcgattcagaatctcaactggctgctgagggtatgatttcctcattgcttatggttttgcaacaccgtgaattcattactgattccaattttactcctcaattgcaattcagagtccaattttgttgcaaataatgatttgaaggcttgtactctgatgagtataatgcaggaagcgaagcgtgttgatctgggcttaaaagtataattacacatccacgaaatcccataatagtctaatattattcgttttaaataaattcgaagattcaacatctatattttatttagggtttatatggggtttttggtatttgaaagtaaattataaacttgcctcattttgcatgtttaattgcttgctttgtagtttctaggaatattaagtgtttgtgtatatatttcttccattgcaggcatataaatacttgtgcatatgtttcctttgctctgggcttctaagcatataaatgtttctatatatttccctgttgataggtatttgtttctgttcgcaaggtttatcaatcacttatttgacttaatgaagtttgagaccagaaatctatgaatttgaaagtcctctttgttttttggatgtaggcactaaattttgtgggaaatggttcaatttttaggaagcttgatatatctgaaatagatcacactttattctgttattagctaattttttgtgcttttggatgaaaattacag

SEQ ID NO: 45732 - DNA, 696 bp, Manihot esculenta
  Intron number 1 from transcript cassava4.1_026182m (locus cassava4.1_026182m.g) derived from phytozome v7.0 (chr-ID scaffold09180; pos 371034 to 371729 reverse strand)
ggtcgattcaagactctgatattaaggtatttttcttttagatttaattcattttctcagtgattggaatttttcttttcttttttcttttgggatgcttataggaagaaagaactaattaattgttagtttttatatgatttagatagagattagaggtggtttggtgccattttcatccaaaaatgagaaacgcctgacaactgtttgatctttgtgttctatgtgatttttctttttcttctgatctaaagatggataagaaaatttactgggtttcttttctttgaatgggttcagtgttatttttatttccatataaagggttcgctcagtagggttaaattttgcgtagttagaaaattctagctccgaatcattgatcaaattagcgaacttgaagctcaataatttagccaaccaaattagtgggataatatatattaaaacacaaaaaaatagagacttggagctctataatcttattgtgattgtgtatcacgacttggttaagtcgcaaaccataatcgtgatcagagaagcaagagacatttggccaataaccttttcaaagaaaaaaaacaccagaaattgtattctttctgtaatatgaaccttgtgtcctgatcctgaacatattgtaataataatatattgttgattcaggaggacgtactcgagtctgcaaaagctgaa

SEQ ID NO: 45733 - DNA, 512 bp, Manihot esculenta
  Intron number 1 from transcript cassava4.1_004090m (locus cassava4.1_004090m.g) derived from phytozome v7.0 (chr-ID scaffold07520; pos 2597933 to 2598444 reverse strand)
tggtgagttgattttggtttatcttcttcttctgatgattagaaagaattttggtcttgtgggttagtattattttgttaaaagatttgattgtagttttttgctttgaatctttctatgttgtggtggtccatctataggtctgtgaaacgtttctgatgctaattgcttcgttttgctacttgatcttttgtttcttccattttagatttcattcaataatgaagatgaggctcaggaattgtaggggatgttgtaaaatattaggttctctgacgccttggtcaacttagttcagtaaaataacccggtttaggttttgagcttgtagatccatcacacagcgtatgctctttgaaagaaactctgattccttgaatattatcagtctctggaatcgtttcttgcattatagttatatgtttcttccgttgtatgttcaattggtaaagaaatgtgcttagcttttgaaatcataaaatcatttatacaggttgcgactctggccccta

SEQ ID NO: 45734 - DNA, 918 bp, Manihot esculenta
  Intron number 1 from transcript cassava4.1_007270m (locus cassava4.1_007270m.g) derived from phytozome v7.0 (chr-ID scaffold07351; pos 414624 to 415541)
cgagtcggacttcggagccctcggtgttccttggtgtaagtctctttttcctcatcaatgcatagatgttcgtgggtttgattcagatctgggtttggatctttgtggtaatcatgcttgtattggttttgctgcgtgaaatgtagaaaagacaaggaattttagttttgaattctagtgagatatccttttaatttggtcatttgatgggatggaaccgtaacaagcgtcctttatcattcttaggtgttggcttattaagcaagtttccacttctgcgatacttcgcattttatgatggtttcattcctactattattttcaacaggaatttaactgaatgtgaaggtgactttttatggtggttcgttccagtgagtgagtgtgtgtgtgtgtttccgtgagagagagagagagagagagagagagagagagagcatgttgtagggatggtgcttttgtcgaagtgaaaagtactccctaactgccatttcctctgatggttgaaaattttgaaatatttggaagaattgcttattactgttctaagcactttatcatagtgtatggactgttggatcctcaagcattcttgtttttttttttggtggaatcacattgttcatctgcaaatttaatggtttactaaacatttcattctcaatattctacttaacaagttatgatctttctacagacttgagatatgttcatcaagttatgatctttctacagacttgagatatgttcattctctttattcaggggaaacaaagtggtttatattttataacagcttggctgatttttttttccttccctttttactgatcagcattcttgatttattggtgaattttgagctttcatgatattcttccttttaattcttgtttttggtaaaaggcagatcgaaac

SEQ ID NO: 45735 - DNA, 699 bp, Manihot esculenta
  Intron number 1 from transcript cassava4.1_020375m (locus cassava4.1_020375m.g) derived from phytozome v7.0 (chr-ID scaffold04718; pos 86285 to 86983)
ccccaattacaggaccaccggcggctccaggagaggtaatctcaatatcaacaaaaaatatatatagatcatccagcaatctatagataatatataaataaataaaccaaatttctttttttttcttcattgtttttttggaaaataagggaatttttcctgattttgaatccattctcatgctcgaatcaaactttatattcttggcttcttttttttttttttttttggattctcatctttgaaacccttttctttctttctttctttctttctttctttctttttttgactctaaaaaagcaaatactgagcatcgaatccaaaagggtggtgtgagattatgaggaaaagaagattaagccttaatcgataaggatatatatcctatcctcatgaaaaattgaatttaaatggtcctaaattacgaaaataaaattccaaaatctaaatttttgaccccacaggcacttttcacgtggcttgtataaataatgattttgactcttattttttttaaaaaaaattatatataaatgtatccatcagagataatacacaatccatagctaatatgattggttttgttttcttctgtgattagataaataaaaaaaaaaaattgctacaattatgtaattttaatttatgctaaaaaaataattttattttattttcttatgcagggtaaaaaaaaaa

SEQ ID NO: 45736 - DNA, 810 bp, Manihot esculenta
  Intron number 1 from transcript cassava4.1_001534m (locus cassava4.1_001528m.g) derived from phytozome v7.0 (chr-ID scaffold08446; pos 95774 to 96583 reverse strand)
aagctgctccttctgctcagttccctcctctacaggtccacctctgtcctccttttctttctcatccgtttgttttccgagaaaatgtcagggacaatgaagtagaattaaggttttaagcatgaccagttccatagataaaacattttctcacttctgcttagctctgttacgttgagactcaatgtaaaggagtttaaaggaattgaagtctgtttgtctttagattttcagtaggagagatccgatattatgcttttctctgtgtcacacaaatttagtgcaaaatttcctcaaagtttatgctcatatgggaaggaaaaggttgaggataagcagaagaattgtactaaaactttcgatactaggttttttttttttttaattaactagcattttaatctggcaaatttggaaatgtaaaagaaattttaaaaggctaactgctatatttttcattatgtaaggagaaaaaaatgacaagtagcttcactttgggtttgctttaacatatgctctttaagttgccgagagaagtcaacagcaaaatatggaagttaatatgttatgtcttcttgcttgggaactgggattggggaatacattttcttagtgatgcttgtttaaccatgactttctgaaaattatgagaaagtgaagaaacaatagcattttctaggatttatatgtcttatttaatgctgatggctaattctctttaccaatgatcaaattggctattcttttggttgagtttatactgtgaatgtttcagaggaacttagatcagttagaagcattatcaaagaa

SEQ ID NO: 45737 - DNA, 370 bp, Manihot esculenta
  Intron number 1 from transcript cassava4.1_015401m (locus cassava4.1_015401m.g) derived from phytozome v7.0 (chr-ID scaffold11661; pos 150048 to 150417 reverse strand)
gaaagctctgcaaatccgggagtaagcgtatgtcttctttgcttttagaatttgggtttcttggagtgtttggttgctgacaaaattgtgagaaaagaaacaaggacttgatttatatttcttcttttaatttcttttatagaggagagatactagagttaatagcagaatcgcctatgaaatttggcagacaaagaatccaaaattttgtgggataatttgaaatttatataatcttaaagattgtactaaattgcatttaatcatggaaaactaaatattgaagaggtccattttcattctatttttggattcttaactgaaccaaacatgcccttgaagaatttgaaagttggcatttcaggagcaa

SEQ ID NO: 45738 - DNA, 582 bp, Manihot esculenta
  Intron number 3 from transcript cassava4.1_006534m (locus cassava4.1_006534m.g) derived from phytozome v7.0 (chr-ID scaffold05213; pos 21527 to 22108)
gaagtacccaataccacaggttgatctatatgctatagctttagaaaaaattcatttgatattttctatatgacatgtgtttctttttcatgctaacacgttgatttatctggtattataggtttgtatgtatactgctgtttgaatttgactaaattttgtgatgattttaaagttgcaaagattactaaggtcaacacttgtagactcttcatcatttaaacaattttaccgttataaatagggtaaaacttcagatctttagtttatttcaggattttggttcaattttatgttaaagtattaccttatttgtgtcatgctattaacaaacaataacaatttctagatttcgtgttagcatggaattcatataactagatactattttgactcaaactttaaagtaaaccaagattcgaagtgaaaaactgatgaaattacatggtacttttttatattttttttttcttataaatattcgctttttacacaagacagacaattggctagacaagccaatgattctaatagttgtatgctacagggcgaaatccatcacgtgatcaacccagatccata

SEQ ID NO: 45739 - DNA, 419 bp, Manihot esculenta
  Intron number 4 from transcript cassava4.1_015340m (locus cassava4.1_015304m.g) derived from phytozome v7.0 (chr-ID scaffold03199; pos 51151 to 51569)
gtctgaagttagtgtccttcctcatactatgtattctgtgctcctgttttaaccattttaatgatgatgccatctgatcccaacatcaaaagattacctgcaaagtgcaatgtattctcacgtgtgggtgaaaaattaaattttaacgagttgaccagaaagcctgagtcttctttgtcataactagaaagaaagctgttgcctatatgatacatcttgaaaaacaaaaagaataataagaatttcaggaagttgacttatggtggtctgaataagttggtattgtttttctacttgctatttcattttttctttctaaatgaaaaaattctgcatctagaatgcttatccataaattatacacagtccgtgtactcaaggatttctgcggattttgatgacgatgttcttcaggtact

SEQ ID NO: 45740 - DNA, 716 bp, Manihot esculenta
  Intron number 1 from transcript cassava4.1_013638m (locus cassava4.1_013638m.g) derived from phytozome v7.0 (chr-ID scaffold11378; pos 262961 to 263676)
cttggtttgaattctttcaagcttccagctccgtggtatttttattattatggagttacagtgacttgagtttttttgtcagattatggtttgaattccatggtgccataatttaatgggattatggtttttgagatggtcttgaaaattacatcaaattataagaattaagaaattaaggggctgtagaaaaaacatttttatattaattaaaaagtattaaaattaatttaaaaagaattgatatagttttttaacttcaaaaatactagaataataaaatagtttttcttttctttatatagcatttaaagtgatacatatatttaatccttgaatcttaaagcaaaacaggcactaaatacgctgatatcagctttttaaatgttattttacactaattgcacattgatgatttgcagccttctcagacccaaaaaaaagggggatgatttgcagcttttgttttcaccaagtactgggtttacttgttcgtatgctagtgaattatggtatttttgttctgaagattgaaggtgtccgtatgaattatctatcaaatattgcaatttgattgtaacttgtgcatttttcaatggaaattgagtttttaattttcttgttgaatgttgctgtgatgttgggttttggtggtcattggggctgaattgttgattcggagctctgctttgggtggcaggttcatctactgtttt

SEQ ID NO: 45741 - DNA, 834 bp, Manihot esculenta
  Intron number 1 from transcript cassava4.1_029561m (locus cassava4.1_029561m.g) derived from phytozome v7.0 (chr-ID scaffold03120; pos 300043 to 300876 reverse strand)
tcttcaagaaattgcttcttctctcccaactaaaggtttatttcttcttttctttttcttccagcttgtatgattaatgggtttttctctttgaaagattttagatgcattcaatcataagcttcacaatgtctgaactagttgagctctagcatttttttcttgcagtttatccacaactgttgaatacaattttgaattgctggattaatatagtttttgccatttaatattctttaactgtaattttttgatttccaatactatactacattgttatgtttcttgtgaaatttgcttcttaatgaaattttggataaataccctgttctctctctctcttaactgtgctggactatcgacaagattccttgaaagtttgtatttcctctttacaacattaactcattgttgggtacaatttgttttactttgtcttgcccttggctatatgcaaccggttatgcgcttatctgatattataccacgattatttttaataatgtttaacattgttcaactcaaatgagtgttgagctttcgaataagagattcttttagcactgcaactcaaatgaatgtttgagctttcggataagagactcttttatcactgtcgcctttttcttaccctttctgttagcgtaacatgatcaacctgtgttaagaatgttgatataccctctttattctgtgtgacaagagcaactgggtatggtattcttgtgcttataattgaacagttcggttccaaatttctatatcacgtttcttgtatttttgttttctggtttggtaggtattgctaaggttgtattgaaaaaagggaaggca

SEQ ID NO: 45742 - DNA, 615 bp, Manihot esculenta
  Intron number 3 from transcript cassava4.1_015917m (locus cassava4.1_015917m.g) derived from phytozome v7.0 (chr-ID scaffold00847; pos 1898715 to 1899329 reverse strand)
gaggttagtaccagtcttacttttctgctcctaattctccgcgcttcataatatgttaaatctaaaatatatcctttgagtgtaagttgacaaagaatactacttgccttggtgtatgcgtataacatagttgaaagcttccccaatattatatatgctcaatgacctcgaagaaatcatgacatgattattccgcaaagactattgtacccataaacggaatggatgtcatatttcattttgagtattgatatcaagacatgtttcaatgatctttaggtagagttttcttttcccctgaacttagcattttccttttggaatttgcttttattgtggtgcatctatcctttcagaccaatcattagcttgacttgaaactgtactatgttgtattgagaagtctgtggtgaaaggtgagttggctttataaacaagggagctggttttatacatgctgttgctattgataatccatggactgtgcaataaaaatcttacttcagtgttgaaaagctgtcttttgtgggcttacagctttggaagctgttgattgtactgacaatacaagccaaacacttgtctgggtgtaggttagctgctttggaggagaaa

SEQ ID NO: 45743 - DNA, 708 bp, Manihot esculenta
  Intron number 3 from transcript cassava4.1_016323m (locus cassava4.1_016323m.g) derived from phytozome v7.0 (chr-ID scaffold12118; pos 332065 to 332772 reverse strand)
tcccgtgagtaacaaattccgtgttaccgttttagataatatgtttaagatttacatagtaattgattgctatagtaataccatttgatggttatatatctcatataattaatttgattgtaaaaaactagcttatgtactgaattttttcttctcatttgtagatcttcttgtatgatggtttgcaatttgaataattacaatgtcctttcaagtgaatgacttctatagttgaggttctctattctcagtgttggcatctttgttatggcttgccaaatgctgtaacttacatagatttgtgggtcactgtggtaactgtgggaaacagattgttttatgaaattgctgtctgctgcttttgagaacttgttttagacaaaacccttttgctgactccaagaacttgtttctcagagcaagctttataaactctgcttctttccttttcttttttcaaaattttttcaatttttttcaatacatagtttgaacttgtaggatctatattgtttgtacatgtaattattttagagagttcttatcttcacttgtaaaatttggaagttttctgttttgttttttctgaacgttcttttttatcatttcatggtgtagtttcatgtttttttcttagaaattttatttatcttatcccagaaaccactctcctgatatctcattttctatttaatagatttacctcag

SEQ ID NO: 45744 - DNA, 1003 bp, Manihot esculenta
  Intron number 1 from transcript cassava4.1_033218m (locus cassava4.1_033218m.g) derived from phytozome v7.0 (chr-ID scaffold11584; pos 286078 to 287080)
gatgtatgtttggttggtgagaaaattgggggagttactgtcttttacagttgtggttaagcttagctttactagtttagtaaattttacttttcctataaatcttttgcacacgatgatgattctctggctttgtgatcaaataaaggaagtctttgaattttgtttgattgttggaaaatcacgaaattgctagagaagattgaatgcatatggttcattgcaaagaattttaaaaggaaattgttgcatttcgtcaatttttccgacttctgatcgtctgctcaacgaggtcttttacttactgtgtctttctttaatttttttttgtttgtccttagtggtattatgttatttttctgttctctttggctttgaacatcgtctttttccattagttttagttgtttactcttcaatggtattttcttggttattttcatgatggttttaggatttacatgtcatttttattattattttttttttttactttatgagtagtttgaaaaagatatcagttttgtcttggcttattaaagacatgtttctttttccttcatctcctagcatagtaaacctgaactatgccatggacttggatctaccaatgctttgatgactcaatcacaaacaactttgacccagttgcatgcaaatctcccttctcgccacctctgaagtggtgaaaaaggtttcctgaggtttacaaataagatgagatgggttttcattgcaatgtgaaagtcttacgaaatggagatctctcaattgacagtctacttatacaatggaggcacttttccatagtttatgctttggcgtatcacatagaagataactatttatgtgacctgctcatataactgaagtctcaaaagtttctggaactctgattttcaaattattctcaaaattctggcctataaacagttatttttttcattgatatgaagttcatttttatgttaacagaggatccctggaaagtttgtcaagaaat

SEQ ID NO: 45745 - DNA, 646 bp, Manihot esculenta
  Intron number 2 from transcript cassava4.1_006257m (locus cassava4.1_006257m.g) derived from phytozome v7.0 (chr-ID scaffold06916; pos 730592 to 731237 reverse strand)
tagaagaagctattgcagttggttttgtataattgcttctcgtatcaatattcctcattttttttaaaggttgtatagatgattaaagattctgcatagccactgtaaactacaaagctattatatcttgttgaattaaaatttcagctgtactgtaacagtgcatagtgatataaggttctcttcatatacattatgcatggaaagtatttttgtaaattgcctaaaatctgattagcatttgcaaagaaaaatatgcttggaacaaaaccattatgttgaatttgtgatttttgcaaatgcacctactttatgccttgtgttgtaccatttcttagttcttgaatgcattgctcaagtgtttctattattattgttattatttcaactgagtactgaaaatgtgcctaaactgattcgtagaaattgaaatgagtgaaaagatttccttttggaaagcaacatttctgctataaaatgacctttggtttttctagtttaatttgtttccatctagagtttgtttaggttctgaattcatatcggtgcttcctctggtctcttttgaatgatgcaacttacacatgccaaattgtggtcacttcttctaggtggaagctttagctgttcaactgactcaaaggga

SEQ ID NO: 45746 - DNA, 613 bp, Manihot esculenta
  Intron number 3 from transcript cassava4.1_031727m (locus cassava4.1_031727m.g) derived from phytozome v7.0 (chr-ID scaffold02572; pos 327137 to 327749 reverse strand)
gggctccctctacaaactgcagtgcactaccagaggtctattcttttatcctcctttgtctttctctccattgaaactaaatcacctttaatctccaaaagggtacataactactagcaactaagctttgataatgatcttatcattacaatctcttcctttattttcttttatatattattagaattcaaaactaaatttatacgcatatatatggatggaagggaagaagcaacaaagaattcttttgtatgttgggaaatgtaaagggttttaaaagctgcattccttcctttctgtcggggctgctgctgctatgagagtagctgagtttcttgctttttgggtcttgtgcttattatttaggcacccttttatatatattctttgtattagggggcacccttttatataatctttgaattatagagcacccatcttgttggaaaaggacaccagccctaaacacttctattgtatatacacatatatattgaggagaagggaaattgtgcattaatgagatttaaacctttatttgtatcataagaatatcatattttgcatattggttagtgggcattaaagggtattattaaatttttaggaagca

SEQ ID NO: 45747 - DNA, 124 bp, Manihot esculenta
  Intron number 1 from transcript cassava4.1_031727m (locus cassava4.1_031727m.g) derived from phytozome v7.0 (chr-ID scaffold02572; pos 328349 to 328472 reverse strand)
aattcttctcactaaatcaccatctgggtaggcattattttttctctttcatctaggtttttcttggctttgaattagtttctttggatctttttatatagattattttgtttgtgcagcatct

SEQ ID NO: 45748 - DNA, 1012 bp, Manihot esculenta
  Intron number 2 from transcript cassava4.1_008898m (locus cassava4.1_008898m.g) derived from phytozome v7.0 (chr-ID scaffold11341; pos 810110 to 811121 reverse strand)
aactcattagtctcattcaaacgtaagtgtttcgttgtgtattagagtataatgtgaaagtagaatagggtaactaatgaaagggtattttaagggaagcaaacgggtatgggaaatcaagcatcgcggccttctatgattggcttgttgcaccaaatctcagtgggttaattgaataatttcttttttccgcaaggaaagtttaatcacgatgagaaacatgttagtttgttgagcatgcctctttatctttgcagtacattttataatgtgagagcttcaaagaacagtatgtttgttattgcttagacaccattgctggagctaatacacagttgctatgttcttcctggagtcatttctatcttctcttcaattctatattctcagcattttttactgaagaaatttaacacccatgtggctcaacccaattccttatatttattgactttggtcaaatgaaatcaatcaaaatcaagaagattaactgtattcagcagttacttgcatgaagggatgcaaaacccttagccaaaagatgccacacatagacaataccgtgcatatgtatgtttagctgtcaaataggtacgtcttgaagtgttggttatgaagacgaaattactaaagaaagaaagaaagaaagaaaagcagttttgtcttgtgaaaatgttgtaacagagtgtttacaaaccagaggcacaaaaagtacaaagacaaagagttttggctttgagatttggagttttggttcttggttacatttagtttgcggagcattattattgtgcaatttaaggcacacatctagctatgaacctttgacatagtttatgatttcgtttaattatattaacaggcaagtgatgcaaattagtggttatatatatatacatatatacatattcttcgtttaaagtacatgtctcgtgttgttacactctttatgcttctaattctattgtactttgtaggctatatataaaacaaccaccaacaagcacttcaa

SEQ ID NO: 45749 - DNA, 855 bp, Manihot esculenta
  Intron number 3 from transcript cassava4.1_015407m (locus cassava4.1_015407m.g) derived from phytozome v7.0 (chr-ID scaffold11224; pos 90861 to 91715 reverse strand)
cgaggtatgaatgaatccttatttatgtctggataatgctaagatttatttggttatactcttcagaaaaattcttaaactcctgaccgcttgcgtaagcttcttattttgtttttctttattagatttatttacttcgtgctcaaatcatgctacttttgtcttttgtgcattatggtatcagatctttaataagtaaccagagtttgatccatgcaaaaagcatgttttcattagtgttaaactgaaaatctgtaccttggctttaatcttggaaggggaaatatctggaagtgttgtagattaggtgcctagtttagaactggtctccttcaactaagatgcccatttaaaaaggacttagaatcttatgtaataatttaactaatttaacaaaactactagaaaggtaaagagaaggttctactcttgaatggtcctactataaataataattcaataatggattcttcttctacccctctttttgaggaaacttaggtcttagttccagtagtgaaatgtgggtttgtagataactattatcagccatctgggtttgctttgtgttttccataattttgattgtataattgatgatcatatacatcagaaatattggcataatctctctcaaaaattaagggaatgcattagttatttatttgcattaattttttggccttcttttttgaatgtgatctcccatgcagaaagtttttgatttcatatcctccccccttctcttcttctttacaactgaatgagatgagaccacgtctacatgattgctgaaaagagaaactacatctgtttgcaggccctcgaagatttttgtttcgccatacatttggt

SEQ ID NO: 45750 - DNA, 1032 bp, Manihot esculenta
  Intron number 1 from transcript cassava4.1_017964m (locus cassava4.1_017964m.g) derived from phytozome v7.0 (chr-ID scaffold03454; pos 127375 to 128406)
tagtcagtgttgaaattaagaagaaaaagggccaggtttggttccatatatcctgcactctatttgtttttctcatgtgatgatgccacttggagcaaatcctgtgcattaggttggttttctggttttgcctccgtgtcctcataacaaaactaggtgactgttgtctgctaaattaatgtctgctctttgtgatgaagaaagggtcaggaacgagttcttgtttttttttatgaatcatctgcaaatccttattttcatttttttgtttaaatcacacatttatttctggaatttattagagggattgaggtcatccatatgattctcttaattgaatgtcactcttgttaaaccgtaaagtggctcttacgtttggcaaatagattgcactcctttgatgatgtggcttccattttgttgttggtgagcattgtttagattttgactccatttgtcgacccacaaatatttccagcatttacttgtgttcggcatacactggaaaatggtttgggacaccatattttcaaggaaaacaacttccatttcaagaggatttcttgtttcaaaaggacattgtgtctccttatttccattatttaagattgtttttcttgcatatgggaagggcgcaaaacgaaactgcttcaaattccaggttctctatttaatttgtgcctgtcatttttgcgttagttttttagggtttgcatggcagtacctacacggcattgttgttagcaagtagaatccttacacctcatgaaattatgaacagccaatgtgatgtggagagtaattgatggtcattcacattatcttctccaaaatagagataaaaagacctgctatcctgaattcctgatgctttatttgcacattttttcctccatatctctgaaatatttcaacatcctagagctgcttgtgcatgcatctttaggaccctctttttttcctcacatgaaaatatttatagagatactccaatggatggcaatgtcctaatggtgtattctgctgtgcagt

SEQ ID NO: 45751 - DNA, 386 bp, Manihot esculenta
  Intron number 1 from transcript cassava4.1_007629m (locus cassava4.1_007629m.g) derived from phytozome v7.0 (chr-ID scaffold05894; pos 38049 to 38434 reverse strand)
ggtaggtgctatttttgttctcttttgagtctcgcgctctgttttcctttatggatttgtgtttctggtactgggtgcagtgattttatttattcgactcttcttttggtttcgtgcttgatttttctcggtctgtccggctgctgtttcttgtgtttcaatagttttatgggcaatttttttttttgggaaataaaatctctttacctggttgtttggagatgggttaataacagtcataagtgaaattttttgtgttatttctgagcttgggcatctgttttctcgttggtcatgtttattctctgtgtgcctcctttacatttttattggctgttttcattctcatagcttttaatctattgtttctttctacagacgccaac

SEQ ID NO: 45752 - DNA, 450 bp, Manihot esculenta
  Intron number 3 from transcript cassava4.1_022191m (locus cassava4.1_022191m.g) derived from phytozome v7.0 (chr-ID scaffold12345; pos 19136 to 19585)
tctctgaccttccttacatttctctagcttctctggtactgaaattttttgccccattttttaaagggtttctcattgtttttttgattttaaagttcaatgtatttgattccaataatctaataagtagaagagaattatttctttatggagttcaatgtggtttatttctatgtattagtgtcaattttctggacttgtgaaatagtgcatagattcttatttgttttccttcatctttttcttccttaagcttgtgtaatggtcagattgtttgaaattggtgatcttctccttagtgtagttattttggattgtatattgtttccatacagtaagtcgcattagggattttatattgttccatgctctaaatgtttgataatagggctttcaaatgtgttactccttccagtacagtgatctagctgaatcagaacgaatcttagt

SEQ ID NO: 45753 - DNA, 759 bp, Manihot esculenta
  Intron number 2 from transcript cassava4.1_017062m (locus cassava4.1_017062m.g) derived from phytozome v7.0 (chr-ID scaffold00271; pos 39450 to 40208)
tctctcgtacgccagaatctttttcatattcattgtagtaatgattttctttcatatagtagtaatgagttgctagtgtgaattcttgatttgcctggtctagtgggatcaacagtgtatattttttttattcaattaatatgaagaagcaagaaatgctataagcgcattcttgatttagacacactctttagctggaagcacaaatgttttggctttcatacattggcttgctcctaaaagtgtgatttttttatgaactaattgattatatttcctatagtgtttaaaaacatagcttattttttgttctaattttttgcggacttgtattttcttttacaatgtcatgcttctcttttgtagaaacctccttatattattataatatggaattttggacacatctgtctgttgtacaggaaatggcattgtgaagtgtctttatagcggttatatataaattctggaacttgagactattaatttattgccatgttacattgatggcatgggcttatccaatttgagtttcttattaagctgcattacttgcatggtttatataatatttttggtgcatcaaatgtcttgaggagatttttttgcacacaattttctatgcaatgtgtacttgcggggagatttttaagctcttctggtgagccatgttagtgtgaatgttttctgtccacctcccaagatttagcctgcaagagtagatgctttcatgaatattaaactgtctggtttgcgcag

SEQ ID NO: 45754 - DNA, 384 bp, Manihot esculenta
  Intron number 2 from transcript cassava4.1_014764m (locus cassava4.1_014764m.g) derived from phytozome v7.0 (chr-ID scaffold08799; pos 55696 to 56079)
ggcaggcgttggaatctttcactctggggttgaaggttagctttccaaatccattgttttttattatgaatacaatgttgtccttgtttgttttgtttgaatagattatcttctaatgttatgtatcatttgatgctcttattgtcattgagtttccattaagaaaaccatacggtcatttagaacttttggttttaatgcacatatcgttggctaagctggtttacaattatacaagcacatgaatatataatcattctagaagatttaaatacacaatttctgctgtgcattattgttatttttctaaatcatgatatctcaggatgccaccagtgctttgctcattatccttttggattcttacagtccacggcgtagaat

SEQ ID NO: 45755 - DNA, 590 bp, Manihot esculenta
  Intron number 1 from transcript cassava4.1_012267m (locus cassava4.1_012267m.g) derived from phytozome v7.0 (chr-ID scaffold12118; pos 93049 to 93638 reverse strand)
cccctccctcaggtttcatccaatttctttctttattcttttcttttaattcattctgtaatttatccaataaatttccacaaccttgtgctttttctatatatatatgtgtgtgtgtgtattaacatggtagtggttttgggtagtggctttttcaccattttagatggttattgctccttacatctggatagattggtttaatagtagtttcacaatcttctgctcttgattgtgatgttatggatgcttctaccttgtccatagttgattcgtgaattaagcttttatgggttcttattaattttccaattgctttggtgaaatgtagagtaatatatattcattttccatcacaatttttgttgtatatatcgcataatctaaccttgttattgggttcagttaggcacatttgcattgctgtatataatccaatcctatatttcttactcaaaacctttgtttattctattgaatttgagctagtatcataacttgattgatgcttgccctggatcttttgaacttggacctttggtgtttatggttagtaggacttacttggatttagattgcagaaagcgagg

SEQ ID NO: 45756 - DNA, 447 bp, Manihot esculenta
  Intron number 2 from transcript cassava4.1_015246m (locus cassava4.1_015246m.g) derived from phytozome v7.0 (chr-ID scaffold00368; pos 98123 to 98569)
ttcttggtaagcccctctgccccctcctctttttgcatttcggtgtcttatgggaaatttgaaaacaatcttacggaaccaacgattcagatttttcttttccaaaaaaaaacggttatttgattttattgtgttctctggcaatctagtgagatattgagttgtttttaatttgagattttattcaacacaataaatgatatatagtatatttgggatttcatctgctttattttttactttttctttttaatggtgcgaaccatttattatggtgggttccgtatgggacctacgatgatcaatggttataatataaccattgtatattataaaatttctcctaaatttagtgtgtactagggaatgaccaataatagccttagctagtttttgacaaattttctatcaggtgagaagggaagaaggatcagggagctgacatct

SEQ ID NO: 45757 - DNA, 857 bp, Manihot esculenta
  Intron number 1 from transcript cassava4.1_004147m (locus cassava4.1_004147m.g) derived from phytozome v7.0 (chr-ID scaffold00325; pos 531105 to 531961)
ttactggtcgagctcctgttttgcctttgtgggctgtaagtacatataaatctttcacttatattatggtttgttgtctgattttatttgaatcgataatttggtttatccaattgtttaattcgttgacttgctttgttctattctttgctgttcatttctgcttttccatctgtatgacataaattcattggaacttcttgttccattggatctacaattttgttgaagttttatgctttgtccacttaatctacaccttcattgcagttcttgaaagcttctgttttaattgtgggttctatgatcattatggttaatcttgaagaatgtaatgagagtcatttaaattgctgaattaaaaattcattgcattcttaagtgattgctgttagtgagcactgttccaatataacagtgcatacaaattactccttaaaacaaatttgcccttttgttcttgttgccaatatgcgtcctgccaatgcattacagttcattactggcaccaaatttttcttaattaatgtatgatatggactccttgttttcttttttctcgggcgcgctggtgagggtaatgcttttatggaaatctttggttactttgacatatattaggccagattacatgttctaaactattttctttgattatatcacaaaagatgaagcttttccttggttttcacattatgtttgaaccttttatgctgccaatatgtgcaaatgactagtttctaataacttttgtgccatcttcttctcaacattcttagtttgtactatttatgaagagttttccaccttatttcctgtcttacatttgatgatttgtgattcatattggtgcgcag

SEQ ID NO: 45758 - DNA, 663 bp, Manihot esculenta
  Intron number 1 from transcript cassava4.1_033513m (locus cassava4.1_033513m.g) derived from phytozome v7.0 (chr-ID scaffold11069; pos 238543 to 239205)
ccgccgcgtcagtctttttcttccttttgttgtttatttgtttattgctttctaattttagttaataatgctgaattttgattttgggttttgaggtttttgtgcgtctgaagggttttggctgtaattatattagttgtattacgattattataactattggaatgtggattgcgcaatcgtgtatgtccttgatttggtatgctaaccactgttgatgcccttgctatgatgtagtgtaattgggcaaattattgaaaaagtcaactctttgatttcttatttagttgaattgggccggccttgatagttattgctgttatgtaaattgttaattgtagctcaattggctgctatctttatagtaattgtgtatttattggaaggggttgtgtgttctaaagcttttgtcgcccttgatagagtacgtgttttgtatgtcaattgtaaagttgcatttgtttacagtcttactagttttcatgttatggtctttaaacactatctttatactagtggttggacatggactatattcttaaatgatcaagtgtgtgttcacttattctgtcaagatatagcttaaattttgtttgtacattaatttgattatctcttatataaacagcaacaagaagaagaaaagaggtcaaagagcaactg

SEQ ID NO: 45759 - DNA, 569 bp, Manihot esculenta
  Intron number 1 from transcript cassava4.1_020792m (locus cassava4.1_020792m.g) derived from phytozome v7.0 (chr-ID scaffold04043; pos 1413906 to 1414474 reverse strand)
ctctccaattgtagctcgagagttgactcatcgtgagaattttaacttttcatgcataattatacataccaactcaagaaaaaaaaaattgttactgtcttagtatctaatacgaaagcctcaattttgtttctttgttcttaatattattattttgtattaatcttcagtgaaagagctatggggacttggggatccatagtccctctagtctccaagtagctccttcactagttgttttgattctgtcttctccttggtgagaacttattaaacttttagagaaaaaaaaaaagaccattgtgtcctttttttttttttttctttctccccttgattgctagtttttctttattactgcaaaaatagcaaattagggatttggtgcatagaaaactcatatctgttcaatggatttactaaaaaccctagtatagattttgctgataattgaaatcatgcatgtgatcctctttctgaaacagttttctattaatcaagttatatatataaaatctctttcgattttgacaggcaaaattggtggtggcgaacctgaagttgtcttt

SEQ ID NO: 45760 - DNA, 953 bp, Manihot esculenta
  Intron number 1 from transcript cassava4.1_016922m (locus cassava4.1_016171m.g) derived from phytozome v7.0 (chr-ID scaffold04457; pos 238804 to 239756 reverse strand)
gccaactctcgtaagttatcgcctcttgttttaccgtttgcgtaatttttatcggtgatgggattcagatgttttttaagctgtatcgttctagtacaaagtatttttatttgtgttattattctggttgggtgcctgttttgattgattctgatgttgaatatagagcttcatatttcaatatatccgaactaggtattgaactcttgtgggttctacatgtatttcccagatgctagaatcctccacagcctgcctgtccatatcctcatcttccggattcctgttactacccctttctcaagccttctgttatttgatgaccttccgcttaatttaactggagtctttgcacattttcagtgttcagtaggagcaagcattttgatgtttttgtcgtctctggatgtggataaattatccaaaattactcttgaaattctttattatttgagagtcagaatatttatgatcaatgttgtctattatttgaaggacaatatggcaaatatcaatggtagtattcttcgagttgtgaagtcgcaggcctttctcatttgattggtcttactcaacaaatatatggtttttataaaatgttcaacactaataagcctggatagatatatatggttatatcttagtccgacttgaagctaaaaaataattgatatgcttttcttttcttcccttggttttccacattgtacatgggataatatataatatgctctcaatcttgaagtacctttgcattttctgttgtaattccagaaatatacaaattacattccttatcatgttgtttatcttttttgttgcaaatcattcttacaggcttttgtattttgtcattgtgctaattctagattatgggcaacttgatgttcatatcttcatgtatagaatgtactttgcaaatgcaggtcaaaacataaggaagttggttaagg

SEQ ID NO: 45761 - DNA, 889 bp, Manihot esculenta
  Intron number 2 from transcript cassava4.1_009235m (locus cassava4.1_009235m.g) derived from phytozome v7.0 (chr-ID scaffold02196; pos 41441 to 42329 reverse strand)
tctttggcccaggttttttttccctttcactttttccaatactatattaatattgttgttttgtactatgatataaagtaattgaaagatgagaagtggatggtttctgctttagtttccaatgcttaatcgtcagtatatgttttggtgtcttgaatattataactgtgaatacggagaattgagaatatttcacattcttctttgaaaacaagattgtgtttgctgcacataatgaaagtgaaagtttgtattcttaatagtaggaagagtaaagatggtgcatttttttttccctttttttagaatgcatctgcagaataatgtcctaaaatttatgtgggaacttgtaagcttcaaaacttgtttttaccattccctttcttggatttgcttaaatagaaagcacaagtatgtggggcttttgaaaatttcttttgaaccttggcatcttgaaacatttttataaaatccatttccaaaatcttaactcaaactctaaagcaaaatcatgattggtggctgtaggtcacttccccaaaattctcaacgtactcgacattgtcagactatcaaacttaaggtcattctgcttgctgtgtgtttctttctcttcatttatttgcctgagactaacaaattttattgtgtcggtcaaattcttttgtcaaatttattggaaaggcgactttatatttagaacttggcattgttcttagacaattgataataagcaaccggaatatgttggctttacttgtcttggttttttctcatttgtgacttaccatgtaaaagaaattcttttcagctgattgactcttgttttttggttgaaatgtgcactactatagggtgttgtttactggcaaccacccaaacaggcatt

SEQ ID NO: 45762 - DNA, 605 bp, Manihot esculenta
  Intron number 1 from transcript cassava4.1_017445m (locus cassava4.1_017445m.g) derived from phytozome v7.0 (chr-ID scaffold06715; pos 187741 to 188345)
gtgttcttagaaggtaatttgctggtgcattcttttatgcgttaaattttctggtgctaaatgtttattgtcgtctcctttttcgtttttttattctcatatcaatgcctgtgtgtctatgtgagtgtttattcctgaattcttttgatatcatattttttagtttttattttttggggggaatttttgtagtccagaccaaagacataagtgtgtaatatccttcataattttcattgaaatctttgaagattaccaaatttgaaaattgaaagaaatcattctgccagaacctatggtgttaagttttgtacacatttcaaatagcattgaatgggttcattgtccatgttcattttgtttctaaatgctgcagagctacaacaggcatagaagttatagtctgatgctgtcacactctacttatggtgttacaccctacttaagttccctaattcagggtcaagggcaggggatgttttgtggtattatgttgttctttttttttttttcttattcagaatggtattaactgttgatggctgtcaatttgttaattgttataaatttatgcagtgtgtgggttgcacggaggccaccaggat

SEQ ID NO: 45763 - DNA, 1020 bp, Manihot esculenta
  Intron number 1 from transcript cassava4.1_011418m (locus cassava4.1_011377m.g) derived from phytozome v7.0 (chr-ID scaffold12416; pos 224543 to 225562 reverse strand)
gctataaggattcgggtatgcttttcttctccttcttctctgtttctgttttgaaactctgttgaacttgttttggtttgtttggctgttgagaaagttcgagataaggaaagacaaaatatttaactttccactctacttgtggcacccattgagtttaaattaaacttttgggttggttccatgtttaggtaataaaatgaattcggattttctgcttttttctgcatcttttggaacttcgaagcttaatcatgtgaattggttctcgttctgttttttcttttacaaagttttctcatcaaccaaacgtgggttaaaaatagtttcttctacaagaaaccttaatgagaatattgttttaattcaaatatatatcttaagcacaagcttcaatttctttattgcaagcatgccagcctggtttcagtctagttctggtttagcgttgagataagagaaccaaaatcagtctctataatttggagccagtttcaactaataaactgttaatcagggtgatcccgagtccaaatcatggctgaatcggcccttggaatatagatttcagtgcttattatataattctttttccttaaaaagaatattctactagttaattagatttaatattcttttgaaattgatatatttatatttgaagttcctacttttgacttttgagtttattgcgttgagataggataatgtttttgctaacatgcacatgagctggttcagtgataaaataatgggtgatgttgagttgcctttataaaagaaatattgatgttcttaatgatagtgcttgacagaaaaaacaatgcatattgcttataaagtatttgtccaccatacaaacaaaccattattataatatctgatgtgagaaattaatttttttaaaaaaaggaactgtatattctggttggtagtgcttggccaggtgcaatgaagttttaatcagagacttcaatcatgggcaactcatttcaattttcctttggtttagcagttcca

SEQ ID NO: 45764 - DNA, 925 bp, Manihot esculenta
  Intron number 2 from transcript cassava4.1_008099m (locus cassava4.1_007135m.g) derived from phytozome v7.0 (chr-ID scaffold02421; pos 629797 to 630721)
gctccggtattcgttctacggtctggaaggtacttcctctctcttccctcttcctctgtgtttctcttgttctctcatttctttcgtaatttgattgaagtgaattattgttttcaagttgctcattttctagctttgagaatatgaaggaaattgggattttaggttttctgtgttttttttttaatgatttgtcgtaattaatttttggagttatcaataagaatttcacattcaagcttggtgcctttttctctctctgttggttttttcgtttgttttggtttggggggggggggtttgttgagcaactttaggatgaatgacctcatggtaatgtgccatagttacttaattttcaattgattttggcagctcttactggggtatctaccagctgatcgctccctttggtcaagtgaattggctaagaggaggtctcagtacaagcattttaaagaggagtttttaatcaatcctgtaagtcatgttgattttgtttatttggttttgttagtctcaatttgttgctttggaaaggactatacgaaactaaaatccttgtatggtcatgatactacacagctattcctctttttttgaggtttctcttaatcttgtctcttggttaactttttcaaaccgtggattttgtgaagtccttaaaagattgacagtacagttaaaccatgaaggccacacttaaaggagcataagttaaatcacaaaagcagatatatgttggcgtgagttttgagcaggctttacttgtcaaactagcatgagatggtgacactcaacttcatgcaatagggatctattttgccttctgattataactttgttcctgtaaatagttttggatctctgattatttttgtgctagttagtcggaaatcacaaggaggttggaggattgtgaaaa

SEQ ID NO: 45765 - DNA, 385 bp, Manihot esculenta
  Intron number 1 from transcript cassava4.1_025795m (locus cassava4.1_025795m.g) derived from phytozome v7.0 (chr-ID scaffold07996; pos 332440 to 332824)
aacgctctttaggtactctctccatgtttctcttgtttctttgcactcctctttctatttattgaattcgccattttttttattgcatctagggttttgtctgcaatttagtaattgaaagcattatttggtgaaattgggaaataggatttgttttcttcttttggtttttgtttggatgactggaaagcccaataaaatagaggggaaaaactgttccatagtaatcatataatttgaattgtttcaagtgttttgataacttaatatgcaataacttgtctttgtagaaagattaaacggttttcctcgctgactggtgattggcatctttgttcttgattttgtagtggttggtgagtctggtaagttgcagttatctcct

SEQ ID NO: 45766 - DNA, 333 bp, Manihot esculenta
  Intron number 3 from transcript cassava4.1_009811m (locus cassava4.1_009811m.g) derived from phytozome v7.0 (chr-ID scaffold10503; pos 38366 to 38698)
aatagatattgcagctcttctgggtaaatcaacaggtttgtgtttcaatgagctcctctcctttgttcttatgttttgatttttaaagcagttagagctttagacattaacttattgcaatgtaaacagtgaattgcattcttagcgatgaaaatttttcacttgttattgcaaactcttttgtttgtttctatcacttgaactgaagcctgagaagtgagaagtggccaagcatttggcttctatattttctgatttctgagctgacattttattattattttttatgatgttacaggcttggcttttgtagattgctctgcaagttctgag

SEQ ID NO: 45767 - DNA, 668 bp, Manihot esculenta
  Intron number 3 from transcript cassava4.1_004703m (locus cassava4.1_004703m.g) derived from phytozome v7.0 (chr-ID scaffold09354; pos 72902 to 73569 reverse strand)
tttcccgccgattggccaaaacccataattggacggtacttgtttcaatgttgaatttgtatagttttagtggcatttgatacttctttatttaattggatctgtatttaattgaattctgctgcttatatatatatatatatatatatatatatatatatatatatggtttcttgttgatttatattaggaagtagttatgaaagttaagaccatggagacttgtaagttgtaagtgaagtctgcactgtgacatttgaatgttttctttatgattcacaagcttcagtttgcgtattatgagcttttatagcaatagtaactggagccgcacatttaagtaattaaactagttttacacatttctcttgtcttcttatgaattgatacattggatgctgtcattttagagagccccattagaactgggatttctatcattgggattaattcttgctttgtatacaagcctttgtggctgctctaactgttctagcccacatgattatataattcttttggagcaaaaaaagtatagactgctgagatattgataatacataaaagcttaatcttgaaaccatatatatatacaagcttgtgatacatatatacctgctttttttttaacaggtagcgttgaaaacattgattgtcatccatagatt

SEQ ID NO: 45768 - DNA, 967 bp, Manihot esculenta
  Intron number 1 from transcript cassava4.1_008925m (locus cassava4.1_007822m.g) derived from phytozome v7.0 (chr-ID scaffold12211; pos 329557 to 330523 reverse strand)
atcttgctttcgctattcagattctgtttattcaggtgcgttttctgaaatttcccacttcgttattattccaagtattctgatttttgctctttgaacttcaaaagagcttcttatggtagtaattacttgcctttgatttttcttgagctaccgatagatagattgaattctttttcagcaattctagctattttcttatttatatcaagctttttggtctttctcttctatatctttcaacatatgcaagtataggttttttttttcttcataatccaatgccaggatctgggcttttgtgctggttacaaattaagctttagactttagatgttagtaaaaaagggtcatgaggtttgcttgattatggaggtaataagtttgagggtttgaaatggaggctcttgggcccttaaatagcttgtttattttgtcaaataggccacatggttagtgagcacatggttgtatcatcgtggttgaggaaatgttagttaataaagttgattaattttatgaggctgtgaatgagcaaagttctttgagtgtatgaattatggagagaagattcaaaggaggtcttatcttggcaatccttatcattttggtttctcagacctttacactatatcagggtatctttactttgtaacagaatacaatttcatgctatgtgacaaacaaaatgggttcgactgggtttattatataatttgtggtctcaaaagctatacactcgcttatttcatcatgttgcttactttcaatttgaatttccaccttggttttatagtgttttcttgttatgataaattcttcatctggacttttgtctaacttactgataacgataccctatttactcttctatatctcctgtattctttgctgaagttctctacctttttcatggaatattggcaactcaggacccaataaacaacacacaagttttaattgtcac

SEQ ID NO: 45769 - DNA, 534 bp, Manihot esculenta
  Intron number 1 from transcript cassava4.1_004164m (locus cassava4.1_004164m.g) derived from phytozome v7.0 (chr-ID scaffold00847; pos 502047 to 502580 reverse strand)
cagctcgtcactccttggactatctcagttgccaggttactatcacttactcgcttcacactgggaatattcttttcttttcgtttctttgtagatttacttctgatgctgattttcctgcttatccatattcttgtatgacaagtaacagatcaggattttttttcccttctttcttgtgattgacttgaagtcttgattagggatttgactgatcattttaccatttttttttatcaatttaagcagtttctaagaattttgttttgtttattctttttctttagttagttgctttggcactttctttagttagttgctttcccaaatgactctttcttgttaactttagtaagtttaatcttgcgttttgactattgttatttgttaattatacatcttttgatctgagattcaagtttatgtcttgatcttgtattcacctgtgttcactggagtgctgatatgatcactaaccttttgatttggctacatgcagtggatactctttgttacgggatccacgccataaca

SEQ ID NO: 45770 - DNA, 842 bp, Manihot esculenta
  Intron number 1 from transcript cassava4.1_009507m (locus cassava4.1_009507m.g) derived from phytozome v7.0 (chr-ID scaffold03219; pos 386194 to 387035)
ggtcaggagcagcggttttgtcagcagtgtagcaggtgagatctaacatgctttgaaattagagctctttgaattttggctgttcctttgctgcactgttggcttgattacctttattttcaaaagcaagggcttaaattgaagattgtgattcttttgggttgcaatatagtctgcctaattacttgtgacttttatgcatatggtctttagtgtcttactgctctcggatcttgaagtcattcacagatgtcaaaaagtttgtagtaacttcaaattacagattcagtaatcttagttcaggcattcttagcattacatatgaaactcttctgacctctcaagcatctcttgcattatgcagcagtttaattcatggttaagttatcatttaatggacttagtatgctattctgattggttaccatgaaaatagacagctattcactgtctttgatatgattgtgaaaaatgaggctgctaataatgcttttccatcaaggagaagaccagaaaatcagggtcatagtcttcaaagagggtcgtttcctcgaatagtttcagttttgctactgccctttgatgcatatgctttgttggcatttatcttgggttaccagggcgaaaaataaacatgaatgtacataatatcttaggttgtaatttcggataattgatcggatgctacttggttagaatggacaggaacaaggagtggaggaggatcttatcattactcatccctctaagacaatcttttgtttgcaaaatttctttagctgttgtaaaatatttactgctctggatgccctataataggttccattcattggtggagtttg

SEQ ID NO: 45771 - DNA, 374 bp, Manihot esculenta
  Intron number 1 from transcript cassava4.1_010490m (locus cassava4.1_010490m.g) derived from phytozome v7.0 (chr-ID scaffold00784; pos 114584 to 114957 reverse strand)
gaggtcagctctttctcactctctctctctctcagacgtcggttgttcatgtttgatgggtgattttgattcttgtatttgatggttgtcttacctaggaaatggtgttcttctattttgtttctttttacttgcttttcagctctaggtgtttttttcccccttcaccactcactgttcttgttggtcctgaaagttgcaaggatgtgaatcctatctgcaaaattgaactgtttctgacaaaggctttccttatgaatatccatatttcttttagagtagaaggatattttcttcttttattctaaatattattaacagtgacattccatgtttcaggtcctggttgttcctccgttggtggaggtgccttc

SEQ ID NO: 45772 - DNA, 919 bp, Manihot esculenta
  Intron number 2 from transcript cassava4.1_007494m (locus cassava4.1_007147m.g) derived from phytozome v7.0 (chr-ID scaffold07660; pos 218979 to 219897 reverse strand)
tgattcgcggtgcttctgatctcaagttagtcatatcttatctacttattgcatatggaagcagaattagttattagctttgccgtttcattctacatgttatttgaaattctgctttctttgtttgctaaaaggtgtgaattctttgttggtatgtctatacttgtttaatgttgtttccccctactttaatctaaggcatagaaaggagagcttggttcttgaggttgatctcattgttttgtgcacacttggtaatacattgcctctaatgtaatttgttaaaggaaatggaatggcattaaggaaagtgaaaaaaataaacaaaattgatttcactgagctttggttgactgctaatagtaatagtttatgcctttaccagtgtgttttgtatttgcttgcactaagatttggttgactgctaatagttcatggaaattgtgacttgtttccggtgctagagcccagaagcacgggcaaattataaattgataagtccatgatgattccagttgatgttactcactggaattttgactgtgtgaatgtcatgaggagaaataattaagctgcagaaagtaagatgttgaattttgctattagtttggatgaggatgatgttagtggattttggttgtacttctatgattgccaattgacacatccactagatttcatcttttccagtatatacttgtctaatccattgtgaattagtacattacaattggttctgttacacttgttgaatcttctcattcataacttatcctttttgccatatcatgtgagattcctttgtggctagacaaggttaagtaagattctctttgattctggtaaatgccttgttgttcacatttaaattggtgctagtctgtgtacagggtcactcttgctgaccagtcaactcttg

SEQ ID NO: 45773 - DNA, 514 bp, Manihot esculenta
  Intron number 2 from transcript cassava4.1_014730m (locus cassava4.1_014730m.g) derived from phytozome v7.0 (chr-ID scaffold11341; pos 877152 to 877665)
tgtctgattcagaagaggcatccgagttggagtgataattggcatggtaatcaggtatctccaccaagcatttttgttttttcagatttgaatcaagtaaaacttttgggagcttttgaaaatggtaagtcattctagtaaaacagactcttgttatggaagctggcagaaaggccggtttcagcttgttgactgtccaggagttgtctagagccctccactgatacctgataatagtctgagcaaattatcttgcaagttgattcttgcactttaaaggttattcagcctaagtatgagcatttattggggaaatgataaatgaattagtagtgattatgggacttgatagtgattatgccataagaaatgtcttttatttgtgccataaagaatggagtgatgttttctctggcactactctgttgtacgcagagtagttttatgtgctttctttccttaaaaaattatttgtaactgagaagatgtttttgacagttgtgtgattgttggc

SEQ ID NO: 45774 - DNA, 960 bp, Manihot esculenta
  Intron number 1 from transcript cassava4.1_017546m (locus cassava4.1_017546m.g) derived from phytozome v7.0 (chr-ID scaffold12498; pos 326075 to 327034 reverse strand)
gggtaagttttctgcttcttcctggttttggatttacatggagattttgcttgtgggtttttatttttatggggttttgtgattgtttgattgtgaattttggtctgctgtgcttgcttttctctgtaattgtgggaaaaaaaagtaggaattgggattattgttttgtgtttgttgcattttagtctctatggtattgactaaattaagctcactaatatgatctattaatttcagcagaaggtatgaggtaaaattttttattggtatgatttggaaaataaaagattatgaaatttttacatcatattttattttgcaagaattgaagtttggttttgctgggtatcgccaaatgaatttcttcaatctcaaaaccataaaccttgttattactatggcacatggtgacaattgacattcctaagaatttatgatggccggagctcgcctggttgttgtgtatgttgaggcatttgcaagtcttgacttgctgcagcacgacacatagcttgcttgggaatggatgatttctctgagtgagaaatttcagtgaattcgctgcttttcttgtagccagaccatttttctcttaaacaagtgcccaaaatgtgatgctgtgctatgaatttcaaatctttggcatttgttttctcttttgtcttcaatgaataatgataatgtattaatatcaagcaattgtaacttaaaatagtgtgtcactgcaaaatgactttttgcaagtgttaatgagaatgtgataatctcatgtgtatttagccatgtgacgatgtgtgtccctctctatcttacttttttgctccttatctttagtttgagcattgactgttttgtagttgtaatttcttctgtatcattcagccacatctatatttagtggttgttatgcttcagctatatgattgtatgtgatttgctacagaacagtggttgtctcgg

SEQ ID NO: 45775 - DNA, 641 bp, Manihot esculenta
  Intron number 1 from transcript cassava4.1_004154m (locus cassava4.1_004154m.g) derived from phytozome v7.0 (chr-ID scaffold06916; pos 1351312 to 1351952 reverse strand)
aacttgaatttatcctccgattactgcaaattcaggtaatttttccttttattttatttatttatttatttatttttttgtcaaaggaattattttcagattcgttttgtttatgtaatatgcttgtttggttgccaagaaatgtgaagagaaatttaggcaaaggacatgaaaatggaaatattttgaatttgtttaatttcgataaactaccatgtttaggattaacaattgctaaggctgcgtaattttatctttcggtgaagcattcgcatttctaatttcgttttggttaccgagaaaatgcgagtggaataaatcagaatacccgagctttgagaactctgattacttgaattctagtggactgtttagccttgtctgctgatcggggtatattattattcttttttatttggtttataggcaaatgaataaggaaaaaagaaaggaatatgttttttttttccatttcatctgatctaactcagagttagggatttagcctgtaacatctgattttacattaacttttttggttcctccatgatgaacggtgcgaaacaatatttatttggtctgattcgatatttctgtgcatttcaggggatcatattcgattggtgaagacatcaaccttt

SEQ ID NO: 45776 - DNA, 645 bp, Manihot esculenta
  Intron number 2 from transcript cassava4.1_014016m (locus cassava4.1_014016m.g) derived from phytozome v7.0 (chr-ID scaffold03741; pos 1122530 to 1123174 reverse strand)
tagctttcaaggtatgttttacattattttataatagtgtggaattattatatttaattataattaatgggtcattaaataattttactggtttggattttagctaaggcaagataaggtattatcattttgtgacattgcataattcgcattacatcacttctgttcttatctgaatatgaatgttttaaatattatggatggtagaagggccttgtatataaaaattttgaggtttggcctttttataatatttgggtgaaaaatgaaattacttaattttttgttgttccatctttattttatttttggcttagtggcctactgacctcggaaatgagttccattctccaatcacttcttgctcttttttcttttcttccttcctttgtagaatacatgcggatctatttggaccaatcccaataattactggaataataatcctttttcttacacctctgttctttttgtcgttttcgttttcctctgccgtaaacttgtttatttctaataaaatgcttaaactcttaattatatgttagttcagaaactcttaattttcgtttgcataacctcaaatgattttttactggttttgctatcgcattccagtttcaaacaacggcaccaaagagctgtttc

SEQ ID NO: 45777 - DNA, 403 bp, Manihot esculenta
  Intron number 1 from transcript cassava4.1_014016m (locus cassava4.1_014016m.g) derived from phytozome v7.0 (chr-ID scaffold03741; pos 1123235 to 1123637 reverse strand)
ccgcctcgaccctgccaattacctctactttccgtgtatgtcagttgaatttagtacacgcgatgacttttcttctttggtcaacttgaattattttcgcaatcattttcattttcgttcatatcgattgttatttgaaatattaagaatcagagatttcgtcaacgtacacagtatgaattacatggtttgtatccccccccccaccctcttttattttactttggtgtactcttttgccttcttctacgctgttctgcaaaccttattagaagttttctagcatcattttgaatttattttttgaagttcactttcgctgtactttgttttattttattatatattttttctttcggtagtggctgaagtttttttttttttttttttgtgggtgttgcag

SEQ ID NO: 45778 - DNA, 833 bp, Manihot esculenta
  Intron number 1 from transcript cassava4.1_018254m (locus cassava4.1_018247m.g) derived from phytozome v7.0 (chr-ID scaffold03750; pos 93434 to 94266 reverse strand)
gcgccagctaaaggtatgattttagtcccatgaagcattattttcttttttaagcatgatagactggtgatatctggtgttttattgactagtttttagttttggctcgtcttttgaaccttctattactctcttttatgttattgtatccaaaatgcagtggcgaggaatgcatattttagttagacaagttcatttcatctttttgtttggctgtaatcagaattcttttttgttttaatggtgatgattgctattagaaggattaggaaaagcactggattttgtggtttgatagatattgaatggtggaaaatgagtatgtttgttcagtgtgttgttttgctggtttcaagtttttatttgaagggcttgttgggtttgtttattttgtactaaatttttactgaaaaataggcttgactacgggtttttttaggcttgtacttgttattatatataactttctttctattaatcagtagagcagagaaagtgcttacctcatgagtgattaagatttaggagtaatgacctcttatattcacaagttagttatttctaatgggttctctatctttgtattgttcctagaaactttatttcattgttaattactgtgcttgtatagttgtttttttagtctctcgggagtataagctcaattatcattgttggagatgaccttgcacttgagaaaactcccactcattttcttaatacaggaagtgatattaagctataatgcaatggatgcatgtttatggatatttcttctctttgattatttagcatgtgtgctatatgcgcagctgacagttcaaaaaagcctg

SEQ ID NO: 45779 - DNA, 846 bp, Manihot esculenta
  Intron number 1 from transcript cassava4.1_002466m (locus cassava4.1_002466m.g) derived from phytozome v7.0 (chr-ID scaffold11341; pos 923699 to 924544)
gaagacgaaacccaaaaatccgatctccgacggaggtttggtgtcttctttggtttatattatctgctgttttgcctaatgttattctctatattctgtttgtgttagtgtgttgtgggtttgaacgttagtgatgagtttgagatggtgtatacgtgtggatgaaagtgagcggatgagagcttccggtctgaatgtctttttgagccttttctttgtgcttgaaattttggtgtttacatgcgaaagcaataacttaagcatccatcatttctcttccagcgtcggagatgttgagaaaatgacgcttactggcgttgttgataggaccacctcttacattatcttgttagtgttgaaaaaggattgggacccaccatctgttggatttagtatgcaagattgtcaaattcatgctatttgacgattttaactagccacatctttccaatcaaacttgatttagtaaatagacaatgctaactgatcaaactggcttcttcatatgttaagctactaaatcatgcacgggtgttgtgtccggatccttttattgatgctgactccataatgtatgagcggttgctggaaatgtagcacagcaaaaattaagctatttgggttgtgtttatgcagggtagagggcttttcttcttctaaattaataacacaagtagttcgaaatttctaattaaggaacaggaaaaaagtataactcttactcctaattttgcaatagtgaggacacacgaaagattggaagtattttacttaacgtttttttaatagtattgcaatatagatatctttcgttttcacttgaatattttggcgtatcctctacag

SEQ ID NO: 45780 - DNA, 557 bp, Manihot esculenta
  Intron number 2 from transcript cassava4.1_026203m (locus cassava4.1_026203m.g) derived from phytozome v7.0 (chr-ID scaffold04177; pos 321057 to 321613 reverse strand)
agcagtttcaaagagctagagagtaagtttaaacttccatctttcatgtcaatttttcacattttagtttatgttattatattctgtaatgaaaataattagttgattgattcgcattgtgtaagagattttacaatttggagtcaaactgctttgtcttggaacaaatttctgttttgttatttggttgaagccatgtgctttactagaggaaacagagaaatataagatgatagtatgtttcaagtcctaatgtgttaataaagtgtgcactcatatgtacatgtagacaaaaaggccatttataatctcgttgaaatgtttgttgtaagaaagggaactagagcatgaaatggatattttgtaaacctttttttactagatctggaagtctgccattatacttgatagttgctcctgcacatgcatgtacataacacataatttgctaatggaagacaatgcctttttggttagtatttgcagtgtgaatccttttgatgtaattgccattctttgtaggtgggtggcaaactcattggacttcaataaggatt

SEQ ID NO: 45781 - DNA, 985 bp, Manihot esculenta
  Intron number 1 from transcript cassava4.1_017467m (locus cassava4.1_017467m.g) derived from phytozome v7.0 (chr-ID scaffold01190; pos 114265 to 115249 reverse strand)
ctctggttgttactgctaacggattcagtacaacggttagtatcttcacccctagatttttttttctttttccttttctctttgtacaaagcatgttgacccctgtactgtatcatgttgttttttacatcatcatttgcaatgccagtgaattaaaaatatctaggacaagtttgtgtgacataactgaacacaaagttcctaccaacaaaataataaatataaataaagcaaaattgttcccctgatctaatgtaattctggatttctgcatatggaaaaatactcaaatcaacacctaaaattaaatactagtatgatatatttgctaaccatttgtttaaattaattgcacattctgcactattaaataaaaattgcatgaactttgtgttcatctcctggggtagctccttagaaggaaaaggatgtggatccatgtgttacaatttataaatcataagatcagtgggattaaatttttggcagtttcctaatcagtgtattagtataattgagaattctctaatgctttatgaagtgtgggaattgcattgctaaagtacatttatgcatttaaagaaacttcatttatgaatcaaatatcacctacagtgtaaattccttgtttgtgccataataatttccttgggccgtgcctgtagtttttgtctgctttgtgttttcatgcaacacaattttgcataggttaaaataaatattgcatatataattcagggggtttaatcaggaaattgattttatggctttgatctttgcttctgatgtctgtaatttgtgtagggagtctagggacctaatcagatggctcccttgtgtaaggcagtaataatagcccaacatttagttgttcaacagttcaatgatgttagggttatgtgagtagtgacttctgtctgagcaaattgattttgttttggtacttgtagggtgacaaagataagaaaattgaagaactaactaa

SEQ ID NO: 45782 - DNA, 440 bp, Manihot esculenta
  Intron number 1 from transcript cassava4.1_030536m (locus cassava4.1_030536m.g) derived from phytozome v7.0 (chr-ID scaffold06715; pos 153970 to 154409)
gcttacaaaggctcttgaaccagctttgcaactgtgtaagtgagctctgctgactgatttgatgctatgaaattatccttctccttctcctaagaatatggcttttctttgctacatgagacagttttgacatggtatcccttgttgtaatgaacctagtcctgtttaaaagatgataaattttcatgtaaattgttgacttgtgccattgctcaagttctaatccatataattttgcatcaaattatctatcctccctgccatttcaccttttgattctgtatatggctgaattctgtttcttatacatcctttagtattccctctttcagtactaaaattattagtgtgttccagtgttttgtaaaatatttcctggcacatttttctagtttgccctatgatcatggagggttattcaatgttccaatgtgcaggga

SEQ ID NO: 45783 - DNA, 1027 bp, Manihot esculenta
  Intron number 2 from transcript cassava4.1_030536m (locus cassava4.1_030536m.g) derived from phytozome v7.0 (chr-ID scaffold06715; pos 154590 to 155616)
tctcttcagagttaatagtaattacataaccttttaccttttgtttggaatggatgattttgagaaaattcaaatgaattaaattcttctttcccaactgttgtgtttggtaaaactcatagcgtaaggattcaattctattgaattcttatgagaattgaatttgaattaaaaataattcttgtcaaaacaattctaaattaaaaataaatcttatcaaaattgttaagattttgcaagaaatgattttactaatgctatttatatcaaaattacttaattagccgttgcatcttgaaaactccattctttttctttccttttatcctttgtttttttagttatcttattttaaaatttccttgtgttttttcttaaattaaaaactgcttttttataatttaattttttagtattgagtattaataatttaatgtatttataattgatattaagaaatttattatataatgttgttaatctcttaaaaaagagagtccactttaatttatgttgttttttatggtaaaaaaaaattatgcaaatttagattttaaatattgtcaaatatattaataacggtttttcaaaatagtattttcgatgtgataaaaatgattatatttagtagcataatagttatgtttagtttagaaaataataaaaataatgattgaaataaatcaatttgatttcattattcattaagtgtaaaacaaaataattcaattgaattctaccttcttaaaatttattccaaacaacagaattttttttttaatagaaatgaattgaattatattaatagaattcatttttttcttgtgagaaatgcattctaaataaggtgttagaattgcttcttcattatggaatacattttttaaatccataccttttgtgtatatcagctgcttattgggttaatattatatcaacctgctttattctacaacatagagcttacataaaataattacttcctggtgtaggtccaagatctcatttatcacattgagttagcaaa

SEQ ID NO: 45784 - DNA, 665 bp, Manihot esculenta
  Intron number 1 from transcript cassava4.1_016811m (locus cassava4.1_016811m.g) derived from phytozome v7.0 (chr-ID scaffold04758; pos 197086 to 197750 reverse strand)
tctcttcctctaggtattctatcagattttctttcttttacttttttcccctttttaatttttgaagataagaaattggctgtggtttatgttcttggcatgcagagtgggaggagaaagaaagtaaatttgcatgtgaatcaaataatacatttgcaacttgaaattgggtacctattaaaatgggatgttgttttgcttaattttctgtttttctttctcctcccaaaaacaaaagctaatagtaatagttttaaaaaataattaaaaaatgtacttaaaaagtaaaacaacagaatattgttgttggttaatccatccttttaaaatttcgtaatttttttttcaatttgagtttttttgtaaaatgttctcacaggtatgcagatagctaattcataactatttctattagtttaggtagggataaattatttgtttgattggcgagaaaaagaggggaggggggaggaggagaggaggaggaggaagaaaatgacaatgcctctgttgctttcagtaattggaaagctaaaactagttgacatcattagctgtcacacttgttatgtgtttctgaaatctgaatgctgtttgttgaattcaactacctgggaaaattttctgaagctaaacatgacattttgtgtgtgtttttgtgcagg

SEQ ID NO: 45785 - DNA, 539 bp, Manihot esculenta
  Intron number 1 from transcript cassava4.1_003009m (locus cassava4.1_003009m.g) derived from phytozome v7.0 (chr-ID scaffold07520; pos 1887309 to 1887847 reverse strand)
cacgagaactcggctctgctccgccccgttttcaggtcccaattcctttctcttcaattcttttatcttgttcttctgattttgcactagttgccgaataattaatggatcaaaaacatcagcctgtattttattcaaattaattatttagtatttgatggttttaaaaatcacaactaaaatgtaaaatcaaactctttaggttgctataaaagaaaaacactagtgcacttattttagccgcagtaggagggactaaatagtatgattagttaaactcataggcactaaacaatacaaatacttaatgttaaaatacgttgattaatattttctttagagtatgattgaagatttcgattttactggtttaaaatggtttcaaaaaacaagaagtaaatagtaatgtttgataaagtagttggtcttaatagcaatttatctataattaattgtttagctgttgttgggtggattggaccaaatcagaagagaagcaatcactggattatttgattgtttaatggacagatttctag

SEQ ID NO: 45786 - DNA, 444 bp, Manihot esculenta
  Intron number 1 from transcript cassava4.1_003276m (locus cassava4.1_003276m.g) derived from phytozome v7.0 (chr-ID scaffold05175; pos 4785 to 5228)
cgtgtacccgttactatcatcgatacttcctctaggtatttagtctctctctctctctctctctctctcccccccctccgcacaacagaaaactgagatggaaaagtatatatatatgtacagtggaccggcaaagctcaaagtctactatttatgatcgatttttgtgtttgaacacatcgtgattctgggatatagaagaaaaagtaataaaaaatgtttgttgcgcggtaaaagaagtatgctcaatgtaatttagcatatctatttcgattggatgaattgaggtgtgaaattcattttgaagtgaaaagttgtttcttataagatttgacatgcagtttgcctcttttttgatcgagtaattatctcaagtaatgaagttttcattaatttgtacgtgatttagggtggaggattctggtaaagtagctgaagagctaa

SEQ ID NO: 45787 - DNA, 741 bp, Manihot esculenta
  Intron number 1 from transcript cassava4.1_002315m (locus cassava4.1_002315m.g) derived from phytozome v7.0 (chr-ID scaffold11216; pos 316283 to 317023)
gagagctatcttgtaagagtggatttatttttacttttattttttatttctgggatgaatatgtcattgttcttttccctcttactattatttgtagcgtatttttctatcaaaggaaaaacattatgttaagaatgcctgacaaacaagagggtttttttatgtccggtaaacatgttcatagataatgatactacatatgttactcttttgttatatttacctttttggtatggaaatgttggggtttgaggcttaatgaatttgccacttgtaaagttgctatctttttcattattcttttcatatcaattagtggattgccacttgagttggcaatcactggtactttctcaagcaacaatttatcaccaaaaagaatgttgataggaaagaaacccttgtcatcaaaatggactatgggcttttagagaaaaggcattgaaaaggctccccataaaggactaattttataattatgtgtattgatgcatgcacaattcagttttgatgattttattgtatgtttatgtcatgtatttgttcaccttgtttgagaagtttttaggttttattgtttaaaccctttttatctcgtgttgtgctgaatgacccctttatattatttatttttgtcacctacgaactgttactgtgttaaggtagcatgatttttctttctagctaagtaagttcactattgcagggaattagaaagctttgttgtgagctattggattt

SEQ ID NO: 45788 - DNA, 477 bp, Manihot esculenta
  Intron number 2 from transcript cassava4.1_002315m (locus cassava4.1_002315m.g) derived from phytozome v7.0 (chr-ID scaffold11216; pos 317058 to 317534)
cagacaaaatatttggctttcttgaggtaaggaatgttgtgggctttttctcattaattataaactgcttatataaatttcaaaattgttttttattggcatgaaaattttctttttaggtggatatttacatccaatcaaataatgttatattgttcgttacatatatgaattccaattagatatttaagtgatgtatggggaataacaaacttaatgcaataagatcttgattaatttttcctagatgtactgtttctggaaaatgaagaagctctgcttcttcccaaatttcacttgtaggttgttggcatggccagttctggtccttccaaaatctgtaaatggttctgtgtatggttaattttgctttggtccagatgaaacttgctctgaatttttctgataaaatttcatcattatctgtcactattatatctgattcctatgagcatggaatttattattttttgtaga

SEQ ID NO: 45789 - DNA, 974 bp, Manihot esculenta
  Intron number 1 from transcript cassava4.1_026909m (locus cassava4.1_026909m.g) derived from phytozome v7.0 (chr-ID scaffold08146; pos 56248 to 57221 reverse strand)
gttgctcttgtaagtgatttggcctaagaaaacttttcacaataaacaatgattcatctctaagccaaaccaacacaataggaatcaaaggaaccattagctatgttgctctaagaaattaacaactatataagctatcttcctctatttttattctttttcttctactttttccacttccattaatagtcttttttctactatgtcaagaaaaaatatatgttttccaattacactttcttatttacaaagcatagaattagataaatttccattaattatagaagatatcatagactttttttttcatatccaaccccatttgtagttatgtgttagaaaccaaataaatgtatataacttaaacaattctattctcactattaactttaacctctaccatctcttttgcaaagatttatgtgttagtacaaataataaaaaataataaaaaaatggtttgtacgtgagattaccgtcttttaaagaattatatcccaactatatggcaaattgttttcaagattgatacaaaaccaataaaattctatattatgaacataatagaaaatagtgtctgaaggagataaatttgataaaaatgagttatatcaaattatctaattaatacatgtatttatattcctaatttggacacaactgtttataatagtattcaattaaacagatatgtcttttgggacataactaatttataatagttattaaagtaacagacatacgatttaagagattgaacagttataaatataaggattctgtcataaactttagatgtgagtttgagatgtgattatatagctttactaactatatccaatgttatattccttacatgttaatttatttttagtcaacaaatggtaaagttatgaatgctatgttaatttgattacttttataattaatacatgcagaataaggaatggacggtttagctttaaatgaaggag

SEQ ID NO: 45790 - DNA, 550 bp, Manihot esculenta
  Intron number 1 from transcript cassava4.1_018830m (locus cassava4.1_018830m.g) derived from phytozome v7.0 (chr-ID scaffold02993; pos 22830 to 23379 reverse strand)
cagtggaggcaagatcaagactgataagccatgttgtttctcaaatctctacaaaatccatatgatttgcttgtttttttcaatttattatttagtgtatatattataaaaattttaataacttatttttgaaatatatatttatatatttttaatattttaaaattttattggttatttattttgtttatttttgttattaaatattttattatttaatttttataatttaaaaaattaattaatttatttattatttttataagagatttattaattaaaattttcatattaaaaatatttttaaattttttcataatatttaatcattaaaattaataacatgattaattaatattttttttagataataaattatgtaatatattttttaaaatcaaaaaaataattaataaatttttcctgatataaaaattaaataatgatttttttcatttcttttcttgtttttttttctctcttgcttttgcattttcttcaaaggagagttttaattttagggttttgaaaattttttctgtaggaatca

SEQ ID NO: 45791 - DNA, 715 bp, Manihot esculenta
  Intron number 1 from transcript cassava4.1_002655m (locus cassava4.1_002655m.g) derived from phytozome v7.0 (chr-ID scaffold10797; pos 110259 to 110973 reverse strand)
ggcttgaacataaaagccccattgttaaacaaaaggtatgtaggttatcttctgattattaaggttttactgttttaggatggattttatatgagttgatgtatttattttataggctgtgtagtgcatgtttagtatatttacctagaaattaactcaaattttaaagttaattttggatgattgtttaggctatgaagggcagaaaaagaagaaattggacccttccattagttgttattgtagtaggaattcttgtggacttggttttacagtttgataggaggcatagtgatttgcacccttctggtgctggaattgtggggaagtatatattgtacatgcttaaaatgcgtttgcctttttctatcgacaactaggaaggttctcagagtaagttgggtggagagtgttgtttctaaagatattttgttcctttaaatgcattttattgttagtaagtggtaacataaattggaagtaatatcattactgctgcaattgcatactaattaatgttttggctggtaattattcccaaagaactatcaattctgtacccaaatttataataataattaacaaaaaaaaagtagcatatgccccttaatgcaatggggaatgatgtgccatagaattacaagaagtcgcccacaattatgttttaccctcactccgcacttgaattctgtgcaggctctgaggttgataaaat

SEQ ID NO: 45792 - DNA, 960 bp, Manihot esculenta; identical to SEQ ID NO: 45774
  Intron number 1 from transcript cassava4.1_018124m (locus cassava4.1_017546m.g) derived from phytozome v7.0 (chr-ID scaffold12498; pos 326075 to 327034 reverse strand)

SEQ ID NO: 45793 - DNA, 845 bp, Manihot esculenta
  Intron number 1 from transcript cassava4.1_027073m (locus cassava4.1_027073m.g) derived from phytozome v7.0 (chr-ID scaffold06683; pos 380031 to 380875 reverse strand)
ggcaggccttggtatctttcattctggtgtggaaggtaatatttgcacactattatttccatgcatgcactgtaattgtgtgcctcagatatgagctaatttggagcaacagtatattaataatgaatagaaagggttaataaaaaggaaagcgggcagtgggaaggtaggaaaaagaaaagtcttcaacaatatgcttcaaaagaggaattaaaaaaattaaaaggaaaaaaacatgattgaaaatgagaggtaagatgcagaaatggcatctagaaaatgatttagcagctctaaggctttctataataggtgttgtcttgaaccaattaaagtggatgaaaatgatccaaatagctgagttcaactgtattgtgaccattagtttgagtaaactaatgtgataaacatcagtgtttgtgacttttgttgcaaaatttttcacttttctctatattgataacagtatatggataactagaaatgcatctccatatttttctttcttctttttcttttttttgctttacagtaggaaaaacattttctctgctactattccctcttatgaaagcatgctaaaagtaaaatgaataggtagatcttctcccactcctttcctcataccttttctatccagaatctgtatcaggccaagtccaaatacaataaatgggacgtttaaatttatttgatggtttcctaaatcctaatacattcattaaatcacacaaatagtattccaaaaatggagggttgataaccttgttaattttcgtgtttatttggctcacttttaagtcgagttcagactttctgattgcctaacctctaccatgcagttc

SEQ ID NO: 45794 - DNA, 967 bp, Manihot esculenta
  Intron number 1 from transcript cassava4.1_015999m (locus cassava4.1_015999m.g) derived from phytozome v7.0 (chr-ID scaffold10797; pos 73363 to 74329)
gtttactctaagtggtccttatctcactcatttgagtaagtacttaactttcttgggtctaaataattgccaaaatgttgtgacttggtttattgctcaggctatttttgttgttgatcctgacgttttaaccgtttggttgctgagagagtgaggagaaatcagtagaaaatgagaattcggagattgcagtattcccatcaaacataggtttccctctttcccttttatcctttttgggttttctttttcatggtttctgatactgcaaacaagtaaaagatttttgctttcttttctttgctttcccaacatcttcttggcaaccaaacagtccatcacaattttaattgactgcaatgcccgtaatttgagatttgaatctctgggattgacccaaattgatcgacaaaagcctggtcccgtcctcatcctcatttgtttgtcgtgttatgcgggaactactgattctgttagactctgcattgacgaaagtgccatcagttttgttgcttctgagtaaaaacaaatttttagctaccttccagattcacggcatttgaatgaacagaataaaactcgtgagcttttcttgtttttagttaccatgttatttttggggtcttgagtatatgcaatttgggactttttgacacggaattttcaaaggtcattggtattgaatgagtggcattaatggctgagtgcattttcactgaactcctgaaatggtttggcattataacgaaggttctattgagaggatgagctacctatggatttcttaaagcaaaattttgcactatttttagatgattgtaaaaggggaggattcaagcaatagggaataatctaatcttgaataattaaaaggcacttttgtatcattgtatgatcagttgttgttgattctgttattgggtggtgagcaggtatttagttggagtttcagcagctgtagttgcac

SEQ ID NO: 45795 - DNA, 499 bp, Manihot esculenta
  Intron number 1 from transcript cassava4.1_011237m (locus cassava4.1_011237m.g) derived from phytozome v7.0 (chr-ID scaffold03750; pos 103098 to 103596)
gtgttttgcaggtaatttttcacactgtgcttgtacctgcatttttatttggaatacatatgtatgcgtttgtatgatcttaatcaataatcaaatttcttctttctttttttttttttttaaaaaaaaggatttttttcgaaggatgtcattgaattagctgtggaaagtatttgggcgtttgatcgccatactgcgaattaatttccttgctggtgggaatttagggcaattgaagttacttagctattcaatatttcaattccaattcatgtgcatttatgggagaattaaacggtgtttaatggcagttttggaaattacagaacgggatttattttttcccaattatgaagcttctacaaatatttttgtgaatgcccagattttgtttcgattattatcatcttcatacttctaagttttattgttatagttgaatctctcattgtgaaaagaaaaagggtccaattcaaactaatttatgcaggaaaagata

SEQ ID NO: 45796 - DNA, 822 bp, Manihot esculenta
  Intron number 5 from transcript cassava4.1_008708m (locus cassava4.1_008708m.g) derived from phytozome v7.0 (chr-ID scaffold07520; pos 1686387 to 1687208)
gattttgcaaagacgttgagagaagatcacaaacggtagtccataacaccatgttctcaagtactttaccatcatgctccttgtctttcctgcttcaatattttctttctaggatttttcttttatctatgaaaatgttggtgcagaaatgattgattcttgaggaattggaagataagtaggaaggactacgctagggcttccttatttgatcacgatatctagtcaaagccaaacttaatcactcatgcttactggttactttaatttgtttagtgtagtccttgcaatagtagtcattggtttgatgaaagttttgtaactagcttactatctttaacatcttttactttaatgatgggtggtcatggaaatacaatttatcatgaaacataagaaagtagtaactctgactagtgtgcaaggtaaattttctgtggaattatgtgtttaaaacaaatatgggtattctttgccaaatgagaacctttttattgaatgacaaataaggctagtgttttgtttttctcagttaggattctggtgtgtgatttgtaaaaattgcataaacataagtgttctccgtgcatatcattctctcattgatagctgtcattcttgtggaagtgcccttttgtcctaaatttacaggaccataacaaattgatggttagccaggatcactttggcacaatttcaaagctttataagttttaatgatatcatatcaccgtgtacattatatctgtttttctgtgatatctatttctgtgatatggtcatggctcatatttcctcaacttcttataattgtgcagggat

SEQ ID NO: 45797 - DNA, 452 bp, Manihot esculenta
  Intron number 1 from transcript cassava4.1_027564m (locus cassava4.1_027564m.g) derived from phytozome v7.0 (chr-ID scaffold05760; pos 46528 to 46979 reverse strand)
caggtatatttgtattcccctcttgttgcttgttttaatgtctgattgaaatttttacccttttcatttctttttctttttaattcttagttatcttccaaaatgctccatgtgtttctgcataagggtctcctctgtctttgttatgtgacattgatttctttctgctctcactcgctccaagcttgttagtatcttcaatatagactgtgtgatttgatttagaatttggtatcagactcaacttccaacttgtggaaaatccaagtttcttaggttttttctttgtgtatgtcacaagctgaacctctgttgcaatgctcttcatcaaggctcaatactaagcaaaaatggaaataaaggaactaaaatgcgtaaaatagttgtgtaaagtatataaaggggtctcacattcagttctgttgctgtagctactgagacaagatacctaa

SEQ ID NO: 45798 - DNA, 836 bp, Manihot esculenta
  Intron number 2 from transcript cassava4.1_015900m (locus cassava4.1_015900m.g) derived from phytozome v7.0 (chr-ID scaffold07520; pos 1702485 to 1703320)
ctcgattcagaaagttagaagttattcttacaacggtatgttttatagatttgattatgtgaatcgtgcttgttttggttaatctgggaattagctcaagttgaatagttttcgccctctcttcacataaattttattttaataatactgttatcgtagccataacgcccataaaactctatagcctgtctagttcctagaaaggccagaagtgatgctgctgttggaagagatctcattaatcatctttgcttgggaagagataattggtgacataggacagaattgcacagcagaaaaaagagaatattatagtaacagtacaaacacaggaggaaatcacatgcttgcataatgtgcctttggaaacacttggccatttcattaatcatagcttaagaaagtagatttggtatattttttccacatttcatgttagatatgatttttttttcatctttcatactctctagtctctagcaattatagcacaaagaaaaatgaagagagttcctggacatgtttttcatttgagttttgactctttatacatgctataatttgactggatattaggtgcagctgtgatagagaagtttatgctttcttggatggaaggtctctacctagacatgcgcatgctgatgatacaaaagattttatttaccaaataatatttgtaaagactttgcttatacctgcttgggtgaaaattgtatagttgcaacggtgttttagtcgataacttatatgtaacagtataatcataattcaaccactgatattgatttttaaatgcagaacatagaaaagctcgggaaagctggtcagacagt

SEQ ID NO: 45799 - DNA, 531 bp, Manihot esculenta
  Intron number 4 from transcript cassava4.1_033611m (locus cassava4.1_033611m.g) derived from phytozome v7.0 (chr-ID scaffold10045; pos 102381 to 102911 reverse strand)
tctgtataggcaagctggtgttgatccattagcaggtaattaactggttgcctgcagttactttcgttccatatttgaatataatcaaaattttgtttcatactggtcagaacttactgttcccttgattttaactccctttagtttttttattctttagataaaaggtcatgcaaatgattttgaattagtgattaaataaagaaataaatgttcattcctttcatgtcattcttgtttatcacattacattaacatctcggtcttgtgcttttattattttttgtactggcttttaagtatttgtttttcctcacttctatcttaagatattgctgcttttttcttcttcatttctagagttattcttctgtatattttatatcatatggcatatccattgtactaagtttacagacttctgcgctcaattttgtcaatatatattttacctgcccattatgtttaatggtgataatgcttaatctcattccaggttattttccaactttggtgacaataacagtttgg

SEQ ID NO: 45800 - DNA, 862 bp, Manihot esculenta
  Intron number 3 from transcript cassava4.1_015484m (locus cassava4.1_015398m.g) derived from phytozome v7.0 (chr-ID scaffold11341; pos 276354 to 277215 reverse strand)
gtttggccttgggatcttccattccggcatcgaaggtgatgtactgatatattttgtgttttttatggtgttgatgctagaattcttttttctcccatgctttattgtaaataattttgtgttgtctagtttagtttttgtagttggggacataagatggttagtgtaaagactagtttattacatgatatggtgcttttttctttggttgctgttgaaagtttaaagggaaacatctgctagatgtgtaaataattggaaaatcttacggaaggcatattaagagaataagaagcagaatatgaaactgaacaggttctggtttaattaaaagtgtctctaaagtgcacaaaaaaaaagaagtaaaaataacaatgtagctttctagatcaaagattagtttcatccatgaatagttctatgaaataataggctccttaaagtagtttcttggagaagtcctattatcccaaatattgagactagaagccatgatagattgctcatgagaacaaaatggtttgtccagaatggcttctttggacttagctaaaagaggagaagaaaaatgaagcatttcttttgcttttgcatagacacagacaaagtaagtttgagccttctttattatattctgtaaacatgggagaatatcatcatatccaactctcaggaagcaagataataatctatgccttaatggagattaatctttgctgatcatcataaatgttcacttccacttcactctctcatttatcagcgtatgtctacttccatttgagcttcatttgctctggcctttttatttgccctttttctgttgcattaacattttgtatgcgtgatctataattagttt

SEQ ID NO: 45801 - DNA, 378 bp, Manihot esculenta
  Intron number 1 from transcript cassava4.1_013292m (locus cassava4.1_010746m.g) derived from phytozome v7.0 (chr-ID scaffold08873; pos 416678 to 417055)
ttcattttgtatcaaccgttaaaaagaaaaaagaggcaagtgttattgtttttttactaggttattgaaagatttcgctattatttggtttaactaatggattttggttgattcgtaaacgtagggctgtgtttgggtgctttgaaataactttcttttcttttctggaattatatggaggaaacgaattgaattaataacaatagcatttgttcttttttgtgttggctttttggttctggagccatttttttgataattgaggaatcaattgatgaacgtaaggattttaggaagataatagtcttgttgattattgcctgtttggttattttcgtttcagatcagactcttccaaaagtaagtgctgcgtggagt

SEQ ID NO: 45802 - DNA, 629 bp, Manihot esculenta
  Intron number 2 from transcript cassava4.1_030636m (locus cassava4.1_030636m.g) derived from phytozome v7.0 (chr-ID scaffold05938; pos 40134 to 40762)
gcgttgttggaaacaggtttaatttcttatgcttactgtaaaattaaactacatttcacatttgaagtacataagtcgtgaattaactcagaattcccatatgtatacaccatctgggtatgtttataatctagggttcttcacttgtcccaatataatttaactcttagcatataaatttctaaaagaatcacatgtggcttgtttcttaatcttggatttcttttccccttgttggagggaggggatcgaaagttgcttgcaatcagacctggtatagtgagagttgatatcaacttgaattttttaaagcaaacttcaaaattaagtcatggcgtgcgtttcactgctttaattttctattaaatattcacaagaagcaaccccatttagaaatagttccttaagctgctatcaactgtaccgtagtagccgttaagaaggaaatatcagaggttgcaatacacattttcagcagaaagtacaatacatttctgaacatttttttgaaccagcttatgatcttccttgttataagaaattggtttttgttcacttgggagatcgctgctccactgaaaatttctctcttcttcttgtgatctgttttgttttacatggaattgcag

SEQ ID NO: 45803 - DNA, 286 bp, Manihot esculenta
  Intron number 1 from transcript cassava4.1_031695m (locus cassava4.1_031695m.g) derived from phytozome v7.0 (chr-ID scaffold03750; pos 906910 to 907195)
gcgcattagcgttgcacttctcctcttcgattccctttacagttttacagaagcatctaacaaagcaaagcaaaagggaaaataagaaaagaaacttgttttgaggaagcaaacaaaaacttttcttaaaggaattaatccatagtttcaagaaaattaagaaaggaaaaagattaaaaacgaatacccaatacagttttgaggaaggagagaataaggaatagtagaagaatgcaagaaatcatgagaaggagagagatccttgcagtgttagtattgttctttg

SEQ ID NO: 45804 - DNA, 399 bp, Manihot esculenta
  Intron number 3 from transcript cassava4.1_031695m (locus cassava4.1_031695m.g) derived from phytozome v7.0 (chr-ID scaffold03750; pos 907474 to 907872)
aacacgaaccagttcgaaaccaggtgctctagtgctgttttttctttgccctccgttaattttaaaatgccatgtttggttccagagaaagcatgagaaagttattactttctgggttttgattgttgcatgtaatgcaaatagttttgatcagctcaacttcttggttcagttgggttgagttagattttttactctttttaatttttcagcagttaattaaaaataaaatggaaaaaccaggaagcaaccctttccctggcaacgaaacagaggaacctctgtaattgattagttttgtaattaattaatcaattcttaaactttttttcttttttttttctggtgataataatatttgcagtttaattttggaggaagattcgacctggtgaaatt

SEQ ID NO: 45805 - DNA, 721 bp, Manihot esculenta
  Intron number 2 from transcript cassava4.1_032916m (locus cassava4.1_032916m.g) derived from phytozome v7.0 (chr-ID scaffold04043; pos 1173001 to 1173721 reverse strand)
gacagtccagtgggaaggtatgtatacatatatattttcaccattctttctttctttgttcgctttgattcgtccccctgctgagaaaatatggctggaagggagcacatatgctttctcgttcccttttttaaattattttcttaaaaaaaaaaaacgccttttggtgtctgtgaaaagggaaggaaaccaaaggaagaaaatttaaaattttgttttcattattttttccccttctactgacttaaaggtttgcaaagatcaacttaaatgcttgtattaagtgctgtcgtgtttgatgagtttgaagaagtgttgtttcctttgtggcttgccttttataataaagaatggagcagtagatttggtcccaaatttttttcatttaagcgtacaagtgcttttatttagttacttgattggttggaattttcctaaactatatagatgcttatccaccgagtatacttggtttaccggttatggaatctaaaacactattttgcttagctctcagtttcttcgcagttgacttggtatcttggcaaccaaaaggagtgtcagattcatttttaatggcctatctcaatttcaaggaactgcaaatggactaatgaattttttctttttaagttttatgctttggcgctgttagaaggtagcttaaccttctgttctttcttcctcaatcattttggacagccaactgagcagaatactt

SEQ ID NO: 45806 - DNA, 652 bp, Manihot esculenta
  Intron number 1 from transcript cassava4.1_000922m (locus cassava4.1_000922m.g) derived from phytozome v7.0 (chr-ID scaffold11994; pos 71241 to 71892)
tcttcgcttctctgattatcctatttttctcgcatgtcagtcacctcttcattttcttcattgctcttattattttctttggtggtgctttttgggattaatcggagcttgagattagtttgcttattgggtattccaatttgataagtgtgttaaattgggacgttcttgttctaaactttgcttctgttatgaaaaaagaataatatatataatttttgttaatctctctttaaagcccggcatgaaacaatgaaactggaattatgaattgcagtatctacttgtttaggtagattagacgagccgttgagtaagaagaaatcgaaaaatgattgtccctcatattgattggttttcttgcccggcttagtattctgtatgcagattctatttcctttgcaatagtctcttacttttttgtagtcatatatgttgttattcggagtttggaagtgagaaacggaattttgtaaatttaagcaacctggtctttctcttcctgcagttaaccgtatctttagtatcttgcagtttctttttgccattgtatttaaccgaacgccattggaagtttaggcttttgtttttgacttgagatttttacttaatgcaggtgcccccaattcagttgctgaaaaccatacagaaa

SEQ ID NO: 45807 - DNA, 1027 bp, Manihot esculenta
  Intron number 1 from transcript cassava4.1_003896m (locus cassava4.1_003896m.g) derived from phytozome v7.0 (chr-ID scaffold12086; pos 59185 to 60211)
ataacaaaaacaaagtgtttttcaacaaagctcaggtatcaaaatctttttcttttaattgtcttatatggttttgtctgctgattttcatctggatttcgtgtttgaggtgagttctggaattgtaatttgtagaaaacgatcagtaacgaactcgaccttttggattggagaagttggggtcttgaagttgtctgttttcatagtttagattagaagaggaaataaggcttttatgttttaatgattgagtttgatcttgagactatgttacattgggtcctaatgtggatgtttacagacttattttatcacgatagtggggaatgctaatagcattgcaggaattgttacttgcaagctgtagaaatgtaacttttccttgttttacttgcataaacttatgcaatcaattaattgaagaaaacatcctgtggttgagtatcccaattcttctacaaagcaagctgtggatttcaggtcttttatttgctagtttaattcacagagatgtatctcctttaattaggaatgagaccaaagtcaccacatcccttagagaatgcatatggcacatattggagataaaatgacagggtctactaagatcttttggtcatgtctgacatagagtattagatacgccagtacaaaagtttgataagttagttggggaagggatgagaaggggaagaagagatctaagatgacatgggggaaagtgatatcaaagtgtttacaagttatggatattgattcaggcttggtgtctaacaatgctaaatgttgaaatgattcatatagccaactccaactactttcgggttgaggcttaagtgttgttgtgtcccttcaaattttctatggaagtgtaataactgtatttgtggatatgaatcatgttatcttttgtatggagtcatttcctgctgctgctaggattatggtttctttgtacaagtttcctaaaattgaacttggaaaatgctcaggtgcacaacagagacttatccattgctgtcctaag

SEQ ID NO: 45808 - DNA, 487 bp, Manihot esculenta
  Intron number 2 from transcript cassava4.1_014265m (locus cassava4.1_014045m.g) derived from phytozome v7.0 (chr-ID scaffold06158; pos 265317 to 265803)
aactcaccagtaagtttagtttctttctttgattttctgtttggtcgttagaaagcaagagaaactttgatatgtggctttgatggtctaggtagtttggtaattgcttgctaattttgggttttttttaaatgttgtttttggttgtggaattgataacttctaatttgttttcttgtttttggtataattggcctacatttctattcactgtcttgattgagatattgggaaattgaaaacagagccagtagtctctcttcttgatgtgtagccattttttaaataaattcattgtttttattattcaaaggaggtttggtgacccgcatcaaacctcccttcacccatccaaacacactgtaattggactattctgatgttagttgttgagcttatttatatcatgattttgttttctaaaatcattggtttggaactttttgtgaataatcttgcagctcattgtgatactacagtggcaaga

SEQ ID NO: 45809 - DNA, 967 bp, Manihot esculenta
  Intron number 2 from transcript cassava4.1_033308m (locus cassava4.1_033308m.g) derived from phytozome v7.0 (chr-ID scaffold05213; pos 63728 to 64694 reverse strand)
agctggacatcaggcagggagaacattaatattttgtgaataaatgaccttttttgttatcatattgacctaataaacgaggcaaatatgtatacatatcatggcagagtttctttataggtggagtagaaactagtcagatggggtttgctggaccaataaaatcaggtttgtttgtcaaatttctggcatcaggatatgtttggttttattttgcttccaatgttaatccgtctaattgaaagcacgtctcccccactctgtggtaggttaatgattgacattttaggaagtaggaactaggaacccttattggatatacatgcaaaaagcttttaaataaagatcacaaatgttttgtatgattatactttatctgatgttgatagcatatatgattttcattagttttgtcttaaaatcttgatagagaacaaggctactataaaaaaagaatggtaggagctgatcaggagaacagcttaaacttgaagtttttaaagtttgaatgcatctgttctgaaattatgtcacagagaatgcactccaattggcaatacagagcaaaatgttgtccaacaactacaagtataagacccacccagataaatgtattatttgtatatactcactggtggtccatgtgataattaaaattcatgtttcttgatggttgatgtgccattgttctaagttttcttctctcaacttaccagagctatattctcatatgtttctctattctattataagccgacaatgaagtctctgcaggtattgcaacttttgagatggagtatagacactgattggaagaacaaagcaaacacatatgcaatttaagaaatgctataaatgttcatttaagtgatattgagcttcgtatactcgtagagagcgccataaatcattaccctgaacttttcatatgaaagcaattgctgctaaggctgatattttctatctg

SEQ ID NO: 45810 - DNA, 632 bp, Manihot esculenta
  Intron number 1 from transcript cassava4.1_007415m (locus cassava4.1_007415m.g) derived from phytozome v7.0 (chr-ID scaffold08446; pos 196989 to 197620 reverse strand)
gaagctcaatctccaggtacgtcgactaggtcactttgtgttttttcttagggattcacattatgggttttgattattgaactatgttcttttgtcttaaatatatgcttcatttgatgtcatatataaattttgttttgcttttgtattcaaactctgaaaactgagagcaataatttgatttagtgtagatttcgtctctatctctgcaattttggttactgggtaaatgtggagaaggaaaaaaatccttcaatatggagccaatagaatgcaaactgcaccatgagattgtgtcttattttctttcttccctttgcttctcctcagtgcctcagcaggtggtagaggaactgctttttgttggttgattctgtaggttaagtacgaagtattgatttgctgaatcaatttctatattgtttcctggaaatatttgagattaatattttattcagttttcacaatttgctgcaaagatcatgattttttctcctttttctctccttgtaccttttttttcttgtcctgatgcttttgagctctcccttttttttttttggaatttgttccaatatataatatatttggtatgctattttcctgcttacccaggactgtctacggttcct

SEQ ID NO: 45811 - DNA, 638 bp, Manihot esculenta
  Intron number 3 from transcript cassava4.1_016325m (locus cassava4.1_016325m.g) derived from phytozome v7.0 (chr-ID scaffold11661; pos 154248 to 154885 reverse strand)
acaccatcagggtgagtctattgcttgattctcttaccatgctcttgttcttggattaattagctaagcatattgtagctgatgttggcacttgtctgacagtttgtttttatattctagctgttagaatggcaacgtttgacggatttgctgtatgtgatatttgtctttatgttctgcttctgcttgcagcttattttgtttgggaaactctacgatcttgtttgagttaattggtttttctacgtcactatagatttcaccttgtctctgcttattagtgtgaaacaactaagtttactttcttttactattctttgctgataaattttattgatatcaaagctgttatgatatatgtactttgttatgcttcttagcactttaactaatgttatttgtggtttgtaagcgtgccaatagtgtcattttcgtatttggcatgtccattttgttggctgcatactgtcttatagaatttcggcctgatagttggtatcaattttaatggcggagggttgttgcctcctcttctcctttcttgctattgtgtttggtgcaagtgataagtaattctacgtctaatgatcttcttgtctaaaggagctggagaagaagagaaaggagagatctcaagt

SEQ ID NO: 45812 - DNA, 397 bp, Manihot esculenta
  Intron number 2 from transcript cassava4.1_004769m (locus cassava4.1_004769m.g) derived from phytozome v7.0 (chr-ID scaffold11998; pos 979598 to 979994 reverse strand)
gaggtaattgttgatcttatctcattctagatttaggaatcttgcccacttatgcctagaacaaaaatgggatttttctctacaatttggtagctttgtttttggattcttatggacctgcacactttagcattattcagcatccgcaagaatgttcgttttgtacaatacaaatgtgtgtttggattttaatggggttctgctacttccattttcagctagagatctgttaatttgttcttttccgcatctgaatttgaattattttgtttttcttcttgtctaaaaaaatctctctttttctatttttttggttttattcaaatttgttgggctgatgcattggcaatggaaagaacatatctttaacaactttattgtgcttctttttcaggtg

SEQ ID NO: 45813 - DNA, 407 bp, Manihot esculenta
  Intron number 1 from transcript cassava4.1_004197m (locus cassava4.1_004197m.g) derived from phytozome v7.0 (chr-ID scaffold10689; pos 107040 to 107446 reverse strand)
gaaagcttgtgcctttcttgttggtaatttaattaaccatctcttaccttcttttttttttcaatctcgcagttaaatttttcatccttttctctcttcatttagcaagctaaacttcctttcttttcttttcttttcttttgcaagattgattatcggttgtgtttcataggacaaactcactttaatccactataatcaaataaagatcattgaaacgtaaagcaaccattaatcatttagcttttactgctctctctctctctctctctctctctctgcatgaactgcaagcgtgaaactttaagctgaattctagagcaaagcttgaaagattgatttttttttctttttttacaagatattctatgtatgtatgaatatgtataattgatcatcaacagggt

SEQ ID NO: 45814 - DNA, 780 bp, Manihot esculenta
  Intron number 3 from transcript cassava4.1_014964m (locus cassava4.1_014964m.g) derived from phytozome v7.0 (chr-ID scaffold04526; pos 46688 to 47467)
agactgagaagttcaagcgaacagctcaccaggaggtcactttcacctattatctttagaatctttattttttttatttataaattattctttatgcttgtgaattagtggtagttcatttctctattttcttaaaataagaaaagcaattgagttttagatacttccatgcgattgtttataggatatattctcatgtaattaatttttttttttaattttaaatctgcatttgctagaaaaccaactatggcatttgtcatgtgtgcatgtatgcagagctttcctcttgtaatcttatatccaattccttaatctgacctttgaagtttgaaccatgaaatcttatgctacattaccatggtacagaaatattctagtttactgctaatcagtttcaatgttattgtatagaaaaatttaatacactactgcttttcctttggtctagttgctgctgtagaaatataaataatttctgctgttgaaacttgaaaattctgaatttttcattattaatgatcatgttcagcaattttcgtatttagttgatagctagaatatgaacattctgttttgtgttttctagctttgccatcaaatatctgaaagctttgctttcagacatgatgaatggaaaaaagaactgaaaatggggtttctccccccaaccaagccaacaatttcgctttatgtttctgttaagaatgtaattggctcaaagtatgttcataacttgttgcgaagaaaacatggttgatttcatgatttgtgccacag

SEQ ID NO: 45815 - DNA, 369 bp, Manihot esculenta
  Intron number 2 from transcript cassava4.1_003863m (locus cassava4.1_003863m.g) derived from phytozome v7.0 (chr-ID scaffold07087; pos 278104 to 278472)
gaaagcaaaggagaataggctgcaaaaacattgtaagtaactaagagtctaatttaattttcatgtaatttttaatattcttaattataatttattaacctttctgagaaaaaaaaattatataaaaaaagaaaatttaaacgtaaaaatatttatatgtttatagttatacttaattttaaaaaagaaatctgtaaaataaagaaaaatagtcgatggtatactgaaatgtccggtgaagacctccgaaatttaaaatagatttgtaaactttgattaattattttatatgcaatttttttccttgtgcattttgtttctcttcaattttcatcctagatttgtgattctgagttattttgcagtctt

SEQ ID NO: 45816 - DNA, 765 bp, Manihot esculenta
  Intron number 3 from transcript cassava4.1_004597m (locus cassava4.1_004564m.g) derived from phytozome v7.0 (chr-ID scaffold10609; pos 107236 to 108000)
gaaattcaatatcctgtaagttctctgttcttttaagcaaggtgtcacttattattatttttctggtgcttgcttattcaaacttgctcattgctgcatgcctagtagttgaccgacttcaaaaccttttttaactaaaacagctaaaataaaggaaattttgaagaaacatggcttctcttagtatcttttgaatgcttaaagacacataacgtcattctgggccttgattttgtgtttctgggatatctttctctaagaaggtggggatgtttgggtggttggaatatttgcaacctgattttcgtataactatcaaaaaattcttagaactttgtgcaggttaggcattgtaattatggataactagtgcatggttttgatttgatgctagttacacattcttgataactagtgagtgacagaatatgatttattgaaaatgaacatgaacgctttgtgtcgtgtgttttattcaacatttaaaatagatgaatgaagggaggcgtgttttagttgagatagtagttctttgagcaacaatatgattcctaagaattttccatatgattttgttcttcttggttttccttttaaactctaattttcactttgtgaaaatttgtatagtgaagctatataaatttattaattttggacgttagcagtatgtgttaattttatggtaggatattgttaagatttgctgttgctgttttgcatttaattataatttatgacgtttacatatgtttaaactaggtc

SEQ ID NO: 45817 - DNA, 506 bp, Manihot esculenta
  Intron number 2 from transcript cassava4.1_012156m (locus cassava4.1_012156m.g) derived from phytozome v7.0 (chr-ID scaffold02973; pos 220623 to 221128 reverse strand)
ctaaactggctgacaatcctcaagaatcagagcaggtataatgaactatttgagcaataaaagcagacaactttgcacgaacaagtaactttctttatgaagcacatgatttactttacgtggaatgtatttcatagcattcaaaatgctgataatcaaaacaatccagttggattataattcataataaattcataacatagtagggtttagactggatcaataaacttacttgaaacagatacagtgactgcaacagaaactcgttaagcatctatagaaaatttcaaatttatgtgttccactgaatgtgctagaaacttctttcttctcctcctttttagagtctccaatccttctggaagatcttgtttgatcatagtaaaactagatcattttctctctttttttccatgattgttgtttttattttttgcaagttaatttgacccagatgttctatctttaatgattctagcatataatgcaggtaatcggaagtgata

SEQ ID NO: 45818 - DNA, 610 bp, Manihot esculenta
  Intron number 1 from transcript cassava4.1_002990m (locus cassava4.1_002990m.g) derived from phytozome v7.0 (chr-ID scaffold12118; pos 278487 to 279096)
ttccagtgataagggttttagcactgctcctagttgagactcgcacactttctttctttaaatatatgtacatatattcaacattatttgtttttattactatgaatttgtgtgcgcatatctgtgattgcacttttgcgcggctactttgctctttcgttattttctttgatttgatgtttgtttcgttcccttccttggcttgtgctttaatcttttgactttgtggctgcactcagttttcagtgtttcgaggcttctaattttctttccatgctatacgtataagtattggttgattttactgaattaattggggctcggggttaaggaggttttgttatctgtctcttctatgcctttgaattctttttacatgtacacggatttgtattgagattatcttggagttttctgctatatacatgtatcgacgcagtataggacttgatttcgtcaatatgtggccgctgacttgatctcgactatcttctattgaatttcatttgctttgagccgtgttttggttttacttccctactttatgtgtcaagactgcagatgattcttttctagaaggcatttttataacttttgatttactgcagat

SEQ ID NO: 45819 - DNA, 472 bp, Manihot esculenta
  Intron number 1 from transcript cassava4.1_011367m (locus cassava4.1_011367m.g) derived from phytozome v7.0 (chr-ID scaffold04457; pos 838361 to 838832 reverse strand)
gacgattattgcgctcctccgccaaaactcccaaggtattacccaacaacttttcatctttccatctttattaatcatgccaatactgattttaattgctgcagttttcgatacccaattttcttaattggttctagacactgttgctgatttaaaattattgaatcaatgtcttcccattaattcttgattttcttaattagtttttttggttgccatatcctgaattagtcttataatctggattcttaatccaaaatctcaattgatcatatgttgtaggatcaatggtcctctcaaatcgccattcagatgattcaattcctttcctgatagtaattagtgtgtctcagtatcgtcactctccttaaattgaaattcatcttatatgaatatgagtttacgtttattttgaattttggttattgtgttttaaatctttcactcaaaacaatcctttgcaggactaaca

SEQ ID NO: 45820 - DNA, 614 bp, Manihot esculenta
  Intron number 1 from transcript cassava4.1_009682m (locus cassava4.1_008704m.g) derived from phytozome v7.0 (chr-ID scaffold03219; pos 157856 to 158469 reverse strand)
aggtacctttactccctttatcttctctattctattcgcacatcgatcgatatgtttatttgcctgcacttctggatatattgagcttatcgctgcagctagctccggatctgttttttttttgttgcatcgcggttaacctaaaaagatctagtatttatgattctttttcctgtaattcttcttttttttttcctgttcatttaggttggtgataaattttgctttgttccgaaaattatgtgttcatttgtcatattgtttttctatgatgatcatattcaagagtagttctagagtttgatttgtaaggttctttggagagaagaaagtaaatgggattcttttttcttttgctaagaatgttaattgtgcctatatctgatccttatttgattgttgaattttatgtaaaatatttacggatggtgttaatgtttataataatttgtattgtgtcttttgttcgttctgtaaattatcaaaatatttaatccactttttattatatggaaagggaaaaattaacggtacttactgattgccttttttttattctcgttttttattcatttgcagctcaaaggagagacccactcttgggtaagtcgcta

SEQ ID NO: 45821 - DNA, 496 bp, Manihot esculenta
  Intron number 1 from transcript cassava4.1_009747m (locus cassava4.1_004700m.g) derived from phytozome v7.0 (chr-ID scaffold07810; pos 88334 to 88829 reverse strand)
catcacagttgaaatctgtgcttggtatatctcaggtgcaactaaattacttagcagttgcttctgatcttggtaaggtgtttggatggtcttcaggattggctttgaaccattttccattatgggtggttcttttcatgtctgcttttattggattctttggttatggttttcagtggcttgtcattagaaacgtcatcgttttgccttatatcttggtatgcttcttctttaacttgttttaatatgcttatatgattccttccttccttccatttatatgtttgtttggagaagttttcttttgagtttttattcataatatttctgttttgagaaaatatttggtaagttgttagctacagttgaaatgaatggaaatggagattatattttattttagtctcctactatggagctcttacttcctctttaagatgaagattttggtttggattcagttgtttttaactggagtatttataagcatccgtaa

SEQ ID NO: 45822 - DNA, 724 bp, Manihot esculenta
  Intron number 1 from transcript cassava4.1_009816m (locus cassava4.1_009816m.g) derived from phytozome v7.0 (chr-ID scaffold04796; pos 260692 to 261415)
cctgtaagaagacgcttgttcggcaccagtcccttgtaagttcctttctcaaaatttcagcaccagtctcattttcttttccaaattggtaatgggcaatgaaaatgcttgtttgcttaaatttgttattgctattcatagaaaaaataaccttttttttagcattgaaggaataaattttggtttttgtttttataaatatttttaagctgaagttgagagaggcacattctctttgaaaggttaggaattgttcttgaaagtgccttgttctggagttgaaatgagctatcgtcgtaattggtttcttaattctatttctttccggcaacaattgttgctattagtatgtgttgttgttcgtagagctgaatcatgagctctgtattcttatagctgagccaactggttggattaacatttagagcccagaagaactgaccaatcgcaaacatattttttaataatgaaaattttttaaggtagcgattgtttaccctgcccattgcctaagattctgtatgataagctgctattgtatttattttgttcctttagtttatggaggtatagcattggctttctcacggttaacgtcaattttgtgcctggggtgctttctcatttctcaaaattgcgcaagccttgtgctctttttttcccctgaggttttgacaagaaattggcaggtgaagacaaggacatcagatatatctgttgaatc

SEQ ID NO: 45823 - DNA, 552 bp, Manihot esculenta
  Intron number 1 from transcript cassava4.1_006473m (locus cassava4.1_006473m.g) derived from phytozome v7.0 (chr-ID scaffold02658; pos 719237 to 719788)
actaaagttgctgttaagaacttgttgaataacaggtaattgatatatcattcaaaattcttttgcttttgcttgtttctggtttttgtttatcttcgatttgctactctggaaactgaaagaaagttgtactagagctaagttatggatattacgtctcttctcttttcattccggctgaggttgctaaggaagtttagcaagatgaagaattctaatgaaaatttgaaaattttttccctactagttttcggcttttaaaattaaagagcatcagtaagcaattattcctcattctgtttcttcatgtgatgctttttcttgttctttattcttatcttgcgtgtggtagaatatgtgctgtaaagtagcatgctttgtggaagtggaactaataactttttagtcaaaaccaaaagctctgtcctcagaatcgatgattttgttttaattctcatttaaacctttgttaccgccatttcctgtgcttatgtcaatgagattaaacattcaccaggggtcaagctgagaaggaattcaaagtggaggtgg

SEQ ID NO: 45824 - DNA, 562 bp, Manihot esculenta
  Intron number 1 from transcript cassava4.1_008333m (locus cassava4.1_008333m.g) derived from phytozome v7.0 (chr-ID scaffold08757; pos 550445 to 551006)
gttccggtcagtgcttagtctttctcatttttcaattattttccgtcgtcaattcaaattcgattgctgcccttaatacattgtgcaaaacataatgccggagtttatgtgccaagaaatgtatcaacaaacaatttttgggtattgcttgtttgctttgacacaatcccattgccaagtttcttcttgcttagtaatgctttaaaaactctacaagttaaaacctccacaattctttatttttgtttccttcatttttgttttactcgtttgctttgagacaatcccattgtcaaattatctctgattctttgttagcttttctaaactttcctaataattgacttgtttttgtgcatttgagcttcaagtagtatgagtatatattactcgttacttatctctcttggttcttttccttttgttttccattctctgcattttactttctacatgcgatgggttcagaatttgtggttggctgtatcttatgaaatattattttgttcatttattggtttgatatttccgtaactactttctttattctgttgacaggttt

SEQ ID NO: 45825 - DNA, 907 bp, Manihot esculenta
  Intron number 2 from transcript cassava4.1_008333m (locus cassava4.1_008333m.g) derived from phytozome v7.0 (chr-ID scaffold08757; pos 551042 to 551948)
acaagttcaatctatttcaattccatacgagaagtgtaagttatttgattgaatttaattttaagtattgcagatgttgctagggattaacttcgttcccaccccatccctttatccctagtttaatacatgtttttgctctttacttaatttttgaatggcaaatggataatggtgtgttaatatcttcgcaaaattcacgttctgtgtatgtgcactgtattattgatccatgtgttcttatttatacatatgtatatggtgatgtgagacatgaataacatttctgtcaaagtagatgaaatgtgctgttgcatattagttgtgccatggtgatgatattggtagtctcatcctgttcagcttagttaatgttatcttaggtgaataagttcatttccatctgtcttagttggccatatggtttgagttgccattgttatcaccaatcggttgttctgagtatgcagggctatgtcctagtttaatgcttgcaaactagacttggtcaacttgaaaatctcgtggttgtggggtttcttactgcgttagcttataggatctattgctgtgtgctgtagcagcaaggttgaggacctgcttttttgtgaacttttttaagaatgaacccaacatacatacatgtaaatggggaaggaggtagctggtagagtggtagaccagcattctgacaataatttcgaagttatgacataattttttaaaattcctttgaaaatttaaaattttaatgtttaactcctttctgcatatagaatagcgtgaaccagatttttcctcaatttgccaagcatgttttacagtgaagggaacaagaaactgcagtcttctgtaaatttttgcagtaaagccctaaccttctaatgttttgttatttgtttcagat

SEQ ID NO: 45826 - DNA, 677 bp, Manihot esculenta
  Intron number 1 from transcript cassava4.1_012126m (locus cassava4.1_012146m.g) derived from phytozome v7.0 (chr-ID scaffold06908; pos 166164 to 166840)
tttgcttgagctggaagctcccattaagatttgtggtatgttctatacataaagatacagactttcttatctatatgttgtttttggtctgggtttttgagggtttcgtgagattatgttgaggggttctttctgcaacatgaattgctgagaggtgttcatcactatttacgtggtctgcttttttcgttacaaagttctttacttggtatggtacatttcagtagaatgtactctatgttaggaatatgcttttttagtctatggtttgatatactgttacattgctcacaaactaggtgaggaaaaatcaacttttagttcatgtaaattggaaaaagaaaaattgtattaggggattaagtgccttgtgagttttgatattacattgtttgacatgaaaccgccgaacatataccagcaaaaatctttgtttcttgtcttgagttttgagaaggtaatatgattcttgcacttgctcaagtctcaccaaaagcatttgaggaatttattcaataaatatatatttctaaataatcaaagacatgtatatgctttagattaacttggtggaagacacatgatgtgattatgtattggaattcattgtaataatggcctttattttgttcttcctgaccttctaacgattcttctttatatttcaggtgacattc

SEQ ID NO: 45827 - DNA, 716 bp, Manihot esculenta
  Intron number 1 from transcript cassava4.1_033924m (locus cassava4.1_033924m.g) derived from phytozome v7.0 (chr-ID scaffold08860; pos 72222 to 72937 reverse strand)
agttctgcagcacctctaggtacgtcccatcttatccattatatatatatatatattggaaaatttgtgtagctttgtttttttttatccctctgtttgatgtctttgagacttgatgttgctttgatttgtgggttcattttggatttttttttttagattgctctactgtctgtttttatttgatctctcagctattttaactttttttttttggattctttcctctttagaattgtttaagggtctctgatggaggataatttattgccaaagtggtgattttggtgtctatttcctggagatctgagtaataattaagaagaaattaaccccttgttcatatatactttactaagaaaaaagaaaaaaaaacaaatcattgatttcttctgttttccaatatcaagagatcgtctaaataaattgctaaaagtgttatcatcgttgagatgagtatgtaaaattttgttgtgtaagtgatgagtttcttttctgaagtttattattcatagcaagattaagaatcttcttcttcttaacaaaaatacatgagttcctctagctggtgattttgtggatgaaggttccaacaagaggaagaagaagaagaagaagaagagagcatgaaattcatggcattttcttttcatgatgtcattaaaacttggttgttattgtatttaagtattaatcctccaatttcctcacagtga

SEQ ID NO: 45828 - DNA, 894 bp, Manihot esculenta
  Intron number 1 from transcript cassava4.1_027805m (locus cassava4.1_027805m.g) derived from phytozome v7.0 (chr-ID scaffold09870; pos 142378 to 143271)
aacaaagagaaaacaagatccaaaaaagcaagaaggtagattataaaagactcacaccaggaagtccaaatttgctagattaaactttcaacaaaagcaaatatatacagcctcactccaaggtcaggagggacaaacccactctccaatgaggaaggtcattatcttctaaggaagattatattatagggcccacgatccaagatcattagaaattgagagcccagatccttctacaagaaaatatgcccaatcccaatgaattaagaaatcctaagataaactggccgacttagatggagaaatagatactcgggcatcacattgttataggcgcctttgctcttccttttccatccaacatccggataagcaaaactaacctgcaaatcacctagattttgcctccttaaagacatgcaagactgtgaactcgttgatctcttctaaactcaaaagctctagctttttccccaaatggattaagagtaatcttggacacaacaaccatataatagtagatcgaaaacagcaagaatgacaatggaggtagttcaactcttcggtaactctcttgcatgttcctggactataaggcctgtgagccatcatcgatgaccttggtgcacttcttcattgttgctgaatctaggataagaatggaactagatccaaaacctctcgaagcctataagcacagagcaagcaatcacccgacataatcgttcccttttgaattggactagccttttcgtcaatcaatcagcttacttatttatgtgttagacatgatgaataggatttaaacagaaattaaccatatcctactgcactaattttttattatttgtttgcacaggttttactggcagctggaactgatacaacagttgc

SEQ ID NO: 45829 - DNA, 643 bp, Manihot esculenta
  Intron number 1 from transcript cassava4.1_011867m (locus cassava4.1_011867m.g) derived from phytozome v7.0 (chr-ID scaffold11425; pos 259946 to 260588)
agagatctgagtaattgaagctccacagactggtcctttttttttttttttctttttcaattgttgagaatcattgcttagctgaattcgaatgttcaatgtataattcaaacttttcttttaagatcttatttctgcgagttagaattctctgcctgagcaaaataaaagagaagaaaactggatgcccacgattatgaatgttggatcatcttttcttcgaaggcataaatttgaagaatgaagagaatgctatgtgtaaagattatctctattactttccccctgttttctaaatccttctcaatatgctttattaaggttgtctattattattattgttattttcggaaaattaagcttttctcgtcactttcttgctttctaccctcccttgcaagaattgaattgatttcttttccaacaattttttttgggaataaaagaattcaattctttttaacttgtaaaaggagtagaattcttagatgattttgcaagaattcatttgaattcttttactgggtataatccatgttgaaacgtctctccataaatttaagtctaaaatgacttcgtaaagagctctcctaactcttgaattgctaatgtcaagtttcagtttcttgtttgtataggtttc

SEQ ID NO: 45830 - DNA, 244 bp, Manihot esculenta
  Intron number 1 from transcript cassava4.1_014255m (locus cassava4.1_014255m.g) derived from phytozome v7.0 (chr-ID scaffold00889; pos 191924 to 192167 reverse strand)
cctattctttcctctcctttcctccctcagaaactgtaagcttcctctctctcattatctccaattcttttgtatccttgaggttggctctttgattattcaattggataattcgaatcttttttagcttttgcatctcctagtttcttttttttgttactaattttgaagatttagctattgaaattgttttcccctcgtctgtgcagcactaaatttgaacaaaacacaagtaataggataa

SEQ ID NO: 45831 - DNA, 1034 bp, Manihot esculenta
  Intron number 2 from transcript cassava4.1_012925m (locus cassava4.1_012771m.g) derived from phytozome v7.0 (chr-ID scaffold04457; pos 472214 to 473247)
ttcgtgagagagaagtggaggatttattctacaaggtaatacagcttctgttgttgtttggattcaattgtatgtgacatggcatctattttcaaattatgccttttgttttttcttattatggtttgctttatagccttgtacattctcttttgagttcatgcatatgggtaagagagagtttttgtagtttttcttcttctttgttttttttggtggtccttccgttggtaaattttatagtgctactatggtctgagtgccgttagaaatatctgatgaagtgaattatctgagctatttgcaggatgctaaaaaggttgttcaaataacataacgtcacgtcgcttgactcatgccattcccttcaaaaacctgcattttgatatttataatcgcttctattccattagaggatgttgttcctagggaacgacaacattttttttggtgtcatggccttgcattttgcttggataagttatcaatgaatcaagcttaacaagtttcttttctataagttcgagtcagtatgtttactattctagaagatctcaatgtctgcacatgacatgagaattcggattattaaatatggaaacactggaacagcagttgaagtttccattaggaagcagacttaaatacatacacttgtaactgtaaagttatagagaacttgatcatacaagtgggctagcagggttaaaagattcattctggcttatgcatatagaaggtgcttgtattgaattgttgtcatttttgtggttatcatcgtcttctgtgttttaagtgtgagaaagatggagcatttccatatttattatgagtttatttctgagacattaaaaagtttgtctatgtaaagagtgcttgccagtggcgacctgttggttttctcactggattcgacgtctacaaaaaagtgtcaaagacttttttatatgacttgtggatcacttttgtcccactccacttaatttaaaatagccatctctctggaatctctgaatctctctttccattgcagt

SEQ ID NO: 45832 - DNA, 990 bp, Manihot esculenta
  Intron number 1 from transcript cassava4.1_010865m (locus cassava4.1_010865m.g) derived from phytozome v7.0 (chr-ID scaffold01664; pos 50267 to 51256)
agcagagcccttcctctcgctcttgggactgcaaggtttgcgaatttcatgtctggttctattttcctgttttgatccctagtaaatgtaagtgttgaggtgaaaatagaagttgaattctggtgttttggaaaagttgataaagttagatagttggattaggcatggttgcgtaggtgttatagttttctggttttataataatgataataatctttaattcaccttccaatgagcattttatttataataaaaacagtcaaaggttaggttttggcttctaaactttaatatgcggagcattagaagcatttataatttcatataaagggggcttatcactttatttcaatttttttttaaatggtaagcattctggttttctaggatcttaattcaataagatatactatgaatgttccttcaattaaattttcgcctaagtgatactaattaactttgcttgctgagtgaagagtagtaaattttttaatggaaagtagtttcttactttctttcctttttccgtttcttatttttttaatctctttcctttctttgctgtgtgcttccgtgaaagcatattaacatctggcgcttcatttcaaatatgaattaagtattgtttactgcaagtgaatgtgtgagcttactgttctgctgttggtttattattctgctgggccagtaacacaggttcttactaacacatgtaaatgcgtaagcttaccattcagctgttgcctagttatttatctgggcagggtctgaatggtctatacatgaaatcacaatctcgatgtcaatgcctggactttatcccacctgtttttctttcaacctgcataccatttttctttgagatttgatggtaaattaagagaccctgaagctatttgtgatgcaagttggtttattttgtatgaagtcataatgataacaagtgattatgcaggcagttttggaagaaacacacactagaactgttcg

SEQ ID NO: 45833 - DNA, 791 bp, Manihot esculenta
  Intron number 2 from transcript cassava4.1_012500m (locus cassava4.1_012500m.g) derived from phytozome v7.0 (chr-ID scaffold02473; pos 105111 to 105901)
ttctttgaaggcgttttgttcttacaagcactcaggtggttatattaacaattttaagatatttatttgtttatttttaaaactcttcttgatagttgtttttgttttagaacttggtatgtgattttgcacagtgaattgagatgtttcttgtagatttttgttttgggaatcacatgtatacaatgaattaggtttttcttcctctatgtctaggatctaaatgcagcagtagtttgataaatagtgagacagatgcaaacgtcttatatgaattggcttgagaaaaataagattgtgatcccattattttgatttgaatttgagaaatttattgcaattggaaactggttggctgttaaattttgttagttatggattttattgatcagattttggttttggattggattgctaattatataatgtgggctttgaaataatgacatggtatatgtgaatatgcacgtatgtttgtgtacggagtattagtaatttctctgattcttatgctggtggcggaaaaaagggttctaatttggttaagttcttattgcaattcacaatatatcagctcatctgcaatggcttgcttcatctttatggacaaataggatgtatgcgaacatgtatctcttgtgtcaagtaaaagaatggacaatggcatttttattcttaatatgcaattgatctctctcgctctcttcctctctgcttttggatatttacagtttcttttatcttttgccattgtagcttcagtgttggaatctggaagttccagtgcctca

SEQ ID NO: 45834 - DNA, 405 bp, Manihot esculenta
  Intron number 1 from transcript cassava4.1_033499m (locus cassava4.1_033499m.g) derived from phytozome v7.0 (chr-ID scaffold04043; pos 97980 to 98384 reverse strand)
ttaataagcttctatcactcccttcctaccctgaggtatacactcaacggaaacctttatttcgctgtttcacagaaaaagaaaggttgatattttattttatgtttttctaccttttctttttgagctcattttccttgcagtccctctctaacaatttgttatacgcttcaatcaaaatagagtcttcaatagatttgtgaaattacgaaagaaacccattttcattttgcatgttcactatagctatgctcaatatctgtgttgtttttagcagcatggaaggttcgaccttgaatgccttctataacccattaaattatatccccccaaagaaaagggtgcattatcattcaacatgggtactatttctaatcttattttgaattatggtgtcttatgtag

SEQ ID NO: 45835 - DNA, 817 bp, Manihot esculenta
  Intron number 2 from transcript cassava4.1_003602m (locus cassava4.1_003602m.g) derived from phytozome v7.0 (chr-ID scaffold12758; pos 24807 to 25623 reverse strand)
tttaacaccacttgccccggtgttagtttctgcccctttccatatgttactgcattctttttttcatttctttaactatgcatgtattacttttatgtttctgactctaattatgtgtctaatatcaaagaaagaagaaagtaatgtttattgtttaaaattatttgtttacttcaattttagtgtcgattttaatttaggaacctaatattagtttttttctctgtccctttctctctctctctttcttaattttgcgttatagattaattgattgtatgtttaattcgattagctgatttaatgaagttgtgatgatggtttaacttgcgttgcctctataatcaattaactaaaatgtttcatcagagtctgctactgttgaagtttgcttcagtgggaagttgtcaaatttcagagcataaatacagattatactcgtagttcatgccatggatcctcaatgtgggatgtgtggtgtgctacatggatgcatttttgtgggattttattatcttaattcttgctgaatgaatattatatggcactgctgcttgttataggattcgtcctgaaataatattgaatgtaaatgagaatctccttgtatcttgcttggttcctctaccctaacttcaagtgttgaaagtactatgaaagtgaagataagataaaactattggatcggtcaaattggttgcttttcatgtgctgtgcattcctatttacacgttagggatcaccttcactagttgtctttgggatgcaatatgtttaacctttcttggttcatcaatattgcaggaagatcaaaaga

SEQ ID NO: 45836 - DNA, 203 bp, Manihot esculenta
  Intron number 1 from transcript cassava4.1_014906m (locus cassava4.1_014906m.g) derived from phytozome v7.0 (chr-ID scaffold00271; pos 71080 to 71282)
gctccgctcctgggtaataagcaatttacaatcttggagtattaatctacaccaagtgtttgatgtgtttgtttattttaattgattattttatgttacataatactggttaatcaaacgcagaactcattggttgatgcgttttcttcgtttgtttttattcctcagtgactttgggttcgacccacttcgtctaggtgagg

SEQ ID NO: 45837 - DNA, 496 bp, Manihot esculenta
  Intron number 1 from transcript cassava4.1_010923m (locus cassava4.1_008844m.g) derived from phytozome v7.0 (chr-ID scaffold04796; pos 9828 to 10323)
acctccttgtattttaaaaacacaagcatcctcaggtagagctatacctaatatttctctgatcatactccataactccgatcaaactcattcatggcttctgattctgtctttgttaaagttgttcaagctcctgaagatcccattctaggggtactcgtttcatttctgtattatttgatcttcaatttatgatctatttggagtttgatcttctgtcgtttggctgattagatcacagatcacagcgtttttgatttgggaaatgttaggggaatactatgtaatttctatatatatagctcgtaactccttttttagtaatgttttttaatttgtcaatcataggatacttatctgagattgaatggaaatatagaaattggatttcttttagttttttgatcgtgttaatctgtattagtgtgtttatttggttttgttttaatgaatataaacaggtcactgttgcttataacaaggataccagcccaaa

SEQ ID NO: 45838 - DNA, 1004 bp, Manihot esculenta
  Intron number 1 from transcript cassava4.1_003295m (locus cassava4.1_003295m.g) derived from phytozome v7.0 (chr-ID scaffold04149; pos 145345 to 146348 reverse strand)
aggagattaggaatttggatctctcgtacctaccggtaattttcattttgtgctatgcccattttggtttctatgctttgttgttttccaggaaacatgaaggaaaggggaaaagcaaataaaattgtgaggtgaaaaaactttttgatcctgttgagatcgcatgtattgatttatgttattgttgtggttttcgttgttgtgattggtccttttgaaatgtgatgttaccgttatgctttttttcgagatttagatgcttaaattaagaatacaaatttgggctttcaatgatgtgacttctgctgtttctttcctctccattattgtactattgcgaatatcagtggacaatggtggggtttgttggaatttgatggtccaagtttggatgtggcgagagcgctgaatttgaatggaatttaattgagtttaatgtgatagctttctcaaaaatacttttaacaatttggattgaactccctttactttgttttattagctcttcctttctccttctttttacaatgtgaaattctcatttctccaacgggtttactttctcttaaaagaccccagttaatgactaaattttattgcccaatatgcgacttctttgtgggtagagatcttgaattcaaagtctctcatttgccaaattttgatggatttatttggttgttaagggaggggtgttcggacaggggaatgggtaccactgattgtgtagtccaagtttccttttggccaccacggtgggttttgcattgttattcatttgttcttgggttctatttggtgattattaattcattttggattatgtatatatatataaggaaaaaaaactccttttacaggttagtgaaggttggctaaacttgttcgaaacgttgcacgagttataagacttactgttaactgtgattttctgttccacttatttttccttccatggatgctaaaatggatggtttttcatttgataagcagatcacagagaa

SEQ ID NO: 45839 - DNA, 751 bp, Manihot esculenta
  Intron number 1 from transcript cassava4.1_017822m (locus cassava4.1_017822m.g) derived from phytozome v7.0 (chr-ID scaffold03245; pos 92078 to 92828)
gtttgactgatagggttagttttccttgtttttacatatgcaaggccattttatttttcttctaattaaggacatgtagatgcataattcctgttgatttgttgtagaattaccaagcgcttaacaaaatagatgtcagatacttggataacataaattgcccgtaccggacttctatatattatgttggcacttggctcttgtggtgatcattatcaatatattgtaatatctatgccctgttgtgtgttctatcatcagcaagaagtaaaatgaagatggaaaaataggagattgtggaataatagcttgatttccctcatctcaatgggcatgtatgaatacaattacaagatatagaaagtaatagttcagtttctaggctaattacatccttattttgatatgcttgcatgaatcatggcatatatattcctgttctaacagatgaaagggaaagtccatttgtcttgttgtacacctgctccttaaattttctttagactgcaatttggtagcatttatacatactcttttttctactatgatgaagctgtttaatgcatgtgtcaattctcataagtttcctcctgggccaatggttacctcaacattttgtgtgtatgtgttttctgaaattgttcatctcagcaagctttctattcatttgttacttccttgcttaattatcatgcaacctaccactgggtatgtaggctacggttgactctttgaagaggcagagaattac

SEQ ID NO: 45840 - DNA, 814 bp, Manihot esculenta
  Intron number 2 from transcript cassava4.1_025987m (locus cassava4.1_025987m.g) derived from phytozome v7.0 (chr-ID scaffold12498; pos 81100 to 81913)
tatattaagggagttgctgttaccaaatataaaaggtgagtcattttctgcaatgcaggtccaagcagttgcatgcaaaatgattttttccttttgtgctgaagaaataatatagaaaaccaattgatatacttaaaatgactattcttttcaatcctgatgagtttatgcaaggatttgaacaatttatatttgaatggcgtactagtgaatgcaccctctctctgtctctctctgttttttggtattaattttccattgtactgcatgtttaagttgcttctaaatataggaaaccgtagtgaaaaaagaaaaggttttaattgtttgaggaatcataaacaattcttaaaagaaaatgatatcagccaggttttcatttattatttggtgatcttccatgaaggaaaactgaacatggagtctatagcactatactatgagaaagcacactacttccgttaacttgccaaaagaaaaggactatgattgggtttgctttccttttttattttcaccattcctaagatattaaaaacacaagtactttatgacatcaaaatgccataggtcattaataacatattattttttgttttaatttgatgaactaatctgagtgttcataagatattttttggtcaactttcaatcaggttatccctgatgtggtattcgagggttgttgcacttgtagcaacatgatgcatcttatttcaaatgagatagcgctgttttattataatgatttccacttgcagaatgatcttcaattgttaatggtcattgagtattggtgacaggtctgctgtga

SEQ ID NO: 45841 - DNA, 413 bp, Manihot esculenta
  Intron number 1 from transcript cassava4.1_032665m (locus cassava4.1_032665m.g) derived from phytozome v7.0 (chr-ID scaffold06916; pos 455224 to 455636)
ctctcgatcctccctgagcaaaaccccaactataggttatcttctcgattttaatgatcttagccttttctcctcgtgctgtaaatttatctattagtcataaatttttaatgatcatattgatgtggcttattaagtgaaaactaatagggattcaattgtaaaacctagcttaattttatagctccaattaattaataaacaagtacccattgtaaaaagcgccaaagttgatgatgacttttttcttcggcattggatttttatttcttattctgcttttttttttggttgatgcgaaaattgaggaataaaattgatctgtgtgcgcgcgtggtttgatttcaatttttgtttaaaattatattatttgtacaggtgtaatacaactctgcttatagattgttgccaga

SEQ ID NO: 45842 - DNA, 455 bp, Manihot esculenta
  Intron number 1 from transcript cassava4.1_001672m (locus cassava4.1_001672m.g) derived from phytozome v7.0 (chr-ID scaffold07351; pos 271414 to 271868)
cccaaacaaatcaaagtttggtttcagaatagaaggtataaaaatttcaatgtcagaaccaaggaatctcattttgtttcttctcttacgtgtagattttcttcccctttttaaatgcagtagaaatgatttaaaaaaattttattgtttgggatagtgcaattaaaaggcttgagattgtcccaatgaggaagtcaaaaaacaccaaggaaaatttagtctttttcaagaacatttaacatcagttctcggttgatttgagaatttaagagaagaatagaactggaagttgaattgtgatgcccaaaagaaactgaatcaaatatttctcaactttcagtgtggtttgatactgctttttaacgaataatgatcttcccaaccatttttcccattgaatccttttgcaatattaatcataacagtgtgttgagtgtttcattttgaattttcag

SEQ ID NO: 45843 - DNA, 678 bp, Manihot esculenta
  Intron number 1 from transcript cassava4.1_000042m (locus cassava4.1_000042m.g) derived from phytozome v7.0 (chr-ID scaffold02421; pos 665065 to 665742)
cggaccatagcctacagcaaacacacagtgagttatcttggcttttttcaccaatgaggctttatcgctttataattgcatgtactgcaattgtttgtcttttgtttttccctttgccaagggggctggaattgcattaattaaactttgtgtgcaaagatagtagaaagtgaagtttccggtgaagaacttggtggaagaggaaaaaaacaaaaagagttggtggtcatggcatggcttgctgctaatatagggcctagcagccattgggtcttatctgctaattaaggaaatataagatggttctataccttgttttagttggttttgactttcttaagtgaagaggtcaacatgactttggagggagcataatttttttttttaaagaaatggaaatggtttacaagatgaacaaaataagtataaggtccacttgtggttttggacttgctgattttagattcggatatttagtgtccatgctttatgcttgatgtgaagggaaaactttattatttttttccctaaaaaatgcatttctttatccatagattatgatttttttttttatataattatggtttgttctgtgtcccttgtgtataatttgctttctaaataagtatttgcttattaataggtgtagcaggtgttacagttgaagagattcttggg

SEQ ID NO: 45844 - DNA, 757 bp, Manihot esculenta
  Intron number 1 from transcript cassava4.1_023651m (locus cassava4.1_023651m.g) derived from phytozome v7.0 (chr-ID scaffold12915; pos 1431 to 2187 reverse strand)
acagttttgatccgtatcaggtaacttttcacttggctttgcaattttttatttgtatttgaaattgagtatatagattatagacatggatttgagatcctgtaattacatagatataattttcctcctgggtttggtgtttgtgatggtgttttaaagtgcaaactccaagtttacatatcgttaggcttcaaaactatccctccttagtatttaatcactagcctgtttgaacgtgcaatttaaagttattcaattggcattttcgaactgataatatatgtgatctatgctaatgtattatgtttgacatggacttttactaccattcccataacttgtatatttgtattcattgttgttgatgatgacttcagtttgacctgaaacataactcaattatcaaaaactacagcattgtagattattttggattatgttgtggttttacagttatgaaacaagtagtgctttgttgcttgattcatgtatttgacatttgaataacagaggagagacactagcttggtgtggcaattcattgctttacagaccttctcttctgattcttgtttaagttttagatattattatattataggagtctgagacgtggatggatctttcacttcattcttgctatttgtgctcttagatgttctcgtcctctttaactgatttttgtcttcatttgttaatcatatatcctgaacactttgctttcaggaattgttgaaagctttaattggttttgtag

SEQ ID NO: 45845 - DNA, 295 bp, Manihot esculenta
  Intron number 1 from transcript cassava4.1_017144m (locus cassava4.1_017144m.g) derived from phytozome v7.0 (chr-ID scaffold11251; pos 101304 to 101598 reverse strand)
tgttacagcttcagcaccatcccttaagaactaaggtccctccacctctttaccctctgttatgtgttttctctttaattatttcagcaatatttttttatgggtggccttgattgagactaggaagcaattaaagtttcaaccttttcaatatcccaaaagaatggaagattgaactcgactactcggatagggggttactatggagtttattcgtgaaatttgtggtctttgattcatcgatttcgtaaataatgcaggcaattacagccggggtgctgtcagctatcagtga

SEQ ID NO: 45846 - DNA, 660 bp, Manihot esculenta
  Intron number 1 from transcript cassava4.1_005831m (locus cassava4.1_003996m.g) derived from phytozome v7.0 (chr-ID scaffold08059; pos 10292 to 10951)
atttcactcttttatctggggatttgccattcaaggttagtttttttctttttcattttttgggatttgttttgcaatgcaactgatattatttaatttgattttgtttgtgtcgtgattttttggatctgggtaggttctttatttggttttgaatgagaatggtgatctgggtttcgatttgtagtgtttgtaattgcttgacagttctacttttgatgtgaaatattgatctgggattgctgtgttccaactaagtttgatccgtaatggaagagtatttttggagttaatacaaactggagatatttcttatatgaataaaaaaaaaattatacttgttgattttgtattggtggacgaaattaatcttgagatattcaccacttgaatcttgtcgattaaagaacccaattttcaaaattttaatttgaattccaaaagtttgggaaaaacgggtttagaaaaatgaaatactcttggcactgaacttgtgcagaagtcactttagaattgaattccagattactgtactagatcataggatctttatgagtttttgtcttatattcggtagcttttgcttcttcatgtattctcaagttatctcacacgtattctcagttctcgtctaaattaattgatcttcaacagggagag

SEQ ID NO: 45847 - DNA, 480 bp, Manihot esculenta
  Intron number 3 from transcript cassava4.1_001422m (locus cassava4.1_001422m.g) derived from phytozome v7.0 (chr-ID scaffold07520; pos 62188 to 62667 reverse strand)
atcctcttattcaggttggttgttgtatcttatatatggaatttttggttccaaaataatcacttagcgcaagttgtataaagaaatacttgaacttttacaattggagaaaggaaattcttcaaccagaataaccctacccttttgatcatttcaagttcaaccttgaacatgttctcattcgcattcattaaagtaagaaaccaaagaaacctatgtgctataaacatctctctaataattaaaataaaaaagaatttaaataattcaaatctttctatttcaagattccttattcaaattcaacataatagtactttagagctgtggtagtctttacaggaaaatgaaattggtgttcagctatttgtaattttatagtgaaataagcagaaagtgattaaaaatattttcttatatctacaaaaattattgatgatggcaggcctctttactctctctcctaccatcacacttgtt

SEQ ID NO: 45848 - DNA, 1053 bp, Manihot esculenta
  Intron number 1 from transcript cassava4.1_002849m (locus cassava4.1_002849m.g) derived from phytozome v7.0 (chr-ID scaffold01624; pos 11694 to 12746)
ggactcagactggaacagctgagggctttgctaaggtatgatcattttcttttaatatgataatgagattgtttgtttcgtttttggtctggcctttgattatggattggtgtttggggatttggctggattggttaaaagagaacgagaattgatcagcgtggctgtggatgaaggtttgtttggcagtcaaagttaggggattattttgactgatgtgaaatccgaatttagtatttggttaacagcggctaataagaactgcccgatatggtctggatttttaacttagtttttgggtgatagaatttggcgttgaactttgaaacgagttaatgagctgaatctaattttatgggcattctttgacaagcttggaagttggaagtggttttgtcaatttcgagaaaaaagcattaagagccactttccgattgtatgttaagatcgatgacttcaagctacaccttggaacttgacctctgggagaaaattgcgataatattaacttttcaacattatgggttttgatagatgaaaaactagttaaatggaggattttaatgtgcatattaactttattagctttttgttctttgttctttgttcttgttgtgtctattgattccatggtattggcatccttgtatgcatgattatggtatcaattttggttgaaggcctcaatcattgctaaggtggggtacataggggcagatatgtgtagcttaattttatgatttcaagagaccctgcagctaagttccataaaatttggagtggagccttacagaaagtgatggcatagtgtaaaaattgcatgtgcgttgctggggatacaaatacaacagatgattaactctttggatagatgtaatcttctgtttgtcatgtgttgtgtttttgatgttcggtgttataattggagagcagctgcagaatcgtgtatttagcattgtcttagagcacccctattttgtattatttaagcttttaattattgctttccctaattattattgcaggccttagctgaggagatcaaggcaaggt

SEQ ID NO: 45849 - DNA, 759 bp, Manihot esculenta
  Intron number 1 from transcript cassava4.1_012829m (locus cassava4.1_012829m.g) derived from phytozome v7.0 (chr-ID scaffold10469; pos 183269 to 184027)
ccaatctctccacatacaaagaacagcttcataaggtacttctccctctatttttctggaacagcttcataatttacctttttgtttttggtaattttgatttttagtgttggtgctgggaattgtgtcaattgggtatctcgaattagggtttgtttttgctgggcttattctcgaggttatattgttgaattttgatttggtttattttttcgcgttaaattatgtttttccccatttaaattatccctttctgttttcttttgaagtttttattttccccgttttcgacttcttcagtagctatatcaaattaagggttctttttcctccttgaacttcaattgttcaatttaatccaactatgtcctctccctccattaagtgggatgaagattgagttgggtttttcatattcgttttctaatatctttatttggctagtcacacactcttgtttagtgtttttttctcccttcacgacttcagcgttagtatgagttctagtaagaattggatttgatagtgtcaaatatgaattttcgaacaatgtgttcttcaagttatgttttcgcttttacagtctaaaatgaatgtgttgcatactttcttataaaaatttgtattttttcgcctatttgctatctgctatagactaaatatagagttatcttttatctagtgtatcttttatgtataatgacatatcatgcctgtggatcaggttagacaacttttggctgataatccagataattc

SEQ ID NO: 45850 - DNA, 693 bp, Manihot esculenta
  Intron number 2 from transcript cassava4.1_012829m (locus cassava4.1_012829m.g) derived from phytozome v7.0 (chr-ID scaffold10469; pos 184060 to 184752)
aggtgatccttacttgtttttactcggtttctgctatttattcctagttgaaaatttttttctgtttgagtatattttcgacagatgctgtttgaataattatcgtctgaaaatggtcaacttctctaggcatcaggtcacaaaacattaggtgtttctatttgggtgttggatagatgttactatttcagcgtctaggttttgatgctgttatctttctttctcttcctcctatctcttgaaggacttcaacatgttgcttaaacatgcaactttaataaggtgctaatggcttccatggagatttgttttcatttcagggttgaaaaggtgagggtggtttttatgctaactaaaattccatgtctccagaaacaggaaatgtgtggagaattttttttttgtcttttaaaaaagaagaaagaaaaaaaaaacttggagctgtttataaaacttaaaacttcatcaagatgcccatcactttatcttggttcatttgcaggtgtgctaggcatcgtgatggccagcctgactctgttcctcacctgatttgagatgttcacactgagattctaagtttgagttttaatgcagattgcagtttatgatgtaaaggctctgttttgtattatactaggctaacattgtcaagatgcaggtcatcgctctcacggaggaacttcttgcaactgc

SEQ ID NO: 45851 - DNA, 729 bp, Manihot esculenta
  Intron number 3 from transcript cassava4.1_002545m (locus cassava4.1_002306m.g) derived from phytozome v7.0 (chr-ID scaffold06916; pos 1694236 to 1694964)
acactcgggtataatacttctaaagttctagtaaaaccttttcatggatgggtggttgcatgtgtgttttatgtcttctgtatgttaagtgtatttcaaattttgtcacctaagacctaatgatttggattgcctgcataaagactggtgtgtggaagttaaatctgctcctcttgtctgactgatatgcatgttctcattttgtagaacattgctgaacaagtcctatgttctattagtatttttcaatgatacagtaaatacctgattgatttctttgcaactaattttcgattaacggttgtgttaaaagtggagtattcttgtacttcttttggattgttggtaaaaaacttcatattttctactttttcataaccttgtctattttattcaaaagaagaaaagggtaagtgttttttttttggccttatttggaaggatggtgaatatggctgtgattctgaatcaatatggtttgacaatggccattgacatttggctgaggtttactttacatgaaatttttatctgcattttctaatattctgtcaaagctagatatcctacttttttctcctttttctctcgcatgcgtgcagaggcacttccacacacatgcacgctgcacgttgtgttctcatgattatatgcatgtgtatgtgcacataggcacaagaaatcaaatgatggcagtgtcaaatttggtaatgcttcaattgtctgcag

SEQ ID NO: 45852 - DNA, 446 bp, Manihot esculenta
  Intron number 1 from transcript cassava4.1_021631m (locus cassava4.1_021631m.g) derived from phytozome v7.0 (chr-ID scaffold08799; pos 136121 to 136566)
gaagcaagagtttcaaagcacaagcgttctcataggtagaacttttcattctctttctgttgctgatcttattacttttcttgtccataagctgttagatgatatgcctctggttattttaactaatgtttttgcgagaagaagtcttagaaacactgattttattaggaatctgaacctgagttttgactgttgcaaaggatctttagtttaacatggggcaactgttttctttttgccttttccttttcttttctttttatttttttttcactttattggtaataaataattaacaaaaccagcacagatttctactgctatatgtttgtgttaagatcagaataccttgatgtattattgctgtctagtatgcgtattgatgtgtcctttccattcgtgatttgacagtgatccagttctaataaaagttgagaaacctaaac

SEQ ID NO: 45853 - DNA, 571 bp, Manihot esculenta
  Intron number 1 from transcript cassava4.1_004714m (locus cassava4.1_004280m.g) derived from phytozome v7.0 (chr-ID scaffold01934; pos 136048 to 136618 reverse strand)
ttcccaaggtctccttcttctaccaatatgaaaggaacccactttcattttattttggtgttttgcggttaggatttagattgtttgatttttggataatgggttcatttcgttttcaaaaaaattaaggaagtcaatagtagattcggttgtataagtctgcatctatgtcgtatagattgatgttttattgccttgtaatcggcatattttgaagttgttgttgttaattttatctgtaaatgcatcaagttctagctccgatctgatttgattggctgttataggctaaattcttgatcatctgttttttcttttccggttggcgaatatggtttctttaacttcattttttctgggttttgattttacatttatgatatatatcgtgatcaataagtgtgtataatgcggtacttttccatcttaaattctgctttgattgactgttagaggtgaaatctgtaaatacttgagtttaacttttgttattaatttacttttgttttgaatactaaatgggttttatgtggttgtcataatgttccaaagatctcttttgctgcaaaag

SEQ ID NO: 45854 - DNA, 585 bp, Manihot esculenta
  Intron number 2 from transcript cassava4.1_006944m (locus cassava4.1_006586m.g) derived from phytozome v7.0 (chr-ID scaffold04443; pos 73426 to 74010 reverse strand)
gcagataggcgttacctaatcctgccttcattggtgtaagagaatgcaaatttccagtttttcattttctttgtgtataagaatcagtagattaactaaaggaaatacaaaaggatgcaaggtgtcaaaactgtgaagagtagcgggtaataaagaagagatgaataaggcttcacttttattgaagttcaatggggagagatagatcagccagcagttgtactgtgcactgatgttttggaagctttaaaattcttgggtgccttgataatttattaaatataactatgcaactcaaaaaactaatgactagtatcctcttaaaatcgtggtttgagattcagtagtgggtgttttgaattcataatcctctcagataagtctagtgagtatatgcttaaagagagccaaaacatgacctgaacactgcacaagcacaagaaggaaaaagccagttataaatttctcttcaatatattggcgggcttgctgtttaggagttagggcactacattagtcagctcatttctttgtgtagttgtgttatcttgaaatactataattctttcagatctggtaacgttt

SEQ ID NO: 45855 - DNA, 799 bp, Manihot esculenta
  Intron number 1 from transcript cassava4.1_001866m (locus cassava4.1_001866m.g) derived from phytozome v7.0 (chr-ID scaffold03000; pos 26318 to 27116)
ttgcatctcatttgacactccggtaatcgtccttgcattttattttctctgtggtttatccagaaattagtagcgaaaatggaagtgtatggcttactgaaatctcttcgtttagtgttattgaaatttgtatttttgaagttttgtttcgcttttttttttgtttgtttgtttcgttggaaatgaaggtaaattgaggtgataaaagaattttgctgttccacttgcttcagttagactttctttaactaaatcttcatccttgttgatgaatactgtggcttgtttgtcttcttgtaaattttttgcgttcattttctatgttttatgcgtgatttttgggggaaaactggtaggactaattcaaggtttatcagttgtcaacagcaataaaatttgctttattggttttccattttgttaatttatttgctaagcttcacttgcttttcattagatctagattgaaggtatttgtttggttatattttactatttcttctattagtgttattggccaaatatgtgatagaaatcacataattaatatatctattagaatgcatacgtcatgtgatttgatttcagatatgtgttttatatgagtaattggttgaattcaacttatagctagctctttcggtatgttgaaagaagtaaaactgctggtttttgtgttatactctcgtcttcttggtctactcccaatgtaaggttctttcttactttcattctaatgcaatgtaatctctgaatttgtgattatttgcagagatcagaaggtggattgtttgtcgac

SEQ ID NO: 45856 - DNA, 998 bp, Manihot esculenta
  Intron number 1 from transcript cassava4.1_002258m (locus cassava4.1_002258m.g) derived from phytozome v7.0 (chr-ID scaffold06616; pos 64482 to 65479)
ttcttattcccgcctacgttaccttcacacccaaggttatgatccttctctgtgtagtctgtaatcccttcttctcattgcctgtgtatcctttgactcacaatgttcataagttcttccattttccatggaaaaatggagtttgctgtagtttcttcttcttcttcttcttccagtgatttatgatgatctgaaatgggtttttgtttttgttttatctttttaattttcctgttaatatttcaaatgggtcgtcatccttctgttcgaatttgtttttccaccgttgataatctctgcatttatattctaatgatggttattttttataaataaaatttgttatttttctttactagttcagggttcatactgcagattttctactgtgaatttgatcagtcagaaacagttctctttatctttatgctattttagaaaaacctttatattcttttgttgtttctttctcttttactacctcgaaactacaaatcataattcttcaatttgaccatcccttaatcatttctatctttcatcactattctctttttgtattttaccacatatcttcttgtaaattcttcacctatattatttttttcaaaaaagaaaagaaaaataaatttctactttttttaattttttgttctctgttggaatatgaagtgtttgagttcttgggttattgagaattaatagagaaaagcatgaaaaacaaaagaatctccggtttctttgatctgttatgcaagttagaaatgtatagtgacttgaaaacaaagaaaagaagcaccacctctttttgaaatcattcttgtatatagaaatgtagaaaagaaagcataaacatatctgtaagtctagctcttttgagcattctgatttctgaggaaattcttttcccattgcttgctttgtatgtgtttgatatttgttaacaatggactagatgtaacttctttgcttttcttcaacagttgttgaaaattcat

SEQ ID NO: 45857 - DNA, 311 bp, Manihot esculenta
  Intron number 1 from transcript cassava4.1_008806m (locus cassava4.1_008806m.g) derived from phytozome v7.0 (chr-ID scaffold12202; pos 46861 to 47171 reverse strand)
ccgcttcttggaatctaatagagataccaacattggtacttcctttccgtaactttttggtttggtctgcagtttaattgctattattgaactgggtttctgtttgattactgagaaatggtggaaaaatctgaaaaactcgatctgagtgatttgagaggttttttctgcttggatatcaaaatgccaaaacaattacctaagagatgaatttcttttcttgcgtatcaaggtatttctccttgttgtgtttgtagaccttatgaatgctgtgcagtgcaggatttgttggagattccttgaacaggaat

SEQ ID NO: 45858 - DNA, 630 bp, Manihot esculenta
  Intron number 2 from transcript cassava4.1_013480m (locus cassava4.1_013480m.g) derived from phytozome v7.0 (chr-ID scaffold09372; pos 289741 to 290370)
tgccggagaagaagcgccgcctcactcaggagcaggtaaaattaatactatgtgccaagagttgagaataatactccattccacacaaaagtagatctactttatcctcttcaaatttatctctctttttttttttagatagcttgtttattagtttataaattagtaaaagtttattagatttgaaaataatttaataagagaatatattgaattcttttgggatttggcatatccatggatgcttctactgaaatatccaatcttatagccttatcagaatcaaattccctttcatttcttgtgaaggggaagtctctccagagtttcttcaaagaatcaaaatgatactaaaacctaaatgtatatattaaattaaataataatactattactgttctttattccttaatttttattttttatttttcacctagatagctagttcaaagatcaatacgaaatgagatgccaaacatcgggggaattttctttctttctttctttcttatttttttaaatgtaatgaatcaaaaagggtagtaaagctattggaagttgatgtgtaatataattaaaatggttggttttgaaggtggatctgctggagaagagttttgaggcagagaa

SEQ ID NO: 45859 - DNA, 993 bp, Manihot esculenta
  Intron number 1 from transcript cassava4.1_007375m (locus cassava4.1_007375m.g) derived from phytozome v7.0 (chr-ID scaffold06609; pos 445997 to 446989 reverse strand)
gtcctttcctcaacaggcgtactataaggactgaggtcagtatctttgttttatcttcaagttgtaatttcattcacttggagttctagtctccatcttattgaaattttcataactagagagaaaatttgtgatcttattctgtattagtgtattaatctgtcattttattctttatttccccatatgcaagttggtaggtttcagatgggcttatattaattttgcatgtattattgttgttaaaatgtgtctgtggattgaaccaacattcttgcaaatgtcttttgtctgtaattcaactgctgtcacttttatctatattaacccataaattattattaatatatggcttgaattgggaagatggagaataattttgtagttctaggtaatggctttattttggtcctttttctgaggcagttttttccgatcttttccatattataattctcagatgctatgtattttgtgtgccattgctcaaacttacaagttattgtattcacataccctggtaagaatgtgagagaagcaaatcatttcaaactggatatgcgttgcatttcctttcctttctgtgctagagttcttgattgacacagtagctttatgttatcatctacgcttcaaaagtgtctttgaactggagatgtatgacattgtggctcattcaatgtagattgaagaacagctgagtatagacaaccacaggatgtaccaatacaaactacccccgagaagttagctagaagataggacttatatgtgatttctacatgattgattgtgttgtcaacttgttggtgggtttgtaagaagagtttcatttgattgaaggagaaaactaagtaacgttaaggacaattttttattttataaattaatatgatttgtaaatacaagttctgtctttcttatttcagttgataaagttttttttttttttttttactattaatgtatgtcttaggtagtgaaaggttccat

SEQ ID NO: 45860 - DNA, 863 bp, Manihot esculenta
  Intron number 2 from transcript cassava4.1_000596m (locus cassava4.1_000596m.g) derived from phytozome v7.0 (chr-ID scaffold04457; pos 870992 to 871854)
ttcggaggcgcaaaagtccgaccaaaccttgattggtacttagctcttagttctcattactttagaagcttatcattgttaagttgttcagaaatctctgttcatattttgattggaaatcatctgtggcagacttgtttacctggtttttgcggctaggaataagaaagtgtttagcgactcgattttgcggttgggttggaattaaatcaccattagtggtggttttaatgaataacatatattatgattcttttctatgtggtcataatgctggagagcttgtttgtccatctatgtacccaaatattcatactacagaatttgaataattatggagtataagcggtttgtttttgctttaatgggtgtttttcatagaatattatgatctgagcaaaatttcttggttttgtattttcttttaagaaggaaaggaatctcaataaataccgataattttcttgtggagtttcattaaaatttgctgcaatacccaccaaaattacaaatatgctttcttagatccatcatagacaggtattatgcaatatctaatattcctcggttacaaaagatgctgaggggtgccaagtagctgtcttgttttcctagcatcactgtatcattttcatgaggttcgtggctgtagataatgtttgcctactccagatatgaatgtgtttgtgggctgtagagtttgagtttacaaatattcttatgcatgctagaaatttgttcagcgtcctttaagaagttattattattattaactttttttttctgttcgaaacgttttgcttagagttttctctatctggcttttgcatgttgatcaccttctgcagaggttatcaaaggta

SEQ ID NO: 45861 - DNA, 991 bp, Manihot esculenta
  Intron number 1 from transcript cassava4.1_013356m (locus cassava4.1_013356m.g) derived from phytozome v7.0 (chr-ID scaffold07087; pos 29716 to 30706 reverse strand)
gtttcatttcaccaacaccaacagcaggaagatcggtaattacgatttcccttattttcttgttcaaatcatttcaaattttcgttgcatttactctatgttttggatccttaattgtgcaagagaattggagagaaattaaagagaggaaattaagaaaatggaaaagaattttgattttctctgtattgtttggattaataagtaatttagagtagaaattaatttcctcctctacagaaaagaagaatatgttggtgctttatatctatttccctcgcttcccactaaattggggggaatttattggggcatttataataaattgggaaatataatttttcctccttttcctttcctttcctttcccttcttttctcctcttaattcatgtccaaacaagaggaatttaaaattttctttcttttatcttctctccatttcttccaaaccaaacaaagcattagtgaatatgtgcactttagcaaaaggttgctcgctgtttctgatgtgcgccaggcgttgagaatgccttaaattgcttgaaattttgcctttccgagttgcgccacgaatactgacaaagtcttatcgcgtattaactaaattgcgccgtactgaataatcttattcaaccaaactgccgattcaacggtgtgatttttccttgaaccggtttcacacgagagtgaaagacgcggaagcacccaatttttttaatgattgggtgttgagttaggtcaccaacaacgggcccatatcttttgtcctgatctctcacgcgtttcaattaatttgcttacgccggattaatcgaaaaaacaaatattgttatcggttatcttctgttgctgcatttagcagtcttttaatacattatctatcttgcatgtgaaaaactaaaaaaaagcaaatatcttttaaaaagctttaattttttggaatttttaatacagggccaaaggaattcacctcagtattctacagtctt

SEQ ID NO: 45862 - DNA, 827 bp, Manihot esculenta
  Intron number 1 from transcript cassava4.1_023723m (locus cassava4.1_023723m.g) derived from phytozome v7.0 (chr-ID scaffold11179; pos 287827 to 288653 reverse strand)
gcaagtattttagacccatacttgtttggagaattgtatgaataaaattgctttgtactagacctcagaaacttttagtattttcttcattggctgtgcttctacattttatattggatgatggagcacatttcttgttaattcgaaatggcactccctgtttatccttatgtttttcattcattcatgttcattatcagaaaccatgctccgagcattgttctgtttcagactttgagaaaatgttttcacttagaagttaggatgctcccataacttgagacttctatttttctgtcaatggcaagggaaaaaattttagtaaaggggcaaaggtcttgaaggattgctgtaaaaagaccatgttctcacatgtaatacaaaagggtgaaaatattgactaatcaaagaatttgtgcagtctggagaggattcaagcttgtagagatgcttgcctccttttcttttgtcatggagttttgtgcagaaattctgatgaatttgataaagggccacatacttttatggtctacatctcaaaattggattgatatatgtgctggagtttgatatgtgtgtggactgtcattagaaaagatgaactattatcatgagttaatagtttggatagatctcacatgcaaacatatcaatgcatccaacacatttatggtagatgttcttgttgcctgtctgtggtaattaataggagtaataatgatgatgagactttgtaatactatggtttcattatgttgctaagacaaataaacaaaattgttagtggatatgttttcataaatttaatagtattttactggagcagg

SEQ ID NO: 45863 - DNA, 450 bp, Manihot esculenta
  Intron number 2 from transcript cassava4.1_025230m (locus cassava4.1_025230m.g) derived from phytozome v7.0 (chr-ID scaffold08677; pos 37595 to 38044 reverse strand)
gagggtaagtgttgtctttgatcgtacctgaatcccaccattaactcttccttgttggttgcttgggaaaatgttggagtggaataattttttttacatgaaatttggtttttttgttaaccgtaatgcaatacaatggtttacttagtatagtgcaaggaaggaaaccgtgataccacttgaatcaataccaaaagaaacaagaatgcaatacaactgttatggattgtagttacaagcttccaattatttgaagctcattttaaatttttattcttatatactttatgattcttctttcagccatgtaaagcgactacatatgctgtcaagagtcatggcattagatgttactatagattaatggtgggcactagaggatcttaatactgtctttttctttggccaattttagttgttgcacaacctgaagctgccaatagtgtggag

SEQ ID NO: 45864 - DNA, 774 bp, Manihot esculenta
  Intron number 3 from transcript cassava4.1_019301m (locus cassava4.1_019301m.g) derived from phytozome v7.0 (chr-ID scaffold07358; pos 11957 to 12730)
ccagatctatccgcaggaagctaactaagcaccaggtattactgtgctcctgaatctgtgtgattcatgattataatggatgggttctgggccttgaaataattgtttttaaaagtagattgttcaatggtcgactttaaagtactttgtatcagagggcacattgtgcatggattagttcattaattgctgacaattgattatatactttagggagaaccatgcatttggtatgtagactatttgacttgaaatagaagggttttccatatttcatgagcttgtgctacttgtttcataagcattgtttgttttcaagcttatgattggatatactcaatatactccttttctcccagtttgaaaatttccaactggtatacttattattaagaaatcttgcaatgcactaagaatgcttaggttttggaatctggatgcaatagggattttttttttgttttgttcccatgtggcttctctagttctagttttacttctaatggaatgagtattgattataagttttgctttacatgtgatattggttttttatggttagaacaattttgtgatgcattctagaaatgtccattccctctagtctttgtgcctttgcatgctttttactattttgttggggtccctgggtgacacattttctatgaaattttcttgttattttcttttcaccaatgactttccttcatatgtaagccttcaatctgtttttgtgcagcaatctttgaagacagaacgtgagaagaagagaga

SEQ ID NO: 45865 - DNA, 682 bp, Manihot esculenta
  Intron number 2 from transcript cassava4.1_014179m (locus cassava4.1_014179m.g) derived from phytozome v7.0 (chr-ID scaffold03741; pos 509764 to 510445 reverse strand)
ctattcaaattcaagcagcttttcgagcttatgtataattcatcatgtgtgcatatgaacattctaaagatgtatacttgcaccacttgcatctaatcgatgattatttttagctgcgtattggaagaattgaatgttaaaatttgagttatacatccatatatatatgtgtgtatgcgtgtgtttatattgatattgggtggctcaatgcattttaattgggacttattagtatcctgaacaggaatttaacacagtcaacaatggagctttactgcaattcacgttgaggattagaaggaagatgcttcataggaaaaaaaaaaaaaattcttttacctcaaactaaacttcatattacaattatgtcttaacattacctatccctttatgttaggtgttcttctggaaaaaaatgtttcattaaaatagagagaacacttttaacacttgagaattttagattcataatgagctacgtgaggaaattgataacaaggacacttcattgacttgtttaaattatttactcttcccagtaacaccagcattgtttatgaccattttgtttttttctcaataatgcagtcatggtggaattttatatcacctgtaaaaaataatgatttggttggatcatttttcaggcgcaaaaaacaaagcgacgtctgaaaggagcagt

SEQ ID NO: 45866 - DNA, 809 bp, Manihot esculenta
  Intron number 1 from transcript cassava4.1_019054m (locus cassava4.1_019054m.g) derived from phytozome v7.0 (chr-ID scaffold00847; pos 304347 to 305155)
gcagcgtttgggcccagagctccaacttccctcaggtctttctctacttcacttacttctctctccttttttctcctagcataaaactaacccaatcgttggatccatggaagtggagttgagattcggtgcttagatgtgatctagttcactcttttttcttcttgatttccccttttcgtaatttagtagtttggcttcttaattacctgatgggatatgcaggaattatattggtcaacttaactgtttttcccatttgaaccggcgtgtcctgattttgtaatgttgggcttcaagttggtgtctttacgatcggatttatgatttcgtgttttcttaaacttactttattttagggttttgaatgattaacatagccatgcaaccatgggaggtgataagagattggacgatctcatatggtttgttttatgattgtcagcgtactctagttgaattggttgatgcctgtgtttgatcattgggttagcttgattcctgtttaatatggtagtcttctatttgtcttccgtcaatttagctgagaatccccatctgtagtttgtttttttttttttttcttggggggggttggtgttgtgaatcaatccctatccctagttaattgagagaaccgcctttctgaaaaggaagaataactacggtcaaactatatcgctgcagatggacgcacctaatcacttactatgaatttatatatgttggacctatttttgataaattcatgatcatttattttattttgatgtttgcttcagttcaagcctgaagaaatcactggcatt

SEQ ID NO: 45867 - DNA, 1023 bp, Manihot esculenta
  Intron number 1 from transcript cassava4.1_008728m (locus cassava4.1_008728m.g) derived from phytozome v7.0 (chr-ID scaffold03079; pos 59656 to 60678 reverse strand)
tctcagtgtagtgataagcttgtaagtttttctgttgttttttgttcttaataacgtgtttcaaatttgtcttcgtttgggagttttgtgcaatgcacaattgctaaactgaaaatttaactatggaatttagattggagagatagatggagaaaaagagaactattccgattttgtctcttgattttactggttttctggtgtttctaacgtttgatttatttattgtaatgaatggatcaaaacgttggatttttttttatagttttctgttaaatttgatggcataatgcagcgtgcgtaactgtggatatactattgggtcaatgtggacaactgccaccattgcccgtttcataattgcttttacagtataggtgtagtttagtctttccccctgggtgttccttttcttgctctctctggattacaaatacaccctcatttgagattggtctattgtgtcacttaagagttgttcaccgaaattcaagcattaaagtctattgctatgatttatgtttgttgtgtacttgtaatttcaataattttttttttttaaattttaatggttgagcattagaatagataaaagaaaacatgctcctccccctgttctctctctctctctataagagttctctgacatcacatgcaagataaccatggaaaaaccatgtaagaagtagtatggaggaaaatgtcggagaagaagaccttcttcttcatccccatatcttccaactgttagtggaagaacttgagattctccactaggtgacacatagctcgccatactatatatatatatataatatatatatgtatataaccctcacttattaatttttttggacgttccattgttgtcgagtttagcatttgattattgtttttttgtttaattctttctttttttccgctccctgacgatgcctttgtgttttataatcaagtatattttgggaagatatccaattcacgtgctggctttattatttgttcagggttgattgacatttg

SEQ ID NO: 45868 - DNA, 829 bp, Manihot esculenta
  Intron number 1 from transcript cassava4.1_002964m (locus cassava4.1_002964m.g) derived from phytozome v7.0 (chr-ID scaffold02801; pos 44890 to 45718 reverse strand)
tgtaagtttcgaaatatcttctttttgtctgtagatcatttctgctaacatttttctttctgatttcttcagtttcctttaatggtttgtgaaaattgtgatttctgattttttaattaaccgaagatgattctgatatgtgattgagttaaatttgagtgttgtattttctgcgatctagcaaagtgtcattaggttggggttatacttgttttggttggctattttggaatttcaagttatggatagatgttctttactattggaaaatagctaatattgaaacgttacccatttctgaaatgaagatttatctgtgctgtctatactctcgggtgaagtggggattcttcttctgcttcttgtccttcttagagttttatctgtaacgttccattttcgatttaaatataaggtatagaaatgttaacaatattagtaaagaaaatgaaatccttgtgcatcaaacatgattacaagaaagttatgttctgtaatttgtgatccattttaacatcaaacacggctttgaatattttgataggtgttaatggccaattgagggacctgaattcatctttgaaaattttggttagcgttaattgtccatttcagttgttaggagtacttactgtcctttattttggagtaagctctggaagaatgcaactctggcttccctggttgtttttggaagaagttctgcgtgatgagaattttcttccatgtggttgcttcttgtattttgttctgaaggtttgtgttgatacagctaattaattgctattattttgtgtattctgcagttgactggcaatttgaaaccatc

SEQ ID NO: 45869 - DNA, 564 bp, Manihot esculenta
  Intron number 1 from transcript cassava4.1_011648m (locus cassava4.1_011648m.g) derived from phytozome v7.0 (chr-ID scaffold03750; pos 959257 to 959820)
atcgcgtttacttttgacgccacagcccccggaaggtaatttttctatgttttattgctattgctggaggcgcagtttgatgaaaaagtttggcctttttggtgaagctacagtaatgttagggtttgttctgtagtgctgtttatttcagaattttgaccccaaattgctgatgaagttgtttgttagcgctgattgctttgatttgataaactagttggagtgtaagtatttttctcagaagtatttaatgttatctgcttataggaacctccttttcccagttgcagggaagtcgatgtttaagaaaattggcagacggaagaagttttgaactagggttatttttttcttctctttatcttactcttaatctgtattgccctgatgtgcttgaattcttgtttatttcatagttaaactgaaggtttttctttttttacttaaatattgaccatgtacgtatgtaattttaattggcatggtgtatttatttatttgttctccttttttctgttttatgtggcagcattacaattggttttttcgctaaagaaggtgtaa

SEQ ID NO: 45870 - DNA, 779 bp, Manihot esculenta
  Intron number 1 from transcript cassava4.1_007409m (locus cassava4.1_007409m.g) derived from phytozome v7.0 (chr-ID scaffold08799; pos 512576 to 513354 reverse strand)
gccaaaccgccgagactgctactcagttcctccaggtaccaatattcctatgcaattagagatatgagtttatctgtgtaatttggctgttaaagtctgttgctcctctttcgttatgagagtgaatctgtgattggttattagcgtgtccatattttgatggcttgatgaggttaatagaatattattttttcgttctttttgttgggcattgataaaagtgtgttctttttgttgccaaggaagtattgggttctgggcgaatcgcattttcgtgtatttttaaattttagatgttctagggaattacgagacataacagaacgatctttttgacgatgggttttccagctggcttttatctagagcagcagtaaggacacaatgttgtttacccgagccttaaagattgcacttttaatgagctggtgtttgctgaagttactaagacatgtccaagattgagaagtcaggttgtctgcattgagcaatagtagtgataaaatatctattaccaatacttgacatttggttatcgttgatgttttaatgattcttcttttttaattatcattttatgtagatataattgaattatgcatatgggcttgcacctgtaaagcatctttttactactgctctaatatgatcttagtgggggattcttgagtatttgagtttttgccacatatttactatgttcttgaatgaaacttaacactggtaagttggaatgtaaaacaggccaccagctggaaacttgacgaagctcttcagtt

SEQ ID NO: 45871 - DNA, 818 bp, Manihot esculenta
  Intron number 1 from transcript cassava4.1_012623m (locus cassava4.1_012623m.g) derived from phytozome v7.0 (chr-ID scaffold03219; pos 165062 to 165879)
agtctgttccttcccatcttctcttttgcattgtttctgcagtttatgtactttgtggttttccgggatttcggaaaaaagttttaatcacgagaatctggctttttatttggactcttttgtttccttgtgtttcacatgtctctctttgtgttacagtgctggtttgactttattatatttcgtaagtttgttataggtttttgagtttttagcaagaaaactgtactttttaggtataaaattttcactttttattgtgtttcagttatatttttctaattaattttctgggttcaatttggtttccgattatcgcaaatagaaatgaaggatctgactgtctgcaatttttattactcaacaatggaaaaggaaaaaaaatataagaaaaatgtcttaaatttatatggctgagtttagttgaatgaatgtatgcctcttgtcaaatgttgatcttttattggagtaaagcaataactgaggaataagatttcagatctgttagctgttgttattgtattttgcaagcagttggtttagttggacaaaagagtttgttagacaaagtttggtttttctgaagtcccatggttttggataaaagctggatccactttatacatttgggttagtaacgttctttaattcaattttctgaatatgtgattcttgctatttgactgtggttgcaagttgaaagaaagtacagaaaggggggaaagtgaaaaggaccttaaccatttgttattctgcgtccgctgtgaaatgtaaaacttgtggtttgagtatctttctcctgttttaattgcctgcag

SEQ ID NO: 45872 - DNA, 649 bp, Manihot esculenta
  Intron number 1 from transcript cassava4.1_003345m (locus cassava4.1_002602m.g) derived from phytozome v7.0 (chr-ID scaffold04116; pos 129229 to 129877 reverse strand)
ctgattctgctgaagccgtttctcatcgattttgggtaagcgagtaattcacctatcttgtggagcttttcaattgatgttcttggtttatctgactttgcatatctttagcttgattgttaagattcttggtgttggtcactctttaaaacttctattgtcatccagccatagttacttgcctatacttatgaagaaattaaatttcttagtttattcataggtgacagtggaatggcattcaattggatggttatggatagttgttcttaacttaggttcaaaatttgaaagttagaatggtgggaattatttcacggaatagatattccataatctcaaattgtaatttttaagcatgtctagaatggatatttcacaaatttttgggatgtgaactacacaagtgttggcaaaaaaaaaaaaaaaactaacacaagtaaatgaagaacagctattccattttatgaattattggtatgaagtaattgaatgtagtataatgttcaaatgtatttctaattggatgttcttttgaatttttgtatactttttgcaaactctataaatatttggaattttgttgaaaaaattgcatgttacataaatgtactgttacattttcctctggtttcacctaatcaggtaa

SEQ ID NO: 45873 - DNA, 526 bp, Manihot esculenta
  Intron number 2 from transcript cassava4.1_012272m (locus cassava4.1_012272m.g) derived from phytozome v7.0 (chr-ID scaffold04043; pos 29350 to 29875)
ctcagcttggcaacaggtttctttctctttcccttccttcttcctctgttccaaagctgaattgattattctgcacttaacttttgtcatgacttgggttggtaaaattcctctttgcaccaacttaaagttataaaacgacatgaaaattgttatccccttctaaatttatgaaaataaaaaactttcagaatttgtttaatgcattaaaacagaattagccttatttatttcattatacacatgcttataatataagaaactagcaattcaaatcataatacgttttcctcctcaaaattattttgatgtgtcttaatctccaagctctggacatgcttctctaaaatgggacccttatagctagtggccataatacaagtaatccactcttcttttgaagtggtcccgagtgtgtgtcccctcatcatcaatttagtcatctaccattttcttcctttttttttttcctttattatataaattttgttaatgatggtggagaaattttcttgcttgttggcag

SEQ ID NO: 45874 - DNA, 566 bp, Manihot esculenta
  Intron number 1 from transcript cassava4.1_007222m (locus cassava4.1_007222m.g) derived from phytozome v7.0 (chr-ID scaffold04457; pos 385250 to 385815)
cttctttgctggatttgggtctcaaccccacccaggtttgagttcattcgattatttttcgtgtttggattactatattgaagatgctgtcgtcatgttttaccatattggtggtgtgtttttcttcagaatattgtaattataataaatatcgatattgtgtggggaaatttgagttgaaatgaagggttggctacaaggttacatcaacattagaacatataaagcaaacatttttatgcatacacatttaacatttgttgttcttattgaaggatggatggcggcttttctgaataattcatagaaatgggatattctgataaattgatagagcctcatattgttttgatcctgcaatttgaattgataagagtattggctccatgttggtctgtctataaactctcatttctcggggttggtattctaaataatattgcaactcaagcattttgctaggcattcttcaagtgagctgcagcaccatgtatgtatatcaatgctttaagtgcagtaacaatgatgtccattaatggtgatccaggaaggaaagccagttgcta

SEQ ID NO: 45875 - DNA, 677 bp, Manihot esculenta
  Intron number 2 from transcript cassava4.1_003192m (locus cassava4.1_002478m.g) derived from phytozome v7.0 (chr-ID scaffold04796; pos 139220 to 139896 reverse strand)
atctgcattcttttgatactgagctgttgtccgaggtaataaatagtaatttccaattcttttatcttccctagtaaaatactcgcatagttgatgatagttttgttatgacgcgtttggaggttagattaagttggaagaattttggcttttgtttgggatcttaattgagcttataattctgatttgattttgtaaaaacgtctcaaaagaaaatgcatgttaagcagacgaagtcattgtaaggattgagatcactaattctctatgctgttgcaataggacatacattttcatctaatatctttgcaaagggcaattaagcttaatgaatttatgcatgaatgggcaattttgaaaaccttttaatatgtgctttttgagtgtcagaactactgaggtttttgttggtgtaaatttattagttgctcacaattaattgtagatagttaaatggggttccgtcttaatgttgtgcagcaatgagatatttttactccatagcctgtaagttttagtgagattcaatatttcaaatcaccttggcaatgaagaattagaaagaacctaatgaaaggataatatattaaatcttttagcttctgtttttgtattgatatttatcatgtacgtccctgataggtgtcaattcccagcctatacgagggatctttgca

SEQ ID NO: 45876 - DNA, 796 bp, Manihot esculenta
  Intron number 1 from transcript cassava4.1_029881m (locus cassava4.1_029881m.g) derived from phytozome v7.0 (chr-ID scaffold08485; pos 65394 to 66189)
tgccagtactgctctgagcctttgaggttccatcttcactctctaatatttcctgatttttttatttttattttctaaatattacagcttcgtcttcttgtctctcctgggctgctacttgttcaaatatttccctgattatgtaaactggacatagatctatgatccgtttcctgaaggtctgatgtgaatatctgaattttgaattgaccaacttgagtagcttgactttgtgtttttgcatgtttctgacaaactagggtttcccagtcaagggttctctcttcttcacacagctttgccttaattttgccttattttgttaattattttatttccaattttagctcgagttctctacttacagatccatattgttcattttgactagctaataaacttgtaatctatggcttcatcacgacttggtctctgatatacattaatcataaagcaaactttaatcttaaaaattactgcctttgcagaaatatttatatgcagaaactaatttttagaataattttaagtaccagttcttatatatctctcgtacacatgaaggaaaatcatgcaacttttgggtttcaatatatatagttttcataaattgggtttttattcaaatattatataattattgagaaaaaaattaattaaatagtgttggcctattgggtaattcatgtaataatgtcatagatcatatgattaagatatttttcacatatatgcatgctccaattttccaagaaaatgtatattaaacaaagattaatatatgatcttcatcagg

SEQ ID NO: 45877 - DNA, 494 bp, Manihot esculenta
  Intron number 2 from transcript cassava4.1_033652m (locus cassava4.1_033652m.g) derived from phytozome v7.0 (chr-ID scaffold01945; pos 241917 to 242410)
accattgttaagttgcacacagctttgggtaacaggtatccaaaaattttcaaccttttctgtttatagttacaaaccctttctgttcatcccactacaactagcatgattttgacttgaaaacctaaaagcttcagtcagctgatattggttgcatagtaacaagaagataaattttgattcgctgtaggattatccacataaaatcaccaccattggttgtagcatataattttcaagaatatgacaacaatcggaaaccaagcactatataaaagctacaacatttctttcttggatattttataatttgatttctagtaacttattacaaaacattacaattctatccaacttctttgcaagaacatgaaactaacttgctccttcttctctgaaatcaaaaataaaatgaaaaatcagttatctgtaacattatttatgaatcatcagcagcgtttacacagactacaatggtatttattctgtcacag

SEQ ID NO: 45878 - DNA, 1068 bp, Manihot esculenta
  Intron number 1 from transcript cassava4.1_025298m (locus cassava4.1_025298m.g) derived from phytozome v7.0 (chr-ID scaffold11584; pos 258925 to 259992)
ttgaccctctctgcctccccgcgtcgctcttctaggtattatgttttccttttggattttttttttcccttggtttcggcgttctgggttgggggacaagacgaaggagtggttttcgaatgtcgtgaaaagaggaaaaaggaaagaaaacgttgatacttaggtcttgtttggttagcaacatcaagttaccattttgtttatttggttggccattttctcttgacttctggatgttagagtgacttgttagacttcacaggaaattaacccatttgaaccaaacaagactttagtaggtattattaggattttgtcgtggttttcgtttgtttggatgtgtagaggagggaaaaggatagaggttttaacttccttctgtttatttatttttttggagagccttattacttctgtttccttcttgtgaatcccccaagagttctatttatacaagtttgattgccaggaagtcggcattcagtgtagaaaaggaacttctaagattatggttgttcaattatttcctgtcctcctattatagtatgaagcaaaatgatgtccttgattagtaatgtaaccatagaaatgagcaaaactgtgaaaatttgaatcttagctggacagaaagaaaaccaaacaacatgtggttatcaattctttagtcccacaaaaattgtaaactccgaaattcgtcccagcaagttcagtagttgaattaggctttctgggttttacacatatttgacttttctctatcttattacattctttaattatgcctgtacttcctcagtccctttgagcaactaagtttggagagaaatttctttattttcatttgttacggaaatgaataactcaactgagcagaaaaagggggaaaaaaaaatcaatcgtggagttaaaatatcagaacttcttcccagcttttcttgcctctcaagtatagatatgcagttctgatgcttcggacattaccatgcatttgtaaatttgcagtaaacttgtttgggtatcttatggtttttaggttgaagactctgaatccagttaactattcagaaa

SEQ ID NO: 45879 - DNA, 752 bp, Manihot esculenta
  Intron number 4 from transcript cassava4.1_016196m (locus cassava4.1_016196m.g) derived from phytozome v7.0 (chr-ID scaffold08315; pos 42802 to 43553 reverse strand)
cttacaggtgagggtttttccccacacttgtgtaattttctttttaaatgatcaaaaatgtgtttgggaggaaatatttcctaaatgacaaagtcagtatccattccaatggtaaccaatgcttgctaagagtaattattaggcgcatccaagtatatattcttagctaatgaacaaatgacatgaaaaatcatgatagaactatattaattaaaatcatggtagttagcatattaactaataaaatatctatcaaaccattatttttccatctgtctactgtatttcgtttcctgcccatcatggtaaaataaaagaaatattaacaggtaaaagaacatacttttttttcttcttactacttatgtttaatgtttacacttggaatttgttctgctcaattaaatcaaacctgaacgaaaaaaaattatggggctgtaaaaataaaaaaaataataataaagaatactttttaaaaaatgcacttcttactttttttttaaaaaaaatagagagagaaatcaaccttcacaatcttaaagagatggagagactagagagtggttaattgggatggcctcagccaaccgttagctgcatggggttacggtgaggttatagacatatttcgcaaaaagtccagcaggttgatttgtagcattgaatcattgattgcgctctttgttatgactatttcttttagatttcatcctagataggatccctcgtttaattttcgcaggagaagtttg

SEQ ID NO: 45880 - DNA, 687 bp, Manihot esculenta
  Intron number 1 from transcript cassava4.1_011165m (locus cassava4.1_011165m.g) derived from phytozome v7.0 (chr-ID scaffold07478; pos 263982 to 264668)
cctcatcatcagtttccttctctcccttcttccaggttcgtttttcttcttcttcctttacgcactcgttcacctaaattgtctgggttatttggtcttctacgactttgttttagttaaatgccttctgggttttgcttttggatagttatcggtatgcatgtttcatgtttgatttctattcgtatttgagacttgttggttattggatgtgttttttttttcgggtgttatcttccaggattgaataagttgttgggtcgaatcaaaaattgcaattttttaaagtattacttggcaatagattttgtactgatttaggtgaaattaggcaggtatcgtcatgtcaaaaaaaaattagccaagtttctctaattcaagtatgcagattaatttgtgaaatgttatgcattgagtagtgagtctggacttgttgctttaaattcagaatatacaaggtggtgtataattgttctaggatgctactacctaaattcttgactgacattctaagggaaagatgagaaacagcaatcaggtaatgacatcatgtgctatcatgatttattgttagacacacacacttgtgatcgtaacaggttgtgaattcagtttgaggggagcattttgtgacttgtgttttgttgggctttttttatatttacatagggaggagttggtggagga

SEQ ID NO: 45881 - DNA, 437 bp, Manihot esculenta
  Intron number 1 from transcript cassava4.1_017001m (locus cassava4.1_017001m.g) derived from phytozome v7.0 (chr-ID scaffold02658; pos 321064 to 321500)
ctcttgtcaagcacattaaagctcctgttcatcttgtaagcttcatcttcttttcgatctatacatcaacttgatgttttctgtttttgttgtttcgattttttacatcccggaggattttagtgaaactttttttgttcttttgaatctgatgaatccggatcggttttggttgattttgctccatctatgatattttagcaatcatttttcttacttccggtcatttttcttgcaatttttttacaaccaaagaacgactactccccgcgccccccctccgaaaaaaaaaaaataccggcgactgtttttccgttgcatgttggaggaggcataaggacttgcaatttagttcctagtttgattctttgtttttgggtttttgttaattgtttggatcaggtgtggtcactggtgaggcgattcgatcagccaca

SEQ ID NO: 45882 - DNA, 358 bp, Manihot esculenta
  Intron number 1 from transcript cassava4.1_008656m (locus cassava4.1_008656m.g) derived from phytozome v7.0 (chr-ID scaffold11069; pos 324073 to 324430 reverse strand)
catactcttctttggccttaatatcgttaaaggaggtaagtataacatgggcctatatttttcttcttgctgctctgtgttggtctctcgaacaacagtacaggaaattaataaagaaaatttatagctttctcaattttgttgttgctattttttttttcttctcttctgcttccaattttaaatggtaaaagttaggctttctgccttttcttcacactttcactaaccatatttgtgaagacctggtgggtttggtgaaataatttttgtttcttaaatgaatttgtggataaagctgtgggattgatgtcttactttgtttgggatttttgatattgtgaagatttatctacgg

SEQ ID NO: 45883 - DNA, 580 bp, Manihot esculenta
  Intron number 1 from transcript cassava4.1_019122m (locus cassava4.1_018830m.g) derived from phytozome v7.0 (chr-ID scaffold02993; pos 22830 to 23409 reverse strand)
ctcaaggagaagcttcagagttgaggccagtggaggcaagatcaagactgataagccatatggttgtttctcaaatctctacaaaatccatatgatttgcttgtttttttcaatttattatttagtgtatatattataaaaattttaataacttatttttgaaatatatatttatatatttttaatattttaaaattttattggttatttattttgtttatttttgttattaaatattttattatttaatttttataatttaaaaaattaattaatttatttattatttttataagagatttattaattaaaattttcatattaaaaatatttttaaattttttcataatatttaatcattaaaattaataacatgattaattaatattttttttagataataaattatgtaatatattttttaaaatcaaaaaaataattaataaatttttcctgatataaaaattaaataatgatttttttcatttcttttcttgtttttttttctctcttgcttttgcattttcttcaaaggagagttttaattttagggttttgaaaattttttctgtaggaatca

SEQ ID NO: 45884 - DNA, 569 bp, Manihot esculenta
  Intron number 2 from transcript cassava4.1_024964m (locus cassava4.1_024964m.g) derived from phytozome v7.0 (chr-ID scaffold03252; pos 332261 to 332829 reverse strand)
aaaatctcacttcatgtttgaaaagaaaatcatcaaacacaattttgtacattatacatagttcttcttttactcaatagtgcctgctactaatgatcatttccagagccagggtagttcatagatcatacaggattggaaaagatactgtcttggactacatacaaatagataaaaatggaaactttaaccattcttgtagtagaacaggagaatctaaactaactcaggaaaatcacgcgagtctgaaattttaaagtttaaactgaagtaaaataatgaaaaaaacacaataaaagagggattcgtaattaaaaatacaaaagttacctcataaaattcctaagggttaaattcttctagttattagatttttgaattagatatttatcttttgattattcattgaaactgaaacaaaggaatgtgaaagaatagcaaaaaagagagccatgattaagattaaatgagatgaatgatgagaatctatgagttttaggtgccacttggcaaataagataaacacttggcaatattttgtgaacccatttctaagctcagctttatag

SEQ ID NO: 45885 - DNA, 563 bp, Manihot esculenta
  Intron number 1 from transcript cassava4.1_031173m (locus cassava4.1_031173m.g) derived from phytozome v7.0 (chr-ID scaffold05744; pos 1894 to 2456 reverse strand)
ggtaagcaacaacatcaaaagctcatgttttccccttctacttttaagctgttttgctgattgtttggcgcattctatcctgtcaaagctttctttttcgttttacccactttataagtttaatccacaaaagttgtagctctttttgtgctattaaggattaagcttagatcaatgttcccaatgagggttacaacttgcattcatcctgattggcttgatactccggtgctcaactgaaataagacttgatcataatcaagttgtacatgtacagattgctgtattcttactttgctataattattttaatttaagatgtatggattcatataattttttataattcttcggttgaatatatttatttcatacaaatgtatccactgcaattataccctcaattaaattttcctctgaatgtttattacatcaaatgcattgcttaggttgagattctagttgagtagttactttccatctgtaactttataacagaagatttgataccatagctaatatgaacagggtggcattttccttcttcctggctgttgtgatcc

SEQ ID NO: 45886 - DNA, 953 bp, Manihot esculenta
  Intron number 1 from transcript cassava4.1_033203m (locus cassava4.1_033203m.g) derived from phytozome v7.0 (chr-ID scaffold11222; pos 82084 to 83036)
cataaggggtataaaaaactagcctaaaccccaacaacaaccacaaaactcatcaagaaagcatacattcatcaaaaacccaactcaaagcctataaccttagatctagccatatcatgcaattttaatccttaacccttttttaaaacttgcttaaacataggaaaagacaaggatctacacttacctcttgacgatctaaggtagatgtgacccaaacttggagttgaggagaaatggtctcccaaactttaaaatctttgatccaagctcgaaacttcaaaaacaagcgaagactcatgaaaatttgaaggaaaaacataaaatcatcaaaggaagggcaagaactcacttttgctcgaaaatggagagagaaactcccccattttcagaccggaggcctcttataggtggctggccagaccaccttcgggggccgaaagagagctcccgcggcagcaccatgttcggcggccgaacctgggcttatccctcaaaaacatttttttttctttcattttaaaacttaactaaaaaccaatcaataaaatcatgaaaaacattttgtaaaaacatattttacccttctaagaggttttggtatccgagattctggattccaacggggattccattggaaggttggaatttcgacaccgaagtctagccgggtattacaccctatttcacaaaaaccccgataacagtggatctatattaacttctgctactctcattagatgtcgtataagtagaaattctgtagcagataatgtaaaggtggattttcttcttttaccacattttctactctcgatcagtgatacttccatttgtgctctatgcaatccaatactctgagtttatatttattgttttattcatttgattgtcaaatcttggtatttgatttccattataatattgttgccttaaagatccagtcagaatcg

SEQ ID NO: 45887 - DNA, 363 bp, Manihot esculenta
  Intron number 1 from transcript cassava4.1_031936m (locus cassava4.1_031936m.g) derived from phytozome v7.0 (chr-ID scaffold01945; pos 608141 to 608503 reverse strand)
tttcatcttggtgagtcacagaccaaaactctatttttctttggttttatcttcattctcgacaatcgcaccaaacacctccaataaaagtagcagagagattttgttatggttaatttatttcgattggctctcttaagcatccacaggttttttgtttgtgccattggctttacgccgtatatgctgattagcttagaagttggtagtgtttttggggaattaatatgtatttgatttatgaagatttacggatcgtttatttgcatatggcattattgttgcttgatatttgcagaatttcgcaattcccttttaatgatctgcacctggccttttcagattgcattggttcagctttta

SEQ ID NO: 45888 - DNA, 434 bp, Manihot esculenta
  Intron number 1 from transcript cassava4.1_026812m (locus cassava4.1_026812m.g) derived from phytozome v7.0 (chr-ID scaffold04450; pos 97273 to 97706 reverse strand)
agccagatagacttgaccacgaagacgttaaagaggtagttttaacttcatctactttcatataacctcatagttatttggtgcttcttccggttcatattgttttttgttatatcaattaaattgcgatttgaaaataatttggcatccatgatttagctatatggaacttatgcttcgcgagtagcgagattgtttgttacatttcaatttcagttttgattatgagaaaaatgtgaatttttcaagcccttgttgaagtgattgaacagtgattgttaactgggaagtgggtggcacttaatttaattcagtacatgcagtttacttattttatctcattagttactttgtatatattgataattgaatgggattactgaaatgggttagttgtaggaagtcaacgaaggccataaattcccaggaaaaga

SEQ ID NO: 45889 - DNA, 741 bp, Manihot esculenta
  Intron number 2 from transcript cassava4.1_020117m (locus cassava4.1_020118m.g) derived from phytozome v7.0 (chr-ID scaffold02196; pos 388155 to 388895)
tgcctgtgctttccctgctgctcgcaagaggaagtgtatgtatatgaactccttggttactgcttattttctattctttaattactgtatgcaatacacaaacctgctttttgacatgtataattgggtaggaagtgatgtttttgtcaagctgatgcccgtccctatatgcctatgttatcatgtagtgtgttcaattattaatgatttttgttgagtatgtgaatttgtttgttctggatttgttgttagcatgtcattatgtgactagcaattatgtgactagcaattatgtgactagcaaactttgcatctataaggaaactagtcgttcaatttgtgcctatgtcccctcctctatggtcatgtttatgaatgaagatatcactaatttgatatgatagtcaattttgtatccaaagattgatacttttgcatgcttgtttatggctcatacgatatgatatggctctgtgtctttgtatgtgaaaaattatatcatcttctatgtacatttggatttgtaggcgatacaagccctgtctcaactccattttttgtaggcataggtgtatgtagaagtttgtcaaatgtgtagccaaagccattggccaatgtcttgattggctttaagtgtgcagtatacttggtgtgtattttactttgcttgtaacaagattacatatttttttgatgtggttttcagataattggagtgtgaaggccattagaagaaagaca

SEQ ID NO: 45890 - DNA, 775 bp, Manihot esculenta
  Intron number 1 from transcript cassava4.1_002425m (locus cassava4.1_002425m.g) derived from phytozome v7.0 (chr-ID scaffold00752; pos 18106 to 18880 reverse strand)
ggacaggaacgggttcgacctggtaatttctctctttctttatgtataatgtttgtatggagactaagcattagatggaagattctgcaattccaaggataaaattctagtgcatttaaagctggtttatttttgcaaaggatttttcattaaattgacagtagcaatcatttaccttagggaattcacctgttggaggagtaattaagaatatgatccatgtctgctcactctaatgtgtcaaaggcttataaacactctgttgtgcttgctgagtgtagttgcctagtcatggcaagcgagctttctgctaaccagaaatattgttctagtgcttttaactgcaaagcgcatatccttgtaaagtatatgtttaacagtaggtgtttggacccaaaattgttggatgaatagcaatacccatggttgaaggtccatttatgtaatagcagatagttaggatctagtttctgatgcaaaaaaattgatgtgtttgactattcatacatgaatatttacgtaattgaatcataaagcctcttttcttagtttgtgttttcaaagcggactgttgctagctaaatttgtgcattcaacttgtggtgaagttcaagtaaattaatatattcaaaatgttgtcgtagttttaatttgttggcatggatacatgttctctaactgttctatatctattacatggcgaattcatttcttataccaaaatgctgtatcatgcttaggaagtccgaggttgctctctctacaaatagttgga

SEQ ID NO: 45891 - DNA, 863 bp, Manihot esculenta
  Intron number 2 from transcript cassava4.1_011651m (locus cassava4.1_011651m.g) derived from phytozome v7.0 (chr-ID scaffold04963; pos 1935 to 2797)
gggagtgccgtttctttttgagaaggtaatttctctccataacattctgcttttctgcagattaattttgaaattccgtgcttagtaattgtcaaagctcttaactattattgtattcgtgcatttatttgcatgaaggaagccacaatttgatatgtcatgttttaatttattgcaatgaagaaaatgacacgtaagtttgcacttgtcaaacttaatttggcaggaattgatgggtgtctttaaatgtgaatgaaatatgactgagtaacttcttcctcgatccaattttatctataatttttcaaaaatgtttttgtccaaaattatccatttcaatgagcattattattaaaattatttaattttacccttatgtctaatgaacaaaataactaattatacagtttcctaaaacttttatcattatttctctttctctctctctttattatcccagttctaatggtaggttaatggagaaaggctttttaatattagagtagttaggtgaaatagatgataaattagtcaaattaaggagaattttgtgttaatttaggttatttaattgtttccttaattactgtacaaaaaccttaggcaaaagatagaagtggatggaggagggagtatacactttgtaacttttcttggaattttttattgctgttagttcttctgctgctttatggcaagcatgctgtgtctggaaaatttaatgttaaattgcttaagctcagacataaaaacacaaaaacgcatgcatgcatccacattttaagatgagagagctctaaatctaatattagtttattcataccaaagtctgttcaatctcattgtaggttctcttgccaatc

SEQ ID NO: 45892 - DNA, 410 bp, Manihot esculenta
  Intron number 1 from transcript cassava4.1_032341m (locus cassava4.1_032341m.g) derived from phytozome v7.0 (chr-ID scaffold04584; pos 28894 to 29303)
ggagccctgggatttgcctggttcgtcttttactttcaccactctagatagaaaaaaggatagcagaaaaaccctttttatgtaatttatgtatatttttcctgctaattttctttcttgttttttgtttaatcaaaagaaaatgataaataatcagggaacatttctgaatctttgatcaattttctttcctttattccttatgaataatttccctttttttttcttcttttgtacatttgtcagttttcttaatcagcaagattcctctaattttgactaattattcctatgatcttttactaatgttgaagtttagggtttatttagtttattagtataatttataagtggatgatttgctcaaatttctgcaattttgtggtcagggttatctgtcattaagacgg

SEQ ID NO: 45893 - DNA, 1037 bp, Manihot esculenta
  Intron number 1 from transcript cassava4.1_010704m (locus cassava4.1_010704m.g) derived from phytozome v7.0 (chr-ID scaffold09320; pos 66463 to 67499 reverse strand)
tcgtgttcctcaaaccagagcaggtaaatttatcttttactacttgattccaattcctattcataactgaattattatctctgcttgttaatttatgtaacagataaacaatagcaatagcttgcatacatatggtccttggaaagtgatttccaataaccagataattacattcttctttttttttttttttttaaaaaaaacttgggaactaccgagaactgatatggttttatgattatttttttgtgtgttttttcgacaggagaatgaaactttgttgtttcgcaagatcagtttgtacggtgacaagatttgtttcacctgtggtgcaaggcctatgggataaaacccagaaagccttgccttgccacctgaactccatgtcaacccaaaatctaattaaaacatatagttttatgaaattaaacgaagaataagaatgggaaaatatttgacgcaaaaaaaaaaaaaaatgaaatgagggtcctgatgtatttgatgagagagaaaaatccttgtgcctctaggatcgtcgggcctagagattccagccactggactcttagacatttggaactagtaatctgattaaaagaaacctacattagctttataattaattagatattcttattcattattcttgacagaagagaacataaacggatcagtatttttcctttttaaagctcttggtttttagcttcaatgtcgtcggtttttttttgtactttttttgaattttattccgtcctcttttgaagagttgatttttttctactgatgtgctaacattcacagctgttttcttttttattttttgactatttattttttaaaaaaaattctcaattctatttcattgttcttcatgccgaatttaagggttttccaagctttgttctagtctattatcatcaattattagctaacaaatcatagacgccgtgatagagctgtgttttacccaaacaaattttccttttcttgttattataggtgttgaaagcaattggaggactaatcccattccc

SEQ ID NO: 45894 - DNA, 465 bp, Manihot esculenta
  Intron number 1 from transcript cassava4.1_010514m (locus cassava4.1_010514m.g) derived from phytozome v7.0 (chr-ID scaffold09705; pos 120422 to 120886 reverse strand)
aagttgttgagactgctgctaagaccggtgctgaggttgggttttatggttctgttctttgaattatgagataaagaaataaaaccctgatgatattctttttgattctttattctttctgcaattttcatttgtttgtttcaaattttctaaagcataaagtttaggttaaaaataaaaacaatgattatattcatttggatttgttcatcaagattaaattgtgtagccatctttcttcctataaatggagcatttcaactcccagtaaggatggagcctaacattcatttgatgttataaatattcttacactctcttctaagattcatgtgatgttttgatgtcttgataacctctttttattattattattattttttttaaaatttagaatgccatatttctaacttttcaatgcctccttgtggttaccaaagcattttcttctctatccaggtggtg

SEQ ID NO: 45895 - DNA, 872 bp, Manihot esculenta
  Intron number 1 from transcript cassava4.1_017133m (locus cassava4.1_017133m.g) derived from phytozome v7.0 (chr-ID scaffold04457; pos 535394 to 536265)
aggtaagctatttcttcttctcgtagttttgcttcgattataagaacgaaccctctgatactattgatttgtgtttggggcacctttttccttttttttggtcgtcttgaagctttaaatgaatggtttcgatttagatctgtttcttccaatttttgtttctgtttgctttctgcaatttatgtatgtatctgtgctttgtattttttttttttttttggtttctattgagattccatttctatttttgttcgtattgttttgagctgctttttattctcttcattggtgtgtgctttcgaggtttgaaggtataattcttaatgttctaggtggttttgttagggataatgattttgcccatttatttcatgtaggagaggaaaataacctattatttgtatatgcttgtgtgttatggcaaagtgctgatttttccccctgggtctttctctctgttcattgctttctttctgcaccgtcccttcttctctctccactggggtggtagtaatttggtgtgttgtagtaattccgtgccgtgtgaatgacttttggaggcggtgtgcttttgtgctatgctatttacagtttcgtggatgagattaacctgttttagttcagatcttaacacgtggcttgatggtgtttcgttccttggaaaaaaaactatatttaatgttgtgattgagataatggaagtaatggaaggatgttttgtggatggaataaagtaaatgtgcttatttgagatttgtacttgctgattttattatcggtttggataatgttacctctgattttgcttagcttgacagaagcttttatctttttcagtcgtcatcccgaggtgaagtgggcccagaggttgg

SEQ ID NO: 45896 - DNA, 688 bp, Manihot esculenta
  Intron number 1 from transcript cassava4.1_007483m (locus cassava4.1_007483m.g) derived from phytozome v7.0 (chr-ID scaffold03980; pos 45346 to 46033)
gccccttccttgctcgctgaggttttgttttattttcttttggttcagtaaaattctctcttattctgttattttttttcaatttctgacttgtattttctttttttattcttcattttcgttctcatggtatgctgctcttgttttgcatttgattgtaagtcaacgattttagtagcaattttcttgttgttctttgttgttttgggtagtgatttcaatgtgatttactgattttcttctttttttttttcctaattggatttgtagtatcagtatgctttctgtgttttttttttctctgaaaaccagcattgctcttgatgctgtttactaattgttttaacattgagagagccaataaactgaagtttgtttttaaaattttttttatttcatttcctagggttttgtttaattgggttcatcaccccttccactaaatttctttatttttcagttttggtggttttatgactgaaccaacggatgcacacccctggttagtctggctcatctaccgatccatgcacacatgctattggagttaacagtcgtttaatgtttaatttgtatgcttaaagacattttcttgctgctctagttcttgaagtttaccttgcttatctaacatttgcattttaaaaatttaggtaatttcacaactgcacagacaggaattgtcaat

SEQ ID NO: 45897 - DNA, 240 bp, Manihot esculenta
  Intron number 1 from transcript cassava4.1_030510m (locus cassava4.1_030510m.g) derived from phytozome v7.0 (chr-ID scaffold08124; pos 25181 to 25420)
gtgctgttgttagaagaggcattggagggtaactctcttctgttttcaaatctttcttcattatgcttgtttatgttccttgctttataacttatttcttggtattaatatttttgtttttcttgtttctttgattatgttttggttttgaatttgtgggtgctgattcttttctgggttctcttttgttggacaattgattttttcaggagtgagctgaagttcttggatccttttctc

SEQ ID NO: 45898 - DNA, 308 bp, Manihot esculenta
  Intron number 3 from transcript cassava4.1_033544m (locus cassava4.1_033544m.g) derived from phytozome v7.0 (chr-ID scaffold02610; pos 164949 to 165256 reverse strand)
gagatccaggtgataacttatgtttttacactgtgtgtgttttttgcaataattaactgtaacgttctctttaaaatgttctttttttccctctgtgttggatccgaaagtgtcaattttatagtgctatgaaattatttgttttgcgttcattttgtccagtttgtggttctgtgtcctttattcttctcttttattcctatatagtaacaccaccggtgatttatccatcatttctggtatttgaattcagctgcttttattgttggacagtcaagtcaacaatactattgtgcagtcactattgg

SEQ ID NO: 45899 - DNA, 1000 bp, Manihot esculenta
  Intron number 1 from transcript cassava4.1_014884m (locus cassava4.1_014884m.g) derived from phytozome v7.0 (chr-ID scaffold08314; pos 90291 to 91290)
ccggagaattgccaaccataaatatactcagcgaggtatgtcttagatagcattaggtcaaactgttttttttattcataattaggctgcaatagtgcatattgagtcacagaatggattttttaggtctcggagtttgaacttcacactaacagccactgaatcaatgttcttgaacctcactcattgtttttcacctggctagtacaccccatctcgtccaaaacccatatcttctgctgctacaattcatgaactgattcaacattttgaaactgagtaatgtcttcaatgtatatatgtagatatgaaaaacagaaacattgttcacaacattgtatatggagttaaccagcagtttttatcagcaagctatccatgcttgacaagtatatattatataaacttcagtgctgtgtctgttgctgtttttatggttactataatccatatgatacttgttctagacactctcatccgtttatattagtactgtcaaaagcttgcatagctaccaggaatgcatgttcatgatgtgggaacttgtcccacatctaatgtaccgaaatttgagtttgtatataatataaatggcaaaaactaatgaataacttggattaattattttgagccaagtgaaaaatgagtccacaagttatttcgctcaatttgagctaggctgctacacgcatattaacaaaaaggcaaagtctaaaaaatccattctctatcaatacatgtgtaagaccattagtttgcacttgtatgtgcgtccttaagattcctctctttttttttcttttaatatatctgaagatcttaaagttctttgtttgtcatgatgctggcaaaatagtaatacagcatgattcattctcccagttctcttaatcctttttattctctccatgtttatgatcatacttccacatttgggtttactaacattcttcaacgacatgattgcaggaagagaaggataagaaaatccaggatctat

SEQ ID NO: 45900 - DNA, 854 bp, Manihot esculenta
  Intron number 1 from transcript cassava4.1_029193m (locus cassava4.1_029193m.g) derived from phytozome v7.0 (chr-ID scaffold00325; pos 248887 to 249740 reverse strand)
acctgtttgagggcggagggagggtacggtaaggagcacgtgccgtaccagcgatcggaaaatgatttgaagggatgaaggtgccgaagcggcagtgcagttgttcctggttccgccactgattaaccaccgccaccacttcgatagtgattttgactgccaccccaattctgacctctacctaaagctataacatttcctaatttttaaaattctaaagatattttaatatttttttaaaattaaaaattacctaattaattttttgatagcacaacgtataaataataaaattttcaaattaaaactattaacaactatgctaaacagagagggcaagggttctaaaaagccaatatcaccttgtaattttattaagtgtaaataaaaatagaaaatgatgaaaaaatctctaggggcagtgaaaacacccagcaaaagcaaatgagaaaacatagaaaatgagcaagaaatcacacggctaccaacagaaacgccaacatgcagatgaaagcacacactaacttcaacatatacattgattatccacaaaactattacatataaaattaataaactataccttgttaatggggtttcaaccccaaataggaagtaaagacaaaagtaatttttagtcttgtttatattcaaagctataatttaaaattgtgaaatatggtcccatttcttcctttaaatatccctattatgaaacgttagtatgcaattttataagaaaactttcttctaaattctccaagctcagcggagtgaagtctcataattcatggagacggttccatttcttttgttgatctgtctgttaataggacaatacgtttgtgatagag

SEQ ID NO: 45901 - DNA, 616 bp, Manihot esculenta
  Intron number 2 from transcript cassava4.1_014076m (locus cassava4.1_012898m.g) derived from phytozome v7.0 (chr-ID scaffold03219; pos 34258 to 34873 reverse strand)
agtttgcacaagtggacaaagagaaatttgaggtgaattccatgaatttttgtttctttgtttggcactcagcaggctgttcttcaatgcttagaatgaaactcgtttttttttttggtagaaactgcttcttggagatgatttctataggataagattgccatctaatgttttgagcccccctggaaggaattacgttgtctcatctgtgaaagccgtaagttgcttctcaattcaaattattccatcttcaaaagcttttgttatgttctgacagatttggggagcttcaccattaaggccagctaaatgaatcctcttcctcaataaatgtgttctgtaaatccaaaatttattgaaaatgcttacagaacaaatccttggcatctctagtatcgtaactaacaaattgaaactttcattcttaatggggtttattttggagaattgggagtatgggcgttcaccacaaaatttgcctggatatatgttactgaacttgtactgtgcataatctagttaatgcgtctaagtgtcttattttttggaactgttgccgttgatttggttttcagtttcagacagtagtaatcatccttgttctttctctgcagag

SEQ ID NO: 45902 - DNA, 918 bp, Manihot esculenta
  Intron number 1 from transcript cassava4.1_019286m (locus cassava4.1_019286m.g) derived from phytozome v7.0 (chr-ID scaffold10469; pos 155028 to 155945 reverse strand)
ccgtcagcttgcatacgccacaaactcctgttgaggtcatttcatccaaccactatttcggtcttattatttgattatattattattattttggtttagctttgtgtataacactttgcatcttgttcttcttcttcttcttcttcttccttttaatttatttttttaatgtgtaaagcacatttaaatccttaattttagcttttttaatgttttataatttttgagcataattgtggttacgtgattggatttgtgtgttttctttcaggagttggaggaaaatgaaatagaaaattggcattttcaattatatttaagattaggatttttattctgaagaggaagaaaaatggtttgtattttattcatccaaaactaatcagagttggaactgtatgcgagtccctggttttgctgctcagagtgaatcctttcatttttaatcatctcagtactttatttcgttgatatggaactgaattagattcctgtttacaggttttcaatacattttagatattttcttcttcaatttgattttatggatatcaattatattggaattagttttttgcatcatgtgcaaattccattatgattcaacattgacaaattggcattaagataaatacacgtgtatgaatattgtacaggattacagaagaaccagcaaacactttgtttaattattaatgatcctagtgtgtgttttgagaggaagtatcacttaagatcagagacatggctgcaatgcacatgtatgattatggtgtattgctttgtgtaggatttctattctctgcgatgtttttacagttgcttatgtatgctggcattgaataaacaagagagcacttagaccaatttaactctgtgaggttcactgagtgtattttatgtaccatgctgcaggaa

SEQ ID NO: 45903 - DNA, 565 bp, Manihot esculenta
  Intron number 2 from transcript cassava4.1_005360m (locus cassava4.1_005360m.g) derived from phytozome v7.0 (chr-ID scaffold02903; pos 3129 to 3693)
actagctacaagaaaggtaaatttactccttaccaaatttttgtgaatctatggatgaaatgttgttaatattcatttaaattttttttatatttttttttgccatttgtccaagtgcttcccagaaggataaaagaaaagatgaaataggaaatcggaaataggaaataacatattgctttttggttatccggagtgaaatcattgggttttgatgtctactgttttaagtttgttctatctgtatgtgcttgtttgttttcctgagagtctaagtgaaaatccttgtgatgttatcaatatagagagtaaagctaatgattcttgctacaagaagaagatgaacaattatttagagcaaatagttatatcggtctcagcatgtgtttcaaatctgcctatgtaagatttgttacctttgcttttatatgtcctttcaattttgagtctgcgttttgattttgtgttttaatccctttttctttgctaatcattgatgtggcacttgtcttattactattgttgatacactcctggtaaaccatttgtgcagttgtatatctcg

SEQ ID NO: 45904 - DNA, 443 bp, Manihot esculenta
  Intron number 3 from transcript cassava4.1_008751m (locus cassava4.1_008751m.g) derived from phytozome v7.0 (chr-ID scaffold12211; pos 355680 to 356122 reverse strand)
cagtggaggtaacttcaatttgcctgtctactgtattatatgttcatttttggtccttaggagagaaaaatgtgcttgatttagacctcacaaaacggaaattaagcatatgcagctgtttcaattttgggcatttgatgcaacattttctgaagaatatctgtggcaatgctgtccatattgtttatttgctagtaactactttgtattgtattttgcttgcttctattgcttgacttccaatgtctactgactatgtttaaatataaattattgtggagaaagaaaacaaaaatgtctacggtaaactccttaatccacttagtcatctttatttattattgttattcagggaggcatgattcgacaatgatgaagaagcttatgttctgtggtttattgttgcagaatctatatcaactaggagcaagaatattttggat

SEQ ID NO: 45905 - DNA, 229 bp, Manihot esculenta
  Intron number 2 from transcript cassava4.1_014630m (locus cassava4.1_010691m.g) derived from phytozome v7.0 (chr-ID scaffold02817; pos 161820 to 162048 reverse strand)
aagtacatcgagcgcggccacaaggtttgtttttatatgtcattaaattaatattatttgtatctatattttctctggaagtgtgatgcacgggaaaaagaaaatattttgtggaggaagaattactgttagctgaatttagattttttagtgaaaattttgaaaaaatggtgaggaattaatttatcgttgcattaagcttactgattctttatttgggctcagattg

SEQ ID NO: 45906 - DNA, 812 bp, Manihot esculenta
  Intron number 2 from transcript cassava4.1_016129m (locus cassava4.1_016129m.g) derived from phytozome v7.0 (chr-ID scaffold06916; pos 1946469 to 1947280 reverse strand)
tcgatcaaaaggtaaacagtctctacactgaattatgtttatatctgctatttaacacagtaggtagctcaatccatcttctccctctaactgaagcattaatttgaaaaagtttacttattttgaagtttaattgtcatatcacgttaaaacgtgggaagctttcaaattttgtgggaagtaatttgaaaatggattctctggatccaatgaaaggtcgagaatctcatcaaaatgtccccaagctttagttcctttaaatacttttatcccatcatccattgaactgtaatacttaaaagaaaagacaaaatacacttgtaggaggaggatttttaatttattttttagaatcagataaagtaaagcatcaacaatagtaaaattcagggattaaatagtcatttatctgaaatttgactgtacttagaaaatagatgaaaggattaaaatcaaaagaaataaaaaattcgaggatgtatgaaatactgcttacatacctggtattggcataattttacaaattgtatcatagttttagcaagaaggggaagggttaaagatttaaccaatgtgagacatcactttagttgaagaaactctagatgctgtagtaagggaagaaatagtagggttcacttgaccagatcttcattttctaatccaaagcctgcttaattgagtttttgaaatataggattaacatgttaatctagcaataattagtgatgattttgtcaatcgccctacccctaatatagggtttaacctgagttgatgtgttttcacataggagttcaataagaagcaga

SEQ ID NO: 45907 - DNA, 449 bp, Manihot esculenta
  Intron number 1 from transcript cassava4.1_017168m (locus cassava4.1_017168m.g) derived from phytozome v7.0 (chr-ID scaffold03741; pos 927966 to 928414 reverse strand)
ctttggctgtggcagctgagcagagaagaagcactgtgagtatattcttggtttctttaatttcacgtttggcttccaattaaagaaggttggggggggggggggagttctaagaaaggaaagagaaatatttacatgtgatttctgcgtttattaacgtttatttgatcttagtgggagaagaaggagagaaaatcttaaacggcatacaagtgtttgatttgcaaaagtttacggatctactgatgaaatgagctttcagtgaagaaagctgttctagcttaattgcttaaatttgcaattagcccattttaactgttggtagtgggtgaagtgtagaaaattaatcgattaccaagagcttagtagctaattcttgatgaattagcaaattaacaatatattattttgcaggccgtaatcaagcaggattctgaagtaaattacaa

SEQ ID NO: 45908 - DNA, 618 bp, Manihot esculenta
  Intron number 3 from transcript cassava4.1_000966m (locus cassava4.1_000966m.g) derived from phytozome v7.0 (chr-ID scaffold05899; pos 97778 to 98395)
gggaaatgtaattatatttatactataattgctgttgttgtttaacaagctgtgtacatgattggtttcattcttgggcgtttagctgcttgatcataaatggagtttgtgctgtaagaatatagatttgctttattgtggttctattgggatacatttttcttcttcattgtgcagggactatggctaatctaagattctcttggctatcaactcttaaatttgctgttagtatggctggtttatattctttgtgattctgtaaatcttcatatctttttctccatgcccatcttataaaatagtgattatggtacaccttaaatttagtaaaagattcaagaatacaaaattattgctctgatgtgctgaataattgtttgaattatatacacatatatattagaatatgtttagctaattacaacatttattcataattttatcatgtggggaatgtcgcatatggtattgttattttgtgtagatgttattttttttcttcttgtgtacccaggaaggtttgaacatttgactgtttttagtcatttagattcttaaatcctctaccttatttcctcagacgtcattaccctttcatcagaggggagtatctta

SEQ ID NO: 45909 - DNA, 911 bp, Manihot esculenta
  Intron number 2 from transcript cassava4.1_017254m (locus cassava4.1_017034m.g) derived from phytozome v7.0 (chr-ID scaffold00847; pos 1157857 to 1158767)
aaggctcctcggattacttctaaaaatctcatcaggtaacgatctttgggttatcttaatccttgtataataccatgtagggtctgtcgatgatgtcttcttcttctttttaatttttgactcccagtaaaccgaggtgttaagatttcggattttcagttcaatcgattaaaagtctggttcttcattttttttctgcccttttgtcatggagcaattttgatgatttattttataatccattctcgtcaactgatatttataatttcattttaaacattcatatgcaatgcacagtctattgaagatgatgatcttttgtctgtggaaatagaggataatccagaagaaataacgtgaattggtcattgtttattaaactcgcgatattgtcattgtggagggactaggaggcaaaattctcaatctagtaaatatgatttttcagaacctacatagcttaaccaattcagaactctaagaatgaataaggaatcgacaaacttacctgggagtgggaaggatttgggagagttaaatctcggtctccttctcttatgcatggatctcttatgttgtatgtttattgatagttttacatgcttaccatttaacctcttgcttagttattcagaagctacatcatcataatcttatgctgtaattttaagttttctggtaattataaagttttaaattcatgcttatattcaccattgcatcctcaaagttagcatatattctgattatgatgttttgtaactggcttagtggtgactttagtttcacgattcacctcctttttagcatttaatatgttttagattttggagtacaagtgatgttaaattgtaatctgactcaatagcatacttttctcagtgtaatcttttgtgaggctgttgctatat

SEQ ID NO: 45910 - DNA, 461 bp, Manihot esculenta
  Intron number 1 from transcript cassava4.1_009936m (locus cassava4.1_009936m.g) derived from phytozome v7.0 (chr-ID scaffold11106; pos 625842 to 626302)
tctctcaagctctccaatctccagatcctatctatgtaagcaactcactttctgattgtctcccgagaaaatttttaatgaacgaagtttcattctttcctgtttcaatgcatattttgattggttgagttttgaagtagtgaggtatactctctgagtggtgaaatactgttctctctctctctctctctctctgtctctctctctctctctctccagttccagtggtttaattttttttttttgggtctcttcctactggtattgttttttttttctctcggagatcaaacagaaggaatgctaatggatgtgctctgatgttgacttgttgcttcatttctacatctggcaatgcagttttatttagtaattaagtaccgattgattgtctcatgtagtaattgaagtttcattttttggatatttttgtagaattgagattgaagcttttcttagca

SEQ ID NO: 45911 - DNA, 846 bp, Manihot esculenta
  Intron number 2 from transcript cassava4.1_009936m (locus cassava4.1_009936m.g) derived from phytozome v7.0 (chr-ID scaffold11106; pos 626305 to 627150)
ggaggttgcacaacagcagcaaagtgaacccatcggtaattgattttgtttttctttttttaattaacttcttaagcaactaaaagcatatgtgtgcaagttagtaaattgaagttctttataagttaccagtatgaataaggattctcagctattttgttattccgtttaaatatttaatgcgacattgttgcaaaatgcaagctcaatttgatgagcaagttgattggggaacaaattggaatgtattgggagctgcacctgtaatttatccgtatgcaggaagttcggttcatggtaatgatttaaggcatactaaactgagtagtagaagagatgatttacttcataaacctggttatgctaattgttcttttagaaatatatttaacatgcgcttgggccttggagatctttcaatttgacttgttgaattctctcgcaaatctgtccttatgatcaatttcaagtccatttattgttggataatttttttttcttaatttacattcttatgcacaaacgttaagctgttgctccactggtaagattcaaggtacagaatagctttggtgagttgaattgttttcatttcttctttgagctgaattggatgacaaattttgtgctaatttcaagtctgttatttttcttaaaagtaaggcgaatgacataatttcctctaaatggaagtgaaataagacacgtaatcttgaactgttctattggttttgtttcccaataatcatattgtagggtaaaagcaacatttgcttttgtccctctttagttgaatcatgtgatactcactagttgttcatatcctgtaatttgcaggccaagaag

SEQ ID NO: 45912 - DNA, 381 bp, Manihot esculenta
  Intron number 3 from transcript cassava4.1_003862m (locus cassava4.1_003862m.g) derived from phytozome v7.0 (chr-ID scaffold01407; pos 241892 to 242272)
ttgggactaaccttcttaagttgggtcatacggaggtatgttatgtttcttttcttgctcagttagtgaatccatctgtgtagcatgtagtgttcttttattcacatagctcactttgaacatccttgacatccatcgcatagcttacttttatgaatttaagttctagtaaaccattaacttttgagttcagtgtgaagatgaacagattttgccttccatatcctcatttaatcttttcatggttatgccctcatttattatgagagcagttagagacaccaactattgattctgacctttacgtcttcgcatcatctaatgaacttcaatgaatccaaacctgtatgcagagagaaaggcattctactctagacatag

SEQ ID NO: 45913 - DNA, 1042 bp, Manihot esculenta
  Intron number 1 from transcript cassava4.1_011747m (locus cassava4.1_011747m.g) derived from phytozome v7.0 (chr-ID scaffold04457; pos 729119 to 730160 reverse strand)
cagttgctgctattgttttcccctcgtttgatttggtgagaaagcaacggaaagtataatagaagtaggcgagttcttttctttctattttttttttcgtggcatgaggtattgtataatttatttctaaagcctatgttgattcgtcactgttatttactgaatgaaatatgatgaattagagtgaccttttgattctacttccgctttcttttattattattattattattattgacatccaaatgcagattatatgaaaattgttatttgcctctttgaagtttgattcggttgatgggtatttgggatgatttatcacttgcttgcttgtttgtctaagtgaaattgggaattgacaattaggtgcactaaaatgttacccatcacctaatttggttaattgattttgctaatcttacttaatttcctaattttggtgttcttatgttttcttaagatgtagaatgatcttatcagactgatgatattatttgctttcattcaatcgattatgacttttttgtggataaatttttgtgtttaaaagctaagggcatacgtgggttgagctttatgtttctgtgcgtttctgcattacttaatcatataacaaatgaagaaattagctatagatgctcacgtcctccgggcagatgatttctgttatgagagcggctatgtgcatccaatgctttacaagtgataattaagtggtagcatgacatctcacatgtttcatgatacatcttagcaagtttatgtgtggacaactcttggtcttgggaaaacattatgtgagaattcatgctaggtggaatatagctccaaggttaggaggaagttggaagtgaacataaaattttttcctataaagaagtttttacgagtgttcttttctctagtttacttattcggggtactttcatctttttgcttatttttcttgttcgcagtctctgcattcctaaactcatgtctgcttagcaaggattttactcacaccctgaattcttactaccttgattcaggtgatcacctg

SEQ ID NO: 45914 - DNA, 697 bp, Manihot esculenta
  Intron number 1 from transcript cassava4.1_028235m (locus cassava4.1_028235m.g) derived from phytozome v7.0 (chr-ID scaffold01664; pos 45921 to 46617 reverse strand)
attattaagactgtgatcactttaggttgtaacaggtactttattttctgatacttccttctgtgctcctatttagtacttttatatatagttaaacccgatggttgctagaaaatcatgactagaggcatgatcctagggcagacttgtagtatgcctcattaattcagcctcataacatttttttgtttttcttcttttgttcatgaaaacattataattccagttttgatttctcttcccattatatctctttcattttttactttcctatgtgaactagttgctgctttcttgatagacagtctatttagtcttctctgaatgatgggattctgtgattgcatgcaaactcatgactggttgaatgtcatgctggcaaaaagtgatgctactcaagtgagatcatcagtttaggagttgtgttatcaaatgagattattgaaaataactaagaaaaaagagagaaaaaaagaagaagaaattgactatggatcttgtttgttgcatatgtcaaactattattagaataccataaaatgatgcaactcgtattttattttgtcattctttttcatatttgcttagattgcgtctccatttacaagttattactacaaatgaaaaccaagtagttttcatatttcatgcttattctttttagtcaaacctaatgcgtgttaatttggtgttgaag

SEQ ID NO: 45915 - DNA, 797 bp, Manihot esculenta
  Intron number 1 from transcript cassava4.1_008155m (locus cassava4.1_008155m.g) derived from phytozome v7.0 (chr-ID scaffold07478; pos 235512 to 236308 reverse strand)
gagtgcttccgattatcccttgctcactcaaggtatgcctctgggtttattaccagttgctttttaattcccctgtttattttggaattaatggtttgattcgtaaaacgggtagctggaaatttctctgtttttttatggggtatttgttcgttggatactttggatgaagataaagtaagaaagttttgaattgactcaaaagaacaattgaagttttccccttccttttctaaccttttttaaatggtctccatttttttagtaaaggggtattttcttcattgagatgtttcatgtttgtgcatttatcagtgccagtaattttgctaattacctgcagaattaatgcaattccattttttgtgttttcttttggattgattctgttcgtcagttgtatgttactagttagcattttaagcaagttccatatttggtatttgcgccaccaacctagctcagagatactattttgttctaattgtctgtctgttttgtttcagtgataatggtggcccaaatcctaatctactataattaactaataaaatgccacatcacttaccttctctaatttttcacccattttatttatttccctcagcatttaatttgttgcttcaacagctggttctatctctctagctgtgcatccacttctttcattaaaattttattttatttaataaataaagcgtctgcatgcctcagtttgatttctagttgttgtaattggtaattttcatttttgtgtcgcagatctgcttcatattttatctacaattccaagaaac

SEQ ID NO: 45916 - DNA, 756 bp, Manihot esculenta
  Intron number 3 from transcript cassava4.1_011304m (locus cassava4.1_008215m.g) derived from phytozome v7.0 (chr-ID scaffold00109; pos 227068 to 227823)
aaccaagttttataacccaaatttctcagctgagagtatgttgacccaattacttccacagtttcatcttttgttaattttttcatacttctttttttggaatgtcatagctcttaagaaaatggactagactaactcatcaaaacaaaatttcatgggtagtggtgcattattccattataacataataaccaaatccaacagatgaatttcggtaatttagatagaagaattcgactatcagttaatgattaaatcgaaacctaattcgcctccaagctcaaggcggaggattgagtgttttatctttacaaggcgcattactactatccaaaaccaaagtgggaatttaacaataacaccatctgaaagtgatatttgaatcttgttgtgtgattgatgcaggaaaattgggtttcagtcatgtttgccatggctggtggtgtggtgcttagcattggaaatttatgcacacagtatgctttagcttttgctggtttatctgtgactgaagtgattactgctagtatgactgttgtcgtaggtttgtttgtcctcatgatgaaagaatttatctattgaagtttataatggactatttttttaaaattcccttttgaatatttggtttggttataacagggacaaccttgaattacttgttagatgacaaaattaacaaggctgagactctgttctctggtgttggttgcttcttgattgcagtgtgtcttgcttcagctgttcactcatcca

SEQ ID NO: 45917 - DNA, 179 bp, Manihot esculenta
  Intron number 2 from transcript cassava4.1_020371m (locus cassava4.1_020371m.g) derived from phytozome v7.0 (chr-ID scaffold08423; pos 120235 to 120413 reverse strand)
taaaagagatcattgtagaagtggacactgacaaagtgtgttttcttgcttttgatcctcttttgttctgtagatttttccttggaagcaaacagtttcatttactaaaatctatttgtttctatagtaatcaaattcataatcatatgttatgtatattcttcaattttttttacagg

SEQ ID NO: 45918 - DNA, 461 bp, Manihot esculenta
  Intron number 1 from transcript cassava4.1_018564m (locus cassava4.1_018564m.g) derived from phytozome v7.0 (chr-ID scaffold11106; pos 489121 to 489581 reverse strand)
gccacacaacaggttttgttttctctaatcttatctttctcaccactcattaatgggtttctttcttctaaattttctgctcaatttcttgcctgccaaatcccaatattatatcttgtttattgctttcttttgtaaatttaagtaaatcattaattttcaatactataaaagagagttaaaatttccattcttttcttctaatttgaagggcaattctctttcccaaaacccttttgaatttgatgggattggaaccttattgtgaagcaaaaatcccaagttttaattgttggggtgtcctcttggcttctgaaaacttgaagttttgtagtaatttcatgtgtaatttcttttgctattccatttgtgatgggtcatgattgtgttgttgtgatatagaagtgatatttacaatacttgcaggggagaagggactgttttctttggcaccaccacac

SEQ ID NO: 45919 - DNA, 990 bp, Manihot esculenta
  Intron number 1 from transcript cassava4.1_020517m (locus cassava4.1_020504m.g) derived from phytozome v7.0 (chr-ID scaffold02242; pos 98052 to 99041 reverse strand)
ggccccgactcagcccaagtaggtgtgaggcctagtggttatcaccattattctttcttttttcttctctctgatcaagtttgttttaaacaagctgtagctctaagagggaaaaagtagaaaaagtttaagggaaaaagtagaaaaagtttatggctatgtgccattcattgaaggaaagaaaaaagcaaatgaatgtttctgggtgggtgaccaatttttgtatgtaagaacttttattcatttcatagtatacatgtaaaacctataaaaaaatttcttccgcattatagacaaccttttgtccttataattattgctgattctagagtatgataagaggataggccttaaagaataggtttgttaaggataatctttagacagataatttaagtgataaaatgtattgagttaggttaaggttaagctgtgtatgtatgcatagactaggttcttttgataatttcctctccttgcatgataatttagaaatctaactttaaaagtatgactaaataatctcttttccaagtattctattctcagtctcaattttagcatatgttatctgctctctaaatgtcagcttttttaaatattttagtgcatcatggattcatggtactgccatctccatccttgatctccagcttttgtgctgtgctgctgctgtgtttcacagctaggatttgatttttgttttatatttactatttgatatataatctaataatggaatacttgttttttttaggattttatatagttgtataactttatttccccgtcatctatatatatatatatattactatgactatttatagatggactctgatggtattgaagtgattcttgaatagtaacaatctaacattaaaaggggatatgaagaggaaaatgaatattataataggccatggtttatgtggttagtatttaagatttctctttcatgttttgagttttttcttttgcagtttgagc

SEQ ID NO: 45920 - DNA, 787 bp, Manihot esculenta
  Intron number 1 from transcript cassava4.1_006658m (locus cassava4.1_006658m.g) derived from phytozome v7.0 (chr-ID scaffold12211; pos 150628 to 151414)
ttcgagcttctgagcttcagaaggaagggaagaaggtatacatagagttcttctgctttagctttctctacgaatattgttctattagtctctagtttttattttctttggaaaaattagtcagcgcagttgctcattgagctatctattgttgttatttcagcttgcaattaactttttacatgattatttgctccttgtttttggatcctccgtaaaactcccaatatgagtttagtttattctaacacttggtgatagtttgcaatttgttttacttgttcaatgtctttcaagtaatggtggatgcctccagttatttctttcttgatgcaactcttgtttgtattttgaagttatcttttaaatgcttattgcggggattttgttgcttgatatgtttgtaacccttctgagaagaaatctgggtactttctgacatgcaaaatattaaacttgatcacataaattgccaccgtggcaggaatagaatttcataaatgtttagcgtggcacacaaaagaaaaatatttccttacagcaggaaagcaatgggaaatgtgaattttcgccaaaattctgatattgtcaaagtgtcatgtaatgttaactaagtatgctatttatttccttttaaagatgggaaaagacaattttatattctacttctctaaagtttgattagtaaaacagtttgataaattttcatagcaagatgttggtagccctttaaatggttatctgtgcgtcactacttccacttcatgtctgtagattattttcacaa

SEQ ID NO: 45921 - DNA, 325 bp, Manihot esculenta
  Intron number 1 from transcript cassava4.1_019128m (locus cassava4.1_019128m.g) derived from phytozome v7.0 (chr-ID scaffold06651; pos 182742 to 183066)
tggttaagaaatttgataacattgacgctgccgtaattaatgcatggctcccttcagatatcttctgtgtgtatatttgtgtttgtgtccattttatgatggtttgaattggcagactaccttttctctttttttaatgtgaaattaaatatgtcatgcattaatgctgattatttagttgttgcttttcgtcaaataagtttcagctaaagaatcaagctttccttcataccctaaagattgaaaattattgaaatgatgaatattccttttgcttgatggctggacaggttactgaaacagcttatttccagaaagatttgtc

SEQ ID NO: 45922 - DNA, 698 bp, Manihot esculenta
  Intron number 1 from transcript cassava4.1_015997m (locus cassava4.1_015954m.g) derived from phytozome v7.0 (chr-ID scaffold02421; pos 547821 to 548518)
gctcctcaagatccacaccatcaaatcctgtgctggtatctatctacattgttttcttctctctttgattttttgtccccaatggttgtgttttttagactctttgaacgatttattttcatttaattagataaatttatttgcgggatttgtgtttaatttcagctttgtttttgtttgtttcctgcaatttagctaccaatcaatggcatgtagaaacttccatccattggcaaaattttaacggttgataaagtttgtgggtctttgttttgatttcaaatctgaagaaaccataaaactttcccagttctatgccaatcatgcaatgtgtttatgaatgtcttgcaggcaactttgttgagaacactgtttggcttcattgttgcttggctagatataatggataagatagataaacattatataaaaatgccaaatttacaagtagaataatggaggttactatcgtgcataattatcgttcgtgcatcgattgacaattgtctcatacatttatgtacttgattggaattgtttttttttctctgtaatatttcctagagttctttttcctttttattttcggcatttattcatggctgtgacaagctgttttatgttattcatttgttgcagtcttgtaattttcaccttcctgccatttacagggatttctttgaagactcaggaactgt

SEQ ID NO: 45923 - DNA, 592 bp, Manihot esculenta
  Intron number 1 from transcript cassava4.1_025972m (locus cassava4.1_025972m.g) derived from phytozome v7.0 (chr-ID scaffold12301; pos 277799 to 278390)
agaaggtcaagaaagaaggtaacgctagcccttttcctgtttgcgttctaactgtgtttggttgcccagaaaactaatcaaagtaattgaaagttaacttttacagtggattttacttttttctttgtttgatgtaatatgtaactcgtcttaaatttgctgaaaatggttgtaattttttattagttactggttatgcaaattaatcagagatttgagctttggatgttgttaagtttcttaaatgtttcaagttttccaggcttatggtggtttttgctgttgttttttgggaaatagttaaaaaagttttaaattgcttaagggggagaattaataatttggttttgttgctgagccttggtttgttgctgagccatggttctgcttttccaatattaatgaaagaggttattgagtcactgtttactagcattagaaaatgttgaaactatgtgggttttgtagatcctgaattggatgggtggtctgtttgtggctgcatcttgtaccaattagtaagaacactgaaaatagttcgtcttcttctttaacagaattaaagagatcactttattgtctattctcccaa

SEQ ID NO: 45924 - DNA, 937 bp, Manihot esculenta
  Intron number 2 from transcript cassava4.1_017090m (locus cassava4.1_017090m.g) derived from phytozome v7.0 (chr-ID scaffold11661; pos 198570 to 199506)
agcgacacgctactcttgttctttccaaagtcaaggttttaatttcttttttctgctatttcttgcttctttttttagcaatttgtgtggaattgtgaatcccttacgctttgtttggattgagggaattagggagaaaagaaaagaaatttaattctttaaattctcctgtttggactaccaataaaagagagaaaagaggagaaaataagagaaattatatttttcaatcccttgaaatgaaccgaaaatattttccaccaatttggtgggaaatgatgggaaatggaaagatggtcaggttatttgtctgaaaattctttaaaggttatctttttaaaattgtaaaggtacaatagtcatttttcatctttttttttaagagagaaattatacttctcttcttttctaaaaatctatccaaataataagaaaaaaatctatattcttttctcttctcttcatttctcctccttaatttctgttgatttctcctatacaactaaattcaaacaaagggtagtatttaggaattagcttgtagtttattctattggagaatttttttaaccactaaaagggtagttatagaagcttatttcttgattgtatcaaggtgatgcagccagtgccatgttgttggtaattatgtcataattatgactgaactcggtgtgtgtaattttttgggtatttgtcaaaaattttagacttaattgcacacaaaattgattttggggtgatttgcctgttgatgacaggggtaaattgctactttatcccttagttttacatgtaggcatggcagtttttattaatttgccataaagtgaaaattgctgcctgaagtgattctgcatttaactgattttcttctactatacccctacttttctctccaggaactttcacaacttagatttaggctttgccctcg

SEQ ID NO: 45925 - DNA, 1066 bp, Manihot esculenta
  Intron number 1 from transcript cassava4.1_009022m (locus cassava4.1_008989m.g) derived from phytozome v7.0 (chr-ID scaffold06916; pos 1263689 to 1264754 reverse strand)
ctctgctatctttggaatccccaccaaaatcacaggtaaattcttcagcatcttctttctcttatgtatatacaaaacaagtatggccttattttggttgtttctgattttctgtatctgggatttgctgctttcaatttcttcttccacttgttcatgttgttttggtcttaattctctcatgaaaagtgtagtgcttttaataaccccatggaatccttatgtttattttagttttagtaaactattgcagttcttacttttctccctttagtttttgtccaataaatgtgcatctattcttttataagcatttcctgtttgaaaatgaagttttttttaccttttcctgcgtatttttagctatgtggacatgtttcttaattatcaagttcgagtgcatgagcatggttaaaatttcatctttaaagggacgaaaattaatgtataaaagaaaataagtgaaattttgataaaaatataggggttaaaataacaatataaaaaattatgggatcaaaatcaaatggcataaataaaatttatatagaagttccgggagaagagaaaaaataaaattttggagagccaaattaaaaaaaaaaaaaagaatatgcactaacattttaattttcattagtttttggggccatggtcccgcatgctatgaagctagttctgctcctgctcaagtggcatgctaccatgtttgtttgataaattcatgcaagctatatttttcgtaacaggtgctatattagaatgagtttccagttcaaattatatgtgcttttatggatccaaaagacaataaaattaaaatccaattaagggttagctagtttggaaaagggaatagtgaaattggctgctctttggttcatggttaacttttgataagatgaagaagttttgatttttgaatgaaattgagctttctttcctgagaagttactatatttgcataatgacttagtttgcaattgggatttcctagtgttttgactctaatcagatgttattaatgatagaagactaaggttcagaaaattgagactgatttccg

SEQ ID NO: 45926 - DNA, 515 bp, Manihot esculenta
  Intron number 1 from transcript cassava4.1_005553m (locus cassava4.1_005553m.g) derived from phytozome v7.0 (chr-ID scaffold00847; pos 1001534 to 1002048 reverse strand)
aagcagtagctaaattggaggaggttctttcatcggtgagttgtaaaaacaggttaattttgtttatattctgaaattttatgaatatgctggtaatttatgttttctgttttttagcaatctttgagcttacatgtgtccaatggaagtataatatatgcagttgattggatttaaggccaaacttttaattttgatattttcctgtaactttgttgagtctaattaagtagaattatttgtcttttaattcttcttcattccattttaataattatagcaaatgcactggatttttttttttattttattggcaaactaattaaagcttagcataactaacaaaactgagcaagacagtaagatttacattttagtatttttcttcatatgcagcaaaattcataaaaattttctttattcaaagttttatggttacataatatgttcatcaaagtaaaacctgtcttcatgatgcagattgctattcaaataggaagatatatagtcaccat

SEQ ID NO: 45927 - DNA, 730 bp, Manihot esculenta
  Intron number 2 from transcript cassava4.1_012614m (locus cassava4.1_012625m.g) derived from phytozome v7.0 (chr-ID scaffold00325; pos 620894 to 621623)
caggaagatttgaagcgccagctatttggtaatgtgttcctcacttctttttctttttcttgttagttttcccttagtcaggacatcacttctggcctgatatgtgttgaccactgtatgatgggaagcctattgatatgtgagtgatatgatgtgagttctgacatgagagtgtcacatatggttcttgtaaccttgaatctctggagttggatgatatcatgatggtcttcatggtatacaccaagtgttgtgacacaactttggcatatatagatgatatttaggaatttatttccttcactaaccataattattaaacggtcgcctcagaggctcagactctcactaggctttagcctcaatgccttaagtaggtaggtgtgctccttatttcagacgcaagctcaactttattgccaccttcagcaagtacttccattgaccccccctcccacaattaatctctctcatatgttgttttcaatattctcttattaaccttttttggttttttgattatctaaaattgctttcttgataatttaatttttcacgcctcatttcattctggcatgtgcctgtttcttgtgtctgggcgccaaatctccttttctccttgagcctataataactatgctactaagtttggataaataatacctgatgtagtgattgtgacactcattcaataggtttacctccaagatatagagattctgttcgggca

SEQ ID NO: 45928 - DNA, 828 bp, Manihot esculenta
  Intron number 2 from transcript cassava4.1_006017m (locus cassava4.1_006017m.g) derived from phytozome v7.0 (chr-ID scaffold07351; pos 410456 to 411283 reverse strand)
tgaagtcgaagcctgccaattgctttcaggtattaagctttagcttttcccagatttttatgctcaattctgctcaaagtcaaacgtctttattttttcccttttgagttttgttgaaattgtagcttactacctttcttttcctattcctttccaatattagattctcagacggtgattaggttcacgaatgagaaggcaaatttatttgaggatgagtttgaagtatgtatagaagaagatgcaatttcaaataaactcttttttcttttaaaatttcccccaatttgactgaaacatcaacaacaaaagcaacttcattatttcactattctgctgaccttattctggtaatttgagagggaaaataaacccttagaaggaagcctcttaaaaaaacttgcagaaaatagaggaggataattatgcattttgaattgctaatatttttttctaggaactgaagttcaattgttgtcttgtacctgagttctgaagttatgttgttcttccactttggaatttaagtatgtgctgattatttttgtttcctctacgatatttttaactggatgaaatgtgtaaagggtaaaggtggagcaaatgactttttggtgcattataacataagattcttattactaatcttcagtttcttctgaaaaaaaagaagtattcaaaatttatttcttgttattgctcaatgtaaattggagattctagatgtataagaggtgtaatgtgaatgaagtatgcagttggcttagttttattgcaataactgatgtgacagggacactgttctcattatagtttgggctttaataa

SEQ ID NO: 45929 - DNA, 746 bp, Manihot esculenta
  Intron number 1 from transcript cassava4.1_000025m (locus cassava4.1_000025m.g) derived from phytozome v7.0 (chr-ID scaffold04450; pos 211477 to 212222 reverse strand)
ccaacgtcgattctgttctccaagaactctgccaggtatcttctattggtctaatgcgactactttcttgcctctatttattgcactgatcatcaattctcagtcaccatgttcacttcattgaaacccttacatctttgatcttctcttaattttggataacacgaacttaggttaaaaacctggcgatttctatccctaattctttaagtttttattttattttatttcctttccttttttttttttcttcttgttgtattttctgtcgtcttccatatatgtcttagaagttgtttcagtcttggtcctaatgtatggagagtcgacttaattgctcgatttagctgagccaaattaagtttatttactcttgagtgcaccatgccgtatacttgcggctcccatataatgctcaaagttttataattttcatgagcttaaataaattgttttaaacattaattcttaatccccctatttgggatgaataattttgcaagaatcaattcatgttatttcttttctatcaattcttttgtttggaaagaaataattcacttttttaaacttaaaaataatttcattttaaaaggaattaaaatcatgcatggttttgtaagaattcagttgaattattttattggaaaatgaatcattcagtttgttagtagttcaagataagcttttgttgcctcccttagatttatgcattcactgagtttcttgctggcagtttattgaat

SEQ ID NO: 45930 - DNA, 673 bp, Manihot esculenta
  Intron number 1 from transcript cassava4.1_012338m (locus cassava4.1_012327m.g) derived from phytozome v7.0 (chr-ID scaffold04718; pos 47084 to 47756 reverse strand)
ggtataaaataatacaattttatttgttctattttagtgattacacactttacagagactcggagaggaaaagagaaaaggacagagagcaagagcgagaaagagttgcctatacgtatgacacgtataatttgtcgtatattctgacatttttttggaatccgtaaggatttgtctttgttcattttgttactttgatgtcactggagggatttaatcttctctgaatctgaaatggtgctcgctttgatttctatggtgtaattggctagttgggtctatttctttattgctaatttttcaattttttgagattatggatatatttttatttaaaactaggattacgggtcggattagttgagtctgattgatgctttcttcctacttataattagatgtaaaccagttttggacagagatcatttttttttagtgctggatatcaatcattttggcttttttgtatatgtgcttttatattcatagtgagagatactgtcagttcatgggttcccacgattgtgtatttgtagttttggacttttctccagctcgtttgctcatcttcttatcgctttatctttttgtttctgcttctgctattgtagttgtttccttcttaactctccctgtcctgacctgcttgttgtatgtttctcagatttcatct

SEQ ID NO: 45931 - DNA, 595 bp, Manihot esculenta
  Intron number 1 from transcript cassava4.1_002692m (locus cassava4.1_002692m.g) derived from phytozome v7.0 (chr-ID scaffold07543; pos 221857 to 222451 reverse strand)
cagccacgccgagtcgctgctgtctctgttgcgaggtagagcttcaaaagaagtaactgtttgctttaattacttgtgattgttgtgctgttaaatgattcttactaggttgcttagaatcgggcctttaggtagctttaataggtttaatatgctaggtgcttagcctgcttttggttgcggagaagataagagttttataatcgaataagataaactgaaggtgtatatctttaataagttcttttgacaatctgagcttccattgtgttgctcaaagtattgaggaaaagatagaagaactgggctcatatgtgttgattttctaaactatgaagctatagaaggcataaaatagcatgaattcttcaacagttgcaatagcatatcttgaggctcactgcatctaatcctgtgttgttttatttttagtatatttgacattacaactatgagtggacatgaaaacatgagcatgtttcatgtgcttgtgcgtgtgcgacctttcaatgttgaattaattgaagtttgactcttttctctttatttaatgttcaaagacgggttgcccaagagcttggtgttaagcttggag

SEQ ID NO: 45932 - DNA, 597 bp, Manihot esculenta
  Intron number 1 from transcript cassava4.1_013140m (locus cassava4.1_013140m.g) derived from phytozome v7.0 (chr-ID scaffold03512; pos 31427 to 32023 reverse strand)
gtagctggacagttgaaccatcggacgttcgagaggtactttgattctgattatgcttaagattatttcttttgatcttgtcgctgttgattggagctcaaatcttttgcttttgagcgatggatgctctgaattcttctaccggggatacctattggaaggcgaaactggtgaacaaaacaacctgagggttttagggaaaaattttaaaacgacgttgtttggtgtctataagcctaattaatagagcataagtcctcgaagtatcgtttgccgtttggtatgaggttcaaagaagggattaaaatttacattatctacatcaagaataaattatatcagactaaatgagttaagttttaatccctcaatttcttttatttcttattttcttataccaaatatgagaaaaattaatagattattatttaacatcattctctattgaaccaaatataatgaaagaaacttttttagagttaattattattccattaaaaaatgcaccattaactattaactttattctgttaacccgcaaacttggataatattgttgcaggtgattttgtatagatcggggctggttactgccgc

SEQ ID NO: 45933 - DNA, 438 bp, Manihot esculenta
  Intron number 2 from transcript cassava4.1_006015m (locus cassava4.1_006015m.g) derived from phytozome v7.0 (chr-ID scaffold01190; pos 44245 to 44682)
aacgtatcaatcttgagaagttttcttttttgaatacattagcagtcctaatccaacactgtacatcatgagaattaaactaattcaaataaaaccatcagtttctcacaccatgtctccaatcttacccttctaacaaggccaatttaatctttcaaaaagaaaagaaggaataggagacctaaaatcacagattcttgtattgcatatccatcgaactattggcaattattgtgatgatttaatcagaatgagttttggatttacattctgcaacaaatttatggtcaacaataatgattctgtctcttgcttgtggcttttctgtgttagttcttagcttttctagtgaaatgggattgttttgctcaagttgtatcaattataaaagattcctttcgatgcattatgcaggtcctttcaattttgaagctgcaa

SEQ ID NO: 45934 - DNA, 908 bp, Manihot esculenta
  Intron number 1 from transcript cassava4.1_020389m (locus cassava4.1_020389m.g) derived from phytozome v7.0 (chr-ID scaffold09870; pos 242918 to 243825)
aggcgtcgctttgcgaattgggattcgcaaacgaggtatctttctgcccgttttatagcccattcgtgaaatcagttgatcgttttgatggtttattgtgtgcaatgatagaaatgttttcatttgttagatcttcgtttgaattgctacaagtttaagatcttatttagccatttgttttatatttgccttctaaattcaaattcaaaatgttcttctcttttgaggatcaggggattgggggaattagttcattttctggtggttctgggaatctgatgtagtactttaaatgaatagatcgagctgaattcaaattcagttcgcttttgatttagttccaaatgatacagtgttgtaatgtaaaatgatcaacagcttctccatagacgaactgttagcaattctgtgatgaaactttctcctttctctgggaattttttgacactggcagatgggagtggtgaggttgctactatcacattgttcttcgcagccccacttgaatttgccatagaaatagtaacaaactgtggtgcattacagaaaatgttcaatttttggcctattcttgttgtcctttccatccttaaatttgttttcaaattaaaggtttttgtacttagatcaatggagccatgtgttgatcttttgcaattttgtaaaattgatctgggattgggagaaggattccagttgatgaaatgtgcaaaacatgacacaaacacatggtttgttgttggagaattatatagttccttacatgacaagtatgctctgcttatgatgatttaggaagttgatttatagcatatgtttgattcacctgcttttccttttcacatttttgcatggaccttatctaatgattctgggtggggaaatgacagggctattgaaactacatc

SEQ ID NO: 45935 - DNA, 252 bp, Manihot esculenta
  Intron number 1 from transcript cassava4.1_031378m (locus cassava4.1_031378m.g) derived from phytozome v7.0 (chr-ID scaffold08799; pos 299062 to 299313)
aggtactttcattttcttaagattttccgttcttaattatcaaatttaaggaagttgactttactgtttctatgtttctaaaaatttattgaaatatttctaaattttgatttcctttatattccatcttttcattcatttaattaaaaagaaaattgtaagttgactgaaactttttaagatataatagtgtttttttttccctttcttatcgtagtcattaaatagatcaggtcctctgctagacagcag

SEQ ID NO: 45936 - DNA, 485 bp, Manihot esculenta
  Intron number 2 from transcript cassava4.1_030800m (locus cassava4.1_030800m.g) derived from phytozome v7.0 (chr-ID scaffold08352; pos 132675 to 133159)
gtctctctgcaatagagtaattcgtctcctcaaaggttatttttcttgaaaggatttgctttgatctcaatctcttcttgcgttgacctaattgataatatttgcttatttctttctcttatttaattgcgtttagtatgattgtgttagtttcatataggatgtttgattcagcactattgtcgggaatcatgtattatccagaaaacaattaccttcaagtgaggaatatatcgtaactattgtaatcagcttaacaattttattttctggaaacgtatggtatcatctggtgatgaaaggagtgcaatcacttgctttcattaccttatgagtgtcagtgtctcataacatgaagcattttgtgtgcattctgaaaattcctattcttcttttatttgtgatcggtgattagctgtgaaattatcattgcccccttatatggtgcagaaaagaaaaatttagaagttttaagtctaaaagag

SEQ ID NO: 45937 - DNA, 990 bp, Manihot esculenta
  Intron number 2 from transcript cassava4.1_010946m (locus cassava4.1_010946m.g) derived from phytozome v7.0 (chr-ID scaffold03750; pos 246982 to 247971 reverse strand)
ttcctctttcatactatactggaattcttggtaagtctcagagaattctgcagcaattgtatatggtatcaacgattaattgagagctaggttttgattgctttgattgcaaatgtgattctgaagttccatgaagtgcatgctaccataagtgtttcttccttataattaaagacatgaatgatatgggttttatcttgatggttagattggctttggaatgtgatgtatgaaattgaattagtggatatattgcaatccagtataagccatctgcataatgaaaatgtttatttgctttgttgtactcatttcaaggtagtaagatgacttcgttggtccacttaaaacaaataatttcggacatggtagtatatgcgtgcttttgaggaggggggggggggattagatcttagatacatcagcagtctatggtatggttcatgattatatgacttgaatgttggatatatttttttcatgggccaattgggatccgattcgaaagttccatgatgtgatctgaaataaatttttgtgatgtatgtggtggtggtggagattgtaattttccttgccttgtaagaatatgtgagattattcgggagatacactggagttaggatagtgaaactttatccctgtctacgtgtgtgcctaatattgtgggtatgtttcaatagattgattgcgtgcttaagatatgagaataaaatgagagattgttccatgtatctatggcatgtggatggagaattttaaacctcaagaaaatgagctgcaattaatatcgcacacataaagatttgaacatgtaaaagtggcgtgttttagattacatcaaattcttgaaagttcattttaaactatacttatgtttttaggtatttcaaattcattctcaaacaaaaaatccattttatgactccatatctgagcgtttcttgatttcctttttcatatctatatccatgcattatttttgtaggt

SEQ ID NO: 45938 - DNA, 482 bp, Manihot esculenta
  Intron number 1 from transcript cassava4.1_030925m (locus cassava4.1_030925m.g) derived from phytozome v7.0 (chr-ID scaffold06701; pos 138882 to 139363)
cttgtcgccgtttgggttactttcaggtaagtatgtatctgcctgtatcaggttctttacggaccatttggcaaaaaacaaaaggcagtcctcctccttatgataacagtcttatttctatttaatttcatataatttaaaaaatataaataacataaaaataaaatattctgttactttttaaaatatcctgtattcatcataattaatgactataatatataataaaaattctctcaaaaaatctaccattgtagtggcgtaagctttttctttttccagtctcttttacgtccctttcttcacctctttaatggaggaagtgcagtgaaaaaagaaaaagtccataactctttgtatagtttatcattttcatgacctagtgctgagaccaggtgtgtgtatttttgtatataatgtatatatgccgttatatatagttaaaataaaaagtttggtaactaattttcagataataaatc

SEQ ID NO: 45939 - DNA, 933 bp, Manihot esculenta
  Intron number 2 from transcript cassava4.1_012073m (locus cassava4.1_012073m.g) derived from phytozome v7.0 (chr-ID scaffold06766; pos 38573 to 39505 reverse strand)
ggaaaattacgtaagtaatgcaattctgcattctgagaagtagatggtattctaaaattttcatcaatttctttttgtgcatgcttaaactaaccattataatattgaacttcactatctttctccatatgcgtgttctcgtgcaatctttggtgtgcttttagtttaaatttttcaatgaattgaatgtaatatggcaaaaggcccctattgtgacacgaaagatagatgcgttaattattgagatcttgaaataggcattaggcttcaggatcctttcacatgagtcttaagtttgtcaattttacccactggtcaaaactgaagaaagataacagtgtttgattattaactaaaccaaaacgaatatatctttccccttctttctttctctttctctctcacttccaatagagacagagaaagcgagcggttgtagaaaatttcactttaaaaaagaaattaccatgttgcaactgatattccataatatttcaaaattaaaggtttggatatttgtagccatttgatctccatatgctcatgacaaaatggatggtgaatatacacaagtaccagaaccagactaatttgttaagtttcattcattcacttgaagagaaatcacatccaattgttatgccatttcatttgcaggtcagtgcattatatgttcaattatctggtgtcactctgtgaaaaatgcagtgtagtactcccaccccatttatcttactggcacctcgtttatgtgtactttttgcttgtccttttcattccttgtagataaacaagaaaagaacttatatgtaatttgaaagataaatacttgcatgtattggttagcttgtgaaaatatcactcagttttatcatttcaaattgggtgccatgggcagttatcttgttacaacatttaaggtagtcccaaggg

SEQ ID NO: 45940 - DNA, 945 bp, Manihot esculenta
  Intron number 1 from transcript cassava4.1_016042m (locus cassava4.1_016042m.g) derived from phytozome v7.0 (chr-ID scaffold07351; pos 301320 to 302264)
gtcattcgctcaatcgttcgagtaagttgctaagtttcttgggtctacgtaattgccaaaatgttagtgtctttgtctattgttaatgcttatttttcttgctgatcatgatgtttctattgtttggttgctgagaaagtgagagaaaaccagagaaatggaattttggagattacatcattgtcatcaacggaggtttttattttcccttttatctttcctttttgtttttcatggtttctggtagtgcatagcagtttgaaattttttgcttttgttttctttcttttattccctgcattttcttagcaaccaaacagtctatcttcaatttgtgatttgaattgacccaaactgaccgacaaaagcgggcttctgtccttgcttgctagccttgcttgtcatgttatgtggaaactatgaagtctcttgaactttgtgttcacggaattgccctcggttttgttgcttcgtgcgaaaacaaattctaggtactctgaccttcaggtcattgacatctgaatgaacagaatcaaacccgtgattttttaataaattaatattttcgggttcctgactatatgctatttggaattttttgacacggagttttcaagatctttgatatttgacatgagtgacattaatggttgagtgcattactacttgatttctagaatggtttgacattatgacaaaagattctattgaaaaggttgttaactatagagtttcttacattttggatagagttcactcctcaagtatcaagcacatgactgttaaaaggggaggattcaagcaattatgtaattaagatgtatgcagttctgagtcatcattacaaggcagttggggtggtaatttgtatgttgagtagttgttgattctgttattggatgctgagcaggtatctagttggagtctctgcagctgtagttgctt

SEQ ID NO: 45941 - DNA, 902 bp, Manihot esculenta
  Intron number 1 from transcript cassava4.1_019574m (locus cassava4.1_018643m.g) derived from phytozome v7.0 (chr-ID scaffold00847; pos 232134 to 233035 reverse strand)
ccttgcacgcaacgaccaacaggtgcttctctcttcctatttacatttaatttcactcccaaccttccattctatccaattcaatgtatagactccagatctccattcccgcagatcttaattcttcttcctcttctaattttgttaccctttgcttcctttgtatttttttttaaacggagttaattagctgggttaacattctatatgatagatgctaagcaatcctcgttaatctgatttcaaaatcaatttaaaaggaatttttgaagatgtatctgcattcccagattgaaaataacaaatgaattccgataattagcttaagattttgatttttcttggttagggtttataaattagaacttctcttgaaaagctttcacgtcattgatgttatcattttggatattcaatgacagtgttcctttgtcgagcatcgcaattacaaaattgtttacaggcgctacgcttcattatttttcctggttggtgtcgacaatgatgaagtaagtttttttttctattttaaattaggattgctttgctagcagaaacaggaaagtggcatggcattgaaaactgctaattttgctcagtgtattttgctcctttaatttataaatctttatttatgtagaacattagtgtaagacttcaatcttgtaggcaataagattatcattgattctacatgagattacttgagatatcttcttgacatagcatgaattgcttaagggaatattttaggaacgtgtgattcttagagctaatggatggtgtgagctatagactagttatgagtgtcgtgcttggtgccttaagcgtgcttatctaaacttaaccgctagtccatcttaatgtatttcttaatatctactttccttgcattttacaga

SEQ ID NO: 45942 - DNA, 569 bp, Manihot esculenta
  Intron number 1 from transcript cassava4.1_005213m (locus cassava4.1_005213m.g) derived from phytozome v7.0 (chr-ID scaffold09870; pos 181764 to 182332)
ctctgggcaggtgtggtgattacagctttggattggtgagtttcagttgattcttacatttttccattcttgtttttaaatactcaattatttctattgaatttgatgttcagaaacttatggttataaaatgtttgttccttgtgaaagttgattttatattttggactttagcatttcagtcatttaggatttttgtcagaagcttgaacatctagattcggtgaatttagactcttgttacattgttaggctttcaaccaagctggaaaggagcgttttacaaaatttatcattctaagcttattgcaatctgttgatggggtaaagttcatgttgatctttcaggaattttttgaatgcatgcacaaagatctcgttgtagcatttcctctgtgttgttgttttctgtttgttaaagggcagtctgtgtctaatgggtgatgaagaacactgcacaatgtagggttcatattttacttggaattagttaatcatgcatttctactgtgcagggacgagatacgtttcattgagaatgatttttgtctctttatgtggacagtttt

SEQ ID NO: 45943 - DNA, 616 bp, Manihot esculenta
  Intron number 1 from transcript cassava4.1_012582m (locus cassava4.1_012582m.g) derived from phytozome v7.0 (chr-ID scaffold08085; pos 27892 to 28507)
gcactgcgcagctctgtcttgaatatttcacccaggtacgatctctccctcccttattttctctacattcttcttccttgatttccttttctttgattttccctctctgtgaccatctgactaatgctttatgcatattgtaatttgaattcaaatcggaaattttaacagaaaattcgtagagaatacaaatttagggtttgctagtagcataattttgtaagaaccaagcttaattctttattatcataggaaagaaacttagggtgtttttggcctgtgagtagtaccaatggaattttagagaacgaagccaaattaatattttattgtcattatcattatcaccaaatatcgtgaaggaaataaccacttatataggtattgacttgcgttttcccctggttagatgcttaaacatgcgcccatactcctgtacctgggttttgcaacttagccacatcaaagattgaagaaaaagaaaataatgcgaaatccttaagaaataatgctaaatacttaacaattagttatactaaagtgcatgtacctgtatatttgtgttgtggtattaataaattgttgtaattatagttacatttatttgcaggaaaag

SEQ ID NO: 45944 - DNA, 657 bp, Manihot esculenta
  Intron number 3 from transcript cassava4.1_010980m (locus cassava4.1_010980m.g) derived from phytozome v7.0 (chr-ID scaffold04457; pos 61615 to 62271 reverse strand)
gatattaacgacatcttcaaaaggtaagctgttctactttttcaatcattttgttttttaaattttatacaaattgcaactgctgcgcccaaaataattctaaggaaatgaactcggttatggttctgggatgaattcgtattttttgttttaatggattgatttgattctggtaaatgttgctttaattataatcctctaatatggaaaaaaaatttcagcttcaggttacaacaacatgtttctctaatacataaatccgtcatctctattagtttgtcttgtgaagaattctgctaactttagcttcaggttacaacaatgtggtttgttcttttaattgcaaaagcttaagatgcttatttgcttaatacggcacctagcgttcctgtaggcgtgtttaaactactttgtagtctttctgttgaccagatgttattctccttgatctaggactgctgtcatagcttcacaaaaagtagatagcactatctttaagatgttttcctctagaaatttttaggtctttgttgcattcataggccttcatgccatctgacaatcattttaacaatgtcttacttttctaataagttactgaaaaattcattaatataacaaaatggtctctctagtttctttggtggaggaggcgac

SEQ ID NO: 45945 - DNA, 493 bp, Manihot esculenta
  Intron number 1 from transcript cassava4.1_004808m (locus cassava4.1_004808m.g) derived from phytozome v7.0 (chr-ID scaffold08873; pos 448641 to 449133)
gcataatcactttggttcccgcgggaatttcatcggtgagtgatcggtgatcgatgcacttgattttggttttattttatgtttgtttgctgggaaagcgaaggataggttgtaaattcattagaatttgaagttggaaaattagttgatagttgagagaaaaggaagtgaaagaggagtaagttaattaatgtttagatacttttgtaattgatttgacttcagggaaactgaagtgaatttatgtcttttgtttaggattcaaagttggaaattagaacgttaaaatattgatagagaaaatgaaaaagaaaaaggtcaattacactgtatagaatctaattatgtttgtagatcctttttgttttgggagttaactagctttttaatgctttgggcgcgcgtttagtttcggttattaactgaatgaaaacattgtcatttcactcatcttcttggctctcagacctgttgtcggagctgcacaataaat

SEQ ID NO: 45946 - DNA, 883 bp, Manihot esculenta
  Intron number 3 from transcript cassava4.1_014198m (locus cassava4.1_014198m.g) derived from phytozome v7.0 (chr-ID scaffold12317; pos 45524 to 46406 reverse strand)
gatttgaagtgagtgctcgtgtttttagaggttaaattgcccttttcatgtctgcctgatgcttttgtggaatctatgcacagtgaattgtctgttgttttactcgaaatttctagcagttgcttgtaaattattgaaattttggtttagttgttccgttttttcagtggcttgcgaatctctctgtaattttttgttgattgttaatgcacttcatcctcaaattaccacacagtcaaatattttccttaaggaagattttgaaatttgccgttgcattaggaattgtcatttgttgtttgcggcattgtgttcatatatactctatagtattttgttcagataggatggactcggtcctgatgattaaacatggaaaaataacatattcctttgaaggtctgtgtagaggactgcgtggcccaggttgttagagcgcccctctgctgatacagtcatgctgttgcaaatatagcttgatttagtaattttgattataatttttatcattattgttattattaaatatcaacctagagcaacttacattaaggcttctcttacgtgcaatagaagatgggggaaggaagcatggtccatgttttaaacatgtattcaaattttttgttcaatacttgtaagacatgctcaggacgaggactgttttctgtaatcactaatcaccatttgatagtttgtaattatgctataatttgttagagcaccctttcatgagtgtttgtttcaactgtttattttgattgtttgacattgattactgtcccttcgttttggttataaagtgctgtcttccaactatttgaaacatatgtaccttgctaactgcttgcaaatcatcaggcattggtactagaggtctgtg

SEQ ID NO: 45947 - DNA, 421 bp, Manihot esculenta
  Intron number 2 from transcript cassava4.1_009730m (locus cassava4.1_009712m.g) derived from phytozome v7.0 (chr-ID scaffold07520; pos 863283 to 863703)
cataacttgccacgcttggagtcccgatcactctagtaactaactttccttttcttcttcttttcatcttccattaatgatttctttctttatgtttgatttcttggaaaatgtgggaaaaagaattcgaatcttgtgtttttgattaaggactgatttcggacatattctttgttcgttgctcgaataaagaggtctgttgttacatttacttatacttgtttgtctgagggttcttttcgataggttgcattaaaaaataaaagattttgggtttgtatttcgagtgtaacatcattaaaacaccacacgttgtcgttcaaatgctcattcttttcaaatccctatctatcgaaatgattttcttgagtggtgactatctccattcaatttgcagtgattgcactttgtcccaatagca

SEQ ID NO: 45948 - DNA, 449 bp, Manihot esculenta
  Intron number 1 from transcript cassava4.1_016355m (locus cassava4.1_016355m.g) derived from phytozome v7.0 (chr-ID scaffold02973; pos 170454 to 170902)
atcctctgcgaattggtgagttttactgttttagaacagattgatcataggactaactgaagctagacacctgattacataatatcttgtttctaatttggaaattttagttcctgatatttgtttttctatttcttctcgtccatcttcattgaatttgatcgcttgcttgaaattggagaatttgtctagattttacatgggtaacttctcatttttgcaagaacatatttttgggatatgcttgttttttttcacgaattctagtttttaacttcttaaaaaaggaaagaaagaagtgtctgaaatctccctttgaagttcattgatctgctcaaatttgatgccttttactttcaagttgtcactttcttcgaaagataaataatcgcatgataatgatgtcagatgtacttttgtaatgcagggcctaaagaatttgttgcttt

SEQ ID NO: 45949 - DNA, 624 bp, Manihot esculenta
  Intron number 2 from transcript cassava4.1_016355m (locus cassava4.1_016355m.g) derived from phytozome v7.0 (chr-ID scaffold02973; pos 170924 to 171547)
gcgagtaagtagtctcatgttgattgtttcttcttaatttcattctgagagaattcataaattaccatttcctctttgaacatgttttcacacaaactaataaggtccttaatctgctgatgattgaaaatttgaattgatatagtgagtgttgctctcttttaggacttggttctcactgcagggaaagaataggttctttaggtactcttttttttttttgtaagtagaggtacttatttaatgagcttattatgagaacaaaaagtcatatccgatgtttggtgagctcttgtgaacatatacacaagtgctgaatcattaacactttcttttcccaacaactacaacagctaagtcttaatcccaaactatttagagttggcaactgaatttttttttattgttgttcaacagtattagacaccaaatctatattaacataaattgtaagatcacaccagctagaatgccgtcaagtaactttttcatatgtggagatttttactttcaagatgctattttcttgtgctaattgtgggacatttgtgtggctattaaaggatgagtttgtaaacttcatttgcagacaatatttgagagatacgataaagataggagtgg

SEQ ID NO: 45950 - DNA, 807 bp, Manihot esculenta
  Intron number 4 from transcript cassava4.1_015743m (locus cassava4.1_015743m.g) derived from phytozome v7.0 (chr-ID scaffold07478; pos 456359 to 457165 reverse strand)
gttactagtaagtgaataatgattacttcctttatgggttcaggatttttgcatgaagcgggttggttgtgtttctggctgtccttcgtctgttcaatgtggtaatagtcctccatggatgagttgagccatcactgaatttcttggggtagtttcatagtaattatgaaccaatattaattaacagccttcaatggggttatttgttatacactggttccttagttgctgtgaagctaaataatttttttttcttcttgtgcatgtgctttctttaatttagattcctagtttttttatgtccagttagtcgggatatgcaatttttgagagtgtagctacaaagtttaaactgaatcaatcatcgttggggaagaaaacaaagatgaaatcaaattagctagatatgcacacatgctacaattgtttgtagtccgtcattgcaatgattttgacagtgcatcgaattaacatgtcttgttcaagtgattatattatttgctactgaaatgatgattgagaaacagtaattaacttgacatcgcaataaatgtgttatggctgcactagcctttctttaagggaaattttatttttttatgaagtttatcattgcattgatgggcattatgaagttccccattattccaatattcgtaattgctttagtttatccttgtcttcttccccatttcatatgcttgagattggtagaggattggcaagcatataattttgttcatcttattttacggctgttgtattggtggttttgtaactcagttttcattgcaatgtgcagtattc

SEQ ID NO: 45951 - DNA, 431 bp, Manihot esculenta
  Intron number 1 from transcript cassava4.1_011717m (locus cassava4.1_011554m.g) derived from phytozome v7.0 (chr-ID scaffold07520; pos 2151446 to 2151876 reverse strand)
accttgcctccctccaactccatccctgatcacaggtttctttcctttgttcttcaaatttataattcttgtaattttcagttgtttgcttaggctctattccggtgggtgtgcgcttaatgaataacatttgaattttaagtcgattgcaaatttttttaatttgatatcatgaaaagtgagttgattgcttgatcttgagattctttgatttttttccccccttctttgaacaagtctttgtgatgaaatgtgaatggggttttgtatcaacattgcaactctttgatagttcaggtgtagatttggtaaattctattatttttcttttagcttttcagttttctgtttccttttttttgtgcttctctaatgttataggcacgattcttacagacagaggctggagccggaggtcaaggatccaattg

SEQ ID NO: 45952 - DNA, 827 bp, Manihot esculenta
  Intron number 1 from transcript cassava4.1_010445m (locus cassava4.1_010445m.g) derived from phytozome v7.0 (chr-ID scaffold03602; pos 525589 to 526415 reverse strand)
gcttgtgtggttcatcttgcaggtaagctgagcagcttttgcatttgaaatggtaggatatattaccttctctcaagttcctttttcactttttattggtaaaattttgcattctatttatattatttttcttttgatcgagaatctggacaagtgtgttttctttaggtgcttaatgctaaatgaaaacgttggatattagtttcttgttccaaactggcggagttgatgttgttcgtgggttgtggtataagtctgttttaatggctattttgtctgtgtggtgtagaaattttgactgttaaccttagttacaagtatgcagtttcttctaagaatgtgtcagataggttggattgtcttttatatcctaaaaattttaatatcttctttctattttgaagttttaactgatgttcatttgctgcaaaggagtttcacttgtgtgggagcaattcctaatcgcttccttcaacctggtttatgagttgtgcatttggattgttggattggcattcaattgaagaaacttataccatctgcttgctttcctatatgctttcacaagtgatcccagctttgtgaattttaaaattaaggaatccatcacgactcagattgcgtaatattgcttgtgttgtttccccttcctttccagaatgatttgtggttttttgagctatacattttctttcattttaacaaaaactgtgacatctttgttggcaagaaagtgaggtttgcctagcatgagtggtgaatttgatagttattaattaaatacattttcaggcactggggaccattcatttgaacggagattgcgt

SEQ ID NO: 45953 - DNA, 987 bp, Manihot esculenta
  Intron number 3 from transcript cassava4.1_019141m (locus cassava4.1_019140m.g) derived from phytozome v7.0 (chr-ID scaffold04450; pos 86659 to 87645 reverse strand)
caagaattagggataagtacccagatagaattccggtgagaattgattgttgaattttggttacttgatttttgaatatgctttcagtgttgatgaatggagtattccgaattcaactcaaattgaatgattagaatataattacaattgatgttccagtttatctgttgatgttgtgttttggggatgcactaagtaacttaatgcagctaagttaggataaagaaaggattaatgaatgtttttcacttcaattgtgatggctgaagtgtctaaagcttatataaggaagcatctacatcattttcatgttagttttctgctgagtagaaacttatcatttacattctgaagtggagtgatagtgaatagagattttataagtcattcttaacaaatgctctctggggcttttaatggaatgttctgttcttgtttatcctctgtgctgggaatatcctgcctggaataaatagaacaaaagcttttgctatcatgtcttcttttcaacaagagtaattttaaaaatttgtttgctgataggatcgacttgatggtgttgcatattttggggttatagtaatataagcttgattatttgttaggctgaaggctgagcctgttaaaggtgcctccttctcttcctccctctctctccctgacggaaatgagggaagaagaaaggaaaacaataatgttggaaggagataacatcagtagtgtttgatgttgcaatctaagcacaattctttgttcacttaatgattactactcaattagaggggtgttaattggattccttgcttgctggactgttatggtttgctcaggctgcatgctgtttactgattgcattatgcaatggtttatctttataaccattgttagcatcaactcacacctttgtattctcaattttattcagttttctttattttcatgcattttctaggtaattgtggagaaggctgagagaagtgatattcc

SEQ ID NO: 45954 - DNA, 651 bp, Manihot esculenta
  Intron number 3 from transcript cassava4.1_023762m (locus cassava4.1_023762m.g) derived from phytozome v7.0 (chr-ID scaffold08873; pos 456089 to 456739)
agaccattcagcagaggtccaactcattgttccttgtgaacttcaagagattgttcatgctaaggctgaggtatcctttttgtttctttgtttttcacttacattagaaattagaacctgatatgaaagattccgtgatggtggttttgggattctaagtggtatcgaattcatttgaaaaaaattttattgcacaagtagaatgaaaccaaactgttttgaatcatttgttggactacccactacgaataaaaaagagagctgtttgtgatcagcaaggcttggttggtttgtcttgcaagtgtaatgtaatcctcaaagctgaaatgggattccattctgtcctttgacgaatcaaaggcattctagttgaatggggaatggaaaacttctgttttttggtatagttttggcattgccattatattatattttaattacattttcaagcgaaccagaagttcttgcatgtaaatttagtttctggaccgactctagccggtctctttctcataatttatgtaggaatttacattgggagaatcatggttaatggtgattgatgtgtaccatatgaacattcttcttcattcctcccctgcccatacacccaagagttaataactctttgtaattgtggacaggtagggg

SEQ ID NO: 45955 - DNA, 916 bp, Manihot esculenta
  Intron number 2 from transcript cassava4.1_007997m (locus cassava4.1_007997m.g) derived from phytozome v7.0 (chr-ID scaffold11998; pos 1238622 to 1239537 reverse strand)
caggtttgttgctttgtttagctagtttacaattttcatatattttagttgcaagattgtatgtcattatgtatacttggtcccattttttaattgccatctcactgtaacatgcaaaacattcttgtggttatggtagtagcatagtagcaaaattgtacgaaccatcagatatagtagtacacgctcgtgattgcatcaaatataagtaggacatgcttgtgttaatggcatgattacagttttttcttttggccttgatgttagaactttgtgactgttttaggtttgtgttaatctggagtcactaaatgttggcttgctactaagttgaatactactctgttgattgggcaaatatgaatgaagcagctaggtatctatttgagtgtaattttatggcatgaaattcgtcattttactatttaatgattaaataaccatctcattttttatttaaaacttagcaactaatatgtaatagcttctgtagatgaatcgtaactttttgctgtataataaacaagttgagagaattttctgggtatgtgtggtgtctaattcatgatccgagtttgctttgtagcacgcttgtatgattttgattgactgctgtgtgatttttgtattgaagatgtttgtcattctgccatttgctctttacattccactcttgcttccctttctattgtctattacatcaagttaaaataaataaataagcaatgtttttttcctctcgagtttatccactttatttgtagagtttaacaggggagtcttttcttttcctcctcctcctctctcacgcattagaaaaatacttaaatccatgatgtgttatttcttttctgcactatgagcagtgtttttactatttttggtttaatatcatcgaacttaatccacaggtact

SEQ ID NO: 45956 - DNA, 842 bp, Manihot esculenta
  Intron number 1 from transcript cassava4.1_001450m (locus cassava4.1_001450m.g) derived from phytozome v7.0 (chr-ID scaffold04450; pos 305270 to 306111)
agcagcctttcttccactcatctgaggacaagaaggtgttagcttttggttcatctggtttctaatttatccaaaatatttttgctttttttttttcgtggtcaacaaattatataggtttcctctggttaattttgtgaatttgtattgtctgacctgattttgcttaatatgtaaagtttcatgcatccgtttgttagttaagcgtgcttagttttaaatatatatttctgtgtgcctcgatcttgctttcttgtatttctcaataaaatgggtgcttatgggcataacaactctgcttcttttgtatatttggagttttgtctgtcgtggaagagaacatgaattttctgtattttttaaatttagatatttatgattgttactgaattgaggttgcatgaatcagaatggaggttatctaattcataacattttatgtgggttggacagtcatatgagtaatagtcgaggaaaactcttatgcaattttataacacttttgagtgttagaattacataatctcaaaatttaatttcatataactagttgtgacctagtgatattgattagatgattccttgatttaggcagagatgcccatttttatttggattcattaaacatttaatttaattatctacgtcgcttggttcttctttagcttaattatgatggttgtgatcgcattgactacttttggaactagttacaactttgtaattgaaatggtatcataaacatgcttctgggtttggaaatatatcgcttagatgtacagtaattaagtcataacttgtttgctttgagctcatgccttttcttttgatggtgtagcttg

SEQ ID NO: 45957 - DNA, 355 bp, Manihot esculenta
  Intron number 3 from transcript cassava4.1_029578m (locus cassava4.1_029578m.g) derived from phytozome v7.0 (chr-ID scaffold04457; pos 918946 to 919300 reverse strand)
ctcaacaattgaagggtagtagtatcaggtatttgtatatatcatttaattgggcaatttgattcatttatttgtactttagtcattacttagaccacttccaactgttaaagggaatggatagtgctgatcagtaaatccattaaatagttgtgtttttgtgaaataaacaactaccatttgaaactttgatgatgctagatctggtttgcgagatcattttacttccgttttgtgataatgtattctcatttgagagggatctttttcctcttcagcttgtttcttttctatagcgttcaatttacaaaattgctttctatggttaacagctttggtgcagctagaattaaag

SEQ ID NO: 45958 - DNA, 345 bp, Manihot esculenta
  Intron number 2 from transcript cassava4.1_029578m (locus cassava4.1_029578m.g) derived from phytozome v7.0 (chr-ID scaffold04457; pos 919304 to 919648 reverse strand)
tccagagctttgtgagttttctttcttacccgtgttcttcttttcactttcttggatatcccttttttcaattttttttctattaatttaaatgaacaatgttttttttaacttataaaattttcattttcttctaatcatacattattttataaaaattggtctgaatttttttcttgtgaaataagtcaaccaaatagagttctcttctttgttttttaggtcgactttggtagcagtgtttactttgttcgcgtgcatgtatggaaatattttacttaattcatattttttttttgagataaatgctcagagaagctaaggatttcaaacagttggattatc

SEQ ID NO: 45959 - DNA, 765 bp, Manihot esculenta
  Intron number 2 from transcript cassava4.1_017548m (locus cassava4.1_017068m.g) derived from phytozome v7.0 (chr-ID scaffold00708; pos 382378 to 383142 reverse strand)
aaacttcttgcgcagcagagggatcttctggtacttatttcttaattgcttgtataagtttactttccattgttttgatattgcctattcagtttttgtcatcaaaacaagttaagttcattgatatgaatgacatttgagtacaaggaactgaaatttagtgggatttttcaatttctttactggctattagcttactgaaagaaacagctgataatccatggatgttaacaccaggtgtcatacaccagaaaacatgccttttcaagcgtgtttctgcattttttttttcttttcatctaacgaattttgatgagaaaaatagtttgtgttctcaagctaggctagatctcgcagcatgactcccttatcaaattttagaaatttccttgttaagtttgagccttttctctgtttctcttgaaagcatttttcacttcatagtattttgtttgaatgataccctcaagtaggggccttgttttgaacatcgatggaaatcaaattattctcatttttgggattagggaacatgagcacatgaattttcattatttaatatattctagtttatgaacaacgcatgtcattgctttactactactgggatcaactacctagtgtgcagcacttgaccagaaactggccattgtgctcaagtaaaaatttgtcctcatcttgttttactttgtaagattcctaatgatttttaataacattcttttcctattattggtgtcaggcaaagatccctgatattgaaaa

SEQ ID NO: 45960 - DNA, 601 bp, Manihot esculenta
  Intron number 1 from transcript cassava4.1_015873m (locus cassava4.1_014000m.g) derived from phytozome v7.0 (chr-ID scaffold00847; pos 942061 to 942661)
cgtcttcctcctcgtcgcatcattcgggacgtgaggtaaataagtatattcgctctctttttgccttgttttgtgggcttttgcatttctggtacctttcttcagtaatttctgattgatcgcgccgttctgactgcagattagagcttgatacggtttaaaattgatgagttgtttgtattctgtataagatttgattcaactgagtagctttttgaggaattgacgttccattttcaactgcttgcactgaaattgatttagaaaatgaccttaattatttggcttctaagctgtttaaagttgaatgcaatttgagatattatatgaattcttaaatcctttgaataaaaaatgtttgtggtggctactgaaactgtattccactgagtttcgataaattacattatgtattgtttttttgctgaaagtttgaaactccttgagcagaagatttattattttgtgaaattggaaagaagtagctttcatgtgtatgtcttctttgattccctgttctgtctcttgttatctgacatttgctgcgtgccattttttctgtgtagacattttgcaaagttgttaggagctgggcttcaaa

SEQ ID NO: 45961 - DNA, 840 bp, Manihot esculenta
  Intron number 2 from transcript cassava4.1_005389m (locus cassava4.1_005389m.g) derived from phytozome v7.0 (chr-ID scaffold09507; pos 139430 to 140269 reverse strand)
accacgccgttgcttctaaggtaggctatctttgttttcagagttaaattcatctataatccttcatcgaaagcatgcatagccgttgcattcacttttggaatccaatgttcctcaaccggaaactctctcatgtttatttgtctgcttttgctccttttgtccgtttcaaattcaaatatcatcaagtattcatctgttaactccaattcaagtttccatacaaacaccaccagaaagttcaaatttacttgaaggtggatcagaaaatgcaattcatgttactctttagaattcccattatgactttaaggtcccatgtaaccgaccaagcattatgatcgcatgatttcttatcactcgtgtccatcccttgctcctatttcaattttaatttattccatcttgagagatctaattttaaattcagcagcattttatagatataataaccttaattgtcagatatttggtcaccttgtttttctacgcgtcaaattttatcttctatgcaataacactcattatactgctgttagtaattggctacttaacgataataacgtaccacaacatgatagatctagaggactggcaaagtataatcacagcaagggtagcaatttggatgtagctcctcagggcaatcttagcactgcctcaattgctgtctggtagattcatattttaggaatatggttctgaggttctccaatctcctttctttattaactttagcaaatggcaatcattggtctgttgtgttcataaacctgcacatagctggggaattgggcatctaaccaagttaatgtttgttcatttgttgcagcagaactt

SEQ ID NO: 45962 - DNA, 801 bp, Manihot esculenta
  Intron number 1 from transcript cassava4.1_008920m (locus cassava4.1_008920m.g) derived from phytozome v7.0 (chr-ID scaffold07543; pos 347127 to 347927)
ttgctttgaataaagcggagcttgttgacgaagaggttagcatctctagtctgcaatggttctgtgaattctgtttttgcatcatggttgattcatgttttaaactctcagtagattgggataccttttttctcttcagtttctgtaaatatggatgctgaggttgctgcttgtttattttgcttatttttgagaaataactatgatgatttattctaagttagaatggtggatactcgcgattggctaattttgtcattgtttgccttgctctggagttgcacatttaatcgattaagttctgaggtggtggaaacttttggtttttgcagcatctctggttgatgtctaatgtagtcagtaccagtagcgtaatatgataatgacaggatggttacttgaccttgctttagtttgttacaaacatggagccaaacaatgatttaggtttataatggttgtgattttcattagtaggtatcaggatcacaatgtgtaggacggtaggtgtttatggacggagagagctatcctttgttgttgctcatctctttttgttctggttgttgttaatttcattaaaattttataaagatgatttcatatgtcataagtttcttattagtctactcttgtgcatataaaagtactagaaaagctccatatcctatcctaaccactgaacgcatatccggtagtaaaatgtttacttcttcattttttcgttcagtaccattgattgtgaatttttgtttgacttatgtagacgttggtggcctggaaacgtagactgcgtagctg

SEQ ID NO: 45963 - DNA, 1052 bp, Manihot esculenta
  Intron number 1 from transcript cassava4.1_023692m (locus cassava4.1_023692m.g) derived from phytozome v7.0 (chr-ID scaffold07478; pos 443620 to 444671 reverse strand)
tctttccttctaccatcattggaagaaaatctgtacttgttcagtttttgttaattatctttcaagttttttaataacttgtgttgatttaatgtttctttttagaaaggccaatgagcagctgcgttcaaatttttgtcatcttgtgggctggtggtgacattgatgatcatgtagagatatgtttgtgtttcagtgttttttttcttttgggtacccaatgaaggaagtgttaatgtggttttagagagttgtcttgagtcttgataattaataaagctgtgagatggtgcttctgttatgatgtgtttaattcctttgtgatccttcccccaaaatttgtgacttttaaaaggcttgttttctgagttcaggtacttctttttaaaacttttcagcctttttctgttcttggatgcttgatgttgaagttgagtttggactgttccacttctttgtttttatctctctcctctggcaacctcctccttccttctacagccagctagcttaatcacccagattatcattttaaatcaaaatttgatattttctttcttttttccctcatactaaaactaacccaaagtggggtattttctcttgtatgttttggagctatcatttgctttctgctttccatgtccacctgcctttgtttgtttgatggctgataatgaagttgtgtgtttgtgtttgctagctgcatagtgtcagttgtcttctttctagtctcttttgtttttgctctctgtcttgtgtagggtcctacactatatatccatgctctctggattaatggctgccatgtttcttgctcatttctctttttgttatctcgatactaactgcttgaggatgtgcgagtcttcctatttggtgcaattacttgcttcttttgtttctttgtgccttgttctttctttctttttcttttttctttttttaatctctctctcggcctctctactgattaaattatttacatacggtggctcatcgtatatctcgttgcaggtgcaacatttctagtgtggttcggacccacggtt

SEQ ID NO: 45964 - DNA, 761 bp, Manihot esculenta
  Intron number 1 from transcript cassava4.1_011599m (locus cassava4.1_011599m.g) derived from phytozome v7.0 (chr-ID scaffold08873; pos 335180 to 335940)
ctgttaacctgagtacaagtaagtattcagtaatccaacttccaaaggaagtttgatcagacatgtagttcttttacactctgtcgcctgaaagataattaaaataaaatgcatccactgatatcttctttgcatgtttatttgtttaaagatttcataggaatttgcttcatgtgctcagaacaatccatcagaatactggtaccatgcaatgtaatattggcttctcttttggaaaattgtcatccaaattgctgctctcatcatttttgctagttcaaaagaactatattcttaaaaaaaaaaaaagataaatatgcaggaaagatttttagtatctgatttggtggcacgcactctgcagtatatatgtgcttgctgctctaggtcatcctcccttttttcattaaattacgatcatagcacccactgcattagttttagattgtttgatggagtagttttatcaagaagtactgtgaataacctagcattagtacaattattctaatatcagaaatttgcattaatttaacatcgtgttgcacagatatttgtggaagagtccaagtagtaatgagtaaaaaattggcttaatgatataataatgcaaatcaatcctccataacacaataaatattgcactaacttttcaagtagtgttgtaaatagatttgaaatttatttgtctgcatctgtgaaagattttgtggcatggaactgcaggtacagtgttcaattcagcaaaagcaagcaaccaa

SEQ ID NO: 45965 - DNA, 721 bp, Manihot esculenta
  Intron number 1 from transcript cassava4.1_019091m (locus cassava4.1_019093m.g) derived from phytozome v7.0 (chr-ID scaffold02947; pos 37802 to 38522)
catctaccagacgcggcctccgattcttctctccggtaattgttcctctccctgtctcatcatcatcttacctgataaaaattattttgtttcaatggaagcatctgaagcatacacgaaaaattgtatgatctaaatctcttatataacttgaaggacgattttcgaagcgtttcactgattctgatcagtacccttttgttcaattgaagataattcttttgttatctcagattaacattcactcttgtttaagtttttgaagaagtactgataagcttttcttgaaatacctattcttaaggttaattttgagtcggtttgctttggtggaattaggaattttatctcatgttggggctatgaactgttttgagaaatcagaatttcatcccaaacatgttctattcttgtgtgcgaatgggtatttgtttgtttggcctgttcaaattattgttgtttctactaatagcattatgatggattgaaatttgatttatttgtgtggaggaaccattgaaactaagccaatgtctctttatatagagctaatgaattcttccttctcgatgcagtttttattgtttatgttgcctgtatatggccttgtgttacttgaggttgaaatgtaatagcatgcatgccaactctttattttacgtttatttatttattttaatttgatttttgttaaaattttcagtagcttgcatttggaaga

SEQ ID NO: 45966 - DNA, 914 bp, Manihot esculenta
  Intron number 3 from transcript cassava4.1_026047m (locus cassava4.1_026047m.g) derived from phytozome v7.0 (chr-ID scaffold03417; pos 7426 to 8339)
tcatcaatataggttccagtcagagaactcgccctgtatgttcctctctcacttcctctagcacctaagcagtggactcagaaactctccctctctctctctcttctttctttctttcttttttcttcttgtttttaacatgattttctcaatagaagaagggttaatatagtttactcatagaattgaataagaaaaaagaaaattgtaaaattttttaaatttacacatctacggtacactaagcattaatgattattaaagtctctctttaacttgttgagattttaatttgttataattttttataatttagtaataatatttaaaactttttgtcatattttatctttattattgagaatatattttttattcattttagaatttattttaaaaaataattaataattattgaagaaatgaaagttttaatttaattttgatagacatatatataatcattaatggtagttttaatgtaaacttaaattgtatataagtaattaaaaatctttttttatttagattttattatataacttcaaaaatatataaaaaaataaattttattattaaaataaaataataaataattttctaaacaactgttaaataattagttgaggtgttaggtagtatactagaatgctttactgagagctttaaaaatgtttaaaacatggtaataaagaaaaataataataaattaagtacttaagaacatatttacaaacgaataatatttatttcagttcgtaatctaaatatttaaaagtttatataatttatttatatatgaattcatacaaatttgatttagataaaataataataaattggggttgcgttgatttaactttgatgcattaattgcagggaaagtttccttctctactattccctcttgagtt

SEQ ID NO: 45967 - DNA, 760 bp, Manihot esculenta
  Intron number 2 from transcript cassava4.1_005146m (locus cassava4.1_005146m.g) derived from phytozome v7.0 (chr-ID scaffold05494; pos 198547 to 199306 reverse strand)
cccaatttgatacattgcgcggacaagtccaacaagtaagacctgtttttctctttctccatttctgtgtgtgtactcactccagctgaactgaattgatgaaacttgtttttgtgaattcatgcatattccttacatttccttggagacttttggatttttctgggtttcttactgcatttctacatcaataatgaggaaagtatgccatgtggcattcttttgacttggcttgaggctattctgtgcttgtggttttactccagaggttattgttatatgatgaagtatatggaaagttttattttactttgtcatgttagttttctagttttgccttttttgctgtgttgttattgatgcgcagttcttttcatctaagtatgtgcattttcaaatgcttagcgtcctggttgttattgtctttcatttaggccacagaagagaatttggactgaaggagttctagtgtatttggttggaaggaatgccaagtattcatcaaattaatttttcccctatggttgttatagaataatattttttcctgcctttgctattgagattgcctattgtcctttttcagagggattgggatttggaagcctttccataattctccgatctccacataattttggagcattaaggggcacactgaaagcatccctttcccctttttattctaatatttttaaccatgtgatagtgaggtttgtaatttcttgcaggctattcctttcctcgtgggttgtccgtc

SEQ ID NO: 45968 - DNA, 688 bp, Manihot esculenta
  Intron number 3 from transcript cassava4.1_005104m (locus cassava4.1_005104m.g) derived from phytozome v7.0 (chr-ID scaffold06916; pos 1745172 to 1745859 reverse strand)
tggctggtttgagtgttgcaacttctatagcagaggtaatgctttaatttttatgataattgttattagtttctcgcagatagtttcttcgttacttgcttttgaatttatattcgtcaaaagtttaacattgttatcagttcctgactgaaaatacgaaaagtttcttgttgtgctatttcttttgctgcttccctctaatccttgaacctgtttctcaccgttttttttttttttgtggagggggctgtggccttaactgctccatcctgccctttctgtctaccattgcaaacttccccctctttgctatcgtctttttactatggacttttacattcattgactaattttattagtttgcttagttaaagaaccagatcaatttttcttgttgtacttgtatttttgctgtggaacttagatgaacactttgaaagtttacttgtgcatacatcttgacgtttctgtgtattttgacgattagtaatttttttggtttatttaacaagctaatatcattatacctatataatttccatgatttttgcagaaaaggggaaagaaacaagatcgttatttaagaaaattcaatctgctgggcaactaagaactcaattcaggtttctttttgaaattgaatctgttggcaggtttacaagccaagcgagtacaatcgtgttcttgc

SEQ ID NO: 45969 - DNA, 700 bp, Manihot esculenta
  Intron number 4 from transcript cassava4.1_000241m (locus cassava4.1_000241m.g) derived from phytozome v7.0 (chr-ID scaffold04796; pos 286451 to 287150 reverse strand)
tggccttggctggaaaacttggtaaagatctcaaagtaagaatattagagaaactcattattcatccatggcagaaacttcttatgagcagtgttcagattaaactcaaaaaaagttacccaactaaataaattcaaaaattcaatttcattttatttttcactttgattcgattttaattttaaaaaattttaattatttcgactcgtttcagattttattaaaagaatttcagcaaaaccaaattgaataattatttttgaatgattttgtatgacaggtataggaattaaaagttttttttaaattttttttatagattttcaatttaaaatttattatttttcttcttattttgtaatagttattaaatcaagattgaaagaaacactttaattgaattttaaaatgtaaaaataagatataacttttaaaatttattaaaaattcaagcgatgaaattaaattaaaactattttaatttaatttaataaattaaattaaaatgttttaatttaatttaataaattaaattaaaacgatttgatttaatttaattttaataaatttctaaaattcagtattcaatttatactgtttaatttaaactgaactgatgtaatgtttaccatattttctgggatctaacatactgcaaattctgttttgagatctcagttttcaggaagagttacgtata

SEQ ID NO: 45970 - DNA, 507 bp, Manihot esculenta
  Intron number 1 from transcript cassava4.1_001051m (locus cassava4.1_001051m.g) derived from phytozome v7.0 (chr-ID scaffold06916; pos 1516252 to 1516758 reverse strand)
cggtaccgtttctttcttcttccctgaagctttccttttttgtttggccaccgaacttttatttttccttcactgttcctgggttgccttttgtagaaagtaacactgaaatgtcccaatttcaattagaatgagtttttaattcgtagtttaatatttttggtatttggtgttctgaattgtgactgtcgttttctcaatttcagttctgctgttcatgtagttatatatatcacagttttgaatttctgtcccatgtttttaatgctaatttgatgttgttgtacacttgatataactgttttgaatttttgatccaatgtttttattttttgatgctgatttcatattgttttaaattggatgtcactgtttgatttttgatccaatgttttctagtgctaatgatattttattagtaattataagtagaagaagtttgatcatatgatatcaactgtgtttgcagtagcccagggatctgctcttgaaaaagaggaaagtggc

SEQ ID NO: 45971 - DNA, 879 bp, Manihot esculenta
  Intron number 1 from transcript cassava4.1_002667m (locus cassava4.1_002667m.g) derived from phytozome v7.0 (chr-ID scaffold03866; pos 10264 to 11142 reverse strand)
ctctctctctctgtgtagattggaacttttagcaggtaagattgtttgggtaaattctccagtttgatccgttcctgcatacttaaaatcatatggatggaacattgtagatgctaacgatgcttcatttgcttattagagctctcaaagctatgactggttcatcattctagttttagttttctcgatagctattagttctttctttgatttcgccattaaatgcttttgtgtttcacaatgatttattattcaatgcaaccattgtgtatgtcgtatgtctgatcgacaattataaccggtgtacttatagcgtattagtcgtaatttggttgcttttcacttaaaattgggattctttcgtgacctttgttttctcagaaaatgggagaattaggcaatggatttgaaacattttgtgctttgtatgccatcatttctgaaatcaaattttgttgctgtttaagaaatatataaattattattgggttattggaatgtcggatattttctggcttgagaaagaaaaggagcaaatcttttgactctaatatgttgttgcttcctcttgtggtgcgcactgatctcctggaagagctggaagatttctaatgatacttgcccccaaaaaaggaaaaaaaacgccttaacgtctaagacatgaaaaaagggcttttattcttaaatgaaaaacaagttaaaatgcataagattaacaattcattatgctaaccctgtttgtatgctgatcaattggttagaaattgtactgataagaatttgtgctccacactacacgtttatcaaagctcttactaccttttctttcattttttatggttattttaccattttgcagaggctggctaagtcttctgg

SEQ ID NO: 45972 - DNA, 1015 bp, Manihot esculenta
  Intron number 3 from transcript cassava4.1_017867m (locus cassava4.1_017867m.g) derived from phytozome v7.0 (chr-ID scaffold07996; pos 376801 to 377815 reverse strand)
tgggagcgatattgtcgtgcagtttctgccattgtgtatggaacaactctacttgaattcactcatacaaagttcataattcacatttcattggtctcataatttatgcttgttctatcttctataggacaaaaatctaaagagttgaggatttgttgtttcttcttaaaggtcgatagaactcagtttccctctttggtcttttctgttgattaaaagcttcttgttaaggagcctggcttctctaatttataattaattttggttagtttagagatttgaaaactggttttgctggaatttaagatattttcactaaaatgcaatggctaaactttcattaatggaagaaaaattgcttccattctctcttaaacatggaaagctaccaaatttattagtacttaggattacacgtatctccaggttggaacttatgttctattaactgttaggagagactcaacatttgatgtttattggattccctggaatgatctcttcccactctaactactgaactttccaccaacaatatatgtgtgtgtgtatatatatatatatatattagtttagtatatcctgcaaaatttttattaaagaatcatgtcttaacaaggtatagtttatatgttgaccagttgtgtaattttagaatctcaggatgaagtgaatgccatgactagggaatgggtttccaatctcagataacaggttgaagaaatttcagcttccagcttgctttgtggttgttaaggatcgatatttcatttgacacatattcgtgtaggttatattggtcctcttgcttcaattagatcattcaaaattgaaaaagttgtcacagatgaattcccatgtctaatttaaatccttagttgtgaatccaatgttttgtataatggacatggcttccctgtctatctgaagttgtattattttgttggtttttgctcaagctatttcttaatttgctgacaactaatgtggttgaattttgtttattgctgcagtt

SEQ ID NO: 45973 - DNA, 594 bp, Manihot esculenta
  Intron number 1 from transcript cassava4.1_015142m (locus cassava4.1_015142m.g) derived from phytozome v7.0 (chr-ID scaffold08477; pos 116067 to 116660)
atccaagtatccctcttacaactgaagagtgggaggtattccttttcttcaattttaattattctgaaacttttagctatataagaaaaggtcatttcctattgctagaggccattgctctttttcattgtgcaactgttttcaagacttgcatctgcactattgtggatattgaaagcaagatttctaacattgcacaaagcaatggcctgtggtttttagaatttgaagcttggtggtgatacatttatgtggaatgtgatattcatatcatatttgatgaatcaagtattagagttttcagattacacatcagtttagtcagcatctttcatgtttggtttacaactttacatcatcctattggcatgtgttttgatatcatggtttgcagtcttaattctttctagaagatagaatatggacatacttcttatttccttttggtatggttgtttaacagggtttataccttttatcatcactctgtaacagttaaaatagagatagactggtacttggttatgcaacgactcggtgctgtttcattcctgaccttgatctgatatctggtctcttgttgttgtttcagga

SEQ ID NO: 45974 - DNA, 861 bp, Manihot esculenta
  Intron number 1 from transcript cassava4.1_031879m (locus cassava4.1_031879m.g) derived from phytozome v7.0 (chr-ID scaffold04883; pos 71994 to 72854)
gggtccataccggttacatcatttggaaaccaagtgtaagtggttactcgactctccaacaactctattaggcgaacattcattttttctgttaatgcagtgcccaacctcaccggttcctacaagccaacatgataatgaagatacttgtttttgatatgaggagcgaaatggttgttactcaatgaaaagtgccaacaaattaacctagtggagtatttttaatcaacaacataatcatttttggagctctttatggaaactgaatgttcctcccaaggtcaaaaattcatgtggagagcttactcgaactgcctaccaactcggacaaacctacgtgacaggcatatccaattagaagtccactgtgtcctttgtaatgatgccaaagcatcccttgaatatctattttcccagtgttgtgtggccaaagaatatttgcaaaattctatccctcagactctcggctgttaacttctaagaatggctggagcacaatttcctctcattgagtgaggataattgccaattgctatgcataattctttgagccatttggaaaagtagaaacgagtgactctagaatcatgcgcctatttctcatcaacagattatctccttcgcctctctatttcttcgtagctggtctatggtaacttgtaatttttttagactctcccacaagacgtttctttttggaagaagacaaccccatgctccttcaactgcaattctgatgctgcaattttatcaagcctaaacaaaatagaagcgggatgagtccttagagatgaatagggattcctgatccatgcttgctgcgtagaactacgaagatttcatatcccttttttgctgaaa

SEQ ID NO: 45975 - DNA, 871 bp, Manihot esculenta
  Intron number 1 from transcript cassava4.1_015066m (locus cassava4.1_015071m.g) derived from phytozome v7.0 (chr-ID scaffold11179; pos 159286 to 160156 reverse strand)
tattgggataataagcaagatatctgtacccgtatgtgagtttgctcttaattttacccttcattactttctcgttcgttattttctttccctttcttcgattcttgttgattttagggttaggcattatgtttttaatggaaacatgaaaagcccaaatgttaattttttttatatctcacgatgttgtttaggaggcccaagagaataccagaattttggacgatttggaaatgtatggttaatgttgtccaatttctttgagtgcctcataaaaatggtgtggcatgcgttgtttcacaggaaaaaagcatgaaagttgtgcttggcgttggcgaaatttaaaacttgggactatgtggatgctataatcacttttcttaagcacccatcggtctccttattatgtgctgtttctagtgtccttgtttattacacgacacatatttgatgacgctttttggtgatttagaaaacgcctttactttcttctttgaattgatacttcaatttcagtttattttgtttggttaagtggatggaaaaagttagagaatatgatatgtcagcactgccactatcaatgtattcatgaccttttcttgataaattttactatttagtgacttgctttatatgccatgctcaataattatagatttagtacccaaataagttgtttcagttttgaattctgtaattgctcactgaccttttgttgttccttacgtcctttgttttgtttttttttttgttctctattttctctccttttccttttaatgttctgaaactcttaatgggtctttttatgttccatatctatcatatctcagtcattttgcagaacatagacttgaaactttctcat

SEQ ID NO: 45976 - DNA, 771 bp, Manihot esculenta
  Intron number 1 from transcript cassava4.1_008401m (locus cassava4.1_008401m.g) derived from phytozome v7.0 (chr-ID scaffold04450; pos 13392 to 14162)
atcttcagcgattctccggcaacatttgcgatcaggtatcttctattcgtcctccatgtcatctgcctacaaatcaagggaaattgtataaacgccaaaatttacattcgcaattgtaagctagcttaactgaatttagagttctttatcactttggttttaaggaattcaaaatttctctagggaactctcttgtttcacatgtgctacctaagaagttcaagtatttggcgtcaaattaggcgtttgataccgttggtgtatttctgtgtgtggtgtgctttataactacgagttgtatttgccttgtcagttgatacattgggagttaatattgggtgatcagctactcttagctcaatataatcagttatggggtttaaattgagagaatctttgcggatttcggagactgctggtagtgggttttattctctgaaattttaacccttgatgtgtgatataattttattgctataaccatccatagtttaaaaggtagagaaaacttctatgatgttctaggttgtagctatcaagcacaaatagtgtgcaaatggtctaacaagtgttggttgctccactcacaaattttttggtactacttttttaatttcacaaggaagataattcgatattggttcttggcactctccactgaactttattttaatgacaaactgaatgtgtattggtctgtataagaaatcatattaggacagtcagaataaactaatttctttgattcatctttctaggttggaggctatt

SEQ ID NO: 45977 - DNA, 989 bp, Manihot esculenta
  Intron number 1 from transcript cassava4.1_014103m (locus cassava4.1_014103m.g) derived from phytozome v7.0 (chr-ID scaffold11341; pos 869820 to 870808)
tatcactggtaagatcatgctttatcattctctcttgtttttatttctaattccaagttctttccctagatttctttgttacgtatgtttgtcaagcttagatctacatggatttgttctttttgttttccatcatctctcccttcttgtatgtctagatcttgttttttttttttctttttgctctaaagctaggaattatattttattttatgaattgtggatttgctgcttgactttagataatattgtttgttatatctgagatttaaatgtaagctaagagaagctaaaggacagaaaaaggttgatttggattatatttaaatggggtttttcttaaaatgatcataaatgctgtcctacctcgcttccactgtttttcaggttcgtgttaactgggaactttgcagttgttattaggattatactgcaagcagttattgtggaatgggaatttttttttttttttgggtctatatgataagagatgattctctggttgctagcttgccttgcatgtagacatttaaaatcttctaaggatataatttttgctgatgaatttatatgactagaatgtaaacaatgagagggtgcagtatgtttaatcagatgatcagttcgatctcttagtttctgatgaatatgccctgttgctatggatttctcaatgcgttaatggtatccgttttggcaaaaacttgattggtcctcccttcagcatgaagtcaaattgttattgagccgttcttggtcatctcataattgacatgattctcctttttcttttggatattttgcattaattcaaagatattgtttgctcctgacgccttatatacttaactattctgtgattattcattacaatgaaaaattggaaagagatgcccaactgaacttgattgtcctgaattatgaggaagctagtttgattctcattcttactcctgttcttgttccaggtgaccttcacaaaattttta

SEQ ID NO: 45978 - DNA, 549 bp, Manihot esculenta
  Intron number 2 from transcript cassava4.1_013747m (locus cassava4.1_013762m.g) derived from phytozome v7.0 (chr-ID scaffold11635; pos 199134 to 199682 reverse strand)
aaacagggactacaattgttggcatagttttccaggtatgataatgcgtaatctgtatttatgtgtattttgatttccatttttctccagaatctggagctaaaacccagtttgatactttgttctggttaatcttatttagtcaatttgattgctttcccagtctcctaatttactattagatgtatttgagataatctggagtccattttgggattgtgacttgtagtttcacaggattatgtttttagactaccatagctctagtatgattgagttcactattcaatattttcagtactgatataggggatgaaagaacgtagattatagtgattgattatttggttaatatatgttagtgcagaaagtttatgatgttattcttcatggaatagtgtcatcatttcttgagttttgcggattgccagattgtttattgcatgttctgctaagcacttggccaaaacttacccagtgtataaaactgtataagttgtttagtttataactttgtatgtcttcttttgtctactttattccaatagg

SEQ ID NO: 45979 - DNA, 605 bp, Manihot esculenta
  Intron number 4 from transcript cassava4.1_017728m (locus cassava4.1_017728m.g) derived from phytozome v7.0 (chr-ID scaffold02421; pos 653572 to 654176)
ttggcaggacaagcccagaacttctcctaaatcctgtaagaattatattgctgaactcaaatataggcatattttatgtctgtctctgcatatgtgtttatttctgtttaatgtttctaaattttgcaaatgttcaatctgtttctgtttttctgttacacttgtccatacagatcacccctcttatagcctgccacgtaaataaccttttgtgtttcaatgcttggaaatgtgggaaaattaaatattcttgcaaagaaagaagcttagacacaatcacaaaatttcacactttgaatgaaggctaaggggaattttcttctccttgtggagagaagtttaggagattgagcataatttggacatctgttggtatacacaaattgctgaagtttcctagcatgacctaaatgctagttttttttatgagattctgtactttccactgttacttttatttgaggtttgctttttgggtacaacactatggagggtgttttgaatttcattttttgtgttggcatttctttttaacttgacatatagatcttgcattttacatgtacgttctaattcattgcatgtaatgctttacagattttgat

SEQ ID NO: 45980 - DNA, 743 bp, Manihot esculenta
  Intron number 4 from transcript cassava4.1_006018m (locus cassava4.1_006018m.g) derived from phytozome v7.0 (chr-ID scaffold07520; pos 342953 to 343695)
gttattgcttggaggtgtcatcaggcgatcagaaggttgtcacagccataacaaaatgcttataatttctaatgtattttcttttgcatctatgcatacttattatgataatgttgcctctacctgctattagctctcaagcgcaattcacgattaagtctgatagacataatttttcaaataaggatgtgattctgagtatcttgtttttctgttattctaatggcttcctgcttcctacttcaaagttgttattgtggatgtcaatttgtcaaatattgatgcaattgtgtgtttcttattttctgtttgcacttcctacgttatagtcattacttcatgtatactcattgactgaagaatgttgtttgaaagcgtgtagtcattctcaggaagtactttattgtatcatgtggttgtctgtagatcatctgttagttgaccttgcttgtgtcaaaaccgtttgtaactttattgcatcattataaaaattatattgtgcagattcgcttttgctttgttgtttttgttcgcttctctcttcttttttaacttttgtttctgcagattagcatgtgctactctgcgtttttctgactttgttttccattgctttggtgtgcatatacaataagtaaatatgttttcttttcaccaaaatttaaggaaactgtgccacaggctaatgtcactgtgtttgaaatacaggtgcttaatcgacaagtagtaaaatcggaatctgc

SEQ ID NO: 45981 - DNA, 689 bp, Manihot esculenta
  Intron number 2 from transcript cassava4.1_010117m (locus cassava4.1_010117m.g) derived from phytozome v7.0 (chr-ID scaffold08500; pos 295458 to 296146)
agattggaagaggaggctttggaaccgtttacaaggtgctcagaatttgcagatgctttagcatgttaacctaatggaaattgctgaacttgacattaattctttgaaatgtactcagcaaactgcattgataatgccttggtcattgtttcttatatgagtttgatggtcattgttttgatgtataattgttacaacttcattgaattcatgcttggcctggctcaagatcgattgtaccaaatatctgaagcatgtgaaactccgtgctgtttatttttggacctgtggattcatagttactttaagtcacagctgaatgtttatattgagtaaacattattacacgtgtaaatgagaaaattttcctccatacttagcttctgtaatgagttaaaaaaaaattccatgtagtgttaggatatagatattttgatattctcgtgttgctgtgtcatgtatttgctaaatattaggaacttaattttcttgaagagcataaattattacttcaaataatcctgttttcatctttttgttttccttaaagtagctcaattatcttatggtttcattctcctgttgaatatatgtaccagctttattcttgttcatattatcttttacttattttcattttcacaatgttgctagggaaccctcaaaagtggaagacaagtggctgtaaa

SEQ ID NO: 45982 - DNA, 859 bp, Manihot esculenta
  Intron number 3 from transcript cassava4.1_003908m (locus cassava4.1_003908m.g) derived from phytozome v7.0 (chr-ID scaffold00708; pos 482736 to 483594 reverse strand)
ggtcaagaggaaattgcaatccctgtacattcaacgtaagctatccttcgttattttgccatttatgtttattaaccaatctgtacaacatagtcaggtttttgaaaggttaattagagcgtgcaaacagatcatttttctctggctttgttagttttttttttttttgtttggtcgaatctggcttagtggagtttagcagcacatgatctcgttgatattacttttatttctgatgaccgtttactctcccctatcctgcttcatcagaacgtggacttctaattgaaaagtcttagatttatgtgctatggttggatgataaattgctgaatatggattaggcactgcttgcttttgaatcaaaaacaacttttatcgctatacaactcaaacatagatattgaattgtaagagtttgttttcctgtttggtcaaaaggtcatgtggtagagcgtataagtcgtcttccatggacatacttaaaacttcagttgttagatttagaacagccaactttgtggggtttaattgaaacttcggtgttatcagtatacaattcaaacatagatattgaattctaagagtttgttttcctgtttggtcaaaaggtcaagtagtacaattagaaattcagcgctacacttgtgctattgcaataagtgaactatgtggtagaaaattaagtcatctgccaagaacatactttaaaacttcaatagttgttagattcagaacaaccaaccttttggggtttaattgaaaatttattagtatttttgtgatggttagttttcttaccttgattttgatgttatatgcagtattgaggcggcttgtgctgctcacccgactgccg

SEQ ID NO: 45983 - DNA, 622 bp, Manihot esculenta
  Intron number 1 from transcript cassava4.1_003908m (locus cassava4.1_003908m.g) derived from phytozome v7.0 (chr-ID scaffold00708; pos 483883 to 484504 reverse strand)
cgaggattaatagagtcaccccaatttctcttcaggtagattaaatttccactaaaacatatcttcaccaaacacctctttaagcttctccaattcccttcctagatctgcttcttgattcctttccttgttcgtttctgtttgttcaatcttaattctccatgttcttcagtagttttgttgttgatacccagttttgttgttagtgaagtattcgaggttatttaaatcgagttttatgtcaaacaagagaaatatctgtgcgtcgttggaattttgagatcctgttaagctgcagtacgttttgattggatttggttttgtttggtttttccattcttaagatctggtacagtgtagcttcgagttaggtgtggtttggtggttgtgatttgcgtctttagctgtgcaatattgtgttctacgtttgacgtttgttagtggttagatcttattttggtggaaaaaatagtgagttttaactgggaactataaaagcagttaacattgtttctcaaaataggaatcccaataagccaattctttgtctgttttctggaagcatttggttagtttatattttggtcctccttgttaacaggtctcttgagtctacaacaac

SEQ ID NO: 45984 - DNA, 557 bp, Manihot esculenta
  Intron number 1 from transcript cassava4.1_013444m (locus cassava4.1_013444m.g) derived from phytozome v7.0 (chr-ID scaffold05689; pos 13314 to 13870 reverse strand)
gaggtatgttaattatgcttgtagtttgaataattggatttattgatcatgtgtgtggttcttacccaattctgagctacattgataatgtttgatatagtatatacccttttggtttcacaggatttagcttttgtttatggtatagcttcccccttattgattgtttctgatgtctttttcgctaattcttctgcataagttctagtttcgacgataatatcattaattttcttcagggttttgtgtttaaactatttcttatggaagggattttctgtgaaatggaatagttagtcttcctagttataaacttgataattttcaattcccgtttctttcatctgaaagtattatcatgattatgttctggtgggtgtttctctgaccagcttcaatttccctgtcattctgcctctttttggaggacaatttagtatcttacagtgaagaaatcaatattaatgtctcatcatcatcaaccttgtccttgccattgtattgtcactctacttcttgctaatgatatgtgtgcacttgtttcaggttgtcacctt

SEQ ID NO: 45985 - DNA, 439 bp, Manihot esculenta
  Intron number 2 from transcript cassava4.1_029440m (locus cassava4.1_029440m.g) derived from phytozome v7.0 (chr-ID scaffold00847; pos 1402771 to 1403209 reverse strand)
gaatccttcgagggctttagtgctgaggcagctgagtgagttaatcaaatccctcgctttttttctttggttcagctgcttcaattttgaatcccttttcttttacttgtaaacgtttgattcaagtagacaatacacgactatgattttgttccgcaactataggaggattgttgacatatacttctactgtcttcatgtttcctttttttctagtggaggtttatcttgaaagatgatcctcgaattttttatgtcacagacatgtgagtgctcagctacttacagcctcaatgtttgtgacttagatgctttagtgtaatcttaagtgtgtccacggtagatatatgtgtttctgcttgtagtgcctcactagatgctagttattcaatgttcttatttttatgattttcttttctctgttgatcctgaagattgg

SEQ ID NO: 45986 - DNA, 346 bp, Manihot esculenta
  Intron number 1 from transcript cassava4.1_000226m (locus cassava4.1_000227m.g) derived from phytozome v7.0 (chr-ID scaffold03079; pos 246100 to 246445 reverse strand)
gagtcagtcctgccaaacaggaggtacaattgcacattgttcttgttcacaattgcaaaagctttttcctaattatctttaactctggtgcttagacaattgggtataaattcaaaaagcaaatataatgtcttgatgtaatctactctgacttattacgtgggtcatagtttagagctgatctgttagtatcctccacctcctcctttaaaactgtaatatttttgtcaagcaatgaataatcatatgttttttttcttctgtgcctatgtcatggttttactttttgtctaataactcaaaatctgtagaaccttctttcttttacagattgctggtctagata

SEQ ID NO: 45987 - DNA, 164 bp, Manihot esculenta
  Intron number 3 from transcript cassava4.1_033619m (locus cassava4.1_033619m.g) derived from phytozome v7.0 (chr-ID scaffold04043; pos 861276 to 861439 reverse strand)
atccaggaggaaggttcaggagcagatattaaagcgtatgtaacccaaatcttgcccattttttttcttttttgaattttctgctatttaattattctcattggtttcttctcatgttcttttgtttagggagttatttatttcctttggtgggcttctgttgt

SEQ ID NO: 45988 - DNA, 831 bp, Manihot esculenta
  Intron number 1 from transcript cassava4.1_006781m (locus cassava4.1_006781m.g) derived from phytozome v7.0 (chr-ID scaffold00325; pos 329309 to 330139 reverse strand)
agaaggagcttctctttaaggctaagcatactcaggtagtggtttttttctttttcttttttatttgcgttttcggttttgtgattttgttttttgttgttttatagcatttttttcacattgaaggaaaatttcttctaattcctcatgtaatatcgggaatattgaatctggatgtggatttatcatatactcggtccagttattcagtaaggatcttgtggaattagcttacttagattactagatgatgatgaaaatgctgtgcattttcagcttaaagaattattagataatagtttgtctttgctggattttacactgtaaggagtgtttaggctaatatggttacgtcattggagaattaatggaaattggatgaatttgattcagatcattgatggcactattttatggatcttatgcttatatatatgatccgatggaggaaaaaaatcaatgattaaattaccaacttaatgagggggaaatcattaaaaacttatcagttacttagctctgtttaattcattttccatatttttcctgaatagttagtagcaaagccatgttatatttggtgtggcaagatccttatttgaactctcatttctataagtttcgaattgacacagtcttacacttggaatcaatgttctcttgtggaagtgatgttgtaattactgagggataattctaaagaggaacatgggaaagtagaactagtgactatcttcagcgattagtcatatgcgggatttctactttcaacgttatttccattgtgtaaattggattttggtgatgtttcactggtgcagaaacctgaca

SEQ ID NO: 45989 - DNA, 859 bp, Manihot esculenta
  Intron number 1 from transcript cassava4.1_005413m (locus cassava4.1_005413m.g) derived from phytozome v7.0 (chr-ID scaffold08122; pos 321598 to 322456)
ccgatctcaagatttctcgatttagtctcagattggttagtttctttgttttgcatttttttatttttatttcctttggaatatattatttttcttcttttttttaatgtatcgttttattgaaacaatgatcgggtgaaaattcgaattttttttttttttgtagtctctgtaattttatatcttttgttgttattgttgctataggtagaaatgttcaggaattttggttttcatttgattgaatgttgtagttaaagatgagtgtttgctttggtaccttttggaatgccgagacacagattttatacgatgtctacactttttgcgaggcttatcttttgtggtgctgtgtgctgctagcttccttccttttttttttttttttttctgtttttcctttttccgggctttagttgggttagaaggtcatcctttttttttaaatattccttagttgcctgagaagctaactgttatggcgtatttatccatatatgtaaagattattgtaatcgtttttggagtattctgctgggtggtgtagcttgtgttgtttatatgatgggtttctaatgttgtctgagaagctaactgttaagacgtattttatccatatatttaaagattacggtgcattttttaaggagcttgtgaatttaccagttcaatgggatatcaggatatcttaatttcaaattcaagtgtgaaatcctccaacccccattccctcccccccaaaaaaatgcttttcttgtatggataggtgggtggtggaccttttgctttaatgttgagaggttatttttctttaccaatttcagcttctgctgaacttccacaaaagttgggtgtgcgg

SEQ ID NO: 45990 - DNA, 475 bp, Manihot esculenta
  Intron number 3 from transcript cassava4.1_027485m (locus cassava4.1_027485m.g) derived from phytozome v7.0 (chr-ID scaffold11998; pos 1619781 to 1620255)
agattccgcggaatcgtgttgttatagcaactaaggtatagctttctatccctgtgtaaattaattccatcttctaccattatgtggtttttcctgatgatattaagttttggcgttgtgaaatttgagtgtggtttcatagtagcgtggtagacatctcggtccaaatttttgtttgtggcacccggttgtaactttaagatttttgtttcatatattgtctgttctggttatatcatgtgtatgcccttgcgtatccctcaattgccttaacttgctgctcatctagttccagtgtggtttatcgctgattgaatgtatgcttttgtccatgaaattttaatatgaaattctgaagttaaaagctatcttctgcctttccaattgctgaaaatttggatcttcctactctttgctgttcctggtttggttatgatagctacttttcatccaggttactggaccttcaggacaa

SEQ ID NO: 45991 - DNA, 675 bp, Manihot esculenta
  Intron number 1 from transcript cassava4.1_012313m (locus cassava4.1_012333m.g) derived from phytozome v7.0 (chr-ID scaffold02978; pos 27053 to 27727 reverse strand)
ggtcgaatattttcctggtaagtcatttttctcccctttttttgtggctttgtataactctagaacaaatagagagctttggccggttgtgcaattgaatatttttcgtaattggggaaggaaagaaattaaaatagttaaatcaattgcttttggatcagctttggttcctttgttgttactagtagatcctctgtttttatttcagaatgattatgattttgattctctgttgttatccctgttctgtaaagttgtttcttcctaattttgagcttcaatatggttatatgctaatttaacttgatgcgctatctttttttttttaatttttggtgggtctctgtttattccttattttcagtgttatagttctctgaagtctgaatttttcttttggtttattgttccttattatgatcccttttttttctcatatgatttttcttttgctctcttttccttatttgaagggcttctgtttcctaaatattaggtcttccttctctatttgcatgtatatgattttgaacattctgctttctgtgatctctatttttttttctccctcttttctttttcttgtttcttttttcttgtgtttggtttatctagatgttatcaatccattccagaacagttttggaggatttcagtgaggattaagcatttaaa

SEQ ID NO: 45992 - DNA, 624 bp, Manihot esculenta
  Intron number 1 from transcript cassava4.1_028491m (locus cassava4.1_028491m.g) derived from phytozome v7.0 (chr-ID scaffold08291; pos 13416 to 14039 reverse strand)
aaggaaggtcagtgtcccctacatctgcgtttacgtatgtacagatatgtaatggtagttcaatgaagcttaatctagcttagttgttaaatcgactttttctttaatgtcaattattttcctttattttctctatatgttaaaaaaaaactaattttgaggtaaatatgacttatgacgatgaggttaccggtctttgaaaggaaattttagctgtggatggattttttacatagaagattatgtgttatcactgaaataacttaatttttgctttgttagaatggatgtgcagcgacagaatgtgtatataattgatgaatatccattctataatagccataaactctattctattcttcataaattctggcattatattttattttgatgtgactgagatttatcgggctcattgtcattggcatgtaaaatgatatttgtatttgtttttagcgtgcttcttttgtctttaaattttgtaattttggttgtatatactattactagatcctgttacattaaataaaatgtgcagtcgtgccttcgcaccagtgtccaagagtagtttttctggcagctagtgtccttgttatataggtgcagtcaaatatttttccaggt

SEQ ID NO: 45993 - DNA, 830 bp, Manihot esculenta
  Intron number 1 from transcript cassava4.1_012243m (locus cassava4.1_012243m.g) derived from phytozome v7.0 (chr-ID scaffold11179; pos 140604 to 141433 reverse strand)
gagttttggggtaatcttctctccctctcgcacttctcatttctcttcgatctcttaaatatgctaaattttgtaagtcgaatttgcaaattctgtgcatgtgattttttcgttttatatatatattttttaacctatgtctcgagaaaactgcatgagaataggaaattctattgaagctgcttgctagagttgagcggagttgataatttttttatgtattattggttttgtatcattttctatgtattatgccataatttggttttttttagtgtcacttacggtggtagtgcagtgatcggtcattttggtggtttaggaatttgataagagttctttgcctctggtgagtattttagtgcgatttacgtctgtaggcacattaccatgttcttgtcaatggattagtagggttgattgttcattagcattattataaaatttatcatgctgtagttaaatttttgccgaggagctggatgtattttaatttattgtataaactctttttgtttttgaattgttctattgatttgcatttctagtcttgaattgttcatcttgccttctaattcttatgaatatagccactacagtttgtgtggaagcttaaattatccatgattcaagtctttttcaaatatataggaatgacttttcttttatggttcttgtagttgtatatggttttattctcactttttggttatttaagaataacataagttgctttacaatgcaactcaaaaattttatgtttatttgataatgctaacgtgcttgaatattcaggtactgaggtcaaaagtggggagcctctagtggtt

SEQ ID NO: 45994 - DNA, 735 bp, Manihot esculenta
  Intron number 2 from transcript cassava4.1_009197m (locus cassava4.1_009197m.g) derived from phytozome v7.0 (chr-ID scaffold12118; pos 363391 to 364125)
ggggtcctggggtgctaggttagtatcaattgaatgcttcaatcctaatttaactattacatgcttagtaatagtatgtaaaaaaatttgcttttctgtctgattttaaatctcaaatgatgacgttgcattttagtttcaaactgaagtcataatctcgggaagaatgttctcagtgcttctgtgcttaatatccttgtaataggactaggatgcttctgagagtttgtgaccaaactgaaaaatggtttttatgttgctgttgcaaaagtgtgaaaggagaattagtctgtggcttaaaccataaaggtggacagcagcagtacatagctacaaaattttgaaccttttaacttctcctcttccaatttcctgattgccttttgattaaagaacaatgtgctagaccaaggttcgattttgagaagggattgaacgctatttggtataccctaaagttttctcgttgaccacaattaggaactctcagtctctattgtgcataagtcttgaggttaaacaagttaattgagtttaatatggtgttttcaattccaagcagttagtatgttttgattagccccgaaaaactactaccagaaatgttgtttctttgctaatccatcttactcggtattcattggattgaactgttgtttatcaattctcagaaattgatcttatttccaattgctaaaagttggtccttgtccattttttggtttactatcagga

SEQ ID NO: 45995 - DNA, 657 bp, Manihot esculenta
  Intron number 1 from transcript cassava4.1_006102m (locus cassava4.1_006102m.g) derived from phytozome v7.0 (chr-ID scaffold07520; pos 1658236 to 1658892)
tggactttgaagcttcctgttccagctcgagggtcagtgctagtttctcttcatcctttatttaactgcctagtttgtttgtttgtttgtttttctttttttttacctctttggaaaaatgagaaacctgttcgcctgtgcaaagttgaaatatatacaaaaatttaaaaaaataaagttttgtgtttgaaacgattctttaactgaaaattaaattttagaatttaatttcgtaaaatattttaaattattttctgcaataattttttagcggaaaatattttgtttaatgattaaaattatattatgaaatcttcacatttaaaaaggaaataattgtatcaaaataataattattatggtagaatttgttatatcattataaaataaataacattgcacaataataaattttattagtaaaatttgatttttaaatatattttaagaaatacatttttttaaaaaaaattcgattaatattcttttattattggaagatgaattttttaatactttttatcaaacgaaaaacacggaggttttattttttattaaaaaaaaacaagtaaaaagactaaggactgtaatgaagcttaattttctaaaattttttgttcctgcagctgacgctctcgggtatactgaatttcattg

SEQ ID NO: 45996 - DNA, 387 bp, Manihot esculenta
  Intron number 2 from transcript cassava4.1_031048m (locus cassava4.1_031048m.g) derived from phytozome v7.0 (chr-ID scaffold07534; pos 40697 to 41083 reverse strand)
cacaggtttgcttaattatattgaatatgcttttgattttgctccgtatctcatttactttttttttttgatccattttcatggtttttgggcttcaataatttctatgtgtgtatataatatatatgttgacatggacatatagtcacaaagtggttctcatatgaaatagtattctttgtatgcaaatggatgcattcagtggttagcaaatgctttagcatgctcttcctctacacatacacatgcgtgcacacaaggatgcatatcttgtgaaaattgaagaatttttttaaatgtgaatttaagccttaaaagattgctatatagctggacctaatatttttttgttctatcaatgcttgcactatgtttttcagggaactt

SEQ ID NO: 45997 - DNA, 294 bp, Manihot esculenta
  Intron number 1 from transcript cassava4.1_031048m (locus cassava4.1_031048m.g) derived from phytozome v7.0 (chr-ID scaffold07534; pos 41132 to 41425 reverse strand)
tattacgtgtttcttatcttgaaatttataacgaggttagtgattccataccgattatcaattccaatggctctaggacttattaattttcttttcctatgcagcatcattagagcaactaatttattttgattaggaagttatatgaaattcaaaattctgtaatttacacgatcgaagtctcccacaatttcaactcgtccttgctttataatataagagcaactgcatactcctcttagtgacaactatctgatttatggttaaatgcatgtttctaatatcaggtgatca

SEQ ID NO: 45998 - DNA, 516 bp, Manihot esculenta
  Intron number 1 from transcript cassava4.1_017583m (locus cassava4.1_017583m.g) derived from phytozome v7.0 (chr-ID scaffold04796; pos 161500 to 162015 reverse strand)
caagaacaagcaacaagaacatacaagccaagctggtgggtatgtctttccctcatgtagttatttatgttatccaagaaaaagaaatgatggattcctttttttttcttcgtttctgttcgtgatcgaatttattcacagtaattctacatgggttttgatccaatcttgttcttgtttctaagttgatctctgttagaggaacctcttgatgcagtggctaaatgggtagatgttgttttcgatattttgcatgtatggttagtcattagtgattaatgatcgatgtagtatctcagcttggagattgtctcaggtacttcttggggatatggggactggaaaaacaagtttggtactgagatttgtcaaaggccaatttttcgatttccaggttcattttccttgcgattttacttttgtttttctctgctgctgtctcatcacagtgcatgaactctaacataaatacaacatttaggaatcaacaattggagcagcctttttcactcaggt

SEQ ID NO: 45999 - DNA, 483 bp, Manihot esculenta
  Intron number 1 from transcript cassava4.1_021835m (locus cassava4.1_021835m.g) derived from phytozome v7.0 (chr-ID scaffold04457; pos 1248618 to 1249100)
ctctcccattcttccctatcccctacttttctccggtaagtttttttttttttaattcattttctcaagacggagctggctagcaagcccacacgaactcaaaatctttcctgtaatttctttcagctcacaattattccccctttctgttaataaaaaaaaattttcggccggttcctttcctgtaattttttcttgatcaaatcttcttcactgtatgtttcgcttgattatgagttacagcgctctgttgtaaataacgttcttcctaatcatggacgcaagttctgtattttatccacatgcgtacagaactcactatctttcttaattttacccatttattcctttctttttttgtatttttttaccataaaacactcgcttagtccgcgataatttactctacagttatcagacttatttataaaaacagacaaaggaaattaattgaacattatgttcttgtaggtgtttggttgc

SEQ ID NO: 46000 - DNA, 638 bp, Manihot esculenta
  Intron number 1 from transcript cassava4.1_002979m (locus cassava4.1_002979m.g) derived from phytozome v7.0 (chr-ID scaffold06701; pos 533524 to 534161)
gagaatttgcaaggttagttgcttcttctgtggaaaaaacaagcttgggtttattaagtgtgttattagttaaatatcgttgcttcgatgtgttatcacttactggtatgtctttctttcatatgcaatttctttccttttgctgagaaataaaaatggttggttcactactctgctgctcggtttcaagaaatatatagaacaaaatgttagttttgccatttgtatgcacacgatacaactttgcctaacactgttataatgtgattaattttatatggttttttataatgaagccaaatacaaatttgaaccaaaaagattcaactttttatttcttcctcccttatattctctctggtgagtaactgattgaattgaagaaacttctttatatgcttgtttgatttcccagcttggtaacttctgattatatggttgtttacaaaaaagcttgaaactttccaacttcagatggatctttaccaaaaagccaaaaatcactgttcattcatgttttgctgaacgtcgcatcttctttctcctaaactgcgtaatcattgttgggcaatggggtttgcttatccgggtgttgtattatagttctgcagctttgttataaccagttcaccggaagc

SEQ ID NO: 46001 - DNA, 455 bp, Manihot esculenta
  Intron number 1 from transcript cassava4.1_004716m (locus cassava4.1_004716m.g) derived from phytozome v7.0 (chr-ID scaffold03750; pos 1146414 to 1146868 reverse strand)
aagcgaaaaagaagaggaagaacggagattaacaagtgagaacagctttttctcagcctgaaagaggggtagggttttcttgagtgatgaataattgagaaatttcaggtctcaaaattttcatttggagtttttaagtgttttgaagtaaacgttggaactttaatccatattgaggctgtcactgagagattcttgagagtttaaaaggtgttccatttttggaagtaacagagagaagcacagtgttctcttttgctctgtttctctggctcagcctgtgtttcttttctctttagagggtctcgtaaatataaagaaagctctagtccttagctaatgaagtgtggcttacttcttcttcttcttcctcttcctttaattttgattttgattttgatttcattttgatttttgtagcattccgagagcccttctcaccaccacaacctctg

SEQ ID NO: 46002 - DNA, 836 bp, Manihot esculenta
  Intron number 1 from transcript cassava4.1_031376m (locus cassava4.1_031376m.g) derived from phytozome v7.0 (chr-ID scaffold11998; pos 208075 to 208910 reverse strand)
gctggttttatcatacccctattggtgttattcactgaaattaataatggttaaagataaattaattgctaaaatatatactagatttgttaaaaaaatatatggataaaactgttaaaagtagaaaaattttagtatttttagttattaactatatatatatatatataattaaaatttttaaatatttcttaattattaagtatttaatttctcatataaaattaaagaagtttaagaataattagagaaaaatcgctataaacatgggaagatattaaaattctctttaattttatgctacacgagttttttaagtataaataatttaaatttttaaaagcttattcataagtataaataatcatgatttattatttaatgacttaaaacatttatttgtttataagttaaaatcttgagataaataaaaagtaaaattacaaataataattgaatttatattaacaaaaatattaaacttaactagataaattaattttattattgaaatctaagcgaaaagtcataaaaaataaattattttattaataaaattataatggagccgataaatttaatttttaataaataaataaataaatatacaggagttgcaaactatataaatatgaatttagaacaaaatcatcaataaacttaactttcagagaactaagaattgagaaaagaatagaactcgattgtccaggtaattaagccttcaattatatgcaagtcatctataattttttttcttccctcatgcatcactgttattgatcattagcatcactgttattgatcattaaattttgattttaaggtaagaaagc

SEQ ID NO: 46003 - DNA, 358 bp, Manihot esculenta
  Intron number 1 from transcript cassava4.1_008773m (locus cassava4.1_008773m.g) derived from phytozome v7.0 (chr-ID scaffold10045; pos 258476 to 258833 reverse strand)
ctaactatcttaaactttactgtaaataatttttctttggagtaaggaggagtgatctaagggataatgtttctttagtttgattatttttcctgcattcttattcaatataatttttagttgagcattatccgtattatcaattgctgtcccagttgaataacaatggtgacacatttttctaaattgtcgtctgcagaaacttttgttttctttttgtgtattttttcctgatttttgatttcctatgctcttagagtttcctatcgaagatggaaggcctttttccctttattttttcctttaaagaaaaaaaactaatcaaatgttctcttcatttcaggaaaacttttccccc

SEQ ID NO: 46004 - DNA, 956 bp, Manihot esculenta
  Intron number 1 from transcript cassava4.1_011490m (locus cassava4.1_011490m.g) derived from phytozome v7.0 (chr-ID scaffold11341; pos 270348 to 271303)
aggctgagttccgctggtgggataggatcgatcaggtataaattttccatctggcgttcgtatgcattgcacggttttggtggcatggtggcattttttcatatgattgtggtattttaggaacaatcgcatgtgtggatattgttaattggattttcactttgacgttatatatctttttttttttttcactttctgattatgtgcattgtgcgaagaaaagtgggcgacggatgatgaatcaatgcgtgttttctgagtcactcgaatgtgaagcaaaatgcttttcctcataatatgtttatcctatcatgcgagtagtgcgaattcagtaaatgtcaggctttttcgcatttcttgctctagtggagctttcttttaagtgcaaattgaccaatccctttgtataagactgattggacaacaacttatggtccccttcataatgtcaaaagccaaaaaattatataccacctgtaaaatgcttatggagtttgatttgtattgattagaatatccaaacctaaaattcttaccattactgccggaagcttgcattcctaggatgaaggtttggaacaaaaaaacaagcctagatttgtttttaaattttaactggaagtttttgtaattctttcaattaaaggaaaatcttctttgctttttgctgagaatgtctatattattgtttctatattttaccgtcactctcgtctcctctgttcctttttgcatgatgtgtttttttgtgcataagtggttaaaaaacacagcattatatcactgttggtttgtttgtttgaagctcaaggatttggtggttattttgcatcatgttgaacctctaatctaataaaatttcctggctactcttattatgacagtcaaactgtttcctaattctgatgagttcttttgcagtttatattgttaggtgctgttccattccctacaga

SEQ ID NO: 46005 - DNA, 877 bp, Manihot esculenta
  Intron number 4 from transcript cassava4.1_017815m (locus cassava4.1_017815m.g) derived from phytozome v7.0 (chr-ID scaffold07520; pos 1441969 to 1442845 reverse strand)
agcttgccgtgctagatctcattcaaggtgcgtttctgataaggaattatcgaagtgtgattatgtctggatttgaatattatgcttcaattttctaaactacgtgttgcctttggctcatacagtaaatgggttttagtcaaaatgattgattaatttcaagttctccaaatcaaagatatatgtagagatgctaatgcattatggtcattgggtttgcataatggaataaaataggagtgaagtggttacttctgtgatcatgggagaacatatacttggagaatgtctatcatatatgatagttattactaatgctaagactacggagtagctgttgttttaataattattctacctctagaatttgaaataaatctaagaatagctattccatctcagcatatttcatgctattcaatgaagcaaatgaagcctgtgaatttaatggaaggttagatgaaaagccagagaagtctaactaaggcacatgcagaggaagatgcatcagtcttgtgtgtttggattggtttatgaaaccaatgttggtttctgtcaatttagttttcctgctagtcgcatttcaaccactgccttctgaattatgatcgcactcaagaagacccttttgagcttcaagatcttcaacttcaaccgaaactgatataaccacatcttcttttttggttagctggcggctcatggcttttataatcttattgctattatcaccataccaagggtagcttattgcttgagattatggctgcataactttcaggacctaactctgaaattttgaaatgttctctttaattttggagcttgtacctaagtaaattcccatctcttcagtttttgtagaaacattggacaa

SEQ ID NO: 46006 - DNA, 646 bp, Manihot esculenta
  Intron number 2 from transcript cassava4.1_031464m (locus cassava4.1_031464m.g) derived from phytozome v7.0 (chr-ID scaffold08617; pos 200441 to 201086)
tggtcctctaatatcagccatttctgtcacttctggtaagtcaacaatttttggagcttccagtacacatttgtgtacaacaacaagcattaaatctttagattttattcttatatgatgcaatgactactttaacatgctctagtctagtttgaaaattgttcgacttcttagtttttgaattaactctttttctctttttcatacttattttcccttatcatgcaatggagaaagaatgagaaaaaagtgtgaaagtttttctattgtttagtttactgtcaattgtcacacccagggatttttgattttctattgaattatggttgatgaatttggcaagtagttttgtatgaatatgcaatgtgaagctagtgctgctgtcataagcagtagtctggactattcaaaaggaataaaaaaaatagctttatttttcaattttttaacccgtaaaaacacaaaaatagagaacgttaaattgttcctttttcttgttaatctgaagttgcaatatttgctagatcattataggtggtacattgtcgaacaaatttccctaacaatttaagctcaattatctattggtttcatattctttcttcatgcagattctacacctggcagtaggatatctgcaggcacc

SEQ ID NO: 46007 - DNA, 600 bp, Manihot esculenta
  Intron number 1 from transcript cassava4.1_028309m (locus cassava4.1_028309m.g) derived from phytozome v7.0 (chr-ID scaffold04796; pos 119633 to 120232 reverse strand)
ctagtccatccatcgtggtcagagattcggtaagcaaacctaagctctcatttatgaaaaaatttaataatagaacaacatgaacatcagatcagataaaatccatactatttaacatatctttgtgagactttgggagtattatgtttcatgcgaatcttaatattttcttgtaggttatatatagatccaccacgatccatgatgaaaatgcaatcgttgtacatacgatgattgtattgtataatgttttgctgatgaaagtcaagtattcttgtaaactttatgttgtgttgtattactgactttagctttagtagtctggtttacgtatgtagaggtacaaatatatagctcactttcttggaatatgtatgcatgcgtagccatagtcagcattccaaaaactcaaattcatatcttaaaggctgctgttctctttaataaaaattttctatggaaagtgttgaagattctaaagcatatatggaaaacaacattgcaatgaattaaagaagcaacttttcttttttcttttttttcttgggggtgggtgggtgggtgggtttgttattgcaggtgcacgttttgccacacgag

SEQ ID NO: 46008 - DNA, 644 bp, Manihot esculenta
  Intron number 1 from transcript cassava4.1_005960m (locus cassava4.1_005960m.g) derived from phytozome v7.0 (chr-ID scaffold12295; pos 4916 to 5559 reverse strand)
ctttgacatatacaaagcttctcctcaggcaaaaggtaagcactctggattattttctatgtttttcttggtttatctttgtccttgtaatgagcatttatttttgttttagaacatataatgtgtttatgacagtaaaaagggtgcagctgatgcattacaatccagcaggaatttgaaaatatggatttgcatgttcttactaaaataaaactttggaagaattactagcaggcccttagattttaggaaatttactactacgttctcatttcaaaatgtctctgtattttgtaaaatcaaactattcagtcattctgtcaaaaaaattgttagtcaatttattttagtattaattagagggactaaataatatggatatttaaatttattggggaccaaatgataagtatagttaaaattagagggattgaatagtacaaatctttgaagccgctaatggtttctttaagaatagtcaaggagtttgattttatgaaataggacttggtaattcttcctaaaactttttgatttcttggtcccagagcttgatcattgcaacataataattcctttgtcttcttgttctttttcttactttggtagaaaagaattgctccatctgcaatttgctgccctat

SEQ ID NO: 46009 - DNA, 503 bp, Manihot esculenta
  Intron number 1 from transcript cassava4.1_005694m (locus cassava4.1_005694m.g) derived from phytozome v7.0 (chr-ID scaffold03219; pos 668641 to 669143 reverse strand)
gttcctgttctgtgggtaaggactttccccttcagcacacaacttttttttcacaattcagccttaataaatgtctttctctgcttgtgtagccattgagatcactgaatagctagctgtactgattaaaaaataggcagtcttaatatatcatatattctatcagagcagagttttcttttcttcactatccctccacttataactcttttctccaattattcccactttgttcaaattcttcctcacatggtagacggattctttaaatcattttctctaagctttccttgtttatttctaatatgtctctttatcccttaaaagtttatgcaatgcccaacccacttcccatttgattgttagctggctctatatattaggttgtaggatatttgtaattttttttttttttctctttgaaaacaatggataaggcaagtttacatttattgagcccttcaacaggagacgatattccggggaacagacacagtagccat

SEQ ID NO: 46010 - DNA, 401 bp, Manihot esculenta
  Intron number 1 from transcript cassava4.1_009943m (locus cassava4.1_009943m.g) derived from phytozome v7.0 (chr-ID scaffold12784; pos 32701 to 33101 reverse strand)
ggcttcaagacccattgttcaacaaccggctagaggtatttgttatttccctgtcgttctctctcttctatttttctctctgttatgcatatcgactaatctttcttggcctttctgtttgatacttgcccaaattcatttgatgattggattgatcagttatctgattttaggagaatttttcagtttcattaactgttagtccgatttcattaactatttcaatgcttttccccattcacttttctttcttttggtggattttccttgtactttctgtttggtttgccgagaaactgacgaaagatactacagtagggttctctgtttctattcttttgtattttgaattgatatctaatgaatgatctcaagcaggggaggcagttgtaggtgtcaat

SEQ ID NO: 46011 - DNA, 410 bp, Manihot esculenta
  Intron number 1 from transcript cassava4.1_020772m (locus cassava4.1_020772m.g) derived from phytozome v7.0 (chr-ID scaffold05230; pos 44830 to 45239 reverse strand)
ccgccgaatcctgccttgttgcttctccaaacgaggttcgattgcatattcttctccaaacaagtaatggaaaccgaagcccgtctttgatggtgcattcgaaattgtgattgatgaaattgaaaattttattgctgtattcgaaatatgaaatgaactagatttgcaatagaattattattattttttatttttttgggattacttctgttgtttgtgttaaatcgttgcattgatctattgatttttttttttgcaatatagggcaagtgatttaccgtcttgatttacaaacatagataaagcaatttgtgtgtgtatgtataagggaggttcattagcatatgtgcttgaattgatactttgaatgtgcaggaaggactccttttgacgtcaagggaacttttgtc

SEQ ID NO: 46012 - DNA, 189 bp, Manihot esculenta
  Intron number 2 from transcript cassava4.1_033535m (locus cassava4.1_033535m.g) derived from phytozome v7.0 (chr-ID scaffold07478; pos 403281 to 403469 reverse strand)
gatcaaggtaatatcattttcctactgcattcttcataatggatatattaatggcatcttctgattatcattcatatccactgcttctgtctttgtgttttgtgtagaatttggtggaggaaccaagtagtttgttcttttgaacttgggtacttttggcattaagatagttgcgtagtctttcattga

SEQ ID NO: 46013 - DNA, 664 bp, Manihot esculenta
  Intron number 1 from transcript cassava4.1_004472m (locus cassava4.1_004472m.g) derived from phytozome v7.0 (chr-ID scaffold02942; pos 13366 to 14029 reverse strand)
ccttattggttggtgagtttaatactttatgttgataatgcatgattaaatatgaaggaaatcttggaaacccatttgatgttttagttaatgggtagtggtaatcccttgtgatgattgttttgagagaaagtagagtgatgtttgagtttaactgattttttggggttatttgattttgggatcaatttgtgactgaattttctttgtcgttgattggaatgattcatattttgaagatgatttaccggcagtgatctatgaatgtggagcaactttcgaagtttctctattatttagtactattgttatttcaaagtttgtcttcttgtttaagaaaattaaggctcattctatttttaaccttacaactctgattatggagtctgtttaagaaaattaaaatttactacatctattcaaaatttttgaggattaagagcgatgcttgcttgggaaattgagataaattgtaatttatagtaatatttaaggactttagaggaaaagtttcttttgctaactgtacaaaaatacatagccttgttcttgcaaattaaaatataagtgcctatatgaaaatgtgttaaactatatagtagtttttttgtagtttcgaccaaaatgaactcattcttcttttccactttatggtgttgcagct

SEQ ID NO: 46014 - DNA, 850 bp, Manihot esculenta
  Intron number 1 from transcript cassava4.1_006660m (locus cassava4.1_006660m.g) derived from phytozome v7.0 (chr-ID scaffold03419; pos 40908 to 41757)
gaggtcaaaactttgaattttagaataatttatgttttctgttaatgtaatttttgtattatttcttgatgtttgattttgtttgtgtcattaactgcaatggattcactagcttcattgttcaatcatgattatttgctttttttgtatttcatttttatgtgccctattttaagtaggaaaatatttgaaggtagtcgctctattttattgcttcatttgaagattttgataactcaactccaactctctttttagttggcttgagggaggtcttactttgacagtacacaggcagagcctttgtgctttttcttgaatatcattatcatgtagtgttccatagaatgattgttttactttttgtctaataaattttgtagctaattcagactttgtatgagaaaaaggctttaatttttatcatctacaatcatttatttgctattttctacttttctcaagttatttatattgcttctgactgcaataactttttttgcttgtaaattggtttttggtttaacaaagataaactttgtaattatgtgatattgaccaatcattatttctgaatatatgagtatttatttgaagaattttttatttttggagttggtttttttgttttcttcagttagttgagctgttattgtctttattttgttattgatttccttaaatggttaacttgtttagttcacatatggtggaaatttccttgattattattcatctttaaattggattggactgctgagagttgataatccgtatattacttgatagtatcaagattttccttaaatgatgtctttttcttacacaaaaatgttcctataggacctgg

SEQ ID NO: 46015 - DNA, 759 bp, Manihot esculenta
  Intron number 1 from transcript cassava4.1_018105m (locus cassava4.1_018105m.g) derived from phytozome v7.0 (chr-ID scaffold03168; pos 56025 to 56783 reverse strand)
tgctcatataacttctctgccagagctcactcagtgtaagaatcaaacacttgctgttccatttcgaaatttcttctctctccatatatatttcccattttttctttctgggttttcttttaaatgttaataatttatgttattaagataaagaaagatcatatatttggatttgtgtggaaaaaatgctagatctcacatcaatattgatgcactagtttaatgggttttatcttggttcagagaattcattttaaaatttatgaatttgagcttgtatttcttcatgattctcatttacctttggttatggatttgatcttcaattttagaccaacttctgagctagactagatctttataatgaaattgttataactaggatttgtctctatcaaaatattaaatcagatggtacaaaacaaggtaaggataatttggctgcttccatttgttggattgtgtgattttttttttttgctgtgagactagtctattacttcaatccaattcctgtgtaaggacaacttatttgtaagtaattttgtcagttcttgttgctttaatttgaggatgtcttatattctgcgttcttcaacccaattgatactgttccatagacattaaaaaataacctgttttgctcagttcttgagaggactaatcatcccttttctgagtttctttaatctcatttctctattgtgttttggtttgattgcaggtcaggcttttaccctccttgatcttattcaataa

SEQ ID NO: 46016 - DNA, 815 bp, Manihot esculenta
  Intron number 1 from transcript cassava4.1_004789m (locus cassava4.1_004789m.g) derived from phytozome v7.0 (chr-ID scaffold00847; pos 247799 to 248613 reverse strand)
ttcctcacttgacagactatattcctggtcttcctgtacgtttttctataccagtatataataatcgtacatattatatggaacaatgtctacgtactttgtacgtatgttgtggttgattgcttgattcttttgctgtttgatttctgactaatgggtggaacaggaagggatactgaaagtttggatccggctttctgaaaataatgagcttggctcagttaattgtgattgttgagtttattatgatctaaacttaatcggaactttgtctttctatgattgctgcgttttatcggccgccaaactggataatggatagatgctgtttttggatctagttaatcctgttactttcttcttcttccttttttaattatatatatatatatatatatatagatatatggattcctattatgcggaatttttttcaaagctattatacgaattaacaccctttttgtttagttgtattatcttttcagctgttacgaagttcatacctgggttatatagaaccggattttttaatttgctgctcttcatagatgtctgaccgttatttttaagttcttgctgcggtaattgaggggaagcagtttaatttagagcaccactttttaagtctagacatttagttctgatcatcagtgattgatagattatggaatatggattgacttgtcgttgtttcctctgtttctttcatctaattgtcttttgattccacatttaaaccacggcttgagtttgttattatttctggttttgttgtagactttttccaatcctctacaagataatccggcata

SEQ ID NO: 46017 - DNA, 576 bp, Manihot esculenta
  Intron number 1 from transcript cassava4.1_004873m (locus cassava4.1_004873m.g) derived from phytozome v7.0 (chr-ID scaffold00847; pos 2154653 to 2155228 reverse strand)
cgaacaccttacagcccagctcagtttctttacaggtctgctattgatacgcatcctttagtttcagtgattgatataatgattttttagattggttcatgccagaagattttttgtctactttaggcctattcagaggatgtaagtatgtaagctgtcatttttcaaaattcttttgtcaatcgtaatctacatgaccttgtctgattattggattcacctttactcttcataagaactgccaattggagatatgtttgattaacactgtcagtaagtattcagcaggaagtaagaagtttactactttttaggaattttgcatcttcttgtgctagtgtgctcgaatctataattatctctgttggatttggttggtcgtattgttgaatgaaagcccttttgcaatagtggacttttctgggattactatacgagtgtgctgccagatctctcttgatagatcttccatttaattttctcacaagatgtttggagatgaagttatgctttagtaatgaaattttgtttctatatgaagttggtggcagcattcagcaaatctagctagttacg

SEQ ID NO: 46018 - DNA, 913 bp, Manihot esculenta
  Intron number 1 from transcript cassava4.1_009193m (locus cassava4.1_009193m.g) derived from phytozome v7.0 (chr-ID scaffold04094; pos 45824 to 46736)
tttttgaataggtaattttacatgcattgtttaaattttgtgactttgcgttgttgggtgttttttttgatttggtggatttggattctatgctctgttttggatgctggcgaacgtgggaagtgagatatggaattgttaaagagttcttcttgcacttacttctgtattactgcctcactagaatgtgtaaattttggatctattattctcattggcaattagtttaattactgggaaaatgtaggataatatttttttgtttgttgtatgtttaacatatttaacttttgggatctgaagaacttgaatttggaaattgagttccttgcaactgttgaccttctagatcattttatgggaaataatatgagcaaactatgagattcagattttctttttaggcagaatgtcttaagagcaaaatggaaaattagtatggtttttcatagttaatcgcactaacgcttatgtgggagttaaaaactaccgattctggtattctattatgataaataaatgtattccttttagtaaaatgggttttttcttgcctcagctctgtgcttaaggttttttaattatcgggttttaccctattcaaattgaaagtaagacaaatatagttggatctcgatgcaataaatgctctatattctccatcgtcatgtttgataacttggtatagatggcatacttgtgcatctgaatgcttaattgatagtgttaaggtattccatctctacaggatcctatacaaattcaacacgtcaatatattactgagtgcttttatattctctttgtcaataaattcaactcataaaccttattcccatttgatcagccatatagatatctctaatctgacatttttctttcaatttttattatcttgctgcaggacttttgtg

SEQ ID NO: 46019 - DNA, 1069 bp, Manihot esculenta
  Intron number 1 from transcript cassava4.1_008989m (locus cassava4.1_008989m.g) derived from phytozome v7.0 (chr-ID scaffold06916; pos 1263686 to 1264754 reverse strand)
ctctgctatctttggaatccccaccaaaatcacaggtaaattcttcagcatcttctttctcttatgtatatacaaaacaagtatggccttattttggttgtttctgattttctgtatctgggatttgctgctttcaatttcttcttccacttgttcatgttgttttggtcttaattctctcatgaaaagtgtagtgcttttaataaccccatggaatccttatgtttattttagttttagtaaactattgcagttcttacttttctccctttagtttttgtccaataaatgtgcatctattcttttataagcatttcctgtttgaaaatgaagttttttttaccttttcctgcgtatttttagctatgtggacatgtttcttaattatcaagttcgagtgcatgagcatggttaaaatttcatctttaaagggacgaaaattaatgtataaaagaaaataagtgaaattttgataaaaatataggggttaaaataacaatataaaaaattatgggatcaaaatcaaatggcataaataaaatttatatagaagttccgggagaagagaaaaaataaaattttggagagccaaattaaaaaaaaaaaaaagaatatgcactaacattttaattttcattagtttttggggccatggtcccgcatgctatgaagctagttctgctcctgctcaagtggcatgctaccatgtttgtttgataaattcatgcaagctatatttttcgtaacaggtgctatattagaatgagtttccagttcaaattatatgtgcttttatggatccaaaagacaataaaattaaaatccaattaagggttagctagtttggaaaagggaatagtgaaattggctgctctttggttcatggttaacttttgataagatgaagaagttttgatttttgaatgaaattgagctttctttcctgagaagttactatatttgcataatgacttagtttgcaattgggatttcctagtgttttgactctaatcagatgttattaatgatagaagactaaggttcagaaaattgagactgatttccgcct

SEQ ID NO: 46020 - DNA, 510 bp, Manihot esculenta
  Intron number 2 from transcript cassava4.1_018984m (locus cassava4.1_017702m.g) derived from phytozome v7.0 (chr-ID scaffold12140; pos 58235 to 58744)
ttaccaactctacttctgtaaataccctttcatccatcttcaagctctccatcattcatttctttttcctctttttgttcacaatctttctttagcatacattaaactcgtgcaaccaaaacaagatagctagctagaacttgcacaaactgatcagcttatgatattgtgatgatcgtgaaagtgaaaaactagcgattttgatgttttcttttgtattgatttcggtatttttccatctgaaatatttgtgattttaatgttgcagatgaataaaacctcaatcattgtagatgcatcaaaatatataggagagttgaaagaaaaagtggaaaggctgaatcaagagataggaacttcccaaaatcaattccctatggtgaaatatgattgtgttgtcttgttcttttttctaatttcctgctttgcatcaattattatatatctaagtctttgttcttttttatgcttacagcaggttacagtggaaaccctaaaaaagggattcct

SEQ ID NO: 46021 - DNA, 808 bp, Manihot esculenta
  Intron number 1 from transcript cassava4.1_012607m (locus cassava4.1_012607m.g) derived from phytozome v7.0 (chr-ID scaffold10849; pos 43429 to 44236 reverse strand)
gagtgtcttttagcccaaaagaaggacatccaaaggtaagttgaacttatctcattgaacgaaagttgtgttttgaattttggatctggtaatattatagcgttagattgactgggaattggatatctgtcacgttgaaaactcataatagcttggttgaatggtggtctttgttttgctagagaatgaactcagaaaatagaatctaaactgctaaacaagcacagaacaagttaaatttgtaatatgtgcagtcttagattaaattttagtaagcctagttatgggcttatgactgatatgatgcgcgtattatttcttgagggactattgctgttagtatctcaggccttgctggcggtctgaattaatgttgagaaaaagtggttcccttttctccgaagcttgtttcttaaatttattggtgattgtattagtcttcagaataagtgataaatatattgttatttctggtttcttgatagaaacttaggaagcctatcccaaaaggctgctagattatgacaatcaaaactgcacacttgagatacgcctgcttgtgcacttcataatgcctattaatgagggttgttgatatgaaaagattagctagggtttatgtaacttggataggtttagtgggaaaagtttgccgttttattgggacatgtagtttagtatgagataggttatgcaaactctttatatatataggttgccgagttggctgtgtgatgcatcatttaagcattgcgatgctgcattgaatagcaagcttttatctgacctggcaggaagctagctgccc

SEQ ID NO: 46022 - DNA, 447 bp, Manihot esculenta
  Intron number 2 from transcript cassava4.1_012231m (locus cassava4.1_012231m.g) derived from phytozome v7.0 (chr-ID scaffold03741; pos 971306 to 971752 reverse strand)
gaaggtagctcttgttcgttaattagttctaaatttagatttttttttaaattttcactcaatactttgaaaattctttttctttaattttcggagataattcattgagttgggggtaaatttagaaaattatccacttgtttcattcttccatagtttgtttttaaaattgttttaccattgaaatctagtttcacaatttctaattttctgaaaattttagctaattaaccattttagggaataaaataagttaatttcttcaaaatatcatatctaattgctataagactcatttttatataagcttcaatttatcgtaattttgccatttcatattaattttattctcaaattgttcaattaattattaaattgatatatttttatatatcatttgaagtaaatggattaatttgtgaattatgtaaacaggagtgggagaat

SEQ ID NO: 46023 - DNA, 505 bp, Manihot esculenta
  Intron number 1 from transcript cassava4.1_012231m (locus cassava4.1_012231m.g) derived from phytozome v7.0 (chr-ID scaffold03741; pos 972308 to 972812 reverse strand)
aaaagaagatattctgctgtttctatattttgcaagtgaattgctcagtaccattctttggttttactttactttccctgatttgtctcagaatagttgagagtcgatcttgattgtttttcaatttatggtttcccattttcagatccttgcctgtttggaaagggaaaaaaaattgattttgaaataattggatcttttcatgacatcccaagttttagtcaaatctctccttatcatcttttcatgtttgctggttccttacctaataaaacactcccattcctccttattatgctctgcttctaattctcatttttaattgcctttctcctctgatactttctttatcatcttcttacaaggtctttgtatttttcatcagatagattttttcttttgtttcatgatgtcctctaatgaatagattttttcttttgtttcatgatgtcctctaatgactctcttcaattttcaggttgaagctaaacccagacccctgtta

SEQ ID NO: 46024 - DNA, 994 bp, Manihot esculenta
  Intron number 1 from transcript cassava4.1_001149m (locus cassava4.1_001149m.g) derived from phytozome v7.0 (chr-ID scaffold07351; pos 396889 to 397882 reverse strand)
tgcaggtcaaatttgtttatttagttgttttttttttgtttttctatatctgggatttagaagtatgtgacagacgaattgaattgaagataggagtcatttaattttttattattattatttctttcaaattgcatttgaaatgtaatggaaagttgtgttaaaaattcttaatgatagttatgtagctttcatttttcttaaaaaagtaaggttagctttggtatgatggaatcaaagatttaatgtaatcattatattacaaatttgattaccaaacaaagtttaagtaatattttacataatgtgatctattgtaatggtcattgcatatacaaatagatgtaataaaaaattacttgttttgatttttatttcatttgttgttaattatcaccactaccaactaattaccactgtcaccactattatcaccacctttgccactgcggttaccatcaccaccaccggcgccatctccctcaccaccattgctcccaccatctacctaccactgtctccactactgctattatcaccaccatcaccctgcaactgccgccactgctgttgtcaccactaccaccatattacattacagattatatattataatttgattacactattaatgagattataatgatcattacattgcatttttattcttccaaacatggtacattgcattacattacattacaactttgattccttacgtagttgattacattccattaaattacattgtactaaatataggcgaagagtgtttgtggttgtattggagatggagttctctttttcagtttatgggatttgatataaagatattttcaggatatattttattagttcacctccagtgaactgcaatggtttttatttgacattacgtgagttgattattggatttccagtagatattcatggttatatctctctagttagtgattggccgtattcctatgtgttccagattctggggactgga

SEQ ID NO: 46025 - DNA, 648 bp, Manihot esculenta
  Intron number 2 from transcript cassava4.1_011633m (locus cassava4.1_011633m.g) derived from phytozome v7.0 (chr-ID scaffold06158; pos 487739 to 488386)
gcctcttttgcctcgtaaattccctcacgttccctgtaagttattatttttatttggttatatttttttaggttctgataatattttctattatcaagcagatttttttttgggggggttgtttggttcagcttgggttgaaccaaacaaggcgatagtataagcattagctgctcattcctgattaatagttggctacaagtggttggaatataccttaatttgtcaattaattacgagttttttttaaaaaaaaacaaatatatatatatcacatgatccaattgtcttatcgattgatggtaatgataagatattatcaaaatattttgtataatacgtgaatcaataacttgaatgaccattcttttacctagtcaactcgcccaaaaaaagctggcccagaatctgttcccttggggaaattgatcaagagaccgatttattctttttttattgtatttgttggctgagacatcaacattcataaattttaatattcgtgggatcttatatatcaatatcttcgttcttgtgtgtgtatggccatgcttgaatggttctgtgtttttcatcttgtggagctttaaaatgatctttgccccttgatttttttgataaggaattctgtttttgcaacaggtactg

SEQ ID NO: 46026 - DNA, 411 bp, Manihot esculenta
  Intron number 1 from transcript cassava4.1_017723m (locus cassava4.1_017723m.g) derived from phytozome v7.0 (chr-ID scaffold06816; pos 90631 to 91041 reverse strand)
aaagacattgagtttttgggtatttatctgttttctctaatcttatctttttaactactgcatagtaaatgtttaatggctgatattaacaaatggaaattacatttcagggagttctctagttgtaagcatagttgattaacaagtcacattggaatgagtctcccttctgaacaattcttaaaaaaacaagttgatggagatcaataataataatgaataatgataataaagctccactcccaacaatcaggaattggagtgcagaaatatatatttgacttgcatttgatgaagacccatagtgaatgatagtaggatgggccggatgttatcaagaagtcggagcattgagattgataatagtaagcttttatccagcattctttaactttgatactttccatccag

SEQ ID NO: 46027 - DNA, 877 bp, Manihot esculenta
  Intron number 3 from transcript cassava4.1_003783m (locus cassava4.1_003783m.g) derived from phytozome v7.0 (chr-ID scaffold07036; pos 70086 to 70962 reverse strand)
gtttttggatctgaagaaagtttaaaagatatacggtaattttcatttcagtccctcatgtttctcttagagcttattgcaattaaattgtattatgctattctcagtttgatgatattggaaattgttttgacatagtaatccgttagtgattttgtcttttaatttttggtcttccttctataatcttcatgtaagttgcgtagcagttgaggaaggggcctgagagagagtggtagctagtgtgcatgatgtttgagttttggttcatgtttcatgtcatatttcactgcttgcaaaacacattattgatgaattattaaactagaatgaatgtcaatagagtgaaatctgcaatattatcttccggatttggctttcattggaattctttgcaattagatgcacttcttcatttttcttttcatattcagctgaggaagaaatttgtttagtcaacatgctgctctcattttggcgtaaggaaattttagaatgaggttaagatactgattctgagattttgtggatgctggtttgtagctttgacgcatgttatctgtgttttggactctcaattcgatcagtttttgtttctatggaaagaaaatctggtttttggatacaatataatggtgttaagcatgataaagtttttacttccagtgttgtgcactttttttttgcttaaggtgaagtcagaattttgaagtaagagaattgaagcattttgtagttgtggattataccattttgtgtcatgattaaggttctcaaggactcaaaccgctatcaataaatagttttaacattcaagcttgatcttatattttagcattttcttccagtacttatggatctctattcacttttaggg

SEQ ID NO: 46028 - DNA, 132 bp, Manihot esculenta
  Intron number 2 from transcript cassava4.1_020320m (locus cassava4.1_020320m.g) derived from phytozome v7.0 (chr-ID scaffold00620; pos 2300 to 2431)
agcgtctcgtgcagtctcctaactcattcttcgtaaatttctatttgtaaataagcatttgccgctgttttttccttattttgtcataacagaagattattttttccatttttgatttcctattggtgcagg

SEQ ID NO: 46029 - DNA, 1018 bp, Manihot esculenta
  Intron number 1 from transcript cassava4.1_003470m (locus cassava4.1_003470m.g) derived from phytozome v7.0 (chr-ID scaffold04043; pos 1533791 to 1534808 reverse strand)
tttcacaatctaggcaaaggtaagagaatgtaaacgaatgattgaacataagaggaaaccctaattctcatgacgttgttaagttaatataatgtttcggctctacgcgtgctttattccttccatttggtttccttgctgattaatcttgattagggtttatacccatgtcgttatcgctctaaatggtttctttatatggtcgaacgacttgggttatctttaccttcaattttttgtcaatatgtttaagggtgtcagtttgttgaagttatggtattgaactgaattaatagtcaataaaactttatagataatgtattttgcatgaattacggtcacttagcttaccttgatgggtactatcgagtaaagaatctataacggggaagatgtatgttgactttgatttgctgtaatgtattggagagcatatgtgcacaagtgcatcatttgcattttttactgaaaacaagtacctgtgttatcagaaaaagagtgtacttaattagagatgtataatcatcattgtgtctttattccgaagattttgcatcataaagctataagaaaaacctttcaactagtcttactcatgcattcgtgatattcttaatgcttttatttatttatttatttaaataaaaaaagagtagctattacatcatttttactgccattatcacttcgactgtaatggagtaacgtttcagttgcttttcagtttgcaattagggcaaagttatcatattagccgtctgacatatcttaattttttgaaaattgatgatgcaatatagctgcttatataggcattgcctctttggagaaagttcaatgttgatagagccttggctttgatcatgtgtttataaatgctggtgatgctcagttaacgcatatgctcatagctgtcttggtatagttgcacagaacttagtggatgccacaggctgcctactaactgttagtgcatgattcaggaaaaagagaaagtgggatcagcctgctgagccat

SEQ ID NO: 46030 - DNA, 869 bp, Manihot esculenta
  Intron number 1 from transcript cassava4.1_006501m (locus cassava4.1_006501m.g) derived from phytozome v7.0 (chr-ID scaffold07520; pos 32217 to 33085)
tgcccaaggtccgaatcatctttatcaaatgacttaaattattacttacagaaatgtgaagggatggaaactgctgcaggacttagctgatacatgttcatcagccatataggctcgtgactgaatctgcccattactcaaaagtcggtggtcataggatgtgagatggctttactgattctaggcccagccactggactaaagaattgtaaaagacaaagcatattgcactagtaaaattgagaatttataaatagcttattaaacttggttatggcacaaaacacaattctttcgagtttttcaaacattttgattcttgaacaaaatatataaagattggtagattcttgaaaaagatataggtttcagggaagatgcaatatacttgaaaggtgtcatttgacatttatgatgtattttaaatgtgtgcttgtgaatccatgaggtgtgcagtgtaacgttctcagatcacaactgtaaagggacctctgtactgaaaactgctattatatgttgttattgcataatgttctggatctataatcttcccagcacaatatctttctacctatagttttatgtgtttgacaaaagttggataaatggtgttattgtttttattttaattttcatgtttctaagcatggaaatatattagggaatttgcaaaaccggagcttatgatgctttcttaccatattcccctaatgggatatttggtagtgattttagaattcctttctcttatatttttttttaaagttttttatttaaacttataacacaggcagtattgaccactaaataatgttcttgttcttgcttaagcagtgagctgttctaagggaaaagctggctggtttcat

SEQ ID NO: 46031 - DNA, 962 bp, Manihot esculenta
  Intron number 1 from transcript cassava4.1_007773m (locus cassava4.1_007748m.g) derived from phytozome v7.0 (chr-ID scaffold07810; pos 25332 to 26293 reverse strand)
tgccattgtgacttgttccgtctcccctttcaaaggcatgataatttcctctttcaatttatgagcttcctctgctactgatttttctttcttcttgtttgctaaaaagtaaaataaagtaaaattttctgttcatctgttatcttattgttgtgaaaaactgaatctgtttatgccaatttagcaatccgaatcagtttcttttcaaatttacgcacagaaagagcaattaatccatccccattgcactttatatatgtgtattgtggttggtgtccgatctgctagttttcttggtgtgatgatatctgcttcttcaactcttttgagattgtttggttcaatactaagggggagctacaattgaatttctaatagaatgcagatcttttcattttgaaaaaactccttacaactctttcccttgattgctttctttggtttttgcttctgcttttgattttttagactttacccactttagtacggcctctctaagatagagattagattgaacctttcaacaactcgaattatttttaatcgcaggtgcagttttttctcccttatggaattggagctaaatttgaagctttacctacttcatgtttcagtttttctcttatctattgattcataatagctcatttaaaattcaacagcaatgtcgattttctgctgtgcaattaaatgattttcttgtttcaatgataaaaacatgatgtgcaaatcaatcaggtatagcaattttatgctgtatatgagtttctttcttttgtttttctttttttaattttgcttttcaggttcaataccatcttgaaggttagtgagagttttgaaatttctgctgacgttcttaaacattttggactactaggattgagagaaggtgagttataggaaagtgggctcattccaagactgttaatgagactgctatataaaagtgaaggcgaagt

SEQ ID NO: 46032 - DNA, 558 bp, Manihot esculenta
  Intron number 2 from transcript cassava4.1_005743m (locus cassava4.1_005743m.g) derived from phytozome v7.0 (chr-ID scaffold03040; pos 87790 to 88347 reverse strand)
tgccaagctcaacaattcacaggcaagcatagagagtatccttttgatattgatagtaaatgatgcctatctttttatttatacctataatatgtgcctaaggtaaatgggttggatgttttttactatcataaatgctcaggcatccaacttaagctattttggtaataacatatgaaaactttcttctcaagtttattgcattgatgtatccaaattaaaaagaagcaagtggtggtgcattctgattgagttttagcaagcaactctctgaaattattcttatattgttctttataccttgaattgcatcttgtcatgttatcctcaatgattagaacaaattcaaaatatcctgtttggagaatttttttaggcctttttttctcttgtttttattttcgtccagtgacataggatcacagtacatttagcatgtgtatatgtagtagaattttgtgtaaatcattaaccttctacctttggtagatatggttctttatttctaatttgcaatccttaacatgccaagcattatctcattggtgtattttccat

SEQ ID NO: 46033 - DNA, 696 bp, Manihot esculenta
  Intron number 3 from transcript cassava4.1_001046m (locus cassava4.1_000843m.g) derived from phytozome v7.0 (chr-ID scaffold08632; pos 18645 to 19340 reverse strand)
ttgttttgaaggttagtggtgtctttaccatctgtatgtgttttatattctttgcatatatgctctattttactctgatagatataggcttgatattatcagctagattgttggcgatgggatttttctccattttctttattgtgatgttggatccacaagatagggatggtgagacacgtgagaatgagtatggacttccattatcttgaccattagggagtgtcttaatgtttttctgtggattcagaaacatttggaagagatccaacatcaaaatttaacttgatttttaggactactactttcttgtgtatttttgtagctatatttggatttctacatcttgattttcatgctgttactgtactattgctccttgtttatgttttgtttaccttggtgtcatgtatagaaaagaaaaactgctgatgtgaaactgtgctctatcttctaataaatgttttgttcaaatataaattataattgtaaatatggttctagtaatgctaagtaggaaaacaacctctccaaaaccaatccatcagttggaagtattttattttggtctagaggtgattgatatttcttttctctgctacttatgggaatgcataatttcatcaatatttttttttgatgtgatgccacttttccctttgcagacaacttcactaaaaagtggtgccttacgac

SEQ ID NO: 46034 - DNA, 625 bp, Manihot esculenta
  Intron number 1 from transcript cassava4.1_022206m (locus cassava4.1_022206m.g) derived from phytozome v7.0 (chr-ID scaffold01761; pos 88627 to 89251)
ggcttctcgagatctgtgagagtgtttacggtacgtttttcttcttctccttcttcttcttcttcttcttttaatttattgggaattgcaaattctgaaattcgaattctatggttttaatggattatgacgatgaataagtatagaattgaattggattatttaaactcaatttttgcacctattgtatcgatggcaaacataaataaaggttaattaatgtgatcaaaatgagttggggaggttttaacaattgaactactgggttctgttgccttgaataaataggtttaggatcgttcttttttctttttctttcccccccacccccttttctcaaggcataatggtcctaacaataccatagctgtgttatctaaagggtatcatggtttttgttgggtatgtactactctctttttgtaatgacatgtatagaagaaggctttatacttgagctgattcagtaacttacttgaaacttaaaatgttgttttggcatagaaatttcagaccggcaactgggtttctttgattggtttaaatttgcaactaatgctttaatttcatgactaacaacctacattctttgtaaacatagtgtttgattactgtttcaccaccg

SEQ ID NO: 46035 - DNA, 350 bp, Manihot esculenta
  Intron number 1 from transcript cassava4.1_005744m (locus cassava4.1_005744m.g) derived from phytozome v7.0 (chr-ID scaffold00847; pos 1129879 to 1130228)
gcgaatttttagattctgtctcaggtgcttttcaccctttcttttattctcaagaacatgagtttcctgctgctcttttttcttttcttcaaacttcagatttactgtatcactttgattaagttttcatgttcaaaagctaggatttgcttattagatttggatttagttgagtagtttaagatcccatttgatggattggagatttattttcctcaatagtaagaaaatagttcttcattttcaacttcaagcagaagtcaatcagtaaactttctgctaaacccctcttggctatccaaacaatatgaacagggaaaacatttgagaccatagacccgagaactgga

SEQ ID NO: 46036 - DNA, 620 bp, Manihot esculenta
  Intron number 2 from transcript cassava4.1_019357m (locus cassava4.1_019357m.g) derived from phytozome v7.0 (chr-ID scaffold03186; pos 106222 to 106841 reverse strand)
tcatcagttctcttctgtttcttgtgctgctgacagtaagtttgagctcctaattgatagcccatttttggccatgtgcttgtgttatttttcattttgttcatattttagggcatttgtgatcaatattgtatgtttttcatgttaagagttttcgagtgtcatgtacaaaagctgtatgtccatgcacaatctaggtctttcaaagttgctttcctttttctttttggccagatattcttgttgctgttgaaattcttgtagtttaccatgcttattttggttatgagatttattctctaaccctttgtttggcatattcattttagaagaaaagaattcaaattagttcttggaaaatcatgcaaaattttaacttatttcaaaataaaaaatttttaagtgaaaaaaatagaattctttcattccaaacaaaagaattattagaaaagaaattaattgaattaaattcttatgaaattcttgattccaaacagagggtaaattttctctctatgaattggtcatttatcttctgtggcactctcaatgaaatttggatatataatatgcatttactgggttgcttttttccagttcattgggaatttccaggaaac

SEQ ID NO: 46037 - DNA, 757 bp, Manihot esculenta
  Intron number 2 from transcript cassava4.1_015664m (locus cassava4.1_015664m.g) derived from phytozome v7.0 (chr-ID scaffold07318; pos 67732 to 68488 reverse strand)
cagagataaagaaaagtgctaagcaaggacaggtgtgctacaatttctttgctgattaatttctggtttatttaacattaaacttctcttggtgtttcaattatttttatccgcagagtctaagctgatggagaatatagcttccttgtaattatgtttttcttagtgctagaattcaaagtttatacattttgttatatgttcattacgaccaaaacatacttttaaataaataaataaataaatatatatatatatatatatatatatctgactagtaatatcatgttgtttcttgtttctgttagtgattatatatgactttgcgttggaaatgttaatatttaattattgatgtcttagaaaaatattatatcagcctgattgtactttaagtaaaagcttgttaatgtaatgtgtcacaaattgtattgttgaaccaattggttagatgttttattgataaagtcaggactcaggaggatattctgattgtaatttcattgtaatacaagcttatgttattaatctggtaagcaatgctaaaatttgatcatggatggatttgttgtaatttttcttgtctggaaggatttaatttggggataattcgtatgtttaaggtctttcccccctgctctccttgatatttttcatttatcccttttttagaaaaaaaaaatttgaaaaaaaaaggagttgatacctaatatatatttgattttctgggataatgttgcagggagctgtgaaaata

SEQ ID NO: 46038 - DNA, 417 bp, Manihot esculenta
  Intron number 1 from transcript cassava4.1_015664m (locus cassava4.1_015664m.g) derived from phytozome v7.0 (chr-ID scaffold07318; pos 68565 to 68981 reverse strand)
gagtttcctcttcggcaagagaaaaactcccgcaggttccttttttactttttcttaaattttacgtcctactttatttgattgatcttctcgtttttatctgtttttgcgttcgtttgtgcctttgattaagttagggctcggtgtttgaatccgtttggttaggattatgattattgatacgaattgaaacatgattgagacgtttgattctattttcagaccgagtttgatcaaggacatgcctaattgatccggattttttgatttttttttctaagtgaatgagaatatttgatatagttgatgcaattacaatattgttttattattggctattttcgattaaactgttctttgtatgatttcaactgagatacgatttgtctttcagaacttttgcgggaaaataagagg

SEQ ID NO: 46039 - DNA, 1051 bp, Manihot esculenta
  Intron number 2 from transcript cassava4.1_018050m (locus cassava4.1_018050m.g) derived from phytozome v7.0 (chr-ID scaffold03602; pos 387218 to 388268)
ttttgttgctggagcttccattctaggcttcaaaggtgatgattcttgttaagtggatgcttccttttctttctttttctttttttactcagccatttaaaaatggaaatttgatcaatggaaaatggtattgctgatatgtgatcacttttcggctggagtatatttcactcctgttactcccattaatggtggatattagaacatgtactggttatgataaacataattattatcctggatctatgagttgcaatgtggtgctatagtcagatagtcaaaagaagaactaactgtaacatttacatgtatcatgtatcaatttgtgtgcttttaccaaatgtcaaaaataatagtataatggtattaccagtatattggcatttgttttgcctaatttatcacaactcagattaaacatacctatggaattttttagagtcctctctcctccattccatagaaatatgatgcagaattgatcttaggaaagtgttaaataaatatgaatttgaaattttaacaaatgtcgtgcttgcctgccagcacttttttggttgagaatgaatgcgataaggaggattatagttgcatattctgagttaaatgtagtaaatcacattttatgttaaaaacttttctgaatgctgttttctccatctgtcaatcttcacatgccatcatgttgaatcccttttctcattctcaatcaacctagccataaaatttctatggagccaaagagttttttttttctgctgatgaccatatatggagaagagtgcaatgttagcacaacgacgtgctctaagtagtgtttgtctgttatagcaccttagtttagctatggaagctcgtaggtgtacaatcattaacatattttttatgtgtttgtcctacttgaagattatagttatgaattttagtctaccaaatgttgactctggtagtttgatgctttattcatctgtcatgattgtcaattgaaattgaatagtatgctgcacattttgcaggaaggagcatctcaacagctgtttctgctggaaca

SEQ ID NO: 46040 - DNA, 665 bp, Manihot esculenta
  Intron number 3 from transcript cassava4.1_003501m (locus cassava4.1_002047m.g) derived from phytozome v7.0 (chr-ID scaffold08799; pos 581589 to 582253)
tctgcagtcttgttcaacgattgttatccttgtttgtacattccttacctgtctcatttatggagagttctgataaacttggaataatgtttatttatttgatgaagcattgtacactaatgatgatagaaattgaaatcaacagaatgaaaatctcaaatactggagggactatcgacagtaaatctattcacataaaagagttacttatctattgatgaagtattggtctcaaattttgacattttttatatgaatgcagtaattctcttgatatacgtggttttatgattaaattgttatgcactaaacctctgtattttatgctaattggagtccattgcactgatatgtaatgcatacttgtcatactatgaaccagaaactgaatcagtttttcatttactgtatctatattcttccaggactttgttatatctaaataaagcagcattaggcataagcatgagtggaaataatacaaatactcaatatgttatgctgatgatgctactttttcttttcttttcttttttctctcaacttactagtgtcagtcagtagcatggaattcttctctgttttaattttttttttattttttattttttttttgtttcacatgtttgcttgtgttttggtgttctaggtggctagtgctgggt

SEQ ID NO: 46041 - DNA, 431 bp, Manihot esculenta
  Intron number 2 from transcript cassava4.1_027249m (locus cassava4.1_027249m.g) derived from phytozome v7.0 (chr-ID scaffold03960; pos 55295 to 55725 reverse strand)
ggctattcaaggtacacagtttttcgttctaattcacccttattagtggcataatcttttgagagattggtgctgcttcttttgtaatatgctcttatgtgcattaatgctcttgattacagtgttaaagatgtccatcataaccactatgctgagactccaatgttggcaatgaatcttgaggatgagttggaagaaactgaaatagagggttttagttcacaagtgtagactttgttttgccagtatgttatctacaatcagcttgtgcaattacgttaaccttttctttataaatgaactttacatatgtcacattgaatactgattgacttggttagtccttgttttttgatgtatgcgttttaagagaactaatttatttatcaattatcaatatatgctctgagtgatcggttacctgataggtt

SEQ ID NO: 46042 - DNA, 935 bp, Manihot esculenta
  Intron number 3 from transcript cassava4.1_031680m (locus cassava4.1_031680m.g) derived from phytozome v7.0 (chr-ID scaffold12564; pos 34828 to 35762 reverse strand)
aaagaaaaaggaatcaaagcactttagtgcttctggtgggatggctgttgaacaaacttaaaggaaaaaaaaaaaaaaaatcttaattcaacttttatttttcttcctagtgattggtgtacggctctttccctgaaaatttgaagaattttacagaacatatgggatattgagagagattaaatgatttttcgtcggtttgatcaacggatatgacagtaagaaaaatggtagctttatcaaaatcaacttattttattttggtagttgaaattgatatatgttactgtattggattgaatttccagacatcgcatgcagaaacttgtttgatttataataatgtgtttaaataacatgtaatgcgagattatgggcttgtcatttgcgatcttcaatttatacctgcaaaatattcggctttctaatatggacatcctgaagctgtcagctacttttcagaaatgctcttgaatttggcatttgttttattgaaaaaaatttacctcactctttctaaacgtttcgaatttttatgcaattatgaaactagtaattaatgaacaatgcctgtttcaggttgggccggttacttaaagttgtctccatttccatttggtttttatctttcttctcaatcgctctttcgaaatctttatttttattgtttttgcacatgatcgtgcaagtttaaatgcatatgacctatgaagtaagatctggaagctgattcctcttttgaagtttagtgcatttccctttttcttcattgtattttatgatttgatgatttattaaaccttttgtataattcatttttggttgagagtagatatcttctttgggtttctaacctttttttgttttaatcataaagattgagctaatgaaatatataagaaggtagaggcactgaaacctttaaaagggcggaa

SEQ ID NO: 46043 - DNA, 558 bp, Manihot esculenta
  Intron number 2 from transcript cassava4.1_012475m (locus cassava4.1_012475m.g) derived from phytozome v7.0 (chr-ID scaffold04457; pos 1066953 to 1067510)
atgtacgtattgatttccctcttttttctttttactaaatactatatatatatatatataggttattgcatttgagattcttatttctacctattgcaccttgataatctcccagcttattaatgactaatggaataaatcagttaaaattgtgatgatttcttttattattcattatctaccaaaacaaagcttatgtattggttttaagataaaagtttgggtgtgaaataagtaaaaagtaaaaatccaagttgcaattgtcgagataaaaggtcatgatcgcttgtgcaatgctcttgttatgttatttgaattgttgcagtggctttaatgaatcaaaaagtgtacaattttgtttcctcttatggctttttaagtccataatattaatgtatttttctgttcttgcaaaaatttcagttgaatatcaatctcaaacttggttcactaggtgatttatctagtagttgttttatgataataacacactaatgtgtgttaagaagatgaaactacttttctagacagctgaccatgacaatttactggctagga

SEQ ID NO: 46044 - DNA, 335 bp, Manihot esculenta
  Intron number 3 from transcript cassava4.1_011024m (locus cassava4.1_011024m.g) derived from phytozome v7.0 (chr-ID scaffold06035; pos 67313 to 67647)
ttgttggaagtgctggatcaaaagaaaaggtgaatatgtagatgtactcttacttggctggttaagaaaattgcattggattacttttgcattcatgttcaagaaaaaaaaaatgtaaaattcttcctttggtttagtttagtttatttgatcttagtaaagaaaatgcaaaatgttcagttagtaatcttattctcttgctaaattatagtcaagagtcattagttgattcatgaaggagctctttttttttatttatttaatttttttgttttcttcctaatcatttctacaacatctgcaggttgatctgctgaagaacaagttcgggtttg

SEQ ID NO: 46045 - DNA, 685 bp, Manihot esculenta
  Intron number 1 from transcript cassava4.1_008160m (locus cassava4.1_008160m.g) derived from phytozome v7.0 (chr-ID scaffold11378; pos 97206 to 97890 reverse strand)
tcacgctatttctccaattggaccatttcattgctgtaaaccctattcctctctcagtataattcctaagtaaatgccgaaaattttctgctcctctcgtatattatcgttgattttcttcttcttcttttcttcttcttcttcttcttctaattaaatttagtgacccgaacgttgattttggtgttccagactctaattatccgcgatctgttttttggtagtagtgttttatggtaatctgttttgtatgatttgtaagaagctcaaggcaaacctaggataagctttaaggtcttgtttattgatgcagtgtgctttgttactttagttagtttacctctttggatatgcatttggctaatatggaaactaggatcagtataataatgtagacagtcgcttttttacttgctgctgatatggaaattttgtgctttgatgcttattgacactgactttatgtacttagcatatatatatatatgtatatcagctttctttgagcaaaaaatttgcactttctgtttattttctttttattttttttttatagattttgctcacttcaaatccatatgttctagtgatttgaagttttcctgcttttttggaatacatatattgattcacatgatctcctttttcttttcagttgccacaatttggatttttacccatttaa

SEQ ID NO: 46046 - DNA, 839 bp, Manihot esculenta
  Intron number 3 from transcript cassava4.1_011343m (locus cassava4.1_011361m.g) derived from phytozome v7.0 (chr-ID scaffold03722; pos 45206 to 46044 reverse strand)
attcctatccctgtaagtttagctgcttttgggtcatacagatgacttcctgttccctcttggtgcaactaattatgccctgggccttcacgttgtctttgttattttttgacagactattctctcaattataaagtaattggcttaggtaacttcaaggtagacaaagttaataccttttttattcaatttcaaggattgcatagtagaatagggatgaggcagagagttggtgtgttccctcaattcacaagtatttctcctgtgagcccacatacatggcttatgggggaagttttaatttttataatgtgttttggttggcatctttgaaacttgcacttgcaagttcaatgtaatttagtgttaaaatttctggtattattgaatgagacctgctttatgaatcattgccttgctactgttatgtcatgaaaaatcatatttaattgaagaatgttggaacggcctatagttatttatattgtttggatgctcatctttgcacaaggacatatccaaataacattctttgacttgcatagcatattttccctctcatcttccacaagagattaagtgatctgctttggtttcaagatttttcttactggataagcatgcaagcacataaatatagaaacttcttaatgtttgagcatgtattcaagatttcaagctcttattggggcaataattctacttatgattattcaagtatctttcaattatcattttcaaaccaaagcacatgaatctgcatgcatacatttgagcatatgaagccattgtatctatgaattttgcttatcctgaatttgtcatttgttctgtgtagc

SEQ ID NO: 46047 - DNA, 552 bp, Manihot esculenta
  Intron number 1 from transcript cassava4.1_011343m (locus cassava4.1_011361m.g) derived from phytozome v7.0 (chr-ID scaffold03722; pos 46607 to 47158 reverse strand)
tgaagattcaagcttcttgaatccaagctgaccaggtgagttcttttctgtttattgaacgatcttatttatttatttattatgtgtttgtatctccgtgtttgattttatgattgattggttgcttgaaagataatgtttagttgattcatgaaaggtaatttgattattgtttataggttcatttatattattggctgttacatgttcatagaaaagtaattgactaattgatgtatttatgattttgtaaaggagtaaaaatcgaatttgaagtattttatttcgaagcacaaaaacctttaaagggtagggggaaaaagtaacaacttccttttaaggacatgttttttttttagactaaaatgctcgagatcgtcaagtgaaagtttgtttcttttttcttcaatctaatggttgacagctgatgctcatatgatgcttacccttgttattaaatatcttgatgtgaacccaataatataatattgtacgaattgaaaaagtcagccaattattcaggttttggattggagggatttttcaaaggag

SEQ ID NO: 46048 - DNA, 678 bp, Manihot esculenta
  Intron number 2 from transcript cassava4.1_031247m (locus cassava4.1_031247m.g) derived from phytozome v7.0 (chr-ID scaffold03741; pos 612524 to 613201)
aatttgcctaccactatctctcacgcagctcaaaggtattattattattattgttgttgtttctttgatacatcataaagtaacggaaacgtacgtcaaccttgttccattacgagggttgttcctcggcagcagtgaagactttcggtttatatatgtagtttgtttagagttatagctgttagttgttgcatatgatgaaagaatagtgtgcttgcggcttcccctctagctagaaccaaaagttaattataaaaagcatttatggggtgcatggtagttatggttaactggttcatccacttaaatgactcgtatgctgttcagtcttctttaaaaagggcgctgaaaaggcattgccattatttttgttgctgctttttttgatatcttgaaaatagtaaacattcgtctttgccgtgatctttgcacttttgctgccattcacaatctttttctggagtccttgtgcattattgctctgggtgcccactttttaagtttcatagatgccaaatttctctctttttcaaccctaaattgttaatcctgcgctgttgtagtgcagagattagggcaatgttgttttcctatttgtcttcttccctcgcttatttgtcgacttttttcgggtgattaccaggacgagtgggtcatctcccgagtctttcagaagag

SEQ ID NO: 46049 - DNA, 505 bp, Manihot esculenta
  Intron number 2 from transcript cassava4.1_009967m (locus cassava4.1_009967m.g) derived from phytozome v7.0 (chr-ID scaffold04457; pos 773283 to 773787)
atttccaggccttaggggttcctcctctgcccaaggcaatttctccgttagcttcttttgtgcatttgcgttctaatattgcctcttgcttcttgaatatcattatataactttaatcagtgagcagtcagactaagtatttgtgttaggttgagcctattttgtagtcaatttaagcgataaaggttgcagagttctgcttatattgctgtagtttttgtttctcgcctctgagtgacatgggcttcctgggttgaagttgaatgcatgaaatacgtcatactggttttcttggcaacaaaagaaaagtatagagcctgcttggtttgattggaaatggaaatgaatgcaattctgaaacctttgcgattagtattcacgatgaaacttctttttcttcatgtgatgaactagctttaatttaggtgataagtaattgttgaaattgtccagagtgttttttcttctgactttgtttaggcatcattgttttatcagaatcgta

SEQ ID NO: 46050 - DNA, 1013 bp, Manihot esculenta
  Intron number 2 from transcript cassava4.1_004131m (locus cassava4.1_004131m.g) derived from phytozome v7.0 (chr-ID scaffold04287; pos 81339 to 82351 reverse strand)
gtcttgcaggctggctttgcctttgtggggtaaaggtataactgtctttcttctaatccctgcatgtttttcaactcatagctattaggtaaatacccgatccaagcccttgagaagtaagagaaaaaacaatactatttgattttataatataaaaaaaactttccgttaattcattgattttaaaaaatatattaaatcgtttttcaagtttaaaaactctactaattaatctatatatcatttattaattttaataattaaatattataaaaagatttaaaatatctttaatattaatgtattaattactagacatttttataaaaattgaaatcaattaatgaattaattttttcatattacaaaattttaataataaaataattatattttatctagaaatgaattatttatttaaaataataaaaggtttttcgagatttaaaactcttgaaccagtatttggtgaggaaaaaatttttttcaaacaaggtttttggatgtttttgaaaacctcgtattttctttaaaaatcaccaaatagtataaaaaatttttcattctcctaaataataaaaaaattattacgatttaaaaaccataaaactatatctcataaaattatatgatagaaaatgttactgttactctaccaatttccaaacatagtgttttaaaggctataactaacaaaatgactcaatattagattttttaaatttttataaatgttttaatattgtttaaaattaaaaattaattaataaatatttttcaaatagtaaatttaaaaaataaaaataaaaaaaccgaggaaaacgcgccaggtaggggtcgaacctacgactttctgcttaggaaacagacgctctatccactgagctacaggcgcagatgtttaaaacagcaatacgtaagcataatcatataagtatatggaaattttgcttcgcttaatgatgaagttgaggattcggcagctaaaacattggtttggtttgcaggtattg

SEQ ID NO: 46051 - DNA, 802 bp, Manihot esculenta
  Intron number 2 from transcript cassava4.1_028856m (locus cassava4.1_028856m.g) derived from phytozome v7.0 (chr-ID scaffold03741; pos 937875 to 938676 reverse strand)
ctcactggattactaaggccactctcccgaggtaacccttttcaagcattcctttttctcttctgtatttttgctttcttaatgaccatttctctgtcgcatgctctactgctgcggtgaacaaaatgggaagttcttgaatttcaacaagtataatttgcaattcttttcctcttcattttgtttaatttgacttagatgaaaattcaaatttttgtttttttaaaaaaagcaccaacaaaatggagtagcttgcgagttacaggctatttggcgtagggacaatgaacttctcttttcccttttaatcaattaaaacatttgatggttggttgtctaataattgaagtactggattagtcaaattaagtcaaatacagtattttctttgccattaccagtcagaatcattgttctgaaattagcccaaatgggaaatattttgcaataattggataagtttagactaatacattccgtcctgtggctttaaatttcactgaaatactttcagtgttgaactggaattcaaaggtttagctgttagttatttgatctgaatttattttctctttcaatttttcaaatacttaattgactaaaatggctattgcactaatgcataaatgaaggggaaaaataaatgggaaattcggattgggatcctcagttgcccaataactgaagtaatcatcgccttacacctggttaatctgtagatttatcattttgaatttgggatctcagcactgtttttttcatgataggtttgtgaggtttgttagcacaccagaaattctag

SEQ ID NO: 46052 - DNA, 478 bp, Manihot esculenta
  Intron number 1 from transcript cassava4.1_014659m (locus cassava4.1_014659m.g) derived from phytozome v7.0 (chr-ID scaffold11330; pos 3010 to 3487 reverse strand)
gaagaacttgagctctttacagcagcagtcgaaaggtttgactttgctccaattcttcgcacaatagccctcatcccctcgatggaattgcgagggaggaacctccttgtgtggctattattatagaataacaataatataaaattttaaaatatttttttgaattatcttaaaagatagaatggcaatggcatgggagcttaatgtttgaaccaacggtgtcgaacaagtgtacatggaatatacaccgtttgatacaacatttaaaaatattttttcagattacatgatttaaaagatattttattaataatgcatgatttaaaaaaaacttcaatttacatgtactacaaattattgtaatcaatatatggggtctatcttatgttatcttcttcgggtgtgatatttctatcttatgttatcctgaaaatctttttcaggtgggatattagcgcaatagatcagctgccagagt

SEQ ID NO: 46053 - DNA, 422 bp, Manihot esculenta
  Intron number 1 from transcript cassava4.1_004707m (locus cassava4.1_004716m.g) derived from phytozome v7.0 (chr-ID scaffold03750; pos 1146414 to 1146835 reverse strand)
aagtgagaacagctttttctcagcctgaaagaggggtagggttttcttgagtgatgaataattgagaaatttcaggtctcaaaattttcatttggagtttttaagtgttttgaagtaaacgttggaactttaatccatattgaggctgtcactgagagattcttgagagtttaaaaggtgttccatttttggaagtaacagagagaagcacagtgttctcttttgctctgtttctctggctcagcctgtgtttcttttctctttagagggtctcgtaaatataaagaaagctctagtccttagctaatgaagtgtggcttacttcttcttcttcttcctcttcctttaattttgattttgattttgatttcattttgatttttgtagcattccgagagcccttctcaccaccacaacctctg

SEQ ID NO: 46054 - DNA, 767 bp, Manihot esculenta
  Intron number 3 from transcript cassava4.1_018950m (locus cassava4.1_018930m.g) derived from phytozome v7.0 (chr-ID scaffold08828; pos 28855 to 29621)
agtgctgcgcttgtaaaggctgctaagcaggtgcccaatgttcattcataagagaatactgttttcaactttaaaattaattgatggattggaatattggacacctctgctacatatcttgggtggctcacctttagttgtattcatttgggatcttttgggggtgaatcagcttttctttgtatgatggataaacccataatttttctttttgctagttttaacaattacaatgacttgtagctttctagagttgattttgtgagacttgggtaaggccgcaaggggatgcctttcccattattttcacaatctaaacccttatttagtcacaaaagggcagcaaaaacttatcacctcattacattctacgtaggagatattaagatctgtattcgtaagttcctgcaagaatggtcaaagcaagtgcaactaaaactttctgaggaacattggtgtcaaagtcttggaataaaacttcaggaaaattcaattgccttagaaagccaagtctgaaattggcacattcaagtagattcccttaacaataccatgtatctgttatatcatgacaacttgttacatatacaacatatctgaagagacaaaatttgatattagaaccacaaaagttttggttcaagtttcaaccacaagttgacctgcgaatcctcgtatgtgtagctacatattcaatatctatgattcctattattgtgtgatctaagtataatcaactaactgctggatgttgcctgttcagtttg

SEQ ID NO: 46055 - DNA, 1027 bp, Manihot esculenta
  Intron number 1 from transcript cassava4.1_017676m (locus cassava4.1_017676m.g) derived from phytozome v7.0 (chr-ID scaffold11998; pos 1088205 to 1089231)
actctgtttgggacaccaagccatcgtgagcctgcttgttctttgtcactatgtatataaatatcctcaaaaatgtgcttgtgaaactgtgaactttgggtcgagtttccttttttcgtagattattatattttgtggctcgtaattgtagcctcagattgggacgtctttgttgtgggaagtttgttgaattcccaaaaggacagatgaaattcttggtacattaagtagagttatcaggagtcgtaaacatggatttcagatgtagttcttctattggaaataggaatgaggccacttttgaaattggagtcattagatcactttgtggtaacaactcttgagactagatctgatggtataagtattgattccatttctcataaattctagaatcccatagcagtatgaattcgagatgaccaaacatgctctgcatccctggcgagaatagttggagcaggattaaatgtatgactgaccattctcattccataatgcgtgcatgtcaccatcaatatccttgtgcttgggtttgttctccaccttgttaaccatgtttcagattctgaggaagatatttcttttctagtgaatcacttttccagtgtgtgtagcctaactccaccccaaagttagctaaggggagaggattgcctaattccttatatttagcattaaatccatgtaccaaacaaatgtgggacaacagtcggcctttgagtggatataaagggaggatcaatgtaatgcacaagaaccccccctccaaaaaaaaaaggaagaaagatccttgtgttacactcatgaaaacattttattttctttcatttagatgctaaggagtgaggattgttaatgcttttgggccttttatggttatcctgagttatctaaaattcctttgctttgaccaccttttcaatgtcttcatgtaaattccatttgagcattcatcaaatttgctgcttgttttagcatgttctttgattacttctaatcttatttttttaaccaggtgtcaacc

SEQ ID NO: 46056 - DNA, 559 bp, Manihot esculenta
  Intron number 1 from transcript cassava4.1_013052m (locus cassava4.1_013052m.g) derived from phytozome v7.0 (chr-ID scaffold11042; pos 129521 to 130079 reverse strand)
taggcttgatcctcctaacaagctctattttccttgtaagcctctttacatatcatcttataatgttagctgttttcattctcttgttctcttttaatgccgtatactttgatttgcattgtgtcttcattcatccttcttttactaaatctgatctgaatcgtcttgtttgtcgattctatgagtaagagccgatcagattcttaccttcaacttttgcttgacatgagattgatgatctgggttgattttcctttttatcttttctttttcagttaattagatttgcttacatagtaagatatgtatatttctcctttcaattttaagaatgataagtttcctttgtccctagctgagctttcatgaatgttgacaaactcatttggtttctactatcgggatttgatgagctttttttattgttaatttgttttatctgggtttaaaattataaattctactttataacagacaataagaattaatctttgtaaaattttctttgtgcattacgttttcttggcatctgattggttccaatatttctggtttgaag

SEQ ID NO: 46057 - DNA, 885 bp, Manihot esculenta
  Intron number 1 from transcript cassava4.1_011014m (locus cassava4.1_011014m.g) derived from phytozome v7.0 (chr-ID scaffold04043; pos 956038 to 956922)
tgcagttgaacgcgcactctgccaccaaggagcaagtaattcatccatttttatgctaattgtgctggattagtaccctggtgtttctttttcatttttttgcgttttatgcgcattttggtatatattgcagtttgttatttttgttcatgttttttatcatatggatctttctggctttgtaatttgttgatgtttatgaatttatatgctgcagaattcttaaaataaatttgtaactatgattgggattttttgttttagttgggaatcattatgataagattacatttttttctcctccgatatacgttttgctgttcttctgttcttggcgtcttaattttggttctgatcttttttttaggtagttattccctataaatctgtttttgtggtatatatacactcaaatttcaggttttttctgtgccatatttgaattttggtgctatgttttcattttgccctagaggttgctgtacatcccttgagcagaatatgtgaattgcgattggaattacattttctgtttaagttttactaattagagctttttagttactgaacatgcacatgtggtccatttagttcatataaaaataaattttcatctatttactccactcattgaaactctttaaacacagactttgctgcttctgcttatgatagtgtgaccatgagttataataactgtgggtggcttggattgagatttgatataaaggttactatatctcggtgtattatgtgtttatctatttcttgaaggctgatatatccctatttcaataattgattatttcctttccacctattaatactttgaactcatctttttgaccaggcccaattgagggaggtaactttgcaagaagaaaa

SEQ ID NO: 46058 - DNA, 929 bp, Manihot esculenta
  Intron number 4 from transcript cassava4.1_030494m (locus cassava4.1_030494m.g) derived from phytozome v7.0 (chr-ID scaffold04024; pos 262024 to 262952)
tagttgttggtaaccttgacactggtgagttttatttatgtctttcaatttcttagaaaatgattggatgatttgcatgagatttgagtctttgtttgaccccatttcttgatttcatttgaccactatgtagttaaattttaggtaatgtataaaatagttgacataatttaaatttatttttttataataaaataattttttaattttaacaatttaatatttatagttttaaattagtctaacttcttcattaattatttttaaataaaataaattaatgaaacgtaaaatgtgacgatggaaatgtagagggtttttttttgttttttttttatagattttgaaactttcaaacactttactcccatgaagaaaaccttctttaaattaaattccccactgtaaagcttacattttatctctaaatgcagtattatcagccaagaaaaataatttttttttttaaaaaaaaacactgctgtttatacacaacgttagtaaatttcagacgttattactttacattaaattatatattaattaaccaataaaggaaattctcgagattttgaatttaaattatagttgaatatatattattaattaaaaaatttggaaggataaagctatttagcaattgggtttgtttcttcattagatttacttactgaaaaataataaaagaccctcactatcggtaatttagtatttatttcaaagtaagatttagttaattaaattaaattattcatttttgattaatcagtattttattatttgattttaaaacattatatgaaaccaattaaaattttacttttacaaaaattttgtaattaatgtttgtaaatggaaaaagataccaaagttgatggacgcgaatcttgggatgcaaattttacaaaaattttatttttaataggtgt

SEQ ID NO: 46059 - DNA, 539 bp, Manihot esculenta
  Intron number 3 from transcript cassava4.1_005425m (locus cassava4.1_005425m.g) derived from phytozome v7.0 (chr-ID scaffold07520; pos 448456 to 448994)
gcttgctgcgtctatagtgagcaagtctgggaaaggtgagtttttgctttctttgccttttttcttatcatcctatctttaatatcttgttttctatattatttttctacgtctttagggtttccattattcaaaatagaagtaaattaacatgcatggaatcttgtaaaccattctttggttggttcagttgataaattcattaaatgtttttgagctattcagcaagttgtgttttatttgtcaatgctaatctccattcagcaagctaatatgcagaattttatttgttaaatctatataatgttagtttttacttcctcctttctctcttaacattggttttttccctgtaaattatgtgtttcttctcgaaatttgattattgtggattagtcaacctatgtccagtttcttaggtgccactgcccatgttctgtctgatggaaaacaaattggtgcaataagacattttgaggatacttggccttcattctttttccttgtttgcagtgctcgtttctcggcagtttgtggac

SEQ ID NO: 46060 - DNA, 779 bp, Manihot esculenta
  Intron number 2 from transcript cassava4.1_008425m (locus cassava4.1_008425m.g) derived from phytozome v7.0 (chr-ID scaffold04796; pos 60730 to 61508)
gatttggtttctaccattcacattgcagataaagagtacgtttttcttttgtttaggtggatttgggattttgattagaagttggtttatatttgaccctatggcctcttcttcttcttcttcttcttcttcttcttcttcttctgggtacttgtattgcttatcatgttaaggttgcttttttcctcttctccctctcacttcatattctttgctgattttccaaattccaatgatttggggtgtgcccaaagtcaaaagtgaaacttacggtaatttcttaggaaatttaccatttagtttaagagaaaataattagttattctttgaaaatatattaaaatattaaaaaaaaatctacggattaatcattctgataactaaatcattccattaatcattttactatatgaacaactatctactaacgaagacattttagggctatgtttgattgggcagagaagagaatatagccctaatttcttccgaatagattgtgcttcgtattctcttctctgctttttaaatgctcagaatgttattcatatacaattcaaggaatgattttgtttgtggtattgggaacttccctattttcattatcttatttttggagccccttcaaaaggcaaagaatggcattttagctttagccaacctttagatttttgttgatgcttccctaggtgatgttattatctctagcgtggttgcttaaatgatctcaattactatgtgtagttacttcaccaccctccagaaggaacttgagccct

SEQ ID NO: 46061 - DNA, 963 bp, Manihot esculenta
  Intron number 1 from transcript cassava4.1_025838m (locus cassava4.1_025838m.g) derived from phytozome v7.0 (chr-ID scaffold09809; pos 544297 to 545259 reverse strand)
gctgaaccagtcgagatgtaagaaattatataataatgaagacctccccgtttacttcgtcgtcattttattagcgccattttccttttcgatttccctttttttaattctctttcgatttaataatttaattattaaaaattaaaagaaaaaaaaagaaaatttttgtaataaaaattaaagagtaaatgaattttaaaattataataattttgtccatttaattgaaaaagaaagagtagtttattttttaattttaatcagtttttcgttaattttagatattaataatttatataattaaatgagtttatggtgtaatataatattttaagtgttaaaaattatatattttaaatattaatttttagtttttgattgttttcatattgtagcaaaggttaattgctttttgcacattaaattcaagagggttgtggctgttttgggctttgaacgattcactcattaggtgagagtcacccaattgattcaatcatcaaccaaggaccgagttatagccatataattaaagagtgctaatcaaacttggtcaaaagaagtccattgaacaggcgaggcatgagttatatatctttttaaaataaaatgtatattttacttgtgaacttgccgaccatttctttcctaattttcgggttcttgctttaattggcaatggaacgcccagtaactttttcagggaacagcttttttttttttttttctcttttctttaagtagttggcagccagcaggtattgaccaaacattgtaatttgttctattattcaaaattaattttcattttgtttccctccattgcgtttgagctctgcaacacttacgtctcggctggaggctgcttgcttctcgatttatccctcaaatgctacctaacactaaaccctgtcgccaattcctcaagtgaaacaagacatagaagtcagaagacctctcatc

SEQ ID NO: 46062 - DNA, 747 bp, Manihot esculenta
  Intron number 1 from transcript cassava4.1_001556m (locus cassava4.1_001554m.g) derived from phytozome v7.0 (chr-ID scaffold11425; pos 406590 to 407336 reverse strand)
ttcgctttatccagctcgctgtttcaactttcaaggtcggtagtttctcttcatttgaattcctttttctttaaatgatttgagcttctttattctttattttcttttttgaatttgttttcttttcccgttttaagcattaaattttgatcgatctcttgagcttgaaagcctagtgtttttaagttaatgatattttctttaatggaatttatttttttgcttgcctgttgatctttcagtccaagttctcaatgaagtggcgaattaaggttaaactgttaattattatgggtttctaatttgggagttcgcaacatcgatcgatttgagcttggttacacactgtgattttcaatgtgtgtgattaacttcaagttgagcttcattaggcgttactagcacgagttgtgcgatatcgtcgctattaggccttacaatctacataattttcgggttcatatcacaagttagtctcattcttgagggaacttaactgaaaattagggtttcttgagggattattgtgtaagtatgctctttttctgctggaggggtaatatactgatagatttggtgtttatgccatgcttctagtttcttgatttatttgtgagggaagttatttttaaaaattactgcttatgtttcttagtatgtgtatttctgcagctaatactgttgtttactttgtttattgaacattgcttagatacctacaacaatttgttcaaagctcaaacagat

SEQ ID NO: 46063 - DNA, 655 bp, Manihot esculenta
  Intron number 1 from transcript cassava4.1_031357m (locus cassava4.1_031357m.g) derived from phytozome v7.0 (chr-ID scaffold06574; pos 3881 to 4535 reverse strand)
gaataataagaagaagaggttgagtatctcgtcgtgtaagaaaggagaaggatgaaggcaattgagtatggagagaaagcaacagctaagttggttttatttgagagagtagggaggatgagtaagggagataatactctggtcggtcatttcttttgagagagtggagaggaagatgaatgaaggaatctcttaaacatgtaactaaggaataggattgtatataattttgattcaattcatttttctttttcgttttttcatgcacaaaactgaaccgaatgaatcgaacaatcaaaattaattgaaactcttaaccataccattgtgtaatccttcggagttgatttaattcaaaactgcatagacatagccacaagttcatagaaccatacctcaatcttggactcaagacattttaggaacatgcacaattttatcatagcgtctgtaatcctacggagttgatatgtaaattccaggtgggatcagaccactagtggtttttctttaaatgaataggattgcattaattgatattgaccatagtatgatgaaataattatctaaagttatactatgatacaaagaggccctccactcccctttcttttcccattcttttcctcaagatttttatttttcttattgcatt

SEQ ID NO: 46064 - DNA, 985 bp, Manihot esculenta
  Intron number 2 from transcript cassava4.1_016749m (locus cassava4.1_016749m.g) derived from phytozome v7.0 (chr-ID scaffold00325; pos 553090 to 554074 reverse strand)
ccggcgctattatcgtccggcagcgtggcaccaaggtgtgaactttaaatttctcgcatttcttaccatttcaatagaattttgtgcatttaaattttgcttagctttagagttcagtgataattagaaacaaatttcacactgttaagtgtaaatgagtgtatatcctgcttttttttttgaacgagtgtgtatcctgcttttgaatgccagaaatttgtaatttcttgaatttaaactttttgcatggtagctatttgttaagaaatgcgaaattaggtggatagagaacctcgtttagttttgagaattatagtgaagattcacagaatcacatttgcttaattgatgatttttttgcataatataacatgtaaatgaaggctgcattttatgcgactctaatgcagaccatactcagattgcaaaagaaatttggttgagaaatccttaatgaaataatatataatgtagaaaattggaaaattgagagaggacatgattgttacatatctagttggctaatgtctggaagataggattttgtttttgctgctgaaggtgaagaccataaagactgagcttaaggatcattaggactgcttatctttattcttaattcaaatttgcagtttgtagtgaagaatacttgtttttggatgaccaaattttaattgacaactccagattgccaagactttttgctttttatgtcatgctaactctctactcaaatagttgcgccaatcatatacagtggcagtgcatgtctagtaggatgtaattgaaatgtattgaaatggaagtttaattgaacagtgaacagaaatccattgcattacataagggaaatatacttgaaatttctccgtgaataacatggcaattggcgatgtgtactaccttattcccaacatgttttatgactgtttgccttcaaaacatttcagtttcatccagggaagaacgtggggattggcaagga

SEQ ID NO: 46065 - DNA, 375 bp, Manihot esculenta
  Intron number 3 from transcript cassava4.1_033706m (locus cassava4.1_033706m.g) derived from phytozome v7.0 (chr-ID scaffold09335; pos 71793 to 72167 reverse strand)
accctttgctccaagtgccagtaagtacagcataatattttatcaaagcagaatctccacatcatcccccaaccaataattccattttttatctgaaagtgtcttttttcccccttcaatctcttgctgcacttcacatttggtcatttcaactcgggctgcacatttggtcttcaggaatatttcagttcatcttgatacttatttatattcttgtctcatgactcaaaataatcttcaagttccacagcttttttgcttcacgtgtaaccaataaacaaaaacatgcatgaatatgcatatctattttcagatatgccttctatcttgtgatttatttgagtaatggaaaaatgcagctcaaagctttgaaat

SEQ ID NO: 46066 - DNA, 638 bp, Manihot esculenta
  Intron number 3 from transcript cassava4.1_008020m (locus cassava4.1_008020m.g) derived from phytozome v7.0 (chr-ID scaffold07806; pos 76884 to 77521 reverse strand)
acaatgtgagtattctttttttcccccactctcccaatttcaattttttttgttgtagtatgatttatttagtgattttttgacattgaaattgaagttgtttttctgaaaaacatctgtttagatacatttgcagaaggcaatttgaatttaatatttagttgttctaacgtttttatgacaaaaaaagcgttgaatctagtttaagattgcctataattatcgtggtgcctttttcttgaaaatagctatggaaatgatgataaataaacctgtagcatgttggttttgatccactgttgagagttttgatatgtttaacagcaaaatttcccttgttcagaatttggattttggaactctttgtcctcacctttctcatacaaaattacaagtattgtttgtgtttttgctttaaaactagatgaatttcattctatgttaactaaaaatgattttcattctatgctaactaaaattatctattctcatgatttaaccagctctttgaagttgctgtcaaactccaagaaatatagttatattgtaatgttgacttgttaatcgtgtcaccatgtgtgttgtgttcttcaatcatcacagaggacagctactagtaagttccggcagagaagaaa

SEQ ID NO: 46067 - DNA, 912 bp, Manihot esculenta
  Intron number 2 from transcript cassava4.1_016615m (locus cassava4.1_016622m.g) derived from phytozome v7.0 (chr-ID scaffold08799; pos 322579 to 323490 reverse strand)
ttgttgccgttaagtatatcgagagaggtgagaaggttagtgtgtctaatttgcttttcaaactttcgtgcttatttttctttagataggttattgagcttctggttaatggttaagttttaaatttagagtaaaatagatgtgcttgtctgagtttctttaatctgtggtttcgataggcgtttgcgcttgaatttattggcaaatcagcttgatatgcatttgtctttggataggttttgactttcatgtatatttcaaaattagtttcttatttaggagcaattaattgtatgatttatccatgctctaagtttgaattcatttcctatctcaacggagtaatttggttgtgttgctcttgttcaagggctagtagctgtttgcatcattgactgaccaaagtttctacctcattatttttgtattccaacattatagaaatcattcttttggtagtttctattcagctgcatttgttttgagatttcttttctggaattggaagattatacgcctagcaggtgatgtagatgaaatgaaattacgtgcatgtccatgggatctggaaattagttttttttttccctccatatctgaatgcaaatgattttattgatttgttatactaagggggaataaaagagagagaaagacaaagaaaaagtagtgtgtttacttttcacaaaaagaagcttcaaaagtgaagagggtgaggaccatgaatcttcaatcaggccactcattttgacctttcattctaaaaaatgatgtgtacggcaccatctaagttattgtttatggagctggcttgttgatcctaagtaatttgatccccttccaagctttgtagaatttttcatgttggcattggaatttttaccttgcttttattttctgtgtaacagatag

SEQ ID NO: 46068 - DNA, 864 bp, Manihot esculenta
  Intron number 3 from transcript cassava4.1_026236m (locus cassava4.1_026236m.g) derived from phytozome v7.0 (chr-ID scaffold07003; pos 223941 to 224804 reverse strand)
ttgattccatcaagcgcatttttcatcccaattatgtaagctacaccatctttttttttttccgtttcatatttataacattttaaagctcttgaaagtttcttttgccagatgaatctgttgctttgtgatacaagattggatgcgagatttgattaattaacttttgtttaaacacctaacatggtcctctcaattcgaataaattgcataattttctcagaataaatatctaattgggcctaaggcttagttgagttgagtttcttctcaagattataatctatatgccgctagataaaaagcttcgtttattctgtttggaaaagctgttttgcatgcaaaatgaggaactggtagtctagcagaacaactatggtttatgtgtatggttgaaattccaaactataaatatttttttgaagatgtccacatgtttgagtacattagaaaggaaaacataactagagcacatgtttgaaaacataacaccaagttctttgtggagaagcataacacatgtgtttttaatatgtcatcaaactttaatccagtgttcactgctgattattaaggaagcattaacttagtgttaactttatctccacgagcaatgaattcaacttagttagaactccaagtttgtttttatctggaaccgtgactcttgaacagatgtaactatgcacagccacagcatcaggcatgaccgataagttatgacaatctgtgaactaaggaaatatgctactcatattgctttgaagttagactactatttttgcagctaatagttattacaaccagaaaactaaataatattttatacttctgcttctcacataacgagtcttgtaggtaaat

SEQ ID NO: 46069 - DNA, 710 bp, Manihot esculenta
  Intron number 2 from transcript cassava4.1_011498m (locus cassava4.1_011498m.g) derived from phytozome v7.0 (chr-ID scaffold09038; pos 37015 to 37724)
aggaggatcttttgaaaggtgttcctttatattttgatccttctattatcttattttctcctttttctacttgtaaaggatggaagaaaaattaccattaatttaagttgagtttatgatatcgcattcttcaactctagtgtcaatacagtcacattaatttggttggctggagttcttttgacgttaaattcttttacaatcacttttgttacaagttgataattgatactaacttgaatctttaactatgaatcggagaaaagggaggatatgtcagcgtgcccattgatgctcaaagatgacacatggttgttgattatctgacctgatagttgcatggcagctggataggatgatgtccctaaagtctatttgcccatcttgtgcaaaagtattatctaattcttcttgtgggctaaatcaaaccttttgttttgagctcttctaattcagaatttcttaaagttaattagaaaatgaataccaaaaaacaaagcagtgtggtgttggttggaattccacaatgaagtggaataagttagcatgtgttcagtttctgcattgaaatggataagctgttccacctatttttactgttagcccttctcatatgtatgattgttcagtgctcacccaccagagtagtaatgtttttttgggttttgtgtgcagaggttgagcagctcctagggctagaagaaagagca

SEQ ID NO: 46070 - DNA, 1007 bp, Manihot esculenta
  Intron number 2 from transcript cassava4.1_001180m (locus cassava4.1_001177m.g) derived from phytozome v7.0 (chr-ID scaffold03651; pos 499389 to 500395 reverse strand)
ctttatccagatcgacggttatctgttatcggctggtacgtttcataattcgtcgtaaaatttctccttcttggtactgttgcgtttttctttatgtgcattttttataatcaattttcctttgtttggttactggggaattgaagaaaagggtaatcatggttttgttctggtctggttgattattgtttgttttctgtggaaaattatagttgctggcttcatcataattgtactgagatttgcaatactgtaaaatggaaatgagaactgaaccagataattgttgctaattctagtgattgccggtttaaatttttagatctgtgacttcttaattttgattatgagtacttagcaaaaaatttaagtttatatttcgagaatgatcagaattatgtgattcaagatataaattcaggttaaattctcaagggaagatcagagattgaaattactactaattgtccgatgaagaaaattacactttttaggaatgaattaaatggctttattagttctctgaaatgttgaactaatgtcagccagcatgatgaaaatgcatagctcattcaccggttcttttcattttttccttttatttatatatttatttatttattttatttgggggggggggggatttcaggtttaatttcaactgctctctgtgttttcttctcttcttctgtcgccctaaggtttgtgactgatcttgcctggtcaatctgtcttttttcttgctgctgctctttctggttccatgctttcagaaattaagcatttatattggagcaaaagtattttattctacacgattacttctaatcttcctgattgttgcttagagttgacacacggtcaatcctcttgcacttctatgctgtgattatttattattattaatatgatttttgggaaatataaacctgtgaattgtatgaaagaagtgcagtcgtggaagagggactaagaattctcttgtattatccttcagcaggcaaaaa

SEQ ID NO: 46071 - DNA, 436 bp, Manihot esculenta
  Intron number 2 from transcript cassava4.1_001589m (locus cassava4.1_001589m.g) derived from phytozome v7.0 (chr-ID scaffold11179; pos 305401 to 305836 reverse strand)
gcttcaaggtatgaaacacatacttcgtgttgcaatgtttctggaaaattgagcaaagggaaaggcaaattgcaaacatttttatgcttaatctatgtattgggccatttaaacccgtcaattttcattttattgacattttaggtgaaaagtaccaagtagatttgtatttattcagtaaggtttcctattgtggattgaatagataggaagttattcttgttactcttccggttgggtttgatttagctgaggaggcttctttcttgctttgtatatcgactctattatgaagttaaattgctccatgctaaaatggatatatctttgaagggattcattcaattttccctttgtatttttaatgaactaataacacttctagagtagtttactttcagggattgtggtagctggagtagctggtgtcatccta

SEQ ID NO: 46072 - DNA, 578 bp, Manihot esculenta
  Intron number 1 from transcript cassava4.1_017848m (locus cassava4.1_017848m.g) derived from phytozome v7.0 (chr-ID scaffold03747; pos 68334 to 68911 reverse strand)
tcaagtaagttttggcatatcttgtgtatgcatctcattgcttggatatttgtttttcgagttgatgcaaatatgagtttcctttttcgctgaattgcatttgttctattaactattcaattggctgatccatttgatgataagggggagaagaacatatcatactgctgtatgttacaaaaagatgttaactcctatggaagttggtgctatacatagttcttattgtaaatgggcgattggcggtttgaggaccaaaacttctttttaggaagaataaaaacataattttagatgttgaaagaagcaattgggaaaagttattttgttattttaattttagtataactaaaatgtatcaaatttgtttttcaattattttttttttaattttctaattaatattttaaaaaagtgttttgtcaacaatacattgtctaagtacctggttgatgtgtttaggtccaatgaattaggatttctttttctgatttgttgcatggtattagcttcctttctcttcaacgttatatggaagacagatggtaactttcaacttattttaaaccatattagag

SEQ ID NO: 46073 - DNA, 902 bp, Manihot esculenta
  Intron number 2 from transcript cassava4.1_028011m (locus cassava4.1_028011m.g) derived from phytozome v7.0 (chr-ID scaffold07996; pos 218883 to 219784)
ataacgacgcttgtcaagactgtacgcttgttaaggtacatttaattttttttctttctttcttttgtttagcagatgaaagacgtgattattcaaggaattttttttatgggtttttattttttattaaaaaattatggggttaatgtatttgggtaaaggtgatggtggagattccatttatgtgattagggaactgaaggcatctgaatagtatctaataatatagaataattagatgaacattaagaattctggatagctatgttttaattagcattaacatctataatgaattccattacgaattctttatattttactggaaaaaccaagcaatcccacgttaggttactgatccaccgagtgaatggccactaaatggaaaggaaaatggaagatagcagaagaaaagtcttttattgtaaaaattaaactttctttttgcttttagcttctttatagagtagatcagagcagaagactcgattcccattccttatctacatgatccagttagtttcttccctagaaaaaaactaccatcttttctttttccctggcaccaaccgagatgacgtaatcagttgcatagaagcattgattacaagacttgaaagaccaacaacaccctctcaggcacttctcaattggattagaaaaaataacttagaactgatttaacttctcataaagtcaataaaaatgacgaccaaataaagaaaattttggcacccttactgaaagagaaagggtcacgtgttagaagagagtaaaaaacttttaattataagaatttccaagtagtaatatatatatatatatatatatatatatatatatatggaatactggggcttactggtttaattttgctatgcaggttgacagcgcgaacaagc

SEQ ID NO: 46074 - DNA, 251 bp, Manihot esculenta
  Intron number 1 from transcript cassava4.1_015527m (locus cassava4.1_015540m.g) derived from phytozome v7.0 (chr-ID scaffold03651; pos 321520 to 321770)
gcgaaaggacttggaaacggtagttcttttttgctttgttaattcaattagggaaattgctgggtttaacatttgattacttcattattctcttcattttctcttataccaaacagaaacattaatgtgttgtactcgtgaaacagtaatccgaaattagagtttttggttttatattctttatcttctatgtctgcagttcactaacactcaccaatggtatgcagagagtatccttgagcaactcaaac

SEQ ID NO: 46075 - DNA, 669 bp, Manihot esculenta
  Intron number 3 from transcript cassava4.1_015527m (locus cassava4.1_015540m.g) derived from phytozome v7.0 (chr-ID scaffold03651; pos 322106 to 322774)
gccggtgtctatttcgtgcactggtattatttggttgcttttttcgctgactgttttgcttctgatagcatcctgctagttgtattcctattatctgttgggatttgaatatttaaacaaagagattaagctatcgttttgtttatctgcaagaatgttgaactattggttggagttttggacttagtattatgggtaaattagcaaagaaactgaataatgaataaaatctattggggttctgactgcagtcaaacaaacacaagtgttaaaagtaggctaaacaatctatagatatgaatgcaagtttgagcttgcttttctctagatggagtactaccgcttaaacctatctcagcagttggaacagattgtccagttctaagtgtataatcgtgaaataatctataaatagcaggaatattttcaccaaaaaaaatatttatagcatatatctgataattagttagactttagaaaaattgtttgcccttaattatcattaccctcctaattatgtgcaactactacctccttgcaagctctatagttttatcttttgtttaaattctataaatagttttgcagaagtgttgctctttagttatgagtgtctcaacaatataataatgttgcctgtaattttatcaatgaaatcaggtcaaagga

SEQ ID NO: 46076 - DNA, 645 bp, Manihot esculenta
  Intron number 1 from transcript cassava4.1_008376m (locus cassava4.1_008376m.g) derived from phytozome v7.0 (chr-ID scaffold03219; pos 26186 to 26830)
agttgctgaaattatttttgaagaaaaatttggtaatttactctctctctctctccctgactttacccttgtttatagttgttggcttcctttctattggcactgtacttcaatgtttcttgagatatcatccatcgctaagaagcacaaagaaaaaaaaaaaattcaactatgtttctattcttagtttttttaactatggtgttgtgctaagtcgcatcaattgaaaaatccatgcttttataactaactctagggctgttaagatgttctcttttctgaggtgaaagcagttgggctacttcaactgaaattatgatttaaagtgacattttgtttcactaactagcccttctatgagactaatctagtgcttgttctttgcttcttcttcaacttgctttgagatctcgggaggaagggagtggaaatgaaaattttgagatttctggcgttttaaattgattctctcttttttcctttcttgcttcataggcattaagctgtgatagaactaaaactgtcatatgcttgtgtagcatcaattttgccattgttattcgagtgaaaggcataggcttttgttggatttagctgaaatttcactaccctttttgatatcttttgttctcctggtggaaaaag

SEQ ID NO: 46077 - DNA, 1004 bp, Manihot esculenta
  Intron number 1 from transcript cassava4.1_009418m (locus cassava4.1_009418m.g) derived from phytozome v7.0 (chr-ID scaffold06669; pos 266622 to 267625 reverse strand)
gtgactcctgtccctcctgaattgtccaaagaaaggtgctataacttttttttttttgtgagagggtaattactcagttctggactggtttttgccattagatgttggttttaggattttgctggttacgctttgagggttggaggcttaatttgatgttcagcatttagatttcgaactagggttccttatttttagttctattttttaaggtgtagttcgtcactttcccacttttggtgattgttgtctttggaactcataggaagcaatttacttgttttatgttgactatcatttaataaattttttaccatttataggtttgtcttcttgtaaaatttgtaccttcaactgtctaatctttattgttaatgctgatttttcaatgcttggagtttactgtaaaaaaagtaattaccaaatttcaagtttacaaagctgtttaaaaaaagttagcattttgtactggtttttttggtatccttttttttttaaaataaatttttgttatttgatataaattaaaaaaagaaaaaaacaaaagccatctgtcatatgaaaatacaagcttctatagttacgtagatgcattattttcttctagatagtattaaaagaaaaagaggaatggcctttgcctgtctttttgaggcaagcgcatgaatcagtcgtgaagagctctgttgatacactggtgtggctttcagattggaagctattattggcgttttagctttattctttactattcagtagcatttttttagtcattcggtagtttctatgtatttggtcgtgcgaaacctttttagtatctttagctgaagatcaataattgtgtctacatttccctttttttttgttcttattttggtttgtctattgaatcttttgcaaacgctgcatgacactacactttagggaggcaaatagagtgatggtgttgctgttatatttctcatgcagtgctccggttggggccaaaagaagaggtggcccag

SEQ ID NO: 46078 - DNA, 485 bp, Manihot esculenta
  Intron number 1 from transcript cassava4.1_015122m (locus cassava4.1_015122m.g) derived from phytozome v7.0 (chr-ID scaffold08500; pos 180108 to 180592 reverse strand)
ctgcaacaaatttggtcccaggattaaagagacaggtaatttgctgtatattgctctggaaaagttaacttttttgatgtatgactgacattcctctctatcttgtttgcatttacttgggctgattcctaagaagctagagatacttccctgtttagtgaaatcttgctttataagattcatgagtgtgtttattattatttgcagtattcttgagtttcatatgagcatataataccaacttcttttacgaggctacacttctctagtgtatcctatgcaaaagcatgtggatttagtagacttgagccgcacattctttagtttacatgctcaactgacttaacatgtctccctcacgacaaaacatgttttggccagtgattggcatctatttcccttgacggtgaagtccatattagctgaatcttctcatcctgtcaatattttgcagggtcagcagattcattctgagttcaaccaga

SEQ ID NO: 46079 - DNA, 1009 bp, Manihot esculenta
  Intron number 1 from transcript cassava4.1_011622m (locus cassava4.1_011622m.g) derived from phytozome v7.0 (chr-ID scaffold04269; pos 61681 to 62689 reverse strand)
ctgcagggttctatcaagagaaactgcagagcgaggtaaaatctcattttgtgctcatttttgcttctgcttatgattatgccatcatggaaatccaacaagagatgatctaaatgatgtaccatttcaacttgcaatttctaagaagaaaaaataactgaagaataaaatagtttagaagagggtaaaacttttttgccgtgagtgttgaatgcctttgattttagtatgtgaatatgaaattgagagggaatttgaattacacattcctcaaaccaaggtcgaggtgcctactgttttgcttgttatcttcatggtcatcctaaattcacttaattagagagaaattgattttagtatcagtgaacttgatcatgaacatcttgttaccctcttaccaaaattctatcaagtagtttcaccttcttaagatcaactctaatcgctgatggataaaatcataatgctgattctgttggaatttctacctttataaaaatactgtcaaggtaatagaattgtgctggtgccaactgccatgcataatctcatatgtcctgtgcttagtgctagatggagcttgtactgactctgcataatcaagcaacatgaagttcagatggtataatggaagaattaggttgcactgctcattgcagaactttgatcctattttacactgcttaagtgattccttaaaatgtggaaaaatgcagcacacagtgtcctatttcaattttttttttttgttataaaggtggataaatttgttgaaatgtaatcctattgctgcatgcctgtatcaaattgcctcctattaaatctcctttgagcttcttggagctatatattctgaaaagattttgtaccttgtgaggaatcattctttatcattgcatatctgtttttcttcgttttatggagtctttgattttaggttatgctggtgtttatttaaaattttctatatgcagggttttgaggttgtgctaccagatagagcaactat

SEQ ID NO: 46080 - DNA, 644 bp, Manihot esculenta
  Intron number 1 from transcript cassava4.1_010506m (locus cassava4.1_010506m.g) derived from phytozome v7.0 (chr-ID scaffold03079; pos 34416 to 35059)
caatcctatatgtaagctcacacctttctctctccccctctctatctatctcttcgtttctctctctaccctttagatggttctcttctcttctctctttggctcaatcatcgacctatcccacatttaaggcctttcaattttgcacttttaactccttgtttgattttctcattcgggtaagttttacttttttgagtcttttttttttctttcctctcatgggtagatatttttattcggaaccaaaaaggaaagtggaaaaacatctgattcctaaagtgggtattctttaatttgtttcattttgtttttttgatacaatatcttcgtgggtttactctattttggctgattttatcttcttttgttctgatcttgtaatatagaatgctatttatgattttatataccctctctctggaatttgattctggatttggtaatcggtacatcacctattagcattttgatatgttgttttaaattgtttgatcttgcattgcaattctaattgatgccaaggatgtttgatttagtttaattacgtgcttaatgggtggaaattagagttttaattgcattcaattttcgattctgagtctctttcaaggttgtgataatattgatgtcaaatgtgcagg

SEQ ID NO: 46081 - DNA, 652 bp, Manihot esculenta
  Intron number 1 from transcript cassava4.1_013289m (locus cassava4.1_013289m.g) derived from phytozome v7.0 (chr-ID scaffold12091; pos 134643 to 135294 reverse strand)
ctcttgtctcctctgttgctctggtctttttcactctctaattaatatttttgtaatttttttattcttttggcggttttattggatcatgaaattttgaggcttcgtagtattggcgttgtgacgaagcaaaatattatattttaccttcaaattcctcgaattcatcatcttttttaagttggtattgattggcctggaactgaacaatgtgatcaagccttttcttttccttagaaaggaaaatatttaaactatcatgtcggaagttcccacagcttcaattatcagctaacctgttagttactaattaattagttttatttattctcttgatctgtataatattattagtatttttaaaaaaagaaattattttggctactgcctgaatattttatgtttcaatggtaaataattgagagtttcaggggtttgagttccttgggtacaggtctagcaagctaaactgtttgacagtcttgttattacctactttagccgctaatatatgctattttgtggaactttctgtctgtatggttttggtttgtatctaaacacgaacaggttaactgagtttagagggttttgatagttttctatttgattttcagattcaattgataaggatagaattgagagtgcccga

SEQ ID NO: 46082 - DNA, 828 bp, Manihot esculenta
  Intron number 1 from transcript cassava4.1_007618m (locus cassava4.1_007618m.g) derived from phytozome v7.0 (chr-ID scaffold12831; pos 51122 to 51949 reverse strand)
gccattgctcgcatctcttccttgcaatcgtggtaaattataattatggtgtagtttaaacttaattttctttatattttcgaaactatctaatactagttttgggtttctttgccaaatttagcttgtaagtttcatgaactgccctgatttactatggctgatcatttcagcgtatatatttctgttgagagtttttagtcggagaattaaattgcaattcttagctaagcattttgggaattacaaaataaaattctgttgagagttgtttgaattattttatattttaactaaaattctgttgagagttgtttgaattattttataatttaactattatatttgattaagtatattaggttagaatttgttgattaatttggattttactattaattgattggattttatgattaattaaatataataggttcaaatcaattcttattagacccaaattataacataattcaatgaaattagagaaaagctcaaaaatccatttcaaaccaaaccgaactgaactgaaaaataaataaaattataattttttaaaaaatatttaaattgaaaaataattgaattataattttttagaaaatatttaaattgaaaaataattgaattataattttttaaaaaatattatttagtttttatattgaaagacagaaactatagagtaacaattctattaattatgaatagagttttttttttctcaattgtttaaaatctttatttcctttttttttcctgtctgcattgaataaattcggattttgaataggtaatcgggtacggatagataagtccgtgtaatag

SEQ ID NO: 46083 - DNA, 248 bp, Manihot esculenta
  Intron number 1 from transcript cassava4.1_009897m (locus cassava4.1_009897m.g) derived from phytozome v7.0 (chr-ID scaffold07478; pos 899947 to 900194)
gaagagcgccaaatctgcccctcccaggtacctattttttccttaatttcattttgtttggtgattattttgttgatcaaacgcttttagagctccttaagttgtaggtatacgattcaattggttgaatttgtaaacttctatttacgggctcgattgaattttgtttttatgcttgttcttcgaaattaatgcatggtttatttattgatttgtgatgatcttgaaatgcagatactgatttgttt

SEQ ID NO: 46084 - DNA, 670 bp, Manihot esculenta
  Intron number 2 from transcript cassava4.1_022174m (locus cassava4.1_022174m.g) derived from phytozome v7.0 (chr-ID scaffold09401; pos 17476 to 18145)
gagctttcagtcagttaactcgccctgtatgttcctctctcacttcctctagcatctaagcagtggactcagaaactctccctccctccctctctctctctctctctctctctctcttcttctttctttctttctttttttcttcttgtttttaacatgattttctcagtagaagaagggttaatagtttactcatagaattgcataagaaaaaagaaaattgtaaaattttttaaatttacacatctactgtacactaagcattaattttttttttgaattttttgtaatttaataataatatttaaaactttttatcatattttatctttgttattgaggatatattttttattcattttgaaatttattttaaaaaatagttaatagttattgaagaaatgaaagttttaatttaattttgatagacgatagttttaatgtaatcttaaattgtatataactaattaaaaattcttttttatttaaaatttataatacaactttaaaaatatttaaaattttatataatttatttatatatgaatctatacaaattcgatttagataaaataataataaattggcgttgtttaaaaggatgtgttgatttaactttgatgcattaattgcagggaaagtttccttctctactattccctattgagtt

SEQ ID NO: 46085 - DNA, 877 bp, Manihot esculenta
  Intron number 2 from transcript cassava4.1_028982m (locus cassava4.1_028982m.g) derived from phytozome v7.0 (chr-ID scaffold06035; pos 275711 to 276587 reverse strand)
atcttttgcaatactttcgacatctggaacaagaggtatataactgaattaattttaaatatttaaactcggtatatttcataagaaatattttttaaaaataattttcatattttacagtgtgtagaacttaagaaaatttatgaaaagaaaatacttttttaacaaaaaaattaagtcgagtttaataagaaagatatttaataagaaaaatatcttcatctttttttaaaaatgaaattgttttcatgattttgagaatggtattgatagtattgaactttctataaattaattatgttaacaatttttgttttctaatatcacaattaaacaataaaaaacttacttttaaaaaacaatttttttttcaaaaaaatatttttaaatataaattatttttacaaaacaaatagagttttaatatgttgaaaaacaaaaattaacggaaaatatgcatgtttaagagaattaactttgaatattattcattaagaatttgttacgtatatatttgccactaaaaataaatcacaattattgataagtttttgttgcttgaaaattaaattaattacgtctttgtccaattttgattagtgggactaatcgaattttaactcttattttaattccatttcaaaaaaaaaaaaaactcttattttaattattattaatagaaaaattgaaactacatacactttatttaatttcttaacgtgtaaataagaatgcaactaaatatgatcgaaaagaaaggctagattcactcactattcaaatgatttttttatataatttattattaaataataatatttcctttttcctctaaatttgagcaaaacatttttttggcttaatattgtgtgcaggc

SEQ ID NO: 46086 - DNA, 584 bp, Manihot esculenta
  Intron number 2 from transcript cassava4.1_006216m (locus cassava4.1_006216m.g) derived from phytozome v7.0 (chr-ID scaffold07520; pos 434230 to 434813)
gctgttcaggtagacattcactattttgtctaatttaattgttttttttttaattagtcctccggttgttttgaaagcaattaatcaactaatttgactggagataaagaagaatagatcaaaacctgatgatacaattcaaaggtattataagaaattgataatactgttgggaacagcttttatgacctgctgagacgtatccctttttaaggcagaaccacagatcatgcttttttcttgagatttagtcgtctttctctatctatgtagcttgcaataaagttcctttagcttcgttggaaatgtaaaattgagatggcaggtgggttttgcttttgttgaccacttgctttttctatttttgaacattgcagttattacctggtcttgacttttgaacaatttaaatattcatatgatataattgagtcttgatcttttccatcagttatttgcactagtaggtggtgtatttatcatactgctaaatttgtttgattagcaaatagggtaatttagcgactgttgttggtaagcattttccagtgacttggttgtccctttctgacaataggatcagt

SEQ ID NO: 46087 - DNA, 364 bp, Manihot esculenta
  Intron number 1 from transcript cassava4.1_010021m (locus cassava4.1_010021m.g) derived from phytozome v7.0 (chr-ID scaffold02658; pos 849259 to 849622 reverse strand)
gtcctcaagctaaaatcaagcctgaagtttctcaggtaaccctctctctgtttttccttcctcattgctcttcaattctcttctttattcttcatctttctggtagtccttttttgggttttcttctgttttcatttttctggggggttatcattgaaattttttctggtgactctgtaatttgtataatgttcctttgagtattgtatcaattgtgaatggtgtttatctttcaattgtgctcatattggtgatctgtttaatgttctgattttcctgaatcttaaattcttctgttctctcactttttttttctttaaatattccagcttattgggaaaactcctcttgtttaccttaacaa

SEQ ID NO: 46088 - DNA, 770 bp, Manihot esculenta
  Intron number 1 from transcript cassava4.1_011380m (locus cassava4.1_011380m.g) derived from phytozome v7.0 (chr-ID scaffold07885; pos 4638 to 5407)
gcggaggtaccttcttttcgcttctgtccatttttcttcgcttatatattcgtgggtatcccttagttttcactctgataaatcgagtttgtcctctatattgtgcttttgagttttctttagagctggaatttgatgcaaatttgtggagcagaagattgataaagaattaacgtggatgagaatttatcgaaataggccaattggttatattagcaagaaactaacttttttccaagtattttaatggggaattttttctagaagataactaattatcagtcattatgtgaaaagaattagtagttagtaaaatcttttttataattacagttttgagtgaaactaatcatgacctgtgtatgatgccatgtgacagtgttagctatgagcctgtaactgtatactgttcgataatatgttcttggtttaaatttgattcttcaaggatagattatgctcatatgttcatgtggaagtgttattagcaggagtagagatcttattgctgatattctaaagtttgatcattcaattggagttgttaatgagctcaagattgagttaaatacacaaacttgttaaggttaccctacaaaatttcagtactctaattgattgctgggctaagaatctctctctcatgcacatgcacttatgctgttgtcgcagtgattctacttttattctttgactaatattgatgtgctgggtaaaatttaattttgtatgcagttgaagctctaaaagttaggataaagactaatcct

SEQ ID NO: 46089 - DNA, 998 bp, Manihot esculenta
  Intron number 1 from transcript cassava4.1_031041m (locus cassava4.1_031041m.g) derived from phytozome v7.0 (chr-ID scaffold12202; pos 54808 to 55805)
gcagtctgggaccccgaaagatcgcaaatacgcaggtactcttgtattgttaccttttatctctcgtctatgttctgtttggattcttagaaagtgcgacggaaaaaaaaaagtggagatttggaaatttagctttcgataccggggttatattcgtgtgggaccggctaaagcgaaaatgtggtttaaagtgtttacttattgtttttgagggcctctcatggcattgtcatgaatattaaatcaacatcttcactcgttcatatattatatgtacaaaagagagggagagaagagataaatgaacagaaaatcaaacactggaggaagaattttgtactcttaaggaaatgaaattgattgacccgaaaatgaagggtatgaataaaaaaaaagatatttagaaggttgatctatgtgtttgatactatttgaggtgataattttccattcttggatttgatcgttgatgttgcttcaaatgcttgtcaaaataactggagctgattagcagcaacaaaatgctgaaactttcaataaaaagctaatttttggtgttttcctgttcctgcttccttcggagctcattgataatcttacttgtcctcgcttggaatcttgtgctatttttgaaatttgttaaggacttaaaagggaattaaagagttttcacacaaataatattaaagtctctccatttctctccatttcccaccaaattaaaagagagtgttttaggtttattttaagataaaaagaaaaatacaatttctcttcttttctctcttttaatgattgtccaaacaagagaattttaaaaaattaaatttattttctttccttttctcctcaattccttcaaaacaaacaacgcattagcaatggaaattaactagcatgtttatttgacatgtcaagagttcggtcactcagaataacattactcgtctcttgtgataacagcaaagatattgccgattgtcaaaaatcagcatttg

SEQ ID NO: 46090 - DNA, 713 bp, Manihot esculenta
  Intron number 1 from transcript cassava4.1_026831m (locus cassava4.1_026831m.g) derived from phytozome v7.0 (chr-ID scaffold10895; pos 1129 to 1841 reverse strand)
tcccaactgcaggaaacatcagaaaattacaataggtaaagcttttataatctaaggagtgatgatggtaagcatctataggtaaagaaaattacaatatgcactccattgcgttattttatggagaaaaggaacagtgatcggtaaggtagtgatcttaatgtagtctaaataaaatagagaacagtgcgactcttatatagtaggtaataatcattgccttttgttctgtctggtttaagaggtttagtacattgaagtaagcatgtcaatattggcttcatgtcttccttgtcaagaatgtgcatccaaaaagtggttttgaagaaaatttatttatctttttatcaagttgaaattcatgcctttgcctttgggtaaggcgggagtgctgcaaaatgaagcaagtttgcttctgaataggctcagcaggcgctcgtttacggtcttctgattaatctttttgatattaaaacataaaagtaaaattttttcaacatctttatatctttgtgattgagattgggtaaaacacagtaggcaggctcatactatatcatgtggtagtataatgcatttcttgttttgttttgcttttgttttttcttacctcaggctccctaggcggtggatattgctattagttttcaaaaaattattgttttgtatgtggtgcaggaaagttgagacctttgagagggaaatagcagtta

SEQ ID NO: 46091 - DNA, 440 bp, Manihot esculenta
  Intron number 1 from transcript cassava4.1_016141m (locus cassava4.1_016141m.g) derived from phytozome v7.0 (chr-ID scaffold09427; pos 40545 to 40984 reverse strand)
caccactccggagaatttctcttttatctgtcgctgtaattatccgcgtctatcgtttccttttttttttttatcaatattttgtctctgtttgtcctttttgttatttgcatttgtctcgatttcacaatctgtccctcgagatttgtcttctggctacattgatctgaaattctttgttttgatttatattgagatgtatttttttcttttttgctccgatcaatttgtgatggattagcttagctaatttcagatgctgaaatttaattgtaacttttttcttgtccttttttttttttgctatatgttacttctgttaagatcttattgactttatcgttgaattatggccttttctttcgttatttggctttcattcaagctaaaatgtggaatctctctgtttgttttctgatgttagtttgtctcagggttat

SEQ ID NO: 46092 - DNA, 480 bp, Manihot esculenta
  Intron number 4 from transcript cassava4.1_011345m (locus cassava4.1_011345m.g) derived from phytozome v7.0 (chr-ID scaffold03245; pos 123718 to 124197 reverse strand)
tcactgaccaggacaaagccgctgcccacttgaaggtgtgtgtgattgattctgtatatgtatgggtttctatgatatgattgaatgcatatttaattgttattcattttcgtggtctcagtttgattcattaatggccttgtgccttctaaatcaaaataagataatggaacaaaagtagttgtacatgatgttaggggtaggaaaacaacatctttttgccaagaattttgcagaacatttttcttattgatagaatcaatcctttttgtttgtgatttttaagttttttaacgttttcaaatttcctctgcttttcaattatttgctacaaccaaccatctttaaagacttttgaatacttcctcattattctgagagcttaattaaatatttcttcttgtaatgtatttgaaaaataattgtttttattatatggtcttagggtggtgcaaagaaggtaattatttctgcccccag

SEQ ID NO: 46093 - DNA, 1019 bp, Manihot esculenta
  Intron number 1 from transcript cassava4.1_033304m (locus cassava4.1_033304m.g) derived from phytozome v7.0 (chr-ID scaffold10797; pos 162305 to 163323 reverse strand)
actctcaagcagatattgctattctactcaggaaggtattatatcaagcattatgatccactgctttatgcaagtgattcatattcttagtgcttgttagtgctataaatctgtgaaacattcctattgaagcttcattcatcatttttattagttgttttaacttttgaaaaataaaccagcatgtggtgtgagaacttatgagtggcttgcattcaagcgacatacaagaagtttgaggtattaaataattgcttattcctattctggcgcaatcattttttactcttgtgatcaatcctaaccgttcatcattttaaattgtcctgggaacccttgccatttatcctccttttgctatcaagttcagttcagctctcaaatccacttgatgcttgatcactggaatcctccttttccccaaaacttgatggataattccttttcccttcaatggagcttttgagctcatatcagttcaaaatcctgctgcctgtaagagcttactttaaaaagcttcttgtttattagaagatgttgatggtagcttctagtcaaggttatagtcttcaaacaatttctttatgttatagtaatgctatttgaaattacaaaccttccatgatggtttcaaatggttcacacctgggctggagagaagcattactggtcatgaggaatttaaaatgttttaagctaaggttcacatgctgttttatctgcatggtactgatacctcatgcaacataggtgtgttgacactaaagttcttaaggaaaaccagatgagattgcttttttttttcctcccctggaaaccctgatctgggcttgaacttgtttatttttatttaccattttagtagttttctaatttttggaaatgttattaacaaaattatatgatacttgggatatgttgcaagttgaaatctgcttttctaatcttctctgttctcttcatgtttatattcctaaatgtgttcattttgatcattcttgtgatgtagctgattcgcg

SEQ ID NO: 46094 - DNA, 816 bp, Manihot esculenta
  Intron number 1 from transcript cassava4.1_012204m (locus cassava4.1_009949m.g) derived from phytozome v7.0 (chr-ID scaffold11425; pos 443725 to 444540 reverse strand)
gtggttcactgtcttcaaatcggtgcttccaagaggtaaatagacgtaagaatatgcaagtcgtgttctaattcgttgtttttaatccccttgcttctaattgtttccagagaaaacaagggaaaatctattcctacggttttatcgataactaggacgaatttttttatcagatctgtgctttgtttcaatcgcatgtggtagatctggttgttatattcctagatctgtttttatggttaccttctgttctgttctgttctaattttgataattttcatagggttttaaggtcaaattattttttgcttcttaaggataggatgaaaaatatccagtatctcatcgtttgtaacgatttgcaaaaaacgattcattttgaaaaaaaaaaatgaaataaatttttataaaatcatataggttttcaagtctttttaaaatgagattttttttttgtaaataaattgaattgaattcttgcgaaattgagagaatatttatcattatgctgcttcaatagcataaaattttgagaattttttttttctaaatttgcttagctgaaatggtttatgtgtgaaatactaacactgaaattgggtgaggaaattaatgaaaaattgaagaatatgttggataattagctgattcttaattgtaagtttgtcttgcgtgttaactgtgatttcttttttccaattatgttgcatgtagttgtgtcgaactctctgactttggagaattttctttgatgtttaaccgtctgtattttctttttgtaattcactttctccgcttaaaatgttctcaggcaat

SEQ ID NO: 46095 - DNA, 526 bp, Manihot esculenta
  Intron number 1 from transcript cassava4.1_003607m (locus cassava4.1_003607m.g) derived from phytozome v7.0 (chr-ID scaffold10689; pos 751685 to 752210 reverse strand)
ctgtagatccgttggtcgcaccagtatctctcgttcgagttttattttgtttgttttccgtccgtttgaatgaaaaatgttgaaactgctctctttttttatttttcatggttttggttggtttagattgttgcatacgttgattgacatgatgtcagtttggggatttcttttaggcataattaattgaagattaaagcacggattagtgtaactctccttgtttccattcttttgctgtatccaagtgctatgtgtttgattcacagccaaggagtccataattataatttgaatgtgggtaaggatgatatgccttgcagctctaacgcaaatttatgccaagtggatgccatgatgcacttattggaaaatattttctgaatatatgaattagaatagtatattcatctaagttttccatcttcaatcacatgatttttgttaactagacatcaacctgatggtttttgttttcttgttattttcacttttttaggtttgttggctcacagcattacggttg

SEQ ID NO: 46096 - DNA, 847 bp, Manihot esculenta
  Intron number 2 from transcript cassava4.1_006046m (locus cassava4.1_006046m.g) derived from phytozome v7.0 (chr-ID scaffold07750; pos 181240 to 182086 reverse strand)
gggctgcttccagctatttttgcttcaaggtcaatcatttttccccttggtttgggtgcttctctactttgcacttctattggttcatgaatggaaattaatgaattatgcagcaattagctctccataattagtggtgttaagatcctgcagataattactttttcaatatttgaattgcatttaaaaaaaatttttttgtttgccatttcaagcacactattaatgttcttagggatgatttagtcatcaaattgactgaaattgctctgctttttcccctttttctgaaaatggaaattgtctgaattgtttattacctgaaattgagaatgttttaatttagaaaatagaaaatcaaacttatactgctgaagtctaactgttgagttaaatttgttgagaaaagaaaaacaattacattctgtgtctttttttttttgtttttcagttttgagagaattattattaggtgcctggatttttaagaaattcattagtttatagcatatttcaaaaccactcaattaaaatgtccttgaattacatcaaattttttagtcatagaaatggttagttaacttgttttaatcttattagagggactaaagcgtatgaatattaaaaattatagggactaaataatacatataattaaaattattgatactaaataatataaatattcaaaacgattttaacataaccactaaaagatttgactttataaaatataaggatattttaattgagtgaatttgagataagaacgaactactgaatttcttaaaaattgagagactttaactgtaattcacccttttgtttttaatttgcaggtcaaaat

SEQ ID NO: 46097 - DNA, 816 bp, Manihot esculenta
  Intron number 1 from transcript cassava4.1_015385m (locus cassava4.1_015385m.g) derived from phytozome v7.0 (chr-ID scaffold02421; pos 891837 to 892652)
agagatcttgcctctcatacgaacctaaagcctaggtgggttctcaatctcctgaaactcaacgtcgacaatctttgtcaaattgcttatgcgtgcttgcatttggggtgtcgtatcatatatcttctctttttgtgccttccttttatacactgaaaatgtgaacgaacgtcaataattgcaatatcaaagtttatttggtgtttcaagttattgtgaatagtaaggctttgtttggaacaattcattttgcaagaaagaattcaaatgaattcctatataatcattagatctttgaagtgatttttaaaaaaagttaaaaaagaatagaaataatcaaatgaatcaagttcttgatttcaaacaagggtaaatgatatttgaagatcgatatactaatcttcttgttatggaatacaattagtgggctgtgaagttaagaagagaagtagaggtagggagaagtcaatttgcctgtgtatttgtctgtgcgagagaggggttttatgatgttacttatattgttgggggattgatctgtgttggtgggttggctttgggtttgattattgattttgtttctggacataaaaattttgtgtaatatgtgttatgattgaattgaaccaacggtcgcctatgcatccaattggtaaatatcacctaaggaatttgtgtcttatttgtattttttcaaattttctaatgcatttcgacatccttgttttgcacatttgtgcttctgtttataatatcaagtgtgaatttatttgcttgcacctgtgaatgatagaaaggaggggcaagacacccagg

SEQ ID NO: 46098 - DNA, 742 bp, Manihot esculenta
  Intron number 2 from transcript cassava4.1_003819m (locus cassava4.1_003819m.g) derived from phytozome v7.0 (chr-ID scaffold11661; pos 6532 to 7273)
gaggaaaactgtacccctcaggaaatttgtgacaagtaagtttactgatagtacctggacttttgtactgaaaaaatgaagaaaaaactggaaattattcagctgtgacttgtgatcacttggtatgtaggggatgattattactagttctgatgattatagttatatcacaaaaggcctttgatggaagaaactaggcttcagttgtatgtagatgagaccttaaattcatataagttggtcttgaaggaattatcttgctgaaaattctttaaaaggctttagtattgttaaatttgcttggcatgatcccatgctaaatttgaagggaattttttatgtaaaaaagtgatgctatatgtgcattttttatgagtttaatatgcataggtagacttaagcaagagctacagtagttgaggaaaatgttgcacatggatttggaaaatgtacatcttaagctgacttggggaacaacaggatgtaaagtaggagatagtgctacatctgtaacttgaaacaactttgatagtaaaattggactcactgaagtatcatattctattctatactttaaattctgaaggattatgccaatatctgctggtctcaccaaggatcttttgacaatctttgttattaccacgttttgatttgtcattgtaatacatgcttttttctgcataatgacaattagctgcttaacttccttgtttcttgcatttcttgctttgtagatatc

SEQ ID NO: 46099 - DNA, 943 bp, Manihot esculenta
  Intron number 1 from transcript cassava4.1_029749m (locus cassava4.1_029749m.g) derived from phytozome v7.0 (chr-ID scaffold04450; pos 29505 to 30447 reverse strand)
atttctcttcaggtttgttcatagttcttagttactaaccacttcatgcctgttaattaataccagaggaaacaaaaaattaataataagtgcatgcttataagttatatttatcagaaagttctgtttctgttttccaattatcagtaaatttcataatgtgggtattcgttccgagctaagcttatgccattttgtagatgaactaaaataacataccaaacgaacgactttagtgcttctgtagatagacggaaggctgtttgaaattttcttttcgaggagtcaacaagtgtctccttttataaagtaaagtattaaggggcatcagcactttggtttgctttcttttaggcactcccattccttaatgtcattcctgtactgtatcctgctttttttcgccccgttttatcattttctatcagcattactcaacttttgtttttctgtaataaccatagttaattaaaatatctggtggatgaaattcaattccattaattaatttttttgattaggtcaatcccaaatttcaaatggaaaaacacgatgtgccttaaaagtaccatattaatggctgataaggtgtccaaaaagaagagaaagctggaatcttttggataatcattcaaagcacgaatagtttaaggaattcaactttccctttgtcttattaccattcaattaactagaaagaactaaagtatctatcagaaccactcaaaatggaaattttattccttcacttaactatttgctgcttcttatttttatttttaacaagcattaacataaaaaaattaaaagcatgacagagatgaagctttaagaaacaagtctacatggtagtggcagctttgtttagtctcttatcaagccatttgagtaggagtaattccacttttgcttttgatggttgcattagattcctccaaccagg

SEQ ID NO: 46100 - DNA, 358 bp, Manihot esculenta
  Intron number 1 from transcript cassava4.1_029255m (locus cassava4.1_029255m.g) derived from phytozome v7.0 (chr-ID scaffold12711; pos 381310 to 381667)
gtgcagaagtatttggacgtaagcatttttgtgctttaatttttatgtttttggtatattttctaggaaaacgtgggaaaagtagacgacttctggaatttgatagttggaagttttgctattgtgaactgattaatccaattcagttttcctggctgagaggaagaattaaacggcggaagtattcaaaattttctttgctttttcttgttctcttagcaacttaaaggaaatttgtagtctccattcgtatttcaattttgttttcctcttcctagcttttgatttatatatgtttatatttgttttttgtttatttgcagtcaatttttccaggattgtggctagcagaagttac

SEQ ID NO: 46101 - DNA, 451 bp, Manihot esculenta
  Intron number 1 from transcript cassava4.1_015748m (locus cassava4.1_014530m.g) derived from phytozome v7.0 (chr-ID scaffold01624; pos 216960 to 217410)
ttagcttataaggccgctcaggtacttcgtcgtttttatcctttcatttctctctcggtttttctttttgttatcgtggatttgtttagattgatggaataaaggtctggtatctagggttttgaattgagctttccattggattaccggttttaatagttactcaaataacgattagttttaaaccatgattaatctagttaattacgtttgttatttatcattctggtttgtctttataatgagtgaggcattttttattttggaaaaattaagattttgattcagctccaagtgttgaaatttggacttgatcaaagaaatgaagcagagaaagagttgaatgctggaagattctttgggagtttgaaaagcgtttgattccttattctgacgtcgtgcaatttattttgaaggatatagcgctctcggatcttgcaccaacacatcc

SEQ ID NO: 46102 - DNA, 725 bp, Manihot esculenta
  Intron number 1 from transcript cassava4.1_008332m (locus cassava4.1_008332m.g) derived from phytozome v7.0 (chr-ID scaffold02196; pos 131782 to 132506)
cgtaatcccgtgcgtcagcccattttataaatctggtacacaatatctcaaattttgttctgtcacatctgcgccaatatacaagttgtagattatgaattaatagtttgattttgcgaactgattcgtgggtctatatttttttgttaggggtgatgccttgagattaattttctaggtccatttaattcaatgtcttgcagagtttcaatctgttgtgaggatattgtccataataatgtttcgacttgtgggtttcgttttgtatgttttatttatgcatctggtatcgtgagttgcttatacatgtggtgagtgttggagagttagtgcacttgtgtgttgttcagattctacttgattaacaaaaccaacacttattttaaaaaaatggtgtgaattggccaatttgcagtattccagatcaaattttgcatttttattgcattccatgtatgagacgatttgtttttaattcaattttatgtgaatttgttggaggctttaggttttctacacaaaatatgttaatatgctttatctgagtatcttttatataaagggaagacaatcggagatgtcatgaagtagcttagttgtttgttggagataaaagagttttatgtatatggtgcaacttctgctagcctgattaatatcttttccttgtgtgtctttggggagccaagccagctcatattttcgcttttctctcttgcagaatc

SEQ ID NO: 46103 - DNA, 900 bp, Manihot esculenta
  Intron number 2 from transcript cassava4.1_008332m (locus cassava4.1_008332m.g) derived from phytozome v7.0 (chr-ID scaffold02196; pos 133417 to 134316)
gtcaagctctgagaccagtaggtgcacggtaatgtcttattcgttataacttttggggactttttcttttttaatgataattgttttattcccatttcatattcctaattactgttatgtggtatcacttgtgaaattgattgagggagtcgagcaacaagaagggaaagtacttggtttaagttaatttcagatttcctctcattctgtttttttggaagccagttctctttatttgtttgccaagatattatgtctcgcagttttaatttagatttgagtttaaaatactacaatagtagctgtgatatttattttacagtagtatgaatctgtctcccaaactatctcttctggtgtggccgtgtggagttttcaatctgtctcttgtttatcctctttgtatccatttcttgcaagcacagctaacagacttcacagcggcaatttaagtttgaccagcactgttcagactttgttatgaaaattttaaggatgtttggaagggtcatctaagcaggtcttatttgatttgcaatcaaaatgagactcctaattcctaaagcagcagagattagattcttgttttattgtttgcaacctgaattcttgctaatttggtagagaactaaattgctaccattatatgtttctgctaatagtttttggttctcaaaattgaatactgaaggatttgtactttagctgtggcattaatatgccctaactttatctgtggcatggatagacactaagtaagaatcagaaaattttgtcaaatgtcctatcatgcagtgaaagttaaggactgcaagcatttcctattatttgtcatagaacttgaatgatcccatttgtgttttgtaatgagtgaaatttggtttatgattagcaggctca

SEQ ID NO: 46104 - DNA, 710 bp, Manihot esculenta
  Intron number 1 from transcript cassava4.1_005477m (locus cassava4.1_005477m.g) derived from phytozome v7.0 (chr-ID scaffold02658; pos 895766 to 896475 reverse strand)
ccaaaaggcctggttgcgataataacttcgttctggtgcttcttgttaacttcaccttctctgtgtgatcttattttgagtgggtgttgaaaacattattttttccttaaattttatagtggccactgttgatttctgtttgtctcccgggaaatttcaaagggaaatgaagagaaatgggtgttattttacttttgtatttgaatgttgggttttgtgatgaataaactcattgggttaaatggactggatgctgaatcgcttaatagattcacttgagtgaagagctgtctcttctttttttttttttttgatatattttattttcgtgctccttggttttctgtttgcttgcttataaaatggggaaaattggaaaagcaagggagagatgaggagattttttcttgttgctttgggttggtaaatgaagggatcagttgaatttcaatccaagattttgtcttaggttgggttggaaataattgtaatgatagaaaaagaagaatcgggaaattttaaaaaactttcaactctaatttcacttgtatgctgacaaattagaagttagtaactctgatattaattcaagctatcttgctcagtccctctccaggcctaagcttgcttgatgctttttcatgtccattggccgttgtatattatgatttatagttttatttgacaggtgaaagtccctgcttgggttg

SEQ ID NO: 46105 - DNA, 701 bp, Manihot esculenta
  Intron number 1 from transcript cassava4.1_004277m (locus cassava4.1_004277m.g) derived from phytozome v7.0 (chr-ID scaffold03741; pos 517033 to 517733 reverse strand)
cttattcttggtaatgtggttactgtatagagattcgatttcatccgatccgattctatttatattctattctatttgtttttatgtgaatttagttttgttttcctattttccttttgtttggcttcctggaaagtgtgggagaaataaacggagaagaaggccatcccctttctcccaattttgttttaaaaattatttaatatttattcaattctggcatatcttattttttttcttgcttgtgatctttttattgtcctctttcttttccatctttaggatttactgcctattattatgaaaattcaactcaattaagccgtagtcataaactatactacttttatactgagatcgaatattaatcgatactaggtgggccttgacctgtacccgtctcgttgaactgttttctagacccaattttctatatgacaaacagtaacaattgtctatacaacttcctccgggcaattgatttgaccaatttgttgacttttttagttgagttttttattaatctttttgttttacctgtatttcttgcttaatttcaactactgtacgttgctagattttccttcagaacttttgggttctgacttttgatatgcacttgacattctgttctgctatttattaacccttcttttatttctacagtgtctggactttctgggagtacagcaacagctcaa

SEQ ID NO: 46106 - DNA, 948 bp, Manihot esculenta
  Intron number 1 from transcript cassava4.1_033099m (locus cassava4.1_033099m.g) derived from phytozome v7.0 (chr-ID scaffold07520; pos 1630423 to 1631370)
tacaggttagtatttctttttccagtttagacttcaaattaattaattccctctatgctggaagaacttgctaattctttttttttttcttaaatgtcagaaaatattaactttttcatcattaactatccttaaattaatattatgatacagaattaatcacatcatagagctttaaaaaacaaaaacaatgaacccacatggctacctccttccagaaaccttggttgtccaacgtggaaagtttctttaaattcatattagtggattggaaagtctcttttgaatactagtagtggtctagtggaatatatttacacaaagtgatcttcttttcaaatataatttcatgaaagagctatcaattctattatttagaatgaaattatttttaatttaaaaaaaaataaaatcaaataaggttttaaaaaatttcatttgaatcatttttttacaaaataaattatttcaaataaaagataattcaatatctaaaatccttatcaacttaacccagagatgagtctgtaagctagtctgaaatacagaaataattcctaaaagtcatttttatccttaaaaagagtaatttagtgttggaattgaaacataacaaaggaagatatagcaaccactgggatgatgagccatcagttgccaaaggggagagagacaaccctttctcgaggcacaaatttgagaagtcctacaattatgggtatacaaactaagtaaagccaacagtgaccttaggatagccaaactaagaacatgtatgtctgtcatttaaggagaaccaaagtcatagaggaactggagaaccagagagtgatatataacaacttctgcattagttaaaatttcccgagtatttatcttttttgtagagagtgatatattaattgttttggacgcagttgacactgtctgggttactaaacttcatag

SEQ ID NO: 46107 - DNA, 740 bp, Manihot esculenta
  Intron number 1 from transcript cassava4.1_018148m (locus cassava4.1_018148m.g) derived from phytozome v7.0 (chr-ID scaffold08085; pos 347402 to 348141 reverse strand)
attttccctcggatatttggccacgaaggatcagggtaacttctaaactttcctttctaatgtaataaataattctcatcatgcctctgcacaattttcgagtgcttaactttgtaatatgtgacctttggcttaaattggagccttgtcatcaaggctcaccctcatatttttctagtttttgctttgtggttttttcatataattctaactttagacaatgctatcagaaaaataatttacttcttgtcaaatagcagcagagaaccttacagttgctgtcctccactgcaaaatctgtgcttcacagtcctaaattcttgattttttttttcaagttcataatttgatgacaaccataacttccaaaatttctaattggccaattatttctacgttttattctctcaaattaccctaaaaatatacaccatctctaaatttctacattttctttgtcaaaatttaaggttgagaataaaataatatgggagaaccagggaaataactaaaaagaagctcgggtagtaacatttacgattaattggcacctaccataaaagagagattgcatgctaatcatctttattccaaatgttatcaattaaggcacttgtacatgtagtaatatgcatataataaggataaccatgtgatatgtattgaggaagataactggagttgtttttattatcaagtttgtaggattgtcgagagcatcggagggggagtgactgaat

SEQ ID NO: 46108 - DNA, 687 bp, Manihot esculenta
  Intron number 1 from transcript cassava4.1_005472m (locus cassava4.1_005472m.g) derived from phytozome v7.0 (chr-ID scaffold10689; pos 77662 to 78348 reverse strand)
ttggaggaagtgggtcttggattccatattacaaggttggaaaaaaaaaaaaagttacttgcataagctactttactctcttttgctggtaaattacttagaattttattctcaagattgggtatttcaataggaaattgactgatttgaagtaagctgaatagaattttgagtttgttgattatggaatttgatttctttgactctttgggagattttattttcacatggatgatgactattttgaatagaagcagctattttgtcacattggttactcatgctcttctattttcacatcaaagtgggttccacaatttgagctattcgaagaatataaagaatgtttatattcagtgtttttcttttgtagtcctagtttctactttcagatttcataaggctttcttaacttgtttacataagcataactttaaaatcactaatttaaccaactcaaatgttttgccaccataaatttcttcaggattgattgtcatgccttgatcctgaatgccagaacctgtaatatgccaggattgcttggctcattcgcctgaatgtttaatgctgattatgatgagtgttgtaattggtaatttgttacatattttcatctttttctgatttggaagaagattgtcatgcacagcaggggtttgaggagatagacataaagaaagttga

SEQ ID NO: 46109 - DNA, 308 bp, Manihot esculenta
  Intron number 1 from transcript cassava4.1_004013m (locus cassava4.1_004013m.g) derived from phytozome v7.0 (chr-ID scaffold11069; pos 268427 to 268734 reverse strand)
tcttccccttggttgttgcagccactgttctacaggtttgtttctctaatttgttcatcagcaacaatgtcaccaagtttggaaaagaatagtctaattattacaagctactggtgaactgttaatcataatgtggattgaattcaatcgagtatttgagtaggacaaatagaatatatttgaagaggaaaaaaagagaaaatttaatggagacaataattatgagcaatagttttgattttcattgttatatgatacttttgtctgaatcatgcttatcactgttttttgttggatttcaacagaaa

SEQ ID NO: 46110 - DNA, 578 bp, Manihot esculenta
  Intron number 4 from transcript cassava4.1_007943m (locus cassava4.1_007541m.g) derived from phytozome v7.0 (chr-ID scaffold03219; pos 290785 to 291362 reverse strand)
tggctgaacaaatcaaacaggtagatctttttttctttttttaaaacaaaaaatattcatatattgtaaattagaatacttggtaaagacaaaaatctactggaaatccaatgcaattcaaaggagaacttttcaatctcaaattctcctattcaatgttaaggatgaactttttgaattttttttataaggaaaaaaaaaggagaaagaaaaagaaaaaaaaaaagaagtaaagttcataaaaagataaatatgttggtcttgaaagtcatggaagaaacagtgccagtcaatttgacaagttatttgtaacttaagttgtagactacacattttgctgttttaatcagacaccacaatctgagacatgaataacaaaaggactacacaataaagaagcagtggttgatgtttggtccgtaccatgaaaatttagcatcttctcttggtggagccaagtgaatttaatgttacgttgatgagttattttacatgtcacagtcgctgggaccaagagcacttagttttcagtccttgagacagtctgtaggtgttcaagctgccacacaaaacacgat

SEQ ID NO: 46111 - DNA, 608 bp, Manihot esculenta
  Intron number 1 from transcript cassava4.1_022670m (locus cassava4.1_022670m.g) derived from phytozome v7.0 (chr-ID scaffold09705; pos 56525 to 57132)
cctaaagccgggtgagaacataaatttaattttatttgtctatggtttttgtataatacaatgaaatatttcatgaatgaattgggtaacagaaacttatatttaaaatgataatagttataaataaacattttttttggaaatttctgattataacaatgtgttatgtaattctttcttcaagaatttctcttcatacaatatttatgaattaaaaattaacacattgtgcactcacagacttaatttagtggtaagtgtatttgagaaaatttgagagttttcgagttttattctccaaattcctaatcttcatttaaaagaaaaaaaaagaaattaacacattgtatgttataattttttacaatgcaatcaatttgattattattttaattcgattattctaaattaaataaataacttattaaattatcatattggtataatattaaaatgatgtatttgaagataaattataatttttaaataaaattttttaaaatgatagaaaaaaactgaattcaactcttataaaattttttattccaaataaagagtaaatgaatttataatgcttgcaattgcagggagaaagatccagcaaagtt

SEQ ID NO: 46112 - DNA, 903 bp, Manihot esculenta
  Intron number 2 from transcript cassava4.1_017732m (locus cassava4.1_017275m.g) derived from phytozome v7.0 (chr-ID scaffold09870; pos 292703 to 293605)
tagatacaaagggaaaaaaatttctgttgtagcaggttattttatcatttgcttttattttttaagctttcaatttgtagtttgatttctgcgctatattacacaattttaattcttgcttggaagagattgagattttgtctatttgttgttcattcaaaggtctagctgatttcagtgttcctttgttattacaaactctgacatgttatcgaagtgccaaatttattaggagttaagtaaatattctaaaactcgacattgcttttggttggttgtctgtgtgagtgatgaaaccttcataggccttctgcagttcacaatcacttttggttttcgtttattaccgtttttctatcaaaccaaacttgttttgtagtttggttgttggatggaaatgcagatgcctttgtttcttatcttttggtctaagtggagttgcatatgagtggtgacggcaaaagcgggtacgggcagtaagcttgattaaatgaatttttcaataagcaaagagaataagagctatacaaacttgactgtagtgcatagttgtcactaaatgtcattctacaaacgcaagtactttgtcaagattctaacatatattgaaacgtaaagagcagatgtgatttatattactaatgcactgaaagcaagtaaacccaataataaaaatggccgctttgaagagaagtgcaattagcaaaagtagtcaaaattctttttgctggatgaaatagaaaaaagaacttagagaaatgaaaattgtttagtttattttctctattagagtagtagtggcatttttttcacttttcgtaaagtagttgtattacttgtattgttctgacattcttgacatgtttaggtattgaagccagaggttttatatttggccctccc

SEQ ID NO: 46113 - DNA, 653 bp, Manihot esculenta
  Intron number 1 from transcript cassava4.1_017740m (locus cassava4.1_016810m.g) derived from phytozome v7.0 (chr-ID scaffold07129; pos 99163 to 99815)
ttctggacaaaccactcagtaagggtaaacaagaggtacctcctcctcccctctctttttatatcatccctaattccagttgtttggtttccgagaaacattcgaagaaagttaaagacgccgatattaaccagaaggcggctttttgtttctcaggtctcttattctagttatttttgccatccattttctgttttctgttctgctgcgtccaacccaaggcattttttcagatctacattgctttttgggtgttaatcttatgctcaaagtgcgtctagttggtttcagtattatttggataagtacttgggcatcgtatagttgtactttgtagcaaggaaatggggaaaagaagggagcattgaaaattgagtttaagatttttgacaatttgattcaagggcatctaaaacctacaataaaggttgcctagttctatcatttgtctaaggcgaaatcaactttaagcaactgaagaccataaaaatttcatatttcatgttaacttctcataagcctctttcatggtaactgtgagtgggttttttcttcaatttggcattagaaattgatgttttctaaattgattgaagtttaagcatttgtgtttctcaggtcagtttgagcgcatttgcatttttgttttcgga

SEQ ID NO: 46114 - DNA, 758 bp, Manihot esculenta
  Intron number 1 from transcript cassava4.1_013090m (locus cassava4.1_013090m.g) derived from phytozome v7.0 (chr-ID scaffold02658; pos 772428 to 773185 reverse strand)
aacaccgtcgtcgacgatactccttgtattcatctatttcgtttctttttttttttccctcctcgtcttttatttcaccttatgtcttatgttctgtttggctgctgagaaaattcatcaagcttcgttttatgactccatctataattgtgagtttgagttgagaatttgtatttttcttttttgcgttaattattatctgtgaatgagataatacttttctgttgaagacaaaatataaggtcaaagagaatggctcatcagtctagagtttctattagaatcgtttgcggcattgatctcctttctatggaaaaatctgttttgtttcctggagaaagaagctccacataaacttgtcataattcgaccttttggcctattttgaccttcagctttaactcgtaaattttcatctatttagtttatactttatgttttccccctttcccctcatttgccatgggactaactcctattccttccttttgttgccgtgattgtccttttggcgctgctctgtttggttctcagtaaaaacgtaggaaaaggaaacaattgaattctgttttatggttcagaaaatgagttttttattttctatttagaacttgttgatgcctctttgttttctcagtagccaaacagaaaattgtcattaatcgacttgatgttaccgttctgtagtatatctaattattatttattatttttgttttacagattgctgtttcgcactaatttggtaatttccatca

SEQ ID NO: 46115 - DNA, 875 bp, Manihot esculenta
  Intron number 1 from transcript cassava4.1_000420m (locus cassava4.1_000420m.g) derived from phytozome v7.0 (chr-ID scaffold02658; pos 538368 to 539242 reverse strand)
attttcttttgtgccatttctcgccagatttaaccgtaagttggtatatattttgttcttaatctatgacttctgtcttcattttctgtgcatttgtgtttatattttcctttactttgttgctgaaaggagctgcagtttttggattttttttttaatgtgctagactctatgtttatgaagttaatagatactgcgagtgttggagaggtcaataaaagaaaggatttagaggcataactgattagctttctgttttatgtgcttaattttttgagaatgggagttgataacaacatatttcttatataattttaaatgtacagcaaaggtttatatcttttaatcaatcaatggtaaatatgaatatgatatgttgaaatttactgaagtccagtcagtttcatcagatctattaagagatttcttaattttgctttagggccttcactgtctgattggaagttattcttggaaatctggtgatgataccttcctttttgggtttttgaaatttcagagggcgtattgggtaatgatagatataacttgggatcgacaaagataagcagatgaaatcatgtttagtatttggtgcgccatggtttgtcattctgtaaactgatatccaattgtcgaaactttcaaaaatttcaactcttaaatatgtattaaaagttggtggtgtaattattaatatgtttatgtttgacgctcgacttttagtggtttcctatttagttgtctagttttcctcatgctagttcttggcaatacttctccctcaaatgcagctgtggatgatttcgtactaacacgcacttttttttttctcctcagttttattaatctctacctttggtggttttctggcc

SEQ ID NO: 46116 - DNA, 1011 bp, Manihot esculenta
  Intron number 1 from transcript cassava4.1_003136m (locus cassava4.1_003136m.g) derived from phytozome v7.0 (chr-ID scaffold11341; pos 223235 to 224245 reverse strand)
gctcgtctggtcgcaagcgatccagtaatctaccgccattcttctcttattattattgttatcattgttattattattggttttggaaagtaggtgcccaagagtgcgaaattggccatgatttcaagctataagatgctggtttttgtgtcttaaatccaattctgcttccaatagaaataagttttaattttacctaggcgtaactccttgagcgaataggctttaaagtataggattttaagtgctgaactgagtttcgattcatatgattgactgcaataatttcttggcttattgctacatatggagatttgattttgttggcctatgtggtcttttaagcagtgtaaatttgcgtttacggtgttaatgtttattgttttgacctgtcgcctgatacgcaactggaaagatgaaaataggaggaaattagaactgtcttggttcagtagcaatcttgcagtctggtttttcattgattttgaaataagggaatgctggctgttaaaagcaggttttttccagctctgaaactgccctcattgtttttctctgtttattttcaaaattttcagtttctattttggcttactagttgagatcctgctcatctcgccgaagattcccaaatttcaacactctgcattttttcttgggaaaatctcaggcaaacctggttcatatttgtatttctcattgcttgatgcaattgataaattttgcacttgcaaccacatgggtgcaggtttgagaattgagaacagtcgctttgtgcaaaaatgctgaagtttttagacttttttttacttagtttttaaaatttttttccacataactcttcctcccaggtcccaattcagcaggaacataatggtaattgagcattaatgttcctttgcagtataattttaacgtacatctgtttatttcgccttttgatacttttacttatcactacctgcccttgtcatatattgtctccaggtttttcgaaaggataatagagct

SEQ ID NO: 46117 - DNA, 563 bp, Manihot esculenta
  Intron number 1 from transcript cassava4.1_004432m (locus cassava4.1_004432m.g) derived from phytozome v7.0 (chr-ID scaffold07520; pos 2510244 to 2510806)
cagctttggcttcatttcaatcgattacctgcgaggtatttgccttaacctagttcttgatcccctaaccgttacttgtttggttgctgagaaacataaggaagctttagaaagaatatcactttgggatcttttgattggtgtaattttaacaactcaagcttgttaggagattcctcgtttttcgctttttcttcttgtcccccttaatcttatccgagtttcagatttacctttataacgcagtttctttgtaatgaaacaaataacggaaacatgaaaccagagttctaacaagctaaatggttggaaccatttcagccatcgtgtgtttttgtatatatatatatatatgtatgtataatgtttgtcttctttgctttcttgttgatttctgcattatacctggttaaatgggcaaataagttggtttgatgtactaatggatgatgcgattatttgaaggacaactagtttagttctgtcttaaatgcgaaaattgaattgtctgttcttctctgtttttaacctttgatgagatatcttgttgctaatgcatagat

SEQ ID NO: 46118 - DNA, 980 bp, Manihot esculenta
  Intron number 1 from transcript cassava4.1_006603m (locus cassava4.1_006603m.g) derived from phytozome v7.0 (chr-ID scaffold11179; pos 207880 to 208859)
ccgccgagtcccgtgtccagccaaactccgttcaggtacacacacaggcacgccatagtagatttctctgtcgatgcgacttccttgttctttttttttttgttttgttttaaatatacattttctctttaatattttgttgccgtaactgcgaaaaactttcatgtaattgagattttagctttctcgattcttgaattatgaaactccagaacttgatttttctatatgctcttcacgttctcagccggtttcattttcttcttctgtttttctttttcccccgtcttgccagattcttttgccctggcttttatgctagttctgtttctgacttctgagagtagggcaagcagaaaaggaaacgaatttctgatttttcatactcttagaatttagaatccgctcaatgatgtggttattggaaagcttaattgacttgtttcattttgcacgatcgataatttgttctcgtacttggcagatagtgaaacacgattacctttctcacaactcatattgagcagggtagctatagggtaaactgatgtattcaagacatgacgagtttagcctagaaatgtttatctagttaccttttcaaaacattcattggcttccttgcaagcagttcttattgcaatttggatcataactctttcctcattgaactggatgactgttctatttcgatggactaggctggtagcaattttcatctctccgtttgtgcgcttgttgctcgggtggagtgatagggggtggtaatacattcagttcttagtatttgacagtgggcaaaaattgtggataaaggaaatgtacttctaaattttgttactttattgaattataaatgcatcagatgttttccatagtcagatcaaaataattgacaatgagggggaaattggttttcattcccttggaaataattgttcacaatcttaacatcttcttattttgacgcagaaaaaaag

SEQ ID NO: 46119 - DNA, 928 bp, Manihot esculenta
  Intron number 3 from transcript cassava4.1_014235m (locus cassava4.1_014235m.g) derived from phytozome v7.0 (chr-ID scaffold03741; pos 318206 to 319133)
cagctgatcagtcacttaaggcataccaggtatgtactaatccttttcatatccaggttttgttactgggtttgattaaattttaatttttgctacggtttttttttttctgttttgggtttttcttttcctagttaattcattgatgtgcttaattcgaacttcgtgattgtttactagctaagcagcttattttaatgaaagcaatggattccccccatttttcgggactgattcagtgattgtaaattgttttatattagctttgaatttctggcaaaagtgaaacctactagtttgattgcttttgtattttcttggaaaactgattttctttcatgtgtagcctgcatttgaaagacttctgggcaaccattttgttcttgtgcaagtatatggatcatttacttagactctgtattgggttggtggaggggtaacaataaatggaagacattacaatcattttgtcctcatggaagtaaatagataattacttacattatttattggatcgctcgagggggcaataaggaaatgagatcttctttataagattactctaaccatgaagtctagaaaaatatagcagaagttgctgttttcaatgagtgctatgattgttaacctcttcagtttgaagaatgtatggttatattttgaattgtcaatagtgttatatttcctttggcaagatgtgctcaacctaaatgtcaaggtgttaaatccttttttgagatatagttttgtgggctttatagttttcctctggaatgtgaagggacattgtgatttgtaagttcatgagtttttcactttcatccttgtttctccataacttcatttttgttggtaaggatcattttacttaatatttattttggttttttcagactgcctcaaccactgcagagagcgatttacctcc

SEQ ID NO: 46120 - DNA, 740 bp, Manihot esculenta
  Intron number 4 from transcript cassava4.1_014226m (locus cassava4.1_014226m.g) derived from phytozome v7.0 (chr-ID scaffold08860; pos 39527 to 40266 reverse strand)
aagaaaacgtcagtactttctatcacttcatctgtacatatataatcgctgtatttgttactgctctctgcttgtgtatttttaaaggataattacctgttaatgtcccttatttagaatccatatttttttactgtgttttatgcaggaggtaggagggtgctctaatgagttttgaatatatataatatttgaacactgtaaaaaatgtccttatccgagctcatagcaatgcaggtgttattttagggatgatggttgctctagatttttcaccaaattaagttgttcattatcaaatgatgttggtatatattgaatgtgagggatactttttctgaaaataactgataacagctctgagtgtaaaaactgctagcaaagagtttggctaatgatcaggtagaatgggagaaaatattaataaaaaaggtggatgctgacatttcatttcttatctttcaatagctggaacctgtatgcagacatgtgaatgtacctctctgttcagtctgtttgctcctgttttggctaggtcctgattgagtaacatcttttgatatatgctttgcttgcaaattatttttccagcttttagcttgtggatgtgcggttatatttactttttaaaaaaaaataaaattattattgctagttattttgtatggccagcttaattagtcagtagttaataacagtttttcttgttgatatttttgtatcatgtcaatagattggcc

SEQ ID NO: 46121 - DNA, 815 bp, Manihot esculenta
  Intron number 2 from transcript cassava4.1_023064m (locus cassava4.1_023064m.g) derived from phytozome v7.0 (chr-ID scaffold04457; pos 1161686 to 1162500 reverse strand)
ctaatattcggtaaggtttaatccatttgtagagacagaatctcagataaaaatctcagatggtattttttcacccaaacatcgctttagaattctgaagcaaaaaggtactctgtgtttttcaccagtaccccagttttgtttctcagtgttccggaatttttggaagtttttatttttcttaataagcttagtggccacttacgcattatgtgaggcggccatttcgtttagttttcttaatctgattttccttttgccctgttgaaattccgctgccctgtaccatgtgaataccacattatcgaaatataagtattttatatacgcaacttggagataatttagaccagagatttttcatggaaataccaagttaagagtgaagaggattttttttttttaaaaaaagtgtttatcattattttcaagtgaaatcataaatatcaacactaattttatttcatatataaaattatatttctttgactattagtgaagcaggaaattagcttgtaattaatattcaacggttttaataattgagatttgcacttagcgaagactttaattaaatgtgtatagcaaaaatatccaacatacaaaagaatttatgttggaatcttaatattctttctttgacaattatgcaataaataaaatataattgttgtataataactcagcttggaaatgtttgcattaagacaaaatttccaatctacataatacaagttggtcattctgaaaagttgactatatatatttattacatttcaggtggagcagcaacatattgtagattgaaaccaagc

SEQ ID NO: 46122 - DNA, 719 bp, Manihot esculenta
  Intron number 2 from transcript cassava4.1_006217m (locus cassava4.1_006217m.g) derived from phytozome v7.0 (chr-ID scaffold11069; pos 229617 to 230335)
ttatcaggaaagccggagaggaaattagggaccaggttagtgtgttagctttgaaatgatgctgttaattgttactatatgcaatgagattgttcattgattgtgttttatatgcgagtttattactgatttcatgttcttacaatttgatattcgcgtgcattgcctgtacaagccaacttattcctcttgagaacaagtttcctttttttttttttatacaaaatttataaatagcttctttaacacaatgaagacttttttcatatgacattacgggaatccttttaaaaggttggatatcttaaacggcattggcaaaaagaggtggaatgcaatcacattttgctggtttcaattaataatttgtcaagattggaagagtataactaaggatttattttggattacttttactacttaccatggcatttgcagcatactaatgacaatttctctccttatggaataaataaacacaaagcacttggatgttgtttgagatgcatgccctcaatgtgcatttttgcaggcgtttgcctgttgtgttgtgtgtggtgatctttcttattcattatctatgaatagccaaattgaatcatcactgcttgaagtttgtgtttaggactcctgatatgcttttgaattcagacccaacaagtttttttctctttcttggcacagttatattgttttgaagatcgtggaaatcgccgtgt

SEQ ID NO: 46123 - DNA, 793 bp, Manihot esculenta
  Intron number 1 from transcript cassava4.1_011839m (locus cassava4.1_011839m.g) derived from phytozome v7.0 (chr-ID scaffold12711; pos 65787 to 66579 reverse strand)
acgctcattctctcttagatcgagcatcaacggtgagtcccgaatccctatctcttgtgtgtctcctgagaaaatttgtgaaaggagattagaaaaaatcgaaaagaaatgaaaaaaaaagtagacaaaagttttactgagtgctatggcaaaggatttgtgtgcttctttttttttcttaaatttttatattaacatgaaatagggccgtataagtcttgcttcgttttcgttttgggtgtctattggaactaaagagtcgcttgttcttggcgtgcgtttgcattgatatgtagcttggcctttgttattcgctaacaggattttaaatattgctgcaatatgattctagtagttcctttttaagttctgatttattgtgtttttgagcaaattaatttaactgattttgcaagtgagctcaatatttgatgtgggtgtattttgtaatttatttctcacaattatctgtgtgggaaataaattagttttggtggaagtagaaatgaatcctttatttttttcttaaaaattaatctttttaatttttgttgaagaaatgggatcaaggtaactagatatgccatgattataatatttttgcagaacaaactgtggttcagtttttagtatattcaaacagattggtagagtagccaattttgtagggataatgatagttcaaatgttgttttacttaactgtttgatgttttttgtctgaatgcctggttgaacaatgttgttttgttatttcaggcctttgtcaaggctcagaaaaccaaggcttactt

SEQ ID NO: 46124 - DNA, 863 bp, Manihot esculenta
  Intron number 3 from transcript cassava4.1_028569m (locus cassava4.1_028569m.g) derived from phytozome v7.0 (chr-ID scaffold10689; pos 784732 to 785594 reverse strand)
ttcttgaaaatttcggggaagaggcggaggaaaaggtaaaacttttatttgaattttcttttattatattttatattccatatataatctgttaagaaaatttgcaaaaggaatgcaactattatggtcatatcttgcaaataaatgagcaatttccactttggaatctgtcaattgattgagttcttgaactatagttatgtaggagacgcttgatgctctgtgccttttgggccatggggaggtgggtgagcttgtgaaatgggtattctaggggattgctgtatgctctgttgaattcatttcaagaaatcttcaagagtaagtccaaatagcaagttatgtttttgaaggactccttcaacttctgtattcaattttctgaaaacattctaccgagctttttgtgtgctagccaaaagaattagcttaaaaacaggtgatttgtttcttgatttcatggggaacagagtaatataagtctatgctaacagttaacatacattggaatgaagacaagagtctgaagcatgatatggcggtggcttttccaaaatgaaccagtgtaattttcattagctgaacaagctcgagtatttgatatttattggtgttttcttccttgcctatagatgttgggagtgcaaagattcttgacaatatgtctatggagtttgaaacctatctggttctatgagatagtttagcaaaagcttactcttactctttgaatttctatcttctgaatacaattgaaaaggctgtgtaatgtgtgacttgatatgattgcattgagttgtttataatttggcagtatgagattagtagtacacatatagcagtcaaatcatattttctcactc

SEQ ID NO: 46125 - DNA, 146 bp, Manihot esculenta
  Intron number 1 from transcript cassava4.1_004156m (locus cassava4.1_004156m.g) derived from phytozome v7.0 (chr-ID scaffold06916; pos 685681 to 685826)
ctccccttgccctcatactcccctgaatcttctctgtatgacctcttcttttaacatatccttttgtgttctaatcaaattctgatacaagattattttttcccctctctgtttattcagggtcgtgaaagaggcttccgtggtat

SEQ ID NO: 46126 - DNA, 762 bp, Manihot esculenta
  Intron number 3 from transcript cassava4.1_004156m (locus cassava4.1_004156m.g) derived from phytozome v7.0 (chr-ID scaffold06916; pos 686160 to 686921)
cattaagacgtgtgcttgctacattcttggctgaggtattctccatcttgttttatgtctcatttcaattgtgtatttcagtcttaataatgtttcttcacttattttgatttgtttgcgtttgtaattccttatcaccaacaaccttaaactatttcttccccttgcaaaacatttcaatgttgactgattgatttggttctcatttctcaatttgaacccatagtcctctatagtaggctctttttatctggcgcatgcttacatacacatacagaagacaatgattttatgttgttcatttttccttatttattttgtaatgctgttaagatccaattgacgtggagggatggttcatgaatgttcttgtgaagaggggagttccatagtataccgtggtggtgtgggcttttaagtgcatcttcttaagtctgttagcatgttaagtttctagggatacagttatctaatgaaaatgtttgtaggtatactagcacttggtgtctctctttgtcttttccctcttagtaatttttcacatcatcttgtttgtcttataatcttcattatagctccttttcttgctatgcaaccaggaagcttctcctaaattatagtaaattgtgtgaagtttcttatttctagcccattcagtataattcattatacatgtacgtaatgcacatataagcaccacatattctcaaaaacatgttagttgattttcaatggatatcttgcttgtatctacaggtttac

SEQ ID NO: 46127 - DNA, 1030 bp, Manihot esculenta
  Intron number 1 from transcript cassava4.1_008478m (locus cassava4.1_008478m.g) derived from phytozome v7.0 (chr-ID scaffold04457; pos 1006576 to 1007605 reverse strand)
tagtcttttaccaagagcagaccagggtcttcaaggtaacctttgaagttatcgtttgtgtcaattaattaatagtgatttatgtgtgctgtggttttattgggtttttgttgattgtgatttaaaattttctgtttgatttacggtaataaacagttctttggggtttatttatcctcttcttctcagttctaattgactgtgatgcgtttgatgatgtgagaaagacgacatcggcatttcctgcttcttgttgatctgtacctgttcaaattaatagttatattttgtcaattgcaagttttgacactgttatttgtacatgcccatgcctaaagcttgatatttttggtatctgttatgtttcatccatttgttttaacaatatgcaataacgtttatgaggatgttttgatctttggatatacgataataaaagatgcaactaaccatttaggatattgctccaaactatgcaatctgcccgtgactggtaggtgattgtattgttattactaaggggggttttcaagtggattggtagtagtcctgggcctgcagccaagaagttgcaggactgtctggagtttgtttccatgagccgctgtggcggacccatatctgggtaaacgttctatctatctgatttgctgttaattctagtgcgatcatgatattggactattgaacttgttcagtctattaatactggtattgcctacttcatttaatggttttgattgttaacttatcatatgtcttgctagtaaatttgtatttgcattattttttagtatcttagactttccccttcaagagattgtactagaagcttatttgagtttgtcattgtaggaaaagattctgattttgttagtagatgatgatcgataattcaatcttaaaatgtttgtcactccatgtatttttttttcaatctcattatgagctgtcttgtcagtggtaaatgattgtcaaatctttggttgatgtaggactgccagccctattttccaagtcagggagcaag

SEQ ID NO: 46128 - DNA, 780 bp, Manihot esculenta
  Intron number 1 from transcript cassava4.1_016825m (locus cassava4.1_016825m.g) derived from phytozome v7.0 (chr-ID scaffold03219; pos 101096 to 101875 reverse strand)
tacactcagtaatattagacgggctttgttaattccgtttcagttgattttgttgtggaaatttgtttgttttgtcgtcaattaaaaaaataaaaagaggaaaggaagaagttcagaacgatggctagttttggttcctataaaagaactaaggaaacggcatgtcgttatgtagaaatccctgtcgaaaactagcctttattcgctcattcttgcctctccgttccctgtatacgtattagtgagtaaacatatgcaggcgaagctaatttagcagtaataatgtgggaagagctttggttttcaaattcatgaatctttacatttcagtcagtgtatagttagaaacattgcctgtctagtaaaactttacactgcccaaactgttggatcttggtttgtgtacctaggaaaatcttaggcaggactcaggagtgatgggttttatacctggaccttttcttccaaagaacccataaatataaaattctacagagttacaaaggtatgggagaattgtgtgcataaaaagtctgttagaagttgaggtcaaatgtagaattgtgtgcagaagctggacatttccatacttttaatagccctctgccagaatgtccaccttgaagccagagaaattttagtgcttcacttccaattttatgtactacagaagatgtgagcttatatctaattcaattatttgggaaatttattttcatttgattttcctttgggagttcttcaggtgtggaccttgtaaagtgatagctcccaaattta

SEQ ID NO: 46129 - DNA, 610 bp, Manihot esculenta
  Intron number 2 from transcript cassava4.1_004176m (locus cassava4.1_004176m.g) derived from phytozome v7.0 (chr-ID scaffold04457; pos 34725 to 35334)
ctttgtaaaaactgcgagaaagaagggcagtggaggtaattttacggttttcttgcattgtggtagatgtttaaagttgtgttttctggtacaagtttaatgagttgtatttattgtttagagcagtgaacgtggttctattggttttgagtaaatgcagaggcagcctttgtttttacatttgtgttgggacatgggggtggtgcccataattggatttctaaacttttcatcttcaaaatgtcctttgctcacaaaggtgtttatgggaattctcaattctgcaatcagagtgctgccctttctcataaagggaattaccacatgaaattgctctggtttttgcataattttatatttattttattttatttttttttttgggggggtggtggggtcaaagtacttgctctaatcatttttttttttttagtttcattttagatggacaaataattataaacataaaaatttggctggtgttatgctaaagatcttggaaagttgccaagattatcatgcaaaaagtttttcagttgaactcattgatttacttcactgttcaattgtaccaggtacttggttttaggccaagcttgttgccatctgg

SEQ ID NO: 46130 - DNA, 1022 bp, Manihot esculenta
  Intron number 1 from transcript cassava4.1_004440m (locus cassava4.1_004440m.g) derived from phytozome v7.0 (chr-ID scaffold04094; pos 24488 to 25509)
tggcggtcaaagttattcccaagtctaaggttcagttctcaacttattatttcctgtaatcttgtctttttaggattttcatatttctaaagtaatttctgttattgcaaaagcaataatgagttgtgtttctattactgatttgtttcaatacttggggccttgaatgatttgtatattaaatcatattttgttggtgagctttcactttgccccttcattccctgtgtgatatattagaggaaatttgttactaatatttagcaactctagagattagtttctgcaactgtttgtgtaacataagggctttctttgttgctattaagatgcctgttgcagtcattgaccttttggtgtgaacaggaaagactaccctggattggtctcaaaagtacaatcctttattttttttttttttttgtttagctaaaagctcaaaatttccagtgccaaaaatgccaaattccatcatttggtccaaaatttgcccttatattatcattaaaggtcaaataaagcaatcacttgtcaggatttcaaagtgtgcttatgttctcctcagtctatttgactttattgcaatactcttctaggtctatttggccttattttcacttatttggcttttaacgatagtatattttaatgatagtatattttaatgatagttcacaagcaaatttggaacgacaggtgatttttaatatttttggcctctgctatatggttcagagataaatttcgcctttcttgtcatttttttccaacgagacatttacaacttgtatgtcggcttttgattgattgactttctttaacatgaaaggcagtaatgtagtgttggatgatcagttttatgtgaatgcaattttgtcttatgttaatatgtcattaatgggactccatgcgtctaagttagtcatgtctatgatttggttttcagcttgtcttgtgtacctgactctgaaaacaacaaattatttgtttttatgtctcatgaaaatgagcaatttttgcag

SEQ ID NO: 46131 - DNA, 895 bp, Manihot esculenta
  Intron number 2 from transcript cassava4.1_014474m (locus cassava4.1_014474m.g) derived from phytozome v7.0 (chr-ID scaffold04457; pos 349037 to 349931)
acaagccagtatgatatatactatatagtttgctgtgtttttctttgtggttttaattttacttgatcaaagttcaaaccacgaaaccattcagctaaacccaactgtttaggcatattttccttcagtctgcactcaagtattgcttaaactctttggcacctttgtaaagaggtgttgaattgttcgtatatgtagcttggtctgattagagatgactgtatttcttcctaaaatttcaaggaaggcaatgttcttgttaatgccctttgattaggttctgtttgtatggcaagtcaaaagactaccagaatccagaaccttcttcttcgtcttcttctttttccccaatcccccttattgtgaagtgtagcattttcaatgttattaacaagtaaagtttgtacattctccatttctttgtcatcattattgtgtcactatataaactttgctactctctcctgagataaccatatggacaatggtatatatattgtagtgaagaagcgccagcatatgactttttcagtcatggaataactcttggatgttaagggcattttgatatattcatacacctaggcacaaatattgcaacaaagtaaaattctaaggataaattgtttgtggatgacaattgacagacaattactataaggggccggttaaggtctttatcctgacctctcactgttgaggctttatcatacctacctagtctgtaagattgatgagtgatcaaaccatgtattagactatggctggtctttcctttcatgttaatgaaaataatgaattcattatatcctctattttggttcagattaatattcatgctcatcatgtatttaacacagagaatacaatttgcaaaaactaaatcggatatcat

SEQ ID NO: 46132 - DNA, 858 bp, Manihot esculenta
  Intron number 1 from transcript cassava4.1_005922m (locus cassava4.1_005037m.g) derived from phytozome v7.0 (chr-ID scaffold06816; pos 178046 to 178903 reverse strand)
tcaaacggtatggaaacaatcaatgcttgaggttcctttcattatgttaccactatttaaattgttggaaccatattatgcacggtaatgttttttccttattattttatttttgacattttggagaaaatggcatggatgcactgttttttatttatttatttgatgattagtagtactatggattggatttggaaaaaagaaaagaaatttgtcacagttggttacaacgatccatatgcttgacccttgcacattggaattgaagcctagccaagttagttgaattggagaaagaaaaccatcttgaggttctaaagaccttatcacaaagcctttgttaatctttgatgtaaaagatgcaaaatgttacatgagatgaaaaatggttatgcagagagaccttttttattttggagtatgtgcaccaatgtaaactgataccaacatacagctttttttcggaggtgtggcagttgttaattttccatttgaaaaatgctttctaatgttcttgattctccttcattgctgatgccttttgtttcaaaccaagtttgcatggaccaattaatgatttgtttttatatttattgattaggaaaaggagtcctgttgcataaggttttatttacagccttatccgtgcaccatgtatatattgcactttttctagaatgtctttttgatatatgacctatatgccttaaatgcatgattttgccaacactgccctgcataggtcagaattcttagacgataacttcagatttgaaatgatccctgaatggtgtccttgtcattttctggttttgttttttaggtaaaagcaggtgaatcttgtgttccttcgttgga

SEQ ID NO: 46133 - DNA, 1054 bp, Manihot esculenta
  Intron number 1 from transcript cassava4.1_024993m (locus cassava4.1_024993m.g) derived from phytozome v7.0 (chr-ID scaffold03741; pos 817269 to 818322)
agttttcatttggggttccattacggttagcaaaggtttgatttaaacatgtttgctattttgttataagcaagagcactaacttgatttaaacatgtatattattgcttttgcatcaaatttgtataatttgggcgtgtctttgttctgatgtagttcacttttgtcatagatgacaattgattaaaagtagcaagcaaataatctgttcatgaaggattaggcatctatttattagttttcattgtttgttctttacacattggtgaaagcaaaaatgagtctagtcccgtggttgaagtgaaaaattagatatagtattgaattggttaccaaatgttttttttttggtggaaagtttataatttgaataatttggctattctttcttgcatcagaatatataaggggtttaattgttctatttctatgtgaaacagtgaaccaaacctaggaccttgtttcttgaatttatagaggaatcagccagcacttccatttccagcctcattgaattattctaaacttggaacacgattttttttttgatatgtagggtcatgccaaaattcctgagattctgaatgggaattcagcatgcctaaagacaggactatctatgttacccttttcaggaccacacattgggtaccatcattcgctagtagctttttttttcccgacaaatattatgaattctgattcaagttcttcatgggaaagcagacagagggaattcttattttctcatttaactattggcagcaatgcatatggaaatgcagcttgattagaataaccatcaacccaaaatgaaaagatcctattaatttgtttccccattcacctaggatgtcatggtatttcttattaggttattcactgcattttagtttatacttttgtatgatgatgcaacagaaagcacaaattcaaatgctaaagaatcaaatgacccttcacttgatgttcacacggtgctaaaatttaaaatgagtgattattctcctctccatcaacatgctggtgcagctagtggttcatcagaacatcc

SEQ ID NO: 46134 - DNA, 679 bp, Manihot esculenta
  Intron number 2 from transcript cassava4.1_013302m (locus cassava4.1_013302m.g) derived from phytozome v7.0 (chr-ID scaffold06762; pos 14223 to 14901 reverse strand)
atagagagtgtgctcgaattttcgagtattatcaggtaagtcttcatgattttagcttcaaggtcttgattatggtaaccgttacgaattttgaatgctattgttttgggtttctttggtttcataagttaaattctacatcttaaggagaatttggatgggacaattttttttaatttctctcttagcatggaaaaaaattgtcatgaagtttggatggtctaagttggttagcgaaatcgtagttgattttagacaaattagaagatatatcgtttgagctagaacaaaagttggaggtactgggatttgtttcgctggctttcttgggtcaatatgggtaaagttttgttttcttggatcctatactttcattttttgtgcatctcaaattatcacccaatttctttttgaggtagtagtttatttaaaatgcctctattttatagatattgagaaaataatccaatagtttgaataataattaacatgaggtttcggttttttaatttttaagggagcagtatgagtgaaccatatattaggaaaagactaaacaaaatatattgctttaactttattaactatattttctttcactacgtgaaattataagtaagcctatctatctttgtgcttttctaatatcgaatgttgaggattatgttgctgtgcatag

SEQ ID NO: 46135 - DNA, 530 bp, Manihot esculenta
  Intron number 1 from transcript cassava4.1_018345m (locus cassava4.1_018345m.g) derived from phytozome v7.0 (chr-ID scaffold06908; pos 78952 to 79481 reverse strand)
gtgtttttgggtctattttctcttctccatcaacggtaatcatcctctttttgattcatttctatcagatttttcttggacccatttgtgatatattattattagcccattaatctccattgataaagatggtagcttcatgtgataatacttattttcattggctttcatgggtatttttcaatcaatttcaattctttatttcataaagtaaaaaacaaacaaaagttttaaaaaataacccaaaaaaaatctctctattacttttcattggataatccatagcctccaatccatggatacagttttatcaattttcatgtccctatcaatgttactgtaatgcatagttgactaactagtgttcatcttgaatctagatttgcatttcctttatttttttaaaaaaaattatattattattattgttattttgattgagcctaatataagatattgatataaagtttgttatctttttgttattattcttcaaaatttaggggctggggagggactcttcagggatc

SEQ ID NO: 46136 - DNA, 348 bp, Manihot esculenta
  Intron number 2 from transcript cassava4.1_003066m (locus cassava4.1_003066m.g) derived from phytozome v7.0 (chr-ID scaffold08515; pos 1760 to 2107)
gaagcccagcttattcaaatcaaggtacgcaattgttacaatatcttcaagctggaaaagaagagaaaaacatagtcagctagaatgtctttgtgctgagaaaaattttttttttagcttattttctgatccatcaattttaaactctatttttgctcacattattattatttttttaaggttatagttatcttaaccagtagtagtcttaatttttcacattaacagtttgattgtaatacatttgtttccttaatatttcgtctttagattggttttactctcatacatagaatactggcatctgtttgtttgtgtagataaccagtgcaggcttgtggtcacaca

SEQ ID NO: 46137 - DNA, 716 bp, Manihot esculenta
  Intron number 1 from transcript cassava4.1_028912m (locus cassava4.1_028912m.g) derived from phytozome v7.0 (chr-ID scaffold01466; pos 109172 to 109887)
tgctttgaagctctccaggtaatattgtggtaaagatggatgttttttgaaattttgatacttgtcactggatatttttagtagtagagtagtagcattccgcacaagcttgtggtttccctcatagtgtgcgcttacatgtatagtttgttttcaaccattttggaactagcaaccttaatgtgcttgatcaaattgttttgttatcaaaggctcttcaggcgttgaaactggaagaggaattgtttgtaacctgtcactgaagctgaaaatcaagttcatgataaactgcagcatttacagaaaggagttgaaatcatttctgagtgattttgatttcgttaatcttggctatgctcatgcttcgccaaatatttaactcagtttagttttatgttgtagtttaataattattcctggtataaaataaaattaagattgtgaataaccaagaagagaacttagaacaaaaatagactagtaggaaaagaatgggaaaaagggaaaattcaatatataaattaaaaccttattgcagaatatcataaattagtagtgatattaagtatcttctcatatcaagctaatattgaatatatatggtagtaatcccaaaaaatatatcctgacaagtctgctgttgtacagttattccattacatcactaattatgtgtcgcaggcccttagagttgttatacacaactacccaagcgt

SEQ ID NO: 46138 - DNA, 751 bp, Manihot esculenta
  Intron number 1 from transcript cassava4.1_002889m (locus cassava4.1_002889m.g) derived from phytozome v7.0 (chr-ID scaffold00847; pos 1809147 to 1809897)
ccaatatcacggtttaattttttttttcttcttttctttattctcgttttagttttgttttattcactcgttggatttgggttgtcgcgtttatgattagatgttgtttgctgattggctaaatctagttttggatgttcatttggtggttttgttcttcatctcgcattttatctgtagtctgtgtaaactatgaaatctgtgccaactattggcctaactgaacttctcttatatttttacttgcattttttcctctaaaagtgtgtcctgttctgtttctttcttttgccatatgggcccttagatatgcatcttctttaaaagattttattcttcattattgtagtaaagtttacaattcgtgctttcgaatctttactgtctctcactagctttctgtgatttcagtttacgtgttctacaattattgaaactgtaggatctactaagttgattgcacatggaccgttggtttattggttctctggagttagatttttattttttctgttcctggtcctcgttttaaagtagaaattttgatagattcatctccgcttaagtttccaatatctcctgatttttggggagtcactcatatgtctttttcttaataatcatgtatttatcaatgtccttatatgttaattgattatggtgcttgtggactttgaaaaattggttttgttgaaaatggattatggactttgcagttaccacgacaagccaggcaattgcagcattgaag

SEQ ID NO: 46139 - DNA, 975 bp, Manihot esculenta
  Intron number 1 from transcript cassava4.1_017465m (locus cassava4.1_017465m.g) derived from phytozome v7.0 (chr-ID scaffold04043; pos 658487 to 659461)
ttctctggctttcttcgaccggaggattccttcaggtaacttttcatcttctctctctcgctctccaaaacatgtatagtcatctgtagaattatggtggtttccactttaaaatcaaaattttccttcacaatctgcagatctatacttgctattttgttctggtttctctttttccccaacatttctagtcaaatattaaaataaaaactttaattttctaattttggatctgatctgtttactcttagccgtgtgttctctttttcctctgttgaactattctatggttattctgttagtgatcttattcttaacggtccctgcagaactgttttcatggtttgttctttctctctgtccctgtgtgtactttgttttttgttttggtttcatttgttcgactgaaggaaacaggaaaaaaggggaaaaaggtagggttcgaaaatttctctaatgtttgtagcttgatttggtttggattggtgtagttttgactggctttggcttgcgagaaaaagctttttcttacttttttttttcttggagagtttgaggttagatctgtggtggaatttgtcagatttagccttggttggtgggaaagtgaagaaaaatctgagaaaaaaaaagaacacaaacgaatttgaaaactcttttcatgtttatattcttgggattgcaaatctaagataattcaactcgacacatttaagccttgtggttggatatgatgatacgaattttgtttcattgcctttcgtgatgtgaagtaacattacaattatgtttggtaattgtctttggtgatctgttcagtggttattctgttggtttagtacgagttaaatagttcattaattgatctttataaatggttgccagacttaaatcctcttttatgcatgatttatctgacatttgtgtattttgatatggacaggcgttctgtagaattatcgtcaaaatttgaag

SEQ ID NO: 46140 - DNA, 982 bp, Manihot esculenta
  Intron number 1 from transcript cassava4.1_018109m (locus cassava4.1_016156m.g) derived from phytozome v7.0 (chr-ID scaffold11341; pos 474361 to 475342 reverse strand)
cgagttcgaaaggcaaaagaagcgcggtcattgtgagttcaatttttagcctgtttattcattttcccacaactttcatgtattgttatacgtttgacatgatatttttcctcgaggagcaaactttgatgttttggatcaccacataaagagccacatttcttcctattatccatccaaacacttggcaatcatttctactctgccaaggttattaatctcattggtaggttccagagcttatacatcgaagaaaaagtataatatatacaacacacgattcttgtacatatatactatgtctatgcataatatgcactatccttttctcttttcccatagtatgcatacttaagtgcattcatacttatatttcataaaagtgatttctaagccaaagtatgtatggctaaaagatatgtctccttatgaggatatagcccaacttatggattttgatggaattaggttgattcacatggatgatccatttaaatttccaacatatatgatccaacaaaatgagactatattatggagatgtaatggtatactcgtagttgagacgaacttgtcacgacttattgcatggcagacctttcaagggactgaaaattcatgaaagttcccattataatttttggctcaccgcctagcaaaggaatatttgagtttggcatagtgttttttaaattgaagcaccgattcttattactttcatttcatattcttatcttggttgacctctgatttgaaccttatatgatcaacagagtcaatcagtaaaaattgcgcttgtaagattgatagtttttctgttcgttaatatgttatgtcataaatttgttcaaagctcttagtatccattgaactatgatgttttttagaatccctgaaaatttgcgatgttgcgaacaaattttttttttttttaatttgtcatccttctttggcaggttattccttatactcggggaagtgc

SEQ ID NO: 46141 - DNA, 745 bp, Manihot esculenta
  Intron number 1 from transcript cassava4.1_028883m (locus cassava4.1_028883m.g) derived from phytozome v7.0 (chr-ID scaffold12437; pos 19708 to 20452)
aaagcgtcgaaccaacggttagtaaataatatatgggacatttgtataggggataagagctcacagctcagctcctccctttcattaagctcagctcctccctttcattatcatgttaatacttaggaagtgaacatctaacttatttttcttcactcttggtacagagttcttggttcattttctagacaaaacaattgcaaggtaccactctaaataatgcttaatgtgattagaaatttgcatacaggctcatctttttttatctggagtcatttgcatgaacatctaaatgatgtcatattatgaatgtttagtaggcattctagagtttagctgaagaagctttatctttttgaagcagttcatagcagaagatatttataaattttttatgactattggcttcttggtaaaaagaaaactgtgtttgatattactgaagtagttcattgcaatttacttaaaatgttgtgcaagttactttaaagaagaaattgagcagatgatggatttatttttgaattttcagaaactcaatattctaaaattcaagtgcatgcatgtgagaacagctacaagctgagactgcataagcatgtagatctagcaatccaagataattaactaagttgagactgcgatccatttactcttttacaaggatgaatcctagaatacagaaactggtttcttaagggatgtaattgacatttcagctcattcaaaggaagagaaataggga

SEQ ID NO: 46142 - DNA, 783 bp, Manihot esculenta
  Intron number 1 from transcript cassava4.1_007521m (locus cassava4.1_007521m.g) derived from phytozome v7.0 (chr-ID scaffold07543; pos 194062 to 194844 reverse strand)
ttcaacagatcaaggttagcttttgctgccatcttgtctcaactacctggtgcatttgataggttggtgcactacttctagagaatatatgaaaatgtgttgctttgttttttgtttctataggtatatattgtgcttttaatagtaattggactagtaatccaataattgagtgtctaatctcacttgtcatttcataaatgcaaatccaaatgtgcttaattgttaatatgaaccaatgtttgatgatggggaatggtttagtaatcttgattgccttcagttcagttctggagtctgtttcctggatgtgaagtttcaaaaagcaaaatcttgaaaattcttgatttctgctatgcataggagcttcatgttcaaatgccaatttgagttgtagtaaaactctgttgcaggaaattgatcatttgcctattatgtacttgctgcaaatgcaattccccccttctctttctctttctattttaacagctttagaactttgcattttggataaatcagtgatcaaattagaatgcagatcatttgaattcaacacccttaaaattattaaactggatggtaatgcttcactttccaaatctcatacttctcttctctgatttctatctcatagcttctacaattacatcacttgcattttagtgcttttccacatacagaacagaattattatccactaagtgctgcagtaagagacttgattagttggatgatcttttttacacaggattcgttacgattgctggtcctctggtcactgcc

SEQ ID NO: 46143 - DNA, 689 bp, Manihot esculenta
  Intron number 2 from transcript cassava4.1_027977m (locus cassava4.1_027977m.g) derived from phytozome v7.0 (chr-ID scaffold07104; pos 58549 to 59237)
cgattcgttgacaacgtcctcgctgtgacgaaagagtgagtcctcctttgcggttttgattgtttgagcatttgatgagaataatgctttctttttcttttctttctcttagaatttttaatgattttctgagttgctgaatgtgagggatttatttgaatttccggctttttttttttggaatttaatggaaatgtgtttctggtatgatagttttgtaattcatttaattttgaacctctgatcaaactgttgtaggtgtttagatttttgcagcaattattaactttgcggttttgaggaaattctaaagcttttcttttacccttttaattgaaattttgtttgaataatatataataggagaaatgcctaagaagatggtcctattggcatgtagctaaagaatgctggagcgcagtgaaatgaaattttttgcagggtgaaatgggtgcgatttgtattcccttatttttttcaaaaaaaaataaaaaaaaaactctgttgtaaatgattggttatctgctattgacatggtttgatccatatgaatgatttctttttgagagtggctacaggcttggtagagtagaattatgggctgttactagtgcttattcattagaaaagttcttgttttggcttttagtgcaggtcggtcaagacattcacttttgaggctttgcata

SEQ ID NO: 46144 - DNA, 88 bp, Manihot esculenta
  Intron number 1 from transcript cassava4.1_011662m (locus cassava4.1_011662m.g) derived from phytozome v7.0 (chr-ID scaffold03486; pos 45961 to 46048)
actgctttgtcagggttagtgttttattgtttcttcttaagatttgattttcttttagtttgtaattatttatttcttgttaataggg

SEQ ID NO: 46145 - DNA, 455 bp, Manihot esculenta
  Intron number 2 from transcript cassava4.1_015117m (locus cassava4.1_015117m.g) derived from phytozome v7.0 (chr-ID scaffold03386; pos 139529 to 139983 reverse strand)
tcactgtggatctcaataagcctcttgtcttccaggtaaaaatgcattgcccctttatatttttttcaatgacattattgtagcatttataaagccaaattatacaattgcaatttgcagacctgagcaattctattttattctatttttttatttatctaatttttcttgagctcttttcatcatgtagaatattggtttttaaaattttagaaaaaacaaagagggccttacctaggatgcaccaaactgtaacttttttccttgattttattgttaaatttggaatgggaaataagtgtcatttttacaattcttccaatattgcctttatgccctgctctatttaaaaacattgttaaatttgagtgaatattcatgttgttattatgagttatattggtgattttgatttctcgagattctgtcacaggttggtcatctgggagaagatt

SEQ ID NO: 46146 - DNA, 446 bp, Manihot esculenta
  Intron number 1 from transcript cassava4.1_025699m (locus cassava4.1_025699m.g) derived from phytozome v7.0 (chr-ID scaffold02658; pos 979308 to 979753 reverse strand)
gcaattttctggtcactttcaactacgcaactagggtatatattttcttagtttcttcaaactaatgattatctgcgtttctctttttgtttcttaaccttcatctctgggtgtcttttgtgaaaaaaaaagtgttgctctgtccaaaaagaacctacactttcagtaatatattacttccagagggaattataattttttttttttaattttaagatcagatacataacccagtactagaatttatggaacatgcaactggttttgaatttgctcagattttgttaatttaagggattgcgctcatgtcatttgagttttttccacttccaacttttctaatcatttaaggaatctattgagatgtctttacttttatctttctctatgcttgtcttgggaaaattttaattaaatgatattctcaagggtgcttgagtgggcgg

SEQ ID NO: 46147 - DNA, 710 bp, Manihot esculenta
  Intron number 3 from transcript cassava4.1_017159m (locus cassava4.1_017159m.g) derived from phytozome v7.0 (chr-ID scaffold00109; pos 212069 to 212778)
gcaggtgtagcgtctgggtgtgtttatcctacaaggtatcccctttttttcttcattaaaagcttagattctctttgaaagaagaagaaaactttgtaatcttgtaaattgtctaattttctggtgatgggtaatccacaaactgatgaattcaccaagaatctgtttctcgtctgttagtttcttaccataaacaccaatgatttgttctggtttgatgagatgagtcttggttggcagaactgccaaattccttcatttttgtgtcaaaatcattgaatttgaaccccccacatgttattgaaatggggtttttcttgcatcaatttcatgtgttttatttatttattttaatcaacagcgtaatagctaagaaattgataaaaaggggtagatctaacattcttaaatattaaaattctgcattgatatttttataggttaaggggatgcatctttacagctgtgagctgtcatgatgttgatatttcattagttgtttgtcctctttcttgtcaatttttctctgattcctcattctcagcttgacatctgttccccacaatctcacattttgattccatgtctgaatcttgatcaagctgatcaagtattgtgatgagaaggagtatgataatttgcctctgtgattaattttttctcttgtatttacagtactacagggacaggaaccaccactactccaacca

SEQ ID NO: 46148 - DNA, 555 bp, Manihot esculenta
  Intron number 1 from transcript cassava4.1_003339m (locus cassava4.1_003341m.g) derived from phytozome v7.0 (chr-ID scaffold09372; pos 7029 to 7583 reverse strand)
tgttttaaacttgtcatctgagaagaacaatctttgtaagtgtttacatcgttagatttttccattattggtaatgggattttgatgatgaatcattgaaatgatgttattcttgttgatgattagaatgaagatgttgggtttctgatcttaagttctgtttttttgttgttttaaggttacggccttgtctgcatcactgcatgttgccttcatttgtagctttctctttttttggctgattcgtagttttttgcttagttagaggaatttctgccttatccccaaccctttttgtctttcccatatttcgtttgtgtttgaattttagccatttacgttcccacgttggattctggttattgttccctttttaaagggattttgctttaaaaatatgagaattcaaaaatgaatttcatgaaagttcaggagacaattctttgttgttcctgtgtttagttttgatcaattatatgctgttaacttgatctgttcttgttcctgatagtgttgctttttttaactttttgttcgtttggcagaggaactaag

SEQ ID NO: 46149 - DNA, 406 bp, Manihot esculenta
  Intron number 1 from transcript cassava4.1_007312m (locus cassava4.1_007312m.g) derived from phytozome v7.0 (chr-ID scaffold12317; pos 99352 to 99757)
tcttgggtgcttgataatttatttgatcattattggtaaggatgaatcaatcttagactaattttcatatcttgtctcaagttgcatgaatgcgattttgtgttctgaagataccgtctagttgagacaaattttgttgatgggttcaatttgttaacccttttttgctcaaatttagctcatttcaacactcagaaggtcatttatgagacagatctttctctattttctttccattttttttcagattctgtgattagagtgggtaatactgggaatccatttgttttcagtttttgttctgtttcactcctgttataattaggcttcctgtttatgaatttcaatatttgaagaatcaggattcttgtagtttatatgcttgtcctttgtttttcctcagggg

SEQ ID NO: 46150 - DNA, 997 bp, Manihot esculenta
  Intron number 1 from transcript cassava4.1_008062m (locus cassava4.1_008062m.g) derived from phytozome v7.0 (chr-ID scaffold02973; pos 24843 to 25839 reverse strand)
tattttgcctgtaaagttcccccaattctttacaggtgatttttattcattcctttttctggagtttttcctcttgtgctatatgcaaggttgcattgctataaatgggctataagtgcattgacatatactttcaagacttaagttgttgcttaattttacttaatgacctaatataataatcatctatcaataacctaataataatcatcatacataatatataaattttaaaattgaaactcatcctgtaaaatcttctctttgaattcaaattgctctaagaatactttagaaattcacactatcatagttcaggtgtatcatgatgtgttatggatggttttcacactcagggtaccacaaccattttctggtaaagtgtaggtgaaaatcaggggttgtgagattgtatggtttttattggcttgctgcattgtactgcctgcaaaaatgacccatagcacttttgttttgctttcttcacctttgagtttattatgcttcaagatattgcaaatgagaaaatcttttgaggacttctgagtttgccttaggtgaactagttgaacttccactgaaatatttgtccggctgccatcttggcagcatcgttttatcttgacacttgagattgtaaatgggaatagtggcatacatagtctgtcatgtttcatatttttcttgggcaaggtttttggaatttggatatctaaggttcttaattggtacacgaaacagttagaatgaaggcatagataagtcctcttgtagttgatatagctctatttttgctgttcttttttgtaatccatgtgttacttaggagatggagttcagtgagttttgtagctattctgtttatgactaattgtaacttctccgttaacattttgaaataaaatcttgactagctttattcagttaattctgatatttccttcatttgctctatcttttagggaaaagacgaccttggagagcttttcttttgtat

SEQ ID NO: 46151 - DNA, 885 bp, Manihot esculenta
  Intron number 1 from transcript cassava4.1_023355m (locus cassava4.1_023355m.g) derived from phytozome v7.0 (chr-ID scaffold08446; pos 134678 to 135562 reverse strand)
agttagaacgtgcccctcccaagcaggtaacatttcatacggtgtttatttaaatatcttcaatttctgcttatgttgaatttttctattttttttatttgattgatgataacaagaaaaaaaatgaaattaatggttgaaatttgaaaatcctagagaatttcaattttttgggttttgaaaactgggatgcggatgggtatggctattgttgttgttgagttctaaaattggcttatggggtttgtaatataacttatgaatgataatattagttggaatcagaaggaaactttaacctctcatttgggatgaatggttttgtaagaaaagaatttaaatgaattcttgcaaaattattcattattttatgaatatacataatgaaaaattttcaagttaaaaaagtttgaatgtttttattccaaacaagaattttgcaagaaaataattgaattgaattgaattcctataaaattcttgatttaaaagctgtataaagtgaaaatcgcagaaaatgagctctctgatgaagacttgatgggcttagttgacgcaagaaattaaacacgaaaactacattaattttttactattattttcttagtgaatttcctatatccagatgtattttaaaaaaaaacaactcaagttagagaaagaattagtagttcttgattcttgtttttcttgacttgggaatggggatgaaatagaaatgaaggtcagaggtgtcaattgaatagcattcctgctttgagccaaattttgaattttagtatcctctttccttttcctttcaagcctttttttctcctaatttttgcttaatgcaataaacatttaatttgcagcctgttaccaagtttggttccttcacaattg

SEQ ID NO: 46152 - DNA, 978 bp, Manihot esculenta
  Intron number 2 from transcript cassava4.1_007158m (locus cassava4.1_007158m.g) derived from phytozome v7.0 (chr-ID scaffold07478; pos 135792 to 136769 reverse strand)
ctgagggaggaggtttacgtggaacaacttggaaggtaggattctattacttggtcttttcctttgctttatgtaattctattgtttacttcttctgtttattttggtaatggagaaattttaagatttaatgcagcaattgatcattggattttcatttgaatttgtgttgtaatgaattctttgtatagtggtgatagttgtgacttcatattttagatgttcaatatgcttgtgaataactacagctccccaaagggtttttctgctttctatgtccttacatgaagaaaatcccataactatgactgcattctcatgcataaggtcctccatgttattttagacattagctgagacagtctatgaatcatagtcatatcgttcaacccgggaaatttctatttttctactttggatattcaaatattgtaatttcaacaatattattcgcttgtgctgaccttttggatgtttgaacaaaatgaactatccatgcaaacattgctgttgatcataataaaaggagattgcaagaaacaaagacgagaatgagacttctgtcactctgtgccagaggaggtctggattggtatacaggcaatctaaagcatcttgccttttgaataattcaaagacttcctctcgtatacagcatttatgttgcaaatagctgttggagttcaaggtttattgtcagtatgaatacagaactgctagcatcattatgtagtcacaacaacttggcatactgctcatcctcagtgtatcagaaaatatgtggcaacaactgaattgctcattataaagaaaagttcaaattaattgttatgaaaatagggccatagatctactcatcataaacgctactaagttcaacctttaagtgcttgttgttatgagggagtcctgaatattctaacatttcttgaactgctggcagcttcttttaggttatttgcctccttctcgcgactt

SEQ ID NO: 46153 - DNA, 790 bp, Manihot esculenta
  Intron number 5 from transcript cassava4.1_011200m (locus cassava4.1_011200m.g) derived from phytozome v7.0 (chr-ID scaffold07520; pos 179706 to 180495 reverse strand)
aactaccaggtattggatttaataattttttcttcaacaatgccatgcgtgcaattttaaagtggtttctgcatctttaataaacttatttttgtttaatatttttggctgggaagtgtgaatgtatatgaatgaaatcatttctctgtgaatttaaactaataaaaccagatcgaactgtaaacttattcgagtttttctgtaatttaatatgattgcagagcaaagatgttttacatgttaagagaatcgaggctatcaaagtttttgtaagaaatatgtttttagaacctttttgaactctgttgtaggttttccaagtcgatttggaataacttggttattttgtgcaacatcttttcatattttttgatgaggctttaaaatggcatttcaagcatgggattccagcttgtatgtcaagttagcaggataatgtaggtttactacccattagttgtttgagtaaccgtgcctttggaaattgctaagaggaagtatcaattcagctttagttgctagtgtagttgaaggtgcttttatcggacatttgatcaaagttatatattgatacttgataaacatggataacatttaagttgagttcaactttttgggaagccaagttttattctgactgtctttaagttcattagtgattgattttgctgtttactatcttcatttgcgttgagttttgttgtttatatctttccttccatagttatttgattaacttgatgttttctttaacaattatgtgttggtgattgcaggaaaacattaggcg

SEQ ID NO: 46154 - DNA, 837 bp, Manihot esculenta
  Intron number 2 from transcript cassava4.1_029170m (locus cassava4.1_029170m.g) derived from phytozome v7.0 (chr-ID scaffold03750; pos 867609 to 868445 reverse strand)
agggtaagcgaaacaacaataattttggataaaatctaactaatgatttctatacaaacaggaatttaaggttttacggtgataaacaacttgatttagaatttcaaaaatactaaaatcactagactaaaagcatgtttgtatcttgacactaagttttccaaggtaaagtaagtatttgtaaagtaatgtatttgtttggagagaataggttttttctaagcagtgtaaggtttttggagttttgaaacgtccaaaaactacactttttcaatctaccaatggaaaggtattaatgtttttccttccattaccttatcttattttcttcatttcttcctaatacactgtaagagggaaagaaatccagcaggaacatgatgataggacaataaaatgaagaaagcatatcctgctaatatgacatgatataatatgatatccacagcagaaatcccttcaagcaaacaactttctgcttaaagggtgacctaagtgcataaaacatcccgtacttgtgggctttggggatggttggtgtacacaaacctagtagagagtttgtttccatcattcggatccatgacttccagcttggtttggttaaatcactgagatactaacaatccaacagtcggagaaataactatgtcaagttggcatgataaatccgcagttcaatttgatggaataagaacgagaatagattccttactcttctcttttctcaatcctgcatctctgttttctatctcttcaatattacttgcatccatttcattttcactgaaatatctcgttaaatcaaataaaaaaaggtcttgtttttacagttag

SEQ ID NO: 46155 - DNA, 357 bp, Manihot esculenta
  Intron number 1 from transcript cassava4.1_014756m (locus cassava4.1_014756m.g) derived from phytozome v7.0 (chr-ID scaffold10469; pos 173046 to 173402)
ttttcatttatactgtgcgcttgacttatctaaaagtgcgtcactccctttcttcctatctaaaggattgaaagtaccgtgactattgctctttctcttatttgttaatgcctgagaccgatgggaaatgggaaggattttcttcatgccttttcatgaacagcaatgcctaagaaatacccataaaaaaaaaactaacaaatttttctttgtttttcagctattcattcattctttatttttcttttttctttttctttttcccccttttgtgaatagatgtttaaattgtatctttgtttatcttgtaactttgatctgatggttacagatagacacaaaagatatccttttcat

SEQ ID NO: 46156 - DNA, 331 bp, Manihot esculenta
  Intron number 4 from transcript cassava4.1_014756m (locus cassava4.1_014756m.g) derived from phytozome v7.0 (chr-ID scaffold10469; pos 173845 to 174175)
aggatcaattggttcaagtgtgtttaactctttgaagtcattattaattatttatgttttttgaatattttggatttttttttcctgttgatagcctattaacgggttcctcttaagctctggagattaagtagcatttaagttgtctttgaagttaattttgtttgctttttcatggaaaaccatttgtactttcttatgttttgagcatgctgtaggcaaaacggggtgtggggagggaagaatttgcaatctgaacaagttaatgacttgagttttctttaaggaaattgacaaaatatgatgcaaattttttgtactgtaggtcata

SEQ ID NO: 46157 - DNA, 558 bp, Manihot esculenta
  Intron number 1 from transcript cassava4.1_031341m (locus cassava4.1_031341m.g) derived from phytozome v7.0 (chr-ID scaffold03171; pos 987 to 1544)
ctctttcatttcacgttcaaacgacattcttccaggtttgccttctcacatatcatatccttcattctatatttttactattaacatttgtcaattatctgatatttgttgaaaaagttgacgagcagatataacagcactgaaactttcattcagaagaaaaacctattttaagtaatttacttattcttactcatttttcattggaaaaagagaaaatataaaaaaaattatttattgtactgtttttcataaatttccattagaactaaaacaaagtttcttgtaagaaacattccatagagaagtttgttatccagggaatcaataccagacaaagtactagaaatttgaatatggaatattttattatgtcttttcgtggaattgaacctcggcaaaaggaaaaaagaaacatacatataagaatgtccacttgcccatagtatttgacttatttctctctcatatcatatggctttggtctgataattgcaattggtataattttttttttttaaaggaaaagaagaattgaaactaaaggcggcgttcaag

SEQ ID NO: 46158 - DNA, 407 bp, Manihot esculenta
  Intron number 1 from transcript cassava4.1_021435m (locus cassava4.1_021435m.g) derived from phytozome v7.0 (chr-ID scaffold01608; pos 258796 to 259202)
gggtgagaaccactttggtagttagtcgcagccttcattagtttatcctacctgccgtatccatgagattctgcagaaacattatttaatgattgatcgtcaccttagtaagcttttgccttaccaactagcttagtagacgtgggcactttttggttgattcctccttttgaattagctttttgggaaatttatgaatgcacaatttcaacaaaatcttgcaatttctttttagggaattgaaaaactgcttgtgtgcctaccttttatattaaaatttttacataatttattggttaagtgttcttttgtctttctgctgcttagtatgagcacatatgagttcatcgtcttctcgcatatgtaaccaaaatttgtttatttattttcaggcataagtgacctat

SEQ ID NO: 46159 - DNA, 629 bp, Manihot esculenta
  Intron number 1 from transcript cassava4.1_004355m (locus cassava4.1_004355m.g) derived from phytozome v7.0 (chr-ID scaffold03079; pos 166922 to 167550 reverse strand)
tgatacagtgttctcatcattagaagtaggattaggtgagttccttcaacatttctattttttttttttttttaaaaagttgggagttctgtttcaacttactaagaatgtggctgcattttgtgtgaagcttttttgggtttttataaatttctagctgaatgtatctcctattgttacattagggttatttcaatttgtgtgaatagaatcactcggatttgaaacgtttgaccagttcgtgttatgctcttaagaatgtctcgaaaatgaaatcaaagtggagtcatttgccattgggctagtagtacatggtcgagtgcctccctcattgccaacaattaacagaattcgcaattaccagaaagaaaaagtcaagtgattttacttatctgagatctcaccaaacttggattagaaattctgtgattgtggtaacaataattcaataataataagaatttcttctttttttttcagttcaacaagttggaatgaaatggaatatatgagtgatttcatcttcactttattctgtgtttaatatgagagaagtggcctttttgagatatgatattctaagtttgtattattttttctttttgttttttcaaactcaggctcaggac

SEQ ID NO: 46160 - DNA, 494 bp, Manihot esculenta
  Intron number 1 from transcript cassava4.1_005593m (locus cassava4.1_005593m.g) derived from phytozome v7.0 (chr-ID scaffold11425; pos 498010 to 498503 reverse strand)
gtggtcctctctctctccctcctgtcgctgacgaggttccccttctctctctactctcctacctatctctagtctttctacgatttcatttcacattggtttgcgattctggggatatgggtgcatttataattggcgatacgcgtagcttattggaaattctgggatctgggtttcctggctctttgataaattttctttggttggtgttgaatttagttgtagtttgcctttttgaagagttcgactgatgggtatttaaagagattcatgttcattatggcttgctagagataactgggattttttttaatgtcttggtatagaccaacaaatatatacataaaatatgatacatctgacaatttgctccatttggttttgtttacatctctcataaaagttttgatttgtgtttttgtattttcctttaaaatttatataattttatggtttcagatccagcagaaactgaaagaaattcccagctgata

SEQ ID NO: 46161 - DNA, 505 bp, Manihot esculenta
  Intron number 1 from transcript cassava4.1_001319m (locus cassava4.1_001319m.g) derived from phytozome v7.0 (chr-ID scaffold03741; pos 800329 to 800833 reverse strand)
atctctctctctccctctctagccctaggacacaggtgggctttttttggttctggtggtggtttattattttttcttttttaagagggcagtattaatgcggtcttgcgtgtgtgatcctgtattatgaagagggtatcttcaattttctcttttctttggatatttttattgcattttaatttggttggttgtggtggtgttgcttttgtttttttgtcgtgtaaagaggatgtgaacgcaatcaatatgttataattctggtggatgaaccaggaaaaaatgaatttaaagaaattatctgttcaaaatgggtgtgttgttctttatttactagcctagattttcttaagattacttagttttcttcaccttcgattggtttttgttggtggtaaggtgtctgtgttgttgtctgatgaaaagcttacgtgctaagagttcattttatttgctttaattccaagcagggagacggcatttatagttgagaagccgagttgtt

SEQ ID NO: 46162 - DNA, 1018 bp, Manihot esculenta
  Intron number 2 from transcript cassava4.1_006562m (locus cassava4.1_006562m.g) derived from phytozome v7.0 (chr-ID scaffold06715; pos 28350 to 29367)
gaattttccaagaaaataaaaggagaggccagtaggtaatcttccttttaggctttggttctttctatggatatatgcatatgtagctggtatttgttatatttgtgaactttaggtctttgattttggaccggggataatggtgtttttgtgcctcctaatgctgagcacgctgcattttctcgatttaacttatagagcagtagtttatgttaaacgagcgttcattatctgttctctggatatttcctgtcccaagcatactggtaaaaatctgcacatgcttcctgtgatgccagcaagaggtatacaatttttttggtacttactagggggataaattatatgttttcagcttcctgctggtgggaatgctggttgagcttttaaaaaggattttcttaacttatataagctttactcccaaatttattgggggaggttatattgatccttttccaccacacttcaacttaaagctttatccttagacacctcaacattatacatttttttcaattcatatcgtggtttatgattaagtttgatgttgattcacatatcataatcctccttgctggtttgggaatggcttcatgatatctaactaaagctgtgcccttacctgactgagctggattttgaagaaagggggaaagagaaaaaataatagttgaagttggagataatttgttctgatattgagtttcattatgatttcttttgtgttttgagtttcattttctattcctttgtttaagggaagtctggttttgagatacaaggcttttatggcagtagcttgagtgagcaagtctcctttaagaatccaagttcaattttcatggctttgttaaactgggtccattccccagtacatttatgtgtttttttttcctttgctgttttcactactctatttggtatttccttctctatatttacctacagaattaatatgtttgctattttgttggatgcagaaatcaagaatttcaagagtcagtcaaggagctga

SEQ ID NO: 46163 - DNA, 288 bp, Manihot esculenta
  Intron number 2 from transcript cassava4.1_013284m (locus cassava4.1_013284m.g) derived from phytozome v7.0 (chr-ID scaffold03750; pos 1034171 to 1034458 reverse strand)
tccctgtaagtacctgattatgtttttctcttaattatttaataaatatttttgctatttaatgtttagttcatataatttcctttgttgctgaatctacagaaagcttttacgatgaaaaatcactacaggcttgttaggtttttgatttggacagcaagtagaagataatattaaaaattattttttaataaaagaaaaagggagtttttcaattaaaaatttattaattttatttttgtttccaattaaggtgttggcacctctccccattggatttgctgtgtt

SEQ ID NO: 46164 - DNA, 524 bp, Manihot esculenta
  Intron number 2 from transcript cassava4.1_012014m (locus cassava4.1_012014m.g) derived from phytozome v7.0 (chr-ID scaffold04024; pos 167963 to 168486)
tgtggtggattacactgttcctgcggcagtaaacggtaaatctcatgtaatctattatttaaagaaacagaagagaaacctgaattgctcattttgttgggatattgaattctataacaaaaaaaaagaaagaattgatttaatagctctgttctataaaatgcgggtatccacaattataggataagtccaatctgaataccctaaactaaaacttgtataactgagaaaaaattgcctttatgtttcctagcacttgcaatgaatatcctaaattttgcttcttagctatataatttttttcgctctttatattctaattgaaatgctttaatttgattacggtttattcatattgcaaatactttaaaatgatgcagacctcattcattaaatgaaatctgttcacttgaactaagttcccatgtatgtatatttgtgagactttgttacagttttagcttccatgcacacttgtctgatggcttctgtcttttctggtcctgttgtatgagatgcagata

SEQ ID NO: 46165 - DNA, 852 bp, Manihot esculenta
  Intron number 1 from transcript cassava4.1_006614m (locus cassava4.1_006338m.g) derived from phytozome v7.0 (chr-ID scaffold00172; pos 3605 to 4456)
cccggaattttgctcaccgtctcgctgcttctgaggtctttccctctgttctagcttatccttcttcttttctcatatttttatagtgtattgagtgatgggtatgtggacttgtatgcttaaaatcattttgaattggatttttaattttgggaattcttgattaggtggatagcggatattttttattattattatttgaagctaatagtggttgattgatttttggtgaccatatgttagtttgttgatatgcttttgtatttattttattagctatcccactttcaaatttcaacggactgatgtttttgggttataagtattcattgaggtcggacggttcagatgttgcactaggaggttctgatcacaatttgctattctaagaagttttcttcttagctttacaaatgaaaaccaactgaactgaagtggagttgatagtgttttctgttggttgagctgaaattagtcaatggggactatctggatactggatattgcattttggtgtttatagatggatttatcatttggaagtatgtatgtttgatcattgctctggcttttgggattaattatatattttcataactgcaattcgaaaatatatgaaaatatagttgataaataatatgaattccacttcacaaaatggaaaagaaagggaaattacaaggaaaaattatttgtttattaaattatgctttttttttggggggggtgggggcggggtggtgatggggggtggctttactgcttgagaatttttatcagtgataaagctctgaagaaaattttgtcttcttttcaggatcttgtactgcgacttgatctatacaagaagct

SEQ ID NO: 46166 - DNA, 622 bp, Manihot esculenta
  Intron number 1 from transcript cassava4.1_028824m (locus cassava4.1_028824m.g) derived from phytozome v7.0 (chr-ID scaffold10899; pos 118098 to 118719)
gcaagttcaatcaccctgtaagaaggaaaaaccaggtaccacatacgcgttctgtatttgtgtgtatacagaacgaacggctgtgtgtactttttgtgtatgctattgcatcatatttagttagatgtgagaactcattttttcctttgatgggagattttttttttccgttttggattttgttaggggatttgcagggtttggaagaagtatttttaagagggttcttttttgtgtgtttttcaaaatggtaaaagtggcttatgcttttattgtcagaatatgagttgcagttgtttgtgttgatggaaattggaaaataattgtagggtttacattttatgttggcatggcaattggcagtgtatcaagtgaaggaaactggtaattgttgctttattaagcatctggtaaatttagatcgtctaacattcttaagatcatctgattcaatatattaacttttctctcttctacttcttatccaaacaagagaatttaaagaaatcaaatttcttttcttttctcttctctttaattccctcaatccaaacaaagcattaagttgtgtttcaaaattttgcaaggctaccaaggagaagctgaaggaaagagaggaagc

SEQ ID NO: 46167 - DNA, 703 bp, Manihot esculenta
  Intron number 1 from transcript cassava4.1_004419m (locus cassava4.1_003110m.g) derived from phytozome v7.0 (chr-ID scaffold11661; pos 145067 to 145769)
accatcatctattccccaaagccatttctcagctggtacttgttctttctttttttaatattcttttcttttgtttggctgctgagaaaatatagggtgatgggtttttttagttaaaggaaaacttggttgtgcccttgcttttctagttatacagggtgctgatttctgtccagtggagtttagtggactgattagggatttgaatatccttacttctatttaacttaatggtatcaagctgcagagctagggatttttgagatctcgattattcagattttttttgcataattttcaagtaaattttgtattcaatttgagctagtatgggatttatacttctagccctcgtttaagttgttctattaggataatttgcatcctgccatttttcgttctattttttctagtgatcacagaagaagcatagtctattaaaaaacccatatcctttttgcggagacatggcatcctgtaacttgcgcggtccaggaaacccgttttagcaagtcatgaaaaactgactcaatctttttacctattaactataactatgaatcaattaatcaatttgcttgcttagttttaggcttggagtttgtagacttgtttaattttctaagtctcttaacttatgttttgcctttttgttttgtttcaataagttggttctagcataggttgcggtaataagctgaac

SEQ ID NO: 46168 - DNA, 802 bp, Manihot esculenta
  Intron number 1 from transcript cassava4.1_025355m (locus cassava4.1_025355m.g) derived from phytozome v7.0 (chr-ID scaffold04796; pos 334672 to 335473)
tgtaccaaagttctgcttccatcactaattccaaggtaagtagaaattttctcctttcttttttaagtatgaaccattaatctatcatttgctgacttttgtaggtcttctactttctttagttgataattttttcattgatagtagatacgacagttaagggcgtcaaatttcatttcttcttagttttatgggcaagaatttccattttgactttctacatttttttatgcttgtgagcctatactcgtgtgctattgattgttttatacgagttactgcctgagaaacgcaaatggaggataaataattctgaattggtccaatgccttgaagtttgcatgtgcatgtttagttagctgacgctatttgggtcataattgacactatgactctaagcactgtagtttaaattgcatctaatggggaggtcaaaagtttattaatccaatatttctttatggaataaactaaaaaactagcaaaaatccgtcaaaaaaaaaatgttccgaagttcctgtatttcaagtaaactgttcatttggtcagtaacactactggagaattttaagttcttaactctggtaattgccaagtttaaataaggtcaggatgattcagttacaaataaatgtattacgagtttgtaacactttagagaatttccagattatctagatttgtaagatgctaattatgcctctaatggtgtagtggtagtagtgatagtgttatatgccgtttattgtgtggatgtacatgattttattttcttatttgggtagggatttgtcagccgaat

SEQ ID NO: 46169 - DNA, 809 bp, Manihot esculenta
  Intron number 2 from transcript cassava4.1_024467m (locus cassava4.1_024467m.g) derived from phytozome v7.0 (chr-ID scaffold01012; pos 167061 to 167869 reverse strand)
tggcacttcttcatcatcaagattaaaggtaagagatttagccagaattattatctttcctatctgtgatgtgggatttttgtcttcaataatcgcgaccaacgaaccatcaagataaagttcgattggcaaaatatatcagatatagaaaatacactataaaccctatcttgaaacataagcaatataaaaagaaaagcaaatataagatagattatacttttatatggaaatagttaatgtgaaagatttctggtttgcatatcacaaatagcgttcaccagagaaaccctagaagcaagaagctagtagctagaggataggaaattattcttactctccatgtatcatctctcatcttcatatgggtttattattcacattgaaggaggatctcatttatgtatgagtgtgtaaaaatgatttaggaactctttgaaatgcatttggatagacatgtttatgagggaatacagttcactacttgactttatgcagtaaagaaaagaaaagcatcgtaggctatgttttctttatgttaaatggcatggagagagaaagaaagagaggttagatctatcaaatttaatcattgctcatgattttatgtaccattatcatttttagatcttccttttttccttaccataacattaccaactctttaataaagaataccttatcaacactatgttgaaagagtctttgtttcaagactttaacttacttgtgactttgcttttgttcctgtttatttttctcctttctaagattttcttttgattgatttttcactctataggattcct

SEQ ID NO: 46170 - DNA, 967 bp, Manihot esculenta
  Intron number 2 from transcript cassava4.1_012016m (locus cassava4.1_012016m.g) derived from phytozome v7.0 (chr-ID scaffold03252; pos 165563 to 166529)
gcttgcagttctttgttggggggaattggaagtgtgtaagtatctttgttcctcactgattcaatcatttctaacttgtttctatttggtttatatatatatatatatatatatatatttactttatcactatcattgttacttctagcgtattgtttcctcattaacttgtgtaattcttgactgaacttgaccttgaacaaaagtgttgctagaccattataacatgcctttgaacaaaagtattgtcggacccatctaagttgacacaatgaaagatgataatcttgtgttagatctagtaaaataagaagaagatgcagttatttatttagaacacattttaaatctgcaagtgtatgtttttgacctttattgggaatatttctttacactttgaaaattacgctctttgcattcactgttaatgacctcgtaacctttctcactgatgtattcataaatttgcgagatttggtgaagtgttttttgattgaattgataatatctccattgccacataagttatgaaaaatttgaagtttatgctggttattcagatgcgttcctgttctttatattgttattgctgtcagtgtgggtttcttctgtttaaacgtttaactatacacttttcatctgtgttattgcaacgattggcattatttcctttttgtaagctttattattatgaactatttattctctggacactgcctcaaccttttaacaagttctgatgattctttttttttttggtcatgccatttaaattatagtgcggttacttttatgtacatttctcaactttagtttttcctgggttctgagaaggtctttagctttctgtcttttctttttgttagcatcttggtgtgggtagtggatagtgcggctggatagctattgtatcctttcatttcttctctttggtttctctaattactttatttttacggtttccaga

SEQ ID NO: 46171 - DNA, 486 bp, Manihot esculenta
  Intron number 1 from transcript cassava4.1_000522m (locus cassava4.1_000522m.g) derived from phytozome v7.0 (chr-ID scaffold07351; pos 104884 to 105369)
ttgactcgtctcgctctccaactcagcaggttcaagtctcatcctcctcctagtcgcattacttccttaattttcaagtttaattagctttattaaggtttcttaaagagttgttcttgggtcgaaattgttcaattatttatcaattaaagtatattatatttcaattgttgtttttcttttctgaatgaaagctattgtttatgcttaaaaacgcacatttacttcctgtttactagtgagatggttttgtttatttgtctactaattaatgattattttacctgaagctgggcaacttttgttgaattgggagttcaatgttactgcattatctaatttcctttcaaaaaattgtaaaaaccaaaagcttttatctgtaggtagcctgcatgtaattgcatgtttaacataatattttgctagttttgactagtttcggaaaatttgctcaattcatgtgtcaactacaggcttcaagtctgg

SEQ ID NO: 46172 - DNA, 938 bp, Manihot esculenta
  Intron number 1 from transcript cassava4.1_031415m (locus cassava4.1_031415m.g) derived from phytozome v7.0 (chr-ID scaffold05531; pos 34376 to 35313 reverse strand)
ttggcaaaattgggctctgccaaacttagtggaaggtattcaccatttttctttgcttgtattaatgtttccaagatggcattttgttttttcagataacataagtaaccagcataattttttttgtttgttgttcaactatctgatataacttgcattttatctatgtttaattattagatatcagtaccatcataagtttttaggattgggcattcccatcttagcattgttttatgtatcttagtgacatctaaatggatctagctatgagccagtttggaaccaaaaccaaaccaaaactgaaaccagtcaaacccagcattgaactggatagaaccagctagttggtttctggggcaaatggatttttctttttaaaaaaatttgaaaacatttccaaccatttgggcttagtcaaaatcagaatcaaactggactataactgaattgagtcagcactggggagacttgaaaggctggttcttgttcccttgaactttgaacaggaaccaccatgggttcaggcttggaactatcttttagccagtcttcttctggacaccaacattgtttgacttactaggagttgagtttgtgttttgcatatcttgggcctctcctttttcacatggctgtgctgcattggtagtctaactttgttagtctcaacctcatttttcatcatattatgaaattgccaacggtctgctttaatttgttcaacgatgacaaatggctctctttaccagcctaaactctttgttcttgctgttccttttctgttaattagagggaattctagagggttactcctggttgcttgattattaattgtgtaaattagagggtatgcattttgttgatttgaattcattttattcctctgaagtgctactttgtctctaatggtttaggaaatgcaggtcttctcccaa

SEQ ID NO: 46173 - DNA, 455 bp, Manihot esculenta
  Intron number 2 from transcript cassava4.1_014801m (locus cassava4.1_014801m.g) derived from phytozome v7.0 (chr-ID scaffold09764; pos 5778 to 6232)
cctacgcgaaagggtaagtttccttccaaaaaggggaaaaaagcagaaagtgaatttataatgttcaggattttttgtatttacttcctttatgcgcttgatccattaaacatgtccaatatcacgtatgtagatggctgttccaagtcaattgccaccctatccttcttatagatcaactataatttgatatacattacgacatacgtagatttgagggaaatacctcttatgcttgtgttatcactcaagactgttgcccattctgctttgtggtcgaagttttgattttatcatgataacatcaaacacttggctgtacttggcataacatatttttgggataatcagggaaatgcacgtttagttatgattagattgctggtgctttaacttatcagagagaagaattttattcgattgaaaccttttcttctctgcagcaataacaataa

SEQ ID NO: 46174 - DNA, 508 bp, Manihot esculenta
  Intron number 1 from transcript cassava4.1_003113m (locus cassava4.1_002974m.g) derived from phytozome v7.0 (chr-ID scaffold12118; pos 269189 to 269696)
ttccagtgacaagggttttagctctgctcctagttgagactctatcactttctgttgtttattaatgtgaatttctgtatgcggatctatgcgcttccgtgtttgtgcaacttctttgcttttatgtacttttatattgttatctatttcctttgatgtttgtttcgtttccttccttgcttagtgcttaatcttttgactttgttgctacactcagttctcattgttttgaggcttctaattttctttccattactatatgtatagctattaggcgatttaactgaataattgggactaggattaagggggttctgttatttgttttcttctatgcctttggattttttttcgaaggtgcttaattaagtatgtggtcactgtcttgatcttgactttgctatttatttgctttgacgatattttgatttactttcctactcgatatttcaagattgcagattattctattctggaagatatttttatgactttattgactgcagat

SEQ ID NO: 46175 - DNA, 476 bp, Manihot esculenta
  Intron number 1 from transcript cassava4.1_022319m (locus cassava4.1_022319m.g) derived from phytozome v7.0 (chr-ID scaffold10469; pos 167689 to 168164)
agtttgttattggacaggataaagctaaaaaggtttggtttttacattgccaattgaattaaggtcaaatttggtgtaatgtatttgttcaattaagagaaaagaaagttttttgatagtatcaaacgatgtatagttaataccttagttttgttgaattgcattatctattaagaaatttttaatgcattgctcaattgtttgtctcacaataacacattaactgggttgattatgcaaatgaatacacgtgtgttttgattactggatggtgagggaggagataagaggatcagaggatggtaagacaaaatttattttagtgcaaccaaaatagtaaaaaggatatagtaatgacgttcaatataattttgtgcggcaagcttataagcacctctttgttttttgggtttgtattactgcctctttttaatgtaacaggtgctttctgtggcagtctacaatcactacaaacg

SEQ ID NO: 46176 - DNA, 544 bp, Manihot esculenta
  Intron number 1 from transcript cassava4.1_018414m (locus cassava4.1_018414m.g) derived from phytozome v7.0 (chr-ID scaffold02947; pos 17564 to 18107)
acttggccgctgttctcgagtacctagcagctgaggtaacttcttgctttcccattttgattttctgctgttgtgtggtttttagatctgcaattgttgtagattgtgcactccattgttatcatgggaagaccatctggtattttgtttactatctttagctgagctgaatttgatgtttttgttagttttggtcccaaatgtctgtttggtagttgggaaaatgatggaaaacggtgtgattctcgacttgtactttcttgagctctcataaatagcaaatgaaacttgaattttattttttcatgtccaatggtagtgagatgatttattgcccatagagttgaattagggtttttatgaggtaataagatttgagtttgtttaatctgattctgccttttgcttgctagtcaaatgtactaacgacactttttattaatttccctattctactgttttatcataggatcaggttgaaatctactttgctctgttctgatgcatagtgttattggggttcaggtgctggaattggctggaa

SEQ ID NO: 46177 - DNA, 857 bp, Manihot esculenta
  Intron number 1 from transcript cassava4.1_019067m (locus cassava4.1_019067m.g) derived from phytozome v7.0 (chr-ID scaffold09503; pos 3825 to 4681)
caaggctctcattagtactctcggtttcacttttggtgagtagttttcattagtaattgtattactttccaccagatgcgtttgattttatttttctttatttgcgttttcttgagattattccgatgagatcagttcatttgtaaagcaggttttgggtttaagatcaattgacatgctctgtaattcttttttgtttgtttttgcttagttatttttagatctaatatgattttatttccactaatttggtagaatactgctgttattgctctgtaattttggtccatcttaaatcctgcattgattcattaaacccccttttttgttgcccaaatatgaatgctaccagtgctatatgttatattttgtggaaaagaaaagcaacttggattttttcttttatttgcctatccgtgtctgttctttgtgtaggctgatgattatcagagcataattaattttgatcccatgctaatatgttctaagtgggtgtaattgtcgaaaaagaaaaaaaagtacatatactagattccaaaactttggttatgaatgggcgtctattccttcgctgttgctctatcctgaattttgcatgcaattacaggccgaagttgatggtagttagaggaaacgagttgatgccatgaataaaatattattttatcatggaagaaggaagcaggcagctattaatttttttcatgcacatgtttaatttgaataaccttttatttttatcccttagccttttgtttttctgatttctttatctttttttttctttcttattgatattacgggcgttattgggggctacagccacaacattgacgagctggcatctactggtcaca

SEQ ID NO: 46178 - DNA, 803 bp, Manihot esculenta
  Intron number 1 from transcript cassava4.1_026963m (locus cassava4.1_026963m.g) derived from phytozome v7.0 (chr-ID scaffold08757; pos 507316 to 508118)
ggagtgagcttgaacattctggaatttctgatcaggtacgacttcttatagttcatgtttcagatcaaatttttttattaagtatagttaattgataaaaatgtgatgctcatatttatttatgcacaagatttttcccaaaggctaactttggacacacttcaaattttgcccttttattagcatctcatctcaaccttctttgcaacaaagaaggcatagctttccccaagtggtaaataactccgctcatgttcaattttctctgcctatgttttatctagcaaaccttgcctactgtctgcaattaattgcattttcttcctgctaccggcttatgctcaattgaaccattcacttgcagcttctaccaccaaggataagcaggagtttccctgatgtctaatcttttattgatgagaacattaatatttttatttttggctacttcatattaccattaaaatgttgggggccaattaattgagtggcgaatagataaaaaggacatacattgccctttcatgcattactcagcaccatctgaactcacactgcaatttattgctgagaagagatcaggagacttggaactatgctatgaaaagcaaaattcgaccgaattgggttgaagcatgcatttctatagcggctgcagaaaccaagtataaggccaagtgttaaatgataagagtgaattaaccttggaagaattaagccattttgcatccactcgaattatgtactgctcttctatatgcttatcttattctgctgtaggcaccttacagtgaggagatcat

SEQ ID NO: 46179 - DNA, 724 bp, Manihot esculenta
  Intron number 1 from transcript cassava4.1_023380m (locus cassava4.1_023380m.g) derived from phytozome v7.0 (chr-ID scaffold03252; pos 28720 to 29443 reverse strand)
caaaaagagttgtcctgttgtcaaaactggtagcttttttttctcaatgatattcttatacttatttacctttttttttggtttgatgatcggcttagtcaatcagagtttgttccatggtctctagttcactttttaaatcagtatcccagatcttttctctgtaataattgtgtgcattactcaatgcaatacttgaacagctttggccctttgattggtgattggcaatgtctccacttgttgtttttgcgttcaaaacagaatttaacataaattttgtctaaagctcctttgttggaaacttggagtgctctgcacctgattctttcattatataggtaacttttttgtttgttttgtaagtgtttccttactactaactcagatgttgttaacataattctattttcatagctagccttgtacttagctcaattaaactttagctaactaggtttctgctggcatattcactatatgtttacctcaaatggagttctctggagtgggaagactatatgaattggaatgatttgtgcgaggagtggatctcactttatccattctgccccttgcttggtgtatgttggatctcaaagagtagagatcactgtcatccttctcttggtttgagttgtctttgttaatgatctttgcaatagattagtaatccatatgtctttcttcttactgtttcacacattttttccacagggaaatt

SEQ ID NO: 46180 - DNA, 638 bp, Manihot esculenta
  Intron number 3 from transcript cassava4.1_002173m (locus cassava4.1_001724m.g) derived from phytozome v7.0 (chr-ID scaffold01945; pos 454748 to 455385)
ttcctaaagttttctgtttgtgtacagatccgaatgtaattggaacttcattttacattatggaatatttggaaggtcgcatttttatagaccccaagctaccggtatggtcccctccctccctccccgccctcaaaaagaaaaaataaaaataaaaaacacaataatttggatatcttgtgattgctgtgatataagtttgaggagtagaaaaatcgagccaataattttgtttgatcagggtgtggcacctgagaggaggggggcaatatatcgagaaactgccagagtgttggctgctctacattccgttgatgtggatgctattggactagggaaatatggacggcgagataattattgtaaacgacaggtgggttgtattctaactttagatgtagcttatcaattctgctgcttatctgagttacatgctcatttgtacctagcaagggcacaatattgtagtaaaatcttttgtaacttaggttgagattgtttaatgtgcatagtgggagcggaaggaaatggagggggactgtttggaagaaaagtactgggggcttgaagtgttccttcgctacttagcggtggtacttgtgatttattttaatttgattctttttctaggtagagag

SEQ ID NO: 46181 - DNA, 731 bp, Manihot esculenta
  Intron number 2 from transcript cassava4.1_002104m (locus cassava4.1_002104m.g) derived from phytozome v7.0 (chr-ID scaffold07520; pos 638574 to 639304)
tggcgtgcttgaggtaatgcttaactgttccaaatttgttttcccccacctttattgttagctatgacctcttctaatcttttttaatcaatcttgtgaaaataaaaaagatttttttcccttattggttgtagggctgtgcttaaaaatgtatattttaatttgtccttcaagtgaaacatcttttctcccatcccagaatatagcaattcccttttctgattttgagtttatttactcgcagctttataaggtgaaatcaagtgtcagtctgcaatatattctttaattgtttaaacaatatgcataagtttttttttttttttctggacaatgaatttgtttgtttttaatgttttaacttaaatgaaacgatcttgtgtattaataattgttgggttatttcattacactgaacatgctttgagttgtggcattatcctcctcctttagtgttccttttttcttttttaaatgttatcagttagtatggtgcttgtctttatattgtgctgaactgggaatcatagtttctcttaatattaggcttgttctaatggcacattcttgttaggtttaagaggttgcattatttctgtgaatggcttttgttgtcatcctaatcatatgcccctttccatgcctttttgctagagaggtgcaattttatgggagttaacttgaagcaaacccaactttgttgttgaattattatctctaggtgttcacag

SEQ ID NO: 46182 - DNA, 728 bp, Manihot esculenta
  Intron number 1 from transcript cassava4.1_014415m (locus cassava4.1_014377m.g) derived from phytozome v7.0 (chr-ID scaffold07465; pos 110485 to 111212 reverse strand)
taagtcttctatttctagtttgtattttatattaaaatttattcgacggctataattttggttgtcgtgtttgtttgctgtgcatagcatatgttcactacatatatttcttatggcgtttaccgtttttgttggctagctgtgtgatttataatgtaaaacttgatttattacctctttattttctacaaatttaatgaattcatcaatcttggggaatctttccatttttcagcacaacttttgcaattccttgtttgatatcatttttaatgtagtcaatttctaggttggaatacttcatgattagtctctgtttatatctgtaaattttttttttccagatataattcatcttttttctgtttactagctatcgtagtccatacatctactttcaagtataaagctatcagttatttgaaaactgaaattggattgagatctttaaatttgggttcttgaagtccatttccaagggtgagcaagcgtgctagttcttcaacaattggctatcttaattcttgttatgctcttgcctacatatagctttgctgagctttttactagttacactagttgtgaaatcttgctcatacctgtaacatttgagtggtgctccctgaacatgtcattattcattcaagtgcttgagatgacattcacagaagccacaaacatcatgtcaattttttatgatgatcctaaacaggtagaggatatcccaa

SEQ ID NO: 46183 - DNA, 892 bp, Manihot esculenta
  Intron number 1 from transcript cassava4.1_022499m (locus cassava4.1_022499m.g) derived from phytozome v7.0 (chr-ID scaffold02817; pos 115969 to 116860)
tcccggtcttcatctcaagaggaaccttggccaacgtctcaaagccaagctttaagctgctgagcagaaaaggtattgtttttgtttggtttgagttatttaatagaagcgtctgagcttgcttgatgggttatttatttacttctgattaggctcattagactcttaataagtatgatgtttaaacaaatagtttctgcaaccaaatgtagttatttcattgctggcattctaaaggttatctatgtgagcattaagtgtctccacagcatcaattatagccacaagatttatatggattttgttcagttggtcatcttacttcagtagtaattgatgatgatgttgtttcttttttattatttgctattttttccctatacctttatatgactgtcttttttaatgtctcctcaacttttgaagaggtttccaacatgaattatgacttctggtttttcctttatcctcattccaactcagctgcttcgtttcatttctaagaaattcttattatgttggatcagattcagaaaatttatttatgcaggcagaacatatgtaatcatctttagatctaaactccttgatcaatgtttaaacatacttgtacttacatgtaggtacttgcaaaggagtatattttctggtcccacttcaagttgttcttcctgacctagttaattctgatgtgttctttacatgtctgtacctaaattctaaatttataactatagttgctgcaatattttatgttgcaataaattttttggtttggaagatttacttatcttggaaaaatgtattttacattttgcagtaaactacaattttaagctcacatattggtctgacaggttggacattccggcaaaggcccaggggcgactag

SEQ ID NO: 46184 - DNA, 680 bp, Manihot esculenta
  Intron number 1 from transcript cassava4.1_012745m (locus cassava4.1_012745m.g) derived from phytozome v7.0 (chr-ID scaffold07610; pos 106795 to 107474 reverse strand)
accgtgtcttcttccttgataactctgggaaaaaggtgtttttcataaactgctttgtttttagtaaatgtgagaagtgaaagaaattgaaatggctgaatcttggactatcggatacctttttattgtagtttcgttttttctgttaaaattgagttgatgagtgcatataatttgttttttagttgttgtccctgttttgggtctttgattgaaattctcttaatttccatcaaatttctgtttgtttcccgataaaaataatggaatatacgattttttaagttcggttttggtaaatttcaaatctttttggcaatttctttagcgaattgaagaaattctttgaaaaaaatgcaatacaaaagaaggattttacaatagtttatccctgacatgagtttgggtccaagttatctttataggaggataatatatgacttggatttcttcaatggtttaaagcgcttccctttcatgtttttcaactttttgtttttgtcaaattttatttgtttatgtgcatgtgatccatttacgctactgcacggatagtatataagtttttcctttttcttgctgtcattggttttttgaagcagaaacagttttgtccattgcatcagttttatctgcttcctgagatgtattattgtttgccatgcaggtttctccttggc

SEQ ID NO: 46185 - DNA, 729 bp, Manihot esculenta
  Intron number 1 from transcript cassava4.1_018769m (locus cassava4.1_018769m.g) derived from phytozome v7.0 (chr-ID scaffold03741; pos 127200 to 127928)
ggtgagactatggtactctcctttttggattttaggtccttataactattttattatatgttccttattttttttttccagttttgagttgccttcaaattaaccttaagaaagaaaattgcttttgcgtaataataattgtgggataggtgaagaaatgattctatactccccctattgagatgaatgatatatttacgtttttcttagattgactcgattcaaccgacccaagcaattagttcttttatccttaggcgatatttggtttgtttattaatttaattatttcccaattatggcaacataagtttacgtaatttattcatcaatcttaaatgacagaatgggtcaatgttgtttaactcctaggtaaacaaaaacaaagcagaattcatctggtttataagtatctttttaggtatccttatttgagatttggatggttaacaaataaatagaatttcaaatgtgtgggtgagtaggtgaaaaaggaaaggggaggtagtgaaagattttcgaagttgataaataaacttctattattttaattttatgtaatattcatgtacaagtgattctagcttttgacattcatgtagttgcttctccatttggttcttggaaatctcttgtttgccctttttctttgccttggttgcttagctaatttgttgtgtttgtttttgtgtgttggaaatgtttgtaggaggtgggcttgggttattc

SEQ ID NO: 46186 - DNA, 786 bp, Manihot esculenta
  Intron number 1 from transcript cassava4.1_004841m (locus cassava4.1_004841m.g) derived from phytozome v7.0 (chr-ID scaffold07996; pos 115960 to 116745 reverse strand)
tcgctggtacagccctcgcttgtacgcttggcaaggtataaattttgtccattttatacttcttttcttctcattattttcaagattgtaatattttctttactggcaagcaaattaatccctatttctcagtaaaatattgaatacccaatctttttttagtttctaatttgaattattttttgttaacttgatttatgggattttcaaagtaattgttcatgaagtttgtagcacttgagatttcacatggtttgcttgtttctacctaatctgaaacaaagcagttcatgcgttttgcaatgcttggattgtcgtattattatatctaatctcgtttgaaggtgaaatgagtttttggcttgttgctttgatgtgcaacctgcatgaaagagttgaataataaaaaatcatttataaactaaaagaaaattttgtttcttttctaaaaaaagcttttgagatatattaacttttacaacataaagttacaaaatctgcaatagttcttttcttcttttgggttaaattcattggatgtgttcaaataccaaattaagagtactagcaaaccaagctttctatccatggttggccagttaaatacttcagggttgagaaatcctgtaaattttgtttgttttccatgtgaatagacgtatgagccatcgttgaacctgaacttggtttaccatcatatgggtatgttaaggattttgtttcagcctaacaaatgaccttcaaactagaagctttgattttaccatttttcatgcaaattgcagg

SEQ ID NO: 46187 - DNA, 774 bp, Manihot esculenta
  Intron number 3 from transcript cassava4.1_030896m (locus cassava4.1_030896m.g) derived from phytozome v7.0 (chr-ID scaffold11322; pos 13156 to 13929)
tggctttcagtcagaaaactcgccctgtatgttcctctctctcttcctcttgcttccaagttggtcggttcgatttaatcaaataaatgaaaaattaaaattttaatatttataaaaatcaaatcaaatcgattttaattaataatcaaattgaatcaaattaatctgatttaattcaattcataatcggcttctgtcttcagccatggagaaccactttaaaaaggtttcttaaactgagcatgcaaccaagagccatacaaatatttatttctgagaataagaagtagatcatagagttttgaacaaaatctatcaatatgtccgatcactccatataaataacaaaaggtgagaagtctttcatatttgaagtccacccaaaaccaattagctattggttgataattcatatccaaactgtaattattcagctcatgcgaatatgaaaagcgaatatgaaaatgataacaattagctcttgcaatttatgagaaaaactaaataatttttagaaataaaattactaactaatatattaataaacacaaagagattaggtagttagtttaatttaaaccagatatattaatcagtaagaattaagggatccatattccatgcatgtttctttatcttaaaaaaaaaatgtcaataaagaaaagaagaaaaaaaataaggggcaatttggcgtggcttaaaaggatgtgttgatctaactttcatgtattaattgcagggaaagcttccttctctgctcttccctattgaggt

SEQ ID NO: 46188 - DNA, 899 bp, Manihot esculenta
  Intron number 2 from transcript cassava4.1_014970m (locus cassava4.1_014970m.g) derived from phytozome v7.0 (chr-ID scaffold07852; pos 11389 to 12287 reverse strand)
aaagcgtggtcaatattgatatcgcaggtaacgattccggacactgagcaaggtttaattgaagtaggggctgacgtcagcgacacggaaagctaatgcgatttttataatcatgttgcaattttaaattctgatattatcaacaggagattgtgcaattttggtctgtatgatccagctttgtttgtattgtgtagacggatttagctccttttatgagtctgttgaactggactaatttggctagtctaatttatgctgggtgcacgctaatcctggtcctgctagaccagcgaacattgttctacaaaatttgaatatcatgtggtcagggtactaaattctagctcactgttgtttgaacttttatgtttggtgattttaatgctcaagtttatcagtagctttactgttgaaagattttaatcaatcttggttcacttggctgctaactctcagcttaaacttcttcaatgaagcttatattttgtcctgattttgagtaatataaatagttatccgttgtttgaattgccaattgacatatgtcgaaaaaaagaccctatgggactctttagtgtcaagagttgtcatgtcatgcatcatggcatgactatctggagttggcaagtccttagaagaccggaaatggaacacataaaattgtttgtcccaactaaacataactgtaagatttaagtacttgccaaattttttgaatttgttgggcccttgtcgggaaggatattactttcccattcaatatattttaaatgttaatcagtactcctttcttgattagggattttctttttaatttctcaaggattattgatttgaaaatcgtaatattaccaaatactgatgtcttcctggttcagctacacaagtgaaagacc

SEQ ID NO: 46189 - DNA, 698 bp, Manihot esculenta
  Intron number 1 from transcript cassava4.1_014970m (locus cassava4.1_014970m.g) derived from phytozome v7.0 (chr-ID scaffold07852; pos 12392 to 13089 reverse strand)
tctccgcctctcccttcggtaaaacttaagcgccggtaaatttctggcaggatattccttcttttgatcatttggaaccgaaattgccttcattggtcgctgaaaaatagctattaatatcaaaataacaagcgaaccttcgatttcccaacttccgttctatctaattactagatttcttttgttctttattctatctatggaattatttttctttctggttgcgtaatatcgctaggagtttgttataatctttattttctgtttgattcgaatttaattatgcatcgttgctggattggataaggttgttactatatttgagagtggaacgttaactatggaaagccaaaaattatttgaatgtcttaaggaagaattatcatggagtttcgttattttatcatttaatatctatggtaaataatgtcagaatatcaacattctaggtgcagcagaatatgtggaacatgagtttattcttgcatctctagtccctctgcccgttttctttatactcagtaatttgcccctgaaacacctctaaaaaataatcctcttgagttgaacccatattaaatacattgaagctcatttatcaatcatcgtcagtaatactggacttttcaatgtcccgggataagttcctcacatatttttcttcatgttggtcttatttgtttgtcacgtcaggtaac

SEQ ID NO: 46190 - DNA, 604 bp, Manihot esculenta
  Intron number 3 from transcript cassava4.1_013038m (locus cassava4.1_013038m.g) derived from phytozome v7.0 (chr-ID scaffold02572; pos 268808 to 269411)
gcatttcaggcaggtatggtgtattgacaacccagctctcttttccagtggtgcctttgtgttgtccttctgggttttattcataggccagacattttagagttcagatgagttggatttgttgtcttctttaagttgatgcttaaacttctagttccagagagattgataatgtgaatttcttaagttccatggtcctcgacaatgtcaaccgcataaaatgagtctacagagttatattttgactgtttcttccacctgtcttcttaaattaagttctttggaaaaggattttttttgggtttctacctctattcaattggattatttgatgaattaatgggtggtgtgactgaagtacactagatgattatatgaagtgcaaaaaaaaaaaaaattgataacagcaaaatttacaagattatcaacaatggaagaactaaacctttatttattatatctctttttgaaaattgagtttgttttgttatatttgatcctgatatggctcttttcctttttcttaaatttgtactccctatttgtgattctgctgttgtgtctttcaggtagttttgagtttacttgtagtattgtggggtct

SEQ ID NO: 46191 - DNA, 630 bp, Manihot esculenta
  Intron number 2 from transcript cassava4.1_007333m (locus cassava4.1_004746m.g) derived from phytozome v7.0 (chr-ID scaffold07520; pos 156799 to 157428)
tacttacctgtggactatcatagctggacaagctggtatgtttctgctgcgctgggttcttggtttttctattttgaaatatgaaattactatgataatgttttctctgtgtttttgaacttcactgttatagtttctctacttttagtagagttgatttgatccgatactacaattactggatggaatctaggccttgtgctgatagtatggaaaaaattgttcagtctcttctattagataacttttcatccatcaacgctaatattgcagcagcaataacttttcagatgttattcatgattttcctttttaatggagaaatgggggcttcttgtactctggaacaacaaagcagcatcattctttttatttttctgtccagcagctctaaattctagggccttatcatgtgacttttggatgtatttttgtttttccttaagttacatctgagcaagtgaatagtcttcacaagggattgtgtgcatatcttctatacaattgttagtttcattgctgttatgcactctcacttgataattgctccaactttctttggggctttagcaatgataattttctgacatctgttttggcaatgatgccaatattgtccagcaattatcc

SEQ ID NO: 46192 - DNA, 690 bp, Manihot esculenta
  Intron number 1 from transcript cassava4.1_014895m (locus cassava4.1_014895m.g) derived from phytozome v7.0 (chr-ID scaffold07543; pos 316162 to 316851)
accctcatctcaaaaagccagttttggagacttgagtatgattctaagttcactctattaatgcatatttctttcttttgcatatccatctgtgttttgcatatttataaagcctgggtttacttgcaaatttgtttattgatcataatgctttatgggtctgtgtattttcataaatcttatacaaggtggtcacagttgaatagaggtgcccttagcaggctaaaaattccagctgcaaaataacaagttgttagtatgcagaaaaaggccatggtctttgtgatgatggtaagcttacaattctagttacagccgtggtctccgcctaaacacagtcatgtctggtttgcttaaggccttagataaggacagagaagtgtgtgcaagatgatctaatgagcccacattaagcctgattctattatttaacaccctgtctgctaaagtttaaaagaattcatggaatctggcctgagttactccaatttcattagtgtttctgattctgattccttatttgaaacccttatccagcctgcataaccttgttaggccgttctggagatgaacattcagttgggaagaaaagctccatttttgtattgaaataagttgggatattgttaaagtaagcatttgtttgattgaagcatgtctgttgcttatgcaggtaacaatagggacgaa

SEQ ID NO: 46193 - DNA, 911 bp, Manihot esculenta
  Intron number 2 from transcript cassava4.1_020728m (locus cassava4.1_020728m.g) derived from phytozome v7.0 (chr-ID scaffold03344; pos 44342 to 45252 reverse strand)
gtttcgtcccagctcagattattgttcttgcttctcttttcatccttacaagaattaattttggttttgaggtttttcgattgttcttttgacttatgggaggaacagaaatactcaattaaatagctaaaaaaccactgtctcatgggttattatgctatgatctgggttatattagtcagctaatatcatttggccccaaattttaatgattcaaaaatgcactccttttttgagtccgctgaaaacttgcaagacctattgtttctttacatgccttcacatgtccaattgtatgattcctgactcaaattttccaaaaatctgcgactcaaatgctgaatgattcacatttaccttgcattattttttggccgagttatttccttagatccattgtttatcacaagcacattgataaaaatttgcagaatttctgtactattcgtgtcttaagtttgatgtggatgacgtggaagacttgggaaatccaactagttatcctgttattttctcttttccactctgctggacctaatctatgaaggaaatgtaatgattagtttcctattagaagattgatataaatggtgatgtgctcatgggagatctcgttgtgaacaggaagagttaaaaaccatcgaaggccttcagcctgcttcctcatgctgcaaagagtatggtttcttggttgatttactttctactagtgtttagttggctttactactctaatatgcttatctctgaccattaacatttaactggcagacttgatgacttcattggagctaaaccagatcctcttgtggcaatgtatctgtatttcatcaagttctaatttttaaaaattatgatttctaatgctaagttaattcactaaaattgcatgatcattttctcatgcagaa

SEQ ID NO: 46194 - DNA, 655 bp, Manihot esculenta
  Intron number 1 from transcript cassava4.1_004866m (locus cassava4.1_004866m.g) derived from phytozome v7.0 (chr-ID scaffold00224; pos 465240 to 465894)
atagattttacagcaagataacataacagaaacaagtattttctaacttgctcactctgttattagcaattcgacctttctatttggttgctaagaaagttgagggaaaaaaaaatgtttccagttctgcttttaaacccttcttctggttattacgttctttcgttttgcattagtgggaattgctttaattgttttccttttcttgttttttcctagcaaccaaacagagagtatgaaggtccattttgaataattcaaacttatttccccttgaaaaccttcgaatccatgcttcactgactcgtttttcttgtattcaacggtcttatcagtttcaaatcttgtgaagttatcttagctgccatgcaaaattttcatcttctttctcattcatactgacttacaacttcagattttctgtaattcattattgattttttccaagtcattgcagtatcagacggactggtatttcttttctttcctttcttggcagaaaacttctgcttatattttctttgtttccttacaattgattttgattctcatatttacatccatttagcaccgaaacaataatttgagtttggtttttctttggggtacttgttttgcagggaagtatttggaagaagaagaagaagaagagaaa

SEQ ID NO: 46195 - DNA, 652 bp, Manihot esculenta
  Intron number 2 from transcript cassava4.1_004866m (locus cassava4.1_004866m.g) derived from phytozome v7.0 (chr-ID scaffold00224; pos 466048 to 466699)
ggttcttacaacacttcttggcctcagagttacaggtctctctttctctttctctctccctttgtcttcttgtgctctgttttgttctctgttattttatgtctcaattaattttgtgtttttctttatcctcccatttcaagttcaatctttccttctatcaaaagctgttgcaagtttgagttatagtcaaagaaagctataccaaaaatctattcaatgaaaaaaattaggggattttggaatcatacagaaagaaatatgatattttgttcaatttagtgcttaataatacaattttttttgagacctaaaacagggaaatgatttttattactgtgtttggttgtgtaataataaagcttatgatttgatatttccttgttgacaagcacaaaataaagaaaccaatttggtagggccagaacatgcatagctcatagcaccataaaaggcttaaggaaaattacaagggcaattttcttgaccttttgaatcacttgaagtttgaaaatgattgatttagaagatgctaagttttattttctgagatgagctttaccattattagcttaattaatggagtgcttaatcatcattgttcattgattttgtaggcagtccattgatctttatagtagtgtgccatctc

SEQ ID NO: 46196 - DNA, 550 bp, Manihot esculenta
  Intron number 1 from transcript cassava4.1_007125m (locus cassava4.1_007125m.g) derived from phytozome v7.0 (chr-ID scaffold12086; pos 74468 to 75017 reverse strand)
aaaaatcagagagcaaggtgactattttacattagtttttatgtttccttagattgatgtttctctgtttctgttctgtttcgaatattttaaggattagaaggtgttctgtttttctgtttcaacagacttcagttttcagcttgtgttcatttcagtttcgcgacttctaggtttaagcttttgagctcttctattcgtatttgctaatgatttttctagttttttgatagccaagctaagcccttcaagaaccagcacttgatttttcaaaagtgatctttctttttccacttcaatcagtgatgatggcaacatccccatccttccctttttccttttggctgtggattggtccataataacccgcaaaacataattacagtaccaaaagccaatcttctcatcaaactataaagctgtcagttagaagagttataaagggttttcttgtaaatgtatcatacactacttgaagatggtctaatatcatatgcatggcttctcttattaatattgtgtttgtttatttttgttttaaataacaggt

SEQ ID NO: 46197 - DNA, 888 bp, Manihot esculenta
  Intron number 1 from transcript cassava4.1_018773m (locus cassava4.1_018773m.g) derived from phytozome v7.0 (chr-ID scaffold06484; pos 77803 to 78690 reverse strand)
gccaattctgtaccgttctgttaccttatcctttatgatagataattaaatgtgcttccaagttcagaattgtcgtttccatatactgaacttttcggtttagattttcgtgatttgattagttcatttggtttgttagttaagtgtatatgaacacattagaggaaattcaatttaattttggcacctggtttgttcgatcaatttatttcactcaaggaacttggttatagatcaatcactggttcaatttatttttgttaatgtgttagttggattaggaataataggaagctagcagtaaagataagaggacgagtgcctaacggtaattacgtagaatttgcttcttgcaatctttattatgtaaaacggggtgaagtaacactaatgcttatgggatatcatgtaatggatccatacctgatgatacagcttagtttgaatgcggattgggatgctctttttgtttttgaatgatttgaagtgcaagagcgcttggaaatggttactcatctgtttactttcagctgaacatggcacttgaatttagacttatggtggagcttgagtaatggatgtttgggataaggatggaaattggggttctggaactcactaatcaagatacttaggtgctactcctcattgatgtactcagtctggaattttgagcattcaagttattcttctttagctttaaatattatccaaactcagtttagtttttttcatttttatttaagcggacctgttgtttggcagccagatatctttaaatatctccaacctcaatagttaatacctcatccattttcttcatatgattttcctttttggacctgctctgcagccaaaaagtggagtttatacagttggtgaatttat

SEQ ID NO: 46198 - DNA, 449 bp, Manihot esculenta
  Intron number 3 from transcript cassava4.1_002078m (locus cassava4.1_002078m.g) derived from phytozome v7.0 (chr-ID scaffold07543; pos 280187 to 280635 reverse strand)
ccaggtgaataattattttttcaaggctattcaattgtattgcccatggtgaaatttaatttggcaatgtaaatagtacacataacagaggacgaagtttgaaatcgaactgagagtgaccaagccattttggtgggctatcagtaattttcaactgttcctttctattcttttgaatttccaatataagttgtaggaacttctatttacggtttgtgtctatgttgattacaacttttctccttttccatgtgggagccttgcttgcttagcatctctctgtaaatttattcaatttgactccaatattatcttggcttggactttttccttttctaatgtctgcttgtttttttacctttgtatttcacttggatttcttgttgatccttttttaatttgtaatcttctcagattttggatattgtaagtgaattggagaatactgt

SEQ ID NO: 46199 - DNA, 742 bp, Manihot esculenta
  Intron number 4 from transcript cassava4.1_022678m (locus cassava4.1_022678m.g) derived from phytozome v7.0 (chr-ID scaffold08151; pos 39893 to 40634 reverse strand)
gttgaaggaaggtgtgctgtaggtgactacaataagtaaggcttctatcgtgttgctagttttatgtgaatcttgtttaatgtacatttccttgcttatttcattttcaattcttgcttttttacaattttacaaatgcaaaattaagtggaaaatcaaaagctaacgacccattgaagtggagaatttttatttgtcattgctcttatttatcttaatatttaactttcataagcacctgttgtgggtatattacacttttaagttctaagtagggaaaggtaacatttgagttctttgtgatttttcagctccatgttcaaactagaagaagatccagtattgcttggctctccctgtcctcataattcatgagctttcatactattgcaagggttctgattttgagcatatcttttgatatgtgaacattttatctgtgccagttttcctgcttgcgtatctgccactgcctatagcgttttagcttatattggtccatttattatggatcctgatatatgccatgtcaaactaggtgcttgctttcaagcatttgagttgttctctgtaaaatggcaaattgttttttgaacctttatctacactgacatttaccttttttttcttccttatcttttacttattgcatttttcctttcaaatttattttacatttactcctctcttttccccccttttttaagaattgaatcaggagcattgatcctctttaataaat

SEQ ID NO: 46200 - DNA, 554 bp, Manihot esculenta
  Intron number 3 from transcript cassava4.1_009518m (locus cassava4.1_009518m.g) derived from phytozome v7.0 (chr-ID scaffold07543; pos 335050 to 335603 reverse strand)
attcttgcctcagtaggtatgttttccataagaacatggtactttctgtctctgcttgtgtgtgtgtttttcactttccagctttttctttgctaagtttatatatttttccttgtaagtttatatataggtaggcctcgtggaaattgttattttctagttgctggtgtggagcctggaattgtgaatcgttacttctttatagatgtgtcaaaaaccttattctccttatagatcaacaccaagatggtgacttcattcaattttagatacatttttgcaacttgtttaaccggcttgtcagtagcatgatttgcaaattacaattttagagaacccattctttgtatagctaagaatgacaacctccactatgttgtttgtcttttggaactcattttagaacaataaaataattattgctggtttattcctaagtagggtttgatctggcctcattgtccaattatttgagtgctatttttggattcttcagattcttactcgttatgcaatgtggcctctgtaattgcagttggagcaaattatcaagc

SEQ ID NO: 46201 - DNA, 744 bp, Manihot esculenta
  Intron number 1 from transcript cassava4.1_019078m (locus cassava4.1_019078m.g) derived from phytozome v7.0 (chr-ID scaffold07168; pos 60901 to 61644)
cagctacaacacgcagcctccatctctgctctgcggtaaattttccctctccctttttctctccatgtatgtaccggatggaaaatttctattcctcctttttattttaattttttaatctgttccaagtgtatgaacgatgaatcgttccgtaaatctagggacttgatcggtttctttctttgatcattttgatttaataatagcgtttgaaatgtagactaaactgtttaatgcaagtctagatctattggttaatctgacggaggttgtccactaatgttctccaatactgtgtgattcattttgcttttgttggattaggaattttttgctttggaatgtttggttcagggcagagtgtttgtttcagagttggatttatttttggcttatgatatttttttgagaatttgattcgaaacagattatctttttgtgtgcaaatagatctttattcttttggcctattgaatttcttttcccgttaaaagcagtgttacaggtttttgttgagatttacttgtgtggatgtcacttgaagataagctaatatcagaatttagtttatttatatacagatgatgagatcttctcacttgttgcaattattattatcatcattatcctggatatgaacttgtgttagttgaaaagtaaatggcatacgttttcctcttgcttttgcattttttatgctaatttgatatttgttcatattttcaggggttgctatttgtaaaa

SEQ ID NO: 46202 - DNA, 693 bp, Manihot esculenta
  Intron number 1 from transcript cassava4.1_008780m (locus cassava4.1_008780m.g) derived from phytozome v7.0 (chr-ID scaffold06916; pos 706050 to 706742)
ttcataatctacagctaaaaggttactaactaaacatcactcttgattttttatcgttattttctttcttttcctttgttcttcaatttctgatttttttgggtctttttttctctgatctccatttcttctatgtttttattcatttaataattggagattaaattccgttttgacttgatgacacttgggtttggttttgtttatcttatagttatagatattaataattcttggcctttttaattgatctgttgtggaggttggatctttgctgtagttttcttttggaccttttacttttgatccctcactctgagattggtcttcttgcaattcttgttactaattggttatgatctttgataaatttttgttcttatttaagatctgactttgagaggggctttggtttacaagtgtttgctgtctctgtttcgaacatctttcaaaaattttgcaaaatctgcaagtgggctggttcttgatttaaagagttttcatcttaacggaaagtttatctatagtttctttccaaaattatgttttcagttggtacatttattgatgtatggcttcgcttttttggatatttttaaagctttgctgggagctcttctgcactgcaaatgtttttgaccccggttattttggctgtttcaggagaagtaaagcagaagaacgttgtagcag

SEQ ID NO: 46203 - DNA, 647 bp, Manihot esculenta
  Intron number 1 from transcript cassava4.1_029919m (locus cassava4.1_029919m.g) derived from phytozome v7.0 (chr-ID scaffold04043; pos 751615 to 752261 reverse strand)
cacctcagataccgcacgagagtttttgctgctgagtaagtttttaatttttggtccttttccaatacattttcaatttttgatataatctatttgatttcagtgagatctcccccattctgtctatgtccccattatgtttatcttcttgcagtattatcttaaccaaactaattggttagaggttataaaatactactgtagtttgtcatttctacattatttttgtgactctcttataaaatttacagctgaacttctgaatgattacctccaacctggagacctgattcacatactgattatagtgatattgtttaagtgactctgaacccattaaaaatgatagtgaatgcattaaaataatttgttgaaaacacgttgaaaatgatgcaaatttatgttatggagacagggaaacttgtgctgacaaagctcatttgtcaaaccacgtaggcattttgactgtaaatgtcaaatttgatatcatgtgtactctcaattcaatgtgtgacctttctattcttctcaaagtactgatctctattttatttcaaatttgatgtgcattctctatcagttaatttaactaaacaatttgatggaatataggtgtttgagtcatctacctagagccgtgggaaaga

SEQ ID NO: 46204 - DNA, 860 bp, Manihot esculenta
  Intron number 2 from transcript cassava4.1_009269m (locus cassava4.1_009269m.g) derived from phytozome v7.0 (chr-ID scaffold06782; pos 49382 to 50241)
agcaatctggaaatcctagtggccatgtgagtgatgatgctccatttttgcaattttttgttcttttttatttttgcatttggtttaatatgcgttttgatcgtggatgataaactttttcgaattaagagtagatcattgtaatggttacttttcttagatataattttttgttcagaccatgagtttgaatagctcactgcttaggctttgtttattccatctatttcctatttatatactgaattctttgttgcatgatatgttgttcaagttattcttttacatgttattaaaagtaatgcttgctatttgaaagcaatagagtgaatctatttttcttttagatgttattgaggaaagggcatttataaaatcttacattgatggagtctgttattcacattggagggtaataagaattttctctgttggaaaatgtctgctgatatgctggttaattttgcagatggtgatgctgaagatttagtaaccatggattgtaaggttgattgaactgtgacattgtacagtgctaatgctttttaatatgtttagaagtttaggaacctgttagaatatttcttcgagtgtgagtatgtgcctggctcttagcacccatagaaggattccagcttaaaaaattaattttagatacaatggtcttaattgacaaaaaaccattgggcagtgtgctagtatttccagtgaaatgtctattttacagatccatgcattttctttctgctctttgaaatttctacattctttcttgttaaagaccaatagatatttgactatgatttttcatacggtttatcatgttatgaaacccttgttgcagccagttgtctttcttc

SEQ ID NO: 46205 - DNA, 772 bp, Manihot esculenta
  Intron number 1 from transcript cassava4.1_020573m (locus cassava4.1_020573m.g) derived from phytozome v7.0 (chr-ID scaffold08352; pos 36251 to 37022 reverse strand)
ctctcaaagcggtccaggtgttcgtttttgcaaaggtaaacccaaactcaaaattttcattttataataatgttaatgtttaggttgatgttttattaaatatcttaggtggggtataattgagtaaagttaattgttacaataaggtattcttattagaactataaggaatatttgtggaattttcaaaaggcttttaatattttattggactttagagatagtatggcatgtgagcaaaagacgcactaattagatagttttgataaataccggatgagcaatataattttgtgttgcgagcctgaggtcaatgtgcttgtaaagatagactaattatgtttgtctacagggagattaggtcctaggtatgaaaaaattctgttaaatgttcatcataagtttagaatatctttgtcactttatttctttgcttatggtctgtctttgataaccttaggataactttatataagtaatctgaatcaactatcttctttccaacaagatcatttggcgacaggtcaccccattttatgaattagatattaattatctttgtaaattcaataatatttatatttatcttatatgctcatgcattacttatattatgtacctagttaatatgttaggatcgttcactactctttgcattatttattttctgttgtgctgccttgaggataagttagagattttatatatatatacgtgatggatggatgtggatttccggagtaggtacgacgcattatctcgctgactcccc

SEQ ID NO: 46206 - DNA, 599 bp, Manihot esculenta
  Intron number 1 from transcript cassava4.1_000450m (locus cassava4.1_000450m.g) derived from phytozome v7.0 (chr-ID scaffold00325; pos 238409 to 239007)
gctgttcctctcagttcaccttcatctatcgcaaggttcttcatctgtttctttcgctgattctttaactcgaaatcttgcttttttgtgttttaattgcgtgttcatcttcatgatcgtgatttcggccactttgtgtaattttgtttatttattatttgttttcacctatttcttccatttccactgtgcactgataattggagcgtgcttgttgaaaattcagtgatttttggaaaataatttcaataattttgtactgggaaatgttggagattttgtatattcagtgcttattgcgcttctcttgttacaaatcaaatgagattgtgatcacttctagtgaccctatgggttttctaatttaatggctccaagtttggattctttttgctttattaagttgtatgcacagagagggggagaatagaaaacaagaattattagcagtgggggttttcgtactgggttttgttgttttacccatttaagcgctgttgtatgatttttcaatggtgtgcaagttcagaggatttattttagctggcctttgctagttactgaaatattttattgaattttcagcatcactgccgaag

SEQ ID NO: 46207 - DNA, 692 bp, Manihot esculenta
  Intron number 2 from transcript cassava4.1_022896m (locus cassava4.1_022896m.g) derived from phytozome v7.0 (chr-ID scaffold03602; pos 486943 to 487634)
tggacaagacccttccactgttcaagaccaaagacgtgaaaactctctctctctatctctctctagatttcatttttcgtttcctttcttcttctttctttcttgcttttgtgtttcggttgggagattctctttgaaaagggttgtttgggtcacaggaaaagcatgttcaacagattaaatctgccggtactttttctttgaccagatccttgcacctgcaaggaaaagatagtgaaaaagatttccttcttttttttttttttccttcttctcttctttttttattttataagaaattcaaacttccaagaacaaatttgcaatatttatcttctttcctttcaaatttattaatgggttcttgttgtttggagcttcgaccatgacatttaacaaacctacgcatattatcatgaatttcctcgctaatttctacatgtactgttaagggtacgaatagggtatggattttcttcaccttttccactttgcttcttgctttttctgtttttatggcctatagctacaatcgcatgacgagttcatggctcatacctctcttgccttgtcttcccttcctttctcttgggtcctcatcctttaatggcttctctctctccttgtgactctctacagtttatctataaataatgattttgagaaattatgtgtgcacagagagtggtgga

SEQ ID NO: 46208 - DNA, 990 bp, Manihot esculenta; identical to SEQ ID NO: 45919
  Intron number 1 from transcript cassava4.1_020506m (locus cassava4.1_020504m.g) derived from phytozome v7.0 (chr-ID scaffold02242; pos 98052 to 99041 reverse strand)

SEQ ID NO: 46209 - DNA, 469 bp, Manihot esculenta
  Intron number 1 from transcript cassava4.1_028572m (locus cassava4.1_028572m.g) derived from phytozome v7.0 (chr-ID scaffold06916; pos 1852891 to 1853359)
ctgaaccttacaagcttcccactactaccactcaggtacacataagtgtttgctcttcttttgttttcttttttgggttctctgaagaatttcgatgagggtttcttctttatttttcttcagaaacttctgtgattttattctttccgctgactgattcattatacctgcattttatcttttatctttttttcttctgcggattagtggtttattgatgcatttctttttattttcaaggcatgaaattgttaaattcttttaattgaaagaaggaataattggcttttacgtatgttgtaatttattaaatttcatttcatttcttcctgttacgtcttattcacattttccgttaaattttctgatcttttatcctgtgtgtggaagttcaattatatacatgtatcttttctttttcattttttgaatttaatttttcccattggacaatttctgtagcagcctc

SEQ ID NO: 46210 - DNA, 519 bp, Manihot esculenta
  Intron number 2 from transcript cassava4.1_026716m (locus cassava4.1_026716m.g) derived from phytozome v7.0 (chr-ID scaffold05244; pos 40853 to 41371 reverse strand)
gaaggtacattctgttcctgtcctaaagaatactgattgactgttgaagaatttggaaaatcctatgattattatttttttgagtaggaggttgagttcaaatgggtactgtcatatattttatttttgtgttcttcctcgacaaagattatgaatgctgaaattagtttcatgtgttagtttgaatttggcagttagtattaccatgtaatgctcagttgagtgtaggattttctctaggagtgcatgtcgcattgtggttaatcctttttaggcttttagaactgtagcagacggttgcttaaattggaggaactgatgagggctttttatttttttattttggtaaattgcagtttgatttctgttgctgtgcaaattgaaattgtatttatttcttgctgttatgctgcatttgtttgaacatttaacacttggttgtcaaaaataaaaaaatacattttgatatatttggtttacaatttttggtagcaccggcggaagccgcaagtgcagttg

SEQ ID NO: 46211 - DNA, 494 bp, Manihot esculenta
  Intron number 3 from transcript cassava4.1_009604m (locus cassava4.1_009604m.g) derived from phytozome v7.0 (chr-ID scaffold04457; pos 541670 to 542163)
gtgataatcttcttgctgctgggtctaaatctcaggttttgttatttgagctggttatctcttcattcggtgtccttcttttctaattatctttatttttttaaggcttcctttggaaaaaattatttacaataaaagaattcaaatgaatccttatattataatagattttaattattttaaaatggattcttttcttaagttaaaagataggattttttcaattattaggtttccaaacatgagaatttatgaaaagaaaagcaattgaactaaatttttgcaaaaatctagtttccaaataggatgtaatagtttgtgctgggggttctaacacggcatttctgtgtttagcttcagtaattttcttctcaagagatgtacttgagagcattatgtgctaccattaactgttttatacagaaactttgatacatgactctatgttaatgtgagttccttgttccctcagatacttttctgggattggagga

SEQ ID NO: 46212 - DNA, 387 bp, Manihot esculenta
  Intron number 2 from transcript cassava4.1_019163m (locus cassava4.1_017818m.g) derived from phytozome v7.0 (chr-ID scaffold11341; pos 318075 to 318461 reverse strand)
tcgccgttttgttcctatttcccataactcagcaggtttgttccattaaaatctgtttcttttccacttctgtacctggggttcattcttgaacttcagttcatgttgcctttctttttctttcctttaattctgcaattttgatggtgtaagaaatcattcactttttattttcttcttttacttatgggtaatctcgtgttttaatgtgtcttaacttaaaattctgctgaaactcctagtctctttcactagtatgatatattttagcagttccacttcaaatgaacgatgccactcaacttgcttgtaaggttagcattttaatatgtaaatgtctggtaatttcttgaaaatttttttattttccagagtgaagaagagaga

SEQ ID NO: 46213 - DNA, 995 bp, Manihot esculenta
  Intron number 1 from transcript cassava4.1_002720m (locus cassava4.1_002720m.g) derived from phytozome v7.0 (chr-ID scaffold03741; pos 663254 to 664248 reverse strand)
tctacaaagcgtaagtctactttgattattaccctttgtttttgctaatccttcataatgttgctcatttttgttttgtcagtgaagctaacagtgattttagtattctctctacttgtttaaagcatatcatttgaattttgcattctcctgttataaatcatatgctagaataatgtaaattgctaaatgattgttcctttttctttttcttttttggttgcaaaggatattgtttaagctcttctgttgttgtaaagtccatggtataaaaaaaattgttgttcgatgttctttttttaattgtttaatgcacttgcacttcaaattggcttgcaaggcttggactatgctaacaaggcagcaacaataatattacatggaaaagaagaaaaaatgttctatttatatgaaaatgaagagattttttccccattgagagaaagtaacatgtctttattccaactttttaaaaaaaaaaattgaaaataggatataaactgctaagtgccacccatctgggaaactacctggttattgaggaattaatgtgaagaaggatatagaggtattgaagaagtttaattttgtttgtgcagttgaaagttgcatacttttctaaatattttttttccagtaaatgtttattatattcatcttcttaattggcatgtgattaatattatgatatatgtttgtttaagatgattaagttgaatattgataattttttagaactcaaactagtgatattggcatcagaaactacaagatattgctgtgatacactgacacagtacatctataattaatttgaatattacaaggctgaataagtctttagtcattactatttgtcatttcaaactgttcttactcctgaaacagtgttgtcatgacaatctgagtactgttttccttctaaggctgatgtgtcctgatacattttatgatttacagatttgataaggagcttaacaaagaagttgccatca

SEQ ID NO: 46214 - DNA, 999 bp, Manihot esculenta
  Intron number 1 from transcript cassava4.1_014879m (locus cassava4.1_014879m.g) derived from phytozome v7.0 (chr-ID scaffold08314; pos 65063 to 66061)
ttgctcatttgattcttaaatcttgcttcagtaagtaatttccgtttctgtgcttttatttgttcatttatgcaattgggagtttttttttcctgtgtgtaattcaagtgtgaatcttaagattttgattgctttctacatattgaatttggtgtttctaaggattgatgcataataaactcaatctatttgttttctttagtatgattattgttcggggtttagaattggatcttgtcctccagaagtaaggtttcacaaatcttcaagcgctaatagggctaattaggcatctgcagattctatctagccatatagcattcattttcttttggttagtctaattaatcattgatttcatttcaaaatcaatgattcttgatttacctccttccaaatatttattccccaaccttgatgccgttgggtatccgttgatgtctatgatgcaccaccttttctcattgcatgcctgttaatgaactaagtaatctgatgatagtgccaaattttcttctaagtccttagcacatggtacttggctcctctctccaagagattagtgccacttcacatctgctgagtcattgaacttatctccaccatatgttggcttgcgaggcatgaacgataagtcgaacacaagaaatatgcaaagctaatttgacttggacgatctcattgataggcgctaataagcaaattgaatcatcatgtggctgaaaacccctacaaactagcagcctcttatgctgcatgtttttgccttttcatctctctcttacattttattacccttgtgcaccacatgggcatgttggtgataacttgtactgccatgaattgccctgttggacccttaaggattgttttgaagaatctgaaacttggatatgcaaaaaaactacttaaggtcttgtctccttttgcttctatacttttggtttttggctttacagttgtgcttgatactagtctcatatttctaataggtttgtg

SEQ ID NO: 46215 - DNA, 415 bp, Manihot esculenta
  Intron number 1 from transcript cassava4.1_011299m (locus cassava4.1_011319m.g) derived from phytozome v7.0 (chr-ID scaffold00832; pos 44261 to 44675 reverse strand)
aagtcacggattcacctcatcctctcaattcccaagtaagaatatggttgctgttgctgatcactttaattgtaaaactattcctttatattcttttcttcttttttggtgaagtgatcttcttttcttcttgtaactggataaggtaggaaaataccaagcgacatggacttttgaatcgcttaatagatttagaattaggtttttctttttgtttatgtgaaatcatattcggtttgagagcgtgtaattcgaaaattagtatgtgcttttgaaatttagtcttgatcatgttatgaatactcaggggtgttgtacttacatggatcatctacttgttgatcgtactgtatgaagttccttgaccaaaagtctttagatatgtttcaaatagcaggttaaccgacctggcata

SEQ ID NO: 46216 - DNA, 370 bp, Manihot esculenta
  Intron number 3 from transcript cassava4.1_003354m (locus cassava4.1_003354m.g) derived from phytozome v7.0 (chr-ID scaffold06701; pos 151425 to 151794)
ttgaattacaaaatacaagcgaagcacaaaaagaggtaataattttttatgctgagtcgaattttttgagtttctgtactgagaacactcaggaaattttgttttgtttctttgttatggattagttcggagagtttataaagcttcaaaaacatacaactccaaactttcaatctaaggaatgtcacatggcattttcttttcatttacttctcatttgtttattttctcatcattttgatggtgctggcaactcttagttgcatgagtggtttcttttctttagtaaaatatttagcacagaaatgagtttgagtactaagtttcttttgtttgcgcatgtagaatacaagtgacaatttctcccttt

SEQ ID NO: 46217 - DNA, 599 bp, Manihot esculenta
  Intron number 1 from transcript cassava4.1_017182m (locus cassava4.1_017182m.g) derived from phytozome v7.0 (chr-ID scaffold02572; pos 385632 to 386230 reverse strand)
ggcaaacaggtttagccatctctcgatcgttttctttgtctttcctctgaattcttgatattcttctgtacttctgagatatgcctccactgttatattatgtaatccgttctctcgtttctttgaatttatttttattattttcaattttgtagttgattgggctttgatgggttggaactcagtaatttcataaccctaaaatgatgttcaaaagttcattggtttcatgtagcctccgtttggtaggattcattttgcaagagaatcttgtatcttccattcctaacaataaaattgatagaaaagaattgaatgaaattgaattcatggggaagtttttattccaaacaaggggatagttgtatactttgatatatgtttttgatggattttgatggactttttcattttcttaaagaaattgaaacttggaacttgacaatattggttgaacctgtaatcttgtaaatctgagtcaaaactcgatggtttcatttcttgatttttgttttctgatgtgggttctaagcttctgcctgttggacatttgatttgatgcagaaactgaagactcgtgtaatacataaggatattaa

SEQ ID NO: 46218 - DNA, 369 bp, Manihot esculenta
  Intron number 1 from transcript cassava4.1_006580m (locus cassava4.1_006580m.g) derived from phytozome v7.0 (chr-ID scaffold03741; pos 74617 to 74985 reverse strand)
cacttttcaatttcaagttcaggctgctcctgcaggtgtctctctctctgcttcttctttattgattcttttgatctgtttagtaaatggtctgtttgttatctactttctttcactatttttgctttcgttttgcattctttgcactgccacttgctgttttctttcatggtgatagattcccatggccaaatcaacccatctcgtttttctcttaaatagttatgaaattatgttcaaatcgttgttatgatctagttgattaatgggtatgtctcttccactctctctaacctgtggttccattttttttggctatattttgagtactcagggctattatttaagcaattatcttctgttcttaaa

SEQ ID NO: 46219 - DNA, 924 bp, Manihot esculenta
  Intron number 2 from transcript cassava4.1_008900m (locus cassava4.1_008900m.g) derived from phytozome v7.0 (chr-ID scaffold07520; pos 1479845 to 1480768 reverse strand)
ttgattcaggaggaggcgacccctttaatcccaaggttttctgggttatggcttgttgaattcaatgattatctgataactttatggatctacttttaaatgtactgaaaatatagatgaatttaattaaacggtatgaggctatggacacttttgctttctcgtaatgcaattcttggttgaccatgcgttgctattatcttgtttttgattggtaatttgtagatcttcatgtttaattcttgttgagggtaactaagctttgaatttattttccttccctcaaattctaaatccggattctctctggtgtaaattcatttgtcaatcttagtcttgtaatgaaatggaaaatcaactggaactctagcatggaacttttttgtgattaatctaacaaaaatggccttgaaagtggttagggaagcaggtttggctggaagcaagaaaattagtgatcttgaaagttaaatcatctcaagttgatatgtactcttctttatcacaatgagattcagctgccatagaaaataatgattgttgcgtgtggcagtggtttctaataggcacggaatcatggtttggagtattcaccctgaagaatcctgtggctaagagatctattcaattttaaggaattcttcttgtagtgtatgcataattgataagagctgtgctcttgtaaattttggtaattataagcatgcacatgtttttttttttctcttcccacatgatcaaattctgtatggtcatttagtttgacatcatttctgttaatttgttctgacccccagctgagatttcatttgctataatatcattggattgctatgctggtaatcacaaatgataaggggtaatacatgatgtttttctgtgctggcaggtctgggctgctggattttctgctgctctgttgaa

SEQ ID NO: 46220 - DNA, 459 bp, Manihot esculenta
  Intron number 2 from transcript cassava4.1_022659m (locus cassava4.1_022659m.g) derived from phytozome v7.0 (chr-ID scaffold07100; pos 41290 to 41748)
aggaaacgatttctaggtgagaactctgttttggtttaattgaatccgaatccgattacttgttagattgattgatttctattgtgatagatttttggattctgaatagagacgtattaaattgtttgattacaagacctccaagtgaagttgctgtgtgtattttgaatattgttccataactaatttttttttttggagatcgaagaatttgagttttgctgtttttttgtcaagaccctgtgttattaaagtaattctcatgaagtattagaagtattcgtttgaatttgaattttactattttatttcattacgaaaatcgattttgctaattacgcagattgaaaaggcatgaaaattttgaagataattttcttttggttcgccattattgtactttgtttcggtgaatgattttcttgtggtggtggcagtgtggcgtctgaggtcaggtca

SEQ ID NO: 46221 - DNA, 705 bp, Manihot esculenta
  Intron number 1 from transcript cassava4.1_018605m (locus cassava4.1_018605m.g) derived from phytozome v7.0 (chr-ID scaffold08085; pos 246066 to 246770 reverse strand)
agtgagtatttctttggacgacaatctgtagtattattttttctgtgaatttctttaaaaatcattaatattgattatgggatgatatgcagcaaatctcagccaattcttataactgtgatgctttttgtgctctttgttttgttttccttttccatttcttcgtttattttgatacaaggtttactagagagatttaggatacagctttcaagaacactaggaacctgacgatttgggtagagagtgaaagggtataaatcactggcatataaagtaattgatttcttttgtggaaacatctagcaagcataatcttcgtggatttctattctatttatttttaatcatggtttaattgatttttaagtgttgcatgttgtcttttataatcctcagtctattttctggttcaatgcttgctgcaggaatctctgatgcaattttcggtagatatgactagcatataatcttgctttaactgcttcagtttgtggaaatgtatagcgcgcactatatgtttggatatactgaagtttgtctatgcaagagagggataagaaaaacttgtgataatgttttatgcttttatttgtggaagtgctttatcatatttttggagctatcaggtttggtttataagcatgatattttgaagaacatatataattgcatttatttgccacgttttgcagtaatccaagc

SEQ ID NO: 46222 - DNA, 1005 bp, Manihot esculenta
  Intron number 3 from transcript cassava4.1_009040m (locus cassava4.1_009040m.g) derived from phytozome v7.0 (chr-ID scaffold00368; pos 90868 to 91872)
aaaccctcggagaagagtactgtgacattactcaggtttttatgctattgatttagctgcctgttgtctacgaatcaaattttaagttccctatagaagttgtacaacaccatgtttcggaattctctgttcaacactagtaacagcattacactagtgtgattagagtttaggaggtcagttatcaggcatctgtttagcttgtgacctgattgaactcactgtgtgcttgatttgtggactggagtgttactatcttattagaacttgaaaactattttgacattctgttaggaacaaataaatacagaattattccacttgttaggaatcttataaaataattttgtttgtattttatgttttatatatattatttgtttcaagtttgtagcattacaaatttaaaattctttggcaaattctatcaagtttggcagaatttggctcaagttttaggtaattcaatagaattaaaagcgtagaattcaaatgaatttttgtgtatacggaacatcttaaatgtggttttagaaatgaattccacaatattgcgtttggattcataaatttgatgaaattaaaatatcttgtttggctaataaaaggaatcgaaagttttgaattgatttacagtggaggtgagtattcaacaaaagaaatttttttgttatgttgaatatgaatttcaaataacaacattaccattgtcatttcaaacccttactttcaactgtttatatttattggatttgattggatgcaaattcttctttttcaaaaaaaattccaaacaaagtatttcatccataacttcaaacacaacattaatctttctgaattcctttattcaaacaagcttgaaactttgcagtgcaggcatacaattcagggggggcggggagatgaacaacttctcagtgctttactgtatttttcattaacattttaccatttcctttctttgctgttattgatggtggtttttccaggttgcagggccac

SEQ ID NO: 46223 - DNA, 521 bp, Manihot esculenta
  Intron number 3 from transcript cassava4.1_016174m (locus cassava4.1_016174m.g) derived from phytozome v7.0 (chr-ID scaffold01664; pos 131275 to 131795)
tggtggtcagtttctttattattttagattgttggcattctagaggaaatactgttggaatgattttgtcatatggacgtgcttttatgcttgtatgcatgtgtgaataatggtgtctgttgttattacttttgacaaatgttacgtgagcggctggttggaagaggaactccaacttacgcgatacaatattgagaaattggccagtgtaaattatatatggactatagagtgttaatcagttcaaaagtatgcctaaaagtacttttgccaaatgatgttaaccgcaaaatgcaggtcatccttttctgtacttaaatatgttcaaaattttgcattcatttttgtgatgaacaagtggattggttattgcctaagctatcatgagttctgaccattgtctattgtcctttatttggttagaatttgattatttaaatggaaaatataaaattctccattaaattaatccttgactctgccacacaggctccattaacagaggaattggtgtttagagc

SEQ ID NO: 46224 - DNA, 553 bp, Manihot esculenta
  Intron number 1 from transcript cassava4.1_001839m (locus cassava4.1_001839m.g) derived from phytozome v7.0 (chr-ID scaffold02658; pos 782764 to 783316)
atttgcgttatattcgaggtgcgtaacccaaatgaaacaacatcactcttctgctcatttgattccctcactcttttgtttttggtttttcaaggatcattggctgctataattggagggtcgtgctcaattttctaacttgtattaaaattttttttcccaatgaattgaacagtgtgattgcctacttttgctagagtccagttcgacataaaattttgtttttgaactctgggatgttgtataagatgtgttttggtcaattttaatgctttcgtaacaaattggaactcattaaaatgagttaaaaattctgggttctggggtttgaggtgattttgagtaagttggtatgtttaattggtaatggttcaagcaatccatcgaactcctcaagtagtgaaggagctgaatcaccgagtacttttctttgatttattcaaattcagcagcaaactttagttgattgattgtgaaaagccagtgtttaagggttctgatgttgtgccttgtttcagttgatttgcccccgtggttctcgtctttgtccata

SEQ ID NO: 46225 - DNA, 380 bp, Manihot esculenta
  Intron number 1 from transcript cassava4.1_010493m (locus cassava4.1_010493m.g) derived from phytozome v7.0 (chr-ID scaffold01190; pos 101894 to 102273)
ctgcagaagaaaaaattttatacaagttgaaaaaggtaaactttgtttttaaaaaaaaatatagtacataatggattagtaaacctaattttctttcttaattttgagttgcatcagttggaatcaaataatgttagagacccttgaaataaatattggcttcctgattgtattattttgtaatattatatttttttttctaatctctctctctctctctctctctctctctgtctatttattatgatgggttagatcaactattcagttaagattttaagtttgtctaaagttggttatggtgcctttcttgatatacaccgtcagtatattatttgtcagatttgtcatttgtccatatcttcatactgcaggctaga

SEQ ID NO: 46226 - DNA, 380 bp, Manihot esculenta
  Intron number 1 from transcript cassava4.1_026065m (locus cassava4.1_026065m.g) derived from phytozome v7.0 (chr-ID scaffold02903; pos 32585 to 32964 reverse strand)
agctctggattttcaaggtgactgcttttctgtttgatgattttcaagcttgctaggtttgggttattttataatttcggatgattgataattcaatgttactctcttttacccttgcttcttgattatcataatctggtgacatggctcggaagagaaagagtttaaccctttgtttggattgagggaaatggagaggagagaaaagaaaaaggaagttatttcttcaattttcgctattagtattacatgtaatgaatagattctacttgctgcccttgctaatttgtaaatgttgatagttcaagattgtgtttggcatatttgactgaagaggcttgtgacagcactcattttctgcaggtatttagagcttttgg

SEQ ID NO: 46227 - DNA, 883 bp, Manihot esculenta
  Intron number 1 from transcript cassava4.1_010543m (locus cassava4.1_010543m.g) derived from phytozome v7.0 (chr-ID scaffold05898; pos 87591 to 88473 reverse strand)
tcttaccgttgtggttgtctttgaattcagtataggtaatttcctttttgaaattttgttttgattcttgattttcatatcaggttcatggttaagtatacgtgtgtgagtaattggtatttttcttttttctgggtttttccctttgtggtttctcattaattgtagctgctcatgctatccaatatccaaattatggggtgtttacaatgatgaagcttgttgactgcttgtaattgtttttaatacagttgagattcattttatgcccccaatgggagacaattgcaaaagtgaaatggcatgttaatatgtgtgttgtgtttttggttaaatttgttccatttcggttttagttcctaatgttcatttgtggatttttgtttgatttctctgtttattggtatgatgccaagctttcgagaattgcattttggtgtgcgcaacactagaagatgctatgagttagaattaatttctactgcattattcttggcaaggttgatagtatatttgggatgtaatatggaggcatgatgttataatttatgatattcagaagaataatttgtactagaaacaattcaaaatgtttccttaaaaattttcaaatttattctgtcaatatagctattatattttttggagcttcaataaatttcctatgttttgaattctagtaaagagtttgtaatcattgcacttaaacaaaccatctttcccaagcttctctcatcttatcttggtattcttttgcgaaagccttttttgaaggcatgaaacaaaagcagaaactgtgagattttattctttcttttttgctcaaactcattgttctgctttttcaggagctactcttagcaaaggctttaatcgttttctt

SEQ ID NO: 46228 - DNA, 460 bp, Manihot esculenta
  Intron number 1 from transcript cassava4.1_011048m (locus cassava4.1_011048m.g) derived from phytozome v7.0 (chr-ID scaffold07351; pos 420511 to 420970 reverse strand)
ctcctgctgcaaagtaagctcactgaagcttctgtttagagatggtttcttttctttgtatggcctgttatggtttgtttctctgttccttgccttgcccaatctttaattacagtgaaaattgtggaaaagggaagaaaaagccaactataatcccaatgagactgagcaaatcaaaccatttacagtctgtttcttgctgctgctctggtttgggaactagaaaatagaaattggaaaaaagaaccttcagttttcaatttctcttccttctctattcatgtcatggtttcattctgtttctttatgattgtttcctgctgaacattcatctctgtttagcagtagcttctttttattacagcatctaaatttttatgattctcacttgagattatgttaaataatttccttcctgagactgagagaagagttcttgcaacagggcacaagtggtagg

SEQ ID NO: 46229 - DNA, 882 bp, Manihot esculenta
  Intron number 1 from transcript cassava4.1_009700m (locus cassava4.1_009700m.g) derived from phytozome v7.0 (chr-ID scaffold03168; pos 42659 to 43540)
ctcgctctcctcaatctcgccgtcagaaatcaacggtgacctccctccctccccccccctccccccactttttgtttcctttaggcgtatgcttatatatttagcttttcactgtgatatgggtacttgtcagatttttgttttatgctctttttttgaattattttttttattatggagtttattgtaactgaccaaaggaactttaatgattactgttgatcgattgatatggcggttaaagcatgttggggattgatttatgttctctaaagggaactagaagaagaaatgagcaactagcaatttgaagaatcaaggtttattttatcctggataatttgtttttttgatttggttgtttatgtagaagaggatggtggatgatttttgttgattttctttcattactgggttgcaagaagaaaaaaattattttacttataatttttcaatactcgtgctttttgtttgtcaggaaggctatggtgttggggactttgtggttgttgctaatgctataataaattattatctgatgtatattaacaggtttctagatctatctagatgtttttctatttccaataacatgaaatgttgtttctgctaaattgacaagttagttttcattgctttacatctggccaaatgtatttgtttaaatttttttttaatcactgataagcagtcaagtaatggtgacttgtgtatattgacatagttatttgaaattttcttgtgttgtcctttctttctttctcccgttcatattatgctgatagtactctcaatgtatgtgccaatttatctgataaaatcctttgtttatttaattgcttatcagaaacaaggtccagatagtaactgctggtgccattc

SEQ ID NO: 46230 - DNA, 694 bp, Manihot esculenta
  Intron number 2 from transcript cassava4.1_032696m (locus cassava4.1_032696m.g) derived from phytozome v7.0 (chr-ID scaffold03908; pos 11331 to 12024)
tgatacaagcagctctcttcagctaatatctgagggtagtgacttttagtttttatatagctcaactcagctaacaaatattaacttgcttttgtagccagagttagtcatatttatcatttctgacttaattctgtttcatgtttctttttcaaagatgatgaaatatttttagccaagaataatacattaatgcctaatgatacaagcagctctcagcaagttgttaagggtatgttcttttttcttttactataaggaaattagttagcatggattagttgtattattgtgtagcattattaaattcatttagtctttttttttttaaagcagaatttacaagaaagaatgatgaacaaataaatgacagaagcagctctcggggaataatcagaggtgagtacttttggttaatcttaactataaaaaagaaataaatatattctccagcaacctaatgctcgaataatttgattggttttggaaatgcagaaataattatgaacaatacggtaaagctcaacaacacaaacatcacccagaaaatagcaggaggtaagtttagtctttaaagaatgttaatttcaaatgatctgtggactagcaagttcaagaaatgcctgactagattttgtttcatcacttttctgatgcagaaattatagctaagaacaaaactgagcctgtaact

SEQ ID NO: 46231 - DNA, 909 bp, Manihot esculenta
  Intron number 1 from transcript cassava4.1_017503m (locus cassava4.1_017503m.g) derived from phytozome v7.0 (chr-ID scaffold08085; pos 223807 to 224715)
gattcacaatcggatttcttgcgccggagactttggtattcacataatttacttcctttgtccatctttaatctttatttcaaaaattatccctgctttgagcccgaatgctgtgattactgaggtataatttctaaaattaccacccataataatttaattttgctataaattgtttaccttatttgctttgtttatttgcatcttattaatgcacaatgaaatgtatgcattttttctttcaaaacaaaaaattgatttaatgtgaatttggttaatcgttaaatttagcgcatgatgggacctttgcttgttgagtaggggctactgataagtaaaactctttcggaaataattaacatgttcgttttaattgggtgcccaatgagaaatgaatggatgtttgggttcatattaattcagtcaataaaacatactctctttgaggcagaattgccttcttaaataaataataatttcttttataaatattcaaaagactttttaaaatttcgacccttaaatctatttccaataaaatatggtttattcactcactttgtcaaattaaataaataaaaagttattatcctttcttatcttaaaatttgacttccacttgactatctggtcatgagatgatgaagatttttcttcttcctctgttcataaggttcatgtgcatcaggataatttcattagattgactatcttcatccacttttatggccatttagcaaggccaaagccaaccaaacattccctctattgtcatttaaacttagttggtttgcctgtcaccacaaatgtgtgttccaattggaaaggagaagaggaattgctgctgcctttttacttttcaatttctataaaatcagtaataagattttatgatttctagagagactg

SEQ ID NO: 46232 - DNA, 486 bp, Manihot esculenta
  Intron number 4 from transcript cassava4.1_017503m (locus cassava4.1_017503m.g) derived from phytozome v7.0 (chr-ID scaffold08085; pos 225409 to 225894)
atttcggcgtccgcaataattctcaggttttagttctacttcttgcaattatttcgtggaggtttatgagttgcatgtgttagtttgttgtgcacaaatttattacattatattgccacatctattataaaatccatttgcatttttcatgtcatttgaaattagaaatccttcttcaccgtgttcatcacagaaaggtcagacaatgttaaacttcaaagaataatttcaaggatctcgtacaactacttggactgatggttttggctcccacatcacctttagctatccattatcgtgcataaattatgaagccattcagatttttgaggatactagtgctattcacatttgttaatcaaaagaaactatttttctcaaatcacttgctttagtatctatgtggaaatatcaactgaattgggatgtgtgcatgccctgtgaattttgagtaattgtctcaaatgcaggttaattttgtcccct

SEQ ID NO: 46233 - DNA, 317 bp, Manihot esculenta
  Intron number 1 from transcript cassava4.1_006443m (locus cassava4.1_006443m.g) derived from phytozome v7.0 (chr-ID scaffold02978; pos 110557 to 110873 reverse strand)
tcgtcgctttgggtcctgttcaattcggtttcaccgtaggctaactaatccgatctctttatttgtgattttagacttcagttggtatctaataagcttcaggcgagtgtcgaaattggtaattttagctcgaaaaggaacaagcgtcagctcaagctctataacgttctgttttactttgtttttattattatgttttaatttgttagtttcagcgaagaaaatttggaatttgaatttatcttcttctctttagtgattgctttaagttttcttgcgcagtgcggttattcgtctccaacccaaactgcgatcac

SEQ ID NO: 46234 - DNA, 823 bp, Manihot esculenta
  Intron number 1 from transcript cassava4.1_001889m (locus cassava4.1_001863m.g) derived from phytozome v7.0 (chr-ID scaffold00708; pos 312835 to 313657)
agggtttgctagccggggaagttctcctggtcctggtgagctttttaattgattgattgaattatttgctatgttttgttccgtatttgttttgggcgtcaatgcattagtggttttagtgagttgcttaacatttagcttctttatgcccacttgcgtgtggttttagttctctgggagttattatagtttataattggatacagttttcgaggccttgggcctgccgtctttctcataaagaatattacttatagaagccatgattttgatcttatggtttgtacttagtagttttcacttttctaatgctttccatcttaggctgcttttttttttcccttagatcccctttaatgtttttatgtgtgtgtgtgtgtgtgtgggtgaaatatattcatttgcttgcttttctgtctcctgttcattttgaaatttgagcttcatagtgagttccttgctctccactgacatgcttcaacctctacgataatccgtgtacctattaacatcaagtgtttgtccttatctcacatgcttatgatctgttgtatattgtggttccacaacatacttacttgtttctgctgttgctttggattttattctctatgaactttgccacctatttcaagcatgcaattgataatttggggtgacactctattgttctttcctgaagaacttttgaaggcattctttttgtatatattaatttggacgtgcatcttattttgttttcatgttatttgcttttttaacgtttatttattttttcctatttaggtgctaatgtttgtttctcttttttaagatcggtttg

SEQ ID NO: 46235 - DNA, 686 bp, Manihot esculenta
  Intron number 1 from transcript cassava4.1_033283m (locus cassava4.1_033283m.g) derived from phytozome v7.0 (chr-ID scaffold02716; pos 662 to 1347)
ttattattttttgtatgataatttagtgaagttatttgtatgattttcatatcattaattaatgtaatcagttcctagatcacctggaactaataatgcttggacgggtaatgtgaatttacaattgttgtatttataacaattttgagtattaatcaccaaattaattttaaatcgtatatgcaaaattgattgattgtgattttatttatattagaatttttaattatgaatagtctaattaaaagaataatgaacaagttagagcatctagacttgagtattggaacttgcttattactctctcacccgacttatcgaccttttttacaactatttgacaggattaatacctacttgtctgacactacaaaataaatggggtttgtatgtactgaactcttcaatactaacaacattagacatcagagacaataatttgtcttcaatactaacaacattgaacatcagagacaataatctgtccggaaagattcttgattcaataactttacttcccaatttatgagttttttttgctgaaaggaaatcatttgctggtactattccaattcagttatgtcaatttatggcataatacaaaaggaaaactaagtccgattcattggccggtgaaatttcctttgtactatatattgaaaagtaaaaaattaaggattcactag

SEQ ID NO: 46236 - DNA, 901 bp, Manihot esculenta
  Intron number 1 from transcript cassava4.1_018674m (locus cassava4.1_018674m.g) derived from phytozome v7.0 (chr-ID scaffold02610; pos 202202 to 203102)
acgttccggcgccgacattgaaactatcaaaaaatgtatacccttttgatttttcctttgctttttttttttaaaaatgattgattagttaatttactatgattgatcaattgaatcgataaagagtttctgtttgattttgatgattgtattatcgtcttgttcgtttcttgggacagatgccaaggaatgggaataacgattttggatctgctaatactcaatttttggaatgatattgtaacaataggcagcaatagatttctttcttccttccccctttttgtggttttggttcccggcggccaaagagcgattagggtttcttactttattattattaaattgtaatgattttcttactcttttgtgataatatctagcatgtatgcacttaggccaaacattcagtaatcagaaaccctaatgctatatttatatgaaatcacttatttttcgtttttattgttatcctgcatctatacaaactataatgaatagctatttgaatttttctgagatggtgactgatattttaagtggtatgttaagctggagtatggacttggatgaagaaactgccatgttgctctcaattttaccatcaggttttactagacaaataatcatgtttattgaatattgagctcattaactagtttgaatgaaatgctattgtgtttataccaatcaatacgtgtatttgtggtcttgattaaagggagttttaggttttagaatgagagtggcaatcatgtaggaagggatgttcataaaatatttaatgatggatcatactcttaacatgtggttgcttagacaatagtttaatcttttcatttagttgatagataccaatttgtgtaaacttaaagttctcttacaatttctcctgcagcaa

SEQ ID NO: 46237 - DNA, 561 bp, Manihot esculenta
  Intron number 1 from transcript cassava4.1_006659m (locus cassava4.1_006659m.g) derived from phytozome v7.0 (chr-ID scaffold02598; pos 47466 to 48026 reverse strand)
ttcaaaggtgagcttctttaatcccactctttcaattttgctaaatccagttttgggatcacttcattttgtttaaatctcgccaaatccactctgggtttacttcattttgtgttttttgctgtttgggtttgtttagtttgctagatttttcttcctcgcaagtgaagattccagcttgtattttccccatttcaacatggtggtccttatcattttcaaggattttgatctagatccgttttctgctatttgttgcatttttctgagcaaccaaacagggatttgctgttctattttacctgtgcatacggtagtcattttcttctttagttgttttcagccattttttcgtccgttcactacattttcctatcaaccaaacagactaagcatttactctgttttctctgtttcccctgcctttttaaccctcccactctgcttttttgttccaattttgattttacatgttctttcgatgcaaacaggttatggtcttttaacttttttgggtatttttcttttcttatcctttctttaatctttgtaggagagtgg

SEQ ID NO: 46238 - DNA, 466 bp, Manihot esculenta
  Intron number 3 from transcript cassava4.1_030233m (locus cassava4.1_030233m.g) derived from phytozome v7.0 (chr-ID scaffold11584; pos 90193 to 90658 reverse strand)
taaaggatcttgtggtcctctcaggttcttcttcttcccttcttcacctctctccatgcatttcatttcttatataatcaaaacaaagaaatgaaaaaagagaagttaataatattgtggaaacaaccacatacgcccatcttcaattgcaatattaaaaaaaaatagaaaaaacactgtaaatttaatatgattcaagtgtaaaatttacgtactaaattaaagataaaatttcactaggataaaaaaataatgatataatatctcagaactctcaaaatcttaattctaatgtgaaaatcggcctcgcactgtggtagaacttttcggatggattcttaattcttcccataaaaagtgtagccaaaattctattcacatgattaaccaatacgattatactttatgtttctttgattggtctcttacaggagcacataccataggttttgctcagtgcttcacg

SEQ ID NO: 46239 - DNA, 813 bp, Manihot esculenta
  Intron number 1 from transcript cassava4.1_000288m (locus cassava4.1_000288m.g) derived from phytozome v7.0 (chr-ID scaffold04457; pos 1095432 to 1096244)
gcagccgaacttgtgtctccacgccgtcgatctaggtctcatcttcaagggatgtgattgaaaggagaatcaacaaagcaaacttgtgtgggaggcgaggacactattttatgcagtagatggcctagatctaaaaaagaagaagaagaagaagaagaagaacagaccaaggaggctccttgagcaagaacgacgcagaaagtcaaatgagaagaagcagaagagcagaccaaggagaaggagaaagagagaagaagaagatgaagagataatgggaggctcctcagcaagaacgatgcagatgagagagttagggatttggggttttaatgatgtgcacgtatatttatataaaaatactattggcaatcagtttggttcggttaatttggttttttgactgaaataactgaaccaaacaaaaaaaaatgaatttttttaaaatgaaaactgaaaccgaaccaataaactaaaaaaccaaaccaaataaaaaaactgttctgttcggttcatttttcagttttaaccatttaatgctcacccccaattgcatgtgcataagtgaaaatagtgaaaataactgttgaatgttgatgtatgccttgccagaaaagaatggatggcacaggataatttgatccattagattgcatgtctgtaggtctgggatatttaacggagttatttttttccccctttttttctgttagccttatttcctcccattttttctgtttgatagccatcttaatggcttagtttgttttatttggttggatatgtcatcatgcagagctttctgccaccctgctg

SEQ ID NO: 46240 - DNA, 720 bp, Manihot esculenta
  Intron number 2 from transcript cassava4.1_004336m (locus cassava4.1_004336m.g) derived from phytozome v7.0 (chr-ID scaffold09354; pos 39875 to 40594 reverse strand)
ccctgactgcagaaaaagttagaggtaggattctgttactcattttatggttcaaattaagaggtagatttttatcatttgtgctatggtttatgtgtaaatttgtgctagtgcacctggatcctctgtggttggaataatagaccgggagggcatacacttggaaatggcacgatgggttaagcagcaagagattcatcctcttggcatgagtttagtctttatttggaaaatgtgttgcattttgtccatggctcatttccccgggggaatatgcattttgctcatgattgtaaaagaatagagagtgtaaatttttttagttcaattaaattaaagatattttatctaattacttcatcatatgatatcttatcatagaaaaaaacaatgatgggcctatttgggatattgaaaattagtgaggtggaaaaagtaactggcattggaataggagctaaagtaaatgtttggtactttattatggtgttccaattctttcttcaattcaagttagtattgtacttgttctgtccttgtactgtgccattgccacacagcttttgacttccatgaaatatctaaactgttccatttttatgtgggccttgttgacaaattattttggtattatttgacctagtatgtgatgagcagttagactaactatttatggacgtcattcattataagcaggcgctacacttgttgtttctggtg

SEQ ID NO: 46241 - DNA, 787 bp, Manihot esculenta
  Intron number 1 from transcript cassava4.1_004336m (locus cassava4.1_004336m.g) derived from phytozome v7.0 (chr-ID scaffold09354; pos 40618 to 41404 reverse strand)
gccagaaaccgggaacttctggccttcggaagaaggtttctttcttccttcttcttcttcttctttttaataattattttaattcaatcactgattattatccttaatatcagtcctcaataggatccgttttgttcgattgttttttctttgtgcttggttgatggcgtttgagccagttctttgtcattttactgagaggagaatagatcagtgtgcatgaatctgatctgtgcatgaatccattagctgaattttatgattacctttttgttttgctttcctgtggcattgcatctttctatatttctctggttgattcctaggcgagattttgttgtatcatttaatttaaatctggaagtgatttgcaccataagattttaaatgtaacttgtcaatcctttataattactttgaatattattttaatactattaagacttagatccttcttaataaactgttgttatttgtttttgaaatttttacaattttcatcgtaatcttcaatgtatatattgaagatgagtgcagcagtgaggtgaagtatttggaaattgtcaacccaaaccatatccatttctccaaatgtttagatgtaatttgccacttatagttacacgctgtgaggtcagacaatggatgctagaatatgaatatctatttttctcataatatttctgcttatggttgctgcatctggcttaaatagccataccttgtttaatacggtggctggtccttttcaggtgaaagtttttattcagcctaattacttggaaaa

SEQ ID NO: 46242 - DNA, 784 bp, Manihot esculenta
  Intron number 3 from transcript cassava4.1_015298m (locus cassava4.1_015298m.g) derived from phytozome v7.0 (chr-ID scaffold04457; pos 972157 to 972940)
ctcaccaggtaaacagttctagtgtagttggtttggatggaatttgaacttcgttgctactggtattttaagaatgtccagtgtaggtttattaatgtgaaaaactcagtgatagtccagttctttttttgtagaatggtcttatagttagtattgtcgtggctgagttgtttagcgactatgaattgaattctttgttattttgtctcagaaatcttctagcgggacgtttttttataaccattgtggttgttgaaacccatagtaagaggtgtgctttcaaatttatggcagtggttctaacaccaatctgtctgtagttctgaaaaatgaagcctcgattgctgaaggttttatacatctcatttagtagtaggacatggtaactggatgattttctttaaatttatagatatatgatgtccattagaagctcaagggcagttcatgcatttcaatttgtctattgtactttgcaatggcttaagtcaaattagtagttatcagcgtgttaattttgaactgaaaagggaatgttacaacttacaacacacaaataagatttcagtttccattactgcttaagcaactgtaatttaaatgaatatgtaattacagtccacgaggtccttgctgaagtgtatacttttctacataatgctagttatgtcggtctttcattttattattgcttttcaatccacaaaatagtgatttgaagctgctgcttcgtcattctttgtttgttttgttatcatatttcaggtctggaatacaaacgagc

SEQ ID NO: 46243 - DNA, 670 bp, Manihot esculenta
  Intron number 2 from transcript cassava4.1_033061m (locus cassava4.1_033061m.g) derived from phytozome v7.0 (chr-ID scaffold03219; pos 487667 to 488336)
tcacgttcggtgcgttctggatcgatgcagtaacagtagcagtagcattgccacgtgaaagtcttgtacgtttgattctttgttgggattcagaatttaatattatatatctttatttaaatttatatatatgtcgaagaaaaaaaaatatttatatctatttaattttatattattaaaaaaattaataaatagggaggtttacaatccatccttcaataagccttatatatgaaactatatatgtttatgttaatgaaagcttgttaattaatatatacgaaaacaacaaaatcaaaatactgtaactagttccacatgaaaaaatgtgatacatcatttcattataatgcaataatgtaaaattacatgtcccataatgcataaaggaattttttaaaaaaaaattgtgaaaatttgattggaaatgaataacgtagcttgaacttcaaatactaattgaattaatttaaaccttgaaaatttacaaatacatgaaattatgtattataaatagctcatacaatcacttgaactaaacaaagaattgaggagatcgattacaaaagacccagaacctatatgaaaacatcaactacttattcattaacattatcactggctaattaatcaagatacaagtgaaccttaacagcaatcaagaagacac

SEQ ID NO: 46244 - DNA, 925 bp, Manihot esculenta
  Intron number 2 from transcript cassava4.1_019886m (locus cassava4.1_018767m.g) derived from phytozome v7.0 (chr-ID scaffold11584; pos 213899 to 214823 reverse strand)
tattcctagtgctaagacccttggcgagtgggctggtgtgagtattcttcatttgctagcttttataatttcgggttttttcaagtgaaatctatgctcttcttctttagtcatatgaatttgcatgatttttgttattgtgatcccacttaccattagcaaagatcatagaggtttgtgttttgttttcattgtactgaagaaatagttataagattcatgattgcacgctcatgatggggatgtctggaaatccattccagatgcagggctgccggtgtatccattgcttgggtttctatgcatcttggatatctcaatgaaaatgatgctttctatttccttattggccttataatttgaaatataaggccaatagtcatgtttgtttcctcaaccatgagatggaagtatgaagatactggcacaaactagtttatgcttgtgctttctttttatcttgaatcaatctcttaataagatcaatttctcatccatctataaacttaaaatttcaaaaaaatgtgaatttgatgaagacatatgcaagaacagaaaatatttgtacaatccactatcttccttggtgtgaatcttaattatatatactcttatacactattggttaataggtttagtagttatggtacttctcgtctccctaaatatttggtggagtcaatgaactatgatttaacatatttttatttgtttcctcaaccatgtaccaagatttttgacttgaattatctaatagtcatgtttgatgtttaatatcgctgcatagatcactactttttcactctggtctaattttcacttcctgaatctagttatgatttgctaactataacattatctcatggtacttcttgggttctttactgcagttgtgcaaaatcgattctgagggcaaggccaggaa

SEQ ID NO: 46245 - DNA, 767 bp, Manihot esculenta
  Intron number 3 from transcript cassava4.1_031851m (locus cassava4.1_031851m.g) derived from phytozome v7.0 (chr-ID scaffold03750; pos 918064 to 918830)
gtacaaggtaacatttaaatctttagcatttatacaaattcaattttaaaaaagcagcacttattcaaaattcatttgttcaatgctattgacattttggtcaaatttctgataattgcattgcaaaatgagattttaaaaaagatcaaaggttttgatatcagactcaacatttaactacacttttctttggagttctagaggagccatttgcaagattattctaggtcagcaatgcagcctagaatggtattagaaaaaaagtgaacattaatgttctgttccttttcaatgataccactaagtcaacttaaccaagacaaaatgttgtgtggttttgtgctacctattaatatcattgtgaaacagtcattggcataaactgtctgatatagatatttctataaaaaattctgaattttgtgtaggaagaaaggaccaatatatcccatatacttgagataatcataaaacagcttgagaatttcatttgtaaaactaaaccataaaatttttcagaatttgttttattttatacaacagaatgtgagtgaattcctacgagatttttgaactaaaaaatgctttccaatgtctttttgtaattgaaactttattcttcaggttctttcaccccacatctttctatgttataggagcttgaattttttttctatatttcatgggggtattcttgttttaattgatagggtatcaattttttagaaactaacaagtcattgtacttgtgatccagaccagtttca

SEQ ID NO: 46246 - DNA, 830 bp, Manihot esculenta
  Intron number 1 from transcript cassava4.1_016760m (locus cassava4.1_016760m.g) derived from phytozome v7.0 (chr-ID scaffold03741; pos 17762 to 18591 reverse strand)
aagaagtttggcgaggatcatcaagaaattgctaagtaagtcgaatttctggattttcttatttgatactttaagatatgatcgtgtctatttgtgattcttcagttcgtggttaagtggttatttggaaggaaaagtaatgataactatgtcctccataagtgaagcttagggaatatcttgaaggaagggatttagttagctcagctgaaattgctgatttgaaaaacttagaccacaggcctatagtttatgatttctcgacttccactggttttcagctgaaagcatctccagaaaatgattttccttcctttgcttatgtctgggtgcagtaaatatcggtcatggtgatggaaatttgcatcaggtttactgaatgacgaaatcttataattcttattttcttgttcttaaatgggtaatgattttttctctaaagaacctggtttttggagtttcaacatgagattaaaaaaattgactgctaatgtgatgttcatctgtaagctatgcatatcattatcgtgttcacaacatagatgttacaacgtgagattggataatctgtatatgcaaatgacagaaatgaagcgctactggcaacttacaaatgcagccttctagttctaggctcaaaattgtctcatccttttcttgggagtttttcccgcatgaatctgacagccataaaagtagaaatgtggttatatttgttcgttttgttgttcaatcttgtgtgttaattatgtgaacattggttttccaactgctcccttctcctttttggctgtgttctgtttattacaagcttaagctgtggtttacag

SEQ ID NO: 46247 - DNA, 472 bp, Manihot esculenta
  Intron number 1 from transcript cassava4.1_009171m (locus cassava4.1_009171m.g) derived from phytozome v7.0 (chr-ID scaffold06916; pos 402490 to 402961)
aaggaaaatccccttcttggtccttcctctaccacgtgagtgcattccttcttgctatatttgatgtctcccttggaagttgctttgaaactttgaagatgttgcatagtgggatttgattaaatgtcatgcatctgaatatttgattctacactgcttgttcttcgaattcgtagtgggtgaatattggagtttttttttcttttctccctcgttggacagaaatcccaatttcaatgaaatttagttgcattaacctctctattgagttaacatgtgcttcctattgattttcctatgtatgtgtgcacttaaagttgtgccgtataatgttttctggccgactgtgctgcttaaggatgacgcgttcttctgttttttggtttgggtctgtgtaaagcagagattttttttttctttgggggtctaatatgttctggtgtttgtttattaattcttcagattagagaag

SEQ ID NO: 46248 - DNA, 855 bp, Manihot esculenta
  Intron number 2 from transcript cassava4.1_009171m (locus cassava4.1_009171m.g) derived from phytozome v7.0 (chr-ID scaffold06916; pos 403081 to 403935)
tattggaattcgcctcgagcaagaatttgggtttagtatgcacctggtttctcaatttcacctttgtttttatgttgtcatgtctcttatatgaaatctgcttctattacttttctattaattgcaaccttcagaaaaaggtgtgtgtagtgttgtacagcaacaaatatgaccgtacaaatactacttatttgttcttgctgatgtatgcaagaattaatggtagttaacttgtttggtctttgaaaaaaaaaaaaaaaattgtttgaaatactgaaaatagtaatggaaagtttactaggttcattgagcttatggatcaagatgaaataaacttaattgtgtactccactgaattgaaatgctgaaaatatatcctattgttgcctgttgtttactttgagtcagaaggttttgaagaaattatatgatatttacaggcatgtgaacacctgtcagtctgaccctgtgatggtaattttggatttgcatctgtagaattttgttgataaaaaatatatatccaatcaatcatacttcgcaaatttaaaacttgaaccttgctcagaaactttaggaaatgaacatattaaaagggcttggctgtttaaggctgcagtcacacatataaagaaatctgtgcagcagaccagcagttgagttcatggatgtttttatggatgataatttgaaaaagaaggggtgggggtttgggatggcagagggattctttgaacctatgtatagaatcttttcttttttctttaatctttgggcgaagatcagttacacttctgcacaaaaaataatttctttctcttatttgcatttttacagtcagaattgggttggtct

SEQ ID NO: 46249 - DNA, 986 bp, Manihot esculenta
  Intron number 1 from transcript cassava4.1_006245m (locus cassava4.1_006245m.g) derived from phytozome v7.0 (chr-ID scaffold12784; pos 45535 to 46520 reverse strand)
ttttttgtgctttggttgcacattgagtgtaatatgtaagtctttgtttctccctcatttgtgtttttttacctgcattttgctgtttcttcatgtgggtttttgttgcatttcgtttttcttttttgctttttgagttgatttcttttgccttaattgtcattgcaagatgtgttttcttttttggaaatttatggtaagttttatgtgatttccaattttgggatgggattgattttatgctgacttttctctgattaaaaaaaaaattatagattgacggagaatttgttgtgtggagagatttggtaacctgggttaataattttttgggaagaacttgttgttcactgcaattgtaagtaaaaaggttgaatcatcaactccatgattcaaaatatccagttagaatgtagaaggtctctctctgttatttcttttctttactttattttttttctttctttcttcttctttggtattattattattttctgattttaaaggtagcttggagaattttgtatttcaagctttggatcacaacttataccagattgatggacattcgagttaataatgcggttaacaagtccaattttcatttgttggcagccttgttattagtcatcaactactcccagcctgtcttaaagagctatttgcctttagtttgcataatacatatcagaatgataccttcttgtttttgcccagtttgagtagccaattaaccatggagatcaacagtgtggtagaatcttatgctgccttcttaaaatatgttgcatattaacatgcttaatgtgttaatgtgtttctgtttttgatatttgtaatttgtacaaacacctagttgattgcagcatgaattggttgaatatggagttttccacgtggtcttaaattttacattttcaattttcatggaaggtctgatgtttgaggttggattttaattggaacagtgagtaaaatctgaatca

SEQ ID NO: 46250 - DNA, 938 bp, Manihot esculenta
  Intron number 1 from transcript cassava4.1_010163m (locus cassava4.1_010163m.g) derived from phytozome v7.0 (chr-ID scaffold07297; pos 40599 to 41536 reverse strand)
tgctcccctttccaccacctctgatctcgcctctggtacgttttacatcttcttcttcttcttcttcaaatttctctaggttttgtttagatgattttcttgtacctttatttgatccttttttcttttcccctcagcgagtttaaagtgttttgaccgtcatagtgaaatggacaccctttttatagttcagtacttgatacttcatataggaatgaattaacttattttactgggtaattttgatttttgtttctagatgggtgaactgtctttgtgtgtgtgtgtatgtgcttaggtggttatgattttcgcctgataatgtagaaagactctttcaagtagtggaactggtatcttttgttatgagttagttttggtgaggtcagtaatggggttggtagctttttgttgtttctccattcttttcttttattaacttatcatcctgctgctttctgagatttcattttctttattgttttactgtaattattttgcttcagttgactggttctgctaaagtggtgttcttacgctttctttaattaatgctgttactgcagaagaataaagttgtttaaaaatgtgcatttcactcttttccttttgaaaattacttattattaagttgacaaaattgattatgcagcttatttgctactgataaaaagaggaagagaaccacatttgccacttaacccttgtgcatttttttgtacaaccgctttgtttgatgatcatgcttgctttatgtttcttttccttttttgggggactttccattataggcttatttactctgccttactgatcttgaagctgtgcccatatttaaaagattacaaaattggagattctatccattgacgttgaagtttgatttatcattaattttaatagaaaggcaggttggaaatcatcttgagggtattccg

SEQ ID NO: 46251 - DNA, 580 bp, Manihot esculenta
  Intron number 1 from transcript cassava4.1_009629m (locus cassava4.1_009629m.g) derived from phytozome v7.0 (chr-ID scaffold11661; pos 255147 to 255726 reverse strand)
ttaatccgaaattcgtattttaggacgccacagaggtctctgctttgcttccctttttaactccattgtctttgatgttatatgcatggaggatgttgatttttggttgatttgaaaatgggattcagtcattatgacaatgcttagtgatggtttgcatacgcttgttagtttgatattattggtaattcagcactttagaggaaactatgtggatgccattttgataagaaattgaaaatcaaaaagaaaaaaccacattgcagcttgtttgcccagttgagctgaaaaaccacattgcagcttgtttgcccagttgagctgaacatttattattattttttgaattccaatgatcatccattgcacagtgactcactagctcacatacatgtgaactctttctttctattggaagaactgccctttttggtgacattaaggttggtatagcaacaagcaatttgatagtaatgtttcacacatatcatttgatttccacagtgtttcaccattgaaatgtaagatttctcgatcttaattttctcacatgtattttttggctgcagaaagtattccc

SEQ ID NO: 46252 - DNA, 622 bp, Manihot esculenta
  Intron number 2 from transcript cassava4.1_004806m (locus cassava4.1_004806m.g) derived from phytozome v7.0 (chr-ID scaffold00847; pos 1655362 to 1655983 reverse strand)
gaatatcagtagtcgccattactgggctgtaagttcatcaatcccataaaaaaactatactttttctcttttgggtactacattttgtaatagattatgataaatgtatagtgtttctgccttaaatttccactcagcatttaggatctcacacatagatggaaagcaagttgatcaataatgtggttatgatgatgctttagaaattaggaagtgaaggtcgcattagttagtagacttagttaaagtggttaagctcaaagatcatctctctcgctcgctcgctcgttcatggaaatagtaaatttgtttttttccaaaagttcagattagtttaggccttacatcatagttaagtacatgttagttatgaatttcagattaagacgtcttttatcactatccaaatgtttgttattatgtgctgcccagtaatggctagaagaagaaagaggtcatcttttttggttatacgatgcaagttaatccgaatataatcatcataaactgactagttatttacagaaaaatgaatgataaatcttcatgaattttcttggtaactcctgaattctgtttgaatgcagtctgtaggatttactgcaattccactgtttgccat

SEQ ID NO: 46253 - DNA, 405 bp, Manihot esculenta
  Intron number 1 from transcript cassava4.1_025813m (locus cassava4.1_025813m.g) derived from phytozome v7.0 (chr-ID scaffold03077; pos 2915 to 3319 reverse strand)
ctggaggtttgtgacttccatttcgttaaaggattgagatattgtgttattttgcctttgtattttggatgcagttctgtttatgacttcttcacagcagaaatggcaattgaggaagtttgaatgctaagtagttgccaagatagaacgttccgttattggaaatttgaattctcgcttagttttaacggcttcattttcctttgaaatcgaattctgctgccttattttcttcttgtagctgtgagaattagtttgctatatccttcttcgttgccatataaatgcagatcattagaaactttctagggatgcatttttcttgaagtttgatagggattgattgtaatttcattttggttgcttgtagttcctggaagagttagggtagctgtgagattgcgg

SEQ ID NO: 46254 - DNA, 590 bp, Manihot esculenta
  Intron number 4 from transcript cassava4.1_011457m (locus cassava4.1_011457m.g) derived from phytozome v7.0 (chr-ID scaffold06916; pos 792405 to 792994)
gattcagtggagaagaaacaaagaattcccttgtttgttcttgctactgcctttgtccaatctgaagatttatcttttatagttttatctgtcagagcttgtggttgcttgaaaaattgagccttttctgccttcttaaagttacagtttccaggaaaagattttgcacaaacacatgaacacaatgtccagaaaatgattttccatgtcatattttccaagattttgtggaaccaatacaaaaaatagttcttcaacttgcacataatctgtatgatagaagaccaattcaatactaatcacctcatcattgataggaagagaaaagatggagacaaatgatttttatattgatgaactgaagaaatctaaggaaaaattttcatagacaatactcttcttgtctgcaagaggcagagacagcagaaaacaaattttttatgttattctttctgcatttgcccttaaaaatgcctacataagtttgcaaacatgtggatgcagaatttatttatttatttattaaattacaatttggagtagttaaatattttgattaaatatggcatatgcatttgcaggttggtggt

SEQ ID NO: 46255 - DNA, 965 bp, Manihot esculenta
  Intron number 3 from transcript cassava4.1_019689m (locus cassava4.1_019689m.g) derived from phytozome v7.0 (chr-ID scaffold03741; pos 225100 to 226064)
atcacagtgacgctgacataaaatttgctcaggtatgattaatatatatatagacacacacacattttgtttacatgtatgattatggagcaaaagttattggtaattgttgtccttgccgtgtggttttcttaggttaaatgtaattctttattttttgcatgctatatatttttgttttccactctcccaaaacttacacatcacctggcttgagttccatacaataacatcttggtctagcagttcatagtcttccaatttactatcccatcttcatccagtgcttccatctcttgcctttccctatctttgccacttccttgcgtactcgatttcttctcccaaggctgatgaaactcatctgcagatctgtactctgaaattgacacagttttgcaacgttttctttctgctgtattaagcatgtatgttctgttctcaatatgatgccaaaactacggattacctattttcttgtgtagatgccaaaatctatggattgtgttgatgtttacattatcaatagagtgcttcacttgctggtgtagggtgagggtatatctcaagttccaatgcatcctgtagaaacaaaataattttttatataaaataagattcacttctctttcagtgatgtaatatcaggaaccaccttgaacgaatctgcaataaaagagcaggcacttgaaaacgattagatgtactggatccattttggactaatttttgtgttaattgtaaaggtggaatctattcacgacatgtatgaaattttttgtattgcacttggagagagaattttaagttgggccaaatttgattgctgaataagatgtatgtttgttatctcttacatgtttagtatggtgatattcaaatttttttatttaatgtgaccaggtaactaaatctttcctttcgttgtaggccattggattgaagttctttgtccctgaggatta

SEQ ID NO: 46256 - DNA, 780 bp, Manihot esculenta
  Intron number 1 from transcript cassava4.1_008621m (locus cassava4.1_006523m.g) derived from phytozome v7.0 (chr-ID scaffold05760; pos 167608 to 168387 reverse strand)
agctcctcttcatcaggtttcaacagaacatttatttcctttattttttaagttatttttttcccttttttttctgaatttttccccggcttcgtcgaacattgaaaattttgggtaggtgaacttgaaatgtaaaatcgtgaattgcgggctttatgttgttttaaaaaaagataaagaaaagaaagtgtttgttttttccgatgataagtatgcaattatgcattctaacagtagtatagttgattgataaatagaggagactgaaagtaaaatagaatttggatcaacagaaaaaaatcgaaagataactttaaacaacaatcaatatctgttaataattatggaataaacaaacaggaaatactttatcagtgttgaattaattcgggtcgtaaactcttgttagctactaaaggaaagaaagaaaataaggtgtttattttatgtatcttcgtttgaaatgtgaaaaggaatcgcctcaaattcgaccaaaattggtttctggatgagttgatgagtggggtttttctccttttttttcccaagttctttggtgtttgttttaatggaatgaatgtatgaattgttcgcttctaagtcattttatatatatctggggggtggaggacgggtggatgatgggaatggaagaatgaatgaaattaattgaaggtcaaggattccaagttttgttaacttcttggcgtgtgtgggcgtgtatatgttattaaaaactgagcactgtctaagttagcatctatcaattattctgaagga

SEQ ID NO: 46257 - DNA, 336 bp, Manihot esculenta
  Intron number 2 from transcript cassava4.1_013406m (locus cassava4.1_013406m.g) derived from phytozome v7.0 (chr-ID scaffold02963; pos 47138 to 47473)
ggattattattggtcagtgaatcaaacacccattattctttcctattattttattttgttgggatattaatttatttccttataaacttgacaaaattataaaagtgggtatatatatagaacacaaattgaaaaattatatacaagtaaggcatagcaaagggaagtgaaattgaaggacacttgtggtcatcaagtgtttgatattttgtctatacatatcacaaatgcacaatcttcttgttgagaattggtaggggccttcttgtgtctggtttatgaacaaacaagtgggcatctcttaacagttggagatggtggtttgaacaggtggag

SEQ ID NO: 46258 - DNA, 818 bp, Manihot esculenta
  Intron number 2 from transcript cassava4.1_005155m (locus cassava4.1_005155m.g) derived from phytozome v7.0 (chr-ID scaffold05005; pos 45800 to 46617 reverse strand)
ctactcagccttcttccagccagcgaaaacctctggtaatattttcatacatgtttatacaatataaatcctcaggtagtggatgattggaaataagagtattattggcagcttggttactgagaaagtgcaaggaaatgaaaagaaactcagtttatttgtttatttagttttctctatctcattttggaagtccttcatagaaaatatctcgttgtagtcgagtactttctgaattaagttctttcaaacagatccatttcatttatggttcgatagatttggattaagctgaatttttttttcttcggagaaattctaatgagccattttgttttcttaatggagttgttcattgagagtataagaacttaaagcagaaacataatttatgtgtaatgttaactttttccacctccttctgaatttcacgttgtagcaagatcttttttgactagtgtatttttgtgcgataaatagagctgaaatttgaaaagcaatttatgattaaactattaagtgcgattttttctctccatggaagttgaattcaaagtttaatatttttggctgagtgtcatgaaaatatttactcggattaatttgaagtcatagagacttgtaattataaggaaaattttcattgcaaaaacaatcttttaaaaatttttcttagttaaaagccaaacacaaagtttattccgcagccttaagattggtgctattggaatattaatttgatgggagtttttgtaccaattaagtgataattaattgtatcagagggtaccaaatttcattggagggacatttgttga

SEQ ID NO: 46259 - DNA, 776 bp, Manihot esculenta
  Intron number 3 from transcript cassava4.1_010299m (locus cassava4.1_009654m.g) derived from phytozome v7.0 (chr-ID scaffold01493; pos 62312 to 63087 reverse strand)
gacctaaagccaaaggtaaatgcttcatatggggatggatgtatctaatcaacttaactatccattagggaaaattattatttggttcctgtattacaaggaaaacttactagttagtctctcagttttgatatattaatatattcttaaggttttaaaaagtttattattagttagtccgttaatttaaaccgttaaatattataaaaaaatttaaaatatcctcaatatggagagactaattaatcgactttttacaaaattaaggaattaactaataagttttttcaaattacagagattaaatagtaaaatatttaacaattaaaattaacagaaagactaattagtagatttttaaaatctctaatgtattttttaaaattgagagatcaactaatgagtttttcataatataggaactaaatagtaaattttctttattttattttaatttatcataacaacctgaagccatggatcttgcttctttattcttttttattctctttttttttttctttggatctatcaggttctgaatatgaatcataagcagataaaatataacctccaagccttgaccagaaatgattatccgcatatacatgaagttcatagaataggattgatgacaactcttttgggcatctgaaagatagttgttgttttgtcttctttatcgttttgatttggcatttgagtgttatgtgattcaagcatcttacatttgaaatgcagattttcgagaacggataattgaaaacttgaaggat

SEQ ID NO: 46260 - DNA, 938 bp, Manihot esculenta
  Intron number 1 from transcript cassava4.1_004918m (locus cassava4.1_004918m.g) derived from phytozome v7.0 (chr-ID scaffold07444; pos 244807 to 245744)
cgcccttgagcaactcaaagcatctgggattgatagtgagtattgttattcttattgttattgttgttatttcgtttacgttttttttttttgtatttaaattttcagaatgatataactagaatactataaaattgagaaagaaaaagtcaaatttgacggtgtcaagatcgatttttcttttttctatcattgaggcgtaatagacttgttttttcccggtgtataacgcaatgctcatgttgaatgacataatggttcttctttagccttttattcttttactggaatttgaagagaagtaaaatacctagactttggggtggagtatgttgtgggggagggggtggggacagaagtcctaattcatatttgagttctaattggcgatactactcgtaattttatggataaaattgatattgtcttaattttttttatcttttagttttacgatgaagctctcgtttgagatctgttaaaatactccagttaattatagcagccagtactattctaatacattagttttgtgatatgtgtttagcttaatgtttgcttttggcttttaattgtgtgcaagtccgattatagatcatgtgatttacttgatcctgaaggattgttgatgtgggacttcttgcattgtaattctctacatggatgttactggttgtatggactttgagattatttgccattgtgcaattgtagtcttaaatgtcaatttctctatattatggctgtggttgctttttctcccttaaaatattattctcttttttgtggaatttgttctgttgctgatgaattctccccccccccccctccctcttcgtatttatgattatatgacaagcatttacgaggactaaccactgaaaaattcattctttttgtcaggatatacaaaggaaaggagcagcattgctgtcata

SEQ ID NO: 46261 - DNA, 200 bp, Manihot esculenta
  Intron number 1 from transcript cassava4.1_017115m (locus cassava4.1_017115m.g) derived from phytozome v7.0 (chr-ID scaffold07520; pos 51283 to 51482)
gtaataagcttccatcgctttcttcttaccctgaggtacattctcattactcccacaaacttgattttctgctttatttttctccattctacctgatttgttttttttgttcagaacccatttccttgaagaagaattttattgttgaaaatttggtaaatttgtataatttgtaatttgaataatggggttctctgaag

SEQ ID NO: 46262 - DNA, 642 bp, Manihot esculenta
  Intron number 1 from transcript cassava4.1_027887m (locus cassava4.1_027887m.g) derived from phytozome v7.0 (chr-ID scaffold00935; pos 41918 to 42559)
gatctgggtgtggcgtcagcgaaaaggtatttcagtttttccaaaactaatatagaagggggaagattgtaaaattttggttagtttatgattttaaatttctgttatttttggtattggaaaaaagcgcgaaagatttattttttaggggagatttaaatgctttttttacgtgattaaggaactcctggaattgcgggcctctgtatttgaatttctttaatttcagtgtaagtggttgacttggtccggtccttttacatgagaatttgtcatgaaattttgggttttttttttatttttaaaaattaatttggtttctattggtgtggaatttattctgtcccttatcagctgaaataattatgaattttactatttaaaaaaatttataaatttgtcttttctttagttattatttttattttaatatctgtatttttttcccctttttggagccttgaactgaatgcgactttgcctttttcatagctactttgcttcttgttctttcacgcattacagtaaaaaataaaaatgacttttttcattgttctgctaatttcttttattttgttttttttttttgaaaaaaaatatatttcagagaggaaagcctgttgctggtgcaaaccccacaaa

SEQ ID NO: 46263 - DNA, 753 bp, Manihot esculenta
  Intron number 1 from transcript cassava4.1_016477m (locus cassava4.1_016472m.g) derived from phytozome v7.0 (chr-ID scaffold06850; pos 56244 to 56996)
tccccatttatctccgttatccatctttgtaacaggtactttttctctataattatgttcaattcttgtttgcactttgattattgtgacgaaatgaagatcggcatcggcattggcgttgatcttacttgaattgagtgcgtgatccggttttttttttccatctcttttggggttaatcgttttttataagcatcaaatccacgtttataaatgatcgtgactcctttttctttggatcgtttaaccggattgtgtatttgagttcagcataattcttggaactcgatgatagagaaagatttgagaatgttgtgttaggtggaggtacaagggaataacttgcagttgattgaaaatcctgttctagtttttgatcgtcatgtttgtatattttttatattcctttcttgaggaaaattttcaaaattacaaagaaaaaaaggtttgatactcttgtgaaattgggttcttactttgaaaaggtctaacctaatgaagcatctttgctcttgtttaaatttcaaagttggggatatgagtatttaccggtagtgcaacttatcttttgaggtggtcaaatgattgtcctggaccattaacatgtcttaatattctttcatatttttcattgttttgatacctatataggtcaattaggaaattttaagtcttcaaaaatttattaaattgcaagtttctgaagaaagattgtgaatattgatttttctgtatgctctttgagttgagtca

SEQ ID NO: 46264 - DNA, 785 bp, Manihot esculenta
  Intron number 5 from transcript cassava4.1_015356m (locus cassava4.1_013184m.g) derived from phytozome v7.0 (chr-ID scaffold01481; pos 277234 to 278018)
ctgacttataccaggtgattatatatggactttttgtaagggttttattcgtggattgtttttctttttattgtttatttcttctagttacatccacatatttaattgaatcttaagtgggattttttctttttccattttcaattcttcctaccaatcatacctttacggggagggaaagaaaaggagggaatatgcttgttaattcattaaaaagaaaaagaaaacaaggaaattccaatacttttttttttttgaataaaggaaattccacttcttaattatgtttcaaagttgattctagtgtaccgtcttctgctgttttaactttgaggcttatgtcaaaactgatagagcattaggtggatgtctaattatgcaaagagtaacttggagagatattctgatatttactcagttaaatttaaaagttgttgtataataatatggatttggaaacattttgatgtgctgttataagtgccattctgtctgcccaccaaatacactatatttgccaggtcatggatagagcacgactccatgttggttagattagtgcatcaaggatcaagcttaaatatcagaattgataggattctccccgaggttgtacttgagagagaaagactatcttgttaatatttaagtgatagttgttaatattagtggctcaaatacacaagaattgacattggttttgcaaatatgaggagcaaactgacttgtataaattattttcatttttagctcgctggtgtcgttgcagttgaggtcactggagg

SEQ ID NO: 46265 - DNA, 690 bp, Manihot esculenta
  Intron number 1 from transcript cassava4.1_015469m (locus cassava4.1_015469m.g) derived from phytozome v7.0 (chr-ID scaffold06683; pos 264586 to 265275 reverse strand)
cgatcgatctttttctgtgtgattatcttaaaaaggtcagaaattcgatcgatctttttctgtgtgattatcttaaaaaggtcagaaattccattcttaatttcgaatagttttcattttcattataataaataattttccttttgaaaatcttgatttaattttgcttgtggatgatatctttcatttgttaattattgccttgagcttctagaagtaaatagacgtgagagagagagagatatctgaggatttggtggtttgaatttgttgggtttttggaattttggttctaatttggaggcttgaaacttttgttaggaaacactatttcaactccaatgaaccgtttggttattagaaatgataaagaatctagaattctgatagcatcagtctgctttggagatagaccataagaactcgttgccatagtaatatgttctatttctgtcagtggctttaaggatacctttttatggacagttcctggattatagattatctttaaggtttccaactttaaatatctgtagtgtcctctggattgtgcttaggacgatttggttatagggttatagttttcaattctgcagtcttcaaatttgatgccagattattagtcattgttggtgttgatttagttttatatatgatttataggcttttgactggggtaataatcgtgag

SEQ ID NO: 46266 - DNA, 1012 bp, Manihot esculenta
  Intron number 2 from transcript cassava4.1_010986m (locus cassava4.1_010986m.g) derived from phytozome v7.0 (chr-ID scaffold06484; pos 191852 to 192863 reverse strand)
tttgtctcatttgctgagattgcttaagaccagaggtaaaatgaggaggcatgattcaactcctgggaacatttacattgtgtgttcattgaagcttttaagcttttttagtttaagaatccggaaatatatgcctttttaattcaaactacgtcaatatttcatttaatgttcattctctttttcttttttttttgtgtgtgtgtgttttgcttgtgggtattgttatctgtcttgcaattcttgagattggttttgcttgattttgctttcttttgtgtggattactgcttattttaggtgtagaatgtagtctgcagctatacaattgtcttccagggtgatgtgacgagagttttttttttttttcacctctaaagtcttgaagcttgatatgcttgtaaggctcgtttgtttcagaaagaatatttttgacgaaaatatttttcacatcttccggtgtttgggtactagaaaattagtcaatagaaaatattttactgatcaaagaaaaaaatatattattttaaggaaatgacttcgactttttaaaagagaaaaaattattttctgcattttaagaatgttattaagacctttatatataaatttattaatgtattttattttttaaattaaaattaaacaataaaaaataagttattttgttagaaaatattttgcgttggaaaacattttcccaaatacaaattattttccgcaaacaaacagggcctaaatttgatatttgcaatgagcacttgctttggaatgaagtgctgaaatcaattgacttccagagaaattattagtttgttttgagatacatatgctgttcttgttaatttgaacaaattgactaataaagtttgtccatcttttctgagcatttgtatgtcaccatggcattcttcttcttgttttcttgtgtcgttcaggcttacatatttttgtttgcatgttacatctaataacaggtgaggccatcatttcccctgaagcaaagcaagga

SEQ ID NO: 46267 - DNA, 934 bp, Manihot esculenta
  Intron number 1 from transcript cassava4.1_016010m (locus cassava4.1_016010m.g) derived from phytozome v7.0 (chr-ID scaffold02793; pos 17002 to 17935)
ggcaagtgtggattatgagggctggttgggtgtggggagtagggggggttgcaagttccttgtaccatctttgatttccagcaatggaaccaatgataggaacagggaggatgataaagtaaaagggattttgatgaaagaaggaaatagataatttattgcagaataatagtccaatttgaggacccactctccaatttcaagtctttggacaattgacaaaaatcagatgcagaaaagaaaagttactggtctatatatacctggtattattataactaaaaactaagaaacagatgtacattccctccactatggcatcagacttccactatctcaactagtccactttcctcgtcatttgggaggaatgggtctagctgaaacaaacaattgaaactgaattgatcttcatatctatcacgtgctttgttttccttcgagaatagataaatagtggaggacatgcatcatgagttaccggtgaatggaatgacaaggaaagggaaagggggaaacctaaaataacatggagggattggtatcacaaaatattgatgcagaattggtttcaagaaaactgaatggtgacaactgacaacagatccatcaagcgaacccaaactagtttggattaaggcttaaacctaaaataaaatggagggaagtggttttgtaaaatattgatgcagaattggtttcaagaaaactgaacggtgacaacagattcaaagaatgaacccaaacttgtctggattaaggcttagttgttattgttgttactgttgtaatgtgttttcctactctctgacagatgcacacactgcactaaatctgtttttccatacatttcttgatgttaaaaactgcagcttacatggaaacatttttctctgcagacccagtcttcctacagattttgtaaggttagatc

SEQ ID NO: 46268 - DNA, 604 bp, Manihot esculenta
  Intron number 1 from transcript cassava4.1_004059m (locus cassava4.1_004059m.g) derived from phytozome v7.0 (chr-ID scaffold07100; pos 267933 to 268536 reverse strand)
taggaaaaggtctgattctccatccatctgtatcctcgttctgtttttgttgttaatggtttaaataatagctcatggaattatagcaactgtcggttgcgtttcttagtttgggagaatggctgaaattgattcacgcttgattgtttgagttatcaccatgcttagattgcttgtgttgtagttcttgcaattattattattgttatttagttattctgagttggttgtttaaattggaaaatgagtacagagggacatacgcgtcatgcctgtttcagatgacttgtgctctgtccttttgttagatgagcaagtgaacatggatagttggttgtttaaattgaactctgtatcattaatgagatgctgattgcaattggtctaattggataacgttgatatgaaccaagacagcatctaattttgaaatattccatttcggtcactttttcttttttttggttcctcttctcttgttgtgtcttctcatcagtggattatgctgtaatctgttcccttgttccctatgggtaaagaagtgatgtttgcactgtggcttgtttcaggtgaagattcacaggaaggtgatcgtgttccaaac

SEQ ID NO: 46269 - DNA, 332 bp, Manihot esculenta
  Intron number 1 from transcript cassava4.1_026384m (locus cassava4.1_026384m.g) derived from phytozome v7.0 (chr-ID scaffold06609; pos 197355 to 197686)
aacagtccactggttctcctccattgctttgacaggtatgccatattattttaaaacttgtttgtttcttgaaaaatacattttagaaaaatattttttattatcccggaattttattaatatattttattttttgaattaaaatttaataataaaaaataaattactgtggaaaaaatattttacaaatacaagtaaatcaaatctctcttccagcgtaaagaaaagatgattaattaattaattactagcccataatcagaaattaagttatatcaagctcaaccgggtttaggtttaccatgttttgttattttcagctcttgtttaga

SEQ ID NO: 46270 - DNA, 157 bp, Manihot esculenta
  Intron number 2 from transcript cassava4.1_021911m (locus cassava4.1_021911m.g) derived from phytozome v7.0 (chr-ID scaffold00325; pos 730245 to 730401 reverse strand)
gagttcttgtggtgtgtgcctctattcttcacactatgtgatgcaatagcaatttgaatccattaaactttaacgttttcgcatatcaaaactgattttgcttcttgattttgtttttgtataaggatgtgatatatatgtatattaatggtgcagg

SEQ ID NO: 46271 - DNA, 633 bp, Manihot esculenta
  Intron number 1 from transcript cassava4.1_018118m (locus cassava4.1_018118m.g) derived from phytozome v7.0 (chr-ID scaffold01624; pos 102568 to 103200)
gctcctcttgctaacccacttctcatttctcaagggtgagtgccaaagtcactgttcttttgtttttcttgtgattttgagtcgatccttagctttgttcttttgtttgttaaaatgggatttttagtttgttgctgaattgtgaaatgagaatcagaaaaggtaatgagatctttcttgtaattgacacgaagttaatgggtttctgctccatttgggtgaaaactctagagttttgagatgtatctgtcagactgatcaaatcggagttttgggtacttagggttttgaatgttttggtggatcacttactttaggaaacgagctacgctgttcgtgttcttatcaggagttaatggggttaaatgatagagcatttgttgtttagtatatcagtgaagttattcttttcgttttcgttttcattttttgagagtttaagaagtggatgcttgtgaaaccttttaaatgatatgttcacatgattctattggaggattgtttaccatcgctgaaaaagtgcggatgttgattctaatatgtttctttattgtctatgaagttgatgattttcttatcaagggacttgtttttgcttcttaaattaggttgtttgaaacaaagctaaaagct

SEQ ID NO: 46272 - DNA, 713 bp, Manihot esculenta
  Intron number 2 from transcript cassava4.1_008473m (locus cassava4.1_008473m.g) derived from phytozome v7.0 (chr-ID scaffold07520; pos 1054114 to 1054826)
taagattgggcattgctaaatctcgttctgatgtacgtgccaattcatcctaaaaagaaatttatcttatttgatgctttatgggattgaagtatcacgaggtttaagttctattatctatggactttacgtaaccataaacatttaggaagaaaaatattctaatgattatgaagatgtttaatcatgagttggcttcagaatataactctaactagtttaatttttatgttagaatttagatcgtgcataaatatgtccttaaattaacttcaaataaatagtgtatgtgggtttatggttcttagatgatttgtttgattgaatccatgagtttatactctctctatatgtgtgtgtgtgtgtttccttctctgtcacatgagccttttaagccattcgcttgttgattttttaattttatattcttgaaagccgacatgaatatttttggtgtatcattattatccttaaggttctgtgttataatagttgagatgtatattgagtgactgtgttctaactttagtccccagcaacattgaaggtgaaattaaatcctaggtctttgctaatacaacaagaaattttaccatcaaaagctagctgaatcttcaatacttttgaatgatccttcttatttgagaaaatattcagtttatactacatcttttttggagtgcagattgttcgcggcactttgactctgcctc

SEQ ID NO: 46273 - DNA, 519 bp, Manihot esculenta
  Intron number 1 from transcript cassava4.1_015331m (locus cassava4.1_013864m.g) derived from phytozome v7.0 (chr-ID scaffold08446; pos 56253 to 56771 reverse strand)
ctttaaatctctctgattccaggtcagatttccatttatttgttcttcatttattgggtatttttctttttcttattttttttgggtttatcatgagattctatagatctttattcatttctttacatgggtttgctgttttaactatagtttttaagatctcttatgtcttaagatttgaggccttggtatttgttgttttcttattgattaaggggttttagtattcgtagctgaatcttttgatatcttttgttgcagatttagcgatatcaactgagtttgcaatagattttagtaggttttcttcgtaatattggattcctgacttgattagagacctgggattgagttgagcaattttgtttctttatttgcgtgctcttgttccgcttattgagtccaatgtcgctgttgctaaaaggcgattctatccagattcgcgaggtgtggaatgacaatcttgaagaagaatttgcacttatccgtgaaattgttgacgactatccatatatagcg

SEQ ID NO: 46274 - DNA, 648 bp, Manihot esculenta
  Intron number 1 from transcript cassava4.1_026165m (locus cassava4.1_026165m.g) derived from phytozome v7.0 (chr-ID scaffold07351; pos 52493 to 53140 reverse strand)
caatcaaagttcaaaccgttttcagaggctttttggtaagcaaaagtagggctttatttaaaaaattttcttactgataagtgggtggttttgacagagtaattttcagctttttttaattttcttttttcatgggtatgattcagatcaagttcaaaagttgatactctcatctgggtatttttagatttttgcagtttctgctctgctttattacaattgtgtgtttttttttcttccttgtaacaaaatgtttataacattgtggaggaaattgtataaattgcttttatgtctactcgtgaaagctggaaacacacaccaagggtaattaatgaaacagtgtcagtactacattttttctgagaaaagtaaatttagcttttagctttagttacttttcttaaatcttactctctcaaaagctggaaacactgattcaaatgttttttctttggtcccctctgttttgggatgattgctaagtcctacttcaactcgtcttttctttttcatctgctctatgaactgctccatgagaaagctgtgtttgtaaggtgttctgtaaattgactctttaatattcttaatgggtttatttggttaatcgcaggctcgaaaagctcttcgagcattgaaaggattggt

SEQ ID NO: 46275 - DNA, 816 bp, Manihot esculenta
  Intron number 2 from transcript cassava4.1_005165m (locus cassava4.1_005165m.g) derived from phytozome v7.0 (chr-ID scaffold02801; pos 252625 to 253440)
ctgctcagccttcttccagccagagaaaacctctggtaatatttccataagtatatatcttgggttcattggagggatgagaatatgggatgtttcagctcaagagcactgcttggttaatgagaaaatgcaagcagaagaggaaattatttatttatttattttttcagtttggaactctccactgagctttttttacaaaatatcctgttgtactcgggttgttctttcctggattaacttccttcagataaatccatttcttatgtttgggagattcagattaagcgtaaggattttttttttcttggagaatatctggtgatccattcttattgctgtttaattgagttcttcactcggatcagaagaactcaaggaaacataatttatgtctaattttaacttcccccatttgaaattcacaccttctgaagttgaatatctttcttgacaagtgcattttttgaagtaaatagggttgaaatttgaaaaggaattcacgagtataactactaagagtgatttttctcttcatggaagttgaattcaaagtttaatatcttgggcctcttgtttgtaaaatatatacaccaattaattggaagtatacaggcatgtaattattataaaatttcactgcaaaacctttttctttttgtggttttgttagttagaaagtgcaacacaaagttaattccatagccttaagattctattgataaactgaattattattattattatttttctttgctttattgataatgaattgtatcagagggttccaaattttattggggggacatttgttga

SEQ ID NO: 46276 - DNA, 907 bp, Manihot esculenta
  Intron number 3 from transcript cassava4.1_034012m (locus cassava4.1_034012m.g) derived from phytozome v7.0 (chr-ID scaffold02136; pos 32911 to 33817 reverse strand)
attcttcttgatcaagattttgaacctaaggtaaagtaattttataaggtaaagtaattttataataaataaatattttatttatataatcatgtatagtaaaaccttaatcactgaataccgaaattttatttttgaataatattgaaaaattatgtgaactttttttttgaattggaaattggagattggagaagcagaatctgagatctctcggatctaatcggatacacttatcaccagaataaacctattattgtaattatgtgaactccttaattatataatttgatttttgtaattaattaataaatctggttctaattcttttttggtttggccatatatttttggcttttttaataaaattgattgcttataaaaaaaattaataaatcaaggtcttttttgtctttttttaaagatttaatattttcttaatcaactttattgaagtacagaaaattgtgtaatttatcaaataaaaaaaagtaaaagtatattcatagaactaagtgtgaaaaataactttaattttaaattaagatatgtatataaatggcataataaattaacttaaattatttatttagataacagattttggacttgctcaattttttaccaacggtgctactcacatatccatatcatcagttatgggaacccatgtgtaagatataattttctttctatcatttaattgcattgatattattttctattttttcaaatgctattattatcttctcttagaataatttaaaataaaataaatattaaaataaataaaataaataaaataacacataaaaaaatataagtaatccttaatttgataatattaataatcttaacaaattctattgcagttacgaagatccgctgacaacaaaattgaggaagt

SEQ ID NO: 46277 - DNA, 741 bp, Manihot esculenta
  Intron number 1 from transcript cassava4.1_022808m (locus cassava4.1_022808m.g) derived from phytozome v7.0 (chr-ID scaffold03079; pos 78849 to 79589)
ctcaaaatgtaagctcattataaaatcgcaccttgcttttgtttggaatacctctgggtagtgtattaatgggttttgttggattttttttttcttttcattttgggtattgagataattgcttggaagtttattacatctttcagttactaacccttttaattggaatgccgctttttattttttaattggatttatgggatatagatgtctgtttcatgtactataatggctgtcgaggcttttttcaaatttgttctctctcccattaggtacttttttttgaaaaacaaaacacactcatgttcaattaccgtgatatttactttattgaagtttagtaaaaattcttactttttccctctatttggaataaaaaatttctcagcaattcaattcaatttaattcctcaattcttatgtttgaaatggaagaattcatttcttttttaatttacaaaattttcattttcaataaaatgaaatcatgcatgattttgtaagaattcatttgaattcttttcttgcaaaatgaatcataccaaatggagggtttatgcttcaattaatttttgtatttctttaatggaatttttctactgtttgataaattgtgtaacatgtatatttcgcttgctgcaaaatgtgagagttgctgcaatttttttagatgatttcaattgactaaaatttcgcaattttgtagctgggatctgcttattctgcaagttcagttggagg

SEQ ID NO: 46278 - DNA, 728 bp, Manihot esculenta
  Intron number 5 from transcript cassava4.1_012737m (locus cassava4.1_012737m.g) derived from phytozome v7.0 (chr-ID scaffold10642; pos 56765 to 57492)
gaacttacatcccagggagctggaacatattggtgagtaatgctgcaacctgtcctttgtgactcacctggatgtaaaagtttttatcccgtttgaaataatgaactacctgagacttgtttagtggacaattttttttacagcttacagtatatctagtagaaagttgatgtttcctagttagaaaaagtcactttgttaataatcttgtatcattgttataagatagcagataatgctattttatttctatgtcagttttacattgcacaaggtcctcattattgcattgatatcagaccacccttgcactccaggcaatgggttcatttcagtttatcagaatatcatatttttaagtcctatggaagacaacttgatttttttaaggtgtccagtcacccctttgtatctataaagaaggcatgactgattttgatgtgggatgaaaattggaacacttggaatgacttgcattgtaattgaccacacatatatttaatgccaatctatatacagatgcatttaaaatggataaatagaattacaagcatgaaacacaatagaaagggttttttaatgtgatttttgttaaaatgttgctcttttttttccgacattttttactgctgctaattgttctgcctcataatgcatcattgtttatcttcaatactgcagcatgctaatttcccccctcctttgtaatttaggtacctgccacctga

SEQ ID NO: 46279 - DNA, 719 bp, Manihot esculenta
  Intron number 3 from transcript cassava4.1_005756m (locus cassava4.1_005756m.g) derived from phytozome v7.0 (chr-ID scaffold03602; pos 666895 to 667613 reverse strand)
ttggggatccctttactcggattataagtccaaaggcgagttgcagtaattattattattattattaaagagtaatttaatttagtaggttttgtaaaaactataattgaatcaccatttttttataagaaataatcaatatcagaggttcattttgttaataaaaatatttctttttttaaatttcattgttaaattgtaacagtttagtccatcatatttcacttttgtaacattttggtccttgtagttctaatatttgtaataagtcttccctttgattgggattgacttcttcgatgcatggttaatggttaatttaacaaaaggattattttgttaacataatgaaatctcatggattaaattgtttctcattaaaaaaagcaagcttcaaaagttctgatttttgccaaaactaggggattttattgtaaattacccttattattattattattgtttaattctttcagcgcatgtcaagtttatgttgatttaatctggcagttccatactattctggttgaaaaacagtagtctactcgtgtcaaaaattatctcatttcctattcttagttttcccattattttttaatgctctaatggcttcttttttattccaaaaaaaaattatattgaaatgatacatctataatcctattgacatggtttggtttctaaattacaggagtaccagagttttcgaattggaagtg

SEQ ID NO: 46280 - DNA, 587 bp, Manihot esculenta
  Intron number 1 from transcript cassava4.1_007266m (locus cassava4.1_007266m.g) derived from phytozome v7.0 (chr-ID scaffold07777; pos 45867 to 46453)
ttggatccacagcagccatctgcgatcagtaaaaggtaataattttgcttttgttgtactggattttcttttgatctggttctggttttggtcttttcagttccatcggcctttgatgatttaatattttaaaattttcaattttgatatgagatgtgtgtttgggtttttgattttgaagtccctgaagcgaatacccatgaatttcaagatttttcgggcttgaaattagattacgtgctttaagcttgtattggcttcttcaagttccagaagaggaatttttgtccaccttcgttattttgttattaatttctttacttatattgcaattcttagctaaacatacactctggagagtcaacttccagtaggattagcatccatggcatgataatttcttggtttcttttctactgcgtcttttaaggaattggtgtatttagatccaatcggaagtgggtttaatctctatggatgggaaatactattgtgttccagtatatcattataatttactggtttcccttttgtttgttcttttattttcaggttataaacccattttgcgattgttatactgatat

SEQ ID NO: 46281 - DNA, 1000 bp, Manihot esculenta
  Intron number 1 from transcript cassava4.1_000274m (locus cassava4.1_000274m.g) derived from phytozome v7.0 (chr-ID scaffold11998; pos 1329885 to 1330884 reverse strand)
cgaaagtgaaaggatttccagcttggccagccacggtatgccctacacatatatctatttatattggctctatctttacatatgggtatgcttatggtattccaagtgttcatgtacgtttgtctatacctttggttcttgtttttcttttgaatctctgatttagtaaggcttttaggttgcatactactaccagttgtcttcgtcttgtggaatctcaacagaatgtttaggttcttttaggacgttaattgcggattttctgctagctttattgatgtttactagtttaatttagtcgcctttggcagagtaacttccttggagactttatattcaaatcctcttaattagttctgctgccataaaaaaacgcccgtgttgcattgagattaagaactactttatttttattttatttctcatttgttggaactgtactcttttattcggatatgtaattgcacctagttgattttgaacagctcaagtttgatgcataaaaaatttttcaagctccagctgaactcttgcttgacttgtttcaaacttgccccaatatctatacgctcaagcttggtttcttttgaaaatgagctaagatgagaagagtttttattgagccaactatcacatcgctagcactttgactcagttcattataatgagttttaggctaaaaataataagtttaaaactaaaacgttctcaaattcaataaaaatagtttttaataccatctaactagaatacttgaagtagtgctttttcaaaactaaagttccaagagaagcctaagattttgtgggaaatttgaattttttggttaactgaatgcatttatttgctggaagtagccactcacataatctttgtatactaattctaacaaaaatgagcattctgtttctattctccatctgcatgtcgaccatcaagtttatttatttggttgctgatgccaggtaagtgagccggagaagtggggatatccagctga

SEQ ID NO: 46282 - DNA, 1037 bp, Manihot esculenta
  Intron number 1 from transcript cassava4.1_027841m (locus cassava4.1_027841m.g) derived from phytozome v7.0 (chr-ID scaffold09018; pos 259684 to 260720)
caacttcctcaagccctttgctccccaaatctagcgtacaatcccttttcaaagagatcccaagttcccttttccaattatcaaaccaagagtcaactccaactaagaatagacatgcgatatttactctctgctaatagaacttgataaatctcaaaatatttcaagcatttattaagccaaaccctaggttgaggttctttcccattaaaacttattcaatttttttgcaacaatttttttaattacctcagaattcacaacaatgccagaagggttaccagaactacctaaatctttctggtgaacagcaactctaggaagaggcagcagacctttgttttcagtttctctgttttcttgccctgttctttgcctttttccatcaacaaagacttgatgaaggcctgcaactcctttctcaatacctatctttagaagactttatacttccttccttcaaagaacgcagctctctattaacctccactgcattgttttggaagtcccctcagataatcctcaactgttctttcagctctgcaaaaaccatttcttaactaactatcactgagctagttattattccaacccccaaggatcaaaaattgcctcagtcccgcttgaaatcagctctgatacccaatgttagggtttttgtgccctaacagagaattagaagagaaacagaagatgaaatagggagaagaggagaattaggtagaaaataatagagagagagagagagagagagagagagagagagagagagatatagaatcagggaaggttttgtttcttgaattcttggactgaatccctcatcactttccttatactttgtagctgctactgtaactatctctaacaaggtaactatcatctaactacctgagctactttcttctaaaactaacttccttctccagtttcaactgtcttgttcccattctgccttctgtacctcttcctataatatgcaacattatacttctgttgcaggtttacacagttcacttcaagtgcaacaaaaagct

SEQ ID NO: 46283 - DNA, 328 bp, Manihot esculenta
  Intron number 1 from transcript cassava4.1_002219m (locus cassava4.1_002219m.g) derived from phytozome v7.0 (chr-ID scaffold11998; pos 1242296 to 1242623)
cagcagtattgccaccgggagtttacacgcttcaggtactaaattcgggtctcacgtgattaattggacttagaattatttgattgtttttggacaattatgtgtttatgaaattattcgttagtgcgtttgtaattgcagtgtggcgggtgcttttgggaagtggattttagatatttttggttgattattgctaaatcttcttctgcttttcactggattgatgacatttccatttgaatcccacattccaagttattcaaaggtcaaaataacctttccttaataaactttgctgtgtttctacgtcttcaggatctgagagcat

SEQ ID NO: 46284 - DNA, 521 bp, Manihot esculenta
  Intron number 1 from transcript cassava4.1_007761m (locus cassava4.1_007761m.g) derived from phytozome v7.0 (chr-ID scaffold12317; pos 94770 to 95290)
tcttggttgtcttatcatctatttgattataattggtaagttcccttgcctttggttttacaatttcttgttctgtaggttgaatttacaagttccacagatatccacaaacacccacttctcaattatggagagtcaatttcaaatttttgcttcttctggggttttagggttatcaatgatattattcaagggttgtcaaattctttattggctgtgaattctttgattgtggactgttcccttctgcagaaattgtttttttttttttttttttgcggagtcctcagcggcagatttcatgtttgattatttgtttctgcatatcaggaagcaaatgtttgagtagttcaccctttcttgcacctcagccactgttgatagaacaataatctgagtttgccggccttaaaatttgaatgatttgatcaattctttgcattcaaatgattggcttgaaacactttttctaacaaaattccagacattgtttgatgaattttgtactgttctcctagggg

SEQ ID NO: 46285 - DNA, 591 bp, Manihot esculenta
  Intron number 1 from transcript cassava4.1_008722m (locus cassava4.1_008250m.g) derived from phytozome v7.0 (chr-ID scaffold06715; pos 204592 to 205182)
tttagcgtctgctgaatccgaagcaaaaaaaagttagtgttatcgtgcatgtccgcttatggctcagcttttatgatttgtttgagtttcttgattttattttctaagaaaatttagtagttgcagattttcgtcaattgaaacaaataggtggaattccaacaacctgttaattgattctaagattaactatcaattcaccttaaaattttagggaaaggaggattccgagtaccgagtaaacattgtggatgtattagtagcatataagagtggatctgattaggttttaaaaaccctagcgctgtaacattcattgtgatatagaacgcaatagaagtatttgaaatttattattttctcattttttgctgttattttgatggaattttgtgagtggatgagctagtttcgaatgattttaaatgttgtttactggaaagttcaatttccatggtttttcttcttctttgcttaatatatgcatgccaagtgtttgtagaaagagtttcataagtttatatttgtgtctgcttttcttggctaatgttttcaggcaactcttgctgattctttccttgcggatcttga

SEQ ID NO: 46286 - DNA, 239 bp, Manihot esculenta
  Intron number 2 from transcript cassava4.1_008722m (locus cassava4.1_008250m.g) derived from phytozome v7.0 (chr-ID scaffold06715; pos 205203 to 205441)
ctgatattattgtgagtatatctttctagtatttttagccatttttttttgctcttctttttgcaatttttttttcactgtgaacattaaaagaattttgatttgggacttcacctttagtggataacacttgttggttggactgttttatttgttagcactctgactgggaagttttttaggatatcttttctttatttattgtcttcgacattcttggttctccttgcaggaggaag

SEQ ID NO: 46287 - DNA, 360 bp, Manihot esculenta
  Intron number 3 from transcript cassava4.1_008722m (locus cassava4.1_008250m.g) derived from phytozome v7.0 (chr-ID scaffold06715; pos 205570 to 205929)
caggttagttcatgcatttttgcaatactcattttaaaattccagtaattgcatttttatgtgtttctcaacggcccctggtttgattagaccaaacctttttcattttaatcttccaacttttgcattatgtgactatgcttaatcattctccattgattatttttccttgcaattttgatgtatttcttttctttaagtatatatgtattattgaagggatgaagtttgctatttgagtaattggtgttttgccagattgacatggatataatgactaatttgttctttaaatttagaaagtggaagatgctcttgagaagggttctgatatttcaaatcagggtttggtactggaag

SEQ ID NO: 46288 - DNA, 795 bp, Manihot esculenta
  Intron number 1 from transcript cassava4.1_012189m (locus cassava4.1_012189m.g) derived from phytozome v7.0 (chr-ID scaffold11998; pos 467188 to 467982)
ctgagacgttctccaatctgagaaaacaaggcaaagtaagtacctcgttatttttcttagtttctttgtttctaacatgggtatgtttctgttattcggtaggaattgatttttatttttatttttttatgagtacggaggggtagcgtgcaattggttggagaagagaggaactcaccttgatgtcagaaatgaattgagtagatcaatggcttactcgtttgaatttatggttgttggtaactaaacatggaataaaagaagagcttaattggataaaattgacaactgatcaacatgaaacgtttaattaattgatggccttgcaagtttgcccacagggcataatttgctgtggaaaatattgcacattttcattagttttttgattgtgcattgcaatttgttgaaaaaggtaaaaatgaaacccggttcatcattgtatatcaggctaatctctatgaaatatggatttagccatccgattttccttttatttagctgtggaaagaggtttagttaatctagtgattctaaggtgctgttatttggatccaaattttatataagaaccgccagaattaaggttatttaacagagaacattattttgggaatgtccaaaaggatttcttttgaggtttgagcaagaaggggttaagaatgagaaatagcattaggattcatttggtggggaaagtggaagaaaattattttaatctctcttaattttgttttgaagagtatacctttgtgtgaaggtggcactcatttcatatatcactgctggtgatcc

SEQ ID NO: 46289 - DNA, 214 bp, Manihot esculenta
  Intron number 7 from transcript cassava4.1_029596m (locus cassava4.1_029596m.g) derived from phytozome v7.0 (chr-ID scaffold00847; pos 918377 to 918590 reverse strand)
ggagttgacacttggaataattcctgggtttggaggtacgaaatgttttttatggaaatacttgtttgcatgaagaaaagagcgcatgtgcactcccacacttgtgttcaagtgctgttaattttttgcatttgagtttgcaactgcagactaaattattttgtgggtattcttttaaggtacacaacgtcttccaaggcttgtaggactgtca

SEQ ID NO: 46290 - DNA, 307 bp, Manihot esculenta
  Intron number 1 from transcript cassava4.1_006414m (locus cassava4.1_006414m.g) derived from phytozome v7.0 (chr-ID scaffold01624; pos 207369 to 207675 reverse strand)
tttgcaagttcgccgaggaagtggtcagtggtaaggttagtcttgtggcgatgattttgcttttcttagtttgttttaatgcttagaaatatattgtttgggcttatttgtatatattttgatggttgaggaggaaatttgaagctggagaattcctgcattatttactgcatctgcaattttgcatgcatgctctagttttgaagaagttgtttgaggtaatgatttgccttctatttgactgttctgtcatgctttgcactttgatgcagattaagcccccatcttcgccagaaggccgttttac

SEQ ID NO: 46291 - DNA, 536 bp, Manihot esculenta
  Intron number 1 from transcript cassava4.1_029641m (locus cassava4.1_029641m.g) derived from phytozome v7.0 (chr-ID scaffold03866; pos 123318 to 123853)
aatttgagcccagcagcggtacgcttattcacatgaacacacgcacacacgcactatattatttgtgttgccaaagatgcccttttgatccttgcaatcgtgagggtacccttttgttttttttttttaatgaaaaatcgttccagtgtagaagtccctgaaacattagcaagaagatccttcaaaacacgcggtggatcttgtagaaaaacaataacattgtacactttgtaaaaaacttggacaatcatccccttaaaggtgccttcttgagtggagtcaagtccagtatcagtatattgaaagaattaacctttttatttcaaatttgtgttacctgcaaaagtatagttatctaagtttcatgctccaaattccaatcttgatcatgagggaatgtgccctgtatcaaccaaagacatgttttgaaggtggagttaaattcgatttattttataaacagggcagccgagaagtgaacttgttattattaaaatgcagggaattgtgtactctacaaaattgcatcttcgaag

SEQ ID NO: 46292 - DNA, 755 bp, Manihot esculenta
  Intron number 3 from transcript cassava4.1_017431m (locus cassava4.1_017368m.g) derived from phytozome v7.0 (chr-ID scaffold00325; pos 589094 to 589848 reverse strand)
ggggttggtgagtctttctgtttgctaatgtattggaccactggtcaactagggaaaaattctgtatatgcaattattgatgttttggctacctgagagagtacttcttccttatcattcctatgaaaacttgaggaacaaactcctcttatttttatctgtggttgaattcccaagctattgaagctagttggcaaaatattgtttcatcttgtattgtattaaagcaaacttcaaatttctgcaaggtttggcatcttataataacctagggtgacaagttgaaaacaattaatagcgtgataggttttattcattaattttgtttttagttcgattatgtaagtttgtttatgtttatgttaatctcatagccctctgtggttgtactgactctactcttagagctttgggaatttatactgattgctgaaccagtaatcatatggtgaatatgctaggaagtttaaaataacgcatgaagtttgtaggttgatggagagcgtacacactcttgttctggctttatcattattttattttttttactctttcatcacttctatctcaatcatggcatcacaatgtttagaagtcagcattaactgagagtttgtagtcatgatgagatgaacttttagttttcaagatgtaattcttgacaatgaaagagcagctttatggcggttatttgtagttcttgcatggcgtctaaaactactttctcatattgcagatccaagttttggtatttc

SEQ ID NO: 46293 - DNA, 775 bp, Manihot esculenta
  Intron number 3 from transcript cassava4.1_023110m (locus cassava4.1_023110m.g) derived from phytozome v7.0 (chr-ID scaffold08828; pos 21462 to 22236 reverse strand)
aaaagttgaaggtgtgcagttcaatttattatttgtaagttcactttttttttggtcagtccaagtcctaactggtgcagttcaagagtcttatgggcattaattcccatagttcaagaatctatctttagtctgcttagcttttatggttatttgattcttttctatacttcttgatgctaaaatggtttaatggacgaaatacttttattccagtatgaccatgcaataatatgtgctgagaattgagagaacagatttactatgttttgcataaaactaatttgatatttgaatattaacatttttcagcacgctccaagaatctacttattactgagcataatggattattgaattttaccaacttctgtaggattgacttccttgagtgagattgagtttttatcaacttgtcttgaattaaattatgtaaagggtttatcaaaagggttgtcagcagtcagaaactcagtatattaatagccatctgactgtaatgtcttttctgaagaaggtatatcccttatgttatgagggcataatcatggttacatcttttgagtctgtttgtatgtagtgctaagagacctgcagttgaagatgtttctgtcaagttcctctcaaattgcttggaaaaatttcactcttttactttttgattctataatgtttcctcactgcagcttgataaagctgtatagtggttttggtattataagctgtcttaggcagtttaattactcattatcggttatgtaggctggcagtgtgg

SEQ ID NO: 46294 - DNA, 572 bp, Manihot esculenta
  Intron number 1 from transcript cassava4.1_023110m (locus cassava4.1_023110m.g) derived from phytozome v7.0 (chr-ID scaffold08828; pos 22592 to 23163 reverse strand)
tgagactagaagatactttcccaatcaaccacttggttagccccctcccccctttttgttgctgctttttagtcttcctgttgttttcttggtcatatatatatgagtatcaacctcggcctctctctgattgtgatactttttatatggcgcttttctcatcaacatttttgtacgttacttcgaaatatctgaatgttaaatattttcaggggcttttgcgtgcatgaacttagccttataaacaagataattgatcatcaacagcgaagggctcatttctgagtcaaatttctttgaacgtctctaaacattgaatttaacttagcttatttaattgcattggatattttacgatgaaaagttaaaactatcttttgatcagttggcatggttgatttttttgcattgtttaaggattaaatgttattgtcactaaatgtttcttttgaaaatcagttgaattcttccttcctgttctcgagtttttgaatcttgatatcttcaacaatgtgtgcatttcttgaaatttggcagacttggagcagatattggaggaagcaaaacaccgt

SEQ ID NO: 46295 - DNA, 799 bp, Manihot esculenta
  Intron number 1 from transcript cassava4.1_027500m (locus cassava4.1_027500m.g) derived from phytozome v7.0 (chr-ID scaffold00847; pos 1147479 to 1148277 reverse strand)
cgattgccttggccgggtgtgtaaggctacgccacaggaagccttttcctacacgcgtctccaacttcaaaattagtggaagaaatctcgcctcaatagtaaaattccaacgcacccgcacttgtcagcctccctcaggcctcaaccgaccaacccctgaaataatgaaatttatgcttcggaaaaaaacaatgcttatatatgaaaaaaaaaatcagctagtattttttcagaaaaaaaaaaaaaaacactgtcttctggttagattgcaattaatctataaagctacgaatttagatgaattttaaattatttatcttaatttcttatatattagtaaaaaattaaatgaatttaaatttttaaatatgtaaaattttaatatacttattcattagcgtgcagtgtgcctagctcctggcttgtatattctctataacgtattatgtttacactttatctggacaacaaattcgaaagcctcttcgagtctctgactcacccttttgccttcctatatcttatactttgaaccttgaaatagggagaggacacgcccttcaacgaaagcttacagcaacatatcatggctattacaagcagttgctgcctcagtctcccccctccaattccaacctctcgtccttcaacccttcaggcttcttccaattcaaagaattctcaaggttcatggtaagtctcaagatcatcccttgacccaactctgttttcatagtattaatataattttattaattgtaacgtttaaaaggttgaagaacgacaagtggagaagcca

SEQ ID NO: 46296 - DNA, 919 bp, Manihot esculenta
  Intron number 1 from transcript cassava4.1_011463m (locus cassava4.1_011463m.g) derived from phytozome v7.0 (chr-ID scaffold01945; pos 339013 to 339931)
caaaaagagcccttacgaggccgtcgctttcgagggttatgaataacgacacatatgctgggttatgttcttctgtctttccgtcagcgtagaagtgaattgcccactggtgtcacccaacgtcgaacgtatttgatgataaaaaatttccgattccgatgcccttcgttagagagcagccatggattttgaattcgtggaatccttttatcgtcatggtcctggaggttgaagtgctggatgggaaattacaattggaggaggagctggatacgggtttggagaggtttgcagtgatatccatcaaatagataaaaatatgggattttgataaaatatgagacttgttgatggctgaatcaaattgggtttgattgaattgattccgagaggcgttgcttcgaccttggagcaattggaggtcaaggagttgaaactggagacattaagatgcctggtccacaacgtcggcggggaagaaattgattttttgttatcagaacgatgagtcaccactcatcagcatgagctaagcagaacgggaaaaatcgaaagagtaaaaaattaacatgtaaggtagccttgctttcgttgagagttgaactcaagacctcccgcttactaaacgggtgctctaaccaactgagctacgagagcagatgctcactgattgtttcgaccttttgataaccaaaggaaacgtctggcgtgttgacgtacagctcgaatcgaacaggcgcgttgaatgatgtgatccaatcaaattcacaaggtgacgacgtcaaaattcttcacatgtgacgcaacttcctggatcaaaagaggacaggtggcgagatatttctgcaatttaataaacatctagacccattgttgcaaataagaaaaagagaggcagagagagggggcctcaacacgt

SEQ ID NO: 46297 - DNA, 485 bp, Manihot esculenta
  Intron number 2 from transcript cassava4.1_012588m (locus cassava4.1_012588m.g) derived from phytozome v7.0 (chr-ID scaffold03219; pos 137997 to 138481 reverse strand)
ccgtttctgtcaaatacaaggtatttctctctgcttcctcctgcattttgtttgtttttcctctgaattacctttgtttgagaggaggtttttaagtaaacgaaggttttgtgagggttgaatttggcttgggataatatatgatcttagtttgaagcagttaacataacttttagggtaatttatagtatagttattaatatttagcaagacctacaatttagtccttattttttttaattgtaaataatttagtctctaattttttattttattaacaaaatagttatttttttaaatttaccgatcttcagtgttaactcaaattaaaagaactagatttctcatagatgtgtggcactggaaggaactagaagatgagttccagtttcagacatgatttgaaatgatactattcttttggaagtcctactttcttagtaattgcaggatccgctcaggagttttactggtcgtgacaaata

SEQ ID NO: 46298 - DNA, 676 bp, Manihot esculenta
  Intron number 1 from transcript cassava4.1_004747m (locus cassava4.1_004747m.g) derived from phytozome v7.0 (chr-ID scaffold08287; pos 96856 to 97531 reverse strand)
ccgtctcagcacgacgattatcacactttattgaggtaattcaaccgtttctgtgatagcatttgatatgcaatttcgtattagatgttttctgataagctagtcagattgttgttccctggaagcaacaatgtgtgaaggatggcattgaaactttgctgacttcggaagtgatcagtttggaactatgaactatggttttcacagttatgacttgttaatccagaggatggtgttggtgcatgagttgaaatatagtctgcttgattaattagagaagactttggagaatttactaagattgccaataatccagttgtgttggagatttgtcaacttagcttagggctcttactgcacgaacatttaactaattaaatctggtaaaattgcggatctaccaaggttgtcatataatgtgcatcatgtatatatttggatgctgccacatgctttggtatatggtatcaaaatccaagaactagctccttctcgttcctgccattattcaagaagcttttattgtctcaagcaatttcaaaaccgtaggacaattctgttacaactatttctatgtacatctttttctccagaaaactacaattctactaaattgcagaattgaatttcctttattgcaggtttctaaaggctcgaaaatttgacctcgagaaaa

SEQ ID NO: 46299 - DNA, 815 bp, Manihot esculenta
  Intron number 1 from transcript cassava4.1_008853m (locus cassava4.1_008853m.g) derived from phytozome v7.0 (chr-ID scaffold11106; pos 487196 to 488010 reverse strand)
tctaagaggtgatgttcctttcttcgtaattctttttgggtataataaaagagattttattgtcatttgatcgtgatcgttatgattgtcgtgggtttgtgaggctattgttgactaagtttgaatgggttgtatgtaaaaagaataaggtgtttgaatttgctgattcatgggtttttaaagcgtagaaatttgcttgtgcctatgaaaactgaagcgggtttctgattaagatttgaatgggttgaagataaatagcagaaagtttttgaatttattggttgatgagctctaaaaggtttgaaacctgcctgtgcttgcgaaaattgaattggatttctgctaggttgcagagaagaactatgaaggaaaagatgaatgttgaatagtcttttttttttttagaaaaaaatgttcatttattttttctgcaatactcgctagtcccccccccccccctgtgtttgattaattgattttactcataaaatcttggtgcttatttctttgcatgtgtcaagttcatgggataaattagttcatttcaatagagaaacctaaaatcattcattcatgaattagtatgagattaatgtgatgggaatagctttctcctctgtcattgctctctggggaatggaaatgagaaagagtaaagagtttaatgatttgctgttgactgaaagttatcatatcatatcttgcccgtcataaaaattgttattaggttagcatagtttctttttttttttttttttaaatttaataatcttgttgtgtttattcttccagggtactttgcaagttttttgcac

SEQ ID NO: 46300 - DNA, 773 bp, Manihot esculenta
  Intron number 1 from transcript cassava4.1_018160m (locus cassava4.1_016557m.g) derived from phytozome v7.0 (chr-ID scaffold03219; pos 572409 to 573181 reverse strand)
gtagtgctcaggtaaagcgcttgggtattcaaatagataggttgcttcaacttccttctgcttgtcagctccaaaatgccagtgctagcgtttgccctagtgagttctctctctctctaaccccctgagcctgtttccttcattcggtgtgtagatctttttctttttttctaaaattcagattattaattactcttatattttaaactaaggttaatatttgtattgattgtgagtattaatttctattggtttcaagaagatatatttactttgttttatcataatatggcatgatattttatttattagtgtcttaatattatcatccctaatatgtattgaaaaaatgatatgaaattcatttgttactagataaatttaataataaaactagaaattagtgtagattatattataaaagattatatacaatttgttattttaattatattaaaaaaattatagaataatatatggagattaaacttgctcatatttaacttagagctacttgaattggaaaaattacatttaataataataataataaaaaaaacattttcaagttgacgattcgattccatacttttgattttaagaacaaaaagaccggaaccagacgggctcattgactcctacacatagtctcagtagttcttgcttcttttttttttttttttaatttttcaggagacaaatttatagttcattatgctgacgtaatttctatgaatggacagagcttcttggcctctctcctacctcaccgg

SEQ ID NO: 46301 - DNA, 957 bp, Manihot esculenta
  Intron number 1 from transcript cassava4.1_016920m (locus cassava4.1_016920m.g) derived from phytozome v7.0 (chr-ID scaffold01466; pos 144537 to 145493 reverse strand)
tgctcctttctgctcttcgctttttccgagctcaggtaaatttcctcttcttcttttaggcttcgttgatttcgaagcaacacaatggagatgtggaatgatttcttgacggtttatgaactgctatttggagactagtaatctcgtccctatgttgtgattaataaaatgtagtggtgaaaaaggaaatttctatgtcttgtggctaagagcttttcttataatataatgtaatctagattcagattagacatgatgggcctctaccaagaaatatagatgtaatgccataagtcaaggcagagctcatctattaacagggcaatagatgaaaactgtgcgcaagtgatatgcaacttgttaaaaatgatggtaacaataagagttataatgaaataagtaatgaatatgatttggaaaacacttgtatttttgaagactcaatatatttttagttcatagaaaagaatgagtgcgttatcattattattatttggttttagtgtatttatgtgcttctgtgatgaatacgtttcatggctttgttcatgtaaatggcatgtgtggattctgtgattcatgataaattattttattcctcattttttaaattctatccgaattgtgataattgtcttgcttttcaggtgccatgttttggcaattcaaaagttttatattttgacatttttggtttgaagtgtctctgttcattatatattcagagaaccagacctcaacattttccatttccattttcatgttctctttacgattatgtcaaggggcttttgattgggttggtttccagcataactttgatttatgcctcgtcttcttctcttactgggttctaattatttgttcaaatgcaatgtcaaattatctgttccattcttgttgtttattttgtttctttcctgagttattacatctatatgatccagttttgtgaag

SEQ ID NO: 46302 - DNA, 707 bp, Manihot esculenta; identical to SEQ ID NO: 45696
  Intron number 1 from transcript cassava4.1_016256m (locus cassava4.1_016226m.g) derived from phytozome v7.0 (chr-ID scaffold12946; pos 41297 to 42003 reverse strand)

SEQ ID NO: 46303 - DNA, 880 bp, Manihot esculenta
  Intron number 2 from transcript cassava4.1_011049m (locus cassava4.1_011049m.g) derived from phytozome v7.0 (chr-ID scaffold07520; pos 2065863 to 2066742 reverse strand)
aagcaatttcaaactattgagagactttttgaacggtcagtaatttcacaagtaataaatgcacttgagaatcattttcttagttttctaagtttacttggtcttcattaggtggtcttcctaaggctaaaaggcaggaatgtagcatgcttaacttttctccagtgttcctgccaacacccaaaaagaggcaaaatttgcaaaaaattcttggtgaattgctcacaggcatgtggagatgaaaaattctaaccttaataatgtggcgtttttctatcaggattggatataagacatgttttcctgccttgtgatggcatacctgactaatactaatgttgtataatgtgttttctcaagtcatacattttcatcaaccattagcaataggcctttttaattgggattaacccaaaaagtagtttagggccaatagcttgcgcccctcaaaatcatagtaaagtcaaaatttatccatgtataatttcattggctttttaagctattccatcgtttatatatgattttgtttgagaaaataaaaactcatgctgactatcgattacaaggcaatctagagccaaattttgatacgacttccttacgtccttgttggttatatctgtgtgttcatctcgtgttttttagcccaagggttcacatctgtaaggtcctcactcgtacataagttgtatgcgattaattgaatgaatggatgcgctattgaattgttgcactctggttctctggtcaaagctagttttgcagctgtttcttttctaccagttgctttgctagcaggattactttagaatctaattttttttttttaatttgtggagcaggctagttgcaaagacaactcaattggaaggtgaaa

SEQ ID NO: 46304 - DNA, 1029 bp, Manihot esculenta
  Intron number 3 from transcript cassava4.1_000221m (locus cassava4.1_000221m.g) derived from phytozome v7.0 (chr-ID scaffold03741; pos 122943 to 123971 reverse strand)
ccttgtggtaggaaaaagtgatgggtctgttgcttgtttccaacttggcttgctcgaacaaacagctccaggtatgttgctcattgtgtaaatgttcatttttttttatcctgctgtcctatggtttctacttttctttttattcttcctccttttacatttctttaatttaaatgcaagtatatacttattgaggatgttcattggctgtgacatggaaagatgcataacttagtgtgggctctgtaaaataagttcatataactaaagtaacatcagtatttcttttcatttgggcaattagtttgctgctgccttgtcttttggttttcctggtgtagggatggcaaatatctaagtaatggatgaagagaaatgctagcattttgagaatcaggcttttttgtgggataatatggttttcttcacctgttttgggccttatgatatggtgtctttccaaattatgtcatttaaagtattattcaacttgaatggagggcaccatttgtttagttgatgcttttgatgttccttttaatgtttatttttactttttgcttatggaagatatcttatgatacattttgtattcccacttcattagtcaatgaattttcttttattataaacataccacaaaggtagacttatagttattttttttaattgattaagaaaatgtcgttaaagcaacaaattctatgttatctttcctaatacaccctccattattgtttcattattgaattattcttgaaactaataaattttatttttccattgcatatgaaataggagtatgataggaatccaataaataaattataggaaagtggcctatgatttgggatgaaggggcaagcaaacctaatttttatgggacattgggagtacctatttagctctttgacaatggaatatgggactccatcatgttttgcttctgcctgtatacaaggatattttgacttcatgtgtgtaatacttttctttttttgctcttagattttgtctacgagctgcggt

SEQ ID NO: 46305 - DNA, 824 bp, Manihot esculenta
  Intron number 1 from transcript cassava4.1_014848m (locus cassava4.1_014848m.g) derived from phytozome v7.0 (chr-ID scaffold06039; pos 38079 to 38902 reverse strand)
atcatatccatccttgctccctccctatctgcctggtactctctacttctctggctgttatatatatatatatacatgtatgtatatatgtatgtttgtgtatgtttatcagttgatctgggcaattgaagatttgaattttgatttcatggggttgggcttaatttgttgcatagtacttggccgaatggattagtaatttgttgtaatcatctacttttcgtataatttcttgctgcgctaccatggaaactggagatgtgtacacgcatgtagtttgtattatgtttatgatttttattgatctgggcaattgaaggtttgagctgatgggattgagtttaatttatgctgtgttggtttacagtatgtattgctacttttttccctgctgggtatctgattttccacttaatttttgatgtctcaccaaggaatatgagctaacgtaaacgaaatgggaagtggttatttattgtttctgagcaatttccacgggcttttactttttaaacagacaagttaatctacaggtgccgtttcattgttgcaccatcttggactctgcgttcatgggaattaatcagagtacctggaagtaaggggaagctgtggcatggagtcttttctcgtgaaaaggaagaataaaaaaatattggtgtttgttatgggtgtcttcttgtaaatttgttttgatctcttaatctctgaatgttggttgcaagctatttgaattttggattgattaattgctatgcatctgtattattgtccttttggctcatgcaggactgctttttggaattgttgcagagagagaatat

SEQ ID NO: 46306 - DNA, 371 bp, Manihot esculenta
  Intron number 3 from transcript cassava4.1_028661m (locus cassava4.1_028661m.g) derived from phytozome v7.0 (chr-ID scaffold05230; pos 109703 to 110073)
gtattaaggtatcaattctattgaaaaccaacaatattaagaatacatgtaattcacaatggcaataatagaaaaagagatacaaaaaatttagcgtaattagattataagctctgcatccacagatgaagaagaagcgtggtataatctctcggagctctcaaaatcctaacgctagtttgtttcccaaaatctcaaaatccaattcgagtcaccgtgtataacttttcagacagggtcttaattccatccataataaaatatacctaaaattccagacacataattaacaatttcattgcagatctataaaagggagatttcaaaaattttctgatgcaatattccacctctttcaggctagggatagg

SEQ ID NO: 46307 - DNA, 580 bp, Manihot esculenta
  Intron number 1 from transcript cassava4.1_001322m (locus cassava4.1_001322m.g) derived from phytozome v7.0 (chr-ID scaffold04443; pos 27867 to 28446)
acgtgctggattacccaattcaccttcatcttcaggtgggttccatcagttttcttcaaaaaggattatgtagagagcgcatgagttttggtggcatgttatgttgtttgcctccaagtatttgttgtcagattttaggttggctgtggtcatgggaatatacatatcagatcaggtcgggccctgccacagtgaatttttgaatgacttccgttctgtaatccactgtttcgcagcatcaaagcattttggagatttcgtctcgaatttttttatatcggttcgtatgtttctggctttgatttctttatgcctacactgacatttcctttgctgtctaacaggtggccctaaccaatgattccaaaaatttcccaatggatttgttgtcgaattttattgcaaataaacatcttctttcttttgtattatgttctggctgtgactgctgatgatgcttgaatattctagtgcatctatttgtttttgatgtttagttattgatattctaaaaagaatgtaacattctagtatcttgtgttcaggtcaaccaccacagaatcctcttctgttacttgga

SEQ ID NO: 46308 - DNA, 1020 bp, Manihot esculenta; identical to SEQ ID NO: 45763
  Intron number 1 from transcript cassava4.1_014775m (locus cassava4.1_011377m.g) derived from phytozome v7.0 (chr-ID scaffold12416; pos 224543 to 225562 reverse strand)

SEQ ID NO: 46309 - DNA, 591 bp, Manihot esculenta
  Intron number 2 from transcript cassava4.1_013056m (locus cassava4.1_008665m.g) derived from phytozome v7.0 (chr-ID scaffold02421; pos 619880 to 620470)
gaagctccagtgcccagcctgaaggtaacatttttgctgtcctgcaatggttgcatgatttttttcccctaattttttcagaagcgtttatcagttaaaattgattaggtctgtcaatgatgggttatatgatgtttttgtttttgttattggccatctgttgtcccatctctcttagttcaaaagccttcttttgcttttctgtagctcggtttgttgaagaaagagttatgggcttgcagggatttatattttagctaaggcaagaaaaagctgttaacttgatacctcttagtatcttgttcaagtgcggtgaaataagtagaagatcattttaaggacaggaattgtatgtctttggctattatgcatggctgacttaatttgctgcgctggtggtgtatcatttactcatttttcatatgcaggatgttttgaaatttcaaaattctctatggatgaatctttccttttatattcttgttctctcattgttgccattttaatcataatatcttaatctctttaattgtattgccatgtttacctttatgcaacatactgatgttcttttctgttcattctgtagaa

SEQ ID NO: 46310 - DNA, 320 bp, Manihot esculenta
  Intron number 2 from transcript cassava4.1_001998m (locus cassava4.1_001998m.g) derived from phytozome v7.0 (chr-ID scaffold04796; pos 391700 to 392019)
caagactgcagaaaatttccgtgccctttgtacaggttatagatagtgctaaattatttttcttttggatgatgccttttcttgtaataggtgtttcatgcatacaaattttgctgttgattgatactatgatagattttctggatgtcatgcctggtgctcatgtaaaattttgagctacctaattttgattggtatttaagtgatagaggtgagtattaaccatatgagataacatttcttgtcaattagcagtgtttcttatttttatttgctcatcttcaggggagaagggatttggtccaaaaactggaaggcca

SEQ ID NO: 46311 - DNA, 709 bp, Manihot esculenta
  Intron number 1 from transcript cassava4.1_001458m (locus cassava4.1_001458m.g) derived from phytozome v7.0 (chr-ID scaffold09335; pos 251199 to 251907 reverse strand)
tgaacagaacaactggaagataattctactttctggtaaggttgaatcatttttataacggacctcttccatttcagcggacttggaagtcattcttgttgatttaattattattgcttaatctgcttcggcggtcctgtagtttccgatacatcaagttgattgtgtgggagattctttggtttcttaggaaaaagaaatgcgggagaactggacaacagtaaaatttgaagttttggctctttgaaatttctttatttagaactttcatacgcgcaaacttactgtctacatcacattcaaattctatatgtattttctgtttttccccctttactttcaattcgtgcattggttttatttttttacagcagtctccctctgggacaattcagccttaatttaatttgctgattgcgtactttatcaaattgaaactaagtcaaaggtcaaacgaatatattcttaattttcgatgcccttgcaaattgcagtttatgtacattgaaattttatagttttttagtatttggtattataatggcatgagtattagtattcaaattttaataaacctggctgccgatgtgattgtgataaatggttaaaaaaaaaaaccatgcgttatatgctagtaagcaccaaattactgcttattatattgtaggattgctgaatggatgtcatttgattaggaaatacttgagat

SEQ ID NO: 46312 - DNA, 441 bp, Manihot esculenta
  Intron number 1 from transcript cassava4.1_007556m (locus cassava4.1_007556m.g) derived from phytozome v7.0 (chr-ID scaffold01709; pos 18959 to 19399 reverse strand)
ctcacacaacaacctatatccactctctccttaaggcaggtccccttcttaatttgctctttttatttaaaatttattattatagttattgtttgtccccttttcttaaaaatccttatagagtaacatgtaatatcaaatggatatgatttgacttttgcatatgcgaaatagtaacttaaactctcaattcctttgatacaataatgagtttaagggtaagatcactcttattttttttccttctatttcatattttattgggtagctcaaggttatcttatatagccttgcgagacttgaggcaaaaccaggtcatattcaagccactttcatattgccttgataggattccactacagctctcagatttgtttttctttgtattcaatattctgatattcttttcatgggtaatggcttgtagctctggaaccacag

SEQ ID NO: 46313 - DNA, 598 bp, Manihot esculenta
  Intron number 1 from transcript cassava4.1_011297m (locus cassava4.1_011297m.g) derived from phytozome v7.0 (chr-ID scaffold10797; pos 131141 to 131738)
ctcattggcgatctctcgccctttcatctcaccaggtctgttttcttctttgctcctgttacctcatttaatttctccttccaatcatgaattagggcttttacatattttcttgctcataattttttaatttgttgttttcttttacaaattttttggcaaatcaatcccagataaaaagttaaagaactttagggcgcaagaattaagtttcttatagctgaattacgataaatgactgaattttccctatttttagcactgaatgtttatggttacagaggtatatcggttaacaagaagaaatattatataagattgtcctggaaatcatttatttccgaaaatggctgagcaaaatttacttactagaggacaagcaacgcaagtgtccattctttgtagttctggacagtttaagtttctactccaattagtagagcagattttggaattttctatctggtcatgtgtttggaaaagatttttgagctgggcctatgtgcagtgaaattgcgttattaactgtgtatattgtttctaatgtttcatttctgtggcagtcaaaattaccaatttcaatatctagagttaatca

SEQ ID NO: 46314 - DNA, 690 bp, Manihot esculenta
  Intron number 2 from transcript cassava4.1_018314m (locus cassava4.1_018314m.g) derived from phytozome v7.0 (chr-ID scaffold11998; pos 1043337 to 1044026 reverse strand)
aacaagaggtcctccctctactttttctctttatttcaatcgatgcgttttctcttattcataaagctaatgcctctgttctgttttacaattatctgccttttgttttacttttacagttctttgagtatttgattatgggctaagccgattcttttgttgctgcataatcgctataaaatctaacttgggatatattggggtattattctgctgagtttaacggtggttatcctccccccccccccttcccttttcttcttattagcttttatactagtaataagatgttgtttaagcacgatttcaactgtgtttagagtccaatttaatggttgtttcccatctaagagatttcaaaggttgtgcaaaatagcactggtcacaatcacctggctttattgacctttgtcacgcagcaatagctttctccctctttttttttggttttgtttttccattttcatgtaatcaaatttcggtttcattggaatgtgggtttgagggaattgctatgaattgtttgtggtttttatgtgcataatttccttccattaactttgcctgctacgtttggtgtatattgattaagttttattgaatactttatttgttgtcttatgtgttctatttttaacttttggattgtttgtagagctggtgaactatcagctgaagaacttgacaaac

SEQ ID NO: 46315 - DNA, 554 bp, Manihot esculenta
  Intron number 1 from transcript cassava4.1_032923m (locus cassava4.1_032923m.g) derived from phytozome v7.0 (chr-ID scaffold03219; pos 337783 to 338336)
cacctaactccgaaccctacccgaatccgagacgggtaaaaatgttcaaatccgaatccgcccaaatccgttttgtaaaaatctaaatccgtcctaataggatttgggcggatcgagtacccgtgaaaacccgcccgcttgccatccctagccatatgaattgaatggattgaatcgtctaaaatcagaattagaattagttaaaatcaaaatcaaaattatttattaactgaatcaaaatcgatgacgaaccaatcagaaactaaattcagctaaaactacttaaaacgaactcgatttagattcatatcctttattaattatggtttgtcgattctgattttgaatcgtaggtactggtctagactggacatgtggccagagaagaggagtggtaaggacacgcgccccagaagcgcgtgtaaaaagatggtggagcataaaccataaataacctgagaaataagaaacggtgactggtctgtgcctgaagtacaattttctgccttgtttatcaagtccattaaagaaccctatcatctctctctctctct

SEQ ID NO: 46316 - DNA, 934 bp, Manihot esculenta
  Intron number 2 from transcript cassava4.1_008083m (locus cassava4.1_008083m.g) derived from phytozome v7.0 (chr-ID scaffold12946; pos 195351 to 196284 reverse strand)
cctggaggtatgtgaacttgataatcatttattctgaaaatgttttactaattgtccattaatttaactttttaactgcatcatccgtgccaatgggaaagatataaagaatttgtccttgtgttggttgttctatatatcttcaaaggccaatttgcaatatattgaaaaaagagtagaattacataattttcccttctttgattttattgtatttattttgtatcatttttttttgtctctaacagtgcttgctttacattttaatccactttatagttaaccagttaaccttatttattgctcgttcttattgataattcattcttttgtttttatgactcattatgaaagagtaaaactttagcttagtgtatgcaactctttaaaattagttcgatctaatgtggagaatgtagatgaaattaaatgcttggagggctttcattttaagggtaggtttaaagaggtaagtgatgctatttttttgattgctcagaaagtgtagatgaaattaaatgcttggagggctttcattttaagggtaggtttaaagaggtaagtgatgctatttttttgattgctcagaaagtgcaaaattcgactaggaatgtagaaaccccatagagtacttctggaatgtagaaaccccatagaaaatacttctgagaatgtagaaagccccatcaaatatctataaagtgaaattggagctgaatttccatctttggattgtatgtctttctgtaatggcactgaattttactcctttaggaccaaatacggaagcttgctagaattaattcttcattagtcaagctttcatgcttttgttttacaacttctaagtctaacgctcttgttctttaaatatgtttctttatgatgcatgattatactttaccttgatgcagcactgggagcacatttgtga

SEQ ID NO: 46317 - DNA, 778 bp, Manihot esculenta
  Intron number 1 from transcript cassava4.1_017893m (locus cassava4.1_017601m.g) derived from phytozome v7.0 (chr-ID scaffold09086; pos 209162 to 209939)
ttcgtctcttttgtttggtttcttgcaaaattgaggtaagtagactcggatgaattttcctggttgttgctctgtttttctattatcttcgtttcttttttgcttttgtggggttatggattacgctctgtggtgattttgaattagagagtaccgcaacttcgttttctcggtgctgctaagaaatttcaaggtcataattttagtttatctatatttttaaccagataatgaatttggtttcagatgtggactgaagctgaatgataccaatttcttatctgtgtatatcagtgtaaaatcgagatttttttggtttaacattttttttaatagttcagcgcccttgatgatcaattttcttagctttttggagtttggcctacctaccttaggttagaatctagttttctattaattctgttagtttcgtggaatttgtaaaacttttttttgaagtttgaagattttaaactttgttgttcttgttgcagaagtatcagttattctatttattgtcgtttttaggagttttttcccttttcttttttcgtgtatgtatatatgtgtatgtgtgcgtgtgcgtgtacataggtataaaacgatatggtgcattgacttgtgtgattcgggtaatgtcttggctccttaatcagcaaacttccctttcatcgaaatttagctctgtttttaattgatacttgaaccataactatgtactgaattttcctcaatttgatctatgagcctttgttgatacagatatactctagcaaca

SEQ ID NO: 46318 - DNA, 749 bp, Manihot esculenta
  Intron number 2 from transcript cassava4.1_013337m (locus cassava4.1_013337m.g) derived from phytozome v7.0 (chr-ID scaffold06782; pos 62550 to 63298)
ctcttccagattccggctctattcgaaggttaactttttcctccctttttaatcagcatagtgttttgttttcaatgataagttttttgtctttatttaattctaaattaacatattagggttatgttaattatatcagatattatttgttctggctatggagtgttgaaagacaaaatcttagagaaaatgaaggaaaatgagagaaccaaaaagaaagtgaaaaagaaataaaaaagatggtttgatttaaagctacctattgatccacctgctttgattaatatttgcaagtattatcatttggtttgatttgatctggaaaagtgaattttatagcaaatgaagcctgacccaaatagagcaaaaacagaattgaattggtttgaatcaaattctgctcacacctaggtttattggaaattctcatctaagctaggtagtagatcagaccattgatatcgcaaaatttttaattttaatcaaagcttatagtgaagtacaatacctttgatgctatgatgccatgtagaataaaactgaaatacctttgatgctatgatgccatgtagaatccatgagagattttcagcgcaaaaacttctctttgattctgtgatttttttttttcacattaatttatcttcactttggatgtgccatacatgacaaagcatgctagtgcctgttgaatgttggctttcatctctttaggtacagtcgcagataacattcgattcggaccacaa

SEQ ID NO: 46319 - DNA, 591 bp, Manihot esculenta
  Intron number 1 from transcript cassava4.1_027206m (locus cassava4.1_027206m.g) derived from phytozome v7.0 (chr-ID scaffold11106; pos 368690 to 369280 reverse strand)
aactttccaggaagagtgtcaaagcttttatcctggtaagacaatgtcttgttcattcaccactattgattattgtcctcttgaacaattactactaggtttgataatggggaaatttttattgtcatattccaccatagataagagacataggttttttagggtttagtgggttccttttcaaatcaaatttgaacaaaataaattgaaatttgaatatttataaaactgaattaaattaaattagaaaaatgaattgaattgagcttgattggacttttcaatttacatattatttttaacattttaatcttagttagaatttgatctccttatattttttaaaaaaatttgtaaattaataagttcgattcaatttttgtaatttttcttatcaaaattaaatcgaaataatttaattttttaaaaattaaaatcaaattaaatttctaaattggtttagttcaattatttttttaaattaaactcaatactactcccctctaatccatctattattttatggaggaaccacctatatttgccgaaagtatttgccttgataataaattttgaaaattttcccaggag

SEQ ID NO: 46320 - DNA, 690 bp, Manihot esculenta
  Intron number 1 from transcript cassava4.1_005616m (locus cassava4.1_005616m.g) derived from phytozome v7.0 (chr-ID scaffold12295; pos 26490 to 27179 reverse strand)
ggaatttggagactagggtttccaattctctcccggtaaacttttgtcccttgtactcatcgataaagttttggattgaatgtttatttcctttacttggttgcgtgtttctgcattattggtttgacttgaatgatttcaggtttctgttttccctgtgatgagaggtcttgttaatttatcggttatgtcaaatttcgattgtttcatttataattttgagcttgttatagctgtgaaagcaatgtttgacctttatcactcatcaataaaattaactttgtcatgtagttcagtgattttccgccttgaaacctgaggtttttttttggtttcagataaatttgtgactgttcatcttgaataaggaaaatagagcatctatctgtgaaatttaatccatgagagccatttacactaattggtgtctaatatcttaaaataacaccgcaacagtacttaaattatctactaaaattcttgaactcattcaaattcactaactctagactagtatattaatgctggttttacttggaaatcagaaactaggataatgcttcctaatgatgagagggaaattgaaaagaaagaaatttgatatgatatgttattatctcctcctttcaattatacatgtccctttcttcgttttttcttttaatttatgattattctgatattaggata

SEQ ID NO: 46321 - DNA, 1040 bp, Manihot esculenta
  Intron number 1 from transcript cassava4.1_026518m (locus cassava4.1_026518m.g) derived from phytozome v7.0 (chr-ID scaffold03219; pos 97528 to 98567 reverse strand)
aaacatcgaatcccttgtcgaatcagtctaccaaggtaataagaaattctctttgttcgtttccttatcggatgatgtttcaccattgtgtttggttgccgagaaaaataataaaattattctcgtttgaatcccgacaaccagctccgaattcggttctggctagcccgtgaatgatttggtcacacttgagaccttatcagttccgagttccgggttcccggggttaggttgtctgttgcaggacaaaatggcggggaagaaaataaataaagaataatatacaagtcatcttaattttagtaaacagtgtagttcatttttgattttttagaagttaatttattttgaagtttaagcttaagcttgcttcggtttaaggatccgtttgacaacattatcggtggttcatgctaatatcctgcagaatatttgtgcctttaacatattgttatacaaacaggatattaaagttctagtggacttaccttttagaagataattgatttcaaccttgctttcttagatcatttcattaatttctcccaccataacctatcatacaccatgttgttttataaaaaatttgaacagcatttttcacattagcatctactgagctcagaatttagttggactgattttgtaagacgtctaatgtttataaaaaagaacctggtttatgctaagtcttggacaggagttacaaacttctgtcaaatgtgatcaaaccctcggtaaatttatttaattgggtggttcttgtagaaattgtttctggtatagaggagtaattggtcagacaccatgccagtaaccaatagattaagccaattggtagtgtgtcaacgtaacacatttgttgtcaaaggttgaatttcatttctggtcttcttttttctttctagattatgcattttatgtgcaaggcctaggacagagaaacagtggaatgcataaaaagttagctctactgggatcgttgcttgatgtttaactaaatagatttagtaccagtttactttgtagtaaaatttatt

SEQ ID NO: 46322 - DNA, 439 bp, Manihot esculenta
  Intron number 1 from transcript cassava4.1_019553m (locus cassava4.1_019553m.g) derived from phytozome v7.0 (chr-ID scaffold00784; pos 127792 to 128230)
ttctggattttgatagatattttcgcgcaatccaggtgtgcaaatctcttcctattcttttttgctttgattatttatattgttttcaaagcaatcccttttctgttacgatttgataaatcctatctgtttggatgtcggttaataatcattagaagaaagcaattcatttcagacctcaagatgctaaattcctcgttgtgagatctggtttttctggattttatatgacttctgattctgtgttttgaattgcaagctgtactgtatgatcgagagctttgaatgagactggtggtttaatgctttatatttttcccctcgaattattcaggatcttatgggtttatgctttaattggaaatttggtgaatctcaaagtctgtataaacatttcaaaatctgtaattttgtaggggcccagaaacttgattatccc

SEQ ID NO: 46323 - DNA, 619 bp, Manihot esculenta
  Intron number 1 from transcript cassava4.1_007287m (locus cassava4.1_007287m.g) derived from phytozome v7.0 (chr-ID scaffold11998; pos 391499 to 392117 reverse strand)
tcttcatacgtgtcagtctttgtatctctttgtttcttttgagaaatttcacttgtttccactcaaatcttaactttctaaatctttcttcctttcgattcttattgtattttgcattgttgatgagcttggtgggttactttcttctttcaggcgttttctttatcttgatttggtttggttttgtctctattttgacgtggtcgtttcgtaattctactgtaagaccatgggcatttagtacttttgcggcttggtttctcctctcttcctccctatttttaggcaaattctagattctggaagaccagaaagcttagtgagaataaacaaatagtgaacaagatttcctgtttcattatttgcttggttgagattaaagtcatgcaacagttttgcaattggaatagtttcctttttgtgaatgtgatagtaaatgggtagttgccacttggcaaagtttctggttgaaagttaatgcttcctaagttcatattttaaagtctgaactacacaagtgttctctgatcttcttcaattttttgattggtgaaagctattacatggaaaatgtctgattgtcgttacttttcttgaactttcattcagtctgcagaaa

SEQ ID NO: 46324 - DNA, 590 bp, Manihot esculenta
  Intron number 5 from transcript cassava4.1_003617m (locus cassava4.1_003212m.g) derived from phytozome v7.0 (chr-ID scaffold06916; pos 1393525 to 1394114)
aattgcaggtatttgaatttatttgttcttttataagttggtgtatttctatttacttattattcattttcatactcattgctttgatgtgcacagtgatatcttcagtttcttttatcagaacttgatcttattttttaagtgtcatctacaaccgttgatagcactttttttggcatgcttttttttcccttgcatatggtatgctactttcttaaattgaaaacttttaaccttaataatgaattgggccaagtacaaagtaatgtatatttgaccaactgaccacatgtgctgttcattaatttcttcctttcttgctcagcatgtttgaatattcaccgtgattcgtgaattgatgaaaaagcatgcttgcttttgtcaggcaagatttgagtttgactcttatggaacttcttttgaaatgctaatgtaatttcacgctatgaatggcactatgatcaccttaaatttagctgcatatgcccatataatgtaccctctccctttgtttttgggtttaataaaatgttgtttgtgattttgtcatctcaggctgcacagcaagaaagatcgacatttgtctcatc

SEQ ID NO: 46325 - DNA, 1030 bp, Manihot esculenta
  Intron number 2 from transcript cassava4.1_011847m (locus cassava4.1_011847m.g) derived from phytozome v7.0 (chr-ID scaffold09335; pos 105545 to 106574 reverse strand)
cacatttggtatccagagtttcaaattcccaccatgtatgtaccttaaacttttagcatgtaaaattctatgcatagaccactaatagaatccaacttaagctcgcacttacttgcttatggagcattcttatttttatgaattgagagtatgacaattccctacttgttttattaaggttgctttgactttactgaggttatttataatatagcccttgagatttgacaaaacctataacttggtacctgcttttttagtgagacaatttagtccgtaagtttcattttattagcaaaatagtaatttaattaaaatttactattagactataacaatttagtccttcaaattttactttttatgacagtttagttcatttagtttttaatatttggaacaatttattcccttcaatttgagttaatttcttcaatttatgattgactaacactaaatttagaatgactattttgttaattaaataaaactcaaggattaaattgtttactattaaaaatgtggattaagttttggattttgctaaatcttagggactacactgtaaattacccattttactatttatgaactgagatgtcaacagtaagctagtttaccgaaggaagctgcttgcaagccctttgtcaatgctgggaggagatccctatattttgataaatttctaggggaaattgttattgccttgatattctgtcaaatgaatctagaatccttcatatctaaaaattgagatgataaggagagagaagctagaggaattctaaacaaattaatttctttcttcactgaaaatccataatgttattttcaattttgatgcagcttttgggcattgaattgatgttttgttctctagtccttttatgggctagtttttcaccctaagcacatttgccaaatgacagtgctggaaacagctttgaatgtattttgtattagcttttattgtaatgctcttactgctgctacaggtcaagaagacctcttcttcaagcggcacaggttc

SEQ ID NO: 46326 - DNA, 901 bp, Manihot esculenta
  Intron number 1 from transcript cassava4.1_016755m (locus cassava4.1_016755m.g) derived from phytozome v7.0 (chr-ID scaffold08898; pos 2610 to 3510 reverse strand)
ctctgcttcttcgcagagaccagacaacattcaaggtgcctctctctctctctctctctcgctctttgttttcatctgggttatgtttttgtctagaaattctgttttttaattaattggcctttacatttaacgaaattctagttctttttgttttgagttttacatggttatcatatttgcttcaccttcatgtactgtttggctgttttctcttgatgatgatccaattagacgcaaatttgttgtatatttcgatgcttatttctgtttcaattgttgactacgactgttaagtctttattccgtgggtttggcatcaattattggcaggggtgttgtaaaattatggaatgaattttctggtatcgtgtgtgaatttgtctagaaaggaaggtaatgggaggtattaatcacccatattttcattaacttgaaaacacatgccttacaaaaactctcttccaaacttaattaaaaagagctaagataggaacctagcattttctggagagcttaactgctatttctttagcaaattgttaaatggaaattagattaactgcctaaaacttttctagatttccttgcagctaatataggcagatgatggtaagtcaatttcctggcatagggaaagagaatcagttgcctacgatatgttttgatttatcattcttgaacttcttgataacacagtagatgacgaaagactcacttctctaattttattatcataaaagtcagaatgcattttagacattgataagctattggtgatactagatgcaatttctttatctacctgtgtgattggttatgtttagaatcactgaagactttacccatttaaccatcaaaatatatttgctttcttttgtagaggcagctaaggttgact

SEQ ID NO: 46327 - DNA, 292 bp, Manihot esculenta
  Intron number 1 from transcript cassava4.1_006303m (locus cassava4.1_006303m.g) derived from phytozome v7.0 (chr-ID scaffold08376; pos 16119 to 16410)
gatccttacaaggtactcttctaatctctctcgtccaatttcttgattttcttcactaattcagcctggattttgcttaggatcatctctttttattggtgttttggaatgattgttttcgactctgttttttatttttatcgtggggttttggtttttctagccgagcttgaacatgaaaggattattcttgctttttttttcgttgcgttagtgaaaaacctgattatattcttcttttgattctgatgctatagaatcgtccatcaagcggtttcaattctgccttctg

SEQ ID NO: 46328 - DNA, 798 bp, Manihot esculenta
  Intron number 2 from transcript cassava4.1_006303m (locus cassava4.1_006303m.g) derived from phytozome v7.0 (chr-ID scaffold08376; pos 16457 to 17254)
actgttggacccagaggtatttgattgatgtttctgttaatcacctttgttattggtattatcataagaaccatcttgctgttgctgtgtttatcccaattattagaacataaaatattatttttattagctttatccttatggttagtctggttgttagaagttttctgtggttgttcttatctattatgcaagtttacaagattgttatccaccgaaattcatcagcgttttgaacgtatttactttatctttgcaatacttataatatattggcaccatattcagttacttcttactaaattacacattttagatgttggtgaatcactctccacaaggtaacacaaaattgctctagttggaaaattatgggcttggtgctaattttttccccgttttgaatcgcatcaaggttatcggagtaccattttaattgtgtataaaacctatgtatacaaagtaggttgattctttacgcaccttggtaccaaagtaagcaacaagcaactagttgaatgtagttgcattatggatatgactatttttatggagaattgaattaggagcataatctcttaaaactggtcatgaacattattccctttcttttcttcttctattgctggcaaaaagtaagtcttgatcgtttgaggcttttttcaagttctttgggtagtgtattttctgttattgtagagctgaaacttagaagtagcaaccgaagatctaagctgtgcccttttccttcttcttttgacaggtcctattcttcttgaagactatcatctagtggag

SEQ ID NO: 46329 - DNA, 590 bp, Manihot esculenta
  Intron number 1 from transcript cassava4.1_033960m (locus cassava4.1_033960m.g) derived from phytozome v7.0 (chr-ID scaffold00708; pos 180478 to 181067 reverse strand)
acccccacagattcaggtactcacttcttcctatatatagatatatatatcaacttttacttcgaaattcttcctataataacttctcctgccatgctcaaccttataataaacacatatacgaagaagaagaagaagaaaacacacgtgacaaaacgagagccatttagacaaccaaaatcacattatacgagtctcctggaaggtgggatcacctgttttcttttttttttttttttggttcggagggatcaccatttatcacttggaaattgttgtgtcaacgccctttaataagcgcgtgtgaaacaaaattattttcacttacaagtcaaaattaacccaaagaaacacaaagttgagtcctatcaccaactgtatcacattggagaaagaaagaaaaggaagagacagattgacaagtcacagagatatatcaggggaaggtccaatccagtctggtgcatgtactgatgatgatcatgtgtgtgatatttattattattttattattattgctattattctgataatcaaaatacgtatgtgtgacagctctgctgtgagtgattatatagaagctgttaggg

SEQ ID NO: 46330 - DNA, 710 bp, Manihot esculenta
  Intron number 1 from transcript cassava4.1_009889m (locus cassava4.1_009865m.g) derived from phytozome v7.0 (chr-ID scaffold11322; pos 55758 to 56467)
ggtacaaagagattggtattcgttttcttctctcgttatcctttctttttctgccttgaatattttctaattttgttgtttggttcatgcaatttatgttattgttcagtctcgtatggaaattttgtaactttgctttcgaaatttggtatggagtttgaattttgatatttgcatataacttgttaattttgtgtgcaaaacaggcaaaattatgatacttgaattcgacaaatggggaaaaaaaggaaaatagaatgagaagaaactgtctgctaatattttgtaattatcttttttcgttattttgaaagaagaagctccatgtttaatttggaagtgtgttttaatgaacatgaagaagccagttctgactggagtttttcccccctaataattggattgcaatagttttaatctctcatcctctagatttttatggattacgccatattaagtaactgttttttcaatgatctgcatgcatgcatgtgttgatggattcttttacatcttcagcatctccctttatgataagttttatggactgctcctaatatgaatgtgattgttgaccaaattttagtgctagtgaaattgggtttacatgattaccttggtttgatttaaacttaaagcttttaagcattgtttaactcttggtggattctgcaggatttagcaagggttcaggggtacactggcccttc

SEQ ID NO: 46331 - DNA, 1036 bp, Manihot esculenta
  Intron number 4 from transcript cassava4.1_016722m (locus cassava4.1_014093m.g) derived from phytozome v7.0 (chr-ID scaffold04450; pos 228760 to 229795)
actacaataccttgcgcttttttgtgagtgaagaggtgagcaaaactattctgtcctgctgttttatgataattggttgacaactaactccagaatcccttagcttagctgccattgctgctagcattatttatttgcttgcgagtcaatcaaattagatccaacggtttaatctaattttgaaattaaaattataagtgaatcagatttgattgacatggtgtctttggctgccttatgtttttgagaatctgacacagtgtaaagctcacaaagataacacacatcacacccacaggagagtgaaaattaagagaaattctcttttgaggtatttttattaatcaaatatgcttacaagttattctaggctatttgtggagttctagttctcctaaacagaataggaatagttctctataatagaaagactaaacaaataagatacccaagtaatataggaagaagctagtcctaactaaagtaggattacaaaataactcccaaataaagcaaaagacattaaaaaactaaattaggagtcataactaagctaaacagaaattgtagaagaaatagaaatatataggagatataactggacaatttcagcataaactccatatcctttgtgctgaacacgtcctggggcctgtggactgcctaggcctagggtgtgctggcccaggactagggtttctgccctcttctacttggacatgccctgggggctggggtgtgttggaactcctgccatgccatggggcatgctgaagtcctttccagatgctgtttgtccttttgaaccttttccctccctgtggagtcattgctcaatatgatccacctcaaactcatagtatgggacacaaaatgggctgtggatgcatgcatagatattagtcctttcatgattgcctagatatgtgaatgcattattgcataattctcatgctaagagttaatttatgtttgttaaatgttgaattgaatgtaaatgctcttttctggttgcagtccttactttcccgagctg

SEQ ID NO: 46332 - DNA, 1000 bp, Manihot esculenta
  Intron number 2 from transcript cassava4.1_016784m (locus cassava4.1_016784m.g) derived from phytozome v7.0 (chr-ID scaffold00847; pos 1473740 to 1474739)
gacatttctgttgttgctggtattgtattaaagcttcttctctttccctctctatgtttcttctctcattacatttactagtaattggtaaactacctgaacaaaggaagcctattattattaattatttttttattttggttttgaattttacgatattttttcaaatcgccttttaaaattcagaattttgctaattgtagcttgtgctccttcaagattgattgtccacatatggaaagatgatgcatttgctgcagtgctttgacaaatttatgcctgtttctttgaaaagtaaaagtattatgaattccatgtgagctgtgacagcaggagaaaaggaaaaagaatagggtaaactggggagtttctataaacacagacacagtgctatttaaacctgcacttttattctacaatatcctctctgtttattttcctgaaaagcactgaaattggtataattctcaataaaaaagggaaattatttgggtttatttagctgcattcttagattccatattaagactcgtatttatgtattgcatacacattctgttattttatttctgagccaagcattcattttattcaatgctgagaatgatcatattgcttccaaggcatattggttaatctgctgcctagtactcttttgagtctcaagcctgaattccatgccttgatattgttataggcttatagcaatggtttgctaaaactgattgagaccttcaattccagtgtttatataaattgtgagcaaaactggtcatctggcacatatgccagttccataagtgttttggtagatatgttggagggtgcttaagaattagtgtaaagattctattttaccttttaggatttgatgattagctaaagatggtgtcttaatgatttatcatctaattccattagatttgttctgtacttccttagtcaagcaattgattttttttcctatttttaatatgtaggtgttgaagctagaggattc

SEQ ID NO: 46333 - DNA, 568 bp, Manihot esculenta
  Intron number 2 from transcript cassava4.1_018375m (locus cassava4.1_016364m.g) derived from phytozome v7.0 (chr-ID scaffold02421; pos 474856 to 475423)
gcccctgctaagatcctctggcgcacaatccgtgggtaagatcaaaacttgtcctgggtttcttttcggttttgtaaatgaaattagttttggacttgtaggacaaaatcccatctttcatttttgcaaatttcgaagtttggtaaaatattttgtagaccttcacagttgctgagtttagttaagaaacatgagttgattgttcctagattcgctgccaaaagataagatgcttacgtttaaattaaggagttcctcgcttgtctgcttggcctttaaagggtttaaaggttatgcactaagttgatttttctgggagatgagtgaatcgtgctttccaggaatggtgttagtttagtgtcaaaatgggaagtgtgattgtttgttatgtctgttaatagtcaaaagatgcattattgcaagaatgtcatgaatccaaagggtgtgcttgtactgtgttttggtttccgatgcacattcgtgtgctggtacaaatgaaacgtctaggtgccttttgtgtttttcattttcttctttggtgctctaaatttccttcttgttttgaagg

SEQ ID NO: 46334 - DNA, 862 bp, Manihot esculenta
  Intron number 1 from transcript cassava4.1_009359m (locus cassava4.1_009359m.g) derived from phytozome v7.0 (chr-ID scaffold07543; pos 53653 to 54514 reverse strand)
gagatccttccaggtaaccattcagttctttaaaattgtgtttttcttgagcttgcccagtagatgctgcagacccaactctgtatccaaacaggttaattgtgcataattgttcgtttgtccaatgatttcgagtcttggccttttttgtttatcgttggaattaaaactggaatttgtggaatagttattttgagccatgggaatagcctagattatgattccacatttgatttacagatcaagaacacactgttgcgtaatgttggagctgtaaagaatagtcttacagcctcctttgttgaattttacagctctaaacattgttgacattgtttgagggtcaaatattgtgtgttagaaaaatttataaatgacaaattatatgacattaaattaaaaattgattggatgactagaaatttcatgtatgaatgaagtctcaaaaagctcgactacgttttgatttgatgtcagaatagcttaccatctaaaagttcaagcttgtgggtgagagttgaagaatgggtttctaaaagtttcataccttatttcaattttctcaccatttttgcctacaggagctcctcaatggatataaggtttttaatgtagttaattagctgttatttatcaacattaattaattaattttatacctaattggaattcattgagttgctaggtgtaatcactggctatagatactgatcaaactgggagtaaaatacagttactgattagttgtactttgatttttgtcaatggatttcttttccttttatgtgatggagttcttcactgacttggtcctgttatcagaacaggtgtgtattacttggggtgagctctggtgcaaata

SEQ ID NO: 46335 - DNA, 238 bp, Manihot esculenta
  Intron number 2 from transcript cassava4.1_005293m (locus cassava4.1_005293m.g) derived from phytozome v7.0 (chr-ID scaffold12118; pos 323893 to 324130 reverse strand)
tgtgtctgtgtctgtccctgtccctgaaactgcaggtagctgaactctgcttcaattattgtggtttctcttttttcttctaatcaatgatagtttagtatttagttgtttcctgtatcttattttgattctaatggagtcttttgcctaataacggggtataattatagcagcctgactcttcttgaatggtaatttttattacaatgtctaggtgaaagaagcagcttcatagact

SEQ ID NO: 46336 - DNA, 920 bp, Manihot esculenta
  Intron number 2 from transcript cassava4.1_018653m (locus cassava4.1_018653m.g) derived from phytozome v7.0 (chr-ID scaffold07318; pos 159341 to 160260 reverse strand)
caggccatctgctcgacaccattcagtatctagaggtaataatcctatctagatattaacctgcttatgtgttcaaatggacagtggcgaacctagaaaaggtttctccccccatccctgagtgagacaagagaagtaactgctaggttcaagtaggtttaagcaagtcatacaaacaagcaatttattttaatgtttataagaggatatatggaacttttaattaatagtggtcaattgacccctcatttttgaaggtgcatctgccactgcatgtagatatcccttgcatatattgagaatttcatttacatatgatcatggctagctcttttcttctcacctttttttcatgattgtatatgcattgatgccccagattaatatgctccctttgaatcactgcagaataatgcaatgctctttacactaaaaattcctcatgtttgtatggatgaaatttagatgatactttcctttgcatatctccagggatccatgtgcatggactatgaatacactttgatattctccaaattttaccttcctttcttttttaagaaaagttttcttttcttgtactgtttttcaatcattggaatccagcacatattctcaatgtgtaatttactagaaactgtcattttcttttcactttaaacttcatcagtgtctgaaacctgtttacccttctttttttaccttgagagatactgatttattgttcgtaaatgtgactgattactgttacaatgacatatactcactgtttatatattgttagattaccttactccatttggtggaacatattttgtccatcattcaaactactattctgttagataaataaatttcacagtgtgtagtgttttatccaaactgctgaagacagtgtcataatgtagggcaaggttcag

SEQ ID NO: 46337 - DNA, 513 bp, Manihot esculenta
  Intron number 1 from transcript cassava4.1_005070m (locus cassava4.1_005070m.g) derived from phytozome v7.0 (chr-ID scaffold03741; pos 183206 to 183718)
caagcccttgaagttgctcatcgcatagtattcgggtaaaaaatttcaactttttattctttttggaagatatatgtttgatattgaaagctggatctaaggaaggggaggagtgggtggtgtagaagtggaagaacttccacttcgagtttggtcattagtgcatacatattaagtattttgttaggaccgagaggcaggagtctatgacctagaggtaacaaataaaatcaaatagacaaaatgaaaatattagcaaataaacaagcagtgctgttcagcaagttgagaaacgcataaagatgctgaaaacccctgaaagcacaggcaatacggatcatttcagtatactttttacacccaattcaattttaagaccaccattttgatactataacgtcatggtttaaccaaaagtttattttgtaagtggtggaagagatttagaagtgtgattaagatatgtataaaatggcaggtacgggcacttgacttgggagtggaagaagggta

SEQ ID NO: 46338 - DNA, 914 bp, Manihot esculenta
  Intron number 2 from transcript cassava4.1_005305m (locus cassava4.1_005305m.g) derived from phytozome v7.0 (chr-ID scaffold10797; pos 220551 to 221464)
ttcatctttggtttctttcagaaatttgaggtacgtgcttttgaattgccttacaaatttgcttgagaggataaaggatactgatttttgttggaatctaaaattttcgagcgcttgcactagtggctgcctcaatggcaaacttgttttcattaatgcaaaatttgatcacaaggggtgtgttgctataatttgagaagaagagacgaaatgaatgcctaaaattgttagccgttaaaaacataaaattggtaacttggcctttcggatgttgcatcttgttgtcactattgtcatcttgcatactggtcgcttgtgcgcttggtactctcttgggcacaatagaatataactactgaagttcttttttcacccgctgactttcaaaatggttgaacatcaactcatttttataacttttcaccatttaatatttaagtaaaatcagatgccagttaagctccagttatgtgtttcaagcaattgccctattggatgcaaccatagaagatgattaatgattatcgactgtttgattgatgtatccttacttttcttgagctatgcctgattgcaggaatcctagttgtttgtttgattaccctgctttgtattggatgtttccgattgaaataatcttgatttgaatttgattgctagcacttccatataaccatggtgcaaaagcataagcacaattctaaaaacaaatatatggaaaagggataatatgtacagctttaagcttctcttttattttacatcacttttcattctttgctatagtttctaggatactgcagatgttttgttgcattagattttgtaattagtaactgaaaatttctagcccaccatatatctctgaaagttttaaggatttattttcatatgtatgaatttttctcagggtc

SEQ ID NO: 46339 - DNA, 934 bp, Manihot esculenta
  Intron number 3 from transcript cassava4.1_028340m (locus cassava4.1_028340m.g) derived from phytozome v7.0 (chr-ID scaffold02658; pos 662986 to 663919)
gtttcctcgttccttcaccttattatccagcgtacggatcatagttcctccctatctactattgttcaatattcaatatttctgttggagtttaatacacgtgcagatggtctttttacttactttttttttctttctaaaggaaaaatgaaggggttgaaaatattgatttcttggattaggaatattggtattattcatttgatgaactataacgcagtaattacttagaaattttaatgagaagaatattatacgagaactggggaccggttccttcatatgagtcaatagtatggtattgactttataagtttgaatttttaaattgatttttactggatttcaatattaccaaattaattaaatatatattaacaatttatacgttgacccgatatattaggaagacttagactcaaaccatttcgtcaacaccgacttaattgcaagttaaaactaaagagagaggtcaatttgactaagttgtcatttcttgaattttcattatactgggtcaaaagcaaattcaaactagggtttgatttcaaatgcttatacgttaatttaattttgcttccattactttcttaatacctaattaagacaaacccaacttagcgatgagaagacatttagatatttgctgcccaccaagaccattcagagagagaatttaatgatttgaatctctgaacgtttaaaccaattgctaaggaaatatatatatatgataaatgctaggaaatttctccattagatcatgatcctcatttttccaaatttgcatgcagtttcaaatttagattgcctgaccaaaatatttaacccttttattttccttttccttttcatgaaatcttggaccaccttatattgtgaacagttgaattaatattttaataaacatgtgcagattcgaccgcgacctaac

SEQ ID NO: 46340 - DNA, 775 bp, Manihot esculenta
  Intron number 1 from transcript cassava4.1_029487m (locus cassava4.1_029487m.g) derived from phytozome v7.0 (chr-ID scaffold02688; pos 14289 to 15063 reverse strand)
ggtgcagtttctcgtctgaatctgaatgaaaattttcttcaaaatggcaatgcaaaatttatgttgaatattttgaggaccaagaaactctaatgctgcaacttttgagcattttaggctctctccttatctgtcctgattattgctgaaatagatggagagcggatttgatgatgaaaggaatgatcaagtccctgcactaggtgatgttcaactttctgacttattgattatctttttggtcttctcttagatgatgatcatctttggttaatctcaatggtaaaattagcagcttcaatttaatttatttaagaactggatcacatgggatagaacaagagcctaaagcagaacacgcagataagggcccttttcccctacaatccaaaagcttagcatgtgaaatgaccatactttcatacagcattcgaggcccctccatgacccctcacagtcacaagcacatagtaaagaatctattgataacataattgaccttaagaatcccatctccatacatccgatagcacaagacaaaattcaaaaagaaaacaaaagcttgatggttcttttaaataaggccataaagaccaaggctaataaagccagcccacaattaaattttccactgggtatcccgtgatgtgcaaccaaagcttcaccaattcacacttataaactactctccatcttccccttcgcggctacagatcacttccagcaaaaattcatgcctgccttcaaaaagttctcagcttctgctgttgctgct

SEQ ID NO: 46341 - DNA, 262 bp, Manihot esculenta
  Intron number 1 from transcript cassava4.1_005610m (locus cassava4.1_005610m.g) derived from phytozome v7.0 (chr-ID scaffold07543; pos 70414 to 70675 reverse strand)
agtctttctttctctgcttctctttcaagtctcttgtaagtatcaaaatattcttcttcttcttcttcttctaatgtaatctgggtttgcttcattttatcgcttctttttgtttttattgttgtttttgagtttgtaattcacttatttttccaaccactttccccgtaattttggcgttagatttcgtctaataatgctattttgttgtttctgatcgaacccagatcctatccctgtctgattcagctgtgagatacta

SEQ ID NO: 46342 - DNA, 961 bp, Manihot esculenta
  Intron number 2 from transcript cassava4.1_003451m (locus cassava4.1_003451m.g) derived from phytozome v7.0 (chr-ID scaffold07351; pos 165040 to 166000 reverse strand)
cagtttgtcacgccttggtccctctctgttgctaggtaagtagaattatgtaaaatttgtagtattcgccttctcattttccttctgtgtttcgattttgattagaatttttggatcttcgatgatgtcaatgtttttaacttgtcgtgtattgttgttgatgtaagttgcgtgtgctactttagatgggatattatacaatgaaaccatagttctcatgtaggactgcttacaggaattgaccatccaatattggttttaaacgaggctactagtaaacttaataagatcaagctcttaaataaaaacaaaaacattacatctttgctgaaaagtggtgaatactatatttgtgtttttcttaaaaaaaaaatgaataacttcatttgtttatattgtcaatttcttattggtttcttgcatgaatcactactgcagaatatactttatgcttgatttggcttagttgcattttctcttttttattttactttgagagcaaaagatcaatgtttggttagacaataaataataatataataatatttgcaaagcaaaagaattatatatttattcagtatacttttctcattatttaggtgttctctgtcttttttttttgcaatcttattctgtgaacctcttttatagcctttctgatttttaaataattaaacatcatgttatgtgtactctctctctctctctctctctttctttctttttgtggaggggagtgttaggggggagggatggaatgttttagagaaaaagagatttgtattgaaagtttttagctattttgctttggaaagtttcatttggagcatccattttctatgttcttttgctatctatcttaatactttgattgtcatgagctaagctaatctgaactggttttgttctgctaccatatgctgtagtggttattctttgttgcgagatccacgctacaaca

SEQ ID NO: 46343 - DNA, 777 bp, Manihot esculenta
  Intron number 2 from transcript cassava4.1_015749m (locus cassava4.1_015749m.g) derived from phytozome v7.0 (chr-ID scaffold03750; pos 318776 to 319552 reverse strand)
tacagtccagaggagaagaaagagagaattgagaagtacagaagcaagaggacacagaggaacttcaccaaaaaaattaaggtcattaatatatttaatttaattaattaaaaccctttttttgttgaaaattaaaacccattattaatttcatgggttaatgatcattaattaattaaaagcaataatacagtagtacacattcacggagatgtagaggtctctagagcacaagttgcaaatgggttcttgctttgatttctttgctcgcaggccatttctttttgctttatgtcaaatccaacttttcttatcctaagtgagacactatttgatagaaactgcaatagttcttgtttgaatttgttggctctctggatgacaactgacaagctttatactcttcaattcactagtcactaatgataaatgtccttttttttttttttctattatgaatggagtgaaatcaaaatcaaagattcaatactcgttagaataatcttatctcttagttggtcgatttggagtcttagttgatagatttggagtaatcgtatttaattttaatttaatggattagagatagttgtggttaaaatcaaaatgctgtgcatacataatgattatatataattaggttaattaagacatacttaattaaggttattaatatttgtcttgtcatgattatgattatgtattaatgaatttttcaattttggtttcagtatgcttgcagaaaaacacttgcagacagccggccacgcattagag

SEQ ID NO: 46344 - DNA, 870 bp, Manihot esculenta
  Intron number 1 from transcript cassava4.1_008286m (locus cassava4.1_008286m.g) derived from phytozome v7.0 (chr-ID scaffold12711; pos 285588 to 286457)
ttggaggaatccttccagggcatcagtttgcatctgtaagtagaattgagttctgtggctgcttttggtgttcgggatttgttttgaaattttgtattcagttgccgtgcttttgttagtcagtgatcggttgttttatgtattgcttgaattttgaagtgaacgtccctgattgagaaaacatgaaatcccatgccatataatccaaaatagaagtaaatatgagatttaaaacttattactctctcttctctcatttgagagattgagttattaaatacattatctcagtttattatggctgtggcgagaagaaaatgataaatatgcaaattaattcagtttaagctccaaactgaggccagttttctaatatatccctggttggaattaagaatttaacaagaattcaattcttgatttttgtcaattctcttgtttggaatgaaagaattctattttttttgttcaactttaaaacattcttattttaaaaagaattagaaatcatgcatgattgtgcaagaatttatttgaattattttcttgcaaaatgaattgttccaaattgaataatgtgatttttgacttgatgtcaacaattgctgcacgcccattacgaatgtagaaacatatactcttgatctatttagttgtgtttctggtgatatattgcaaccctcttgctgttggagaacaatttctgttgtcgctgaaatagctgtatgctgaggttgtggatatgtaaagcttgtgtgccactgtattctgatggaaatttattgtgtttgattctcatttttgtatatgaataggaatttcatttcctagtacttcttttggcacttataggttagggcaggagttgag

SEQ ID NO: 46345 - DNA, 699 bp, Manihot esculenta
  Intron number 1 from transcript cassava4.1_008871m (locus cassava4.1_008868m.g) derived from phytozome v7.0 (chr-ID scaffold11998; pos 1769968 to 1770666)
cgggcaagttgacattcccaatctccttgaaacaggtttgttactggccctcattcatgttttaactatgttttattttctgttatttatgtgttttgctagagtagtggaatctagaaacgtaactaacaatttggataatgctagtcgttccaaatcgttatatttagctgtataatagttgtggttatttgactcttcccgtgatgaaaatctcagccagattgtagctctactagtaattttaatgcagtgaaattgcgtcattgtcttcactcactctgcaaaatttcaacaattacatgtgaaggtctcaccttttttcccacttatatgaggaatacttgctttttatttggcttcgaaattgttattctgtttggcttgttgtcatcagtggaagtgggttgttgagttatgctataataaggttattgtcagttgatattctttcaaagatcatcacgttcctgtttgtagttgtgaaatttttggctttttcgagttttctataatggcatgaatagaaactatttggagacatctctctcttttgtttatattgcaaacgtaaaatttaacttctgttaagatctaagacctaatgcatttgcgttttttacattacagctaatttcagtgctcttggtgttttcttttgcagcctggtccaagggactccctcctccagtgctacat

SEQ ID NO: 46346 - DNA, 733 bp, Manihot esculenta
  Intron number 2 from transcript cassava4.1_001405m (locus cassava4.1_001405m.g) derived from phytozome v7.0 (chr-ID scaffold03995; pos 35868 to 36600)
gctggtttggctcctaaaactaaggtattttgctgaacaaatatgcttcaatttgtgaggttacccttcttgcttcaatctgtaaaatttattatttaatccaaaattttaacactagtaacaatatgatacttgtattttgaaataaggccattcagtcccttgcttttgcttctattatacatttaagtcctttcatccattttgtcattggttttatatgttaaattaccattccttatgtgaatattgcaattatttataatttcatcctttaattttgtaattagttgcaatttcatctgtttgtctctctctacatgtatgtctcttccttgagagaaaagagagatgaagacatagcattaatggatggaattgtaaataaccttaaaattaagggaggaaattataagtactatcaatatctagggattaaatagtaatttatcttaaaatactaacaaaaaatggacgaaataacttaatcatatgatggaagaaaaatcaatgaactaaataatttgatatctaaagtataggaactaaattgatattaatgataagatctatggtctaataggaaatttctctaaatttcagtaatgggttttaatactggtgtaatggaactttatgaacattttttcacattcttatctttcattttccattagaggtgcaagtacaagttttctcacaactcatgtggtgcatgtataggtgctcaggg

SEQ ID NO: 46347 - DNA, 1045 bp, Manihot esculenta
  Intron number 1 from transcript cassava4.1_026452m (locus cassava4.1_026452m.g) derived from phytozome v7.0 (chr-ID scaffold08446; pos 477996 to 479040)
aaccgaaccggtctgattcggttcgattcggttcggtttgatcggtttcgatttttaataatttttttattttttacactttatttttaatattttaaaatttaattaaaatattttaatcttaatatgatttaatttctatatattattgaaaaaacatattattattactaatcggttcggttcgattttttctgatcaaaaccgaaccgaaccgaaataaccgaaatttttaaaattaaaaaccgaaccgaaccgaaatatataaaaaaccgaactaaatttttaaatcggtttgattcggtcggttttttcggtttgaaccgaatactgctcacccctaaatagcgcagaacaagtcggattatcctcgagtccagattaaataagaaaatctaattcagtaatgtaacatgagaaaagatgacaatccagtcacctcacacccctactcgcatgagcgccaaaaaaaattgaatgatctggcataaaaagaaatctaacaacatacgtacgtacaaatctgagtatcctccgctcaaattcatactctattattattattaattctctattattaattttataacatgtaattaattttatattaaatagtacactaatcaaaatataattcaatctcaattaaattttaaattcttaattttttaaaaaaataaatttcttaatttttatattttcaactatttaatttttttttttaataagtattgatacagtatgccttttagcaagctaactaagcccattattcctataggggattaaaacagcccaacgcgagaggtgacaacaaggccttcaccggctcaaattctaggctgcctcccatctctcagaagtcagaattgatgagcagaaaattttctgcccatgtgatagtcttcgtacaataatgcaaaggctcgccgttttgacgtccaatgataagctgccgcttgctccgcgtccgctctctctccacctttcctctccctatacatgtctcccaaaggccattgtacccgcaaaggcatttgtttca

SEQ ID NO: 46348 - DNA, 886 bp, Manihot esculenta
  Intron number 1 from transcript cassava4.1_015071m (locus cassava4.1_015071m.g) derived from phytozome v7.0 (chr-ID scaffold11179; pos 159275 to 160160 reverse strand)
ataatattgggataataagcaagatatctgtacccgtatgtgagtttgctcttaattttacccttcattactttctcgttcgttattttctttccctttcttcgattcttgttgattttagggttaggcattatgtttttaatggaaacatgaaaagcccaaatgttaattttttttatatctcacgatgttgtttaggaggcccaagagaataccagaattttggacgatttggaaatgtatggttaatgttgtccaatttctttgagtgcctcataaaaatggtgtggcatgcgttgtttcacaggaaaaaagcatgaaagttgtgcttggcgttggcgaaatttaaaacttgggactatgtggatgctataatcacttttcttaagcacccatcggtctccttattatgtgctgtttctagtgtccttgtttattacacgacacatatttgatgacgctttttggtgatttagaaaacgcctttactttcttctttgaattgatacttcaatttcagtttattttgtttggttaagtggatggaaaaagttagagaatatgatatgtcagcactgccactatcaatgtattcatgaccttttcttgataaattttactatttagtgacttgctttatatgccatgctcaataattatagatttagtacccaaataagttgtttcagttttgaattctgtaattgctcactgaccttttgttgttccttacgtcctttgttttgtttttttttttgttctctattttctctccttttccttttaatgttctgaaactcttaatgggtctttttatgttccatatctatcatatctcagtcattttgcagaacatagacttgaaactttctcataagctctcacc

SEQ ID NO: 46349 - DNA, 473 bp, Manihot esculenta
  Intron number 1 from transcript cassava4.1_009792m (locus cassava4.1_009792m.g) derived from phytozome v7.0 (chr-ID scaffold07478; pos 413679 to 414151)
gaaaggtacctacttttatttctacgtttttacagaaactaatggcttctgttacttaactctgttactgaacatatggaaattggtggcttcaagcccagaaatcttgttcttgaggggtaagcctacttcatctcgctacgaatgagttagagcaatttgtttgcaaccttctttattttttggttatttattttgctaatgcgttttcttcagttaactagggtgttttgatgttttttaccattgaaaataattgttcttggaactaaagattcctactcttttctcttcatatcctatagatggacgacgcattaataatttatgaatcttgagattgaatttgacttcttgagagttctgatgagtaattaactgcagattttggatgataacttgctttgatgtttagcattgattggagaaatttacggctaattttcacaaatatgttgtgtaggtggtgttgg

SEQ ID NO: 46350 - DNA, 539 bp, Manihot esculenta; identical to SEQ ID NO: 45595
  Intron number 1 from transcript cassava4.1_010764m (locus cassava4.1_010755m.g) derived from phytozome v7.0 (chr-ID scaffold02658; pos 723583 to 724121)

SEQ ID NO: 46351 - DNA, 390 bp, Manihot esculenta
  Intron number 1 from transcript cassava4.1_003209m (locus cassava4.1_003209m.g) derived from phytozome v7.0 (chr-ID scaffold03602; pos 647046 to 647435)
gcttttcttgttcttcataaagctgagaaaaagaagtaagaagctctgtttttattttttttgcaagctttgtttcttcttgttctttatctctgtggatcttcttgaatatgcccactgaaaagctcaatttctgggttttaacaaattgaaggagatgaactgattttgctattaatgattgaagtggacttgataggaaataaaattttcaagaaaggaaatgtaaacatccttgtggtcggttattaattgatttcaattgcgagcacgaagtatctgaatcaaattttgatttgggatttaaaagtggtaggtagtggtcctgtcggcacatttctttgtctgttagctcattgatttttgggtttttttctctgcctgttaggt

SEQ ID NO: 46352 - DNA, 632 bp, Manihot esculenta
  Intron number 1 from transcript cassava4.1_005359m (locus cassava4.1_005359m.g) derived from phytozome v7.0 (chr-ID scaffold02973; pos 210199 to 210830)
gtaatttgtctttgtaatctaatcccctcgtccaggtgagtctctgttgcaactcgtgttgagtcaactctagggttttcttttttttttttaaattttcatctaatctttccgatttcatttcaattcttgtacttttgctttccgctgatctttttcgtttctctttatatcactgtaattattttttccgaaggttggtttgtggatttggtatttttcattggcctggttgcttgcctgaaaatcggtgggaaatgaaaggggaagaaaagtaacagaaacttgttaactttttttttttttaattgagaaagggggagttctttcaaatgaagtattttagctttggcttcactattaaacgaatttttctcctctttttttctgaattgagccgtttgtatgaaggattatatatcatatgtcgtacagagttaataagattacagcattggagtgaaagttctttttcttttttgaagattaaaaaatctacttttgataaatttatttgaattgtgtcactgtattttgaagaaatgaagttgcttttatgttgatttttcgtgcaaattggatctatgttgtttgcagctcgagcgtgtgaaggtgaattttgggatttcctt

SEQ ID NO: 46353 - DNA, 491 bp, Manihot esculenta
  Intron number 2 from transcript cassava4.1_005253m (locus cassava4.1_005253m.g) derived from phytozome v7.0 (chr-ID scaffold06916; pos 174640 to 175130)
caggaggcttttgcttggtcttctgtgatcttgccgtgagttattcttgtcgaatctttccttcagttttttttttttctttttcctcagtgtttgaattgttaatgggtatttttttttcgttcgttgttgaattagttttttcttgaataaattgtaatgggcgagtgtttgactctatgtcgtgggtttgcattttctttgaggcgaattggcataaattcataagagaatcaaatatataaattgacctccaattgggaattttattaaaagtgggaagattctaggaagaacttcttttaacatcctggcagtgaaagagtagagggtaaagttgtttttgtgccgtaatctatacccaaatttttgtttatgtttgtgaaatttatattgaaggctttttgcatgtttgtgctataattgtgtctaattaatttggtttatggattttaggtttcttttcccagctttgggaggattgctatttg

SEQ ID NO: 46354 - DNA, 418 bp, Manihot esculenta
  Intron number 2 from transcript cassava4.1_003169m (locus cassava4.1_003169m.g) derived from phytozome v7.0 (chr-ID scaffold04796; pos 152575 to 152992)
gcagagtaattttttctcttttttttttctttggtgtaatcgcattgagcttgttttcattatttgatctgatttaaactgagagtaagtttgtttgttttaatcaatttgtttggtagatgagaaattgttcgaaagtagcagaaataaaatttagaatttccaaactttgttttcttgcaaaaagagaatatcaggtcttatgttcctgtttctctgcttgtttttgttcgttccgttcttcctatagattgttgccaagtttatacaaggtatataatgtgtgtgcatgtgcccctgtgtctgtatctttgttagtttaccttttaagtttaatctaagatcttgaagaaatattctcattctgcaatgtgatggaacaggccgaaggtctcctagctgaattggccctatcatt

SEQ ID NO: 46355 - DNA, 422 bp, Manihot esculenta
  Intron number 3 from transcript cassava4.1_021458m (locus cassava4.1_021458m.g) derived from phytozome v7.0 (chr-ID scaffold04457; pos 380081 to 380502 reverse strand)
aaggatatttaagagatcagcggaaaggcttaaaggtgtttaatttttttactagttttaagtggccatatcttctaagtgcattgtttttctacaaaagttgaggtgttcagaatgttgattgcatcaatgttttgagtgttggttttcagaaacaaacagaaaactgccggcagtacacatttgcttgaaatgcagttaatcaggtcgcttccataaaagttttttgttgttcaggatattctaaaaaatttcagaatttcagaagattattcctgacgtcgttttgacacaatctccaattctgtgctgtacaaaatttcttctgttttttattataaatttcattttgttcaaattttgatggtatctgctcgaagatattaggtgttggagctaagattcctagaaattgcttgttc

SEQ ID NO: 46356 - DNA, 951 bp, Manihot esculenta
  Intron number 2 from transcript cassava4.1_022291m (locus cassava4.1_022291m.g) derived from phytozome v7.0 (chr-ID scaffold10972; pos 31998 to 32948)
ggaagctcttcatctactatacttgttactaaattgtgagcaattttatttttatatttcttttcgtccatttgttttttcataagcttacatgtagtacttagttgtaatttgcttattactctcgcatataacttcccccatggggataaaatagtgttactagcttaggttgtactcaaaactactatgatgttcttgaaaactaaatatccttgtgactttaaccaggaatagcagctgtgacatggtttatagatgtggatgactatatgctcatgaacccacacgaaggcaccccgaaactttatgaaaatgattaagcatgtagtggcttgggtagcttttcatatcttttggcggcatatgcaaatagttgattcctagtgactcatagctaaaaatttgcaatagaacatttttaacagttctttggttatgttaaatgacctttgaaagtgtaattgcataatatcttctgcatgaatgagttatataaaaaaataaggtagaaaacatttgttaatgaattcatagttcttctcagatgtttatataatcaattttacaatacccttttgcttatttctcagatgtttatataatcaattttacaatacccttttgcttattttctttaataatcttttagaatatttggtgctgtaggttttaaggaatagtgagttgaagttctacttgatcattaacagattgtcctgtgaactaaagctgagaaaagctattgggttcactttgtgggacttttctctctccttgcagctgaatataaatatcaaactacctttcttggattagcttctttcatttgctttatttcctgtttctagaatttaatatttgtatcaaaattgattgtttcgttcgcaaatcaaatcctgttcttgtttttaaggtcccaagctattgagtgctctctgtcctagttgt

SEQ ID NO: 46357 - DNA, 967 bp, Manihot esculenta
  Intron number 1 from transcript cassava4.1_031957m (locus cassava4.1_031957m.g) derived from phytozome v7.0 (chr-ID scaffold08446; pos 138301 to 139267 reverse strand)
aggtaacttcattgtctagtactgcaagatgttgagtattttcttttggatcaatatatacatttgactcttatctctttgtattcatggaatattctccttttgttttcttaaaatatatctttgcatgtgatttacagcgtcaaaaggatacttgtgcagctttttatttttctctttatttttttgggtccaaatgtgacggttgaaattacttacctattcttcctgccttgaaaagaagtattcccatataatagacttttaactattatccaaaaagtgtcctatatatgttgtggccaaaaaagccttcaacctcatatatgcctgcattaggctgacaaacattaatttcatgctatgaatacttacgaactacatgatctagtctattcattgaaatgcaactgaaacctgaagttttctagtcattttgatacatgttcacgaaacctattcaaggtgaagcttatttcaacttattggtttttaagcctctttccttttcattccctttttcttttctctttgggtttctctaatgatatcttcaaaccaaatttcttagaaaatcattttcctctctctttctttcttttcttttctttttttttttcttaaattccttattgtcaattttctataagaagcttttaaatgctctggaggccccctacaattcattgatgtcaatcttctggcagtgactgctgtcattggttttcattagccattctgaaggatagtttgataccttaaaatatcacaagaatgggaactaagcagtttattttaatggatgttatccaatactgtacaagtaaaatttcctgctttttttcccagtgatgctgtgaaggttagctgttctcccacctattctttaaagtaccttgttagataactgaataccatattgatcagcacaggaacttgagctgaaaaagaagaaagaggaagagga

SEQ ID NO: 46358 - DNA, 275 bp, Manihot esculenta
  Intron number 1 from transcript cassava4.1_026807m (locus cassava4.1_026807m.g) derived from phytozome v7.0 (chr-ID scaffold00847; pos 1232810 to 1233084)
gtaaattcttttttcgtttttgatctctgcgatttattcttcttgtatagatctggaaatgtactgcaattttcagatttgcgctacttttgctcatattgatttcttcgatctagaacagtgtcgaatttttagatgggaaatcgttttaataaagatgttttttccctatgtatcagtttccataggaactgatattttgagcttttgtaatgatcgatttcttcttctgggctgtaggctctaccaaatcagcagactgttgattatcctag

SEQ ID NO: 46359 - DNA, 519 bp, Manihot esculenta
  Intron number 4 from transcript cassava4.1_026807m (locus cassava4.1_026807m.g) derived from phytozome v7.0 (chr-ID scaffold00847; pos 1233644 to 1234162)
gatattagtgagttattaattccttctcccctccatgctcattgcttgaaagttttgtgcgtatagtaaccatttaatgtgttatgaaccgcatacagtttgttagcttaattttgtattagttactgtaaggggggtcctgcttttgtcttcctcatcattatataacttgttaatttttatagtctgttgttatatcactaaatcaaattttgattctttaattggactttataatgaaattttccacccaactcatgcatcatgaaggttatgagaatttattgttggtgtaggttgtttgtccaatgtagatcgaggtttctacaggatgtgaatggtcacttgtgaagagattttatatagaacttatattcttgattttctttttagatggcctctctttttttagcacgctttatcaaatggtttatttgattcatttttcttctttttatcttttttttttttcatggtttcttgaattgatgtaccatgtttttatttttggcagcatcc

SEQ ID NO: 46360 - DNA, 643 bp, Manihot esculenta
  Intron number 1 from transcript cassava4.1_000849m (locus cassava4.1_000849m.g) derived from phytozome v7.0 (chr-ID scaffold12416; pos 198457 to 199099)
atactttggagaagatcatttgtcacaattcaactgtgagttttttcccctaatgtaatgttctattttttagcttgcactaatttttctatcttagttgaaatgcaagaaaatctgtattgaattttttggcttttgtcaaggtagacgaaacactggaattaacggaaatagaagcgattgagaggggatacaaaaatggaaagatttgtgtttattgtatttgtgcttcgttgaggacaaggcttgataatgttttaattgggctgtagtggaaattggtgttcaattatagcaatccccaaaatcagattgtattgcttgaaattgttagtgttgcagaactgtctgtaggcatttgttttataagagtagaaggaagcaattgttgcaataataattaatgaaacatagtatacaatggcatttttctatttaatgatcaatcaaacagttgctgtaatttcttgctgattaatttgttttttcgtgttgggtattgctttcttggtatgaattccttaaattattttacattatagcgagtgccttttttttttctcttgctgattttctcgtgtaaactagtgtttggcacttgtcttttcatttaatgtctttctttgcttttgaaaaatttagg

SEQ ID NO: 46361 - DNA, 841 bp, Manihot esculenta
  Intron number 1 from transcript cassava4.1_018994m (locus cassava4.1_018994m.g) derived from phytozome v7.0 (chr-ID scaffold04024; pos 42660 to 43500 reverse strand)
tggaaccaccttctcttccaccatcttcatcacaggtattctcttttttcttctttatttgttttcttaaccttgcaagaagataagctaatttttagtttctaatctgggtattcttatttctctattttaattttgttttctgtatttggattttctggtataagaatcttcaagatttcatagaaaaactctctcttgaaagcccttgtttgctattattttcttggcatgtttttcccaggaatttgtgaagttaggcttgaatttgtttcttttaatttgtttatatctcttgtggatattaagatcgtttaactttaatagattactagtaatgattaaacatgattaagattttgaaactgactccatgtttcctcttttctgattgtttatccagctgtgtgtgattggggacaaagtttctgggtactgaaattgaaggcagctggtttttctaaaatataacggcatagagaatggtcacaagagttggacattgcttttattaatagaatttcgaacctcatctaggtttcttgtgaatttgtctttgaatctggttcaaagttcttgcaaatgaagcatcaaccgtccacattgtgatctacaagaagcatttgcattataacacatctttcttcaagattagagtcctgctggtttgctgcatatcacatttcagaatctgggttagatcttaaatatttcaatatagagagaaagatttctgggtttggacagagctggttgtccattgaacaatctcgagaaatcagaggctcaaatctgtggcattgtctggggatttggatttggtgactaaatcaagtattaa

SEQ ID NO: 46362 - DNA, 622 bp, Manihot esculenta
  Intron number 2 from transcript cassava4.1_028428m (locus cassava4.1_028428m.g) derived from phytozome v7.0 (chr-ID scaffold00847; pos 800367 to 800988 reverse strand)
gttaccctaacatcgtatgtggtcttgttcctttgtctctttatctgtttacccaaatttcattccagtatctgttttagatggaaagccattgaaaccgcttataagaatatgcaacaaatctctgcaacttctgatctacaattggagctagcactgatactacaaattatagaaaaaaattttggtggattgtataaactttaatttagcatatactcttcttcattaccatgtaaatcctcttcaaaattaatgcatattccaatcaatcttcttcctttaaattcaaatcaaacagctaatctgagaagatcttcagaagtttttttttgaatttctctgaaaatctctctctctctctctctctctcttactcattggcactaaccctaggtcaatcaataaaacaaaagctttgggccctcaccttatgaatcgagctttgagatgcttgtttatgaaaaatcaaaatatgaactaatcaataccttctccctcatcattgccattgtatactatgcgagcttttccgagaaggacgagttcaaattgtccattttgtttcctgttatgctgcgtttggcccttaaataatcagtttttttttatggcattgcag

SEQ ID NO: 46363 - DNA, 958 bp, Manihot esculenta
  Intron number 1 from transcript cassava4.1_001381m (locus cassava4.1_001381m.g) derived from phytozome v7.0 (chr-ID scaffold08500; pos 310872 to 311829 reverse strand)
atcttttgcactcctcctgtatccaggaaaacaaggtatcgcattaaagcacaaaaaaccctaattttaagagacaaccataacctaaaaagaaaaagcaaatgaaaaaaaaaagaccgcaaataccagaaatttccaaactttacccagttcagtatgttgcacaggggattctggactaatggacaagttcccatttgaatatttttagattattttcagtgaatcctaaatttttaagaactttatgaacttaaatatctcatctcagataacgaggttcttttctcccacgatatatatacttctggtgaagctattgtacgctaaattcataagaactgcctgaaatttacaatagtcatgagttgatttcctggaaatcttatgcaagttagcctgacaagtcttgctgaattgcagtcatataggagacttgccttttctgcctttgaaacttacacttagtttcaacaatgtgattgtctaaatttgggttgttgtttcaggaatttgagcataacgataagtggaattagatttgctggtgaatgtctcgttttcttgaatgtgtatgctgttagatgtaaaatgggaactaaatgggttttgcatggagacttcatctgatattgctttggtagattatttgagaacagttgtgttattgaacctgctctagtctcaaagggagctgaatggtaaaagaagatccataaagccatggaattaaagcttagttgttgtctttgtgttgtaaaaacaaaagtttgggtaattgatacgcctctgtttttcaaatgattcctagttttcataatgcttattcttcttatttttatgtaaatgcagatcaacagatttaaaatatctcatcattcttttgttgatattaactgttattagcattgtggtgtctccagactgctgtagtatcactcggagagggagagcttca

SEQ ID NO: 46364 - DNA, 731 bp, Manihot esculenta
  Intron number 2 from transcript cassava4.1_024891m (locus cassava4.1_024891m.g) derived from phytozome v7.0 (chr-ID scaffold06683; pos 499998 to 500728)
aaggcccgccacgacccttgagacgtttcttccaggtatatatcatcttcctaccacaagcccacactatcaattacgtctcatatatatacaaacgatcaattctctagctttcagtccatcagaaccttcttgaggcatgttaagttgtctgttccatgatgtttcaaccttgaatgtgttgtaatagcttgtttaaactaagttatagaaaagaaaaaaggtgatcccacattggaaagacacaagttttcttgtcaaaaatttggagggaggggggtgggggtggggggtttgattggaattgatccctgaaatagccaagaggtgcctttgccaacccaaccaagggagtcaggcaaacacttgattttaactggtatttgtttataatgcgaaaattttttgctcaaaactgagaagatttggagatatagaagatgatgtttatttttgttaagcatactattgagactttatcaatcttgaaagaatattgacagccatacagcaaccatagcagggacaattaatttccgaaagaaaatattatttcatgtcacaaagccatatcatctctaccattaagtttggtcgaaattcttgactagaaaattaaaatttgaatgcatagaaaattttaggatggatcaggaaaacttgtgtggataatatttcatggtttgatctcatcaggggttggatcccaggtgcacggccaacttgttctt

SEQ ID NO: 46365 - DNA, 893 bp, Manihot esculenta
  Intron number 1 from transcript cassava4.1_016530m (locus cassava4.1_016530m.g) derived from phytozome v7.0 (chr-ID scaffold08085; pos 297404 to 298296)
gctctctctccattcttcagtctccttcttctttggtacgttattgaacttcagcttctgggtttcctttattttgaggtttcaactcgattttgaccctccaagtttttaactcttcctttaggagctattttttcgtcaattttttccgctcatttcctggaaaatgaatgttacccatgatttataatcagttccagatggggaaatttctgagtgcttgtcttgtgatgttttcggattgtcgggcaataaaatctagaggatatgagattgagatgcctgtttttatagttaccaatactactttaatttgttgataatgttcaattaggactttgaacgctttcagaggaaaggtagttctggcgacagatgcatgtggaattacatcaatttgatttgttttgttgacaaaagcctacagtgtgctcaggcatagttcgggattaatagaagagtatagttaggaagattgtttgacattgatcaatttgtatcaaatttttgcacgccagtccaaagttatttcaatgctgcttttggtctttcttcatagttgccatcactaactttgatgcttgcttaattctaaatcaagaatcaagtatgtatatttgtaagggttcatatgacttcactgttattctttgttcattcatttgtttgcaaggtagatttgctcaagttgagtcatcttaagttatgagcataaatatgtaaccacctcccacttcttttctgttgaaacattttaagagtcatcaatattatcttggatcttgtcagtgttatagctcttgttagagtttatggttcaattattcctatgactgtttcttttactataattgcttaaatttcagggtgcacctggagtaactggttcggtg

SEQ ID NO: 46366 - DNA, 620 bp, Manihot esculenta
  Intron number 1 from transcript cassava4.1_005839m (locus cassava4.1_004423m.g) derived from phytozome v7.0 (chr-ID scaffold06916; pos 1444788 to 1445407)
ataaatttgtgattggacaagaacgcgctaaaaaggtgattttccttcttgtttggttgattgcttatgattaaatgtattggttttgtctttaaaatgcttatacaagtagcacactgttggttccctcacgatatgtgattgatttaagtttggtaaattttgttttgactatgttgtttaagaaaaagtttgcaattcgtttagttgttccttttctttttcttgcacgtaatttatttttaaatgttcggatagaaagtttttggttatgctgcctggattttttagcataccaatagagatgtgcttctgtgcatcggtagaaacttttattactgccttttaacagaaatgcttagaacgacacaatgcttataaaaaaattgcattttttggtttcttttgttactacttttttggaaagaaacctgcctgtatttgaactttgttcataagttatgatgtagattgtgcaagacacagccacttctctgccttgtattaacatttcttttgttatatttttccatatcttctacatccttaatattgtttatttctaatttaatgtattctatacaggtgctttctgttgcagtttacaatcactacaagag

SEQ ID NO: 46367 - DNA, 559 bp, Manihot esculenta
  Intron number 1 from transcript cassava4.1_005087m (locus cassava4.1_005087m.g) derived from phytozome v7.0 (chr-ID scaffold12564; pos 887 to 1445)
atcgcaaggagctccgcaagaaggaattaaagcgggtaatttcatatttattttccacttttcttaaatgccggaagttggttgtggttaattttatcatcgatttttttttctttaactggattttggagctgaatcgctaagtacagagaaaagatagcagtaacgaagaaatttgaatttttgtttgtgcaatcagtaattgatattttactccaattgctctggagaaatttggaaattgggtggtttttagaaatttacgtgccttttcaaacgttgcccaaatagtccagaatttcatgagcaccagaaggagcgtagtggaagaacgcctacttttactctgattctggagtttcttcataattgttattttaattattgcttttgtgatttcatgacacatgcatgcctacgtgttttgttgctccaagtaatgttgttggatttggattattgaaaatccgatgcattgttctacaaattgtcaaacttctgaagttttgtattgaatgtaacagaacaaaaaagaaagaaagaaggtaagggaggtggg

SEQ ID NO: 46368 - DNA, 897 bp, Manihot esculenta
  Intron number 2 from transcript cassava4.1_016989m (locus cassava4.1_016989m.g) derived from phytozome v7.0 (chr-ID scaffold07520; pos 1491384 to 1492280 reverse strand)
ccttttatccgccgactacctgagtttaagttctggtaatatttttataataagcttctgaatggatttacatggaacctaacacgctttaccttgttaaggatttaataacttgagctttttggcatgtcataatttaatatttactaaacctacttcatctaagtagctgttttgcatgtgaggtgtgcttttgatgaaaggcggaaaaatcatttcgtcaaggcaagtgctaggtgttttaggaagctttgatctggtttgccagaatttattaggcaataaatttcagattgttattaacttaaacctttatttctcttttgttgtttttgcaattggtgaaaagaaaatggcctttttaatttgtgttgatttatatgttagtagtttcatgcaatttaagcattatagcagagtttgttttcttatttgtgctgaaattattaagaacacaataatttcttaattgtcctagcttctttggcttcttttagttttgcttgtatattatcttcattcatgaagctatcacaagttctcacattgactgggggatttcccaatgtattaaggctgttggttcccgcaataatgtaggtgttgcatggatatgccaacagttggatgtaatagttacactaattgggaatagtgtaaatggagtaggtctccctaatgagtggatgccattggtggcattatttaggatcttttttcaaaatgctagttagcttctaaattatgaagtgtttccagtgcttttcaatcagctccactagtgcatctcactttacccaaatatcgtgtgtatggatgtatacatatattggttcttttgggactgtttaaactgtaggaagtttctgaatgtattgtttcatcttgttttcaggt

SEQ ID NO: 46369 - DNA, 553 bp, Manihot esculenta
  Intron number 1 from transcript cassava4.1_007320m (locus cassava4.1_007320m.g) derived from phytozome v7.0 (chr-ID scaffold07036; pos 170743 to 171295 reverse strand)
agagatcctgtcatattggccactggccaggtttgttttctgtatttttctgctaaatgatttcgtttttgttctgtttgctacctgacaaattgcccgttatggctcgaggatgtgtaattgctgttttgcgtttcaaaattttcactttgggcttagccaactgagctattcacttatttcgcagtaattttagcttattggaggtgggtatttaatcttgttaaagattcaggtaaattgatgagtaatcctttacattcttcattcacttttgctttagtctctcattctttctcacaatgttgttttcagattttttttttttggaaaaaaatttctcatctttgaatttgggttaaagtggcatgatgataacaatttctatactttactgtgttatttggctgattatcttattactgaaatggaattaaatggcagtgaatctttttgttattttgattttagttttggttcattccacttgttcttattttgtttcttcctggttattgatttattttatgttctttttttgatgtgtagactt

SEQ ID NO: 46370 - DNA, 875 bp, Manihot esculenta
  Intron number 1 from transcript cassava4.1_003290m (locus cassava4.1_003290m.g) derived from phytozome v7.0 (chr-ID scaffold00109; pos 78746 to 79620)
gcgttagatattattaccaggtaattgcacatggtgatttcaattgggttttttcatttaattgatgataataattcaaatttcatattttcctgagaattatttgattcttgtagcttgttttttttttttttttgtttttttgttttttttgtttttttgtttttttttttttttttttttttttatctcagctgcctctgatcaattgccatgccacatttttctgggttttgttagattagaactctgcaattatgacttgtttttgaaaaattgaagcaattccttttcaacttttgttttgctgtttcaacatgaactgttcccttttgaggattctttgatgataatgccttcatagacttggaattgattgataagggttcatgggaagacatctcctcatcagcttacattaatttatttactctattcctctgctcaaatcagtttaagtttaaagtgaactcgtcttttgtggtatggttggatggtgttctcatttaaaactgcaagtgattttgctttgatgacatactttatctcatatcatgttcctttttcttctttcccacaaccaaagcaacaaaccatcttaggaaacttgcacttatcaattattagaagtcttatttagatgggcccttttcgtgtgttcactttccagttgcattgagatttgttattgacttgatttgttctccaacatttttcatgttaatgtgaggatgagagcaacataatcctttcttgcacttgtggcccatggcaaacttggctgcagcgattaaatctcacttgtccacaatctgagttagcacaacctcgttatgacaggttggaagcgattctaaaggttggagtggaactca

SEQ ID NO: 46371 - DNA, 508 bp, Manihot esculenta
  Intron number 1 from transcript cassava4.1_011543m (locus cassava4.1_011543m.g) derived from phytozome v7.0 (chr-ID scaffold10797; pos 67454 to 67961)
aggaaaaccgtaaaaacccaaatcacaattcacaggtactctctctatcttcatttaaatgaatactatgtcggaatctctgtttgctttctgagaaaatgtcgagaaattagaagaagattaggtattcgttttccctatgctgcagcaagaggagagaatatattttttcgttgtatattcgtctcttctctcttaatttttcttcttcagatagagtttcgaatttttttggcgttttcattttgttggtgtcaatagttcatctttctttgctcaacttgactctgtagacttaaattacttaattatgttcgaattttgtgaaattattttaagtttgtggtattaagagatgctttatgtgtttatttcttcacttggttttgatttttgtgttgcctgctttcagtgaagctatcagccatatgtttctcattttttttttcagtttatcttctaaggctaataattttgttgcttgctggtgcatagaagacattaccaa

SEQ ID NO: 46372 - DNA, 772 bp, Manihot esculenta
  Intron number 1 from transcript cassava4.1_021769m (locus cassava4.1_021769m.g) derived from phytozome v7.0 (chr-ID scaffold11179; pos 73309 to 74080)
tggctctggtaactggcagttgcttgcatctttaggtaagtttcaagaaacccagcaattgaatgggaaaagaaaatagttttatgcgataaaagtagcgccttggctgtttttaagtttgcttttgttttgtggtttttgaacactgattggttgctgagaaaatttaggaaaagaaagtgtgaaaagcccgagtatatgtgtgacgattttatttatattaaaattgtcctttgttttcctaaacaaaatctaaaagattcaaacttggcagctttcttcttaaattttctctcataattttctcaccaaccaaacctagtatacccaattatgacattgaagaatcagggaaaagaaaacaaaaacgtttatggttaatgcctttagaaggactagaaaaaattctgtctaaagataggggaatccatggaattagcactttttttaaaagaaaattagaatttttcaaatagttttttcaactttatatatttcataatttttcattgcgtaaaagcaaatgacaatgaaagttttttaaagagtaacttcatacccactaatttagaggattgggaaaaaaaaaaaaaaaaaagaagagagattttaaatttttaaagacataaaactacctgatttcaaaattatttaaaaaaaaaaaaatctctgaatgaggaaaagcaagagatgattgtacatttttttgtctttcttttttcttgttagattttatctcacatgtagcttttgatccttgaaggtgagttgt

SEQ ID NO: 46373 - DNA, 843 bp, Manihot esculenta
  Intron number 3 from transcript cassava4.1_028803m (locus cassava4.1_028803m.g) derived from phytozome v7.0 (chr-ID scaffold00847; pos 1081573 to 1082415)
gaatttgccttgatattctcaatctcccccccaaggtcagacccttgttaaacttcttattttgttcaagtttagatttttttacgaattgatgatattaattggaatgttttataccatgggaacaagtgattgcttaatttgaaggaagttttggaaactgaaactaaataagtctcatgtttctagtttagtaagatggaaaacctagaaatggtgtatacatatttgatggttttagctgagattgggttctcaatagagcatactcacttttaggtagctgaatttgagcctgagcatagtcctaattcctaaatttctcatggttctagtgcacaaatttcaattttgttaatataatcgttctatagtttgtctttcaactaagttaatcgtgccttggttaaaactgctggcatttatgttcatttaggtattgccatggatttacattgtcgcacaatcaaaaagtagttaatttctgaagtcaggttctattttggatttaacattcgtttgcttgctttgtttcccccttaatgcaacaacgttatgcactattctgttttgacccgtgaaactcgcaaaagaataagcttctcatgtgttaaatctttaatctggaagatggtgtccggaatatttcctaaaatgtaataactgctcaatggttgaaccatcagatggcttttagttctttagagttaactactttcacttgctattgtagaatgaatcaccctgacttaaaatctttgtgccatttttcaaattgcaacttctgtttctttcaaagatgttatttataacaaggctcatgctcttacttaagcagggtgc

SEQ ID NO: 46374 - DNA, 776 bp, Manihot esculenta
  Intron number 1 from transcript cassava4.1_003605m (locus cassava4.1_003605m.g) derived from phytozome v7.0 (chr-ID scaffold00847; pos 227978 to 228753)
tgttttcttctttctttgtttcttcaccatctcatgtcagttccttttcttgtctcttaatctttgttttcaggttgtttctgtctcgtaatttcagaatctgggtaagcttttactagttggattttccatgaaaattctttgtgttctgcttttgaatgatcctgagaggaccacggtagtcgttttctttttgcagccactggtatcgtatggctaacaattactaagtcctcaatcaacacgttacctggctggggacggctaaattctttttaccctttcgatttttttttaaattttttttaatgaaatccaattccagtctaaattagtccaggttttcttttgtaaaataataataatgatttagtttaatgatatgatttgaattatggattgtttttcgtaaacttggattatgcattgtttgtcgtttcaaaagtttgcagtatgacctgattgaaatatttcacgaggaatgtgacagtggtggatcagtttttgagagttttggttaaaatttatttctctctatcaattattttatttttctaatattagattaatggagagagaattattgaaattacaataggtgagataaaaataatttaattaattctctttaatcaataaatttaggactttggagattgttatatcataatgctttacaatcaatgtacccaattatttattgtacttgtggaatgtgattgtcttgttgaaatttatcagttgtaggccttataattggaggcaattttactccc

SEQ ID NO: 46375 - DNA, 677 bp, Manihot esculenta
  Intron number 1 from transcript cassava4.1_012492m (locus cassava4.1_012510m.g) derived from phytozome v7.0 (chr-ID scaffold04298; pos 43234 to 43910 reverse strand)
acgctaaatcctggagaaaccaatctctttcacaggtttggctctttgtattttttttttttttctttttttggatttctcgtttaatttcgattctgactggttgcggcttctagggttggttttgattttgtgaatgttaacgtctctttggttgcttagaaactgctggaacatcaaatttgtcactccgcaatctgaattttggagttcattagcttctgaagtatatttttttttctatggttgctttttattttgttaatattaacgtttgtttggttgcaaaaaaaaattgctggaacgtcaaattcattgatcgtgaagcaacgatccccgcactccccatggttattgatttcttatgaagtaagataacaagctcgatttattttggtgctaaatagcataaatttcgatactttaggaaaacatgtagttgaattgcttttattttgtttcttctgattataaagcatttatttgataaggactcaatgaatttagaagttaattatagtgacaagcataaatttggaattctaggtgggatttttctctgtattagtaagcattgagaaaatagggcgtgattgttgtctgtttttaacataatttgatgctatggtaatgggtttgcagcttttccaattgaagctagaagtttaattattgga

SEQ ID NO: 46376 - DNA, 1032 bp, Manihot esculenta
  Intron number 2 from transcript cassava4.1_015779m (locus cassava4.1_015779m.g) derived from phytozome v7.0 (chr-ID scaffold11341; pos 745972 to 747003 reverse strand)
gaggtaagtttttgtcaaagaacgggggaaagaagcgtcttacttgttgctcttggtggatgtctattgcttattgcttaatgtttgcttatacttgatcgctgatccatatcactataatggaattcttttgaagctcattttacgtttttatttggggaaatctttacgttattaagatccaaattttatgtttttgtttcaaatagttttccttttccgatccaattgcacctttatatttgggtttccatgatttgtgtctgtacgagcaatgtttagctatcctatgatatggtagtgaagtttattgagcttatcacttatagtttgtgtgtacttgaaattgacaagcgtattgagcttggagaacgcagcattattctgtgcttatgaattttgtgggttccttttattcttaactcttaaacttgaataaattctcctttcgtccctcaaaaatcggcttactttcctttttcatctgtcccaaattacatgccactttcttttctttagatgataatttatttagtagtttactaatatatccttaaaattcaatagtttggataataattagaatagagttaacaaaatttattgctttaatcatactaactatattttctccctccatgtgcaaatagaaataagcacatctttgtagtatggagggataaagtatcataaaagtgagagaagtttgaaattattctagtactctggggaacatagcggtcaggacaaatttcaaatttgataccatggcagaatttcacagcttcaatttaatccatatttcaacttctctgtgtgcaacttaagaactgtttgttttatttcaagctgctgcaagtctgagtatgtgcttatcagcacagtgtcatgcacatctttttgttttctttaattcaaattctaagttttgacatcaatttcaacataagaaagaccatagcatgtttgttttcataaaatgctggtcatcctgcagagcaaaagaagcaaaagctttctgaagttaaaact

SEQ ID NO: 46377 - DNA, 771 bp, Manihot esculenta
  Intron number 2 from transcript cassava4.1_017216m (locus cassava4.1_016300m.g) derived from phytozome v7.0 (chr-ID scaffold10797; pos 258320 to 259090 reverse strand)
aagttcaatttgaggataggttgttcacattgcaggttgtatcaagaacaccttttttttaatcatttttaaaattttttaccaatgagtatatattcactgtaatattgaaagaagacatcataaaattattttagctgaaaactgaaagattttgacttcctcattagtttgaggtttcagatgaatgtgtttacatattagttcgaggaattaatgtcgaattatgaagttttgcgagtttaatagaggcatagagtggtgggaagttatcagctaaaatcgttaaagaaccgtaagaagatgagcaatacaattatctgttggctgtattggactcttgaggtataccttgaacaatggtatagattgtacaattgcataaattaaaaattttcattttgagagttggtcaagctgttagctttgtggttctgaaagtgaccgtagattataccaaattaggatgccgcatttagatataaggaaagggaacaacagagaaactggaggttctgcaaacagactgataattattagtgtttgacaataattaggtttgaacaccaataataggtttaagggtttctagaattttttcattattagctatggagttatattaataagttatctgtccacccaaaattgcaatactaaagttttatggagcatatctgtgctgtagatccatttcatagttgggcggaatgcccaataattgcaaaataagtgattttgttctgagccttgttatttatacatgcagat

SEQ ID NO: 46378 - DNA, 992 bp, Manihot esculenta
  Intron number 1 from transcript cassava4.1_007732m (locus cassava4.1_007732m.g) derived from phytozome v7.0 (chr-ID scaffold10689; pos 134504 to 135495)
aaacgtcggagctcagagatccatctgggtatttggtatttactccttactataatttgcttttgtttttaactgttaatcgatgctacccttttctacttttggttgtttatggtgtttactaagctgccttcaggcttcagctgcaaaattttctcaattctgttcgctcatctttttggtgttctcgtatgacttgatttctgatggtgggttcatttgcatgttcgaattgagactattaaattattgcacgtttgttgcagccaaatacgagggagctgaagcttattagcagccatttttatgggtagttaatttatctgcatagaagattttcttttggtactttagtgcttctccacagtgtaatcatgtcatacaataggaaaatttgctggtgtatatccaataaaaaaatgctccaaggatgggaaccgatatatagagttgtaattgagggatgctttggtaatttgattggccccacttgaagctccctatgtgtttgtagaaattactatattggaatattagttaatggatgtatttagactgcccgcgaaaggcatggttgttcagaatttgagttatgcagtcattcagaatcttagatgacatcataatggtgctgcacttctcctacctcttcaagttccaggaaatacattttcttatgttttgaaatagtaacttttcttgtgaaccatgtttgggtggtgatgcagatctttgtgtttattttgttccttctgtagtttgtaaattaataaacatgtgtacgcggtgtttgaaaaaaggggaaaagatgatggtgcctgattcaattatgttggatgtaaaaattacagtttgtgctttctaatggttgtgattataaatcttattatcaattagatgattggttcattaactttgttttgatgatacagttgcagtgtcggatttatcttgcagggagacaacaaatacacaggatatactttgatata

SEQ ID NO: 46379 - DNA, 987 bp, Manihot esculenta
  Intron number 1 from transcript cassava4.1_019076m (locus cassava4.1_017143m.g) derived from phytozome v7.0 (chr-ID scaffold07478; pos 51058 to 52044)
acatcccttgcaacttttgcaatattgttcttgcggtatatacgactctcatcatcatctttaatgggatctgttctctttttctgggttcttattagcaacttctaattcaagtgtttttggtttttgttttttgttttattctgttctgttctgcacttctgtttctccccttttcctttgtatctcttaatatgaaagaaagaaagaaagaaacatattagatcctgataaaagctagtctgaggcttctgctgatcaggctctcgtgctatttttaacaggaaaaaaaaaggctaactctattgattttccttctggggtttcttgtttttgttacagtcaggtctccatcgttggacttttctttttttcttcttcttttgcagtcaaagaaaagtcagacctgctgctacaagccactgagaagagattattgtggttttacttccgttaatagaggatttttggacgtcaaaacaacaatttactgataaatttttgatgaagacaactccttcaccactggattttctctctcttcccttgttaatagactactgcaccatcaaagtgctgctccattaggcttttagctgatgagaaaaagaaaatgaagatctcagtttggtgttttcttcttctaaacaaaggaacccaacccaattcttcacttttgattctaaaccttttgtttatatcaaataacccattttcttttggaacttttcttccagttttagcaaattaatccaaccctattaggatttttcatgagcccagtcttcttaattttcttttgatctttcctcttccttggatcaagagcgagaatcgaagaaagtttctaattggttttttcttgactttatttttcttgttaattctcggtttcactgcttacatgaaaattaatacatgtacagagttcttccttgaagatcgactcggttattaatggagttattgtgtgcaggtgagtgtacc

SEQ ID NO: 46380 - DNA, 1021 bp, Manihot esculenta
  Intron number 3 from transcript cassava4.1_013703m (locus cassava4.1_011652m.g) derived from phytozome v7.0 (chr-ID scaffold06158; pos 472458 to 473478)
ctgtatgtgctaatcattgattcaatttattgttctctctccttttaactatttaagtttttcaatcattgattcaatttattggtcttctttcctctccctttcactatttaaatttttcattcaacaagcaattctgtttctgaagctgacattaagcttatgagatgcttgataataattagaaaaaacattgcggtaagaatggtgaggcgccagaagtatcatgtttactagaattgaaaaaaatatgttaaaatttttctgagaatggcttatttaatgaaccattagcaagtgtgtgaacaccttatatccgtgttatctgtttcctgggtggcaaatcttggaatcctcagaaactgctgaactagggaatcagtgcactcattgacctcctttgtgaaataaattatcatttatacttcaacacaactcactccttccaaaagttgaagtgatgctgaaataaccaacagtgggagaattttttacaaattaatttacttagattccttgcttttagatgttgaaacaatgaagtactacatggaaagaatacatattttggacattcagacttgggggcgacatcaaattgatttagtcttacggatatgaacattggtggttctttcattcctaaaaactatatattgacaacttcagcattgatttgatcaccaccaggcagttagttgtggtactcaaatcgaatttggttttcctggtcatttctcaggctctctcttgtgttgcttttgttgatcttggaaccttggaaccaagaatgtgttgacttatccctcatcagtttattttactttttgtgaggggtggggtagatggggggaggattcataatttctttggggtcgccgaagcacagttgcatgaaattgatatttgatttgttgtatatcttgttataaattccatctgtatcaatctttcttctgttactaattatactaatgatattacagactggaggtggactcgctgagtttgcagtggctaa

SEQ ID NO: 46381 - DNA, 699 bp, Manihot esculenta
  Intron number 3 from transcript cassava4.1_008905m (locus cassava4.1_008917m.g) derived from phytozome v7.0 (chr-ID scaffold06916; pos 481909 to 482607 reverse strand)
caacacaggtactctaatttctctctctctctctctctttacttttttttttttaaaaaaaaaatcaaacacatgtagtttaatttatttggttttattttgtagttctgcctgctcaaatttaagttgttttgcttgagtttttgtggttccttcttattttttctcatctccttctttccccttttgataatgtttccttatctgtttcatgcctttttccaattgtggtgtgcttgattgcgggtagttgttgcgtaggtatagtttgttgaggagtttaaatctatgaaattggatgactttgaaagttagatgcttctcaattggaaccatggtcattgctaaaaatcatcatcacaacctaaattaaagtcagtttgttgtcctaaatatatctgacagcaaaaggggcggatttcacctggctttcattttcatttcttagtttcttggcaatcaaacaggcgttgcaatatttttaaatttgtcgccatgggcaatctttgaattgttattctatatcgtttatgtacatgagagtctttgttccttcaaaataggattggaaaaccttttaagtaattgtatgtagaaacattcgtaaggattctctcgtatagaaatagagattaaagtaattagaaagattattaaaaccccactgcacattggcttgtgcagggctgagctcgaggt

SEQ ID NO: 46382 - DNA, 654 bp, Manihot esculenta
  Intron number 2 from transcript cassava4.1_007565m (locus cassava4.1_007565m.g) derived from phytozome v7.0 (chr-ID scaffold02421; pos 560886 to 561539 reverse strand)
atttgctgctgcaacaaggtaacaatttatgtttgttttatgatggtcaatcttcttaaaagaaggtccttgttgtcaaattcaaaatctcagaatttttttgggcatttgtggacgactttgaagtatcatggtcgttcacttaattggaaaatgtttgtttgtactctactaagatgaaagagagaagtttattgctcggtgtgaaattggaagttatttaaaataatcttttgagtgttcgattgtttagccaattttatgccaattgtttcttaaatgcttctttgtttctttgatttcaatttttctctgatgctgaaatgaaaattaatattttaatcatgctttccgtgattgattttcgggcttattagcataattaatgagtggtattgcatttttagtgtgaaggcatttgcctccgatgcttattgtgctgattttcggttttctttctttactgtcttggactgttattgtacttcatgatttttagtccagtttttgcttgacatctaggttactatgcacctttatcaaaatcatattttcttctcatttgagtttcagagcatgaattgaaaattttcttatacttttatctgataactcgtgtaattttcctgtgttgtgttatgtttttgtttgcag

SEQ ID NO: 46383 - DNA, 916 bp, Manihot esculenta
  Intron number 1 from transcript cassava4.1_007565m (locus cassava4.1_007565m.g) derived from phytozome v7.0 (chr-ID scaffold02421; pos 562000 to 562915 reverse strand)
tatttctcaattttcttagcttgaggtatgctcagtttattccattttaggtttatcttcgtttcttataatcaatatctgaattatccattgattcctggtgacttttggctgtaatccggatgtgtctgtatggttaattttccttttattttcgttttatggtttagctttatgtgaattatgcttggatcttgttagattcgtagttcatatgctgattcattgttggctagtggatcgataactaagagattggtgctttttttaaaaaaaattcgactgtgtttgctttattgtttttacataaacaaaaactttgaatccagtgaactgatgggtgtttctggtctctaggatttgaactatgttttttttattgttattttcttttatgcaaacatcggttttgaatgaatttactggttgttggttttgtttcgaggtaaaatccgtgaaatctctgtttttcatcttctttatggcctccctttttgtctgaaactagttagtgaattacttgctttgaattgttattatcattattgttggaggtactagttaggagttgctcatatggtttgatttggcgaatctaataagattttatgcttttttttaagaaaaaaatagtatgaaatatttgttgacccttctatgtttatattcttgctcctccattgttattctttgagtatcttcacttttgactgggtggattttgttattattagtctctatcaaatcatgtctattgcctgcctgaaatttattactaatattatttattttgtggttcccctgttagctatttctttttagcatgtggatttctttcaccctactgatttcaaattaatctaaccttgctttctttgcagatatatttcagcgggaagcttaatatttcatatca

SEQ ID NO: 46384 - DNA, 608 bp, Manihot esculenta
  Intron number 1 from transcript cassava4.1_000122m (locus cassava4.1_000122m.g) derived from phytozome v7.0 (chr-ID scaffold01745; pos 133872 to 134479 reverse strand)
cgtgagaaaatgtaagatatccatttctccatccactatcaattcccaatttatcctatttaatttaccataaaattgaatgaaagccttgttgcagttttagtgcctacacataccaggataatagccttatcgtgacattggtttagattatggctttatagaagtttacttgcactctctttctctccttctttcttttatttatttgtttatttaaaatctaagagactaatcgcagaagctagatggtcgcgatgaagagaatatggttttatttggactgatattttagttattaatggtcatcaactttgttctatatgcttaggtgatgcccacgtatgggctaaaataaaaatgttaaagccaatgttgaataccttctatattaagttcctgaagttaactttcttgctttggtatataatttagttagacctagacattgctgctgaaagttctcttccatcttttgacctgttcatggctttgattggtgttataatgacgacataatctaacctgcaataggtatgtattactactgatcatattttccatcatttctagatttgcaattatcttgcagaggcagcctcagccag

SEQ ID NO: 46385 - DNA, 614 bp, Manihot esculenta
  Intron number 1 from transcript cassava4.1_017704m (locus cassava4.1_017704m.g) derived from phytozome v7.0 (chr-ID scaffold08639; pos 44362 to 44975 reverse strand)
atttctctctcatcttattctttggaaatccagttagatgttcactccaaatccctaatttgctttgtgttaattttttgttctactatttagtttctgtatgattttgctactttctaaaaacctaacttgaattttttatttatctcgatctgttctggttagatatgaaatttggaactgtagttttttttttttaatatatgtttgattcttaaatatatgaatggcaaattcaaagagggaaagtagttttattttggaaatatcatccggggattgaattttgtttcagtgcttgacttaggttaaactgctactaccattttgtggttctaattattgtcatttgttcatcacttataaataagattcttgattattttgtttctaaccattttggagcccttgtggaatgaattttctttgcttggaggcttattgttattcctgtaattagttatgttcatgctacattcttgagtattcaagacatcagttccttaattctttgttttaaatgtcattaaaagttagacaactaatttttggattacgcaatgcattatgtttcaacaggaaagtcttcacagagcgcaatctaggaaagacaa

SEQ ID NO: 46386 - DNA, 656 bp, Manihot esculenta
  Intron number 1 from transcript cassava4.1_026930m (locus cassava4.1_026930m.g) derived from phytozome v7.0 (chr-ID scaffold05103; pos 44682 to 45337 reverse strand)
tcctccattgactccatccacacctactcctagtggttagtgttgatatctgcactttagccttggtgttttttactgcaatttttaattcgattggacccttttctcgatttccaagaccttgtttaaattttcctatgtttctttattattcagttggaagttggaattttatttgcatcttgaatgatgcctttatatctgcaatttggtattagttcatatttatttttgtttttttcaacttctctctgaattcataattaataaaagggtgaataaacttcatatgatttccattttttacttgaactttaaggttggaccattttcctttgaacagttaatttttgtacttttttttttctaattggtatgagcttttgtcataacttaatttgatccttcaattcatttctcaatattgagattgagaacttatgattatgtttccaattaggatctgaattcttacgctagggtcatatcttcctgtaaagtttgttgaattgtttcattaaactttaggtatcctcaagtggaaaatgctgattgttatttttgtcatcagctaatagcacaaatttggtgttctgtacttgtgaaatatcattccaacaggtaacagcgctactggagctatcgctggaggagtt

SEQ ID NO: 46387 - DNA, 894 bp, Manihot esculenta
  Intron number 1 from transcript cassava4.1_002222m (locus cassava4.1_002222m.g) derived from phytozome v7.0 (chr-ID scaffold07543; pos 226983 to 227876 reverse strand)
ccggaaatttaacgcttgtgaggaagttactggtaatatagctgacttcattttgatttggtctctggagttacttggagatcgaaaacaacaaaaggaaagaaaaaaaagaagaaaaatactgaatttttatctcatttcgttaatagctactgcgagtaaatgctgattctgctgcgattataaattttttagcatattcttaatcgacttgtttggatggtttggagatattcaatttaatacttttcaatggatgatgagtgattttactaattaatttcaagttgtgatggatatgatttgatttaaatatgattgatattgtagattgagggagggactatgtatgtcacgcagaatattttgtcgatgtctttggagattatgtgacgtttgcagatatttgtaccttttccttttgcatcttttatgaagtttatttgcgtagctcctgctttggacactcgtattcaaccaacaaaatctgatactgttcactgctggacagcgatcagaattctagcatcagatagctcatctagaatctgagattgataattaatagtagctgatagaatatgccttctggttcttctatttgctaccccagcgggtgagatcatacttttggacttctttttttgcaattatattgtaatttaggcgagattgtgatgtaattatataaagaaatagatttttgcactcatgacttttttagtttaagaacaaaacttatgaaagtttgctggagactgattttgtattattcttactttgtggttctttccaagctagaaacaggataaagaagaaaaacttttaaatcacaatgtggtttcttgacacaaataaggtttggcttatttttatggcagagcgttggagcca

SEQ ID NO: 46388 - DNA, 967 bp, Manihot esculenta
  Intron number 1 from transcript cassava4.1_010931m (locus cassava4.1_010931m.g) derived from phytozome v7.0 (chr-ID scaffold02610; pos 4575 to 5541 reverse strand)
ctgctctaatagtgtcctgtcattggaatcaacaggttggtgttccccattcctattttatgtgatgcaaactttctctgtttgtagaaaagatgcctccaaatgtgattatatggttattttatcttagtatgtgtcttggattgtcactaggtatctgggaatgcagataaggagacttgtgctgtgtttgtgtacattattttcaaatgtgaactaaaaaaactatgtgaaaaaaaatgttgactgttttctggtgagacatctctagagacaatagatctgcatggtttactattgttgagacaatagttttgtgaataaaaagccctgttattattgacttgcatataaaattttattggttcattaacctggaattatcagttttaaatagttgtttacttggtgcgtctgcatgcaagctcagtcatctccatgcatgcttgtgtgtgcatgtacactttaggcatgttttcatagtcaatggaaactgttgcaatcttaaacagagcagcatgattatttccatgtagcaacatccttgagacatggagaaacatgaccttgtgctgcaataaatgacaatcatataatattcaatcttctgtgtgcttgcgacatgtcatatgcatcttgtctagtaagatttacatataaacaactggatatggttttgatgcacattgcatggagcatttaattttatctgtgacttgtcaaggtcatcctatgactgtttctgaggtgtagcatattgatgctaatgtgtcctacatcttagagatactcagcatattagaattcatttaacatccttgacttccacatttggtgattttgatgtgttgacttgcttgtgttatgttgttttttcttatctttgatgagctttctaagaagagatcataaatgacacctctttcatatgttgaaggtgttatcttcttactaatcttagaaccat

SEQ ID NO: 46389 - DNA, 601 bp, Manihot esculenta
  Intron number 2 from transcript cassava4.1_016788m (locus cassava4.1_016788m.g) derived from phytozome v7.0 (chr-ID scaffold10797; pos 144950 to 145550)
gcgttctagtagtctgggtaatcttcttctgttttctgttgattttaggcaagcaattcagttctctttctttaataagctctgttttctcctgggtaagttgtaattcttgggaaattttagttgccatagaaaagtgtatgaatttctgttgcgaaacaatattccaaaggtaattgctagatcccaacttctctgtgctgtttgttaggcaataatgttcagtaactattgtaactcataggaatttctgaaaatttggggctctacttggatttgggggtacttgatgttatgttagtagaaaattgtacagagaaaattttagggactgttcagttagtgactttaaggaccctttttgtggggaatttggaagttaatatcttacttgcctattgtttatctcagaaaggaaagaaaaccgtgtgcttacctgagagtatttctactttgctttgttcttttcataatttgtttattgctcggcttgattttgatctattccttgtggacacaagttgaaaaactctagttcataagtctctacgtgcagatggtgaatgttatgggaatttgtgggtttaggttgtccgtgaac

SEQ ID NO: 46390 - DNA, 580 bp, Manihot esculenta
  Intron number 2 from transcript cassava4.1_018986m (locus cassava4.1_018986m.g) derived from phytozome v7.0 (chr-ID scaffold07478; pos 224400 to 224979 reverse strand)
caaaaaatagtaaatttcaatctttggaggttaaggtgagtggttgctagaaaaagttttagtttaatctaatgagctatatgcattatattgtagcagaaaccatgtaaatcgctgtttcaaactcacaaagaggtcttaattggttggcttgaagtatgtggtagcttataatgggtgaattggcaaaataaaggaagaaagcaacaaagtgtttggagatgatggggagggatatgaatgaccaatctgacaatcttgaatggaactattagtggtaattgaagagaataacaaaatataaaacattaatgcttatgagacatgatcattgatgcctaggtatcaaatcagagaaaactgtactgtagcatcttataaaatcaaatagatgttagtatcttaggggatacacttggatttctttaaccaattgttgaatgaggcatggctcaattcaattggcaatgcaagaatgctagatatttcctttttcttcatctggtataatttccttgcaactcacttttctctgggtttcacaggctacaaacagtgataaaagctctaaaccaaacag

SEQ ID NO: 46391 - DNA, 736 bp, Manihot esculenta
  Intron number 1 from transcript cassava4.1_000197m (locus cassava4.1_000197m.g) derived from phytozome v7.0 (chr-ID scaffold07520; pos 1507872 to 1508607)
attcctcctctgacgaggcttggtatgaatattatcatggcataatgttaagcatttctttaacgtagtttatgctcttctgtttttagtggtcttgtttgtgtttcaagtttatactactctttagcttctttttcattcatttttttttttcaaaaacttgggaatattatagatagtaggatacatattggaagctttttggaaggctgggggaagaagagagagattgttaaaggatatagattccacggcagtgaaaatcaaccttacttatcacaagaagtattatgataatgtataaaagtgtggtttctgaagtttaagcttggctgattaaatgttctgctgagaaatttatgtcgttcttgaaaaaattaagttttttttttgtcttaattgttaatagattatgttttttctttgaattgcagaaggggttctagttttgttgaaaacttagctggtaaatctattgtccccttgcatatgtctaggggcttatccgtaattttgaaaatgatttgtttttgcatagacaatttggatacttatattgctgtctgctgctgtattactaaatatgtgttttctttcatggattctatatctttgcctttatcaagtaaacacagctgttaatctgtatccaacaaggaagttgagaattgatggtaggacatggttttctgtttcctcacttatagggctccagcagaagctgaaaatctatcag

SEQ ID NO: 46392 - DNA, 1051 bp, Manihot esculenta
  Intron number 1 from transcript cassava4.1_014791m (locus cassava4.1_013801m.g) derived from phytozome v7.0 (chr-ID scaffold04043; pos 791614 to 792664)
ttccgttcttctgtcgatccatagtccaaaatcttgtaagggtaactttctccactcaatttcttctattttctttttgtttacctcagtgttttagatctctgttttttttgtttttcctctttttttttaaaaaaaaatttttcttttgtttttttgctttatctgattcgacggattactgtgtttttttactcgatctatggagattttagcgatctgagatcttcctgcttcttgatttggtttgttttgcaatgtggaaatagtttagtaacagaggggagttagtttttaggtttctttgtttgatgttgtgatctatatggttcctgagcaagtaggttgctgatggggcagtgaaagcccacaatagtttgactttggcatttctttttcatttcattacaagaaatgtggcttttatttattaggttgatgagaaaatgttggagagaattaaagggattgatagttgactttggtttctatattacttattcatttatttacttcagatcatctaaataaaatatttgttgttctaaatctaatcggtttggttgtagagaaaatcttgaaaaaagaaaaaggaattaaattcttgatctagaattcttattgtcgttaccacatgtcaaaaaggttgatgaagaatgtggtcatcaatgaagaaatggaagaaatgtcactttgtacagataactaaagcaccgtttgattcatgtgattaaagaatatctgattgtacatttttgtgtttgatgctagtatgctatcatagttggaattgggcttttggttttctagagatttttaaaaatgaaaaatattcacaaacagcgatgtccggaagaaattaagagaaacagattaattttcagagtgctatgtggatggttgggaagtcgattgatgaatgtttgtttgtttgttattcttgaattagatgttgaaatttggttccagttggtaattttggatcatgctaaagatgcttgtattgggaattgtcgtgcagaagttacttttttagtttgatatagcaagg

SEQ ID NO: 46393 - DNA, 767 bp, Manihot esculenta
  Intron number 2 from transcript cassava4.1_005491m (locus cassava4.1_005491m.g) derived from phytozome v7.0 (chr-ID scaffold10045; pos 263978 to 264744 reverse strand)
tctttctaccccactccaaggacaagctagccaatgtaagtggatatcttgcttctggttatttggatgcaatttaagggaaattttggagaaattaggttataaaacctaagaaattgtaatatgttttcttttttcttttggacaccacaaaggaaatggtcttgaatttgtgagtgttcatgcaaaatgtttggtgtttgaagatacttgttctattttgaaagagcagctgttagtgctataaattggaaggactttgttaattatgtggcttaaattttgggtatgttttcttatgagccgaattgtgacccgacccgagaagtttctcgcttcgattatggttttgagagctctgagagagattatattatacttttcatcatagtgctttgctcgtgatggagaccttatgtcccacgttaaactttttatgtttattctcttttctctttctctatattgcaattgtgagtgtctgtgtgcctagtattgtacgtttgtttaaacaggtttgatatttcgtatgcatggcctttgaaagattgtgaaaaatggttgataagtagatatatgtttgaagatgcacgctattttgaattaagggtgttgcttggctttcgttcatgaccaatagcttcttttatttgtagcatttaaatgtttacccttttggatactgtattttcgtctattgtttaatctttaccatcacaacccacatttcaggaagcagataggaaaagcacaaaagaaaagaagaa

SEQ ID NO: 46394 - DNA, 668 bp, Manihot esculenta
  Intron number 2 from transcript cassava4.1_002857m (locus cassava4.1_002857m.g) derived from phytozome v7.0 (chr-ID scaffold09277; pos 32568 to 33235 reverse strand)
caggtaacaactatcttagtttgatttgcttggttaatattctgaattttgtttatctttctgactgagaatagcagtggcatgtattataagattaccaacaattttcttctaccatttctactctaattgtgcacttctgaacgaatgtatggtagaagttttgttgttgcagaaattcttttcatttttgtgcttttaatccaaactggaggatgagctgtcatattagttgtctgtttgttgttcgtttgtggtataaacatacaagttagcacaaagctgtcgcatgttgttatgcaaatcattatttacttattttattaactaatattgaacaaaccatagtcctactggagatgaaattctacactgcctacatctttcacttttgactaaattgaacctgtctgacacgaagacttagatcaaaccttcccaacttaaaacctatggataaatgaggtatgagacatgaacttctgaagggagaggaggaaggagatttatggatatttcttaatatatcaaataagcccaactgtccacttaaaaaccaattctcagaccttcaaaatgagaattgttgcttcctgttggttcgtagttaactggtcctgttttaaatatcaggtttgctgataagcagatagtgaggctccaggaga

SEQ ID NO: 46395 - DNA, 1035 bp, Manihot esculenta
  Intron number 1 from transcript cassava4.1_007857m (locus cassava4.1_007857m.g) derived from phytozome v7.0 (chr-ID scaffold02658; pos 331760 to 332794)
gacccagagaatactacagtgttcattctagataagtaagattttggagtcattctctgtttctatttacagatttcatctcataataatcagtctatgagttgattggcattttttattgaaactttgaattagacaactaggtatttcttcatggaatttcttgcttcagcgactggtttaggaattaaacatatctagatttagattttactaataataataataataataatggaagaaggaaaaaaaatgttttgttttccttgaatttggagagctggatgtgattgagatttatgttaggtcctgggttgacttgattatgagttgctccttcaaaatccatgttcaagttcatagaagtaacaatgtgctaaatgttgcgcaaaagatcatcagtttgatttgaaatgtgaaaaagaaaccatctttggatgtgcttgtattagatactctacatttgcacttgagcatctgtgtgatgtttgaggctggaatccagcaaaggataaaaccatagactgcctagattagtatgtcaagttgtagcatagttctaaatcacgatgtctccaacatagcactattcataatttaaaagcataattattgatctcctctccaaggatttcaactggttcattgtcaacatgatcactttgaaccaatgtagcctatttagataaataaggaatacctgattattgaaaaatgagagaaacagcagaatagaaaaggcaggatgtctaaatcattcagtaaactttcatgaatcaagcagtttaatgttaagcagcttctaatcttagaggttgatacaagaaaatctggtgaccttttcactgcactttgtctctctcacacaagcatacatgactgcacgacataatagttcgtgtgatgatgcacatatgcaaagaaaatccccttttatgattttacattacacacaaggtgattaattgcagtttctgcctttgaagttaccatataaaactaacgtttcaaaatttatgctgaaagccagattgg

SEQ ID NO: 46396 - DNA, 795 bp, Manihot esculenta
  Intron number 2 from transcript cassava4.1_001840m (locus cassava4.1_001840m.g) derived from phytozome v7.0 (chr-ID scaffold04457; pos 280521 to 281315)
gtccctttagtgaaatcattaaatctgctcaggtagtctttggtcgctgttgttgagcacacatgaccttaatgtttttgattatgacatattctacacagaaatgaaggtaaggggaaggagaaacaccttaatatgcttatttattattattatttttaaaaatttctgttaaagaataaagtcacgttcaatcaataaatgccgatcaaagccagacgttttgtgatcggcggagagaaggaaaaaggataaagggttttttattattattattattattatctgtcgcgagaaattgtgaatcagatagctagtttgtcttaaatataatcctacattattaactggataatgcatttagggtgtgggtgtgctagacgccctcggatagtaaaaagatttacaaaaaatgctagatgtagctttatatacatatttagttatttatttatttatagataaagaactttttatatttctactttactggaactcttatatgagtaatgcaataggcagaattttatctaattacttttttttaaatttttgctctaattatttttgtcctttaattactttttatgtttgttctactgaagaagattacacttgacacatttgcatgttaccataaaaatctgcccgattttgtgtgcttatgtttatttccagcaaatggaagccgccccctcccccttttccttttctcctgcaaattacattatcttgacttttggatatatgttggcaataggaagccatagttctgcctccatttgtggctatagc

SEQ ID NO: 46397 - DNA, 898 bp, Manihot esculenta
  Intron number 2 from transcript cassava4.1_018273m (locus cassava4.1_018273m.g) derived from phytozome v7.0 (chr-ID scaffold08799; pos 314870 to 315767 reverse strand)
tgattggaagaatatttgtggctgaccctgcaaaggtgtgtgtgcttttctagattctttagaacatgattagctgcatgaacgttaaaatacaggtgttacaactttgctactacttgctcctaagcacatcatacacattctcttctttgccccccttcccgattggggagtgaattactgaaagtcatctcaacaggtcagagtcataggaagctccccatctatttgtaggttgggttcctcgtacagaaacataaaacatacaaaacccatcaagttactagatgagcacaagtttacggctgtaaatccactttcaagctgaaatctcccacaatagacctctttgttggcctctgccccttggtccttggattgacactgggaggtctatttatcagttttgaaattggtcaaatacccttcagactgtcatatctggttgcagagagcttccaatacttgaggaccaaaaagttcaatcaaccaaaggatgatgaacagaaatcataaatcccttgttagatttggaaaatattgtcaacctaagacaaggggaagaaaccccaggttttatccaaatattataaaggaaactccaaaagattaaaatggataattacttgaaaattttgaaatttgagcaggggaagcttattgtcatcgattacagtattgcattttcttccttctcaaaatagttatccacaattctttgttattatattgcttcagcaacctcatattcctcctaataactccatctctctctcttcctatctccctaaggttctgttcgaattaactgaatttggagaaaatgggctggtaaattttctaatttgagtatttttttgcgacagaggataagcatacctgagatcaggaatcacga

SEQ ID NO: 46398 - DNA, 928 bp, Manihot esculenta
  Intron number 1 from transcript cassava4.1_012339m (locus cassava4.1_012339m.g) derived from phytozome v7.0 (chr-ID scaffold11170; pos 228292 to 229219)
tgattttgtgatagcaaaagttagctattccctgtgttagcagtttaaaaaaatttcagcagccacttgaaactgtttagatttatggctttccaaattggataaaacgcataatttttttttatgtcttttacgcccttttactttatgtggtcctattaggcccctcaactttaattcttataagcaacaaactccttatttttctcatttgttgatttagcttggagattttgcttacagatttcttatggaaatggtattgttttggtctctattattgctccctttattcatggtaaattggggagagagaaagagagatgtgaagtttatgctatgccatgttaaaaatgcaaatgctctgcctttcatactttatcatcgtgttattgctcgtatatatagaccaattttttttaccatttaaggatatatagtgtttagggagctagaaagttagcatcataataggttcaagtaaaggacttgagggaaacagaactctcatgtaaagtgtaggggcaaatttgtgtattaatcacatttcctttctaatagttatagtagatggtattattaattgtagatacttgttcacgaatgccatctcaatgctcaatacagaagaaaagaagcggatctccttttgagttttgattggttacaagtctttagctggaacaatattttactgcatggtcgctttgttgaaagaatatattattgtagccacaatgttgaatcttcttgtcggtgaccatgtgttgtgtaccatctaattttcttatatgagttgttgaatataatgataagtcaagttttacagacccttatacatgatggagttaattattcttttctaacatctgttatccaggatttggatgcgacacttctgtagtggttaatatattggctcatcgag

SEQ ID NO: 46399 - DNA, 1029 bp, Manihot esculenta
  Intron number 1 from transcript cassava4.1_018948m (locus cassava4.1_018948m.g) derived from phytozome v7.0 (chr-ID scaffold00010; pos 219419 to 220447)
gatctcatccttaccctgggtgagcttcttgcattttgtaacttgtctattctcaagttgaatgtaatttttattcggttgtcttgagcttttcttgatgtataagccaatagactatcaaaggaatacaattctcaaaattcttatttattcttcattgttaataataatcaaaataagctcttctaaaatatctaatacatgggtattatagagtaataactagtcctacgactattagaattaagaatgccaaaacgagaaatttgtaaatcaataataatcaagaatactaaagcaaaacactcctaaataaataaaacactagttaatcggattatctaaattttttccaaaaatatggagactcaaaatctctagtagaaggtcttgcattctttctccttagttgaaagaactcaactcttgggagttgaactgcagataagaatctaagggaggttccaaagtttgaagttcctcattagtaataatccatgcagaatcagaatcacagtggcctaactactccttacagtagtgaggtttagggaaaacatgagaaaggtgaaggaagaaaaattaacaaaagaaagccaaaatattaagattgtattctctggctaattttcataagcaaaacagattcaacaatctctaataccaaattgatgtaatcaacagaacaatcaaaggggaaaggaataaagttctcaatatttctatcagttttcaatgatcaatgatggtcataataatctcttctaaaatacttctgacacataggtgtttatagactaataactagtcatatttactattgggattagaaattccaaaataagaaatactaaactaatgctaattaggaatattaaaggttgcacaaactcatgatgagcaaataaaacactatattaaatttcctaaattttttcctaaaatatgtagacttaaaatctctagaaggcctgcttcatttcctcttctattttcttgatgaaggtggcactggcttcacccccagag

SEQ ID NO: 46400 - DNA, 910 bp, Manihot esculenta
  Intron number 1 from transcript cassava4.1_015902m (locus cassava4.1_015902m.g) derived from phytozome v7.0 (chr-ID scaffold04796; pos 432058 to 432967 reverse strand)
ttctttttaatcattttccaggtccctcttttcaggtactttcttaattttctttttcatttactcgctttttcttctttaagatcttgtttatcttccttacttaatcccctttgtttttaatttttatttttctacttgttttcttcatcgttggtctcatggttcacttatggaaattcatgccactgtgtgagactaagatcttctttgcctgaccttcccttttctagattataatcttgggttttgtttattttgacttgggaacttttgaatttcttgcaattgttctttgtaactgtatactgtgttttaagctttaataaatgctgaagtccgtgctggtgcatgattcttggagttattggaggctttgttcgagttctagcgaagattcattcatcttctcatccttgaattcttagtttgcttgttttgctgtgtaaaaaattgggcaagaccaaattaattaaggattattagtaatcaagccaatgaacaatcgttgaccaatacgggattgttctatggaagattaatgtctcttgcaacaagaatatcaatggactaaagtgaaattctttagcatgggggaaaaccctaaatggagtagtgaaactgtaaactgatgcttggaattataagcctgaatattattaatcttgcaagtaattctgcaattttattgtttcattccacatattggctctttccgtagttatctccatctgtggcttcaccatccattatttttgcatttcagattgttataatggaattcaactgtcgaacatctttaattatctagggctatttgatttgtagatatacagtgcgtgaaggaaattttgaatccaaactctaattcatttattaaccatttttacctactgttttacagggttcc

SEQ ID NO: 46401 - DNA, 640 bp, Manihot esculenta
  Intron number 1 from transcript cassava4.1_033410m (locus cassava4.1_033410m.g) derived from phytozome v7.0 (chr-ID scaffold03513; pos 77455 to 78094)
tgtgttcaacaaggtgctaactttatcctctttctctttcttagttcttgttctctttttttgtttcctgcaaaaatttggatatgacaagctgctgctcatgccggataatgtttttctcgttctctgctttgaaattttagcaccagctaagctgtgttttttcctctttttacaaaaaactttgttccgttttagtgaaatttatgggtatggaagatgaggcgcaatgggttttgtagaataatactttgcacggtctgatctgtgtttcattctgggtatttattgtgttctccatatgattattgtgcttgtttttagctgattcctcctaaatccacattgtcttatttccttctccatttctaaaggccttatcttttgtggttattgcaagttctatggcttttccttggtgcctggtggtggtggagcactgtagtttttagggttttagcaccaactttgatgaggagaagctactttgaatgcctaacttatacaacctcagatgtggtttatttagataatttattttccttaaatttatttagcacgctttttctcctattgatgggatgcgtatttattgtgtttcacaggatacaatcatcataaagcctcctaagaaatctcc

SEQ ID NO: 46402 - DNA, 887 bp, Manihot esculenta
  Intron number 1 from transcript cassava4.1_002495m (locus cassava4.1_002479m.g) derived from phytozome v7.0 (chr-ID scaffold01945; pos 532964 to 533850)
catcaatcctcctgttaattctctctctttcggtacccttcttttttttttttttttttttttccgtttgacgtttatttgcccagatctttatatactcagttcatttcatgagctcttgttttcatagtgaagcttaatcgactttcctttcttaatttttattcggcgagctttcagccatgtattatttagctgtttgcgttgtctttgtgggatttatttccctgcaaagcttttgaaagcacagccgagttagcttttgttttggtgatttttgatcttcttgacattgccctgctatttgattcaaggattagatggtcattgattgggagaagagattggctctggagatcacaataagatagcttcatatgcagtgatctattctgggtgtatttgatttgacaggattatgagtgcctctgggaatgtgtttatgctcaaatgataggaaatttgatggatggataatatggtggatcgggttgttaagttccataaaatttgataaggaatattcataggctaaaaggtgcccatttagattactatcactgaacttcatgttctcagtagaagttgtactccttgcctccgataagctaaaagtccgttacttgatcagggtcttaaaattttgggtttatggctttgggtgatccaatggctatgttgttctaaaatttgacaacaatcagacaattgcttaggcttgcttcagtgtttttatttgtttattttttcccttcgtttatgctttacacctttttggaaacgatgatattttccataattgtgactagacattgggcttattactcttttcctcttatggtcttcttgcagttctaaatagcttgaaagatagttttgacgaagcc

SEQ ID NO: 46403 - DNA, 434 bp, Manihot esculenta
  Intron number 3 from transcript cassava4.1_012898m (locus cassava4.1_012898m.g) derived from phytozome v7.0 (chr-ID scaffold03219; pos 34258 to 34691 reverse strand)
ctggaaggaattacgttgtctcatctgtgaaagccgtaagttgcttctcaattcaaattattccatcttcaaaagcttttgttatgttctgacagatttggggagcttcaccattaaggccagctaaatgaatcctcttcctcaataaatgtgttctgtaaatccaaaatttattgaaaatgcttacagaacaaatccttggcatctctagtatcgtaactaacaaattgaaactttcattcttaatggggtttattttggagaattgggagtatgggcgttcaccacaaaatttgcctggatatatgttactgaacttgtactgtgcataatctagttaatgcgtctaagtgtcttattttttggaactgttgccgttgatttggttttcagtttcagacagtagtaatcatccttgttctttctctgcagag

SEQ ID NO: 46404 - DNA, 766 bp, Manihot esculenta
  Intron number 1 from transcript cassava4.1_002473m (locus cassava4.1_002473m.g) derived from phytozome v7.0 (chr-ID scaffold00070; pos 75681 to 76446)
cacgccgtgctaatacatttgagaagttgggcaaagtatgttcctttctttaattgatgtgtaatttatgctttcttcaattttgtggtcagttctgtaaatcattgttttgctcgctcttttgcaagtacatctgatgtctagtttctgctgaaaataagtatatgatttgagtaatatctctttattttattaaactgcaatttagagattgagatagggttcattatgttgttaggatcctctctttctttacaaaaattgtaataacttgaactcttgtacatttttggaatattaactgatttatcagaagtaagacttgaatataagctccttcacaatggtgaaaatttttttagaactttaagaaagaattttctgttaactcaaaactgtgcaatttatgttatgtcaaatgctttatgatatcattcccactgtatcctactgaaaaatacataatctgagcatgaaattcgatatatgcatgatgcatcaatatgccagttcctctgatcccatttggcatagagattggtgttagatttttagttcgatttcagttgttttgagaatgccgattacattatttgaagtttatttcatgtctgatctaacattttatgaaaaccctgcaatccggagttgggggaagtgcttttcttctgtcatgtgtgcctgtacattgatttcttcatcttcaattttgagttctgtatgatgggcatcttattcttgcagattggccaaggaacctacagta

SEQ ID NO: 46405 - DNA, 853 bp, Manihot esculenta
  Intron number 2 from transcript cassava4.1_006292m (locus cassava4.1_006292m.g) derived from phytozome v7.0 (chr-ID scaffold06383; pos 36010 to 36862 reverse strand)
agaggttcgtactataatctcatgctgatttatgcactgaatttatattttcaaagtttttatttaagacatctaatagttaatgcaatttggtattgtctgtgaatttttctagttgatcaaattgttgtattgaaggttttcactatctgaaattttagggaaattttgggtctgccttgttaccattatttttttttgttcattcaagttttcaactttcatttctagtctaaatagaagattttttgttgctaacctctacaaatcatttttcaaattttccttttctttcttggtgagaggttgtgagggcatgggaagaattagattgaggaagacaagataaaaattctggattgaacccaaatcttttcctataactctcaagaactaaatcttcattaatgtcactgagaagttcaagaattcaagggtccaaggttctatgtggcttttcgaaagagtaaaagaaggaaaaggagtttgttgaatgctttcttcattgtgcctggctgctcactgattagtacttgccatggctagctaatcttttttggaatgctatgtgtatgaaaaataactaaatttatttttttaaaaacatttatattgttaaactctgccattaatttttttttctattcactgctattgcttctttcctctttgaaatttctgtttgatttatagtagaaaaatgataataatatgccaataataataaaagtacaattccgtgcatatattaaaattgtttgtataatatgtagttccgcagttaatctcctcacattattagtttatttgattggcagggcattgacacaaagcattggccttctctcttata

SEQ ID NO: 46406 - DNA, 446 bp, Manihot esculenta
  Intron number 2 from transcript cassava4.1_014802m (locus cassava4.1_014802m.g) derived from phytozome v7.0 (chr-ID scaffold01792; pos 1749 to 2194 reverse strand)
ttagctcatcaggtaggattttcttctccattcagggttttaaaaatttttctggaaggtgcaagtgcattttggattataagcatactgttgcttccatttcctttacatgatctaataaaattcacatggagctatggttaggattaaaatattgatagcatttaatatatgagtatgctatggggtcttatggactgttctgtttcatacactgttactccacttgagtgcagacttttattttttcacttttgtcttctatttcctcccattttgcaagcaatgagatcttcactatttgtggaggattcaaggccaacttgtcgtgtttgatttgccaaaccccataaatatattaatatttgaaggccaaaatgcatgcattgttttacttctattttgggttgcctgatgtcatgatggctcaatgttaggttttacaa

SEQ ID NO: 46407 - DNA, 535 bp, Manihot esculenta
  Intron number 4 from transcript cassava4.1_013656m (locus cassava4.1_013656m.g) derived from phytozome v7.0 (chr-ID scaffold07046; pos 55067 to 55601)
gatttagtggtaagaattttgaatgcggatctagtggtgctttttctcttttgtttttcatttcttagaaaaattccctattctattgccagtattatttttatgaaaaatgttgaagcaaataaaatggtgctatattcatttgattatccatataatcagaatcatgagtttgttacatgtcaattgtattttaatgaactggaaacgatgtctgttgattgttgaagacttgaagcaatgcaatatggcacaatgttcattgctgtttcaatatacctaatgagtagattcccagtgagtcagagaaaaaaaaaagattcccagtgagaatccatgaagacaccaatataatagcaacaaatttttgattagttgatctgcaaggaaaagtgtttagaggataagtataggcaacagaaacagactaatagggaaaaatttgtctgatgagcaacacattcttctgaatcctgaccattgtttttgtgtctgttggagtaggggaagattgctctgggaggttgcacttgga

SEQ ID NO: 46408 - DNA, 833 bp, Manihot esculenta
  Intron number 2 from transcript cassava4.1_015424m (locus cassava4.1_015424m.g) derived from phytozome v7.0 (chr-ID scaffold12946; pos 402316 to 403148)
atctaagggagagaatagatctcctgaattcaaaggtttctatctcactatcacactcgactagatgttttagtagcagtcagctaaactttagaattagaggagtaatattttatgatctacagtcaccaagattttgtttggataaggggaaagtagggcagaaagaaaatatatgatgtaaaatgtcaaggtagaaaggaaaatatgaaagcagaggaaaatagatttattttcccttagtaaatggagagaaaataagaaaccacagatccttttggtaaaattacatttttgtccttttatatctattactattttccttgctttgccctttttatttttcacattgagcgaaaataaacatagtaaataaaaaatattttcctttttttttattttttatttcccttctccttctccttccccttcaaaaatatccaaagactaaatgagtctcagtgttttatattatattagatttatttttgaagattcacttatgaattgatgaaatcaaagaaggaaaccaaaatattagagcatatgaagtgaaaactatttttgtttttcggtttggaaattataccattgtaattgttcagtaaaagtagtagattattaggaggctgattcagggaaccttaagataagccttcacatgagcgcagtacctcaaaccaaatcattcgctaaaaaacctttttttttaatctatcatgtacttgagatttattaaaactggtagtttgtttaacagtgaaaaggaaagtatgtactgctgtcgttcttttgtttctaactataattcactaattgcagagataaatcct

SEQ ID NO: 46409 - DNA, 986 bp, Manihot esculenta
  Intron number 2 from transcript cassava4.1_031290m (locus cassava4.1_031290m.g) derived from phytozome v7.0 (chr-ID scaffold06916; pos 1983364 to 1984349 reverse strand)
agggtatgttttctctttttgttttttttttttcaatgggccccttcctgttttttgtggttcatattcatattgtagtcatatcattttgttagctctgcaatattcttgtttggtccttaattcttccattggggtggggggtgggctgtgtgcatgcatattttttaagctttatcctttccttctaggctgtaggtgattgtatactctgctttgatctctatttacttctctttttctttgtttaatcaatgatgaatccaataagagcatgccaaacaagacttgttagatggactaaataatatggatatttaaaattgcagggactaaattatatatagcgcaaattacagggactatacaatataaatgtccaggctaagttggttgtttcctttgatagaagaactaaggagtttgattcaccaaatatgagatattttaattgagtgatttaaaaatagggattaagtagttaattttgataaaagataaggacctgattgtaattcacactttttcctcataaaaataatttagttgcaaataaaacttgggcctgtgcgaggattttaacagaagatatgaattgattgaaaagaatgattgccatggattttaatagaagatattgtccttgttatatgggaaaaaggagttgggtaaacaatcgcaataggtggacttggattaggatcttataggtttgttacatgccgaggctatgttattgggatttaaagaacatccaatggaaaaactagttgggaaattgagggtaattgttgtttggcaattattattccaagcaattaaattctttgataacccctgaatgattttgtagcttgcataaaaatttgatttagttcatttttggaatctattaaatgggaatattgaatacctcatttaaagtcttcaacatccctctttctgtcacaggagctcaactcccagattttgccaaaggtgagcat

SEQ ID NO: 46410 - DNA, 511 bp, Manihot esculenta
  Intron number 2 from transcript cassava4.1_011084m (locus cassava4.1_011084m.g) derived from phytozome v7.0 (chr-ID scaffold11170; pos 240500 to 241010 reverse strand)
tcaaaagccacttacaggtctggccttaagctctgacttagaaaaattttcagtctttttaattaaacacagcacaaccctttgtttctttatctctcttctgtgctatggtgaagactttgggcatgaaaacaggcacgagagccgatgagttgcagtgaatgaatgaacagttgagtgtgctgtttgtgatacaggacaacttctactttttgaaggagatagagagcaagaaaaagaggaaaaaaaaataaagttgccatcatttctcaataatagaagcaattactgaccttaccaaacatcaacctcgtggttaataaacaaaccaagaaaaatccggaaagagaagcatctgatttgattttttgactgtttctttctttctttttctttatttttttattttctattcttaatttgagaaaagataaaatactacgtatattattttaattagcttataggtttccttgttttctattcattttctgtctcttttgctttgcag

SEQ ID NO: 46411 - DNA, 1027 bp, Manihot esculenta
  Intron number 2 from transcript cassava4.1_016569m (locus cassava4.1_016569m.g) derived from phytozome v7.0 (chr-ID scaffold04269; pos 72006 to 73032 reverse strand)
tctcagcactaccttgagcttcaggctttgataaggtaatttctgattgacatattgtttggaacactgaaacactttttttttttaactagtctccattgtattattttagaaattgataattaaaatgtgcagaagtgataaaattctgaaaagttcggtgtttctactgcttttactgttaagctaatggatcttcatggtcatttatgctttgtggtctcttgcaattcagtgcatcatttaaatttgctccaacacaacttttatagaagcaaacattattgtaggagatgttcaaatcaaatcatgattatcctgccatcatacaaatagtaaataatctgatcgttaaatttggatcagatttaactcatccaaaaattagttcaagggagaatactgcctaaattcagagcatattacccactccaaactgacatgggattcaataccccttgcgccaatatgccaagtatgcaggaatatatttttgatagactattttttggtaattctgataccatgttaaatttgagtaaggtctaacttatcaattaccatgttaaatttaagtaaggtctaacttacccaaaattagctcaatagggaggaatgcgggcacattactctatactaaactgacgtgggattcaatactgattcacagtggaaaggacattggttttgttcaacactgattcacagtgaaaaggacattggttttgttcacattaagagatttcgtgtccatctaccaggagacaatattaatcatgcactatgtatcagatggcataaacccagaagcacttttttagccccagaagtatggcagtaagggatcatcaaattgagcttttagcattgtcgtaaagaatttcattacatttgcagttgattatgcatctttgaagatgtcttggtagctctgatgtgtgcttgcacactaacacataggtcgttttgtaatatatgggattactattgtgctgttcgatttttgacatgatatcaaaataggaaa

SEQ ID NO: 46412 - DNA, 758 bp, Manihot esculenta
  Intron number 2 from transcript cassava4.1_005823m (locus cassava4.1_005823m.g) derived from phytozome v7.0 (chr-ID scaffold07520; pos 848411 to 849168)
aagtagcacctttttggaagtatcctacctcatatgtgagtacccttaataattatccgcagtggtaatttttggtattatagtcacgtagatttaaggaatcaaaatctggattcgagagtgaccgactgttttctttttgaggctcctccttgcaagttaaaccgcttgccacattgatatgtcaaaaaagagcaattttttgagtttgaaatatgcttacgtgcgtttttctacttccatagtatggatacattcacgtgcacttcaagaacaaagaaatgctagctttttccccttatctttcattcaacaattccttaggatatgatgttcacgttttcccattggatttaactaatggagttgccagcgttgcggcaaggcacgcatcaaagagtctcgtccctttgaaatctagaattactaactagtttcataaaaaatggtaaaaaaactattcagattgtgcatggaacacatagggctgtttctggtattttggtacatccattgagaggacaaagtttcctgtccggtctctgtttttctgtctctttatttgtctcgagtgaaacaagagaaaagggtgaatttttttaaactaaatattaaattgctttttatgatttactttataaattgctactatctacttaattgccaaacactttatatgtctttcttccactactgcatcaatctggtttatttggttattggctgagatcttatgtaaattgcttcctttgcagtat

SEQ ID NO: 46413 - DNA, 658 bp, Manihot esculenta
  Intron number 1 from transcript cassava4.1_017791m (locus cassava4.1_017791m.g) derived from phytozome v7.0 (chr-ID scaffold06651; pos 133069 to 133726)
gagctacctctccatctcttgctgttctcaacaaggtcctctctctctctctctctctctctctctctctctctacacacacacacacacacacacacacttgcacacttttagttgtattgctgttgaatctgttaagaatttggatttattgaactttgatctgtcttattctgctaattttgtttatttgttgtttccattttgaacttatacgcttttctgaactttttctcccttcttgtgggtacagatttatccatcttttgggaaattgagtttgttcttttaatctttttcgcagtttattcttttatatgggttttgtggcttctgcttaaatattgatcttgcgtattgtttaagttgttgtgaagagtgtcccctgagagaaacttatagtatccttgaatttgattcttcattcgagattaaacccctcagcacgattcattttgcaagaaaagcaagcatatcaacttcttttaaaatataaattcttaaagatagttaaaaaattgaatagaaaagaaatcaattgacttaaattcttttgaaattcttgattcgaaacggcggttgaaattttagatattgagtttcttttgctttgttctttgcagtgtttttcttctctcttgaaattgctgcatctgtt

SEQ ID NO: 46414 - DNA, 521 bp, Manihot esculenta
  Intron number 2 from transcript cassava4.1_017791m (locus cassava4.1_017791m.g) derived from phytozome v7.0 (chr-ID scaffold06651; pos 133828 to 134348)
tggtggtcaagcttgggaatcaggtgattctaagctctactatgattcttttgattcaaagcttcatgagtttgtggatgatccatcttatatctcttctttgattcaaaacccaattgctttaagaccttaaatgcattgaattcagttgatttaggggataccatgatccatgaagctggtggcataagcttcttatataagaccacattgttttctcttagataggatgattgatatcattcatatgttttcctcttcattttcatatcctttaaataattgccaagcacggtagtagagaaatgcacttgttgtgtatcttttcttttctcttttttctttcccttctcatttttgtttcttctggtagatcaatggatgggcatgctttggtgtgaatccgatttcttagcattcagtaggatggtgttcagttcttgtactccaatgaattatataagtgactagtatctcttgtaacagacatcaaagaccagagttattaatagttgccttaa

SEQ ID NO: 46415 - DNA, 455 bp, Manihot esculenta
  Intron number 1 from transcript cassava4.1_009356m (locus cassava4.1_009356m.g) derived from phytozome v7.0 (chr-ID scaffold11069; pos 317301 to 317755)
tttcttctgttagagctcgctctttttgctcacaggtaagcatttccaatctttgttttacattgcagatctattagattttctgttataatcttcatataaaatctctgtttagattttgtttaagactgacagtgttctttcatcactggggtagttgattttggcactttttagggcacgattggattgttttggggcgcaaatcaatttgaaatacatctctcttgtccaatttagagatttatttgagcttaggtttcttgtatgtcaaataagaaaatccaatcttattgtaaattttagattcatttatattttcaaaatgaatcaaatctgattttaaaggatttttgtatggaatcataatttcaatgttgcttgtattttttttttcttttaatgtttgaaaagctcttatcgtttgttgataattgatgtggtccagttgagat

SEQ ID NO: 46416 - DNA, 290 bp, Manihot esculenta
  Intron number 1 from transcript cassava4.1_020047m (locus cassava4.1_020059m.g) derived from phytozome v7.0 (chr-ID scaffold01945; pos 558821 to 559110 reverse strand)
gtctttccctttctgtcttccggtgagaatacaactcctcttgctcttctcttttctgggtttttcatattcttgatacatatatctagactgtgttctcttctataataaaacgaaggaaaatcaaggttcttgcaattttctggtccttttatcctcgagaaactgtggtttctttgttgcatgattaagaaagaaaagggtaggtgtattttgaattgattgatttcttctattaatttacgtgatttgttgatattaagtgaatattaatgtgaacaggaggtgct

SEQ ID NO: 46417 - DNA, 968 bp, Manihot esculenta
  Intron number 2 from transcript cassava4.1_006512m (locus cassava4.1_006512m.g) derived from phytozome v7.0 (chr-ID scaffold06683; pos 214863 to 215830 reverse strand)
cattggacagactactcagatatctactgctgcaggtttctttactactgtgtcccttttcttattaactctctctctctctcattaaacatcgtatgcataaataattctggaaaattccattaatccaattttcaattcaataaatataattaacctcctttaataaattaaacattgtcagagctaaaatgagatgtcatgaaaattttttcccttgatagtggtctatgtcttaaaaaagaataataacaaaaaaaaaaatataagttgggtggaatcccgtggctagaagtaacctgcacggccttgtgcaatgaaggctgtgtgacatgctggcgggccttgtaacgtgctgctttcttcagttacgtccattcctcttccaacagtagactacataagtcatgtaaactaggtgcaaatgaattaaactattcttgaattattcaaagtttactcatcttctacatcagttaaattcaaatttaattttaaattaattttgtaaacaagtcggagtttgaatttattaaacacactaaatttaatgtcttaggagaattgaacttaatttggaatttatataaatttttatgagtcaaacttaaacctttaagtcaattctactcgattcgattacactattaaaacttgtagatatttagtatattaaaatttaagatcttatcttttacaggtttgtatatgtacttatttaatcaaaattatttagttttaaatttattaagtttaaattaaaacttattatagttgtaaacaaaattgaatgaattattggagattagacttgatgataactccacttgtcttaatttatttactaaataaactaaatttaaactttggacgcttgttatttgttcaataggatttgattgtaccatatacaatgagtttttgagaatacatttaactagggcatttgttgcaggcaaatttgctct

SEQ ID NO: 46418 - DNA, 186 bp, Manihot esculenta
  Intron number 1 from transcript cassava4.1_006512m (locus cassava4.1_006512m.g) derived from phytozome v7.0 (chr-ID scaffold06683; pos 215986 to 216171 reverse strand)
actcggttattgctggcctcgccttcggtgtcgtcagttcttcttccccttgcttcttttgttttttctgttaatatctacaatgtttttgttagtaaataagattatgaggtgtttggtttgataaaaaattgcataataatcataaaacttaagtttggattttgagtttgagtgcagctggga

SEQ ID NO: 46419 - DNA, 813 bp, Manihot esculenta
  Intron number 2 from transcript cassava4.1_006849m (locus cassava4.1_006849m.g) derived from phytozome v7.0 (chr-ID scaffold06916; pos 1759331 to 1760143 reverse strand)
agaatttcaaattgtaagtctcctagctattttaagcaatattctatttgctttctaactctttttcaaaattgtgttctattttttggcaacttacccatataatttttagcattcagttaaattttaaaaaattatatgtatttgtatatccaggaagttgataggacagattaccaaagtacgcacttcaggaaatgcaagagggtgggtagaaaatggtgtctcaagtatattttggttttagataaaatcacgcgtctttggcaggcagtaaccttaggaaataagtagggtgaattatttgagagagttttttctttatctttccttcttgtatggaaatctcatttggtgccgttttgcctagctccaattatgtggtttggtctattagctgaaataagaataaggcacaggaaatgctgaaaagattttttcaacttacatttaacttctaatttcagattaaccacagaaaagtcttatattctttgcaagttattttaaatacaggtagtatatctggaacatatcatagccatatttctggttgcctgctactatcacagtggtactttggatactttcatgtagggttcataaatttccagaatgtgaaagatacaaagttattgaaatgtagaaatttatgcttaatatgcacaattgtgaatatgttctgtcattttctctagaaacttatattctcactccgtgagtatcacattgcttatatttttaaagatatccttgtgtaatgaaatgatgaatgcaggtcagacattgtctggattggctggaagtcctgct

SEQ ID NO: 46420 - DNA, 462 bp, Manihot esculenta
  Intron number 1 from transcript cassava4.1_006849m (locus cassava4.1_006849m.g) derived from phytozome v7.0 (chr-ID scaffold06916; pos 1760903 to 1761364 reverse strand)
tgcttctgaattcaaaggaaattttagcccataaggtttgatctttgcccaattttttcttttatccttttaatatatttgattaattggagtttattgaggattattgaaagtggcgttgttattacttttgatccctaatgttactcatcaaatgcataatcgaacagtttctgttttcagtttcggtggttttagggtttatctggggaccaaatagagctcagaggatgaaaagtttggaataatgaaaaaataataataaagaacaatttttcggcaaaacaaatgtgactattttttctcattctgggcaatcagaaccttatcgaatgcattttgatgtcaattaagtagtttgcgtaggtgcagaagagaaccttgatgtcaattaatccgtcctttctcttctttttttccctcacagtttcatctattgttagcggaattcccattggagag

SEQ ID NO: 46421 - DNA, 821 bp, Manihot esculenta
  Intron number 2 from transcript cassava4.1_007646m (locus cassava4.1_007646m.g) derived from phytozome v7.0 (chr-ID scaffold11106; pos 417024 to 417844 reverse strand)
ttggtaatttctgcttaacagatatccttttccccatcctcttttggttgtggttgcaattgaagtttgctgtacttgtggatcttttgagtattctgcttcctgagttaagggatatcaataaagctcttccaattttgcacttacgttgattttttgatgacttctattttcttcctatccaatatgactcatgcagcctctctatcacttcaatccacaattggttagaataaatgtgttgattcctgtttttacgctagaaatgcatgattttgtcctgaactattgttttgctgatgttgtgttattacagtcatgattctttgcattatctcttctcagcttgtttctggtgaagcagatgatggggctaaatcaaatgattttgcccaattatctgcttaaagaagattgagtgctggactatttgtgcttaaccatttgacagtttctattgtccttcgccttggatggttgcatctcttctcaaagaaaatagtaataataatgagttttgaaccaataaaattagtccccttctttaagtctgatctaagaaataactggacatgtctactctgttcctgaatggacaaatgaagaggacaaaacattcttgaatatttcttgtctgatgaatgcagcttataccctatgtatcaatcaacattggtcgaaagagatgttcaatgaaagatttggcatatgtggcacgctgctacaagagtaatttgaattctcttgttgctcttggtattaatcagttttataagtgatgtgcagcaccaccttccccaagtgatcctacagtgaagaaa

SEQ ID NO: 46422 - DNA, 240 bp, Manihot esculenta
  Intron number 1 from transcript cassava4.1_021324m (locus cassava4.1_021324m.g) derived from phytozome v7.0 (chr-ID scaffold09335; pos 238103 to 238342)
cttatccttacccagctcaaggtacccccattttctcttcaaccatacaatttcttccttcaaagtttaatgggtttcgcttgatttctctaatttgtgctctgttctcctttgattttctgggtttttgctttcttctctctattttctttttcttctgaacataaatgaataaatgggtttgtttatggatttgcgtggttgatttcgttgacaggatattaccaaggacctccagtg

SEQ ID NO: 46423 - DNA, 211 bp, Manihot esculenta
  Intron number 2 from transcript cassava4.1_021324m (locus cassava4.1_021324m.g) derived from phytozome v7.0 (chr-ID scaffold09335; pos 238373 to 238583)
ccacccagaagagagcctggtttccttgaagggtaattttctctacccattttccttttctttcttatttccccctttcaaaattaaaaaaagaaataaattaacttaaagagagaatttcttggaagagaaattggaggtatggtttttgatgtttggtttgttgatgattatgacagccttgcagctttgtgttgctgctgccttattg

SEQ ID NO: 46424 - DNA, 885 bp, Manihot esculenta
  Intron number 2 from transcript cassava4.1_030076m (locus cassava4.1_030076m.g) derived from phytozome v7.0 (chr-ID scaffold04003; pos 75521 to 76405)
gcttttattcgctccaccctttgtcgacatttcaggtggattgcctatacattgctcatatctcctttttgcttcatgtttactatttctcgcatggcctgaatattgaatgcctttttcttttggaatgtctggaagaacttaacttggccagttttatggttggtggacacaaataagcttatttggtgcttgggttggaaatagtcttaagtagaacccattctacaattggtatgtcaggatcaaagaatgaagatctaaaattattgtttttccagatatcaatctaagattaaggattcaaattaggctgagtaactggaatatgatcctgaaaaaaggtgtagttactgacttgattgaagagtgttgcaatcatgcttgtggtagagtgtagggtttgtaatgctttttgaggaactggagaatgaaattcatgggtatttttaatggtcttatttctggtttcaacttcattaggtgcttgagaagatgtatgaatatttcttcatgagtttataaggctgagcctatctctatgcttctaatttaagtatttcttgctaactctctggcatccaatatctaaagcaggttctcatgattaaataaacgtaatactgtgtcataagatgtgaaagccttaaaaaattgtgacatgtaattgtgaatagttatgagtatttttctttatctatttatgccacataactgtgccccaagaaaaaggttgtaaattagcactggcagcggaaatactttttctattgtttggaatataaatatgaatgccaagactttaattttataactgtggtagggctttcttattgcaccattcgtgaaagcttatcaatttgaattgtttcaggaaggatccac

SEQ ID NO: 46425 - DNA, 515 bp, Manihot esculenta
  Intron number 1 from transcript cassava4.1_029473m (locus cassava4.1_029473m.g) derived from phytozome v7.0 (chr-ID scaffold12564; pos 75565 to 76079 reverse strand)
gccagaatacaccacgtcttggtaagcagtgggagcttcaatttaaattttcccttatcttttttcagttgtatagtcttgatttgaattcttcaaactcttgaagatgtcttgcacttatacataatctttatacctattaaatgcaatcattttggctttgtttggaacaatttcaatttcttttcaaatgaatttttttaagtttgaaacaattaaattctttaatttcaaacatgagaattgataaaagaatatcaaaattgaattgaatttttgcaaaattctttattgcaaacaagaagtttgagttgtttgcacacaggcaatgcaaattcttgaaatctattgctaagcggtgctcgtattttccttttgtttctaaattttgcaatgcaactccataaaaattttgacatgctaaatgtatcaagcctccttttttgcccctctacttctttaactaactatttattgttttttggtggatgcattttgtgtatcagctaaagaag

SEQ ID NO: 46426 - DNA, 750 bp, Manihot esculenta
  Intron number 1 from transcript cassava4.1_001389m (locus cassava4.1_001389m.g) derived from phytozome v7.0 (chr-ID scaffold00325; pos 280474 to 281223)
aaggtattggatcagttattgtcttcttaacttatgatttcatctcattttttactttatttcctactttcatttcatttcctctaattcatttcaatcttaggtttaccagcattagatcagttgttagcttcaagatctgtgttgtttctccaattttagagacgttagcttgaatattctatcatactagatcaattttctgagagcttacgctcttgttttagttgatttggtgtagttttagtttgttctgatctctgttcttatatgcaaatactaaagcaggtggatgcttttcgaattcctagatcgcaatgtgggtggctttttcaatgtaaatttgtttgaagaagttgatctgtgtgtatagtttagagacttgtaatttttaattcttatttgatatagccttgtaattgttgttttattggttaaaaagtgtgattctttatcgggtaagttcatatgtttaacaatttttcatatgtttaacaatttaggcaatcatttccagggatctaacagagctctgtatttgctgactgcactaagtctcaatgtagattctctgtgtacacgtactattttgatttatttaatgtggaaaactaatatagctctcgtagatttttaactgatgggctgcaataaggtgtgttttcaattatagttcagtatgttgaacgatgcaatgacatgcatgattatgcaacatctattgttttgacagcagagtattctcccttt

SEQ ID NO: 46427 - DNA, 810 bp, Manihot esculenta
  Intron number 3 from transcript cassava4.1_011671m (locus cassava4.1_011671m.g) derived from phytozome v7.0 (chr-ID scaffold06158; pos 491940 to 492749)
ctgtaagttctcaatcatctcataagattggtgtttttttatatctcctccttttcactgtttttgaagccaacctaaggttgtaagatgttagtatttgattagaatcatcagaatcattatttaggaattgtgtccctgcttcctaataaagccagacactgtggataatggtttacttcttcgcactctccgctcaatatatgcagtgattaatagacaaaagaactagctaaggctttatgttgtctatctggtggaaatcataatcactttgattctgtagtaggtaaatttgaagggaaagagacattactttgtactttgttgatttactaagtaatgattttattgaaaagatcaaagtcgctgtatttatttcactcaagattgggtctctctattaagtattatgccggtagcttcaggggcattcacatttaggatgaaaacattaaacaatccatgtggttgagagccctcacgcacaattaggcaattatgaaggacgtactctacctgaggtgcaggcctcttgccgagtggcccaaaagcgaccatccctccctttcctttttcgcttgacaagggatcttatcaacttattcttgacttgaatctataacctcaagctcacaattagagtgactttgctgttatgataaagccaccctcaatgtttaacttgttataaatatatcatattgtcattacaatttcatctgtattaatattttttctgttattaatttactttatgcaatattaattatagagtggaggtgcactagccgagtttgcagtagctaa

SEQ ID NO: 46428 - DNA, 527 bp, Manihot esculenta
  Intron number 5 from transcript cassava4.1_003876m (locus cassava4.1_003876m.g) derived from phytozome v7.0 (chr-ID scaffold07520; pos 2657102 to 2657628)
acaccaatttgaccctgaggtaaagaatcaaatcacattggttgtctttatctttttttttttttaattgtgtttccgttgtggaaaccttgagcaaaagcagaacttatatatatatgtatgtatattaaaaaattatctatggcttcattcagaacttcaaactttgaattcaatattgaattgttaaaattaatgtagagtgcaatatgaaaaaatctattcaaattaaataaaatttttgagtaaaggacaaaatctggatcggcaattttcacattctggaatgccagttgggtggggggtggggagagcgaattaggtaacactggctgtggtttgcacttatccaacccaagaaaaaaggtgaaagaaccaaggttatgatggatgtataacattgaagtcgataagtcaaaaaactaaccttatttatcaatgtcttcatggagtatgttgaaggtgaaactattaacttttgtacaatctcttttgctacagcgcccagcgactgcacgatttgggtg

SEQ ID NO: 46429 - DNA, 933 bp, Manihot esculenta
  Intron number 3 from transcript cassava4.1_025830m (locus cassava4.1_025830m.g) derived from phytozome v7.0 (chr-ID scaffold05911; pos 13872 to 14804)
ttcaaaaggacaaaaatacgcctcttgtgcagaaggtgctttatgcacttttatgctattagaattcttggctcaatgtcttgctaattttggttttttctgtattctttatttctgtgctgttgcaagctgtgtgctttctgtattgtttgtttctttgctacttaactttgcatcattgcttttattagtggggtcttgcagtgcttgtctaattgattaccgaggtcttagtttatctgcaggtggtgatgtgaagactattgcaaccaaaaaccaacttccagatgtgattgaggtcttattgcgtcttcctagttctatcatcctcccctaaacctcattcatgatgttggattaagcggacattagttgctgccttgtcatattgcttttagtgctgatattgtcatataagttgctgcagcaggaatcttggttcttggttaactcacatagtcaacctttgtataactgcttgctgttgtggtcaaaattagtgtcaacctttttcattctttctttctttcttttgtttctttttctttaaagaaacttcaggcaaatggttaagggttcatatttgaagatttccacattttttctccaaaataccaaataccaacggttatttatgggaaagaaggatagttgtgtcatattgtctaaaccgtttttaagttcttggatgataatttattgtgatatcctcgaatgatgattaagaaagattatttatgtaggatattgtaggtttttttttaaatgaaatttatagccccacctctgttttgtattctgtgtgcttgttttgctcgttttatatattgagttgttttctaaagattgtgcattgaaattgttttgttgcatgaacttaatatgccccatgatgcattttctgtaggtattcacagcagaatattcactaat

SEQ ID NO: 46430 - DNA, 840 bp, Manihot esculenta
  Intron number 2 from transcript cassava4.1_012586m (locus cassava4.1_011668m.g) derived from phytozome v7.0 (chr-ID scaffold07478; pos 719072 to 719911)
cgacagtggaattggccggcatcttgttgctcttggtactctcttcttctatgcgcatattctataaacacatacgttaaaatatgtttgcgttacacattgttcacaaccgatgtaaagttgcaacctgaaaggtaatttgctatagtttaacatggttgaattaatgatcggatggtttaaaatgaagaatgtgttcgtgttaaaaaaaatatgaaataggattttgctatagtatatgccatttggaacttccccccagttttgcagtaaatttcttttcactgccttgaagactagaactgctaagtccttgagaagttcgatggggagcttgaatgaattaacagattttatacagtatctatatctttttttttttgtgaactgtccagttgaaagaactaaatcacatcttagatgcgttgtgaaagagaataaatctcaaagctatatctgaaaatgagaatgctaatatgctccagatcattcagttcttaaatctttaattactgataaaggataggaagtatttaattttgtgttgatagcacatctaatcggaattccagcttgttaagagcttgtttattaagcctcttttagttaataagccaaatttgagctaacctctggtcagttagtttaagtttgtttataagaaaacaagaatgaatgtgatgctcaagctggcttgcaaatcatgatattctaaattgtcgctgagctcagcttatttgcagacccataggttatcggttaattggtgtgcattttcaattactaacataaagtactgatgcagattgtggttctggcattgggaggataaccaagaat

SEQ ID NO: 46431 - DNA, 847 bp, Manihot esculenta
  Intron number 2 from transcript cassava4.1_010400m (locus cassava4.1_010400m.g) derived from phytozome v7.0 (chr-ID scaffold03593; pos 1785 to 2631 reverse strand)
ttcaggttctccactctggttttgatcggcagcttgtgagttctttcttctattagctttgcctattttcttatatcttaccattcaaattgttgattgcatatatttgtcacgaaaagcataaggctttaaagggaccatctcttggtgtggggggttgggtatcctgcatattggatgagttgattcgggagcattgggtgtcaacattttttcgttaactggttttcattattagcaaagagcattggttatagtaatttcaaagattttgcttaactttattttcggctcagacttggtttctcattgggttatgtggatttttttctcatatatcatgttattatgtggacaatattttcctgtatatcaagcatcaatgttgaacatggcctaggcatcatctctgatttggtggagactattttgtgcacgcatacattggtttaattgttctcattacatttactttcattcaacagcttatttaatttagcttatctaatttggttatgtaaaagaactggcctagaaatgagtgaaatacaaatgaataatatattcatttgagctgattggtgcacaactgttattctttgcttatatataatggtgctattgccacgttaaattattttggatcaattgagtgtgtcaaaagctatatgaccttttagacgtgtgagacctcagcaaacaacactcttcttctctcctgaatatcaaaagctgtcactatcttctttcaaaatgtaacattttactgtcaaaagattttaatttgcttgcctttctttgtatgattgcaggcaatcccggagcattttacaaaaaatttgagaaa

SEQ ID NO: 46432 - DNA, 536 bp, Manihot esculenta
  Intron number 4 from transcript cassava4.1_012441m (locus cassava4.1_007541m.g) derived from phytozome v7.0 (chr-ID scaffold03219; pos 290827 to 291362 reverse strand)
tggctgaacaaatcaaacaggtagatctttttttctttttttaaaacaaaaaatattcatatattgtaaattagaatacttggtaaagacaaaaatctactggaaatccaatgcaattcaaaggagaacttttcaatctcaaattctcctattcaatgttaaggatgaactttttgaattttttttataaggaaaaaaaaaggagaaagaaaaagaaaaaaaaaaagaagtaaagttcataaaaagataaatatgttggtcttgaaagtcatggaagaaacagtgccagtcaatttgacaagttatttgtaacttaagttgtagactacacattttgctgttttaatcagacaccacaatctgagacatgaataacaaaaggactacacaataaagaagcagtggttgatgtttggtccgtaccatgaaaatttagcatcttctcttggtggagccaagtgaatttaatgttacgttgatgagttattttacatgtcacagtcgctgggaccaagagcacttagttttcagtcctt

SEQ ID NO: 46433 - DNA, 655 bp, Manihot esculenta
  Intron number 1 from transcript cassava4.1_006963m (locus cassava4.1_006963m.g) derived from phytozome v7.0 (chr-ID scaffold00847; pos 916737 to 917391 reverse strand)
tcttttttgctcagcgtgcaacatcaaaggtacaggatatgaagcaagatttataattttggctctgttattcatttgtgaaatgttcgctagtggctgataatcctaaggttataaagttttgtgatttcacctatttttttggatatattgttgaattttaagtgttaagtttgaaaattttctggttggctttcccaactttgattgtttacttggataagttattttggcgtataagtcattatactgtcttcctgtctatgaaatatagtttgtttattgtcattttctcttttgagatgaagtttgtagccaggaatgagtttgttacaccaagttgaatttgtaaccatgaaatcgttatggatgcatgctatagctttctgagctctattcttgcataggttagaagatattgcatagcatatttttgcagatgttgattttgataattttttcatggcagttgacatctgagtttttgtacttgacattcctctcttgtttttacttggcatatgttttatcatataattatgttgttatcacttgatttttatacgtaatttattaaaaattttgtgccgatattatttaacttcctcttttgatctcatccatttccttttttaaaaaaaatggcaggtaccta

SEQ ID NO: 46434 - DNA, 1037 bp, Manihot esculenta
  Intron number 1 from transcript cassava4.1_009620m (locus cassava4.1_009620m.g) derived from phytozome v7.0 (chr-ID scaffold02196; pos 276525 to 277561 reverse strand)
cattagttattgggtatttttaaagtttcaatctttggcctctgtttgaagccatactgtatttttttttttctattgtcagacttggtttttagtgtttttgaggttctttttgatgcttgatatggatctttttgccgtaaacattgatctgatattagttttaatttctaagcaccctttgaggaattttagcgataacaaaaggatcaattttttatgttaaggtctttcaatcctttgaaccctttactttttgcgcatgcttgattccttgtggaaatctaaatctctgagtttaatagcgcaaatgatgcatttgatcctcttattcattcaataacacattttatagaaagttctctggtataggttatctgggtaaaaaatgtaaagcagttcctttgtttttctaaacctctgtctctctctctttctctttttctctcgctggggaaaaggaatgagagttgggggactaatagatctcaagcctttgccttacatgattaaattgcatgctcatgacttgcaattttgctaattgatatttattattttgatagttttattaagtatttgtgattatgaaatctttatgcctctgtttatctttaatggtctgcagtcataggattcctggtcttgaattaatgaactggtttctgggtatttaagctcttttgtttttattgagcatagattatatcgttctggaccttttcgagtctataaggcaggttccattgttgatacctcgggttaaatgtggttctcagatgtcattcagagctcataaatgtttcaaaatcattttggatcttttactgtgaccaaagatttgtcatcatggcggggcaattttgtgatatcttgcttattgattcacgtctcttctaaatgctttgcatctcatattgattcttgaccgttttggcactatttcaaattattttgaggcgttctacttttctttgattttattaacttcaacttttacagcagggaattgccagttttttttacttcaaccattg

SEQ ID NO: 46435 - DNA, 545 bp, Manihot esculenta
  Intron number 1 from transcript cassava4.1_015979m (locus cassava4.1_015979m.g) derived from phytozome v7.0 (chr-ID scaffold10045; pos 440080 to 440624)
ccgttaaaacccgtttctggggtttaaactccaaggtaagtaaattcttctccctctcgcccctgttcaaattcttgtaatcctgaacttgtttgcttcaatttgtatgtgaaacttggggatctttcatttgattttgtaggttataagtgtgtttgttgaaaatgctaaatgaattttgtattttatgaactcaattgttaccgactcccagctgcacttgttaagcatgtccgtttcattgtatgcttatatgcatacacaggattttcatattttatacacaactttgcttagagagttatgggtttcaaaattccatttcactctcatttttcttcttcatcatctttcctttagcatgagctgtattgtaatctaattatttttataattaataaggttatcggttacgttttatctctttcatcatcaatggtattttttttttctttttgttgcattttgtttaacttaagaaacaagagcaatagctaagatgaatgagtttttctttcagttaataaatcacaaacgtacactag

SEQ ID NO: 46436 - DNA, 811 bp, Manihot esculenta
  Intron number 1 from transcript cassava4.1_009626m (locus cassava4.1_009626m.g) derived from phytozome v7.0 (chr-ID scaffold01745; pos 79791 to 80601)
cctcaggtgcattaaggagattcaggtatgttgtcaattgaccctatttattttatctgccccttaaagtcatgaagatttcaatattataaaaattattactacaaacgatattgaaactattttttgagaatctgtgatctagacagttgtctgcattttgttcatctggatggttttctttgagttcttccaattttaattgttggaatttgacttcctttttgttgacttccactgcttatgttctttttccatttttcactttctaaattataattaccttagctcacagtcactctctctctctttttctgtcttgatctagagttcacacccaaatatgatgactaattcatataattggtggttttataggcactattttctaaatgctcaaaacatctgaaaagtatgtgctgtaccattttccttcatattgttttactttactggtgtttttttctgcttgaaatcagacgctgttttctttttccaccctactattttgttgttctgttgaggttgggcatggatatttgcagttttaactcattttcggggagcattagtttgagttttgcctgtcattttgtttgcactgggggaaacaagtagacaaaggaggggaaaggaaactttgaatgctttgataaactcgtcaggtagttactatcattagtatttatataagcagatggagatgttgattggttgagttgtctgaaattatatatatatcttgtttgattagctgttttgactttggagaacaggactcttgttgaacaactggccaaagtgaacccta

SEQ ID NO: 46437 - DNA, 963 bp, Manihot esculenta
  Intron number 1 from transcript cassava4.1_024654m (locus cassava4.1_024654m.g) derived from phytozome v7.0 (chr-ID scaffold03219; pos 11525 to 12487 reverse strand)
gtcgtttggattactggagctagtcgtggaattggtattaatttagtttcgttttctgtttagaattttttagtgttactaatttagtttcatttctgtttagaattttcgtataagtttattgatgttttttcggtttgatattgtttatttgtttgtttgtatgataaatactgatatcaatttccctggttaagtgctgttagtatacaaaaaattatcgaattacttgtgttttagcaaacatagaatgtatttagaagtgcatttatgctttatgttgcagctatttaagatgccattgtcatataccaatcttgtgatccactgcagtcattgttatcactttatacggacgactggttccaaaaattatccttctctttaaaatatatggcttttttgtagttggttatgcattttgccccgtctatattgtgatggtgttaagtgttaactatgttggaatctttctgttgctttcatagtcaagggtaattttgctatatatagaacgtcagcattaagattctgtttcctgattcttggcaaagcaaagtcaaatatagtcttccgaatggaggaagggtaatttttttattttcttggctgcaatttaggcatcatgtctttcatttttggatggtaaattcatatctgtccagaggatgccatccaaatactgaaatgctggacaaactttgttcattgtcgataggtggttgtgttgacacctaatttaaaagaccttaaacattgcaattaaaatgcacaatggtatattttttcccttgtgtgtttataactgggacataattgtggccatattaaggatatctggtccaactccaagctatgtttatgaagctcactattcactttttatgtttttttattcttaagttttcactttgatggtgaatttcaggtgaggttcttgctaaacaattggcaagtttaggt

SEQ ID NO: 46438 - DNA, 575 bp, Manihot esculenta
  Intron number 1 from transcript cassava4.1_033485m (locus cassava4.1_033485m.g) derived from phytozome v7.0 (chr-ID scaffold05230; pos 188187 to 188761 reverse strand)
tactggaaagcctctataaggggcctaatcactttggctaagggacaaaatcccatgttttttgttgaagctctttagcacaatagttcaagttcgctagtcggccattaactatgatttggaccccactttaacacctaaccatcctacacaaatccttctttttctccacaaactaatcttttatttccaattttctgcaatttgagaaaaaaaaaaaagaaacccactttttctcttttatcgttcttaaattttgtaccaaatttctttgattatttgctctttttctaatattaattttttgacttgttacacaatcaacctcaacacgcaccactaacataccaaattcctgatttataaccatatcttacattcataatcttttggagctcgtggttggacaccactcttctctttaaaccttttagcttaccaaatctcttttcctctgtctctctagagtttctctgatctgctccttctttttctctctttcttgcacttctaggttttggggttggtgaaatggttaagagtcatctagttctagtgctctggctgctcttact

SEQ ID NO: 46439 - DNA, 783 bp, Manihot esculenta
  Intron number 1 from transcript cassava4.1_010667m (locus cassava4.1_010667m.g) derived from phytozome v7.0 (chr-ID scaffold06916; pos 1675514 to 1676296)
gtggcagaaaagaggctatcgattggattggaaaggtgggttttgtggattgacatggtttctcagacactatcaatcttttctggttttcttttttcattcattcaaagtgaatttttatggttttcatttaacgatactcttgtttgagaagacttttgcttttgcccgtttgaatgaaggattggttttcactagttttctagaacaagatttttttttcatggttttcacattggttttgatggtttaatcgagatttagttcttgagatggatttggttgattcgaaccctttagtcaagtgctgattgtgtttgtatttcctttcttggtattggtgttcaatgaaattgccaggcagtctcccatttagttcttgttcttttttcttttttggaattttttttggccttcacgagttcacgttttggtcaatctgaatttggtttggtggattcctcactttttctcccttttttggggacgatgctcatttgttaatttgcatttctgtgtgttcttttctttttctcttctgtgtgattttgttattgcatattttatcattgcctttttctctttcctttaattagtttcatatgcgttttgtttttcttgttttgattctctctcctttgattagtctcataccgaacatcactaatattaatttgagttgttctttgcttttcctcttgtattaaattctttgtgcaattcattaacggagcccagttgatgatcaataatgctaatagcctttttgtttctaacaggctc

SEQ ID NO: 46440 - DNA, 349 bp, Manihot esculenta
  Intron number 4 from transcript cassava4.1_016958m (locus cassava4.1_016958m.g) derived from phytozome v7.0 (chr-ID scaffold10689; pos 302160 to 302508 reverse strand)
tggtgcttctagattagcccgttttgcggttggtaaagcagcttaattttcatttttaagcataagcttatatgagttatccatttttactgcctttttctaatgggttttgttgaggttttctggtattcttcttttaaaacaaataatattttctaatgcatttggtttctgcttatagaattatgctgttggtttgattctgtatctttgtctaatcaaattgtctaagccttctgtttcttccaatgccatgtttttttttaaattgatatataattatgtaaacatattattggatagtgagattggcatttcatggtaggctatgtatcctcttgtttcccag

SEQ ID NO: 46441 - DNA, 712 bp, Manihot esculenta
  Intron number 1 from transcript cassava4.1_019791m (locus cassava4.1_019791m.g) derived from phytozome v7.0 (chr-ID scaffold01945; pos 215456 to 216167)
tctgtgttttgctgcaacataggtatgtgaaagaacagcacatttttttcttggaaaatcaatagtcatgcaagcatttataaaattgtcactaatcctttacagggaaggcatatgatgaggaagtgcctcagacaggcacaggccttgcaggatatgatcctttcacaggttcaggcgttgtaggacatgtgcctcaaacaggtattggcgttctagaagatgagccggctggaattcttgacaaagccttgctgtgttttaatgagaaacatgtaagttgaattatattaggagtgcaaacgagtcaagttacttttgagctattcgaacatgactcagcaaaatacttgacatcgaccctatgtctattgagtcaagctcaaacttgaatcatttgagtaatatgtccagctgagttcgaatattataatactcaactcgagtagctcgaaatctttaccaagttgtatttattgagttaaactcaagttgagctttcttgagttttaattttaactaataaatttgcaaatcaagttacttaatggatccacatttggcggagtctcagatttacagcagctgcgaagaagcctatagattaaccgagactggagatatcaaagtgccttatgcatatgttgaacaatattgccatgggccatgcctctcagagacccatttggtgctcaattgcgtagaaaacgtt

SEQ ID NO: 46442 - DNA, 927 bp, Manihot esculenta
  Intron number 1 from transcript cassava4.1_030750m (locus cassava4.1_030750m.g) derived from phytozome v7.0 (chr-ID scaffold05084; pos 35748 to 36674 reverse strand)
aactacttcctgccggaaaaatatcaggattttaggtattctttgttttctgcttctatgatcatgatcctattgatccgatatatcggcgtcgtcgtttcatgaattattattatcttgattagtaatattcagatgctaatctggcctactgagctgcctattcatacctgtgctttgaaattctagatgagtattgataattaatcaatgaggtagccttctcccttcctgcctagctttttctttttctttttctttttttttttcaaattattattttgaatcgaatagagtcatgattatattgtagcaaggttatttagattctggttaaatacaaatcatactaaaagcattcaatagtttccttttgatatcatcccaaaggtactagaaataaacaccatcatttaccaatgagataactgacttagaaactaaatttgagcatagtgaacaaaaggttgagttggcattgaactttaacttaaatggtatgagagttattctaatactacagtactgagttttaattacttgagcatattggaggctgtcatgaattttatttattttttactcaaaatctctcactctttgttaaacagtttgatacttcgtagtctgggcaagtagttcttaattttttaaaacactgtaagtttgcaacctaagaaagctaagagagaagaacgttgtcttcttatcttttttaattgaattttaacagcattgctatttctattgctattatacgatgtctatacttggatcaatttttggcaagtctagacaaataagcattagcatcattctgttgggtaagggacaacttaatttagccagcagcatattgattatggaatgaggattatgtggcctaccagtatttgatttgtatttttctgaattttcagtgaaaag

SEQ ID NO: 46443 - DNA, 676 bp, Manihot esculenta
  Intron number 1 from transcript cassava4.1_007686m (locus cassava4.1_007686m.g) derived from phytozome v7.0 (chr-ID scaffold03386; pos 172210 to 172885)
caggaaagaagctgagtattgtgattgcttacagggtaattgagaggttcttagattctcgttttatttatttcaattcgtttgattggatcctgttttttcttgtgtgggttgagttcggtttccttattaattttgatcttgaattggctggagctttaagttctttcgaacatggattctctttgttttcttgaaatttcaaggatttgattagatttcttctttatacatagattgtggaatttgtttctacataaattttcatttggggttggaaattgctgtttgttttgatctttcctgcactgtgtgacaaattaatgttgaatttgttcaattacatatataaggtgaagcggaatgcgtaagtagatcaatgatttttttttttaactccattgcgtgctttttataaaaaaagttttttttttaatctaaatggctcatttgggaatttcaaaaagaatccaatctccaatctttaggttcattattttcagtcatttaattggacaatcatttctaccaaaggagttttcacctctggcaatcacgtagcattatctttttacgctttttactgctgaagttatcattgtttattagtgctgtaattctagttttgctatctgttacaggattccaagtttgtcattcattgggtggaggcact

SEQ ID NO: 46444 - DNA, 606 bp, Manihot esculenta
  Intron number 1 from transcript cassava4.1_008674m (locus cassava4.1_008674m.g) derived from phytozome v7.0 (chr-ID scaffold06609; pos 73210 to 73815)
cctctgagcttgcctgggccgacgcgggtcctgaggtatctatatgtacataatttgcatatatgttactgcatgtataactgtacatgtatgtgtctcttaatatgtgcctacatcgtccttggctttggaaaattttactggcaacaaggtctttatgtatcggcttctgattttatagtttaattcgtttggaatagattttggtcagtgaatttgattgaataaatgaagatttttttaacaaaattaaaattttatggttgctatctcacttttttttttttgatttgtggattgctttttgtcatttgatttaataaagtgcttgcctgctgctgtaatgtgctagttatcttgttcaaaattttcagaattccaaaaatggaagttgggaaaatatggtgtagaattcctctgcttgctggagagtgaaacaaattattttgcttgtgtgcttggcagttaaagaataatgtccttattttagaatagaaaatcgtgatatgtataagcggtaaatttaatgtaatttgtaagtcagtttatctatgtttttgttgctgcttaggttgcggagcaacaagtttctaggctttgtttgga

SEQ ID NO: 46445 - DNA, 565 bp, Manihot esculenta
  Intron number 2 from transcript cassava4.1_000351m (locus cassava4.1_000351m.g) derived from phytozome v7.0 (chr-ID scaffold06816; pos 124861 to 125425)
gaattggtgttgtcactggaagagaacttgcacaggtagttacctatttctgtgaggatattattgtaggtttatatgcctatgctcattattagtggtgcctatgctgtaattttgccacggatgttcccttggaaattttatgtttttattcttttttgaatggtcatggtttggttttcatgagctatttcttcctttcgcatatggcaaattagtaaaatttgggaattaaaaaaaggttggacaagtttgcttggaagtgttcatgttacgcctcttgtttttcacttaggttgaaacgtgcgcatatgacttcctaagggttaaaacacattctatttttctatgtgcaatcacatgtgcatacatatatcagttatctgaggcactgcataccatagaataggactttattttggtttatgatggtagggcatctttgcattagctcccttttcttcccttgtttctctttctctcttgtcaccctaaatgtttcatttgaagtttaattgaccattttactttcctttttccatgccatagatttgctctgacgaat

SEQ ID NO: 46446 - DNA, 996 bp, Manihot esculenta
  Intron number 2 from transcript cassava4.1_016904m (locus cassava4.1_016904m.g) derived from phytozome v7.0 (chr-ID scaffold07996; pos 325818 to 326813)
ccattactaaatctgagacctgcagttctgttaaggtaacataacttaagctcaaaccttcttcaactcttataatgtaataatgatcaactgggtagtttagctctgttggttgtctgaaagcaattttgaagcagctcagattccaataatggttgattagaaaatttagcataaggctcgatctttttgattctgtacagtacaaagaagaagtgcagagtatctgtaaaagcatctttttcaattcaaaagaggaatattaattttaaaaaaattgtcatacagaaaacgttttacacacagagacccttttccaattgtctctttcccttgatgaataaatttaaatctatatcagactgtggaagaatctgaagcttttctttaataaacagcagatctagatatgatagatttttaccattaatcacattttattggcagaatttaaggaatctgcacccttatttaggagggctctctgtccctcttgagacaaagtgggaattgttctttatctttagtatgattgagttcatatttagtggatctttgataatctttttagtgatttctaatcatcattctttctttacccagctggttgtaagagattcaatgacaagcacacatgtccaaaaaaggattggctagtcatgagatcttgtcattatttgtccaataattcataattggtcaatatttagtgcagatatattcaattagcttgctaagttgtgagtggccactcataggaaatggaatacttactagaaacttgacaataacgatatacacgagcaagattatctttcccctttacgtcagagtgaaaataatgaaatactaaaagaaaacctttgcttagagatgaaggtgatataaatgagtagcataaatatgaattgtcattatctgaatgtcgtgtgtctcaagtgttgtttcatttttctttttggcaggtggagcaggagtttcctcgactgggaagca

SEQ ID NO: 46447 - DNA, 443 bp, Manihot esculenta
  Intron number 1 from transcript cassava4.1_006396m (locus cassava4.1_006396m.g) derived from phytozome v7.0 (chr-ID scaffold11179; pos 175331 to 175773)
tctctgttatcggcactttctctttcggcttcgttagcacctgtcaccctcttcttcttcttcttcttcttcttctttatcgttaatgtaggttatctggatatatgctccgtgaaaagataaaagatgagggccaacaacgtgcaggaaaataattgaggcgtctctgtttcggttttcttttatgcccaatgggggaaagagtgatgagattaagatataaaaattctcttatttctgattccaattatcactattttggaaactttcctgttttatccaagcaagggacttgagaaacgtaactttaattctatttgaagatagaacttcaggatctgttatatgcattgtaaagaacataccaatcgtttctgttttcttttgctatttgattctaaaaccaatagaaactgacccagttccaaatattgcagcttgga

SEQ ID NO: 46448 - DNA, 1013 bp, Manihot esculenta
  Intron number 2 from transcript cassava4.1_001475m (locus cassava4.1_001475m.g) derived from phytozome v7.0 (chr-ID scaffold11106; pos 611309 to 612321)
gcggtaagattgttgtttgagtggtcttatatttacatgtacaaacgtatatgtggttttattttaattactggctgttgagagattggctagtttgtgtttaatttgagtgtaggtgtttaagtctcttaatgcttgtcttatgagtttaactttaaatgtgtaggatctggtggttgtttcgtttgattacctttctaaattatggttaattgaacaattacgttcatttgagcttagaatggttcattgttagcttattttgttaggtttgatttactgttggcgtaaatttttgctggtgagttggaggtaaatattgaggttatttgttgaaatgtttgatttgtgtttagttataccggtgcttgattaatatgctgggatggggaggtaattttattacttggatatataatgctttttttttttttggtgtgtgtgtgcatgtgtttgggaaacaaagcatttggaagctttaattactgaaagcaaacaatgtagcaggaatgctgggggagaaataccccagataatctcatcagacaaagaaacagctgctctagccatcagatgagcaacttggttcactgatttatttgcgaaggaacatagaattaaaagagctcaaaagagctttacaatcattaactatttcgctcaaagaagaaagatttgctgttgagatctgcaaagcttgattcaaaagaagtgattcagtttcaacaatgtagttgaaacgtttgattttattttattggggttggggaggggtcatttgagtggtggcatttgaagttttctattgctttatagaaatgattgtaatgggatgacaagagattttaggtgacagaggttggaattgaaagattattttagagtattggttgatagggtctactattggcaaagaaaagtttagttgcttcttctcttctctattttttattttttattttaaaaattcattttcaggttgcctcaaaagatactattggagacgagcaagg

SEQ ID NO: 46449 - DNA, 734 bp, Manihot esculenta
  Intron number 2 from transcript cassava4.1_006455m (locus cassava4.1_006455m.g) derived from phytozome v7.0 (chr-ID scaffold10316; pos 98181 to 98914 reverse strand)
gaagcagaggtaagcttttgaggtttctggtcgcatttcccttttgcttttcgggctcatatcttaagtcttaacaatttttatttattttttattacatggtattcattggaatttgatgcggtcatgtttcaattctgaaaggatgtgtagaaagatatgtactcaaccgcttttctatttattggtagctttcattaatgcatcgagtccttgagaaggccgaggcactagaactaaaaatacatttatactggagtttggtcggtcaggtgcgtcagtgaaagacggaagtatattcattgagggaaaagaatgtgtatctttctgtgaaaaagattcaggaataagtattgtatcagctctatttgactacttttcaagataagtttctgggattatgtaaagaacattttcatgtatacgtcgttgttttaactaaaggcttaaccacccactatttgttttatgaataaagtgtctacttggaatgtttctgcctgtcgttttgcattgtttattcaaaaattaaattttattatcttattgctgtggactggctttgttcagtatggtgtggattttggcaagttgctgcttagatatgagattcctttgtgcaaatttcagattaatgtacctacataatgtaagaattccatggtcctaattgttgtgttgctatgtggaactggccaggattacttctcaaagtggggagacagtggtgaagt

SEQ ID NO: 46450 - DNA, 511 bp, Manihot esculenta
  Intron number 1 from transcript cassava4.1_009234m (locus cassava4.1_009218m.g) derived from phytozome v7.0 (chr-ID scaffold07520; pos 2432884 to 2433394)
agaaactgtgcagataaccttactttatattgtgagtttctctttattatgtctttctgtttcatgtgattgacatttgagttccaaatcctttttatttgtttggctctaatcaactcgagaattttgtacctgctggaatgagcatttgtgtggttgatgactttgaagtgtgaatgtagacttagatttgacctcctttctatttttgccattcaccccaagctgttgtatattttatctgtttaatctcttgggagcactgttagcatagggataacttttattttgctgttttaagtggagatggatatggttttctgattttagattttcaggcatctatttttcttagtttatttgattgtttactgaactgtagatcgattcttatctcttcaatttgagaatctgttgctgccttccttcagagaagtgttctctttatagctctttcagttattggtgtgtaggaggggagactggtggagtttattggaaggagtggtat

SEQ ID NO: 46451 - DNA, 586 bp, Manihot esculenta
  Intron number 1 from transcript cassava4.1_024297m (locus cassava4.1_024297m.g) derived from phytozome v7.0 (chr-ID scaffold08765; pos 130819 to 131404)
gaaattttatcaccagaagtacttcaagtatattagtattttaaaactaattataaaccagctcagagtgaaacatatattccttctttaatgtaatgcaattttttatcccttgggtatatcaatggttttttgatttccaatatatgacaggatccaatattccagttatagtaagaaaacataaaataaaatggtggggatcattcaaaaataccaccacagaaattgttgtaaaaaattggatcatcaaaagagctcagttttctactgtcacttatgctagtaaattaactctacaagaacaaccttcatttggagcacagaagactcaatgccaggcattacttgcagtggctaaaactcctgaagaatataagatgatttgccagcaaatgtttaatcatcttggctcaagagaatcagtaaagaatgaagaattaaagcaagaagaaattaaatcctccaataaagattcattatgagaaggaaaaataaaaaacagtccagttcggaagcgaagtcgacagcgtcatccagtacgtcatcctccagtaaaatccgacatcttcctattgtgacagca

SEQ ID NO: 46452 - DNA, 783 bp, Manihot esculenta
  Intron number 2 from transcript cassava4.1_023287m (locus cassava4.1_023287m.g) derived from phytozome v7.0 (chr-ID scaffold02136; pos 8842 to 9624 reverse strand)
tagaccgtgagtttttaactttattttttgtttttgaatttttctatattaaattttgcgcatttaagataaaccaagaattatctaccaaatcttaatttaatttaaaataccttctgtttgaaattaaaataccttctgtttaaaataccttttcaaatcttaatttaaaatacattctgtttgaaattaaaaaaaaaaagtgtaaaattcatatcaacgttaaatttgaatttaacttgttagttataattttaattgctatgttataaatttaatttgaatgatataataatctaaagagtgtaaattctacttatttagcacataattttacttatatacttgggttcgattctgctaaagttttgatatttttgcacttattagattttgagaaattttttgatatccttgaaaagaaaagccctatatggaagttttgaactagaatcaaggagagcatcatgaagcaagccttggtcacgtctcattgtaggcaaggcttacatcaaatgacttacattgagaagtgaagggagccgtagtgcaaacctcaagtaaggcttattcaaactttgggcagggcttatacagagttaaaagtcttccatatccgattctcaaaattttgtggataactatttaggaagcttactatcacatataatttaaagaaaaaaaaaagaatattttgggatccttctattttggaatgagatgtttttttttattcctcttaaactaggaaggaaccatttaaaaaggagaggctcttttagt

SEQ ID NO: 46453 - DNA, 676 bp, Manihot esculenta
  Intron number 2 from transcript cassava4.1_021830m (locus cassava4.1_021830m.g) derived from phytozome v7.0 (chr-ID scaffold05709; pos 225812 to 226487 reverse strand)
ctgctttaaggaagtaagtttaatttttctttttcctgtccatttttattatgatcaattaactgtaaatatctttcctttccaggaaaatatcaactgtgaatttctccccattcatctactctacattttcttcttattgtttaccatctatttatacattcccagaacttttattgtggatctgattttgattgttaagttatcattccactttgtttgctttaacaatgccaacttgtaaccagtccattttttgttcaccatttttcatatgttcacgttattgaataataaccaaatttcatgtaactccttatgtctgtcaaacattaacagcattttttctgtggatttgattgagtgctaaattaccagtccactttgttcatcattaacaatctatttttggtcactattattttgttggcatgttgaataaatacaacaaactcctttgcttatgggagtatgctcatagttagatgactttatatgtaataatgtatttataattgtgatgctctcttatatgaaaatttaatggtaatgttgtagccgtttccatgcatcatctgcttccatgatacagcttttctaaatttgtgtattttttgggatgtatcttatatttgatccttttttcttttcaattgattcaggccttatctggtga

SEQ ID NO: 46454 - DNA, 378 bp, Manihot esculenta
  Intron number 1 from transcript cassava4.1_008844m (locus cassava4.1_008844m.g) derived from phytozome v7.0 (chr-ID scaffold04796; pos 9946 to 10323)
aagttgttcaagctcctgaagatcccattctaggggtactcgtttcatttctgtattatttgatcttcaatttatgatctatttggagtttgatcttctgtcgtttggctgattagatcacagatcacagcgtttttgatttgggaaatgttaggggaatactatgtaatttctatatatatagctcgtaactccttttttagtaatgttttttaatttgtcaatcataggatacttatctgagattgaatggaaatatagaaattggatttcttttagttttttgatcgtgttaatctgtattagtgtgtttatttggttttgttttaatgaatataaacaggtcactgttgcttataacaaggataccagcccaaa

SEQ ID NO: 46455 - DNA, 913 bp, Manihot esculenta
  Intron number 3 from transcript cassava4.1_006492m (locus cassava4.1_006492m.g) derived from phytozome v7.0 (chr-ID scaffold03079; pos 205994 to 206906)
ggcaaaatcttgttctgatcccccttgctgacttggtaacgtcttccatttgccttttaattcaatctttttagcttcaaactaaagtgcctgtttaaagcttgcttgacaattactttgtatcatgttctgttttgcttgatatgttaaggagatcttctcaagcttcaacgtcaagtagaagtggatacttaagggtttcctgacaattattttgtactgtgttctgtttttcttgatatatggaggagatcctttggacatagatggcctgaaatttttttcaacagcctatttgatggaagcttcttttagagattgatacattgaaatggaaccttcattgggcatccaactacgcatatataaatatgttaagattgcaatgtgtgatgtaccaaaaaaaacaaggggaagtgtgatatcaatttgcagcccatgtgcagcatcttatgtcagaaatatagcaataaaatgaaggctaagtgcatgcttgcacacaacatgtattttagcatttttgtttattagatacctctttgactttaattttgacctaataaatacttaaactttaaaaaaaatagttttaaacacttaaatatttttaaaaaattacttttaaacacaactttaaaaccatgaatttggctgaattgtgtttgaaagtaatattttttttttaagtttagatatttatcaagtcatgattaaaattgagatgtctactggtcaaagtattaaagcacatgtgtgtaagtatgaatttagccataagatgaaacaatagttgtccttcatgtataggccatgttcactgattcatgactacctttcctctcatgtctaatattctgcaaacctggcttttggatcagatcaatcacagtcctgatataacaacagaagatta

SEQ ID NO: 46456 - DNA, 924 bp, Manihot esculenta
  Intron number 1 from transcript cassava4.1_000508m (locus cassava4.1_000508m.g) derived from phytozome v7.0 (chr-ID scaffold00746; pos 39949 to 40872)
ttcaagtgttaaaaggccaatcacagagctacgtggaaggagagggccatgcccccttccccctaaaataattgaaaatttttcttctcattttcctgtgatgcatagatgaagtttgaaacacttacagagtcttggttcatttgatctccctcaagttattttattttttaatgtttttctggtacagtattagccataaaaagcacctctataaaacagaagttatagaacatagatatataattgggcgaaaaataagggaatcatgaaaagtgttttttgaatttttttatgctatataatagatttttgtttcccttctctgtgtatatttatttatttgtttttataagaattgttacttttatgtattaatttttttgcctatggccccctcagattaaaatgtgctagctctgccactgcaaaaggccaatctattggagcaaaaaaaattgccaaattgtccctgatattgtaatgcatatatatatgaaaaaggagtagaaaattaacatctttgatctttagattgttttcaagggcacctattcgtagatcaaaatatcttatttatctggcttagtctccatcaagacaaatatttcagtttcctggttagacaactataaagagcagaaaattaacatctttgaattttactgttacaaagcgcacctattcttggattaaatgtcttattatctggtttagtctccatgaagagaaatattttagtttcctagatagacaactatgtagattttgttgatattacatttttcaggtgtgtattttttctctgttgattaaattcaaaagtccattccctttgtcctctgggttaagcattctaagctatgtgctgctttctcattcatgacagtcagtggcaaccaatcttcgacgctctaccagaaa

SEQ ID NO: 46457 - DNA, 500 bp, Manihot esculenta
  Intron number 2 from transcript cassava4.1_006517m (locus cassava4.1_006517m.g) derived from phytozome v7.0 (chr-ID scaffold07351; pos 581832 to 582331 reverse strand)
gtttgacgaaaaatcatctactgcaatatcaaagtgtgagagaattttaagtttattcctgattcaagatgcttaggatgtcaaacgaaagaaaaaaaaagtcaatacactagagatctccagcttaattcaaaattgtgattaagacttttgaaattattacagcttttctgtttattcatgtctttaaaagctaggatttttttcggtcatttcagatgagcagacatcatgtttgttttattggcctttgttccccaattttctatcttttagttcttgattggttatatactcttggaatattggtaacccaagttaagtacaaaatgttccctgtttggaacacttttttcttttctttctttctgtatacctcttaaactccatctaaaagacctgtaatgttgaggacccctgtctgctagttgacatttactgttccatgaaagcattctaatggaattgattgggcatttttttcttttttttttccaggt

SEQ ID NO: 46458 - DNA, 806 bp, Manihot esculenta
  Intron number 1 from transcript cassava4.1_016332m (locus cassava4.1_014864m.g) derived from phytozome v7.0 (chr-ID scaffold00847; pos 292364 to 293169)
tcttcacctgccgagtaagtaaccttttccatccctctctctttttgtaggtctgtatcactgtatgtagtgcgctttgctgatttttcttcgtatcttaatcctagctttcttgtaatttatttttaaagttatatttgtggttcagtgattgcgtgattgactttactctgttgctatgtgtttgtttgtgtatgcacttactaggattctattgaacttattcctatgcaagttttatcagttttattttataaataaatgggaaaatttcttgcatctagcatagaagtaagattgtaagtatcagaaatagttgcaaacgtgattgaagtttggtgaggaagcaattacgcatgttggcttcagaagtataaggttatttcttcatgatcttttagattgaatcaaatgcagagcagtataacagtacattgcaaaaattaaaattttgtttgggtattcattatatatatatatatacccatggtgaaatcttccaatgacattctgaatgcatactgtaattttactataaattgcacaacaaattgacatggtgatactgagttgttttctaaatggtgcctcatgttgttcttttaatctttaattctcgatttgccgggtagtagcagcaaagtttgtactgctgaaacaaatttaaaatttgaaccgaattcccctatttttagatgtgtatgctctatattattttttaaaaaccttttcaagaccattgaaatttttgttgttcattttttttcccagatactatcactctcttccacctataagcaaggctt

SEQ ID NO: 46459 - DNA, 1000 bp, Manihot esculenta
  Intron number 2 from transcript cassava4.1_016332m (locus cassava4.1_014864m.g) derived from phytozome v7.0 (chr-ID scaffold00847; pos 293236 to 294235)
cattggtgtataaacttgtattctcacactttcaggtatggattaaattatttattgatgatcctttttcctaattaaggatttccattcctattatcatgtgtgccatatgagttctgaaagtttgttttggcaattgcatttatgagtatcactattttaagatactgatatgtaggattgtcaataattttttagttataggcatgccaatgatttctttccttatgtctgcttgctagatttccactatacagacgataagttcatatgggagtctctgttaacttggctcatgtatgatggaaattattagcttgaactgctgtttgaataccaagaggcattgagtcagaatggactcaatcacatgggcatttgatgcttatatacactattgtttctgttcaacagtttcattgaattgaatcaatggcaaaaaccatacctaaaatattggcaaacagcaagccattcaaaattctgccaaatggaactcttccggatccctctagcgttttcgcctttcttttttccacacacaagcataattacaagtgtgaacagcaagccattcaaaattctgccaaatggaactcttctggatccctctagcgttttcacctttctttattccacacacaagtataaattgcgagtgcacacttattattcaaatgacgagcgcattatgatgaatatttggctttcaaagttctttttgctgattttaatattttcacctctcgaagaggtctctctttctgtgtcacacacacacacactcgcacacatgcacttgcacactactcaaatgaggactcaagtatatttatgatgaataatttgctatcaaagctctttttttggctgattttatcgaaatcttatattgttgttgaacacttaattgtctgctgacacaagtccatgctactattttgtgactttgtatacattcccaggtctggaggctctttacaaacttcttttttcttgg

SEQ ID NO: 46460 - DNA, 591 bp, Manihot esculenta
  Intron number 3 from transcript cassava4.1_019372m (locus cassava4.1_019372m.g) derived from phytozome v7.0 (chr-ID scaffold02193; pos 58424 to 59014)
ctgaaaattccccagcatcttctggtctgttacaggtatagacaagaatttatgttcatttccttttctaaaattacttgaaaaacgtgaatttttaaaaatattttagtattggtaagtttatgatttgtatcgcatgcagttgatgtaattttttgctcttaaaaagaatttaaacagaatggtggttgcatccttccttatgaattctgtgcctttagtatgggtttctgcattatctatattctgtttcagtcttacttttaggagtgctcagcccaattatatgcaagttcaaataaaaaaatctgagtccaaaaaactgaatttttggaaacctaaaactgaaccaaactaaattgaaatatttaggttattggttcagtttgatatgatttataataggttgtgttcgatttcctccatagttcagctttatttttgtctatttctgttattaggatttcatttttgaaccaaaccgactgcttgaatgccctacagaatgtgttcatgccaactgttgatagattattgacttacatatcttaaacaggacaaggttaagactgacagtaaaacaaagagaac

SEQ ID NO: 46461 - DNA, 763 bp, Manihot esculenta
  Intron number 1 from transcript cassava4.1_012730m (locus cassava4.1_012730m.g) derived from phytozome v7.0 (chr-ID scaffold01894; pos 20834 to 21596)
tggagagaaagcacagttttcccggagtaattaatccttgcctgggtcatagctagaagtagtagcctttaatttttgttggtattgaatattcagtatggatgctgtttgtcattaagttcacttcttcagagaaagagaggaggagagtcagtatacagactgtttagttgattattgtatattcgagtttcaaatcttttctttaaattgttggattgctgaattgggtagcatatgtttggttaagaaagcaaattcttctatgaaggttgcatttcactttctttttgtcctctttttgttttgtttaaaggattaaatttcgcaatcaagctttggtcgcttaagtatgaaaccgtatgagtgtctccttgaattggatgctgtcaccatatagcacagttgtttcttgctatttgaatgttttattaggggaagtagaaagcgggggtgtttgattgaataaaaagcattgccattattgagttcaactttttagggctgcagatgaaaaaaaaaagaagaaaagatttgggatttcaactatttgggttttctttactaattttatgctgttttatcttatgagggtgttggtgttcatgtttgtgtaattgttatatatatcaaagcagcttggtcattctgtttcaggaatgattgtttagggttggtcgaggttttatcatcattagtcttcatgctatttattggcttttatgcaggagttgcttatccgagaattttcttttcatcagct

SEQ ID NO: 46462 - DNA, 837 bp, Manihot esculenta
  Intron number 1 from transcript cassava4.1_011943m (locus cassava4.1_009957m.g) derived from phytozome v7.0 (chr-ID scaffold02658; pos 728573 to 729409)
gtattgtttggtaagattcttaatcacttgttatcctctcttttatctcttttggaaggtcttgtgtgctttagcttgttatgatggttttttttcttcatctcgacgtttttggttctttgtttaagtttgctgatgctgatgtagtggagatatgtctcgagtttgcttaagattcaagtgttttagtgagtcctgcatgcagatcgtaataattttatcaaattagcttaattttcaactgtaattaggctgatccctatcggaacatatatggagatgactttgttctcgtgatttgatcaagtttttttggacctaatttgcctcagaaatatcatatttttttcgttttaatgctttggcagttatctattattcccaagcaataattaatttatttttcgctgtgaaccttcaatcagcatcatgttaatctgactgtgggcttttctaggtgtggcaagtccgaagttactagtttcacttgcaaatcagtgcgtcactacgtttggaaattatgaagaaatagataaaattttcaaataggtttaattcttaaattgtttctctgtgtatgctgttcctgctgttatttcagagtgttactggtcagcagcatgtttgatgattatttccagttgactgacactgtaaaagtgtatgaaacctgttctgctacttctttcagaaaactagtattctggtgaattataaatggttatattttccttacattttttttttgtcaaagtattttcctcacatttgacttgatatttttgcttatcaacattatgaaggaagatgtaattctttatttccttcagtgctgct

SEQ ID NO: 46463 - DNA, 687 bp, Manihot esculenta
  Intron number 1 from transcript cassava4.1_012360m (locus cassava4.1_012360m.g) derived from phytozome v7.0 (chr-ID scaffold03651; pos 39730 to 40416)
caggtcccatttctttctcttcttcattatcttttcatatcagccgcttgaagccctcgctgctatttaatttttcttaattttgttctagatctaatttttctttcttaagtttcattgctatacaggaaattgagcttttgcaattgttgtgttttcttgtttgaatagtgggctaggtttcatgcagtgaaacttgtttaataatggtattgtagcgctgtcgttaatttcttcattggtccacaattttgtgtggttagggaagatcttatgtttggtttggtataatgttttccctgtatctagtcaacctgagctttttcataagctctgaacttttaagttggagaagattggagtccttagtaatgggtcactgattaggtgtcactgaggttattttcttttcaaaaggcatttcctctgctttgcataaggttgtcttaaattttttagaggttttatgttaatggatggagaaaagacagttgagctagttccaattctatgcgctaaagatgtgttaatattatggcattaacataaattgtaaacagagtaatgtgttttgatactatagcatacattgtaaatatagtactctcaataatgattgctgagtttcagtattgtaattttgtgctttcagtgccttttgaagaagaagacaaggacccaactata

SEQ ID NO: 46464 - DNA, 734 bp, Manihot esculenta
  Intron number 2 from transcript cassava4.1_010355m (locus cassava4.1_010355m.g) derived from phytozome v7.0 (chr-ID scaffold04024; pos 193182 to 193915)
cctttgatcatacttgtgcataatcgttataaaaggttactttgttttgttccttttgggcgccttagattattgagtttgaaaaaatttcatgtgattctgttgaaagaaaaagagtgattcacttgattgagtttatgctttatggttttagatagttcataaagtgttatttagatttgcctctttttcttggcttaaaaggctaaatttacccttgaaccatacagcaggggccaaaagtgccaaatttcattttctagtccaaatttgcccctaaactgtcattgaaagactaaataagagtattacctgtggatttaaaagtatgaactacactttgctcattcaatttagccttatttggctttattttttaatgataatttaggggcaaatttgaactgaaagatggattttgatatttttacccccacaatatagttcaagggcaaatttgacctttttgcctttttatcaccttgttttaggagtagcactttaactttcctagtatttcatgccaacatgaccagtttatctggttctcagttggtgaacatggtatatgatacttttagctgatgtatctcagagtggagctctgctctatgcctgccatagaaaccttggacattgtaaacatttttctcatctcaacctttgctgcatccagaactaacttgctgttaatttttcatctaaattttatattctcaccagaccaaaggaaa

SEQ ID NO: 46465 - DNA, 464 bp, Manihot esculenta
  Intron number 2 from transcript cassava4.1_007197m (locus cassava4.1_007197m.g) derived from phytozome v7.0 (chr-ID scaffold04740; pos 109757 to 110220)
agattattcacaacccaactgttaataaggtctatacatattccgtcctttttttttttcttgaatatggacatttctggcttgaaattgcaaacttaatttgtgatttttctaagggcaacacccgtgataatattgtgtagttcccctagtaatagtcgtgaactggacttatgatcttgatcggcaggaatttaaacggttatcataattagcaagaacttcggagcttactttctagtgatgctcttggattcagaacttttttgatattagatatcagaaattttgccttattgattccagctagattacttttttctttcttaagtggaattttaaggctcttgaagaagttggttaaaatgagtaaagtttgattgtatgtgtttgtttctcatctttcatctttaaaataatggttagtgaaattcttatgtctcatatggcagcgtttagaagag

SEQ ID NO: 46466 - DNA, 820 bp, Manihot esculenta
  Intron number 2 from transcript cassava4.1_025100m (locus cassava4.1_025100m.g) derived from phytozome v7.0 (chr-ID scaffold11322; pos 20055 to 20874 reverse strand)
ttgagtcaaagaagattgacacccaggtatgtgaaatcagtgcaagttttgatccttagaaatgggataaaagttatttgtctaattttgttagagttcgagacatcatttgttttagttaaccttagaaggtgtaatagcagttgaagctcagattactctgaaacaagtgaacaagctgccccttacaactttcatttaagagcatcgaaatgagtttctcatatgtgtttctgttattttcttccttgtattataaagtttcatgcgttagaaaatattatagaaattaatggaaaaaaacaagatggcttgccgccttataatttcatttaggataaattactccttttagcctctagttatgtcaaaattaacacacatctccttaagttttcaaaactcgatagtttagttcttagtgttcttgtattttgactctaatattatttcttttttcaatttgataaaatcaaaatgcagatattacacattgaatgtttaaaaagttgaaaaacatacatgttagttatagtaagggtattttgatcttatcacagacaattgatggaaaattgggctaaatggatatttagtttgatggacatatgaattgattttgatgtaatttagaagcaataaataatttaccattctgatttaattgattatgtttatcacttgtgcttctttacttatttatgtaatattttgtgctcatttattttttcatgaagtccttgtatcagcacaggacattctaatccactcatttgttttgccagatccgggtctttttctctgttcctgagagtgtagc

SEQ ID NO: 46467 - DNA, 482 bp, Manihot esculenta
  Intron number 1 from transcript cassava4.1_013131m (locus cassava4.1_013131m.g) derived from phytozome v7.0 (chr-ID scaffold05255; pos 95324 to 95805)
ggagaagaacaggtaccatttttttttaaaattgtgttaagtatgtattcacttgttttggtggtttttgttttttaatcaaagttctgtttgaatgaagaagtaaaaggtccactggaaattaacattcctatctacttcagctatcaagataaaaaatatcagttttgcttcaatgtgtcatggatttgtatggtggaaatgattcactggttgttgagtttatattgattcatagaattcttttttcatttctttattgattggtggacactctattcttgtgggttatcccctaattgatcacatatcacatttaggtaagccagcgtattttcagtctcattttgtttggaactccaatatcttggtttcttttttttaatttttttttgttaatttccatgttatttggagttggtatggtaaagttgctggtttgaatggggaatgatttgcaatgcaggtttttgatctctttg

SEQ ID NO: 46468 - DNA, 830 bp, Manihot esculenta
  Intron number 1 from transcript cassava4.1_029600m (locus cassava4.1_029600m.g) derived from phytozome v7.0 (chr-ID scaffold01945; pos 412419 to 413248 reverse strand)
aatcaagtgtatcgtttatcttaatatatgtatcgttgatttttttttggaagtgaattgaaaattgaggtttcaacgattcaatttggaatgtcttttagcttttatgctccttttaaatgatgagaatatgcgaaaagcatattaaaaaaaaagtggttacctgattatgatatttttttgtgaacaagtataagcttattgtcttttgatttttttttttcctaataattctcttgtttgtaatattggaattcaattttctttaacttaaaatgaatggatttttaagaattcagttgaattcttcacaatgaaccacttgttttataggggaagtgtaatggtatttttttttaaatatagtttcattttattgttatttgcttcatttgacatataatggataaatgaagaaagttttatcttattcaatacgattttccttcttttttttttttttgaaaaaaaggcaaataattgagttccttgtttaagctgcatccataattacgtcttcagtgctttctctgtaaggcgtcattttgctctcttccttactctgttttcttttggtggttatttccaataaactctgtttgctatatccattcatccatgtggtcaatagctgctttattgtatgaaatttatcacgtgtggaaatttttataacggttatcagtttttgaattcgttaaatatttttatttaatgtggaaattttataacggtgatcagtttttgaattcgttaaatatttttatttaatgttttgcatttttttcccatcagttcaagtggcagttattgaggaaagcagcgcaagt

SEQ ID NO: 46469 - DNA, 521 bp, Manihot esculenta
  Intron number 1 from transcript cassava4.1_024460m (locus cassava4.1_024460m.g) derived from phytozome v7.0 (chr-ID scaffold02817; pos 214860 to 215380)
acaagttttacttgaaaacggtaatactcatgaacttgagtatatattgcaaatctcatgtgatttttaaattttctattgcatcttggccagtgctaattctttttccgcctgatagagaggtttatgggccaaacttccaaactctttatgattagcaaacacattacaaggttgtacgttcagatgatttttctccttgtttaccaaaattgtttctgagagtgaccgagtccttatggttagcaaacatgttagcttctccttttccttttccttttcttctgtcctagctccttgacaatgtttctctttctgttcgagaagattattcattgacaacattccataagtagaaagaaaatgtcaaactcttccccgtgctcccgacttatttttatttatttatttattttgtgatgttagggatgcataactatttattcacactttcaaattgacattgtttcaattcagctgtgacatatattcattttgtttgatgtgagcttgaatgcagg

SEQ ID NO: 46470 - DNA, 792 bp, Manihot esculenta
  Intron number 2 from transcript cassava4.1_012774m (locus cassava4.1_012774m.g) derived from phytozome v7.0 (chr-ID scaffold07806; pos 30580 to 31371)
cttgcacttaaaggcttctccgctggtcctaagaggttttatctcactcctgtatttctttttttgtttttccttgttcaagagaagcagaagcataacagttaattctattcaaattttctgtgaattgcagaaatattgagaatttaacagaaataataagtgtttgcaatgtatgggcatgtatctgtgtgtgcgagtctggattcgtgagagagacaggaaatgagaatctgtgtttgacttttgataaaacattcctgcatcaagccacaaaatattggtataaatgcagtcaggtttgaatgttatcaaacaatagaccaaaggacatgaaattgtgaaactgtataataatccacaaagaatacaatgtaatgaggctggttaagatattgtttctttgaggtaacccagaagatgtgataaaatctaactgtcaatagctttctgaaaatcactcaacacacattaaataatatttgtgttgaccatggttcaggttcatgtgtccctatctaaagttgtagtttgtcacaaattttgtgtcacaatgcaagggaaatctggggaaaaaagattcctatctgaaaattatttgcgattttcattctagattagatcacgtttcatggtatgattatgattctattaagatgagcatgaggaattattatttcttttaacgttgatctgaccattctaagtgtgcttttatttttactttttgttgattttaatatatttgtatcatcaaaccgtgcaggttgttagtgtttgacaacatagaaa

SEQ ID NO: 46471 - DNA, 371 bp, Manihot esculenta
  Intron number 1 from transcript cassava4.1_004809m (locus cassava4.1_004809m.g) derived from phytozome v7.0 (chr-ID scaffold06701; pos 570691 to 571061 reverse strand)
ctttcttttcttgcttttttttttttttttgaaaggtattttcttctgacatatgaggatctgaaaaagatggcaattgttccttatataacgatttttgacttagtctgagataattgaataatttatttggaagcggatatgaaggatatgcgctgcttacgtgtaattatagaattattgtttgttttgtgtattgtatttgacaattgacttcagattctatttcttgtgtctctcagttttcttttttcttttaatttttttttgtttgataaaaagttggttaagttctgttattagttcattaaatgccgtgttcttttgctttctcaggttactgaagcctgaaggcgattcttgtttttgat

SEQ ID NO: 46472 - DNA, 688 bp, Manihot esculenta
  Intron number 2 from transcript cassava4.1_013121m (locus cassava4.1_013121m.g) derived from phytozome v7.0 (chr-ID scaffold04457; pos 561716 to 562403)
ttcgacacaggttttccgtttctagtcccaatctgctgctgtattgcatctatatgtcatgaaattattgatgatttagttgcttagtgaagcaatctaatttttgtgtggttttggatcaaatttcgaatgaaattttgtatgaaagtagatgcagttggcatgaggttaattgaatgcgatacagctttcctttatgagtttgaaattgcatcaagttgcctgctacctaaaattaatatgctgttgatttggttttttttttttcttaaaaaaaatctaaaattgtgagaattttccaaacgcttatttgattttgataattaagtacggggtggatctttcaagtaatctttacctcaacttaagacgatctcagtcgaaggaaagtaacatatttttttttctccaagtgatagcactttcagagttccctttgtaataaccagattggagtaaacaccatggtgtattagttgattcagattatcatctaatttgggttttaaaatcttcagactacagagatttatatgcctttgtatactgttgtcaggatacgttttaaatcactttcttatctttagctcattgctgattatcaagcttgtaccagttcctagccatcagcttatgatactgatattttgtttggaacaggtacaagccagatttaatcaagggtgac

SEQ ID NO: 46473 - DNA, 556 bp, Manihot esculenta
  Intron number 2 from transcript cassava4.1_017492m (locus cassava4.1_017492m.g) derived from phytozome v7.0 (chr-ID scaffold06801; pos 66445 to 67000)
tcagagggtgtggcagcatcaaggacccagctagggtaataataagatatttctcttgtttgttgtgattatatgtgcattcatgtttctcaataccattatgattttaaacctgaaacatcaattttactgggttgaaaccaaaggatctgattagatgacttataattgaaccacctttgtcccgaaactacatgagtcttgataaggatcagtctgtatcctttttgaggtgaatctactgtgtcaagtgaaagagccatagagtgattattgactgaacaatttatcttcttgtggaaaataattggaaatgactaaattggaattattgagtgtgcatcctttactaatgagtattctatgaattgtcctagtctgcttttcaataatttcaaaacaattattttttaattatactgtaaaagcattgtcatttggtgtgttttggaacagttatcttgttgctgcaagctatttgctttgattgagcttctcttatgtgtgcatgtgaattatttttagtcaaatttgtttattccttttaaaggaagaa

SEQ ID NO: 46474 - DNA, 485 bp, Manihot esculenta
  Intron number 1 from transcript cassava4.1_033629m (locus cassava4.1_033629m.g) derived from phytozome v7.0 (chr-ID scaffold07157; pos 3752 to 4236 reverse strand)
agtctgcacaaaggtatgaatagtaagtttaattttcctattaccacttcactatggaatttttcgcacttgatttatagacaggcattcctattttctttgaagcctatgcttttatcatatttttagttcagtcatttatggagtagttcttggctcctttgtgcttttatcaggcttgattttgcctaaaaaaggttatattttcttcttattatgcggtaggaattttaattttcaacacgcacaacaatatattttgatctttttggaggaagacttagcaggatgaagtttataatgtttgtgataaacttttggcttctcttttaacatttttcatgtggacaatatcattcacctcttgaaataattatgttaatgacatcattattctgctgaaacaaagtgtctcaactagtgattttgtttgtaaatgtattgttggaataccttttgcttccttggctgtttttgtatacagc

SEQ ID NO: 46475 - DNA, 454 bp, Manihot esculenta
  Intron number 1 from transcript cassava4.1_012709m (locus cassava4.1_012709m.g) derived from phytozome v7.0 (chr-ID scaffold05002; pos 215426 to 215879)
atactctgtcgccgcgtaatcacagcatttatctggtaaattttcttttcaattcctgaatttagcagtcaacttactccctgttgtttttctgttttctgtttgtattttattattttttattttgttttggactaatagtagatgcgttcaataggatttgttggatttacgttccaattacctttggtttttgatttatgttgtttaaactgtaaaagttttccgatttggaattctccctttttgtttatcaggattttgttgattttacttaatttttgccaattaattgaaaacgtttccatgctcaagagttggagtaatctgctgctgtttttaattttaacttagaagagattccattcagaaaaaaaaaaaattcttatgggttttttactaaattatttgttgatttcttattttccagtttttgggcgcataggcttgtgtg

SEQ ID NO: 46476 - DNA, 897 bp, Manihot esculenta
  Intron number 1 from transcript cassava4.1_018609m (locus cassava4.1_018609m.g) derived from phytozome v7.0 (chr-ID scaffold06609; pos 340851 to 341747 reverse strand)
aggcttacgctgctcacctcaaacgatctggcaaggtatggctccttctattgttcatatttctgcccattccatctgtaattataggttctagggtttttaccaattagatcttattttgaaattgctgtgttttaatttctgaatcgctatcttgtgtttgcgggtcagtctatgttttcttattgattgatagatgctaagtcatgtttcctatgtgagatgcgaaaattatgctgacaccttgtgggttcatgaactgtattgcgagaatggagtgggtggttaattgatgagttcagaaagaactatgccttgagccttagttaactatattgttgagggtttaagattacaaatacagggtgaacggaaatatgccccttctcctctatgttcactctccactgcatctaggcaaaatcttttgttataaagaaaatcacattatgcatggatctcagctgcctgccatatgatgaggcctgaaaccatggttaggaggatgcactcttgaaaattgagggctatgttcttcagtgttttcggatgacatttgtgttcctaattcttgaaggatagcaaaaaatctatagagcgctgaaggacattatgcttttgactttggtccatctttattgcatgatcctagcttatcttgaaaatagaagttcattggtgatgtgggtgtgagagagtcaaggtgaaatgtttatattgaggacaaactttttatgtttatgacaagagactgacctatattttttttgaattttttgtcaacacattatgtatggaactgttttgtcttttgcattacactatacaatctttattgatatttcatggtgtgggtttacagattgagttgcctcactggactgatatcgtgaagac

SEQ ID NO: 46477 - DNA, 849 bp, Manihot esculenta
  Intron number 1 from transcript cassava4.1_007632m (locus cassava4.1_007632m.g) derived from phytozome v7.0 (chr-ID scaffold11425; pos 160044 to 160892 reverse strand)
gaggaaggaagccgagaactgtgactgtttgcaaggtacttcctatgcagtcttttaggaaaatattttttgggttattatactattttgtgacctggatagcgtggtatgtgctttatgaaatccattcattagtttatccgtgttctttatttttcttttctcacagaagctggttttgctgcattttatattttcaatctatagatccgttggattcaaaatagactgttttatcttctctattctcactcactggaggtggttgtctatgtgttctatgcgcaattattttaatttgtcttcaaagtatttctaaggcgaatatttggatatagaattgggatccaataattccgaagatgcatatttattaacttccaaaccatgctgtgatgctggttttaacttttaatcagtctaaaagtacttgacaagttgtgtttggttcacttaactgtgtcaaaagtggttgaagatgagtttcagagttcaataacatgaattgagagtactaatttgtatcaagtgctcagttgaactctggagattaatttacattaaaaagacctttgtttttctatgctaatggcacctgaacaacttgaattttcagtttaatggtactgtatgcgggaactagatattactgttctttttagtatattgatttgcaagtacataatttgaacttttctagcgattaatctttaatctggataagctgatgcggagctctttgtttggctattttttatttttattcatcattacgtttgtgggttgcgggatttacaagtttcaacttatgcaggttttcaggtttgccactcattgggaggtggtact

SEQ ID NO: 46478 - DNA, 841 bp, Manihot esculenta
  Intron number 4 from transcript cassava4.1_023282m (locus cassava4.1_023282m.g) derived from phytozome v7.0 (chr-ID scaffold03393; pos 7472 to 8312)
tgattggaggtggacaactaaattccagcgttcctgtaagtatctccttcaatctttatttatttatttatttttcttccatttttgtgaaattaatacttattatatctcaaaaaattgtaatatctgataacagtattttgaaaagtaaattaattaatttctctccttcacttaattttaactttttcagattttgccattaacgacaagttttcattacaaaaaaaaagactatagcaatgaaaaatccatatactttagtgacagatttatgatgatccaacatttatcgtttaaagtcgtatcgctaatttttttcaacagattttaaatctgttgaaaatatttacgaaagattttcgacaaatcatatttaatttttactaacgtaaatatttttatttttgagattttttattattggcatttatatttctagttgatattttttcatttattatgaatctattaagtattattattataactggtattagaaaaaaaacgctttcttaaatatattagttaaacaatattaaaattgatttaaaaataaatttgatatgttttgataataaaaagagtttttttttttcaaatatctttaaaaaaatttaaaataatttttaaaaaggtgttttttagctcttgaaccccagtgccaaataagaactagttaacagttaaatttgataaatcattttttttttttagaaaataaaataactgaataactgattttaacataaccaaggaatttcttttccttgaattttcatatactgtactatattcttgttttgcattaacagttaagtgaacaagaagatctcatcgt

SEQ ID NO: 46479 - DNA, 666 bp, Manihot esculenta
  Intron number 2 from transcript cassava4.1_014248m (locus cassava4.1_014248m.g) derived from phytozome v7.0 (chr-ID scaffold12118; pos 82627 to 83292)
gtcaggtataagaaatttatctcctttgcttaagttttaacggcttctttgtcacttttatattgctttgataggctgatgcttgcagggacaggtagttatctttctattgcgcaaaatacaatttattgtgactgctaagctttatatttaatttcattcagacagtgttttttgtcagccatttgattagttctatgcttgtttaaaatggtgcagtttgcgttactattttgcgaggatttaataaattgacactaaacaaagttattgccaagttttttctttggttatccagcgtaacattcatcactttattgtgattgttaagtaatatgacaagaatttgcttgcaattgttcaagaatatttttttttatgatttggcacatttgattatattttaagaaatgtccgaatggattcatgaatattgggccggctaagttgttgggttgaaatcacaagcttggttcaagctttttgtatcaagcagcctcccacggggaaacacttatctcagcttcatttctgctcctaaacattatgaaatagaatattatggtcaagttgagcctttagtatcgatgagccaacggcgtctgcattgctttgtatgtaacagatttgcaaacttgatgtctaaaatgaattttctcaacagat

SEQ ID NO: 46480 - DNA, 1013 bp, Manihot esculenta
  Intron number 1 from transcript cassava4.1_002858m (locus cassava4.1_002858m.g) derived from phytozome v7.0 (chr-ID scaffold03741; pos 351056 to 352068 reverse strand)
agggcgcatcagaggttggggtctttgtttgttaggtgagttgtggatggagctttgttgtgagtttctggtgttgggtccttaaggtgctactttgggatttattattgggtgttttctgagttaaggtgttgatttgatctgcattgatcggataaataacttttgttggttatatacatttgtgaatcaagtttcaagttcttgtcttttggatttttgcaatttgcttaattttgggggcattttttttaatgatgtttcatctgcattgattggatggtaataggggaggataaaatctctctttcttcttttgttttgtttcttgtgtcattgtgttgttataattgcttaattagcttttttattttgggaatgtgcatttcattgataaattgattcgtagaatgttcattatctataattttagtgaacagtttgtgagtatatgttttttatccttgtggtcacagtggttctttattgcaatcctaaatctgctccatctgtctatacatttgcatatgtttgtttgttatggctgttgaaacttttttgaatgccttgccgctaacctttgtcaattagtgtgctatgctcatgtgactgttagttatgttttcattcccataatcttgatttgcattaatcacaaaagtcccatgctttatggtgttaccaggtcatttcaggaccagttctgaatggtgttagaattttattatttcatgctctatgatttggatgtttgatggtatcatgtaacattttgagccgcttgcatatttggtgtcttgtagattcagtgattctatttccatcttttaatgaacttttctccatcttttcagtcatttgctgatatatttgcataggtcctttttgtaatttcaggtgaatttagttttccatttgtttctcctgcattatgttgcagagattatggtgtgttatgtttgggctgcacttattttaatcttgatcttattgcaggttaggacaggttgaga

SEQ ID NO: 46481 - DNA, 433 bp, Manihot esculenta
  Intron number 3 from transcript cassava4.1_010161m (locus cassava4.1_010161m.g) derived from phytozome v7.0 (chr-ID scaffold04457; pos 1230962 to 1231394 reverse strand)
caagaattcctttgtccacaacccatccacaggttaagttccaattaaatgaatgctttcaaaacaaatattgttaggttcatataatgtgtgtttatatgagtgtatgggtggatgtgcctgcttcattgtgcattgcttttctaagttctagcctctctacatgttggaggtattaagatgtttctttccattcatttcattgtatgctgtactttatagatgggcttcccccttccttttctttaatctgtatgtgtgttcgccattgttaatcaaataatgggctatttcgcagaattagtagtctctgattatgcaatgccagtctggactagttacttctctcagttgattctgatgtttaatgtttacttaatactccaatcaaacaccaaccttgtctttgcttttgtttttcttccttaagcag

SEQ ID NO: 46482 - DNA, 337 bp, Manihot esculenta
  Intron number 1 from transcript cassava4.1_002140m (locus cassava4.1_002140m.g) derived from phytozome v7.0 (chr-ID scaffold07470; pos 95821 to 96157)
tattcaccgttgattcttcaccaacaaattttcaggtgaccagaaggtcctctttcttttcttcactttaatgggtttctattggtttgagtgttttttgtgatttctaatttgtttataggatgatgatgagttttatttttgatagttggtaattggtgaacttcttttacttgatttagtttgtgggtttgtgatttatttctgggtttgattttgtggcctttttgctttagatggtttgatattgtctcttatgggtcttattttgtctcactgttttgtttttctttattttccagattttttgtttggttctactgagtactaggccttc

SEQ ID NO: 46483 - DNA, 741 bp, Manihot esculenta
  Intron number 2 from transcript cassava4.1_002140m (locus cassava4.1_002140m.g) derived from phytozome v7.0 (chr-ID scaffold07470; pos 96184 to 96924)
tttcttcagtctactgggttttcttctatcttgaggtactcacttcacttctttttttttctctctcttgatggtttctttattttattttaaattttagtttattctcattttaatacggaggtctatagaatgtgcaaatgaccccccccctccctctctctctctctatctctcctagtggaaaaagggtgtagcttatgatattacagaaactgatcatatggagattttgtgttttgatggctattttgcagtacagttctagtggtttcgctttgctgcttaggcagatgaatattcatagagattccctctttctttttttccccttctttttatgcttatattttgaatttagcaacttttgagttatttgtttcgttggccttatggtttaaaattacaagactaaagatgtctggagatttgttatgtgatttctttaatacaagcagtctaggtttagggatcttgagataaagaaagctttttgaatttaattcttaaaattcacatctcataatcatgacaaactgggtacggggcctgtcttcatcagtttgaacattggacctattagttattgtaatattgctactttttcatgtctttaattttaattgtttatttgccttctaaattaagtattctagggaagaattgtaatgaaatatggttttttcagaatttttttaattgttttttaatctgaatttggttaatttcaggaagaacccc

SEQ ID NO: 46484 - DNA, 555 bp, Manihot esculenta
  Intron number 1 from transcript cassava4.1_014159m (locus cassava4.1_014159m.g) derived from phytozome v7.0 (chr-ID scaffold07996; pos 232290 to 232844)
gttgtccaaaccttctgtttttataagaaaaacagtatattaatttgttagatcttacctcttataaccacatttcacaatctattttaatcgagttttatttaacatcaattatatatattatataataaattaatatttttatatttatttcattaaaactctacttatttattgaaaatgatatttaaaaaatataaatatttttaacaaaataaattattaattttaatttggtgaaatgatacttgcggttcggtttttggcctttggccgatggcaagtccaaaatcgtcatttggtcccaagttttctcaagttctcacattgcagggttgaaagcagtaaacgatgccgttttttgaatctgtggtccgagtctatgacatggagctctgcaagagttaacactcccgagcagaatgctactccgaaaccgcctcttcactctcttaccacctccatcttttcatctaccttctacaaaacctctcttctctaccctctttttcaattactcgaccctaaaatctccaaagcccaattcgatacctc

SEQ ID NO: 46485 - DNA, 722 bp, Manihot esculenta
  Intron number 2 from transcript cassava4.1_014401m (locus cassava4.1_014401m.g) derived from phytozome v7.0 (chr-ID scaffold10689; pos 681819 to 682540 reverse strand)
gtgctgttgaggtcttgaatcaaatttttccaaaggtattgctgttgtaacattggctgcaaaagattatatctacaattttcttctgtaattgaaaatatttgtctagattgtgaacagaaaagtcttccccttacttaatataaaagaaaaactgacgaaccaactaatgaatttttctatatgataggaattaaatagtaaatcacttaacgactaaaattgacagagggacattttaatagattttttagttacagatattttagtgcatttttaaaaacagggagactaatttcgtaccataggaactaatagtaaattttcctagtataaattcacagataagaacagaacacccaattgcatcaatatgtagttagtcttgcaatggtcatgcatggttgcttaaatttgtggctgaccttttagctgtcacattcataaaagattttccattgacaatggaacttatggttagcatttgctattgtatagttaatgctaaaaattcaaacttggtaaatactctctcaattataaccccaacaaaattgggcatcataagtgttttcttttcttttcttttctttattggttttcttccttcttttggttacatgtgatacaaaattataaaggtttattcaagtgattttcttagttaacagctttttgtgcaattatctgatgtagtttttttgtactctccccaatgtaga

SEQ ID NO: 46486 - DNA, 445 bp, Manihot esculenta
  Intron number 1 from transcript cassava4.1_014401m (locus cassava4.1_014401m.g) derived from phytozome v7.0 (chr-ID scaffold10689; pos 682559 to 683003 reverse strand)
ggggctccattctcaccgatatttacgctcgcaaagtaatttttctattcctttgttatgatttcattcagtaatggctctaatttttcatgcctctgttttcccatttcttcaatttaactgtaagtgtttgatttaatctgtttggttacttcatttttactcatgatttgaaatcgagggtctttgtttgtttatttggggaacatagaagggaagatcatgtgggttgggaccctggaacgtgacccttagctgataacccaaatgctcgttgagttggtttagtcattaaatattagctcctgtagcagtgcgaggcttatcactgttccatttttacaagaaatccttgtaatcttgtatgcaatttttggttctttctttttcgaatcttattttggttcaaattggttgtaggcagacatagtgttgcgaggatact

SEQ ID NO: 46487 - DNA, 268 bp, Manihot esculenta
  Intron number 2 from transcript cassava4.1_017828m (locus cassava4.1_017828m.g) derived from phytozome v7.0 (chr-ID scaffold07478; pos 220647 to 220914)
tcagtctcgcgtttggtgattcctacggcaacgaggttagtaaagaaacaggacatatctcaaacacctggagaccatatttcttacatgtttgttctgttcagttttccttccatttgacttggcagtgagatttctcatggcctggcaatcaggaggagaaaacataaacatataattaagatcgacccattaaagaagcttagattatagttaatgggcatctgatcgatttcttctttaacgtgtgaatatgttcttaaggtgt

SEQ ID NO: 46488 - DNA, 623 bp, Manihot esculenta
  Intron number 1 from transcript cassava4.1_011358m (locus cassava4.1_011358m.g) derived from phytozome v7.0 (chr-ID scaffold07413; pos 189575 to 190197)
gttgaatcctttataaagaagtaatttgcataatgatcccctctggtgaaattcttcatgttaaattagttctatatggtccagagataatcacgaaatttcattgcatcaccaattgatctcatccctcctattatatgaaaaaaaaaaagaaaagaaaaccatgcaaatttcttgtgcagacttggaatacatgaagtttctctgatgtgtgcatgtgaaaacatactacccatgggcaaatcaatttgaaagtagattctaatcacttagaagataagcttggtgcttgtttgaaggaaggaggcattttaaagggggttctccattattagacaatgttgaaataatttacaagagaattttaaaagtctatgacagcttgtatttagtaggtattaggttcatacaataagcttttttgctagctttgatcatttgtgcaacacaaatgacagctgatacctttacaatgatacaatgaggatattgtcattgtttaggttaatcctgttatctataaattttctctactgctctttgccaagttatcggagtaggactatgcaacctggatgtataattcattcagctaccattttgtaggcaccagagcttaaaca

SEQ ID NO: 46489 - DNA, 894 bp, Manihot esculenta
  Intron number 1 from transcript cassava4.1_003112m (locus cassava4.1_001721m.g) derived from phytozome v7.0 (chr-ID scaffold11069; pos 422887 to 423780 reverse strand)
ctaaacttgattctttgatccattcacctttgaaggtactctagtattcttgtttttcttcagtttaattggtattgcaagccttttagtgtcagtttgtatagatcttgcttcctctgtcagccttttttggtgcgtgtttctttcttagcaaggaagaactgatttgtgattggatttgttgtttgttttcttcttgtgatttgagtaaattgatttctaatgtcttctgtagcggagatgttgtggtttttgctcggtgactggatttagaattaacattttagtaataggtacttgaagcaaggaaaattagtcaaaatgataaaaagttttgatgatttaaaccaaagctcctgcatattctatcaaaattaggcacatatttggatccatttaattcaatttttcttttcttttttccctttcttttgctggaaagaagggaatgaaatcattgggacagagtgtccttgttattatgttttttttattcacttagaaaaatcttttttttattcttcgtattgttaatggaatttcatatgatgagttctccttgttccttgatcatagttttattcattgatttatgtatttactatctagtttttgatggtggagtctaatttttactattacttttgcctgcaaatagcgtggatactgttaattacataggcacgtccttgctcctctttctattgatatcttttgtgtatctgttcttttacgtttatgtatcttttctgaagcgtgctgcttttgtttcttaagggcttataactattcttctaatggtattggaattaattgttcttctgtcaatgataagcttcatattcttttctttgtgcagtcaaaggacaaggagattaaagctatcatcacaat

SEQ ID NO: 46490 - DNA, 402 bp, Manihot esculenta
  Intron number 1 from transcript cassava4.1_026765m (locus cassava4.1_026765m.g) derived from phytozome v7.0 (chr-ID scaffold12317; pos 54875 to 55276 reverse strand)
cagctctgtcaagacttgggtatctcatacttcaggtaaaaaaatagaaacatggattcaaacactaatacatatctgtttaatttttctataattcttatatgcacttttagggatatggttacatttcttgaagcagacaacgatatcattctgttttgtacgtcaatactctctcttctagaggataaagaaactaaaattattctttcttttcaattcaattacttctttttttaaattgattttatttatttttttaaattcaaaacctctctattttattttattttattttttatttcttgttcatttaatagaattaatttatttaccaatctctatatgcattctattttgttttaaagcagaaatttacttttgatagtgtcaacgcccatc

SEQ ID NO: 46491 - DNA, 750 bp, Manihot esculenta
  Intron number 1 from transcript cassava4.1_001383m (locus cassava4.1_001383m.g) derived from phytozome v7.0 (chr-ID scaffold03168; pos 28494 to 29243)
aaaccgctcagaagcttctttttcaaggcaacttcttttattaatttatgtttgttgtattgttattagcttatggtttccgatttttggtttcgtttaagtttatgatttttggagtgcatgctttctattttgatgatttctttgtgatccatgtttttggacttgtggatttgatttattttggattttgtattttgaatttgctcgataggaagtgtggattgaattgggttttcttttatttagttattttctgtgatgggtcttttctgcgcttttcttcttttctataattgatcctaacttgcgggccaggcgggggttatgttagattttacaaatgctccttctgtttgtcaagcttttccatctctgaagtgaaagctttctcctttacatttcgctttttatttattttggtaattttgatttgtggaaatcgcttctgaagattttcaagagttaagagagataacttataagctaagagctcagctcaagaaattggggtgcttctcctgttgatttcactataatgcctgctgttcagaggaacaaccttcataaatttatatttttaaagttcatatgagttgcttatgggctctgtgtttgaatgctcataagccgaggtagtatatactacatagaaaaagagtgaatgattttgtttctatgttatattttctttttattttccataatccaattataaccggcctgtatgtggtttcgcagatccatttc

SEQ ID NO: 46492 - DNA, 822 bp, Manihot esculenta
  Intron number 2 from transcript cassava4.1_013707m (locus cassava4.1_013707m.g) derived from phytozome v7.0 (chr-ID scaffold07520; pos 67809 to 68630)
ttatatgcatgtgactgagtacctgatatgcttaagaaatccaactgcaagaggatctctaattatgataatatcaaaatacagtggatttgttgtgtaatttagttctcattcatggagaagctcattctggcctcagccaacaaagcattgttgcacattgcaattttatcattatcctcggggattgtctagtacttgtgggttatattcaacatgtattggggatttatcgcagatctgatctcacaaaatcgcgcagaaggttttgttggggtctgcattagttgttattgctaattattaccattgcttaccaaggggcttcattagttgattattctggagtggatctctcaccaccagtagcataacaccagttcactattagactcccatgtaatccgtgttatatagctgtagttttgatgtacgtcttatttagacggggagttggtgatggatcctcttgctccgtggaattcttcgacacgagatcccagttcctctcctagttcatggtgtttttgcaaaggagcttccttcgcttaacttcagaacaggagttctcacacatatctaacaccagttcacatatgcagtggtttgaattctttacttctgtcatcagttggctcagtttcctggagtttggctacatggttacttgagctttttactaatctcgattttctctaatcttatcgtagttttgctgagattgatgttgaagaatggtgatcttgttattgttcataagttgacatgttctatttgctttcatcagcctccacgcagaatcaggagtttaccttggcagta

SEQ ID NO: 46493 - DNA, 987 bp, Manihot esculenta
  Intron number 1 from transcript cassava4.1_009647m (locus cassava4.1_009647m.g) derived from phytozome v7.0 (chr-ID scaffold00708; pos 108550 to 109536)
agacaatctccactgatatctcgcgatttgaatcggtgcgtttctatttttgttcataaatcttgctcgaattcttcagttttatctgtttattttctgtttattttgttttatggtaatttgctgattcttgtgtagcgattgctcaatcattactgggcttgattattttactttgtatttgggtatatttttaacgccttatagatttagggttgataagtgtttgtgcagaattttgatttttcatgggttccttgctgagatgctgtcttttaccgtttggttagatgggtttctcgtcttgtccacagattatcctttgtccatttattggagagcttagcttccctttattgaacaagaaaagaccgattgcataggattttcttcgagatattagaactttttttttacgtggctattcaatacgagttgtacgtctttgatctatgtgtagtgaatcatgttatgtgtattgattcttacatggaagaattgacttgttgcatgtggttttatgttaattttggatcaattgtgttgatggggataatcaaatcgaagctactctttcaatatagcgttttgttaacaactgcagtgtctctttccttgatctataagatgtttgtatgctagctcattaaattagtggttttgcatattaattattagataagccataaagaagctaagaagaaggattaaaaagctgaaagagtgaaaaagaagggagctgtagttaagtaattgaatcaaatgctgttggtgaaataaccgggtatggtacttagtgttagattaactttgattatagtattgttaccatatcttacatgttttgtctgtcattttaattatttcttcttgttatgttgaaatttttggtatttttttttatctctctttatacttgggtacacatcagaacgtagtctaaccacttcctgtccggcattataggttgtgagttgcacagagacg

SEQ ID NO: 46494 - DNA, 471 bp, Manihot esculenta
  Intron number 1 from transcript cassava4.1_013168m (locus cassava4.1_013168m.g) derived from phytozome v7.0 (chr-ID scaffold10797; pos 228600 to 229070 reverse strand)
tggattctttggagcagcatttgggagcgtgggaggtgttggtgggggtggtatttttgttcctatgcttaccttgattattgggttcgacgcaaaatcgtcaactgcaatttcaaaatgtgagactcagttgtttggatttctgatttatatcggttttcctcttgattcaagatgcagaggaagggcccaaaatgcagtggtgatctctaacttgattcaaaattgtgaccaagtgtttttaagttattacaccattttctgtgctttcatgtctcaaaaagctaggacttcttaggtcctttcagctaacatcatgacccgcatctgtttgttttgttggccttctttatcaatttttgtctagctcttaaaaaccttctaaacaaccttgtctgcttgttgacttttaatgttgcattgaagattcataaggcaattgattggctattttttttttttggctcaggt

SEQ ID NO: 46495 - DNA, 731 bp, Manihot esculenta
  Intron number 1 from transcript cassava4.1_022068m (locus cassava4.1_022068m.g) derived from phytozome v7.0 (chr-ID scaffold03199; pos 60877 to 61607 reverse strand)
tcagttcaaggctcttccgatccctatctcgtcgggtaattttgtcttctttgatttgctgttcttgttctttcatggtttgcattgatgggttttcgttctttttttttttcttttaataatttgtggttaatcttcatgaacgtctaacaattaatgtatttcattggtaaatttggttcaaggtctttctttttattgattgggctaagcaattatcaacatattttttgtttcctacatatacatgtgctctttgcacaatggccaaaagtataagaaaagtaaagaaaagtaaagaaaaagattcagatgttagttcatgatggtttgtgtaagaaaaaatggattctttgcttttctagttttcttcgtaattgtccttctctgtaacaaaaaagagactttgacaattgattgagtttgatataatcaaatttattgcttgatctttatcatctgaaattgatttgtgataatgcgatttatattgtagacaaatgtttttgttggactaattttgtttttgctctcctggctttgggtgcccttgtaatacatctgtctcggttcacttcagttttttctgcagtttcatacttaaattaggacaatattgactacttgtgtttttctttttggtagttaattatgggcattaactatattgttcttggtttctttgttttgttccagactctattttacaaaagtgaaattgggctctcctc

SEQ ID NO: 46496 - DNA, 917 bp, Manihot esculenta
  Intron number 2 from transcript cassava4.1_012112m (locus cassava4.1_012112m.g) derived from phytozome v7.0 (chr-ID scaffold03651; pos 491458 to 492374 reverse strand)
attggaaatacattcttgcttgtctaatttttcaggtttcctttacttctgagaaattcttaatgcagtatcattgtgttattctgttttctacgtacaaagttaaagtgattgaattcatttttcttttttacgactctgtcgggtctcgagttcatccaaaaatcataaacttttgattgtgcgtaatgctggaattcttggtcaagttggattgcgacctcaatggtatattaacttgattcaacttacagggtaagcaatggaatttgatttaagattaatgataaagtgtagcgtctggtagaaggtttagtcgctgttccctacatgttctgattttctgtgagaaaacttacacttttagcgtaaggtaaagtccctatcagttcatgtgaacttgactatgaacctggtcctggttgaatgtcattttgtgtttctttctttctttcttttctttgttttttcaaattttttttcccaaaagaatggggtgagggcttggagacggtatttaacatcttgatagatttgcaataatatgttgtgtgctatttttgagtgcctgcaatatctcaagtatctgcattatttagggatgtgtacagtcattcatgagtttttttttgtagaaggatgttcaaaacttttcttttattttttttttgctgtcttacttttcatgaaaattgtgactattaacaagtcccatgcatttccagaaatcccaagttcttagattgtctttattgtttttatttcgttttcaacaacatattccatcctttgtttaagccgtccttgcacattcacttttttatatagttctgcttttatgtcttattcttcttcccttttattcagtttgttatgcacgtaaaacatttccaatttgtgttgattgtagtatatac

SEQ ID NO: 46497 - DNA, 883 bp, Manihot esculenta
  Intron number 1 from transcript cassava4.1_032834m (locus cassava4.1_032834m.g) derived from phytozome v7.0 (chr-ID scaffold00620; pos 15738 to 16620)
caactttaccaggatcaacttaggcttgtagctgggtatgtgtacattttctttttttttttctttttctgtattttagttttccattcgaattttcctcctaaatcagaacgtcgggtttatggtttttgattccgtcgatcccatgcatcagattttcttttcttcttttcctttagagtagattggacaattaatatatcatataaatataatctaaacctgggtctgctcttaaatggaataaccactcgttaaagactatttttttcccttagtttagttttagttcaatggattagtggtacctatagtttatatatatatatatatttctcaagttacaaccgaggaatcatggaaatttctattattttaataatttaaatggctatgcatttccgcctttggttttgtaaggagtgagctcaagaagttgaactttctgcaggactatgtctattgccatatttatttggttagaaggaaacacaaagctaaaggcaacttttatttcacaagttataatcttagaaaaggtcggtgagccaaatactaaaatacattaaatccgaacaaacatatacagcaccaaaatttacttgccatactagtcttgcaatcagatggttcagttataataattgtaacccagttggtgaagagcttgtctcaaatttattagatttatattaaacctttatatgctatgtatttttttccaacatgggatttttaattcttaaacatatacattaatgccttttttgattgttcatggttcctaaattgatttcttgtgtggagtaactgtaaactttatttaccctttgtggtgcaaaacataggtgcattccttataaacttgacaagaacgctaagg

SEQ ID NO: 46498 - DNA, 735 bp, Manihot esculenta
  Intron number 1 from transcript cassava4.1_024745m (locus cassava4.1_024745m.g) derived from phytozome v7.0 (chr-ID scaffold11661; pos 269309 to 270043)
tttgcgttgtttctccacctgggcactcagtggaggtccacaaagtcttcaatttgagagcttggcgattggaaccattggaaaattcttaacctgcttaggaaaaatatatcatctcatgcttgtaggaatttcatcataaagttgcgagacagattaatcaagtgattccagtgctttcaacaaccgttcatctccctagtgttgtttgttgattgtttcaatgaaattgttcccaattaacaagctcctcacctgttcttgaaattgctccaacgaaactaatttttactgaattcttctcaggaactttcatactacttcttgttggaaaaattttacaacacttctagtgggtaataattccaggaggttcatgcatgaaaccaaacggctcactttgatctatgttttctagtgaatattcaaggataaggtttccttttcatggcctagtttacatcagtcaacaaaattgactcttcatgatttcaagtaactcctccctgcatgaacatcttcatcttgcatcctttgttttatatttcaaagcagttgtcatatgtacgtacacacactgagaggcgcatatacaaatcagcatccttaccttctttagaagaacatttgcatctgtctgtctgtaactgtgaagtagcaaacaaaactcaaagccaaatggaaatacatcccgggttaacaatggcattttgttttgaagaaaaaattggtaga

SEQ ID NO: 46499 - DNA, 573 bp, Manihot esculenta
  Intron number 3 from transcript cassava4.1_020445m (locus cassava4.1_020445m.g) derived from phytozome v7.0 (chr-ID scaffold06206; pos 46521 to 47093 reverse strand)
caaagcttcttccaaagaatcggcttctcactgaagtgagttcaattggggttatctttgtgctttcttatctcttagtactcattttgttgtatggtttcatcatttattttagttttgtggttgattaagagttttgatttttttttttttcatatttgcgtaaatttttattgtgtcatttgagcgtttttggttaattatacgcaattattagtctaaattttagattgggatcaagaaaaagagagcgggattctgggtttctagtgccactgttttgaagaaagaactttggattcgaaattatagttttagaaaaagaaatcaattcaatgtgtataaactgataataacagaatcattggaaggaactaagaatctaagatgctatagattgcatttcacttagattttgtagcacactatgtaaattcaatgtattaataggcagtttaaaacttaatgttttcatttcctttacatgttttcattttatatatggtgtgtatgagcagttaatttgcgaaattcttagcaattttgtttgtgtttgtaaactggttctgcaga

SEQ ID NO: 46500 - DNA, 952 bp, Manihot esculenta
  Intron number 1 from transcript cassava4.1_008744m (locus cassava4.1_008744m.g) derived from phytozome v7.0 (chr-ID scaffold11998; pos 1388154 to 1389105 reverse strand)
tggtgagatatcgtgttattttcctactttttgtaatttaagttagttgttttgagctgatctattgatttacagtgctcatgggattcaatatttgtgctggattgttgagagagcttctttttatgtcttctatttactagaatagttgagacggtgaaataggtgatcggtttgtgagcctttgggatcttaagtgttttctgggtcaattttggtatgcaaaattgaggttacggcttttctagttaataacgtgattaattagccagttttgttttaatgcgttataatttatatttgcaaacaaatatatgaaacgttgacgtagtggcaaaacagcgctattgtctgtgttgctacaatcttttcatttatctagtatccgtgttttttaatttcttgggtgtttcctttttttttttttggggggggggtgttagggggttagtgtgcgtttggtttttttctttatttttttattttttttatactaagtagttgatggtcatcttacatggataatacggcaaggattgattaggtacaggtccattttttagcctatgtacacaaaataggtgctataatggctttaaaattcacaactttgcatgctttgtttaaaattgtctggggcgatatatttgtgggccgattgtaatggttcaagtagttgatatgatggcaatttgactactagttgacttataagaaacctcatggtcgtgtacgttgtttccataggcggatgcagctggcagcctggataaatttgcgcttggtatagcaattctgttttgttgcggcagcatattatagtgcatccaagtaaactttagtttttgaataaactgacatatttattatcactagtgcgtatgtaattttaatgggattaattgcttatgttgcaggggatacaaaaggtttttcaaaagaactgttctgg

SEQ ID NO: 46501 - DNA, 522 bp, Manihot esculenta
  Intron number 1 from transcript cassava4.1_029020m (locus cassava4.1_029020m.g) derived from phytozome v7.0 (chr-ID scaffold11341; pos 330332 to 330853)
gaggtaattgcagttattccacaaactattttctgtttgcaaatttgtttataaattgtaaattgttgaagtttggattgcagagtattccccaaggggattggttatgcccttactgtgtttgcatcttctgtgatggtggcaaccgtgatatgcttacatgtcaacaatgccagaagaaatgtaagtacagtacagcaaattcctttttttttttatagtatttgagaaaactctttcagccattgatggagcttgtgaacatttctgttgcagttcactgggagtgttttcttgaaaggcagcctatagatcttaaaatatattggctcacccaattttgtggacctaactgcgaacaggtaaattaactttttttgtcttttttcttgagagtatgtgtttgattgctggttattaatttaagtgttacaaagaacaataggaactgaacttagagttttcttctttttttttttttttaaagattgactgcaagcttcataggctaattggagtgaa

SEQ ID NO: 46502 - DNA, 967 bp, Manihot esculenta
  Intron number 1 from transcript cassava4.1_007739m (locus cassava4.1_007732m.g) derived from phytozome v7.0 (chr-ID scaffold10689; pos 134504 to 135470)
aaacgtcggagctcagagatccatctgggtatttggtatttactccttactataatttgcttttgtttttaactgttaatcgatgctacccttttctacttttggttgtttatggtgtttactaagctgccttcaggcttcagctgcaaaattttctcaattctgttcgctcatctttttggtgttctcgtatgacttgatttctgatggtgggttcatttgcatgttcgaattgagactattaaattattgcacgtttgttgcagccaaatacgagggagctgaagcttattagcagccatttttatgggtagttaatttatctgcatagaagattttcttttggtactttagtgcttctccacagtgtaatcatgtcatacaataggaaaatttgctggtgtatatccaataaaaaaatgctccaaggatgggaaccgatatatagagttgtaattgagggatgctttggtaatttgattggccccacttgaagctccctatgtgtttgtagaaattactatattggaatattagttaatggatgtatttagactgcccgcgaaaggcatggttgttcagaatttgagttatgcagtcattcagaatcttagatgacatcataatggtgctgcacttctcctacctcttcaagttccaggaaatacattttcttatgttttgaaatagtaacttttcttgtgaaccatgtttgggtggtgatgcagatctttgtgtttattttgttccttctgtagtttgtaaattaataaacatgtgtacgcggtgtttgaaaaaaggggaaaagatgatggtgcctgattcaattatgttggatgtaaaaattacagtttgtgctttctaatggttgtgattataaatcttattatcaattagatgattggttcattaactttgttttgatgatacagttgcagtgtcggatttatcttgcagggagacaaca

SEQ ID NO: 46503 - DNA, 647 bp, Manihot esculenta
  Intron number 1 from transcript cassava4.1_012115m (locus cassava4.1_012115m.g) derived from phytozome v7.0 (chr-ID scaffold11998; pos 702282 to 702928 reverse strand)
acttctccagctttgtcaggcaacttaacacttatgtaagtattacaagtcttcaattcccttcccccatttcttcttcttcaaattcaaccatgttcttgaaaaagcaaagctcatgtttgttatatatttttctaaatcaaattctaacttagtttgtgcttattcttgggtggggtgttctaaaattggttgctcttttttttttatttatttaattgaaatatttttatgcttaaggaacggtgatgatgtcctattcatgagagttgctattattgctcaccagcaaagaagattgttctaggagcttctggaatcttcatgcatcaactttgatagtatttctggattatctcctccagtaaatgctcatcggttttaatgttaatattttattatttttcaatgtagttggagttcttttgtttaattttgttttaccaatggtttttcctggatgtggccatgctgtatatgggtttggagccagaagtggaatattcagtattgatctcggtgatcggttgattttctttttcctctgtttccggatgcaacttggtaaatttgattatgttggtggaagtgggtgattgataatatatatcaatcctgcagggatttaaaaagatagatcctgacag

SEQ ID NO: 46504 - DNA, 503 bp, Manihot esculenta
  Intron number 1 from transcript cassava4.1_024563m (locus cassava4.1_024563m.g) derived from phytozome v7.0 (chr-ID scaffold00708; pos 191312 to 191814)
ggtcctgggtcccccctcttcctgaacaagtgtgtctctgtgtgcatgtgttagatttattttttaattttttaatttttattgtttatttgtttattctttgatgggtttgtttaatttgattgttttccttctttttttttttatgattattttataatcacgacatgcttgaattgtatgagattttgccggtgtttatttgccatttcccctttgtcattattgagtgtaatttctcgtaaaatttatgtttcttttactgggttctatgttccattaacgtgggtttctgtttcttacagaaaattaaatgtaatggaacgcttgtgattatctcatttgttaaacataatttttatttatgttccttcgatagtgtttggcgatacgtatttagcggctagtgcgtattatttgatttgaaggtcccttatctcgccaatgattttgctggttttaatgggtttacttcctttttgggagagcttgaattgcagaac

SEQ ID NO: 46505 - DNA, 763 bp, Manihot esculenta
  Intron number 1 from transcript cassava4.1_017326m (locus cassava4.1_017326m.g) derived from phytozome v7.0 (chr-ID scaffold04269; pos 138802 to 139564 reverse strand)
gatccgccagctcctcactcaggccgtcagtctaggtcagtctctacttttattgatgcttttttctatgcgtaaaaatttctgtaggctcatggaattcttctctggtattgagtgatggaggtgcgaagattctgagagaaatttgtaattgttaaagttcaatagggtgctgattgaatgtggctacaataatggaattttaatttgtcatcattttgttttttggttaaatgggcataacgagttaaagtttgaggctttatttactcttgtttttcctttgattgatgtgatgtattctgggttgagaggaaaattgcatttagttgaggctaaagtgctgcgtaatcctaaaactgattgcaatttgtaggttctatgttgaattgggttttctgttttattggatataaacacaggcataattgatagacgcaatgttcctttgaaattatgttttttgggttgggttatgcaagttctgtagatctttttaggaaatcaagtactcctatattttgtgtttggatcaggtttagcatgtagtatatggtttaagttgcctttcctccctttgatggtttagataatttgctatttaaaattcaaaatgctttctgatcagataatggttcagaaacttggatttatgaaagaaagctgcaattctataaagaacagtattaaacattacagtttctagttgtgtcccatctgcttgagtgtatgttatattcaatacctgcttttgatttcagga

SEQ ID NO: 46506 - DNA, 1054 bp, Manihot esculenta
  Intron number 1 from transcript cassava4.1_010878m (locus cassava4.1_010878m.g) derived from phytozome v7.0 (chr-ID scaffold02963; pos 22656 to 23709)
tgctcttctcctcttgattttcactgccgaagttggtatgttgtgattatggtttctttcaatttcctgatcttttcctttttttttctgtgtatgccagaaacgtgattgcttttagttttagatctttgttttgccattttctttgagcttagagtttgctgttttagttaataagatcatgatctgcgctgtattcatgctgagttttgtttgattggtatttttttttttttttgtgatttggaggtttttgacttgttggattgatggatttatgacgcgatgtgaaattggattttcggattcgaatgggtttctcgttttttaggtcaagctttatgaaattcggtaatttgtttgatggcttctcagttctttgtaacatgtacttttgctaaattttggtttttggaaagtattaattttgatttttatagaattgtaagttcttcttagagagtctcaagtcccatctgttgacgtcgtcaaataatctccaaaagctactaacggttgctgtttatgaagcatcattgaatttaattccttttcttttaatttggacaactagtttgggatcaaggcttagttgttgttctttgaacttccaatttctggcttgatgttcccagatcgtaaaacacgctattgttgtctttggtacttactaaattctcgtaaattttcctgaaacaatctttacactgttgctgacatcagttttgagatcttgaagcattcttctatctgctttatgcatcaagtcacaagatatttaatctttaagattgtatgcttcagctgttattggtggtatatataagctaggcttgttttgaccttgtgtgtattgttctctactgttaactcttaagattagctatggcgattttcagcattactgtcggctcaatttcagctgattttttaccttagcgtggtgttgtgttgatcaatgtgttgaaactttggttctccaatttggcgttttggatttcatatgcataaaaaagtgagctatctgtgcagggaaacttgcttcctgataaag

SEQ ID NO: 46507 - DNA, 829 bp, Manihot esculenta
  Intron number 2 from transcript cassava4.1_022431m (locus cassava4.1_022431m.g) derived from phytozome v7.0 (chr-ID scaffold02242; pos 219725 to 220553 reverse strand)
ttgaagcaatccaaggtaaacacttcagaaatgcatgggtaaatagttatacactgtaattgaatcatgctacttgctcaagaggttttcgtctaatagtgccaagccaacaaaccaaaccaaacaagccttgctgatttgattagaaaatttagttcagcgttgtttgacatttctgaatatcaatttaacctgaaacgacacaaagtcataacaaaaatgtgagcgttgtgtttgtgtgtgtataatgttgctattttatcttctaacgcactttgcaacaacatgtgttttatcctttgacaagggctaatgaggacatttatgcatactctttggttcagttggtaatatttaactgattttgattaatcggacataattcccccacaaactgcattgttcctacctgttaatacgcgttggtagccccttgatagtagttgaactttatgtttaaatgtagatatttagtcagattgaaatatcaccacctagtacactgtggagttatacgaggccatgttgtctcaactaagatattgctattaaaaataattacaatgattaataagaaagatctatattaacatacaaataactctagaaccattactagagtgctcctttattgatttagagtatcctaaataaataaaattcaattggaaaggctaactaggaccatatcatggcaaaccattctgattagtttttaactttgttgactgggaatttcttattgtgagaaagtggtgaaagaaattatatttatgtccaacatgtttgtgcaggtatttcgtgataaccaatttgtacaggaaagaat

SEQ ID NO: 46508 - DNA, 294 bp, Manihot esculenta
  Intron number 1 from transcript cassava4.1_033244m (locus cassava4.1_033244m.g) derived from phytozome v7.0 (chr-ID scaffold05000; pos 163742 to 164035 reverse strand)
aaagagcaggtaaccctttggttattacatatatatatatatatatgatttgtggttttgtttttattccttttttattgtacattgttgtggagctagggaaaatgaggagactaatgattttgtatttgtttggttggtaagaaagccttgattttcctggaaacaccaaaggaaaaggggaataaaacccttatgttaattaatatacatgcctggaattatttgttatgatgggttttggatttttgatttattatgttattgttttttcttctttgcagggaatattgg

SEQ ID NO: 46509 - DNA, 684 bp, Manihot esculenta
  Intron number 3 from transcript cassava4.1_023208m (locus cassava4.1_023208m.g) derived from phytozome v7.0 (chr-ID scaffold11356; pos 135380 to 136063)
agtagagagttccttgttcacaagccagttccattgtctcaatctcttcaggaaattcctctatggcatctgataaatcaagacatatgcatgcaagaggaaaattagctgacgtgcaaggtcagttatcttttgatatatattaatattaaagtatacgatccttaatttttttaaaaaatattatgtattaatctttctgttatatatatatatatatatattctaattgagagtatttcagttctattatcaactaaaagatatataatagaaatgtgcttgtgtgaaggtagttactgcttgggattgcaagaaaataatggagtgaagaaattgttcaagttgccaatgcaccatctattaataccttttttagtgtccatcaatttaggaaaaaaaaagactgaatttaaaatgtaatgatcatagtttgaaggtctttgtctatttttaggtttatttttcatttcattttgtggattattgtgtaacggccagcaatctcagggatttagtaagttaaatgataggccttgaatcttttttattattattatccttcccctctttatggtatagattataattatgtatttgtattgtatgaattttcagtgttcatttggatttagataagctcatgctctgtattattcagttagagctgttgtaggaatttag

SEQ ID NO: 46510 - DNA, 949 bp, Manihot esculenta
  Intron number 1 from transcript cassava4.1_029434m (locus cassava4.1_029434m.g) derived from phytozome v7.0 (chr-ID scaffold08873; pos 45484 to 46432)
cacatattcagcttcttatctccaattccaggtttccttttttccctctctctatatctctctctgtgtttattatgggtgggccttgttgtagtggttgtcgcgtattgtgtgtatccatgttcgtatgaaccctaattgaactgagatgtgaatcaattttatctctaactattatagttgtatcgggtttggaattgtgaagctttaatctttagtttgttggttgaccgttttcaaaattgggttctagccctgaatgtggagctaatgctgtagtttatgctcagtaacaattttagtataacgttttcctaattagagggggacgtcaaaacctttgagcttgatggatagaggaatgcagctgctgcaaatgaagtgtggcaatgagaggagtgtgatttacctgagttggatattaatttgcattttaattttcttgcctaagattcaactacagaagaagacttggttttggacagaatttgattagggaaaaaagcaacttcaataagaatggctaagttgttaaattgtgaagcagaagggtgagaaagattggaagttgtggataatttgtcaaagttcagcacccttttgtcagtatataccctcagttgaatttctttagtagcacgctagcatggtgagatgtgaaattgatggtttctcaggagggaggagatgaatccaataggatggggaaatttatgattaaattgcgtgtatgtcttacatttatatattagcatgtgaaaagattttcttttatttttccatactgttctcttactcgagtctgccaatgatgatcttagttagaggactatgtagtaatatctagttgtgaggatataacttgttcattatgtgaagaatataattgtgagcaatatgtgtcatgaattgtgattgagtttgcagatcggtataacaccgccctcgt

SEQ ID NO: 46511 - DNA, 742 bp, Manihot esculenta
  Intron number 2 from transcript cassava4.1_014750m (locus cassava4.1_014750m.g) derived from phytozome v7.0 (chr-ID scaffold08446; pos 99538 to 100279 reverse strand)
ggcctgagcattttatcaaggaattcagagacaaggtaagttctcaaatggtttggtttagcttgatttcaattgagtatagtgttcctttgatggaattttgtgctcattccctgtgtttttcttggaattctttgtttaatgcctattgaaagtgaagattgaaatactctcacatttcagcaatttacttatttttcagaaacaatacagatggagagcagaaataaaattgatatatcttcccatttagatcattcattggttattctattacatttgaaaggaaattttgctcatatgtaggattcttctcacatctctattgactttaatatgtgtttgtgtatgtgtttgcaagtatagatgataataaattttctaagtacatattctttttgtttatggagttggaaaccatactcgtgatgatcaggggaatttagggttggttgtttggggcacgcattatccccccttgtcaacacagctattttggggttgaatgattaaagtcagttagacccattctatcctggagttgaatgattaaaagccctttggaacttatataatctcagtgaatttcattacttaaataataaaatttgaacttgtattgcttaatatttcacgagatgtcgcacttttctggtctgctcttcatataatattctcttatctgtgcaaaaattgattagtctttttattttgtaataaataggaactggacctaatccgg

SEQ ID NO: 46512 - DNA, 598 bp, Manihot esculenta
  Intron number 3 from transcript cassava4.1_013079m (locus cassava4.1_011931m.g) derived from phytozome v7.0 (chr-ID scaffold11069; pos 31283 to 31880)
gccgatctagcctctttgatatcactactgatacggtatctatcttatatctgtcatattttcatgttttcttaaaatcatatatctctatcgaaaaaaaaaaatcatatctctgtattggctgcggagaaagaaaattataaaagataaggcttcttgttatactttgtgttggtttcttaaatggggaggtcgagtgaaatcaaggttgatggttgaatatggatcggctgattgaaggttttagtcttcctgcgttatagacaaatgtaaatttagaagtttaacgtggattttgaatattatttatgtcataaaattgttaatttcataggatcctattcttgatcgttgagataaatagaaaagccaaaatcacacgcaagtgatgatttattggaagtgaaatgttttgagttgagcatgttaagggtgtagcaaatttatttatattatgttattgtcttcttttctgatttttaaacaatgagtactggatttaacatctagtattttgttggtttctcattatttctctaataagaagttgagcatttagcgttgaccttctgttcttaatcagttctcggcatttcca

SEQ ID NO: 46513 - DNA, 806 bp, Manihot esculenta
  Intron number 3 from transcript cassava4.1_004844m (locus cassava4.1_004844m.g) derived from phytozome v7.0 (chr-ID scaffold07520; pos 261447 to 262252)
ctctggagaatttatcaatcagattgtaagtcacttgctcattcattgtgccatcacgtttgacagattatagataagtaacatcaaattaaagatccaatgtgtaggaattatggaaaaagtgaagctctattacttcatctggtttaaatccactgtgggtttcattggcaatgcataatgccattacaagctagggtaatgccatcacaataaacccaaattgtaaatttgtaatgactattggggttttttgtacttaataatataaataaggatagccttgaaaaaaaataaacttatttaattatttttttaaatgacaattgaagtgatacaatatcttttttgaatatcacatgaaatagagatggagtagtcatagtgaatggttcttggttcataaagtaggtcccaatcaaagttatgttgcctgggttaagcgaaaattgaccattcttgtctgtcaaatgagacagcctctgataagtccaaagtcacctgttatcctcttgtgtcaattcacgtctttatgaatcttcctctttctctattactgctttctacttgtaagttgtgacaagtcactttttatgtactggtgcgttcctaggcctacctcgttcatatgcaaaccattgttaatcaatcccactctgtcatcaaattgtacaacttctagctttttctggatagtttgttctgtgttctatgctttcttgcatggctgggtatccattggggcatcctaatcccctttacacatatattcattttctttttattggtgcaggtcattaggctcc

SEQ ID NO: 46514 - DNA, 731 bp, Manihot esculenta
  Intron number 1 from transcript cassava4.1_012105m (locus cassava4.1_012105m.g) derived from phytozome v7.0 (chr-ID scaffold09260; pos 340882 to 341612 reverse strand)
gcaccacctatcgcaaggttttcttttccattagctaatttcttttttttttttctctctctcttcgaattttcatggatttcctagatctatatgcatggtctatagattttggtttctgagtggttttcggaaagcttttaatcgatcttgacccatgtgttctcttcttgtttcatcttgtcttatgttcatctggcatcatgtttaattgcaatttgtccagatttgagcaagtctctggtttcaattttttttctacgtttacttgattggttttgtttatattcatgttagatctgtggcattcctaggctttctgatgtagaaaaatgtgagagtagataaggggagagtttgctaccctctttgatcaaatcttgttctaaagggtaaattttctgctatatttacttgcttttctgaatccaaaatcttggtttatcataggcgtcttatccttccattactaatggcaaggttgctggatgtttcttttgcctggtttgactattgagttgatttctatttctagtgatttttgggcttttctcatcaataactcatttcttagttgatataagttctggaaatcaaacccttgtatcaataaacaaacaaccactttcttaaacttcatgcaattgtatcaccgcagcaactttgactattaacacttgtaatcttctgttacagggctgcaagccacccccatcagagattgctggcat

SEQ ID NO: 46515 - DNA, 898 bp, Manihot esculenta
  Intron number 4 from transcript cassava4.1_013429m (locus cassava4.1_013429m.g) derived from phytozome v7.0 (chr-ID scaffold12118; pos 374037 to 374934)
agaatcaccgattccgccacaacttgaagtttcaggtaatgctattttcctcttcggtgcacctcatttaccccctctctctctatgcctgtgtttttggtttcggtttgaagatttttcttaagaagaaaattctgggtacgatttttctctgaagaatctcaggctcaggacgtctcgactgttttcgatcaattgttttctggattttagattccaatgatcaatcttttggttcatcttggttcactttctagtatctgttcttcgcaaatccttcccatagttaattaccctcgtttggttttggtcctcaaaaattccagatcgtagaggaagcatgtcgattctgggatgcgatttaagtcgaatttcaagttcccttctgtttatgaaaacaattagttgagaaatcaaggttggcatcatcaactaaattttatcggtaaccaagcatagctctcaccgaatttcttgcaccctccgcatttctttaggttaaaaccactggaaatgtagtggatccgttctagattgacttatctcattacagccaagtttctctttggtttcatttttgtattctctcttctatactcatcgaacggttcccagtgattacaattttttaatctaaaaaagcatagccgtctgattcgtatccgctgcaatcttcttctgagttctaatttatgtttattttcgttagttttttctgaaagactgcttcttttatttgaatttttgtagtaggacagggaggacgcacttcaattctcaaagctagcttgttaagcagaaaacaaaagcttgttatatttatttatttatttattttttaaaataaatttgtttaaattattctttttggtgggataggacaggtgtgcaaccgaag

SEQ ID NO: 46516 - DNA, 804 bp, Manihot esculenta
  Intron number 1 from transcript cassava4.1_029344m (locus cassava4.1_029344m.g) derived from phytozome v7.0 (chr-ID scaffold00010; pos 65602 to 66405)
tccaatcaaggcagatttgagaaggtattcgaggagagacaaggcaaaagaagccattatgtagtctactcagagtcaaaaatcttcttctggtgagttacccagtcatgaatctttttctggtgagttacccacaactcttgaatgctccaatgacttagataagcttattgcacaaagaaaaggggtcagaattgtaatggtgcgtgacatattttatgggaggcccaatatcggatggggaggctctaataccatgaaaaagtttgggaaaatttagagtattcttgtatttcactcttaatctttacaattggtttacatgactatttatatacaaagaattatatataaacagaaagtaaataatcaaataataattacagagataattaaggatcctagtcaaatcaaatcatatccttagaatcaggaatattaaaattagcggtctacacaattaatagtaaaagttcattttttaacttatttcaaattaacaaattcaagtgagcttgagttcaagtgcaaattatccttcttagtttaaatatttagacaaataaaaaattggtgaacatcgtagtttgctattttgatgtatgatataagacatttaaattacatggaagtatacaattcaataactttgtctctagtgatttcaattagattatctgcatttcattttatgtgggtcatggactattaattttggtgattctatactatttcaatttatgttagctaattctttctcacatttctatgttaatctacagattctcctggagttacaagttt

SEQ ID NO: 46517 - DNA, 781 bp, Manihot esculenta
  Intron number 1 from transcript cassava4.1_006900m (locus cassava4.1_006900m.g) derived from phytozome v7.0 (chr-ID scaffold07520; pos 681159 to 681939 reverse strand)
ttttactaagggaacatacaaagttggtcggaaaggtactagtccacagtggtgtgttactttggttacatcaaattgttgttgttgttggtggtgtattgtttccttataaaatgtgggagcccatgcttgactacttaatttcgctactccctccgttccataaaaatagccctgatctactttttttatacgtcctaaattatgggccactttagttttaagatgctaatacatattggcttcataatataacctactcaatacccattaaaaaagtagaaatttattagttccaagaataatcagtatcaaagcgatacgagtatggcgaatataagcaaagataatgtaaaatttattgttcaactgtattaactatattttcttttatcaatttgaaaaaccaagtaggtccacctatctttgtgggatggagggagtaagttttatatcaacaagaagtgttcacttttctgccggtgcttgcctaggtttccactagtgataatcttactgcattcaaggcttccttgacctttgagtatttctatgagactgatcaacagttattttctgtaattctttgatgattaataatgtctaaagttaacaatgatatgttttaagatgcaaggcaaactaccaagagtagttattttcaaaagttctacttttctgttggctcttccagccaaggaaagtatctttgaaaactttatatgttgctgcagttgtttgtgtcatggtgaactgactatttctttctcttcaggttgcg

SEQ ID NO: 46518 - DNA, 638 bp, Manihot esculenta
  Intron number 2 from transcript cassava4.1_033064m (locus cassava4.1_033064m.g) derived from phytozome v7.0 (chr-ID scaffold03866; pos 85725 to 86362)
aagtcgacacaagtaagtttaacacctacatttgagcccctcactatcagtggcactcaacatatattgtccattacatatgcctaatctccccctagctcctaaggcctctaatttttttttcccttttcaaggtttaatgtgatagtctttgtgattgcaatctaaagttatctttctaaatcttttgggataaaaatttgttatgtagttgcaatgactactgtttattttatgggtcttaaccagtaatcaaatcttgaagcaggaataattatcttgaagcttagcttcacagattctcaagcctttgtgtgttttcttaacattcttgcttatttaacttgagtgtgacgaagccacttgcaaggtgagaaatgatgcaagaaactttagtgtaggaaagagaagttgtagaaaaatgtggaggtggacatataaatttcagcaatggtcacaaagggtagtgatctcctttagggatattaatcttccatctgtttttctttttctttttttcttttttcaatttcgattacatgattttcaccactcccttatctcttatgaaactgaatcatacaattgcattattcatttcaggttgttggacgtcaactcctcgcataataaactgg

SEQ ID NO: 46519 - DNA, 695 bp, Manihot esculenta
  Intron number 2 from transcript cassava4.1_000258m (locus cassava4.1_000258m.g) derived from phytozome v7.0 (chr-ID scaffold11106; pos 353988 to 354682 reverse strand)
gaactaagcaaggtaaagttgttttttcattattctattgtacacttattcgaaccaatatggttttttctttcaattcatcacttctgtaattttttaaaagaggctgtctggttaacagtgtgaggagagaaataactttctgctttgaaatgttagtgttcaaactatccatgatatttgttgcgacctactaaagtcaggcaactgtggggtcctttcaggaactttatcattttgttgaaacaaaatcttaatagttctacttgatattctatttttttctcatgcctgagaatgaaaaaatatggcatgtacaggaatatgcttctataatgtgtaaaattcagattcaaaacacacatactcatatacctctcacaagtttgtgtgcacttttgtaaacacactcacaaactccaactttcaacctatataagggggaagagtttttatctatgagtttgtcccaaattttagaggtgatgggagaactcattgtcttctatatttatattttatagccttccacagtttgtctcaacaatgcatgtgtatatttgtgtgttactgtatctaatgttgcaatactggtcagtgatcttcctattctgctttgtcatatttatgtttaatgtggtgtttcccctatggttccaggtgagcttcatctgtatccagtctctgtcaaaaca

SEQ ID NO: 46520 - DNA, 387 bp, Manihot esculenta
  Intron number 2 from transcript cassava4.1_011089m (locus cassava4.1_011089m.g) derived from phytozome v7.0 (chr-ID scaffold02658; pos 712905 to 713291 reverse strand)
ggccagaaagatattcttggagctaattttccaaggtgagaaacttaaggcccttcagatgctgatgtttttattcactgaccagaaagaaagcaataaagaaaaaaggcaaaaaaaaaaaaagtttaatttgatttgtagtgaagtgcaatcaggagttaggtttggtttcggactatgccaataagaatctcacttaatattagaaacagtaacttgcttaatgacaatggctctgatcaaaagcagagcacaacttgttaagtcgtgtattccaacaatattaagtttgaagtctttttttcttgtcttgattgtgatttgatgtattttacaataatttctctaaaatttaagtaatattttcaattgcagagggtattacag

SEQ ID NO: 46521 - DNA, 1000 bp, Manihot esculenta
  Intron number 1 from transcript cassava4.1_019276m (locus cassava4.1_017889m.g) derived from phytozome v7.0 (chr-ID scaffold06591; pos 28516 to 29515 reverse strand)
tcaccaagcgggctgtcggtgttgaggtcaacaagcaggtataaatatggaaaatttttcttgatttggtgttttgcttcttgaaagcaatgaagattggttattaacttatatgtattttatgcttatgaattggggttttctatctctttttttcctgggttttcattgtcattttgattggtgtgtgtttgatcattaggtttccgatgtatgtatcatacattatgtaatagtttttcactccttttttcaggggagatgatagctaatttgtgagaatctagttattttgatcatgtgggtgatgatgctactttgattaaggaatttggttgaatgttcatgtgcttgctattatatggactggttgtagctctttggttgttgggtttgggctctgacttcgatttacttcattttgtttggtattgtgcaactgaatggtttcagctttagacactatgtgaggggaagaggttactgaacccttgttttctttctttagaaggcatgcactcgaccggcgtgttctgattattctgcccctggtacaaatgttcagattttatgggtgctgttgtctggtttcatccgtctcagttaatgctagtttaactcgtagacttttgaaattttgccttggtgttcttatgtttggtttatagttttcagttctgttgttaattgtcatggatgattatttacagcgtctgagactaaaggatttgcttgacattagagagcaatcaagtaaatggcttaatttttaactgaatcagtttttaaccttaggttattgcttcatgtgtgctctgtttcacactgacctgtgtatttgcattctttgattgagtgtttaagctgcgaactataatgatggatattatttgcctattataggtgggtaataggattatcaagaagaggatccatgtccgcgtggagcatttgcagcagtccagatgcacagaagagtttcgcctaaggaagaagaaga

SEQ ID NO: 46522 - DNA, 1007 bp, Manihot esculenta; identical to SEQ ID NO: 46070
  Intron number 2 from transcript cassava4.1_001177m (locus cassava4.1_001177m.g) derived from phytozome v7.0 (chr-ID scaffold03651; pos 499389 to 500395 reverse strand)

SEQ ID NO: 46523 - DNA, 815 bp, Manihot esculenta
  Intron number 1 from transcript cassava4.1_018780m (locus cassava4.1_018780m.g) derived from phytozome v7.0 (chr-ID scaffold03079; pos 176787 to 177601)
gctgtcccaaaaaagaaggtaattgctcatctcatttcttgctctgatgggttttactattctcattttgtgttatcattatttctatgatcacactatttcgtttaatgatatttaggatctgagtttttttttgttgggtggggttaaactagggttttggtggggttctaggtggctatacatttggattggaattggcttctggtcattctggtattctgattgtgaatttattcttgggtttcgctgagaaaatgctgatattgcttacttattgccaataaagagaaattggatcacttcttcatgcctttcccttgggttgcttgcttcatatttagtgtgtgagaagaacaagctattgttgaggtggactaggaagtcatcaaattactatttctgcttttccggattttgcaataatgagcatatcaattgtattcataaattccagggacagccttcgagggtcatgacattttgattttgggttgtatgtgtagtgaatgtcactgtgcagatgtgtgaatgcgtggacatttccccttctgaaacctccatgatgatttccctttaactatctctgaagtagcaatcctaattatagtcattagagctcctgttgtgagctttacttttgatgcgcgactgtttagtcacccgtgtagtatgttttttcaatggtgaggtttcttgatgtatggttcactttgcatttcttttcggaccagttttatgtaggagccatgattttgtgaacactgtaatctttttatacatgtaggtgtctccccataagagaggcataagaa

SEQ ID NO: 46524 - DNA, 759 bp, Manihot esculenta
  Intron number 1 from transcript cassava4.1_002913m (locus cassava4.1_002913m.g) derived from phytozome v7.0 (chr-ID scaffold00708; pos 175627 to 176385)
tgaagaactttctcctttacacattgcagttacaggtaatttatgattgaatcataataatttcctagttgttgatgtgccattctagcataggatatgaatgaatttttgtttgttggttctcacagttgaattactttcttcatataataggtggcacttcaattttgcatctgacatgaaattctgttgttcaagatagagttttaaatttaactattttcttgatgagaccactagttccagatcagcaaatatttctgatattgagtggctccagtttttatagtattcactttaatggcataccttatgtagaaacataagtagcgggagaatttttgtgaccataatgtttctttctctgcattcttgcttaccccccatcggtaccctacactattgcactctttaactcaagtaagccttaatccctatctagctctattgttgcatttgcctgttgcttagtctttaatgtgcatggtttgtactgcaaattgtactagtgaaaatcttttgatctctgcaagtagtaaattagcttgttgaagtaggttatatgatgttgcaacttgtggcagggtagcatattggttatgcatcttaaatggattttttataattaacctattaattgtttcatgtgcatggtggggggtggggtaaaactggcgtcctttatttctcactggaataaacattcgtcttttttgtttgttagagttgggagaagacagtggactgttacagtccagg

SEQ ID NO: 46525 - DNA, 284 bp, Manihot esculenta
  Intron number 2 from transcript cassava4.1_015405m (locus cassava4.1_015405m.g) derived from phytozome v7.0 (chr-ID scaffold07520; pos 945121 to 945404)
tcaagattcttttctatcttcattctatttcacaggcaagttttgtttttttcccttcttcacttcttgaaaattatgttaacattccattcagcttttagtttctcacctcaaaattctcaaatcccagaaatagatcacttaaacctttttttttattttatttgaggttgatgccccaactttaatctcataataatcatatcccaatttgcctcagatgctttaattattgtgtgtattattacattgatttttaacgtcataatattcttgattagcag

SEQ ID NO: 46526 - DNA, 362 bp, Manihot esculenta
  Intron number 3 from transcript cassava4.1_014222m (locus cassava4.1_014222m.g) derived from phytozome v7.0 (chr-ID scaffold03507; pos 117626 to 117987 reverse strand)
aattcttctgatcgtatattgttacagtggctcaggtttgcatctttcctgcaaatttaatctttctgatagatgaattcatgatcccctctgttcgcgaatacatgtcaggctattgtatttagttcaagtttcctactagtgccgtctctttttcttggcattgaaatgactttgaatctcttctctgctttagggaatgaaacaaaacaaaataaataaattgagttgaaaatatattcaatacaggcaactgtctagtttaggttatcgggtttacattttatgataccttctgtactgaatattttaaggtttttctgacaggtagacgtattagtagaaaagaagctttcagcaaa

SEQ ID NO: 46527 - DNA, 418 bp, Manihot esculenta
  Intron number 1 from transcript cassava4.1_014222m (locus cassava4.1_014222m.g) derived from phytozome v7.0 (chr-ID scaffold03507; pos 118312 to 118729 reverse strand)
aaacccaactgtttttgtcaattcttgatctcggggtaagctcttcatttgcttttctctagtcttcactcttctgtttcattttctgtaatttcgttacctatgcagcttttcatgaacgaacttgcaattagagtttacccaaatcactttccttaatttccaaatctgggttgtgtttagaattgaattaccacacatataatcaattgggtttgattatattatttgaaatgagaaatgggcaatgaagtttggattgaaaaaaattgtttgctttttggtatttagcttttacatacgcaaatgaattgaaaagatgtgggaaaaaaaaaaaaaatcttgctgtgttgattgaaagaagcgttttcagaacactgactctagttttttcttggcgttgaaggaatagatagca

SEQ ID NO: 46528 - DNA, 336 bp, Manihot esculenta
  Intron number 3 from transcript cassava4.1_008024m (locus cassava4.1_008024m.g) derived from phytozome v7.0 (chr-ID scaffold07520; pos 2631570 to 2631905 reverse strand)
aaccagctagatcctgtgcatcgaccgattacaaggttagaaccatagtgttctgtgtttttcacttttcctttcttttgttttggaagaaagaaaaatgtggtggagacagaaaacgatgcctgcatcttaactgagcattatgattgagtctcggttaagttttcacttttccgctgttagaacagccttaggcataacagtttgtcattgttttcctcattttagcaaacaaatattggagaattctaaataattttcatcaaaagctatgttcagattttgatagttctgtttctaggaagtttgctgcacaattgtcaagtacacatcagc

SEQ ID NO: 46529 - DNA, 889 bp, Manihot esculenta
  Intron number 2 from transcript cassava4.1_027984m (locus cassava4.1_027984m.g) derived from phytozome v7.0 (chr-ID scaffold10045; pos 179251 to 180139)
tagaaatctacttggccatttgtcgtagagctaaggtggctttttctcccaaatatcttctctccttctgcagtttatgtttttaaatcggatgctgtttaatattagccagttattttccttgattgtcttaacatatatatatatatacacaaggaaaaacaaattcaatattgcattgtaaataatctttatgtgatcagcatgtcacaacagcacattcctttctcttattgaatgatggtgctgaaaattttcagccttgtcattcctctaccctagtgaatgatagtaaattcaataataatttacttagcttgtagaggatccttctggagcagtaactgtgttggtttctaatttgatgctggtttttgggatagtgcatctctaatatgggtgaaggggagaggttgtgtaggtaggaggttcactatatattagtctcatcttgttcatgagtgggtcctaatgatcatagagttcgagtattaattctggtcctaaacagaaataaatggagaccaagaatccattcagttgagcctgactaatctggggctaagctaggttcagttatttccaaagggataaaatccgtgattctgattttattatatttggtttatgaacttttcccatttggttacaggcattttggttgaatgattcttctttttggtagtttgcaaagaacacagctttgatctttttagtagttgtcatctgtttttcccacatttgggcctaataattacacattcaattctatatcaaggaagttgtatttttcccagaatttgtggttttgctggagtcatctaaaattctcatggattatggttactttgcaggttaaagcaagtatagttacgactgattgtgacca

SEQ ID NO: 46530 - DNA, 665 bp, Manihot esculenta
  Intron number 1 from transcript cassava4.1_010930m (locus cassava4.1_010930m.g) derived from phytozome v7.0 (chr-ID scaffold12946; pos 367764 to 368428)
tgggagtgggaggaagcagcaattggctcttcttggtaagcattctatttggaatttaatgagttcaactttgtaccgtgtttgataagaacttggtgaaatgtatttgctggttatgagccactttagacatttgtatttgaaattggtcatgtccaattatgtgatgtgttgtattcaagaagtcactaaatgtgctattgacattgaaattttttattttcagtttattgctactgtttttataagctattgggagcatttacttaaccttgcatccattaattcttttttcaacacctgatgttatttcatagtcataccaagtacctcttggtttagtgatggattcatgtgttactgtaaaattagaacacaaaatttgggaaaaaaacttaatttgaaatgactatatcaaatctaaaattgagtggaatctctgtttttaatcatttagcgtggagatactgtaagggagaacaagggacttctttcatgcaattctgctgacatgccttttatcttgaagcagctttagttatgtctaattgttgacaaatttgatttgaccttctccctcgttaaattgtactaggtctgtgggaattttttttttccagatctcttaaatgctttgtgtttaactgatttttgtaggtgactgg

SEQ ID NO: 46531 - DNA, 732 bp, Manihot esculenta
  Intron number 3 from transcript cassava4.1_018268m (locus cassava4.1_018268m.g) derived from phytozome v7.0 (chr-ID scaffold08323; pos 4362 to 5093 reverse strand)
ccctatactcttcattctacaggtgattcattctgcctcttacatttcacaaaggggaaaaagaaaagaaaagaaaaagaagaaaaaactgcctcttactgcatttaatatatatagatggaacgggcaaatatttaccataaatggagatgcattcacatgacaattttttgcatcccttccttagttgtaatttttatgacttgttagtctgaatagtgaaataattaaagttcttatctaaatctgatgtcttcttagtatgagatcacattagtgaattaatatgaaatcttttgggaggaaaagattgtctatttgtaccttttggttgtaaaatattatcttattttctttctttggctcccaaggaaaatttgacaatgaaaaatatttatattttattttttgaaggggtaaactacatcattgtcgaggaaaatttctgttttcatgtcagagtcattcagactataaaaagcagagaacaatttcttgctgattttcaatgttacacaaactgcagaaaataagatgtcctttgagaaaaggttatcggaaggatatattctgtaggcattactttccataaaacaaatggtgactgatatacgatcttttgtatttgaaatggagctcaatgaaaagatgctcttttcgggttttacatcatcatggcccgagtaattttctgtatgctgctttaattccttttttagggttttgaggcat

SEQ ID NO: 46532 - DNA, 618 bp, Manihot esculenta
  Intron number 1 from transcript cassava4.1_008830m (locus cassava4.1_008830m.g) derived from phytozome v7.0 (chr-ID scaffold00847; pos 736550 to 737167)
attgcccaaactcaggatctccgctcttcgttatagcatatgaaactaattagatttagagattcacttgaaaccgaaggatttagattttaaactctgaaacttttagtcgacttctttcaggtattcatttaaaatggaaaattcaataataagatttaagaatttttaaaatatataataattataattaaataagtatttaatttaaaattgattaaaattatttaaaaatttatagcaatttgaaagtcttcaatataaaattaattaaaattatttgaaagttaaatatgattaaactcaaaagttttcttgctgtaatttgtttaaattaaaattgcacctttttatatcattagccaaacaatttgttttaatatttaatagttaacactgttgcaattttctttttacatttatatattttaatttttttataaattttaaatatttattcatagtattattttatattttaaaaattaattcagttttattttgtatgaaacacttatgcttctttgctagtgaaacaattattacagcagctaggctggtcaaacttttataagtggaacagggcgaacataaacccatcgtccacttcttttcccg

SEQ ID NO: 46533 - DNA, 992 bp, Manihot esculenta
  Intron number 1 from transcript cassava4.1_024747m (locus cassava4.1_024747m.g) derived from phytozome v7.0 (chr-ID scaffold07374; pos 820 to 1811)
agaccaaattcaagctgactatatgtcagataaaaaccgggggaaaagggatctatttctcaaccaatattctagaaaagaccagagtttaattaaaaaataattttttgaattttgtgaacaagtagaaaaaacgataccattctttacttacttaaaatattatcatgaagataaactaaatgttttagaaaagaaaatacacaaatggaataaagttaatgatataggagatccaagtgaccaatattatgaatctgagagaccacctatgaatcgagcattttttaaaaaggatcatgtatataatggtatacaacctattatacatacacaaaatatacaaaataatgaaacaagagatatatgtttataaaataattggacaaatgtaacattacatttattaggacaacaattagatagaatagaagaaaaagtagaagaaaatcataaagccataacagatatagattatttagaagtaacaaaaacaccatctccaataattcctaaaccaaatactacttatacctcgcaaagatatactaatgcaaaatcatttagtatagatccagccaaaaaacaaataaataaaccttttacaaaaatgataccaccttcacaaaatcctatagatataacaacaataaatccaaaaacagaattaagtgatatgtcaaaactattacaaaaaatattagacgaataaaatactccttcaaaaaccagtacctcagaaggaattaaaataaatgagcccttacaatctcaaagtaatattaaaagtgaaaatactagtaaagacaaaggtaaaattaccattttaacagaatataatgagacctcctcttcagaagatgaaaccataaaaaatcccttagaagcatcagactttgaccaaaattacattcccttaaataccatagaaagacaatataataatagaccagatgacttaaaaattttagatagaaaacaaaagcaatata

SEQ ID NO: 46534 - DNA, 515 bp, Manihot esculenta
  Intron number 1 from transcript cassava4.1_000913m (locus cassava4.1_000913m.g) derived from phytozome v7.0 (chr-ID scaffold03186; pos 128982 to 129496 reverse strand)
gggctttctccttgagtttgggtttggactctcaggtcattttctctctttttactccctttctatctctgattttgtgtttgtgtgaagaatctttgtgatttgtttgtttagtctttgatgtttgataaaatgaccgagtgatttgagagtgctacgtagtgtatgagcaaatctaggaagagcgtttcggttgtgggtttcgtttttctgtttttaaatcgtttgataatgtcaacaacaatgctggatttttctttccccaccttttctggcagtagttcgtttcatgtatcgaatttcaaattcaggttgtagtgatctttctttctttctttttttatttttattttttaaattcactttaaattaaatgaaaaccagagctcaacttttcaccttgaatgcttgccgaaattgaaattgaaattataatgatatatagacggccttatcccaatttgtttttactagactaacgtgtctatattcttattaaaatgttgtccagtccc

SEQ ID NO: 46535 - DNA, 958 bp, Manihot esculenta
  Intron number 1 from transcript cassava4.1_001582m (locus cassava4.1_001582m.g) derived from phytozome v7.0 (chr-ID scaffold04287; pos 55759 to 56716 reverse strand)
aattctgctcctcttctcgtttctggataatcttggtaagtttctctccctttcctctcctcgttcttcttcctttttctttttctagttttctttcaaagcttagatttcgatttctattgtgtgggttttgttctttctgctcatttggaagctgctctgcaggatttctgggaattttgagttcttctacgttgactttgatattatgtttttgtttggtttttcttgggattcttaaatgaagctaagttcactgattttgttggattttggtgattttcacatcatttctgcatcaaacatagattagcaggattttttttttttcttaatcttgcttatattggagcctagttatgttttaatttgatgagggatggtgatttataaagaggaaaatgattatttaataactaagaaaaaaagaaagggaagaaaaatctcatcttggaatgaagtgggctgcaatttcaagtttatgatgtgggtaatctgttatgatgaatatattaaagagcaaatgctaatttgtctgaaagaggaaaagttgctaatatggtatgtcttataatcagattctggtcttatttattgcaattttttcaaatcataattgtgtgttttagattctaattgtaattgatttttcaaatgtggagacaagactgcatgttgaatatgtttctttctgtctaagattgaatcctcgtactgagtgttaatgtctgaattttcatggattggcctcctagccttccttctaattttgatctgtagagatggagttcaatagggaattaaaacaaatgattaaccttgtatttgcatagtgttgctatggcattctaattcctgctgctaaaattctttgtgagattgttctttcgccttttttctaattgattttgttatggattcagacaggagtggacctcttgctacatctttttctgat

SEQ ID NO: 46536 - DNA, 863 bp, Manihot esculenta
  Intron number 1 from transcript cassava4.1_009868m (locus cassava4.1_009868m.g) derived from phytozome v7.0 (chr-ID scaffold07318; pos 99819 to 100681)
aaggtaatagagatgacgaggggtgtttcttcttgataatgaggagggttgttcctttggtggtagcaataacaagggcttttctttcgccgtggcaatgacgagccagcgacgactatgggagaagagaagagagagttcaacttgaggggaaaaggaaaaaggataaggagaagggaaagagtagaagagaaaaagaaaaataagagtatttttaaaattatattttaatccattttctttaattagactttgatttactggaagttttatatgggaaaattttgaatttagatggaattaaattttaagaatttaagtgttgagttttaaaaataaaaaaataaaaaaattaattatattataatttaaaataaaaaaatttcctttaaaaaatttaaactattatataatttttttgtcctctttattttttttatatattaaaaaaacaattttttattaattttttaattatattttcttaaatatattaaattttattaaatattaaaaaatatttttaaaaaatttaaaaataaaataaaataattaatttatatattattataatataaaataaaaaataaataataattttaagataataataaaaaaatataaaaattatgtgatggagtaataattttaacagagctagatagatctagcagaaaagcaagaatagacgagactccaccctacctttcttaacgatggaccccacattcttcccattggttttccgttttccaataaaagttaccacgtcgcagctgagaaaactaaaaaagactcaaaagagagagactctgtctcagctcaaaggcatcaccaacagcggcagatattactgcttcgct

SEQ ID NO: 46537 - DNA, 330 bp, Manihot esculenta
  Intron number 1 from transcript cassava4.1_005538m (locus cassava4.1_005538m.g) derived from phytozome v7.0 (chr-ID scaffold06916; pos 1108124 to 1108453)
caaactctggtttcagaatttgcagtcttcgacaggtgaaaaattctgctatcctttttgcaatgggaagattttatattattatttttaaaacttggattgtttttggaaaatattttatttatttgttaatttgattctttttcttcattttctatctctgtttttttctctccaattctaaagaacacatcgcccatcactcgcatttaagattatttattactataattttgtatttttttttactcttattaattgcctgcttagctgaggtgaccacgtgttctgacaggtggttcgcatccgtgccgtcgtcgacacaaccga

SEQ ID NO: 46538 - DNA, 468 bp, Manihot esculenta
  Intron number 1 from transcript cassava4.1_015635m (locus cassava4.1_015635m.g) derived from phytozome v7.0 (chr-ID scaffold08873; pos 421693 to 422160)
tgctcctgataaggaggtaaacttcttgctgaagaattattctttaactttctagtgttgcttttcttgtacttaatttaagcttatatttctattctacgctattcgttcttgctatgttgttttttctctttattattttttggttaagagtctaaggctagtttctttcttgagttaataaatatgagaggaaaaagtaggaaattatgtggaatttggtgttatcttaattgatagttagcccaaatttgtcaatctgaaactgttttatgtttttgcagcttattttttgctgaatttgtaaccatgttgagaatatgaaatatataaagaatagttgttagttaatatggcggttggtttctcaaaggtatagaatcatgaaggaaatgttagagagtccactttgataatattttggttttgtttccatggtgaaaaataggtaggcaaggtgagcgtgga

SEQ ID NO: 46539 - DNA, 723 bp, Manihot esculenta
  Intron number 1 from transcript cassava4.1_014069m (locus cassava4.1_014080m.g) derived from phytozome v7.0 (chr-ID scaffold07520; pos 2700130 to 2700852 reverse strand)
tttgttgtttcaagcgtcaatcctgaaatttctgcgtaggtatcgctctctctctctctctctctctctcccatttcgttctctctataccctctatgtttatgttgtcaaacacaggagaagaaaaatcagctggatttcgttttcagaagacgatttcatttcaataagtttgttgatttcccttattgttttatgggttgttaatatttgattttgtaggattttattatttgattttacggtgttattgttgctgatttgggtttttcaatatttgaatttgtggatgtttgttattgactttattgggttttcaatattgattttgtggtgctctgattattgattttacgaggattaggataacgtggaggatttacttgtatgttcggaaagttttttggcgttaatattggagatttatgagtttttaatacagattttaagagtaaattatttccttgtagtagattaatgatttaagagtatattatttattgtgtgcaattgtaaactttgtgattaagagggagtccgttgaattaattttgagtttcggttttgcgcttgctcggaatttatgggcagatttgttgttgttgtcctttgtatgaaccctagctaggattttaatatcttaatttctacatttcttagaatttttcgaatctctctaatttctcaggttatcagacgagactgctgaacatttcaaagacc

SEQ ID NO: 46540 - DNA, 842 bp, Manihot esculenta
  Intron number 1 from transcript cassava4.1_007497m (locus cassava4.1_006216m.g) derived from phytozome v7.0 (chr-ID scaffold07520; pos 434230 to 435071)
gctgttcaggtagacattcactattttgtctaatttaattgttttttttttaattagtcctccggttgttttgaaagcaattaatcaactaatttgactggagataaagaagaatagatcaaaacctgatgatacaattcaaaggtattataagaaattgataatactgttgggaacagcttttatgacctgctgagacgtatccctttttaaggcagaaccacagatcatgcttttttcttgagatttagtcgtctttctctatctatgtagcttgcaataaagttcctttagcttcgttggaaatgtaaaattgagatggcaggtgggttttgcttttgttgaccacttgctttttctatttttgaacattgcagttattacctggtcttgacttttgaacaatttaaatattcatatgatataattgagtcttgatcttttccatcagttatttgcactagtaggtggtgtatttatcatactgctaaatttgtttgattagcaaatagggtaatttagcgactgttgttggtaagcattttccagtgacttggttgtccctttctgacaataggatcagtatggaggcactcctccaagtactgcgcatccagcaggcaatggaatttcagtgaatgctggcttgcatgctataatgggttcccaagttagggagcagtttactagtgggaatgactatgctccgaaggttttattcttaacatgaccctgggtggttcttttgtcttagtggatggttatctgattaaccagttaatttcctttctggtcatcttgtattaggtgaggaaaccctacacaatcacgaaacaaagaga

SEQ ID NO: 46541 - DNA, 648 bp, Manihot esculenta
  Intron number 1 from transcript cassava4.1_004785m (locus cassava4.1_004785m.g) derived from phytozome v7.0 (chr-ID scaffold03651; pos 178256 to 178903 reverse strand)
caggattcgtcgttacaattttgatgtaagtgtagaaaattaaatgctacatgcacattgatcactgggagttttcctttaacatgcatgcattttcttttgctttccctagaaaatgactatattttgcatggtgtaagcaaagtatttcatgcatgtctttagcaaaatttatcttttaaaaaacaccctgtatatttttaatatatttaaattttttaaaaagttaaataaaataagacgtgtattttttttaaataacaatttcaaattcgagattgaacggaatatttttaaaattcaaaaattctgaaagtgagcattttaactctcttaatgaatttatttatgtaaatctgaattagtcgaataatggattaaatccacagaaattgattggataaagtaaaaaaatcttgccaactttatctaagaaagctacaccaagaataaaaagaaaagaagagggaaaataaaaaggacgtgaagaggacgatcttaaatcactagcacactacagtgaaacagtgacttgttagttaattagttgcaactgcatgtctctctctctctctaatattaaattcatgaacttggttaaatttttttatatctagctaactcgatgagtaacgtacacaggtggtg

SEQ ID NO: 46542 - DNA, 785 bp, Manihot esculenta
  Intron number 1 from transcript cassava4.1_018288m (locus cassava4.1_018288m.g) derived from phytozome v7.0 (chr-ID scaffold02196; pos 271239 to 272023 reverse strand)
gtaatcgcctcctttctcttcagctccattgtcgggtaagtacttaaatcaattttgcttcttttgttgcttttatttttccttagtaagttatttaattatcaaaattgaaacctcaattatttgctttgatgaatttttttttcctgtactgtttaattagcttttgcatccttaggttgggtcagttttgttggttcactagaactgtagcttagtctgtgatttgacaggtagttgtttgctttacattttgttggttgcattttgttgactgtaaatatttggaacatatagatatacacacctacagcaggaggaacgtgttactctcatttgtgatagatgatgtatatgcagcagacatgggtatttgctttataaaagaggtcaagcaaaacaatgtggcaatgctgagagtattttatttaagaaatatatgtaatgctttcaatacgagttggatagtgggaatacaacaaatcctggtttcagagtttcatgtttgttcaggtagtttgagcagagtgtgtgtggagacgctctgtttcttctttcagttgatgattgatgtctgtaagaaaggtggcccatttgtggttgtaaatttgctatgttccaagaaaattttacatctcttggtttcgattctgttagtctgtatctgatggcagttttgaatgtatatatgtatcattttgtttattacatgctaaacttccgtatttttattttgtttggtttatgtagagctggttatttgctttacttgattgagaggtcaa

SEQ ID NO: 46543 - DNA, 758 bp, Manihot esculenta
  Intron number 1 from transcript cassava4.1_010761m (locus cassava4.1_010761m.g) derived from phytozome v7.0 (chr-ID scaffold08799; pos 778897 to 779654 reverse strand)
ggccactcttgtgactgtggccgtgtcttttccaggtaaataatttctaatatactttaattgaatagattctcagcaaaccctaaatccccatgaaagcttgctcgttttcaaggattttcactttaattttctgtttttcttcttctcctcgctcagtgatcccacatagtaaattcaagctcaaactcatttttcattaagaaaaaaaggaatttagatcgatatttgaaacctaacaaccatttccgttggtggatgacgaattcatgcttgcccgtgtatgtgatccaggttaaccaatggaggtttatgggcagtgcacctctaatgccagaaagagtttccactggctaaatatatgcaatttccaattacccatgtcataaaaaacaaacagttatttttgcatacacagaccccatctctagctttcttcttctttttttttttataagaaaattcatatttaatataggaaacctagtcatataaatccattgcacagatccttaatcaatattatatattataatacgtttgtttcttggcaaccctacacgagccgaaaccttaattttttggatcctcgacttggctgtattaattgccaattttgattattgaaaaacaccatgaatccatcgtttactcacttaatctaacaataataacagtattaaatatcccttgtttgaatcattccatttcttgccttttcagggtggaaagtttcatcgaacaccaagactcttgca

SEQ ID NO: 46544 - DNA, 657 bp, Manihot esculenta
  Intron number 3 from transcript cassava4.1_002391m (locus cassava4.1_002391m.g) derived from phytozome v7.0 (chr-ID scaffold03245; pos 141954 to 142610)
agggtttcgtcgcttgctacttgctgtggaccgaggtgggttctagtgattttggttttctatgtctggaagtgaattggcatttgctttttgggcggataagttatatacatgcaaatgcagatatgaaggttacgattcatgctttttcaacatatattactcttctactctgatgactgggtttcagttctctcatagtgcgagatgagaagttagggattgtcaagaagtattactgtcataggctaggcaatccagagtaggattctgggggtaattttggcttctgggaaacaaagagccaaactaatgtgtagaaaattgcctaagaatccatgagtgaatgctatgaggaagtattttcagcatatagcccgactgactatataatactattgtttctcaaagaaaagcagtaacaaaattcatgggtaacatatagacagcgtacctattctgcttaggttttgcatgtgggtgaaaaacctttagaaatttgtgtgaatatctatcaagaattttaactttgatgctggttttgtgaatttttaaaaatgttttattagttaaaagctatgcttaagcaaagtcaatgactcaatgttttatttatctgatgaacttccaatgtcactgcagatttgttgaacttct

SEQ ID NO: 46545 - DNA, 677 bp, Manihot esculenta
  Intron number 2 from transcript cassava4.1_029398m (locus cassava4.1_029398m.g) derived from phytozome v7.0 (chr-ID scaffold02973; pos 329631 to 330307)
tgggaggcttggactctcttagtaatgtaagtttgatggaggtattgttctttgtgagaatttactcaaatattgtttatgataaggcccatatacaatgcatcataaaatgattataataaaatattacatttctctttgtgttgggtcgttttcaaataatgtttcatgtttcaaaattttctagcatgattttaggatagaaagaggaacatgtctgtagtgcatattttgatttatgtttctgataatggctccaccaaagtttgttaaatttgagccaagtctaactcagcaaaaaattagagaatgtctaaagctcttctaaggcacgttaccttatcccaaacactcttaggtgctctatacatgttaaatttgagcaagttctaactcatccaaaaaatcaagggaggagtgtctaaggcacttaggcacgttatcccctatccatttggatgtgggattcaacaaatatagctttcaaatacactattatttcgtctgatatttctttttagagaacgactggtaatctgagttcttggaaaatgttaaacccttttgaattcccatgattgcatttcatatgactttttacaatttacacaatcctgacctcataattccactaaaatgcagactgaaactcataccaaaagcaagagacacaagga

SEQ ID NO: 46546 - DNA, 557 bp, Manihot esculenta
  Intron number 2 from transcript cassava4.1_004535m (locus cassava4.1_004535m.g) derived from phytozome v7.0 (chr-ID scaffold03602; pos 380814 to 381370 reverse strand)
tatcgatacctatttccaaacccttgaccctgaaggttttgttttctccctactaattttattattatttgtattcttgtttgactgtttctagctttaattcgattcgaataatttcattctgttgtcttgtctttagaaaaatttggaatttaaatttgcttgatgggaactgagaaagatattgtttgatttactaaaacttaatccaaggtaaaagctaagtttttcattttattctcttcttttatatgtggaattcctgtgtttcagctctgttaataaaactctacttcattcttaaatttgaataaacgtaacaaagtatgattcctgtgtggaaatccattgttagtaatggttcttatttaaggagtagctcagagtaggggaaatgcttatggatcactgtcaatgactaattgttgatccaaatttaggcgtttgctctagattttcaaaattagctgtcttttgtctattcttgcaaattttgttgtggatgatcatcagtataccattttcagggattgggtacttggaggccaagaaaattt

SEQ ID NO: 46547 - DNA, 1038 bp, Manihot esculenta
  Intron number 1 from transcript cassava4.1_011827m (locus cassava4.1_011827m.g) derived from phytozome v7.0 (chr-ID scaffold00847; pos 1659817 to 1660854)
tcaccacaatccatttctacttcaggccttttcaggtaaatacctcagtccgatgctctaccctctctttctcttcctcctcatcaaatcggtcatatataatcggtgtctatttatcatttcatttctggcataggcacttttctttctttctttctttttttttttgttgaagcaattttgttttttagtcttatatttgtcatttatgactcattgaaccctagtaattgatgggctaatcgatttcttgttattcaatgctaggactaattctatgagtatttgtcgaatttagccactgacaaatgcaattgtatttggaagtctttcttttttgtgaacttgtaccgtaggtgcatgcattagaattaatggagttgaatttgaaagatattttctcagtttgcgaatgtttattcatttgagtttaacgggttttatttcatttcttattcctacgctacagtaagaaccctgcgcaaaactgttttagcaaggctgtatgcttaatgactgatctgctgttgagaatactgggagggggggggggggagggaatggactcgagatttcattttatatttaaaattttcctggtttgtttctgtattaggtgctatatttttttacttggtaaatggataaaggtcgctcttttaaaattctgattttattgtattttacttttctctgcttatcaaatacaacaactacatgtaatcatatattacctgactttctgagtgtatggattacttctcgagaagtagagacgggtgcaactggggagacggattttatttattctcgccattatatattcttggtttggaaatgcattttgaattaattacatgtaactcttttatccttcttctcatcattacacatttacttcttgtgtttgaagtttgagggcatttctttttaagctatagaaattcaattttgttcacttatattaatagttgtgttgaggttattatcggttattgttcaggttttgaagaaaagggagattgtggtggtgatcaa

SEQ ID NO: 46548 - DNA, 805 bp, Manihot esculenta
  Intron number 2 from transcript cassava4.1_006156m (locus cassava4.1_006156m.g) derived from phytozome v7.0 (chr-ID scaffold03277; pos 11164 to 11968 reverse strand)
ttatattatctgaaagtgttcaaacacctggtgagaaattttatatggatattgttaagaaactactgtttgtgaaattgttgtactaccttttttttttaaaaaaaaaaatcctctttctctggttaaaatatcctaaatgtaagattttatgctttgatgataggatgaatatggggaaatattcctaggaataaaagggatagaatgtaattcaataggtgactgttaatacacttagttacaagttgttaagaggttacatgatcattctagttatacttgggagaatttatatgagtcaatggcaaagaaaaatgtatttttgattttgttgtaatatatattttttttactgattaaaacctgaccttttgaagttgctttaattggcaaagaataaaggtacatggtacatggttattttaacgattaattcgaaactttgctgacgtggcgtatgacatggctttgacgtgggtagggtacaattggagtaactttaaaaggtcaggttttaattggcaaaaaaagtataggatgtaattgcaacaaaatcaaaagtatagattttttttttgccattaactcaatttatatttgtaaatttgttgtagaagttcttagaaatgaactagaatcccattctttcaattttttttattctttgagtcttcttcctatgttgttatctaataatcctgagtatcaagttatgatttaacaggcaatgaattgtcctcaattttaatggcaatttctctttttaaaacagatttgtcggaaattccagctgaaaaacttg

SEQ ID NO: 46549 - DNA, 1004 bp, Manihot esculenta
  Intron number 1 from transcript cassava4.1_001576m (locus cassava4.1_001576m.g) derived from phytozome v7.0 (chr-ID scaffold05456; pos 91021 to 92024)
cttgtctctgctatacttgcgggtaatttgtgttctatttttagtatttttcttaaatttcgtttattagctgttcttttgcactcttttgggtggttctgctgcgatggcagtctagggatgtgattacatttacgatttaatttgctggtattttgataattggatttgggtttgggtttccattatgcgctacattatggttttgtatcgtgtaattgtgcaggaaaaaaagtggtattatgactaagacacccataattaggcatcaatagcaataataatgatcattaattgtacaataccaaaagcagctactggctattgttatttgtttaaaagggatattttatgttttaatttctgcccctgaaagtgttgtgcatttataaaggaagccagattgcagttagatataatattcatgagaacaaaaataataatgaattctgaattattggctcccatgtaattcgtctaatccatgtgtttttgattcagcatattcggaactcagttaatgttttgttgatgtgaataggacccaaaaaattcttgtttattgtgaaagggatggaaagcagaaaggtggtttcagctctgtaatacatatttaggaattgcatgttatattttggaccacttcttgtatgatcaattctataaaattgtttgagtgcataattggctagttcttctgttatgcatggcgcatcttgattagaataggatttctggtatttatgtgtatgagaatgatcctgtctcggtaaaaactatgatatagcatatgcctccattttatgaagaagcaaactcactggtagcattcaacaattgcctataactaaaagttgaaaattttctgtctttactgatagcttcttgaatccttgttatggttttctttttatgatttcaatgggctgctttaagcttatattcatattcatgtgcctcatacaatagatctgcatttgagaattcagtttactgtgatacat

SEQ ID NO: 46550 - DNA, 517 bp, Manihot esculenta
  Intron number 1 from transcript cassava4.1_014883m (locus cassava4.1_014883m.g) derived from phytozome v7.0 (chr-ID scaffold06916; pos 1153380 to 1153896 reverse strand)
ccaccgctctttcccatttagccattcaagatcaggtgcttattctttctccgtgcttttttttcttttctttttcttgggagttgcggaaaaagggttcagggcggtggaagggattattatatggaatttttaaaaagaaaattttgaatcagatacagttgatttaatagcaaaagaagaaagttgattttgtgtgtgttttaattttgatcttatgttttgtttggttgcggtgaaaacgtagaaagaaaaattaaatgatatgacctatgtttattcttggtttgagtttttgtatcattcaatttcaacagcaattagattattagggcaattagattcaaataatatcggcggattttatgactattagactagattgcatatattttatcattttcagaagccctttcaaattaggcccctttttcctcttctaggaaataaacatgttgtcatttatcattgaattcgtccactgggattttgtcttcagggggaagtagaaactaag

SEQ ID NO: 46551 - DNA, 743 bp, Manihot esculenta
  Intron number 3 from transcript cassava4.1_008380m (locus cassava4.1_008380m.g) derived from phytozome v7.0 (chr-ID scaffold11106; pos 404286 to 405028 reverse strand)
agctgtatttttctccaacctaggcgttgacaacggtattgttatttgtttcttgctcttatttgaatttgcacatgaaaattttagaattatatatctaaattataaaatataataatgttgtctattgtttgttttccgagaaagttagcaagaggaaatgcaggaatctatttttctttttttaaatatttgtttaagattcccttgattcttgactggaatgatatcaaattgcaaaaattaaaaagaaataaattgagaataaaggaacatgctctttagatttctttcacttttctgcaatcaaacaatatttttattcttgttcctgacttggcttggtggcaccataaagatttgttaaaccttttcacccagaaaagttgaaggtacctctgaaagtttttctttatgcaaagaaagccaacttttggcatttcctctttttcttttattcccattgaattactcgaatagtcggtgaaaagaaatggtttctagctcagaatcgtggaataaaattagtcaatgcagctgagttatgtttatacagttgtctgaaatcttaatcttgatggtaatgttcagttttttcttgtttcaattagatcctaattgtgttctcttgaaatattaagttctgccgttgtgaccagttaattccctgttgttcattgcttcaagattgaaccattgataattcttttttcaatgactaacaggcttcactgtaacaaaag

SEQ ID NO: 46552 - DNA, 418 bp, Manihot esculenta
  Intron number 1 from transcript cassava4.1_008380m (locus cassava4.1_008380m.g) derived from phytozome v7.0 (chr-ID scaffold11106; pos 405824 to 406241 reverse strand)
aagagtgataaaaagctgaaacccagaaagttaaggtactttgttgataactctgatgatgttaaatttgagttaattacttgtactatctctacctgtcttttcttgtgaattctttttgtcttgaagctattcctaatgctaaagagacataaatcaacagagattctgtgcagaagcaagctgtttttcttctcttgtacatttctacaaataatttaagtgcattcatgtttacatgtcctctatattgtattagatttgtaagctaatatccctttttgaaatgttctgtgttaaggcttgatcaacaatatactagtgtacaagctttttgacttgggttctctctgaaatctaacaatcttcttgtttttttgcagccttttcctttttggttggatttgctgtgaaggaa

SEQ ID NO: 46553 - DNA, 636 bp, Manihot esculenta
  Intron number 1 from transcript cassava4.1_002822m (locus cassava4.1_002797m.g) derived from phytozome v7.0 (chr-ID scaffold02633; pos 68370 to 69005 reverse strand)
ggtgcttgcgagcggcaatcataatcaaatactctgtgagttagtgcttaattttgttataattttttatgcactttttttttggtgatttgtccttgaggtggagcgttataactaatgtgtggtagtgaataatgttctttgttttccctctttctttctttcttctttttccgcgtcctcctcctcttcttcttcttcttctttttttaagttgctcaattcccaaaatgtaactgaccgagcgatattggtacatttttgttttatcatgcatgtgaaaatcttcgttttttaggggagtgtgaatgttagaattcttttgttgtaatatttaaaaaatatttttttctttaatattcctgtataccatgttttgcctagcaattttttttatttcattttctgggatattaaattggttcctcagctaagttataagtgctgtcttgcctattaattttgagcaattttggctttatttatttatttatttttacttttgatgttgtcctttggcctgtaagtggttctctcattcagttgtatatttgagtgtgagatcatttgttgctgattgcgtgttcaacttttatgtgttgcagaggattgtgaaaaagattttagttggaaagg

SEQ ID NO: 46554 - DNA, 514 bp, Manihot esculenta
  Intron number 2 from transcript cassava4.1_000232m (locus cassava4.1_000232m.g) derived from phytozome v7.0 (chr-ID scaffold11378; pos 333222 to 333735 reverse strand)
aaatctatgtgagtatttgcaagcaatagataatttttcctttttgctggttgggggcagggtaaataggtttgtttgaatgtgcacttttttgatggatgtgagatagattgattgtacaattttttttttcaaggatcaacatataaactatatgcatatcaaaagtaaagttttaaagttggttcaagtataaagagctcaacatctaaaaacctaaataggataaaattgggccaacttacccgaccttttcatgtaaagagaagagaaagaactagttgactttaagcaagccgcacaaagcagcaacacatttttaacttttaccaaaaagagggttcaataattaaatttacgaggatttaatacttgaccccattttttatgcacatcttcactggatatctttatcttttttcctttaaattttccctttctgatctatcaaagcctaatgtactaaatggtccctccagacttacacagggaatatattaattgctgtgaatcc

SEQ ID NO: 46555 - DNA, 779 bp, Manihot esculenta
  Intron number 4 from transcript cassava4.1_000489m (locus cassava4.1_000489m.g) derived from phytozome v7.0 (chr-ID scaffold04457; pos 224209 to 224987)
atagcacgaaagcctccgacttagtatgtttctcatatataaataaattttgggatcttaagtatggttaattggttattggatttatatttaaaatgtaattgattataaacataagttgaaaagcatatatgagaaatttttattgcttatccatttataaacaaatcttattaagttgtgattctatgtgtgaattcaatgttttgttattaatgtgttctacatacattacatgtccagtgttgcattaataacatatgcactattagatgatgggatagatatgctgcttgtattcacatactttaagtgacaaggcatgttggacaaaccatatttatttttctgaaaaatagcggaggacttggtagtattaaagattttcctagtgtagaatatcaaataaataattatttaaacttttttttttatcaaagtaggggaagttagattccaaatgttttaatataaaagatggtgtatattttcttctaatctaataacaataggagactagggcctaatgaaaattttattttgatttgccaaaagacataaaagtaatcactatggcttgcatttatttgcataaaatcttgtttgcacaacaaatgtaataacattgaagaatcaaatgtaattggtgctggaacactcattggaaacataccatataatatctctctgttattaagattggtttttgcataacattatgccgtgtttgataattctgcttggaaacttggttacctacatggagtagggcaagtcag

SEQ ID NO: 46556 - DNA, 571 bp, Manihot esculenta
  Intron number 1 from transcript cassava4.1_018723m (locus cassava4.1_017499m.g) derived from phytozome v7.0 (chr-ID scaffold09705; pos 62818 to 63388)
cagaaggttagaatgcttaactatctctttgattatgtggctatttgattcttaacaagtgctctttgattatcttctctgtctcaataagaagagcacattctataactgttagcatgcatttccttttcctcttttcatatttcgaaacttaaatttcattattttatgaaaaataatttttatttttatttttatttttactttttttgcattttttgatggttgagtcattctgaaaatgagtttgggaatttagtttatcaaatttggtaaatgcaggatccagtcatgagttgggtgcttaaaccaagagcacttaacatcgtttggggaaatgaccctcgctattggaagatgcctgtcgggtgagaacataaaaactttttcccaaattttttatggaaaaagtatcgtgatttagtaacggatatgcagatctgttactaataatgatagtgaaaaaatatttaaaacttaacctatgaaaagttagataaacttgctctcaaaaacttaaggcttgcactttgcaggaaggaagatccagcagagttactgcaggtgtgtt

SEQ ID NO: 46557 - DNA, 927 bp, Manihot esculenta
  Intron number 1 from transcript cassava4.1_006530m (locus cassava4.1_006530m.g) derived from phytozome v7.0 (chr-ID scaffold11998; pos 1522995 to 1523921)
aaagtgcagaagatttttgacgatactgatttcaggtgacttttcaattttcatgctctgtttctctctgttttattggattttactctttttcttcagtaaattaaataaataaatgaaaggaaattcatcatcaatcaatttcaatactgtttttatctaggatatgattatggttactcattgtccttagccaaagcaccataagatgataattaaatattaccacttttgaaaaagtgagcaattatagactgcttttacacagattaatcttatcttctacaaacataacttttcttgcacttccttcacattctaatggagactaaactcatttcttgaaattttgtgcctgagatttaagctcaagctactaattgggtcttgaaattctaactttgttatgatttctttgacattttgcactcatagacttaaactgtgtagacatgtacatcctctaaatggatttttaaattaagagtatgattgagatatgaatgaaagctaagaaaagtttgctaatgactattgagtaaagcattgttttcttttattagaaaagcaaaatgatgatatggggtagctcagtctagactagctgtacattggtagagctgaaatttaggtatgctaaagttatttaattattgaaacgctttaattgaggctatacgtgtagcccttttccttaaaaaagaagcagtcaatgaaagtttaaacaacaagaaggaaggagacagaatgatgaaatatatccattataatatttaatattttataacccataattaactaatcctactaaacccttcagtcaaacagtgggtagtcaataattaatgatttaatggatctcgatcttcaagaaatcccaaatccttgattgaaaattgagaaaagttttacatttgatttgcagaa

SEQ ID NO: 46558 - DNA, 980 bp, Manihot esculenta
  Intron number 2 from transcript cassava4.1_030208m (locus cassava4.1_030208m.g) derived from phytozome v7.0 (chr-ID scaffold03735; pos 409584 to 410563 reverse strand)
attcgcacataattaggtaaacttatcaaattttcatatttactttgtttgagaacatttatgttgaaacatagacactcttctgtttgcactcctttttggtattagattttccgtttcttttgcttgccacttttattcactttttattataaatacacccataggcctcttcttggatcttttcctatatacatgagaatcatatgtcattgcttctttcctcgattagcttattgtcttgctttatttccatgaagagatgggatcaaaagaaaaaggggagaaaaacatcgtgaaaatggtatagttgatctgaatcatttgaactaattttagatggtgaatcatagttcgtgattcagagtcatgttcaaatagctttactctaatcatctttactgagattgaaaattgcttttttgacatagaaactccctttatatgttattgcaaagagttacttttatggctataacatgttaagtttaccataaaaatgaacttttcaatggcctctagtcaacaaattcaatataattcttttcttaataatagttccaaaagcaaatgctaaatagacagtaaaattattgaaagagacactaaactgtatttgttaaaactatgttacatttaacatgtataatccatcaaattttcttttctcgtagtaattgctgcgtgatgttgatggtataatgcatattagcttcttttggaaatgataacatgccttaacatcatatgcagatatggttgcttaaagtaagaaagtgtcaacttaaacagtatccaagttctaattaatgtgccgtatatttgcttgcatattatcggacaactaagtcattttgccccttatccttttaaacagaacactggaaatgaagaagcaatatgattgattgctctagtttatacaacttcatattattatatttgcaggcaggagtctgaacttgtcgacaaaattgtca

SEQ ID NO: 46559 - DNA, 821 bp, Manihot esculenta
  Intron number 1 from transcript cassava4.1_028684m (locus cassava4.1_028684m.g) derived from phytozome v7.0 (chr-ID scaffold02817; pos 221035 to 221855)
atataagaaattgcttagagtttaagagtagttgtgtaggaattgcgtatctttatttctgcgatagttggcttttatactgtaagagttcgaaattatttataatatttttcggaaattcagcaatgatgtggccgactcgttgataaggaatctcaccggctaattggttaggaattacgtgattacaggcataaagagaatttgttggattgtagcctttaaccgtaatgtaaaagggtctgctgaattgtagtctctaacggtaactttatgtgaagaggtcgagtattgagtgtccaggttctgtttcgacaaagagccgaactgaagccgacctgaagtgttcaggttttctgtcttgacgaagagtcaaactgagaccgacctaaagcgtccgggtctttttttcccttggtgggatcaagtatcgtctgatcagactctttccatgtaatcctgtcttcgagtgccggtacaaggccttctttgggcgattattatgtaatatcaatgagtaaattaattttagggggccaataactaaaattattttaagtttttttgtgggaatccctatatatacaagatcattttagaagggttgggagggcatggctcccacttccccctccccgccctccccaaccctacccctgctaatggtctattagtagtttctattgtaatcgtttaaggcatttgcttttgtaattttttatcctgttgatgacaaaaatgataagctactgcaataaagcagaagtgacatattcttggatatgtttttgacggtgggattttatcacatgcccagtcca

SEQ ID NO: 46560 - DNA, 293 bp, Manihot esculenta
  Intron number 1 from transcript cassava4.1_011391m (locus cassava4.1_011391m.g) derived from phytozome v7.0 (chr-ID scaffold04043; pos 276491 to 276783 reverse strand)
caatcatccctctcccaagttctgcactttacgttgtaagtacccttaaccctcagaatccatttccatttctctacgccgcttgctttgatttttggtctttagaaaattgaagtgaactcttaactgcgctacagttaattacggtacaattgaaaaaaaaaatagtgataaaacggattagatgttttttattattggactttagctaagaaaacatgcttatatttttttttttgtcgaaactctttatttttttgtgatttatttttattattattattattctgtag

SEQ ID NO: 46561 - DNA, 672 bp, Manihot esculenta
  Intron number 1 from transcript cassava4.1_015128m (locus cassava4.1_013831m.g) derived from phytozome v7.0 (chr-ID scaffold02658; pos 62503 to 63174 reverse strand)
actagctaagagcagctgcagacaaattaaagaaggtgatcttctcccacatctctctgtctctgtctctgtctctctttctctttctgaagtcatcacttgcttttcattcctttccttctcaatttatggatgctgctccatggccacaggtgggtagaacactcttttttctttttatatttgtgaattctatggttcagattttagggttaattaacctggattatgctccactagctagttaattagttttaagaacgttgtggatttgttttttcacttaatgtgtggaaagtgcaagtccacaacttatgtctgaattttttcttttcaagaatggaaggataaagtttaattctttcggtccttgaagcctgaaaaccctgcactttttctttcttggccttttttgcttatgtgagaactcaaaaggataaggaaaagctacaatttgttattatcatttgtttttttctcctctctttccacttcagttagttctgcaaaacacaaaagcctggtttgttttctttgatcagtttgttgtctcctaagaccttgtcttaataaggcctcggagctccatggtactcctgtccgtctaatgtttatttccttatgtcatctctttaactctagggtttgcaggattttaaattagtaaagccc

SEQ ID NO: 46562 - DNA, 622 bp, Manihot esculenta
  Intron number 1 from transcript cassava4.1_028190m (locus cassava4.1_028190m.g) derived from phytozome v7.0 (chr-ID scaffold05236; pos 16192 to 16813)
catatttctaaaaacctattccagaaaagatcaaagtatgctcaagaaaaaatattttgaattttgcaatcaagtagaaacaaatataccattttttacgtacttaaaatattttcatgaagaaagattaaatatattagaaaagaaaatacataaatggaacaaagtaaatgatataggagaaccaagtgaccaatattatgaatcagaaagaccaaaaatgagtagaacattttttaaaaaagatcatgtatataatggtatacaaccaattatacacacaaatactatacaaaataatgaaatgaaagatatctgtttacaaaacaattggacaaatgtaacattacatttattaggaaaataattagacagaatagaagaaaagatagaacaaaatcatgaagccataacagatatagatcatatagaaataccaaagacacaatcccctataacatataaaccaaacactacatatgtttctcaaagatatactaattcgagaccatataccatagatcccacgaaaaaaccaataaataaacctttcacaaaaatgatacctccatcacaaaatcccatagatatagtcacaataaatccaaaaacagaactaaat

SEQ ID NO: 46563 - DNA, 982 bp, Manihot esculenta
  Intron number 1 from transcript cassava4.1_005123m (locus cassava4.1_005124m.g) derived from phytozome v7.0 (chr-ID scaffold06715; pos 212227 to 213208)
tctgcttctgcttctgctctgttttcaggaggtgtgtgagaatctcctcttccctttttctgcttttatttttgtattgaaaatcagagaaacaaagtccaaaagcaaatcgtttaatgatttttcttgtgctttgattgtttgttgcaccacctataggttggttattggaaatcagtcttccccctattagaatttacagtctttgatgttcttttttctgcttggttgctgagaaaaaagtggtgggagggaggaggaagaaagtttacttctcatgaaagatagaaaaaaaagaaaagttttggccaatttattgtttttttcaatttcttttcaaaactgaaacaatctgttttcttgggtgtaaataaaaatcttttgatcataattatatctacctgattgtacttgttttccaattatttttagttggcagtttatttcagtttgccgggtccattgaatatacaagttcataactcaaatctttttgtggctcatagttcagattcaaaagtacttgctcagatctcttttctcgttttcaatctgattgtttatctcttttactggaattatctatattttctttcttacttcattaccatttgggaaggaagaggaactgcctcttttactcttgggacccatcagtgtggtgtatgtgggcccctgcctgtggaaatgtggccatctatctcccataattttttgttctgtatatgcatttatcttgctgatgtcgatgaatcctatcttgtgattgttccaatttttttgttgttttttcactagtcaaaaatgggggcacctttaatgtgtgcattagaagtaattcaactgccttcacaattgtatttgtttcttgtatagttggttttgactattgtattcgtgacttcaatattattattgtttttttaaaatgtatattcttcagggaggagttcaaaccttggtagaggaatcagcagatata

SEQ ID NO: 46564 - DNA, 495 bp, Manihot esculenta
  Intron number 3 from transcript cassava4.1_000801m (locus cassava4.1_000801m.g) derived from phytozome v7.0 (chr-ID scaffold00847; pos 211498 to 211992)
aacgcttgattttatcattatttttcagtataaatgtaagctgatacctattacctatggtgtgcaaatgttcttttaagactagatggaaaagttttgatgcttgtaaatttgagtttatctttctaattagcttatgttgttgatgtttaactggaactttaatcctgggtaaggactagccaagggataatttatttggcatagctgcttgcctctaatttgttgtttgtgctcttcatattttgaaattcttcagcttgattaaagcaccatttgtctaaaggtttttaactagctgctagagatagtgatgatatgattcttttttcttcaagtacttttaagttggatggagagatataatttggttctatttttaaatttgccttttttcataaaaattaattttatgtttttttaatactcatgccattaaaaatctctttacaatttgaaggttggacctggttctgttcttcgaggacccttgga

SEQ ID NO: 46565 - DNA, 413 bp, Manihot esculenta
  Intron number 1 from transcript cassava4.1_011778m (locus cassava4.1_011778m.g) derived from phytozome v7.0 (chr-ID scaffold10689; pos 100179 to 100591 reverse strand)
actgcttcgtcaatgtaattcttttctcttctttgcttgtcatataacttaattatgagtttgttaagtattattgttggaattgttttcgagtgaaatatcttaaggatatcaaaaaattaatttaaaaattttcaactcctctgaaatcactctttgattcgaaaaataaatatataaattaataatataattatataattaaaaaataaaaatataaaaattaatcatatatatggtaaatagattaagtctctatatatgattgcttggttttatgtgatatgtgataagaagttttccattgacaattttcttcatcaagtcataaactactataattggatcaacaaaattattttattttatttttaatataaattggtagcttaatttaaaatttgatgacaggg

SEQ ID NO: 46566 - DNA, 440 bp, Manihot esculenta; identical to SEQ ID NO: 46091
  Intron number 1 from transcript cassava4.1_016139m (locus cassava4.1_016141m.g) derived from phytozome v7.0 (chr-ID scaffold09427; pos 40545 to 40984 reverse strand)

SEQ ID NO: 46567 - DNA, 854 bp, Manihot esculenta
  Intron number 1 from transcript cassava4.1_004045m (locus cassava4.1_004045m.g) derived from phytozome v7.0 (chr-ID scaffold07351; pos 606310 to 607163 reverse strand)
gagaaagaagagaaaggaggcactgagttctaaaggtttatttattagcttcgaagcacatattataataactattccttttattttattaattcaaattccatttgttccaggttatttattatttattctctttggtgacgtatagcgttttgtatgatatcttttgggggggctttgtctgaacatttgaagttgttcgtttctgctcattttcgtattccgatttgcttttcagttttgggttttagctccagagatggttgtttctcgtcccttttttttttttttttgtaatatatgtattaatatgagatttgtggattggctacaatctactgatttttgaggatgatttttggaattggaaacgatctttagtggggacatgtgctgcgtgcttcatgtgggtacccggtgatattttgtgagtttcagctgaagaggttgatattcatgagcctctcttagaggaatgaaatgtagaggaataaatgcctctataacatacgcgaagctcctttgtacgcatgcttataagtccatgatggaatagcatattggaaaaacgtttaaattcttgatatctttgttatgtcaagttgtcccttttgaaattcagctgttcaggtgattgatcatacttgaatgcatatgttatcacttcaaattttattctgatgtttgtccaatctgacattacttgatgacttttgtaaagctgctgtttttatattgataattattactttattattattgtttgattggtctttccctattattgactttctttgttttttgccaatttttttctaggtgatcataacactggcgcaccccaggctcagcat

SEQ ID NO: 46568 - DNA, 682 bp, Manihot esculenta
  Intron number 4 from transcript cassava4.1_009986m (locus cassava4.1_009986m.g) derived from phytozome v7.0 (chr-ID scaffold00847; pos 2028243 to 2028924 reverse strand)
aaggtaggccttctttcaagctcaattactaatgtgtacatctttagctttattggtaatctaaaccgctaagggtcaaaatatcaaattgttattttgtggtagcaaaaacttcaaagaatttgctcatttctgcagcaggccatcgttttggtacatgcttctaaaatttttgaagaacacctttgatcagcatgaaaatgataaattattcctgagaatgatagaaacataggattcttgaataagatagcttaagaggaggttggagtgtgcattgcaactccctcccatttaagccttgatttggatttaacctatttcatttcatttatttcatacttttggatcattgacattactgttactttgacaccttaattctctttatttttcgactttcaactggttaagcctcacagttgttaattagtaatcagtgatattgttgctagtatatttcccaactttcttgattatgtacaggcatggaattgtaattactgttatgttgaaagctcagttctctttgtttcaacaattaactttattaatgttgcttgttgttcagattatgcatttctgccattatttaccacatcatgatttgtcatattgtagcttatatctcaactgttctttgtgtacagggagagttgaagagtgcaaaagcttttttcag

SEQ ID NO: 46569 - DNA, 1009 bp, Manihot esculenta
  Intron number 2 from transcript cassava4.1_017072m (locus cassava4.1_017072m.g) derived from phytozome v7.0 (chr-ID scaffold06916; pos 826987 to 827995 reverse strand)
tctccagtctgcatctagtgagttatttctcaattatctgatgcaatatagttaaaaaaacaaaacccttttcttattttaaggatttgatcattattgttcaagaaagatatttgattgtgtactcaattgactgatgatgtctctttccggtttgttcttggattctaagattatcgagtagttgcaaaaaagaactctcacaagcaagttcgcttaataaaataaataggttttaaatatggaaaaaccacaagaaggaaatgataacatattaaccaggagtgaagatgaataatttattggctggtttatctgcaataagatactggcaactgtatattgatgtggccattactttatcctgcaatatggtctggatgggttcctccatatactggaacttggaagggtgattagttttcaaaatcttggcgaataacgatgtgactataggtgataatggctttgttttctgaattctgattgtatatcagtagtggcagttttacatcactgtgatctcggcctcccatgtgcaagcaaatttaggaatcaatggtaattatgaaaatttatgtgacaaactagcaaatctagtgctggagatatctaatgcattttccaagattatttaatattgataagcgtatctgcaatgggattgtgtgattggagggagtcaacagatatgttattgctgattcttgtgaagttgtcatctatgacccctttttgtattcctctcttctcctttcctgatagatgatatatgtaagttctatgcaacaaaataattagaactccatgaaacttgccaatctctgttcattggtactgcacttttactgatcataattatgcatattcttagacattgatcattgatgaattaatttcacgtggctctatgaattcagttgctttcatttagtatgatattttaaattgtatactaacttgttgtgagacagctgattttgatttgacagggcaactagtgtggcct

SEQ ID NO: 46570 - DNA, 763 bp, Manihot esculenta
  Intron number 2 from transcript cassava4.1_012398m (locus cassava4.1_012398m.g) derived from phytozome v7.0 (chr-ID scaffold03741; pos 426390 to 427152)
agaatctggttaagttgtatggttgttgtgtggaagaaaataatagaattttggtttatggctatcttgagaataacagccttgcacaaacacttttaggtaaattaaaaattattctttatttgagtttattaattgcttaggtagtaattttttttccctttaaggtggaagccatagcagcatccagttcagttggccaacaaggtgtaagatatgcataggtgtagctcaggggcttgcatttcttcatgaagaagtccagccacatattgttcatagagacatcaaagcaagcaatatcctccttgatagagacctcatgcccaaaatttcagattttggtctagctaagcttttcccagccaacatgacccatataagcacacgagttgctggaacagcgtaagtttgtgcactctatcatactcccttaatatccatgacgtttaaacatctgctggactatctttacagatatttccgtgttgtatatatttcacgtgaggatcatagaacagtgatccttcactgtttaaggatggtatattattattctagtgatttatcagattcaaatttagtttggagcctgtcacaacatgctatctggctcagttaaatgtgataatgtgaccacttgttgacatagcatgatgtttgattaggatagaatattacccagaaaccatattttctttttctcttatttgagtatgtgctgcccttttttatttatgtagaggttatttggcacctgaat

SEQ ID NO: 46571 - DNA, 512 bp, Manihot esculenta
  Intron number 1 from transcript cassava4.1_033362m (locus cassava4.1_033362m.g) derived from phytozome v7.0 (chr-ID scaffold05782; pos 51201 to 51712)
tattttctgggaagtcaagtaacttaactagttgggtaagtaatttacccaacctccatagaaaaaaagaaaacccttggctttctggaaagtgaagaagaagaaatgctaaccaaacagaaacaattttcacaccttttgaaaacttcaatttctctaactgagttatccccaaccaaacatagctgaagagtagtcaagtgcatctgaatgttctaaactttatacccaacatagcaaatatgaataatgttcttattatccatgaattattgaaggatcaaagtgtaaacgagattattatagactttatatgcttctttgtgttataaactcaggcctttgagtgatacaataaatcagttataattggaagctacgtatggctcaatggatatgtgggattcaaagtaaacaaattgattcaacttgatagggttatgtatagggtgctataactttgttacccttatgtaggttcttgagaagattctaaaaggtgtggagaactt

SEQ ID NO: 46572 - DNA, 410 bp, Manihot esculenta
  Intron number 2 from transcript cassava4.1_007135m (locus cassava4.1_007135m.g) derived from phytozome v7.0 (chr-ID scaffold02421; pos 629797 to 630206)
gctccggtattcgttctacggtctggaaggtacttcctctctcttccctcttcctctgtgtttctcttgttctctcatttctttcgtaatttgattgaagtgaattattgttttcaagttgctcattttctagctttgagaatatgaaggaaattgggattttaggttttctgtgttttttttttaatgatttgtcgtaattaatttttggagttatcaataagaatttcacattcaagcttggtgcctttttctctctctgttggttttttcgtttgttttggtttggggggggggggtttgttgagcaactttaggatgaatgacctcatggtaatgtgccatagttacttaattttcaattgattttggcagctcttactggggtatctaccagctgatcgctccct

SEQ ID NO: 46573 - DNA, 886 bp, Manihot esculenta
  Intron number 1 from transcript cassava4.1_032027m (locus cassava4.1_032027m.g) derived from phytozome v7.0 (chr-ID scaffold06701; pos 246611 to 247496 reverse strand)
tttcagacgtggcagcctggctctgttcatcagaggtaaaacttctgtttggttgcttagaaaatatccacatatgctctgtaaaaactataagattcatacatttcctgttggtcattagcttctctaattatgctgattgacatttgatttttattttttcacaaataagtaaaaagagtaactaaggaataatggaagaagtgtaacaatcatgtactacgtaatggactcacaaatttaagcatgcatagccaattctgcaactgatttccatatttcatttttcatttttccagtcttatttttatactgatttccatttctaaagatcatcaaatttcttttgattatatatttaatgcattaatggagttttacataatttggtttggcatcttgaaactcgcattgatattggcaatcagatcaagtacatacatttatatcttttcctctctaatcttccaattgcaattatgttcatttatttagtttgtctggtctttcttggggttgagtggttggggtgtaagttttcaaagaggattctttatctggatttggactcaaaatcttgttttgcctgcatcactttatctctgatttggcaagtagtcaaccgtttttgtttttttcagtccttgatttatttctgtcggcattcaccttttgtcttaacttcgtttaccctcacgtaataaccttactttttatttttttttatttgataattataatgaccttgcttttaatgattctgtgttactgtgtttcaactttactccaaatttctagacgttccaagtaaattcctgccgatgaagtaccttttaagttgcagtaaatcttgaatggtcctacaatgttagttttctatgggcag

SEQ ID NO: 46574 - DNA, 901 bp, Manihot esculenta; identical to SEQ ID NO: 45727
  Intron number 2 from transcript cassava4.1_010958m (locus cassava4.1_010958m.g) derived from phytozome v7.0 (chr-ID scaffold07520; pos 2028229 to 2029129)

SEQ ID NO: 46575 - DNA, 786 bp, Manihot esculenta
  Intron number 3 from transcript cassava4.1_008884m (locus cassava4.1_008884m.g) derived from phytozome v7.0 (chr-ID scaffold03489; pos 67434 to 68219 reverse strand)
gtttggttgaaggtatactgaaaaaacttttagaaaaaaaacttgtttttctggatcaggtattatctttagctgcataatgcttgcaagatggttgtttcaatatgtttttatcacacatatggaatctactggtttattagtatcttcttttggctggttaagctggatttggtggaaatgctgctactacattcaatattgcctgctccaaatagaaagtctatttccgaattgtttccttatagaagttggcatttttaaaaaaaaaaaggctatttaccagttatgttcttatagacttacatccttaaattaattgaatgctctttaggctttaagcatacagatgccttggttgggttaatgccgcacttttttcttttcccctcttttttataatattcattggatgtgctgcttttggataaattaatagtgggatgggatgcatacattttgattaagcaatataacctaatgtgtagggcaaagcacaaggggggggggattcttgtactattggaaactatatacaaaataacaaatttccccatcttttatttcactttcatgtagtctttagatatgcttgtgctttgtttcatattcggtggccaataatttcttgtgcatataaaagcagaataatcagtagcttgtgtaatttttcccctttattttccatcatttatatatattactaaattatgaagtggtttaccatattttatctgctatctttctgagaacagaaccctctgccatatcttgctcgctatcctg

SEQ ID NO: 46576 - DNA, 405 bp, Manihot esculenta
  Intron number 1 from transcript cassava4.1_013864m (locus cassava4.1_013864m.g) derived from phytozome v7.0 (chr-ID scaffold08446; pos 56367 to 56771 reverse strand)
ctttaaatctctctgattccaggtcagatttccatttatttgttcttcatttattgggtatttttctttttcttattttttttgggtttatcatgagattctatagatctttattcatttctttacatgggtttgctgttttaactatagtttttaagatctcttatgtcttaagatttgaggccttggtatttgttgttttcttattgattaaggggttttagtattcgtagctgaatcttttgatatcttttgttgcagatttagcgatatcaactgagtttgcaatagattttagtaggttttcttcgtaatattggattcctgacttgattagagacctgggattgagttgagcaattttgtttctttatttgcgtgctcttgttccgcttattgagtcca

SEQ ID NO: 46577 - DNA, 675 bp, Manihot esculenta
  Intron number 1 from transcript cassava4.1_023766m (locus cassava4.1_023766m.g) derived from phytozome v7.0 (chr-ID scaffold06609; pos 540718 to 541392)
cttttgagaaattagagaaggtattaattcatcattttttccactctttttgaatttgatctcaatgctgctacattattaatgagaatggatagtgctccctctctttttcatatattttatttattcattcatccgtttaccatctcttttgtttgtataagattttctttgggaaatgaaatgcgaacatatggagattccagtattagtatttgtgatgattgcttccgatattatcatttctatgggtaagtgagagaaatttcaggggaagtgatagatatggcttctgaaagatttagaagtgttgagttttaaaacttttatggtctcagcctttcgtggagcattcttaattaatctgatttacattgttgttagaatatggcaagtttgttgaaggctttaagttctagttaaattgtgctcattgagctataaattttcttcgcaatgggtgttcaacattatttgccttctgctgcactgggataagaatcaatgcatgggcctgaatttaaatgcttatttctacacttctctttattatttatgttgcaatgggtggttcaatgttcatttttcacatctcatgatgtctaaaaagtgtcatttgcaatatctgccatacatatagatcggacaaggcacatatagcagcgtgttccgagc

SEQ ID NO: 46578 - DNA, 286 bp, Manihot esculenta
  Intron number 1 from transcript cassava4.1_012202m (locus cassava4.1_012202m.g) derived from phytozome v7.0 (chr-ID scaffold04457; pos 196856 to 197141)
ccggcgcaggggcggctgccggtacgtttttaatttatattttccccgttttttgttctattatttacgtatactctggttggttatcaagaaaattgcggaaagaaaagaaaacattttgatatgtggtcaagcgatagtgtaaatcgagaatttggaattgtgactgcttttctgttcttgatttacacagtgtttgaatctggtgatttttatcgtcgtgttttttttttggtgtacttttgttgcaggagttattgctgcgacatttgtgtgtcctttagac

SEQ ID NO: 46579 - DNA, 1001 bp, Manihot esculenta
  Intron number 1 from transcript cassava4.1_013494m (locus cassava4.1_013494m.g) derived from phytozome v7.0 (chr-ID scaffold03603; pos 517 to 1517)
ttttgcttctaccggcgaggtacaaaggactctccctatgtatctacctctctttacatatgtatgaatgaaaatatgattattattttgtgtatattgttttttttcccttttctttgttaatgtatccatgtatagatgtgctgattaactctatcatttgaatcctgggtctgctgtgtatgtttatatcgtggtggagctgtctctttggtttttgcatatgtatatatacatatatacataatgttggtaattcagtaaggaactattttatgattgaaattgtgggaggcgaatttgttattggttgcagcatgtcttgataaggctagctttgcacatatcatggcattgtatcggaaataaaatgaaggaataaaaagtatgtcagtgcaatcctggtgtatatgtcacggtggcgtgtaaaagaagatgtgctggcatttattcttttgacacgagaggaggatttttatgaacaaactttgtgcataattggaagtgtttcacaaagcattgtaattttatatgataaacaagaataatctcttgttagggtataaatataagttgcacatagagatgtgctatttcaatttgattttgtggaggacatattgagccatcctaagtaaggtctttgaatattatacttaggaagtgatttgttatcacctgaataggttgagccaagcacaaatacaacatgtggacttattacgcaatatacatgagattctattccaaattcatttcaagggcgagccacacaacactaaaatttcttgtgaatgttaccaagcacaaatacaacatgtggacttattacgcaatatacatgagattctattccaaattcatttcaagggcgagccacacaacactaaaatttcttgtgaatgtttgtttgactgactaccactcatttttcctgaccaatgacggctgttttattttgcacagattgcttccattaaggttattcgcaataagcagac

SEQ ID NO: 46580 - DNA, 765 bp, Manihot esculenta
  Intron number 2 from transcript cassava4.1_016020m (locus cassava4.1_016020m.g) derived from phytozome v7.0 (chr-ID scaffold04003; pos 94568 to 95332 reverse strand)
ctctattggtgcaggagaagttcacattcctagaggtgacttttcttgaacagtgatctcgtacattcaacttttgtgtgtgtgtgttttagggtgggggggggggggacttggagctatgctggagtgctggagttagcttgtgtaaaagaagaatcttttgtgcttcgaggtttcatatatgggacatgttgcttgagtgcatttgatggtgtttgttgcatggataaccatagaagaatcaaggcctagtaacttggtaatcccatatgaaaaatattagctgtctaagaatcattccataaaagataatcatagtaaaagaatttgtataaaaagtcaaccaattacggatcattggttatggctggacattccagctgaacaattttgaattagccacttcatttcatttagatgtcaagagtaaggggtgcttctaactgaatatatgaaaaataaattatggtcggtgcacatgtatgccatgcttgacaggaagtaatggctttaacaaactaacaatagcttcctttaaacatctttcacttcctctcatttcctaatgattctccgcagcagagacttgctagtgctgttttataattagcagcattcaattattttacatgcagttgagaacactggtgattctatgtgttctagctctctctttcattttttaaattacataaatcatctgctttaccttttctcaaaattgttgcaggtcttgtgggcattttcaatatacttggaggcagt

SEQ ID NO: 46581 - DNA, 300 bp, Manihot esculenta
  Intron number 1 from transcript cassava4.1_008446m (locus cassava4.1_008446m.g) derived from phytozome v7.0 (chr-ID scaffold04343; pos 57922 to 58221 reverse strand)
acttttccagcttcattcgccagcttaacacctatgtcagtcttctttaatcttagttttctctttcattttcattctattttttgattttaacaccatattctataattcattcttgaactgttctctctttgattttcccatttatgaataacttgctctgattttcgggtctctgtctcaggttcaggaacatgtttaatggaataattgtgtatgaaattattgtattagcgttatgggtttcgtttcttatgatgcaaaatggtctcagggctttagaaagattgatcctgatag

SEQ ID NO: 46582 - DNA, 515 bp, Manihot esculenta
  Intron number 1 from transcript cassava4.1_018386m (locus cassava4.1_018386m.g) derived from phytozome v7.0 (chr-ID scaffold02947; pos 32830 to 33344)
acttggccgctgttctcgagtacctagctgctgaggtaattttttgcttctttcccaattttggattttcagttttttgcgtaattttcagatctgcgattgctgtataatatgccctacattgtgattttgtttactatctctggctgagctgaatttgacttttttgttagttttggtcacaaatgtctgtttggcaattgggaaaattgtagaaaaagttgtgttgctccacttgtactgtctggagatctcactcttgccaaatggagcttcaattttctgttatatgccaaaatggcagtgagaagatttgttgtccatatagttgaattagggtgtttaagggggaaaaaaagaaagatttgagtttgtttaatctgattctgcaatactgacttcattttctatgaatttcgttattgtactgtttatcatggatcaagttgaaatctactgttccactgttctgatgcatagtgttattggggctcaggtgctggaattggctggaa

SEQ ID NO: 46583 - DNA, 471 bp, Manihot esculenta
  Intron number 1 from transcript cassava4.1_011858m (locus cassava4.1_011858m.g) derived from phytozome v7.0 (chr-ID scaffold12211; pos 308292 to 308762 reverse strand)
gatcttgttatccctgctctaaacaattccctcaggcaagaaacagattctatccttttttttactcttcattactgtagattagcatataagcaactggagctctataaattttgatgcacattttaccagatttggctttttttttttcttagtggtccagttcggcaacaatgactgttttatcaatttttttttcaatcaaattactaaataatgccttcataattgttgctgaacaagcaattatcttaatcgatccttggtgatcaaacaaaggatcgaggcccgatgggcttgcgagttaatggggaatgaaccctttaagactgaattggtttggttcaatgcaaaatcaaacccaaaatttctgctttaattttcttattcttctcctggtaaccagtttagattacacaataccaattgtgcacaggaatcttcaactggagtatttagacctttatttga

SEQ ID NO: 46584 - DNA, 691 bp, Manihot esculenta
  Intron number 3 from transcript cassava4.1_015620m (locus cassava4.1_015620m.g) derived from phytozome v7.0 (chr-ID scaffold06158; pos 424872 to 425562 reverse strand)
agaagaagactgctgtgaagaaggaaacttctgaggtgatttcactttgagaacaacgttgtttttatatttgatattgtttctgaagaatatcttagtaggttttgttttggtcgatgcttttgttggttgtttagataagcgtcgagaataaattcattgttatgtacaaatttgttattgctggtgtgctcttgaggaggaactgaacctattgaagatttaagtgctatcagtagcccatttgactgttcaaatctcttggagtatttaagaaagctcatatccgtaactcaaatctggtatactttataatagtatcttcttgtcacaattgatctgagtgaaaaagttggtaatattgagggttgtgcatttccccttgctattctatttgggtttcctagatatggatctcgtttgagatgtatgtcatacatttattcactggcttatcaatgctacagtgtcgctctgaataggagtatgttcatcattaactgtgaacgtcatttcaatttatgtgatctcaccctacacagaataaatgagtcataagttattgtatttcaattggaaactttatgactattctccgagttctctagcctttatgtgactggaaattaaataacgtccatgtttttgggtaacaggaaggagaaggtgctactgccactgctactgcaga

SEQ ID NO: 46585 - DNA, 1035 bp, Manihot esculenta
  Intron number 1 from transcript cassava4.1_015367m (locus cassava4.1_015367m.g) derived from phytozome v7.0 (chr-ID scaffold07470; pos 75003 to 76037)
gactctttccagaaccctccttgtcagtatgtaaccacctttgcctttcacttttcatttataattgtgcattcggcatctcagatctggtttaaaacgtaatcgtttttgggttttgtggaatttaaaatgtaagaggaacttgaatcttgttttctttagcatggttatgtttagtgggaaatttgttttttagtcattttgttcaaggctcattgtaatgggttctaatggtttgctatctttcgtttgaatttgatgggtatttcagcattcgtttcagggattggttatgtcaagtgcagtgccattagaattaaaaccttattattcaattttatgtacggaaagaaaatttgatgtcttttgggtttcggttccgccagtttttgctgtggtccacatgaggagaggtcttaaattatgccttcaatttggatggctctgtgatagattgtaatactaaagaaacttgattcgcttttttccttttttggccgaagaaacttgattcactgtgtcagcattttctacattgcttagtcttgaaaagtgcgtccctattctcattatcttctaatttttcttccacagtctggcgtgcgtggaatttgatcagcgtgtctctaccagtgtgttttgtatatgtatgtggcaggtgcatggagtataaatttactcgtttatgcatgtagatttaatatggcatatttaattttgctatattaattgaataatttgatctataatatctaaattcaaataaatgcttccagtttttgctataggaagatgctctatgttttgagttcattcaattctgattggttgacactaatctgacctaatagcatgctgaagtcaaaccattaggtcatgctgttgttgatggatttgttgaccatgtgaaactagaacaggaagctgaatattgattcgcattctctttctcaaatattcaaacttgtagggtaacaagcatatccttcattctttcttctttcctttatgcagcggcacttggagcggttttgc

SEQ ID NO: 46586 - DNA, 367 bp, Manihot esculenta
  Intron number 3 from transcript cassava4.1_012856m (locus cassava4.1_012856m.g) derived from phytozome v7.0 (chr-ID scaffold06916; pos 388961 to 389327 reverse strand)
ctgaggtaattctcttttgaatatttcatattacatgtagctataccctgcaactgcctagacttgaagcaaattggtgtactgccttaaagcagagataggcactctgctgatggcgtcatctcttgctgattttagttgtcctaccaaaaagaaaagaaactactgaatgttggagaaactcttgtatgatttcaagggattttgctttctttcctctacaagcataactcacttggtcggttggtattagagttgggtttattgttattattattttaatcttgcttcttgcttccacttgaagattgattgacatggatgtagggcaggaagatatatcacaggcttttgcactagcaagcgt

SEQ ID NO: 46587 - DNA, 635 bp, Manihot esculenta
  Intron number 1 from transcript cassava4.1_026861m (locus cassava4.1_026861m.g) derived from phytozome v7.0 (chr-ID scaffold04796; pos 492169 to 492803 reverse strand)
tcgccgttgcttctgtctccacggtcccgactctggtttgtttgaataattgagatttgtctctgaatcggtttctgttctgttgctgaaatggcttcctgtctcccacgatctctcaattctttgaatagatttgtgttctgtttctgaaatgcttagatttgtgtgtatgtgttgagatttattgaagtgagcagatatgtgatattattctgatatgcaattcatcgcattacaaggaagaagagctaattttacatacatatgtgatttgccttttgcatgtatgctcaaatgatactgaatttttcatatttgtttacttctgaagctagtttcattcactatttggttttcttttctttgttgattgtgcttgtacctgggttcaacttttaattttacttatagttaatcggctgtaaatcatcaatgccttagtgtttccttttaattgtgtttattccacctgtatttccaacttctttcttcttgtcttcagaattgagtagttttaaagagaatcttttgaatgaagaagtgtgcattcatcattgttttataaagtttcatctaataatgaattatgctttcagtaattcagttcagctgggaagagtataggagaaagaaaa

SEQ ID NO: 46588 - DNA, 286 bp, Manihot esculenta
  Intron number 1 from transcript cassava4.1_020004m (locus cassava4.1_020004m.g) derived from phytozome v7.0 (chr-ID scaffold07351; pos 557543 to 557828 reverse strand)
tggacttgaaatccattgctgcccacataaaaaaggtaacatttttttgctcagatatactcaaagcaaaataatttttttgaacttttgaatctctttactggccataggaagataatgcttgtccttgtatgcagagagtttattacctggctagtctgattttcttatttgattcaaataaactaaatagatagaataatagctaaaagaaaatgaaaggaaaaatgaagacttctgcatagaaaaattcaatttctgatataaaatttggcaggagtttgac

SEQ ID NO: 46589 - DNA, 397 bp, Manihot esculenta
  Intron number 1 from transcript cassava4.1_022386m (locus cassava4.1_022386m.g) derived from phytozome v7.0 (chr-ID scaffold05425; pos 835 to 1231 reverse strand)
gctcattagctggttcactcttgtgcttcttaaatgtactttcttctacccagcatttatcaacttctttcattcagtcgcatagaattggaatttacattaattaattatgatggtagagctttagtattttgtccaaaggagtttattggctttctctcccacagtgagaggctgagtacacctgcctttctctgcataagttggtagctgcttttaatacaaaacttgtgttgttttggtcttttgagagggttgtgctttgaaatgtgaactaatagctctagcttaagtgtatgaattgcagttaaatcaacattaatagaaaattatgtgcagaatgagattaattctgtcaccccttttgatctattgcagggttgtgtttacatttttt

SEQ ID NO: 46590 - DNA, 965 bp, Manihot esculenta
  Intron number 2 from transcript cassava4.1_008443m (locus cassava4.1_008443m.g) derived from phytozome v7.0 (chr-ID scaffold07520; pos 2372862 to 2373826)
ctcttattactcttgtcgacaacgctcgtgtcagggtatatcagttgttctggctttgattctctctcatatcttattaagatattacctcttttgtgcgaataattgctttttgtctttctttaaacttaatttcttgtcttctctctttatgatgtaattatataaatctcaaatggtaatgtgctattttcagttatttgttaggaaaaccatacatgatggaaggttgatctcttaatctttcttcgttccttgtaggcactgcttttgcacaactgttaccttttctcaacttagctcgcaattggatttgttttgtcatcttttatttgatgtactttatctgctccaatccattccttgtttctaacacatttaacggtggaagtaaatggcaataaattgacccaagggtgtcaaattggaatattataatggagattccatgttaggttctgctgatgtatcatgtgactgagtgcagacagctgcatctgcagttggttcaagcagttctgcaatggattatttgtaactttttggtatgcatgttacagatagagggttttcttctagtgggttgacttctttggagggtagccagtgggtaactggagtaaaaaattctacagccagatgtgttagatggatgaccttgttgatttggaactttggctttccaacaatggtgacgttatcataataaagtatactattttagaaagaaggttttaaccatacaattagagcactctactctaactctttccttaaagctcatgataatcagctctctgtcccatatctatgcagaacttgactaatatactcagtgccttcattgttgcaattgtgctttatcctgtctgcattttatatctgtgcgaactgatctatgaccaatgactttctgtttgctatatgcaggagagactggaagatattgagaaggatcaattcga

SEQ ID NO: 46591 - DNA, 463 bp, Manihot esculenta
  Intron number 2 from transcript cassava4.1_021922m (locus cassava4.1_021922m.g) derived from phytozome v7.0 (chr-ID scaffold07478; pos 344528 to 344990 reverse strand)
caaaacatcaagggaatgtaagcaattttacataaagtattttgacaatttcttctcaaacacaattttttttttcagaaaatcccaagtaatatcagtaatcaccatgcttgattactttctctcttattaaatatgataataattcaattattcttgtgtattttcaggtggaatttaaccaagaaaccagctttcttgcccttttcagaagactaattaataatgagcttttgaatgatctcaagatcacggccatgtatttgaatttggaagggtttctggctttgtgtatgattattggtgttcttgcatgaagcttatagaatcccttctttcctctttctttttttttccttccataattggatacagtatatgctttctttgcatccatcaagatcactcttttcttggagagtgagttgatttttaattggtgttgttgcagtagctgcttttt

SEQ ID NO: 46592 - DNA, 859 bp, Manihot esculenta
  Intron number 2 from transcript cassava4.1_026426m (locus cassava4.1_026426m.g) derived from phytozome v7.0 (chr-ID scaffold07444; pos 15384 to 16242)
aacactattgctgtggtaattatcaatcccccgttaatgagttttgaatttgagattgaattactcttctggagtttagcctcatttatgtttgtaatctagaaagtcaagcgaaaaaattttaagcaaattagagagattttttatgaaaaaagtatatatatagagaggggtgggagagagaaaagtatttgttgaatggagtgaattgagccaactcaacagagaaaagacgacctatcacctatctaacaagcggctagtgaagcgcaacaaaatttattttttcttttttttaataaaaaatatctcagtagaatttagtagacgaaatagcttgccactagtcagtccaacggtagacttgtctggcaaagagccatatgagactggtgcacctgccagacgaaattactagactctcactaatatccaatcttcttttatatactttcttataaatttttcttgttctatctttcacaaatgtccctctcggtacttcctcacaaaagacaagtttttctttttagatacaaattgccacactttataagcgcggcaagtcaactttttcagttgacttggcccaactcccccctgttccacaagtacttttcattcttctctcttcataaatattttttttacacatttttcataaaaaaaaactcaaattagatatagctagcaaatttttatataaaaactaataatatggaattgaaaatttttagaataatttaggcaagtaatagagaagttagataaggagaagatcagaaataaatgaactataaaatgttgttgcctttggatttaaggttcgtaatttcctaggtcaaccacaactagggaa

SEQ ID NO: 46593 - DNA, 309 bp, Manihot esculenta
  Intron number 3 from transcript cassava4.1_008250m (locus cassava4.1_008250m.g) derived from phytozome v7.0 (chr-ID scaffold06715; pos 205570 to 205878)
caggttagttcatgcatttttgcaatactcattttaaaattccagtaattgcatttttatgtgtttctcaacggcccctggtttgattagaccaaacctttttcattttaatcttccaacttttgcattatgtgactatgcttaatcattctccattgattatttttccttgcaattttgatgtatttcttttctttaagtatatatgtattattgaagggatgaagtttgctatttgagtaattggtgttttgccagattgacatggatataatgactaatttgttctttaaatttagaaagtggaag

SEQ ID NO: 46594 - DNA, 860 bp, Manihot esculenta
  Intron number 1 from transcript cassava4.1_031686m (locus cassava4.1_031686m.g) derived from phytozome v7.0 (chr-ID scaffold11425; pos 238897 to 239756 reverse strand)
gctgttggagctccgtccccattaacgctggtgagtttactcacactccttccattcattatctttctctatggctgtaggaacaccacactcgataatgcagcaaatggaatacgcatcaaataatcatatatacagcacaagttatgctgatacatataaagcaatcacttagctataattgtatttcttcttcttcttcttcttcagaattaattccaattaatatacatggatcccttttatatatatcaaatggatatagagcattctacaacacctattgttttctttttgttatatgtttcctggaaatggaaatcattctggaatttcctccaccgatactgatctaacctcggaaaagcacttgctttaattgcagattgatgggaatagttttcagatttatttatgatattttttgtttttataatcaatatgtgttttaatgccgtttctgactctgataattctttaattgctacaggtaatattcttttagaaagtcaatttttttaacgtcacaaagataatgaaaatccctcgtcctcttccacgcttcagctaatgcatttttttttttttttgatgggagcctgagtcattcaaaacgtatagaaaagtaataaattatttctagtgtaggttaataccataccatatcgcagcatgaagtgtaatcatgatcatatgaaaacctacggactgttaattagctaagttccagaggttgaaattcgaaaaagacttctagttacaattactgaactaccctattatagttgacttacatggatttttgttatggatttattcatgcaggcctgcagaggaacgggaagagctgcagattgagg

SEQ ID NO: 46595 - DNA, 758 bp, Manihot esculenta
  Intron number 1 from transcript cassava4.1_011887m (locus cassava4.1_011887m.g) derived from phytozome v7.0 (chr-ID scaffold00111; pos 9046 to 9803)
gtttggtggatcaagatcgggccaagttggttttggtaggtttttcttctattcgtcattgaattccattaaacacttcgttactgtatcattggtttttttttttttttttgttgataattggttcccactgatttcgaagtcgagaactctcagactactcaatatgagctagcacccattggtcttttttgttttttggttccaaaaatgaagttactgtctcgggggttggtttataatgaagtattcgtcttcctcctttgcggggacaagcataaactgtgttgaatctcacctcaggtttcggatagggtaggggagagctagcttttgggcgagttaggcccctgactcaaatttaattgatatcagagcctcccacaacatcggtggatgttgtggactccctgggcgtacttctcccttgagttagctggatgcttttggggcgagttagcatgatccaaatttaacaaactgagtttagcagaatatgaaattatgattgctagtagagtttttggcagttggaagtagatgtggaaattttcttcgacgacttgcattagcactgggataatttcttcagcatctttaaatttgtaaaaaaagagatctttattccttttatttgaagtcatgcgtctgaaattctctatcttttatttgtcaatttgattatttatgtaatacgtaaatgagtgttgatggagttattgttcttacactccatgcaggaagcaacacaaggatta

SEQ ID NO: 46596 - DNA, 892 bp, Manihot esculenta
  Intron number 2 from transcript cassava4.1_009988m (locus cassava4.1_009983m.g) derived from phytozome v7.0 (chr-ID scaffold11179; pos 309587 to 310478 reverse strand)
ctaggccttggagacgtatgataaccttttctttccccaaatatacaagttgtgctgttttcatattaccaagctgttatttttcatttcaaaatttttgtttgttgttttcatgaaaggagtctatgtttcaagctctcctgttcttctggaaatagctggcaccctccatcctttgcagtgcagcaatccttgtaatggaattggaattggattgcaacttagttcattcagtgttaacgcagttatgcaaaatattaggaagctatctgcatttttgcttactgtatcatattcttggtttgacttggttactattgatgtgtgttctctaattcctcaaaagggagctcatctatggtatttactttgagccttagtctagaatgtatttgcttccttagttctgattaacatctctagatattcatatcttttagctttatgcatattaatagaaggacggagatggtgagactttaaggatgcattggttgaaaatcttcatagcaagtcattattcaaactggatcttctcccctgtttgtaatgttgttttctttatttacaatacacaagcttttcttattttgaactaatttgtccatattggtctgcttcccttccatagaagttcaagctactgtctagactatataattttctgcccagttgtgcttgcatgacgaagtcaccatgtaactttctgtgctacttaatttttgataaaaatattttgtgactgaaagccacgaatatctgcttttcagttctgattcttgtgtctgacatgccctgggttcattagcactggtgcctagcataaataaatattgctgggaaccattgaaataagttgacttttgatatgttattgcaggctattccggcc

SEQ ID NO: 46597 - DNA, 886 bp, Manihot esculenta
  Intron number 1 from transcript cassava4.1_009988m (locus cassava4.1_009983m.g) derived from phytozome v7.0 (chr-ID scaffold11179; pos 311378 to 312263 reverse strand)
caggggggagtcttccaagctcttcaaagtccaaggttagtcctttcaaaacccttccgaatttcccaactccaaatccttttttgatttcagatctaaaactatagaactcgtcttatatttcaattgcgtgcaaatctgaatgtttgtgatgattttagtcgcttgttggtttatgaggtctagatgtttatgcttttcaactaatgatgcgaggaaggcagattgagaaaatttgagtggtaacctgttgtttgtttgccgagaaatacgagggaaagcagagacaaatcaaaagttcatttctgttcgctggttgttgatttaatttattttcgaaaggaaagtggataaaatagggttcgatcgtgtatattactgaggtaaaggtggattgtttttttttaagaaaaaaagaggaaataaatcaagagttctgatttttattctttaaaaaaaaacatttttttaatggattcagccgaaggtaaatgtgtgtgcttgatttgattttgatgaaaattcagtttcttatcgtttgggttgtttatgtcgagaaaaccataacaagaaaaagagccaaatcattaactagggttttgatgctattgattttttgtttcattttctttgggaatcaaaaatatagaatctgaaatagaaattttctgcaactgcatttttaaaaatgggactatgtcctttaatttttttttaaaaaaacttttcagagagtattgtaaccagggaaccaagaaatcctagaagtttcagtcttcacattattaacaggatcagctttttttcactgatgcttccatttattgcacttgcttgtgctcctatgtttctttttacgtcactgaccactattttgcaggttcac

SEQ ID NO: 46598 - DNA, 621 bp, Manihot esculenta
  Intron number 2 from transcript cassava4.1_027613m (locus cassava4.1_027613m.g) derived from phytozome v7.0 (chr-ID scaffold03218; pos 29487 to 30107 reverse strand)
gcaagcactacttctgtgagcattgtgctttgaaggtgagtactttttctgtgaacactgttctttgaaggaggtgctgtttgcatgaatttatgcttgttcttgagatagagagaacatataattcaaaaataaacagctggaagggataaattcattaaaaaaacagaatataaattggacaattgtttagtggcaatttggaatccatgttgtttctggttattgttgtccagtgttcatagaaaacaatatttttagaacatatttatttctgttaattgatgtcttgagaaagaacaaattgtgacaatacaagttccttgattttaagatgcaattttatagcattggacaacaatcaccaaaaaagagataccatttacatcctgaggatattactattgtaagtaacaaacaacaactaacaatttggaattattgtagagtttttcttcctttgtcctaagtattgcctatcttttcatatttggtagccttttctatcttttgcggcgggtcataatatcttctttccattttgcattgtgcttttatgtgttaaattctttttccatgattgtaaactgatatatttgctcccttctgattcacagcacc

SEQ ID NO: 46599 - DNA, 641 bp, Manihot esculenta
  Intron number 1 from transcript cassava4.1_001497m (locus cassava4.1_001497m.g) derived from phytozome v7.0 (chr-ID scaffold02421; pos 735340 to 735980)
ggcagtccgttccccgtgttcttcagtgcaggtatttgtcattataacttctctataattattcgagtcttggttagtcatgaaatgccaaatatcgttctttatacttgctattgtttcacttcatggaaacttcattcttgcatgtgttgctggcacattatagttgaccacaatttgatactcatacgtttcgttgtcgactattctaaatgtcctggtatcttgtttactttagaaatttgtagattgtgcgtgactttgagaatgatttgattaatttctggattatatgagaaatctcagtatttgttttgcttgtccagttctatccagtgtagaaagtatgtcttcagtttgtatggaattgaaagtaaaaactgatgggaagattttccactgtggcatttaaagtaaagaaaaaaaaagagtacggttgcatataaatttcgaattagtaaaaatacgtctgtcagtatgtctgccagtttcctttacttaccattgtttgcttgccaatagttaaaaatgttactggtgcaccgttcttgcgatggagcctgaataatattttctttggcagtgaattttaaatatggaattgttgttttctaggtacttcaactggaggactgctgggt

SEQ ID NO: 46600 - DNA, 961 bp, Manihot esculenta
  Intron number 1 from transcript cassava4.1_012311m (locus cassava4.1_012327m.g) derived from phytozome v7.0 (chr-ID scaffold04718; pos 46796 to 47756 reverse strand)
ggtataaaataatacaattttatttgttctattttagtgattacacactttacagagactcggagaggaaaagagaaaaggacagagagcaagagcgagaaagagttgcctatacgtatgacacgtataatttgtcgtatattctgacatttttttggaatccgtaaggatttgtctttgttcattttgttactttgatgtcactggagggatttaatcttctctgaatctgaaatggtgctcgctttgatttctatggtgtaattggctagttgggtctatttctttattgctaatttttcaattttttgagattatggatatatttttatttaaaactaggattacgggtcggattagttgagtctgattgatgctttcttcctacttataattagatgtaaaccagttttggacagagatcatttttttttagtgctggatatcaatcattttggcttttttgtatatgtgcttttatattcatagtgagagatactgtcagttcatgggttcccacgattgtgtatttgtagttttggacttttctccagctcgtttgctcatcttcttatcgctttatctttttgtttctgcttctgctattgtagttgtttccttcttaactctccctgtcctgacctgcttgttgtatgtttctcagatttcatctatggttcctgccgttcagttcaagccctttgtcttctatatcatctattgtgttgtttaacttccattctcactgaccttgttagctgttgtatctctcttccgggttggatttgccccaaatttcgattttgattttgagtgagaaacatttctttcaaaattttccttttggtgcccatttctgtgtagcttactttgcttgatcaataatttaagtggggtaattgaatcttatctgtttttccatgtagtctcctttgttcacgtctgttaatctttgcaatca

SEQ ID NO: 46601 - DNA, 508 bp, Manihot esculenta
  Intron number 1 from transcript cassava4.1_030733m (locus cassava4.1_030733m.g) derived from phytozome v7.0 (chr-ID scaffold07036; pos 51712 to 52219)
gagaactccaagaaagtagaaaacacaactaccctttgatgttaatcatgcattgggatattcatctgatcagcgacaaaccgtgtaaagcaaaactctgatgctacttaaagattaaaattacagaatatcgaaagaaacccaagagaaaaaaaagtaacatttcttactctttttctattccttaatacgttccttacttctttgtctctctgtctgttactgtgaagcttctttatctgagtagttttcttttttactcttcctccatgaccatcaccaacttttctatatatatggtgtttgtgtgtccacgctcagcagcttcaaaagatattaaattttgaaaaaaaaaaaaactttcatattgactcatctgctgcttcaacctcatggaagtgagctctcttgatctttttttctttgttttctttcttatagattgttaatattctgggttttgcgttgtgcaggagtataattattattcgaggaacaatatacctgc

SEQ ID NO: 46602 - DNA, 556 bp, Manihot esculenta
  Intron number 2 from transcript cassava4.1_030733m (locus cassava4.1_030733m.g) derived from phytozome v7.0 (chr-ID scaffold07036; pos 52374 to 52929)
attgttgttcctcgccggagggtaattatacttactagattcttttcttctttttctcaaatgctcttcttgttcttgaaatttttgaataattcatgaaagttagcagcaagcagcgtaaaacacaaaacaaaaaagaagacgagaaagaaaaggaaaaaggaaaaagaaaaagacaagaaaagattcattaaaagaagctaacaagcaaaggaaatgctttcgatagcttgtatatggggaattgaaaaacaaacaagaaaagggtgttttaggaatgctttcccaatggtcgcatattgttagatatggtagtagtatagctcatagcccggcttgatcaccggaatcgattttacgtgatcgattgaatgataaattacaaatataatttcaaaagaaaatccaaagtgaagtgaagtgattgttggtattgttggaagaatatgttaaatgttaatacgtaattatagatttgaaaatgggatgatgattaagcttggaaattcttggtattgcaggcaaaagtacgtcaatcccgtgtcaaagaagagag

SEQ ID NO: 46603 - DNA, 918 bp, Manihot esculenta
  Intron number 1 from transcript cassava4.1_003996m (locus cassava4.1_003996m.g) derived from phytozome v7.0 (chr-ID scaffold08059; pos 9000 to 9917)
ttcggcggccgaacctggtttttccccttcaaagcatttttctttcttttaaaattttttaacataaaactcaacagtaaaaccataaaattcattttgtgaaaaacttattttacccttctaagaggttccggcatccgagattcctgattccaataaggatttcgtcggaaagttgaaattccaacgccggagtatagccggatattacaataataacttctaatcctagaagaatttagcagataaatgtatgttaatcatgctattatcttcttgatcttttaattttcatatttttatagcgtatatactacttaaatatcataaaagttactcatattatctttcttttcacatatatctgttattattactctaattcgtaaatctaactttgaatgtttgagagtttctatcagaaatatcaccaatagaccccttatcatcttttacttatcgcttcctaaaaggtaatttctattaactagttaggagtaaaacctgagatctctcagacttactcgaatgcagcgtaaattacttcccttcatttttttttagaaaatatcctttttaaattttaaaaaggtagaaaaatatccaaattaaataaatatattaattttctagaaatttaaaatttttttagtgaacttaatccctaataaggtctaaacttagatatatatactttcaaaaagaattgaatagtaccgataatgataaaataaaaaggaaaagtgaaattacaatacatacgaaatgggtagcactactatgtatttttaattttttgggccgtttgtttaaaattaattacattaataatcataataaaaaggccaaacggccagccagttccgtggacggaaaacacaacctctagaaacaggggagtgagagagagagtcaaag

SEQ ID NO: 46604 - DNA, 920 bp, Manihot esculenta
  Intron number 3 from transcript cassava4.1_021975m (locus cassava4.1_021975m.g) derived from phytozome v7.0 (chr-ID scaffold01493; pos 30000 to 30919 reverse strand)
tctggaactcctgctttaaaaggagattttgtaaggtacccttctgcagatccatttataagcttttttatgcaaaatatgcttatgctacacttgctgaagattaatggcatgaagctttttgaaattttcctgaaatggcatttgcaaatgcttgttgatctcgactttacagtgctcatttctttctttttacaagacactacaaatatcattgataaaacatctgtttttgtacgagtaatttcatgcatagaaatagtattttaacacaagtttaatgaaacttgtcaaattggtagcagtataatgatgcaaaaaattcctgtccctttattgtcaaggcattgaaaaaaaatggtacccttaatgtcaaggcattaaaggacatggtacttttctagacttttgcctattgttttcattattgtcctttggtaattggtacactatgatgaccagtgcagtgctcatgaggtgcacttatggttcaatgtttgtggcaatttttcttttacatgtaatttattccattcctctgtgtttggataattatgtatatattgaaatctttgtgctttattttttttcctgctactagcttttttaactatagagaagactaaaacctactggtagcaaggtcagcattcatcctttagttcattgatctcaacaaatgtggagatttggcagtcttaactttttcaaatgcattgtgcctatttcataatgacacactttatattctctttctgctcattgcaatactccctacttttgatgcttttggtctaaaagctttattacatacttcagtatctgagttatgtttgccatatttgcttgcattgacattcttactattcttgtcctttgctttctccaagttcttacttcttactcctcttgcattgcag

SEQ ID NO: 46605 - DNA, 980 bp, Manihot esculenta
  Intron number 1 from transcript cassava4.1_009387m (locus cassava4.1_009387m.g) derived from phytozome v7.0 (chr-ID scaffold11224; pos 107088 to 108067)
tctccagctaatctcccatccaattccacttttgggtaattttcttttctcctctttcattttatttatattttcttgatgattactggtatttcgctttactttttccttttgtatttttttttttttttataatttttttcctctgtgcgtgttaaattcaaatattattgtcttgtcttgtttctttatgcgatgatgggtttttctaagaatttagagaatcagctgataaatatgtaagatgaaatgcttgtttgcgtcaaacattacatgctttgcttctggggattcttccagatctttctggggttttaataatttgagcttgatttacctacccttgattttcctcataagaggtctctcttcttgaatttatatttatattttgggtttatctgatattttgttatactgaattaattctcttgtattcatttggtaagagctactcaagtctttttctttatctctctttttcttgaaattaattttttttttcttgcggggatctgccaacatgctacaattttttttttttctgttttgtggaaattgtacttgctttaagatgaagattcttgtttatagatggaaaatttccccattttcttatttatttcttttagtttaggctttttttttggtcaaatttttagctggagattgattatcactgggtgatctgtgattttctgattgatagatcttgaaatatatcactttttaccggacccataagtggttttgtttttccaagagacattcagttaccttccactcccttacacaagagattgtggaatttggtatttctattgttcatcagttcttagatctgaagacatttgcaaattttcatgtcacttctttctgtgtgaattcaagattggaacggtgtttgctttacttattaatgcgtttatgccttgattgtgacagagattacaataaagggggtgttgctggaggagggg

SEQ ID NO: 46606 - DNA, 288 bp, Manihot esculenta; identical to SEQ ID NO: 46163
  Intron number 2 from transcript cassava4.1_015316m (locus cassava4.1_013284m.g) derived from phytozome v7.0 (chr-ID scaffold03750; pos 1034171 to 1034458 reverse strand)

SEQ ID NO: 46607 - DNA, 635 bp, Manihot esculenta
  Intron number 5 from transcript cassava4.1_018999m (locus cassava4.1_018999m.g) derived from phytozome v7.0 (chr-ID scaffold08757; pos 498329 to 498963 reverse strand)
agttagagctgcaacgcccttttgttttgagaaaggtgtgtgcctgcttagtttcttttttgttcctgtcaaaattttagcaaatcaatttaattttacaaatatattaagattttgttgaagttaatcttgcactgagaactagtggtaactccataaatcactaaagtattcaggttctgcatataataaaattggtatgtaaagttctcacaacttttcatattaaaatacttttacatggttttagtgtattttaaaaaaattaaatgagtggctaaaattgatatttattaaaaagctttttttgatgatttggtatcaatttaatttaaattgctaaaattgaaataaacccttaaggtaaggttggattgccaaaattgagaggaattatgaggttgttgctttttggctgtttgaccttattttaactgctttcattgtttcatgtacacttcctgtatattggtgttacagttgcactcccctttttttttggtatctttaataaattaattcagtacaaacaggaaaaagaatttatctacatgatcttctattttgttgtgtttatagcctttttcatctgcttgcttactttggccaatgtatcctaggaagtttgggactca

SEQ ID NO: 46608 - DNA, 788 bp, Manihot esculenta
  Intron number 1 from transcript cassava4.1_016472m (locus cassava4.1_016472m.g) derived from phytozome v7.0 (chr-ID scaffold06850; pos 56244 to 57031)
tccccatttatctccgttatccatctttgtaacaggtactttttctctataattatgttcaattcttgtttgcactttgattattgtgacgaaatgaagatcggcatcggcattggcgttgatcttacttgaattgagtgcgtgatccggttttttttttccatctcttttggggttaatcgttttttataagcatcaaatccacgtttataaatgatcgtgactcctttttctttggatcgtttaaccggattgtgtatttgagttcagcataattcttggaactcgatgatagagaaagatttgagaatgttgtgttaggtggaggtacaagggaataacttgcagttgattgaaaatcctgttctagtttttgatcgtcatgtttgtatattttttatattcctttcttgaggaaaattttcaaaattacaaagaaaaaaaggtttgatactcttgtgaaattgggttcttactttgaaaaggtctaacctaatgaagcatctttgctcttgtttaaatttcaaagttggggatatgagtatttaccggtagtgcaacttatcttttgaggtggtcaaatgattgtcctggaccattaacatgtcttaatattctttcatatttttcattgttttgatacctatataggtcaattaggaaattttaagtcttcaaaaatttattaaattgcaagtttctgaagaaagattgtgaatattgatttttctgtatgctctttgagttgagtcaatgtcaaacagtgatcttacatccgaattaaggca

SEQ ID NO: 46609 - DNA, 542 bp, Manihot esculenta
  Intron number 2 from transcript cassava4.1_017405m (locus cassava4.1_017405m.g) derived from phytozome v7.0 (chr-ID scaffold00010; pos 264014 to 264555)
ataaaaggtactgttgctctttttgcaacttatgaatcaaattgtctgcatgaacttgcatataaagatcctagtgaccttccttcttagtttgcatatgttgcagcctcatttattttaataattttttgcagccaaaaagaaataattttttgtttttgcaatttaattcaaagctgcttttttttttgtttttttttttgataagcacactcaacctgatttctaaaattgatggaaattttatccaaattttgaaatcaactttggtggacatgtgctttaactggtgtgaatgaaaaagctgagcttcctctatataaaaatgtgcttgtaaacttgactggtagggcttcttctgccatctttgatatccatcctttacttcaacaggaaaaagagagggctttcaactttgctaattaagtgtactgagtctatctcttcttcttctttcttttcttttctctttctttcttcctttttctttttttcttttttttccagaattggttttgcaaattatacaggaagctttcacc

SEQ ID NO: 46610 - DNA, 657 bp, Manihot esculenta
  Intron number 6 from transcript cassava4.1_013943m (locus cassava4.1_013943m.g) derived from phytozome v7.0 (chr-ID scaffold00784; pos 93272 to 93928)
ataagcctgtacaacaggtgagttcaatttccaacttatcataaccttggttcttaataactttaattataaaaatcaaacattcgtgtttgttttggatctaattcaaaatttttatgtaatagacttaacttttgaagtttgtcaaaataattctgtccaaattttccgaaataacaatttttagaaatttagccaattatgtcaaaatttaaataggattggattgctagaacacacaagggtttggattttttttttttaattattctttttatccatgaagatccatttttaccactaccatgaatctctctccagtttcattttgatactcataaggcattaaatagtgatgggatttggtaaaagtgggtagagggtgagcaaataatactacagggtttggccaaatagctaaaaattttcatgtacaatacatatcaaaattaaagttgatgttagcggtaagattggattatttgaaaaatagaattaaggaaactggttgggaaaaaattggacaaaagattgcacaaacttttatagtttaaagaccttggagacagagtttaaattctcaggctgaatgctatggtaaactctctgtattttttgagattgatacctgacttttgtgatcaggtaatcgctgag

SEQ ID NO: 46611 - DNA, 769 bp, Manihot esculenta
  Intron number 4 from transcript cassava4.1_032931m (locus cassava4.1_032931m.g) derived from phytozome v7.0 (chr-ID scaffold04796; pos 272172 to 272940 reverse strand)
tggctctggctggaaaactgggtaaagaactgaaggtaagtagtcattctcttccacttcctgttaaggcggaagaaggttgtttgttttttttttttttttttttttttttttctaaaaaaattactatttaatctttatggaaaaaatcattagttggtccttcaattttgaaaaatatgctaaaatgtcccttaaaatgtttaaagtgttttactattcagtggtttgaaaaaaattaatagttaatcacttgtaaaaagtctactaatttgtccgtgtgaaacaaggcattttagacttcttttacactaactaacggagggtccaattagtagattttttaaaatgtcggaatgttttaatgtatttttgaaaatatagagaataactaatgagttttcccatgctacagagactaaatagtaaatttctcgatttttcttttgttcttttcgttctaccattcctgcctcattcaatgataacaaggaatcatgtatttttcaagcatgatcatcagtgccataattgtcatgatgcttaacttttcaatttgtctacaatttgattcatttagagccattgtcaattacctcattcttggtttccctttgacatttgattgctgtgaagttctggataatgaaaaattttctatgttgggttcttaacggaacaacatgctgcatgtccttgcaaaaatgattagacttctgatctgatgtagatattttgaaatcttagttttcaggaaaagtaacataca

SEQ ID NO: 46612 - DNA, 813 bp, Manihot esculenta
  Intron number 1 from transcript cassava4.1_000290m (locus cassava4.1_000290m.g) derived from phytozome v7.0 (chr-ID scaffold02978; pos 237690 to 238502)
tcaaagaaagtgaagaattcgtctcaggaggctcggtatggaagttccttgaatatgttgtacgtttattgtctatttataaccgcatttaatcccttgcccctttttcgattggctagttgagggaaactgcatttaaaatgttaagagaggaagagaaataaaataaaaaggaagcttgtcgttcatttaccagccaaactacgatcttttacaacgacagggaggagttcgagttatggatttaagtactcgggtgtgtttggttagttaaccaacaaccagattttctttccattttcagtgaactaaaaattggaaaaatgagctttgccctgttctggggacagagcaattttgataatcaagtgcagcttcttctaaactggccatgtttatcactacttcaatttgatatgagcttgagaaagataaaaaactttgatttctttttatgtagccttggttagtttgacaatcaaatacagcaaataagaaactttcaagtgaaaaaaatgttgttggcagctatgggcttagccggcagtaactgcaccaaagttgccaatccccctacccccataactctgatcctttattattattatttgtgatgtttaatcaacatagtttccttcttctcttccctctcgttctatgtttttatgctatagttttcttgatgtcttatataatctgtcaataggcatgagatggtttattatgctatattcaactttgtagaagtagaaaactgaccacaagaatggttctgtagcgttgcagctagagcaaggttctgccctgcagggc

SEQ ID NO: 46613 - DNA, 923 bp, Manihot esculenta
  Intron number 1 from transcript cassava4.1_014214m (locus cassava4.1_014214m.g) derived from phytozome v7.0 (chr-ID scaffold04457; pos 1218914 to 1219836)
ccagtgctgctagacttatagaaaagccacacagggtaaaagcaaaagaaaccctcttcgccttttcttctgttttttttcttatttatttaatctctgctgtgtgcgcctgagactgtgagaccatgaggccatatgtttgttcaatatatgtgtttactatatgcatcgattctttaggggaaaaaataactaattctggttggtttctctgttgtattttatgtttgttcaatgtatgtctatggtttgcatgcaagtctgattttactttgctgatttctttttcttttctagttaaaagcattaaaagttggcattctaattaagggttttggctagatatttggggattagggttttaggaaagtcataaatttttgtggaaatcaccatgcttatgagtttctacttcccttttttgcttctgtttgatcattgttatcgatatttagcttctcggtactgtttttcttgtttaacgtttaccattcaaaggcattggttttgttagtctatgaattctaggagccatatagagtaagattgtttgtcagttttgatcatccaagtatccaggttcaaacttcttgcagaagtttttttttttttttaattaagaaaggggaaaaaaaagggaacttgatgctctggggattactagtctttgtatcactcacaagcgagaaatagaaggcatgaattgctattcccatactatgaggaatggaggatgataattttgtatcaggtgcattggattttagcaaagttcatttacttgtccctgcgccactttgcttactctgacttggcatttttcagtgcattacttaagatacaaaaaaaattaatttctcctaaggacctcattattggatttgaagttaccaaattaacccttttttttttctaattgaaga

SEQ ID NO: 46614 - DNA, 596 bp, Manihot esculenta
  Intron number 1 from transcript cassava4.1_025599m (locus cassava4.1_025599m.g) derived from phytozome v7.0 (chr-ID scaffold11341; pos 797018 to 797613 reverse strand)
cttttgagaaattagagaaggtaataagggcttatttatatctttcccgtctttaaatatataatactggatttgattcaatgcagctacattgttgaggagaatggaaattcattgctattatagttatacattttatttattcattcatccacttatcttcttcctctctctctcttaattttccttttataagattttatttaggaatgaataaggagatcctaccatcaatgttttaagaatatgattgcttcccaattataattttgtgggggaaaagagaaaattttcaggggaaaggatattctttttgttgaggtttgagttttacaaattttcatctcagaaaccttggtagagcattataatctaataaaggtagctatgaggcataaggtgataactgtgagaaactacatttgtttggtatgatgcagcaaattttagttccttttcctatttcttgatagccaattcatgttaatgctcatgctttggccattttcataatgcatgatgtctaagaattgtcatttgcaatttttgccatatatcaagattggacaaggcacatatagcagtgtgttccgagc

SEQ ID NO: 46615 - DNA, 215 bp, Manihot esculenta
  Intron number 1 from transcript cassava4.1_031543m (locus cassava4.1_031543m.g) derived from phytozome v7.0 (chr-ID scaffold07478; pos 103124 to 103338 reverse strand)
catcttttccctcactttctttccttccatttcaggtaaagaagaaaaagaagcaaaacccattttgagttttgagttaaaaactcatcaggataagagtggctgaaactgtggcaatttatgcaaaaaacaaaaaaaaaaatcaagattttgctttgtttaactactaatttgtggttaatttttggcagttggatcatcagttttcaaaagag

SEQ ID NO: 46616 - DNA, 910 bp, Manihot esculenta
  Intron number 3 from transcript cassava4.1_027780m (locus cassava4.1_027780m.g) derived from phytozome v7.0 (chr-ID scaffold11050; pos 5689 to 6598 reverse strand)
ggccagaaagtagtcaagaatagccttcatccaaggtaaccatttcgttgctttgaggtttctttatagacatacatagatacatacatgtgggatgagatttgatcccatacttggatagtttagccctaatgaagttgtttgttttattaaaaaacaaaaagtggtttcatatgaaagtaggagcttacatgctgctcaactctttaatgataataataaatatatacttgatgacaaaatcagcaactcttggatgcaatgatgcataataatttcattcaaagctatggactgcaagtagaagagaatattaaaagtacagtttgtcagccattttcaggcttatgtatataaaaattattttaatgggccttgaaaaacaagcaagtttgaagtttgtgtgagaaaacgaattttctcttgcacttgcaaccatttcagtggcctaaaactccaaatctggaatagatgttgcttctgcatctcttgaataattagcatgtagttaaactagttaaaggctaattaaaggtccgagttaagcaaatcaaaccaacatgaagagctttgtttttgattgtttctactataaataaataaatgagggctagatttcagataagcttggagtaactaatagtgaaactgctttcagggttcacaaagtgaatatatatttccccttaaaagtcaatattaagattcggatataactcatatactagtgataaaaaaatttctaatatatattataattagcttcaacgtatgcaaatgcctagcaaatttgatgaaggatatgcttgtatatactacataattagatacaaatatttaacttaaatcctatcatgagttttgtagaaaataacaatgaattttgaatgattggcaggagttattatcg

SEQ ID NO: 46617 - DNA, 450 bp, Manihot esculenta
  Intron number 1 from transcript cassava4.1_000018m (locus cassava4.1_000018m.g) derived from phytozome v7.0 (chr-ID scaffold03741; pos 680817 to 681266)
acctaggtgtgtaattctaactacgcgtctctattactaacaacttccccggattgggagccaagaaattttaggaatgctaaatttcaagttcgttaactttgtgcttgattgccttttgctcttctttttgattcccactgttattttctgttgaaaatttataaggtaagtggtggtttgtgatctaatttgatagaatgctgagagaagtataatctttagtaacgttttaggtatctttgttttttctttcattaaccagaaaaaggatatatttatagcacttggccttttgaattggaagctcttactaattttttggttttcttctgccttagcttctccaagtagcattgtatattttgtctggaaagtaacataagtatgaatttacttacatatttgctttgtcaaattgcagttttgaaggaagaggaggatagtgaa

SEQ ID NO: 46618 - DNA, 1008 bp, Manihot esculenta
  Intron number 1 from transcript cassava4.1_011450m (locus cassava4.1_010931m.g) derived from phytozome v7.0 (chr-ID scaffold02610; pos 4534 to 5541 reverse strand)
ctgctctaatagtgtcctgtcattggaatcaacaggttggtgttccccattcctattttatgtgatgcaaactttctctgtttgtagaaaagatgcctccaaatgtgattatatggttattttatcttagtatgtgtcttggattgtcactaggtatctgggaatgcagataaggagacttgtgctgtgtttgtgtacattattttcaaatgtgaactaaaaaaactatgtgaaaaaaaatgttgactgttttctggtgagacatctctagagacaatagatctgcatggtttactattgttgagacaatagttttgtgaataaaaagccctgttattattgacttgcatataaaattttattggttcattaacctggaattatcagttttaaatagttgtttacttggtgcgtctgcatgcaagctcagtcatctccatgcatgcttgtgtgtgcatgtacactttaggcatgttttcatagtcaatggaaactgttgcaatcttaaacagagcagcatgattatttccatgtagcaacatccttgagacatggagaaacatgaccttgtgctgcaataaatgacaatcatataatattcaatcttctgtgtgcttgcgacatgtcatatgcatcttgtctagtaagatttacatataaacaactggatatggttttgatgcacattgcatggagcatttaattttatctgtgacttgtcaaggtcatcctatgactgtttctgaggtgtagcatattgatgctaatgtgtcctacatcttagagatactcagcatattagaattcatttaacatccttgacttccacatttggtgattttgatgtgttgacttgcttgtgttatgttgttttttcttatctttgatgagctttctaagaagagatcataaatgacacctctttcatatgttgaaggtgttatcttcttactaatcttagaaccatatgcagagtgctccaattactccagtaatcttagtgacgat

SEQ ID NO: 46619 - DNA, 434 bp, Manihot esculenta
  Intron number 3 from transcript cassava4.1_010061m (locus cassava4.1_010053m.g) derived from phytozome v7.0 (chr-ID scaffold01945; pos 392259 to 392692 reverse strand)
gcagtggtactacagctttaacaatcgttaaacaggttacatgctttcttccgttgttggaggtggatatatagtagcaatcatgtcattttgcaatttcatgtttcatcacataatgatagatttctccgattacttaaagcaaaataacagtttcctatgtagaacatgaaatatccttcttaaaatatttctagaataccaaagttttggtttgtagaagtcgttagatttactgtttatctttccaaaagcaatagcccacaattgaagaagggaaaagtgggataagcattgtctaaattcttgaatggtatcggaatgatcataagtttttgagtttcgaacttttatcgagtccaataagccgaaaaaaggaagaagcgaaatgattgataattgttgttttcagggtgaacaacttattatagcaa

SEQ ID NO: 46620 - DNA, 567 bp, Manihot esculenta
  Intron number 1 from transcript cassava4.1_010061m (locus cassava4.1_010053m.g) derived from phytozome v7.0 (chr-ID scaffold01945; pos 393360 to 393926 reverse strand)
atcgttcttttataaccaagttgcacaaggaccaggttttgtatactctcttctcttcctcttgttgattttgagatatgattgattgtagctagcgaaaactttgattttcttctcttgggagctctatttaattttgtttcttgtattttgacaccttgttcagtcggtggcgacttatatatatatatgcaatggatttagtttggtcgagaaaatttgagaatatgagttcaaaaggaagagataggaatcattttagcgtgttaattctgtccttgcttagttttagtgactagaaaggagaagaaattatgttttcaacgttgcatttcaaattgcataacatagaaagtgaaggggattctgaatgtttgtttgctgggaaaaattttaggaatttacagatatttttggttgttcttttatgcactgattagtgaagaataattaaagatatcagaaaggtgtaaattccataataaagtaaatatgcatcttatgtgtttgttttattgatataaaacaatttcatttgttattgttattaattaggtagtgaaagca

SEQ ID NO: 46621 - DNA, 789 bp, Manihot esculenta
  Intron number 1 from transcript cassava4.1_020524m (locus cassava4.1_020524m.g) derived from phytozome v7.0 (chr-ID scaffold11341; pos 370485 to 371273)
tgccatcatcctttggatcttctctagcccaggtactaaaaattatttctgattatcaatttcttcaatttttattgactgcttggtctggaacaataaataaacaaattccttaggaagtcttgaagtgcacagaattgttacggtattgtttgttgaacaagttttattcatggctctttggtagttgggaatatgctaaattactctgtcttgagagcaaggattgaaaagttttgtttggtgatgctttgattatacttcttcatttcaagaacacgaaattatttggtccattgaacccaactgctcaatccttttttaacatctcacccatcatacatcttccactgatggttgtcgacttacctaatcaatcaatttcctgatgtcctggctggtgcaagctttgtatattctaatgatgtgaaaaaagctttgaataattagatctcaccttacttcatactgctgattttttggcagaaatctgcttattgttgatggccccatttcttgggttccatgaactatataattgctaatactattagattccatgccttttaagaaaaatatatgttgattttaccagaatgatattgatgtagtgaaagagattataatttccgtactcaaatgccattcggaaatatgatgttagttaaagacagacttttaagttagttaactaataagtatatatatcatgtaacgtttgctttgttggattataattctgatcacatatctcaactattgttggcagagtcaagggtttgaagtttg

SEQ ID NO: 46622 - DNA, 1019 bp, Manihot esculenta
  Intron number 3 from transcript cassava4.1_013876m (locus cassava4.1_013876m.g) derived from phytozome v7.0 (chr-ID scaffold03735; pos 412588 to 413606 reverse strand)
actccattctagttaacattggagatcaccttgaggtgcattccttttcatgctttcttatatataatactctcttcttcataaaggtaacttgttccttatttaggaaaaaaggtatcttcatatcttgttggatctctataacagcctgagttaaaattagcctacataatttttgtatacatttttttactattatgtgtacatgtttttactttgttcaaaagttatttaagtcggttttactcgggttattataattggcataagaactattcggaattataaaaattatatgggactaattggtaaaaaagaaaatctgagatgtaaaaaatatagtctgaaatctagaaaatagggtttaagagtgagcttaactggagaaattactcctttcactcagacttgtacaagcatacttctctctgtaaggcggccatttaattctcccgatgcgcatgttaaaatggctgcgaggtgactgggcctgctctcttacccttattgtgtcaccggactaggctatcatctagtggacctgcgtgtgtagccagtccggtctgctttagacacgagctgaagcatgtgacgttggatcggtttgttttagagggttctgatgagttttgggtctacattctatatccgggtctaccttcacccgaggtgggagaagccaatgatcattggatgagatggagtcatctaagctactagcaaatcattatattgagagtctggtcctactttagtaagtgtactcaattcaacatagcacatacaacatagtagagctgctataaaaatgtcgcaaaattgagggagaaaaaatgttggattccattcccgagttagggatattatatagaaatagctagtttaaaactactaaataatttgagttaatttttattaagtcatatgaaaaatgagtcgaaaatttatttgaatcagttttagtccagcagttttttcgtgattctgacgatttcatttttgttgatagattttaagta

SEQ ID NO: 46623 - DNA, 677 bp, Manihot esculenta
  Intron number 1 from transcript cassava4.1_006452m (locus cassava4.1_006452m.g) derived from phytozome v7.0 (chr-ID scaffold02688; pos 334718 to 335394)
accttggctaacctcattggtatcttatgcttcctcttataccttgtttaatctctctttcttaagtaatattgcgttgctttgcttctgtaaagatgtgggtcttctttctttttgaattacacaaactgggtgctattgtttatttgttaattggttctttcagcttttgaattcgttactacttttagccctcattggttttgtttcttttttctttttaataaaaacccatttgtcccccaaatttcaacatttgcagcgtcctccattcctatatgaatttcccagttttgcactttcttctatgtttatagacttcagttccttcagtcttggactgattttgcatagttcataacctcgagatttgtgaaaatcacctcacttgaatattgggatccttgcattggcaacttctttttatcccacagggatttatgtaggcaatgagctttctttctaaaaggactgaaggaaaaaaaaaaaaaaaaaaaaaaaaaagaagaaaggcttagatgggaattctaagaaaatctctgtttttgctgctgtacatgacttgaggcgatggtttattggctcagttttgcgtcttgttatattctaaattgatatggagtttttctcaatattctgtagaacataaatctgaccgggctgagtttctaaagctc

SEQ ID NO: 46624 - DNA, 474 bp, Manihot esculenta
  Intron number 2 from transcript cassava4.1_004166m (locus cassava4.1_004166m.g) derived from phytozome v7.0 (chr-ID scaffold08799; pos 703300 to 703773)
gtatcgctatttcgatctgcccttctgtgttccaggttgttgtctctgcttgtgctttatcttctatttatagcggattttctttttgtacatgtacttttatttatgttttttttggctaattttttgtttattctcaaggaaacctttccaaatgcaacattggaaacttgttgaataagctacttgtttagagtggacatataaaaagacaggaagaaaatagatgtttaggaagttttaatgtgtgctatatgtgctgcactccacttaattcaaatgcgatagacattatatttgttcgcatgttcaataattgattttgaagctagaaaggagagcattgcaagaattttgaaccttaaggatgaaattttgtttggatgtgagaattttgcccatttctcttttttgatgtttgagtgaattttaatggcagaacacctgaaagagaaaacagaagctcttggtgag

SEQ ID NO: 46625 - DNA, 522 bp, Manihot esculenta
  Intron number 1 from transcript cassava4.1_016702m (locus cassava4.1_016702m.g) derived from phytozome v7.0 (chr-ID scaffold07520; pos 2332309 to 2332830)
tcttgatttcttacactagcaacaccttccctacggtatatctctctcttttatttttgaagtgtggggggttttatagagaacacggtattgtggtcgattgttcaactggctaatttcattacccattttgattgaaagtgggttgcttgatttggaaattttttgtacattggtttaaagattatcggcagttctatgctctttttttttctccgaaaaaatgaaaaagtttattcattgatgaaagttgagttttgctgatatactttcagactatcgtttttgtgtatgaaatgctttgcattccgctcagcactctccatcctttcttcgaatattttgtttgcttttcctcattttgaggacgtgattgagatcatgacgtgcatgctatctgatttgggtaattgttgctaagcattagataatctcgttgtttctataaagcatttgaggtggtaattttttgaaatataatgccattggcttaactctttgcattctgtgttgaataggatt

SEQ ID NO: 46626 - DNA, 843 bp, Manihot esculenta
  Intron number 2 from transcript cassava4.1_010952m (locus cassava4.1_010952m.g) derived from phytozome v7.0 (chr-ID scaffold06035; pos 52679 to 53521)
tgatcttcctctttcttactacactggaattctaggtaaaaaagattatcttcttttccttcaaattactactgctcaacaaaacctggagatttaattagcattaggttataattcgatcacatttactttctacgtccagaaaacaaaatattcacaacaatagtggtaacttatcaaaatttatcgaaataataatgaatattaataatgaatattataatttgtttgtaatttaataatgaattaataaatttgttatttaatattgtttgtaaatttaataaccgatcgattattaactccattactaaatcagcaaaatattaataacagatctcaatccgttattaaattggttgctaaatcgattaaataaataatttaaataataaataaataaaatagtaatgaatttaataatgtgatactatttattactaaattaataatgaatttataacgtaatccaaaatatttttctctaacattggtgagaaataagtacataacatctaattaaatttctttttatttttgatatatatcatctagtatctaattttcattggctcgactaatccggacatatgaaagaaatttgatttctcttctaaattactcatttatccaaataaaataaaataaataaaaaatttctttttcctttcttttctctttcatttcctccattaatttttctccaattctcttccacgattaattaagaatccaaacataggataaacttttattttccagtgagaacccatgcaattgttttgttatttcatgcttctttatgcaggggttgcaggtatcacagcctacgctggtttctat

SEQ ID NO: 46627 - DNA, 700 bp, Manihot esculenta
  Intron number 1 from transcript cassava4.1_007140m (locus cassava4.1_007140m.g) derived from phytozome v7.0 (chr-ID scaffold04457; pos 1151771 to 1152470)
tggcgttggcaacccaaacattgtgacttgccgaggttcgtttcttcctttaaatctgatccatctaatttttattttatcttttcggttttgaattcggttttgtagctgaggaactctggaatcaatctgaaaacgttttgtactgtcatttatttttattgatgtatttggtttggtacagatgacaggctgctaagttaaactctagtttgagtaagatgcaggttttgcttaatttctcccagccacaaaaaggaccgttatttagcttcttttttttcttttttttttttatggtcgattactgcctggaaattaccatcgaataatttattttgcttcctctgttgtctttaatggagggtgttatttgcttttcgcttatgataatttgtggattagttgttgcccctactcgtgccgtatgttcttgattgttggggtttcacttccatttgaaatgctgcatccaggatatatgaattaattattatggtttcagtgtaaattaatgaaagagttttgttccaaggggatttgaatttggaaaacctcttaatcattatgtttctttttttttttttctttctttctatcagacaaaactctgaattcctaaaatagtgttttccctccttcagctctctgcttggtttttaactttgtttttatattatcttccttgagaatagatttg

SEQ ID NO: 46628 - DNA, 683 bp, Manihot esculenta
  Intron number 1 from transcript cassava4.1_011041m (locus cassava4.1_011041m.g) derived from phytozome v7.0 (chr-ID scaffold11998; pos 1594769 to 1595451 reverse strand)
aatccaaggtatccccttcttttcatttctacgcttcttttttactcccttttctcctcttgctattttgaagtttacaaaggctgcttttgcttgatgggttcagtgaatttccatgaaatcttgtccatttcgttagcattctgtttgggccttgtgttttggaaaatcggaatgccaggaatttgactttgattataacgaaaaaatatggacttcctcgttgaatttggtttgcaaaatttgtcatttctcgtgctgcttttgccattgctttcaatttcttgctagtctgacttgtcaggttgatgttctttgatttcctcgatgggtttggggttttgagagctacccatctcatacttacaaaatttgaagtaaattgttttttttttttttaaaataaaattttaagctcactatattattttcttgtttaggatttgattttacattcctctttcaactatttctaactggtgtttggctttttcagggtgtattttactttcttttgctgttttgggtgcataataaaattccatactgcttttcaaaatgtatacgatcaatctagctctcattataaaggcgaagattttctcaacattgacatctaattgataaatccctctttccttcttgtagagggtagttccgctgaacacttgggtcctcatctc

SEQ ID NO: 46629 - DNA, 751 bp, Manihot esculenta
  Intron number 3 from transcript cassava4.1_019449m (locus cassava4.1_019449m.g) derived from phytozome v7.0 (chr-ID scaffold08446; pos 48336 to 49086)
gcttttttggtgggcttgtatgttcctcaatttaattactagttttttttctttatttgtaaattcttatttttcattggataaggttctcctctttggtaacattttctctttgtattgtctgtgattattgtatttttataagtaaaggcctttgttgtatgtgagtattctttatcatatttgaaatagttagtatcacttgtagttctactttaggaatggattctccacaagttgataagccggtctatcaattattacctgagagtgactactgtcacattccttgcaaattgacttaggcacgtagtcaattcacaagggatgtgactgctttttctacaaaaagtgaatagcagggcttgtttttactttgagattttacaagtcttgaatattaatgctaatttgttgtgtaacagagctgaatggtgataaaagttccataaagctgactccaacttgtttgggattaaggctcagttgttttagtggtgttgttgagatatggctttatatttcttaatttttcagatgccactttctgaaaattcggttggtcatccatgtctgtttctgaattttatgtggcaatttcaataaaattactatcgtaatgacatattcaatttctgggtaatattcttcttcttgatatcttctgtttggtacttcaataactgacaatatcttctctttttctttctgtttttatgcagtcgttcgtgctattctggacgtatccttc

SEQ ID NO: 46630 - DNA, 821 bp, Manihot esculenta
  Intron number 4 from transcript cassava4.1_014946m (locus cassava4.1_014946m.g) derived from phytozome v7.0 (chr-ID scaffold10191; pos 38532 to 39352 reverse strand)
ccagagctgccaaaggtgctatagcacatccacaggtactgttaataatttaatcttacatttgcttatgcttactgcagatcttttccaataaattgcatgtatcccaaggtagaacagatattggagcccttataaagcaaacgaggttggaagaaaatcttgttaattttagctagaaaatcttgttgggtgtttttttgttggcaaacgaagataagttattctttgttgcaattggatttcttccttttctcatatcaagaagaattaatatattcattaatttatcttttgttattgttgcatttaaattttagtacttatttaaaacagcaaaggatccttgactacacttagctttctctaagttgctgacatcaaattgtttcattttgaacagcattatcaaatattacttctttgaaacgtcttcccagttcaagtcttatatgttgaaacttaagtctaatgaagctaatgtattccgtgatggattctgaaatttgaaccagaatgcaaggtataaaatcaatgaacataaagaatgaaattatatatgtgaattagtgtaaattgatggccttacattgctcatcaatgtaaacagcgcatccttatagaatgagaagtgggatgctaggattcatagagggctttataatcaatgttttgctattctcatgctttgttattgtaagatttttgtttaaaaaaatgctccttttatctttagtagcaatgcttacagtaccatgctgatttgtttttgagggccagagacttttgttattctattttattttttgtggcaggatctg

SEQ ID NO: 46631 - DNA, 797 bp, Manihot esculenta
  Intron number 2 from transcript cassava4.1_010662m (locus cassava4.1_010662m.g) derived from phytozome v7.0 (chr-ID scaffold11341; pos 485183 to 485979 reverse strand)
agatcaagctcgcaagtaagtctaactggaatatgaaaatgtaagaagcctgttggttatttcatatttggaagatacatgcctttgttcttttcctttaagtgtatttctaattaagtttgatctgagagaatgtgaacgcatttgattatactttggctctaagtacccgtttctcatgtttcatttgaggcataatattctggaaccgcaaggaacttgttgttggactggcttatagattgggtggaataaatagattgcaattaaaattttttgaaaggcttgtaaatgttggaatgtcaaagtaatggcttgacgttgaactaacttaaaaggctgatgttgaataaatttattagtgattgtgaggctaccaatttcagattttttgaagtaaggggttacaaggctcccccagtattaccttgttcttttcgctataaagggcatttatagtggcaccaggctccccagtcccactaatttcaatttgtgaaatgagatagtgtaatctttgatttacctcatcagtactttgtaataactgtttattgttgttgagaaattattttgtacaaaggcttctttgacttggcttaggttacttattcagtctagttcttctttgcatttgtgggattagtatgaagtacattatagatgatgggggagactcctatttatttattttattattttccctggctctcaatattttgcactatgattttgctttgaatttttcatgtacattatatggctgattacattaacaggaaggagtggagttattt

SEQ ID NO: 46632 - DNA, 990 bp, Manihot esculenta
  Intron number 3 from transcript cassava4.1_012255m (locus cassava4.1_012255m.g) derived from phytozome v7.0 (chr-ID scaffold08485; pos 9174 to 10163)
aggaagcgatattgcatcccctgcttgattaactggtttagtttacccaactaattactttcttccttttaccgtcttccttttaggcccgtattcacatttagggttgaaaagtgcatggcaatatatattcttagtattgcatgtttttgtcagtaatattatagttaattctgatagtcaattatatatatcatatgaaagtgcagtcttgatgctttcaccacgtgaagtggtctgacagtttcaattgaaccataagtttttcattgatgtgactattaaaggtaatttatagttataacgaattggaattggattgtataataaatctgctaattttaattttaaaagattaagagcatgatttgtttgagtaatttctgttattaaaattcccatatttttatgtttagttcttttaaaagcatagaattggcagtggtggcatagcccaatggtaattgtatatattttgaaaattgggagacccaggttcaagtccccctcccttacacatgtaaccgaaaaaataatttctgaaatattaaagcgaattgttcctacaataaataacacccacctgataggcatgtatctagtttttacatgatactgttgctttcattattaatttcattgtttgatactttttttttctgtgtatgttttctgctggtctgatagcaagttattattaggtaatctcatgatatattcttttcctaaataaacctgtataggaaatgctcattgatttgcacaggagatgtcctgtgtgatctgtatgtgcttctacaattgagctaaaatttcaataatctgcagtgaataggaacatccatgagccagttaagcttaggacttgttttcaatgcatgaagatgaacagtatcatgttttacatgtgaatgctgttactcttagttaattcactattagtgtttcttctattgaagtcattttttttcttgttgtaggtatcctaag

SEQ ID NO: 46633 - DNA, 556 bp, Manihot esculenta
  Intron number 1 from transcript cassava4.1_009992m (locus cassava4.1_009992m.g) derived from phytozome v7.0 (chr-ID scaffold02658; pos 477127 to 477682)
gccggctaattgttgatttcttaggtactgctaccattttctcaccgacaactacttttttgttttcttcgaatattagattttaatattaacttattattggtaacatgttaaatcagtagtttttatgtcatgattgggcattacctctgattggcaaataagatgaatgaatctttttctttcaatgaatgatttcaagcttcgaaaattctccgagagagagctgtgatcggttgattctcccttctgtttttacaaaaaagacaggactgattctgactctcatttggcaatttcctatcacaagacaaagagcttagctggaaaggcttgaatttttcacattttctcatctagtattcagatggtcctctacaatagtagaaattattccatgttaatacttgcaatgtttcttttaataataataaaaaaagaaccaaatgaagattgcatatcatctctaaaatgcaaatcaaattgacgtatgatagtgtgagtgctctttcgcttggcagctcaagctctaggattcccatttctgagtccatac

SEQ ID NO: 46634 - DNA, 1035 bp, Manihot esculenta
  Intron number 1 from transcript cassava4.1_000475m (locus cassava4.1_000475m.g) derived from phytozome v7.0 (chr-ID scaffold07100; pos 70002 to 71036 reverse strand)
agcataaccctggccaccagtctgatttcgctgaggtactggaaatttttgtttaaggagagtatttatgggagctgcgggcttttgtctgtggaaactgagggaagggttagcttattttttttggtctagggttttggggtctcacttggaagtgtttccttgtaaattggctggcttataaatagttctgctttcagcagtggctattgaatgaattacctgtttgtttatgagttctggaaaggttaaattccaaatgcttgggctctggagtgactgtctggtggaaaacatttgtctttgaaaatttgggaattgataacttaagtgtaacacatccgttttgacaacaccgatagttgcactttcctcttgtatcagcttaaattgtagaagggcaaaacgaagattatagtattatttcttgtgataaaaatgttacctggcattatttggttaattttcatcgatttgttatcttcaccttgcaattctttttcatcgggaagtagcacttgaaacattatagaatttcttatttcagttgcttcaatcatctgagatgttggaacaaaaaaaaaataaaaatcatctgagattcataattctataatttgatttagtttgtagaatctcttaaaattgcatgtgaaaacttatttatgctgttgatgatattttattatctttaatgggattgctgtcttcatttctaaaagtgttttcttaaagatgaacgaatattagtccctcaaacgatatggatatgtattgaagacagataatttagctaggctagccctgtccagaatatacatatgcaaacatgtattgcttctggcaatgaaattactattgcgtctcatatgtgtaaatgtgaaagatttttttgttcttactatttttgttttaataataagagccttcaaactttgtgtatgtaatataaagcaacttgtaattatatctattttgctgcattgtgtttggtttttaacattgttgggttttcctgcagacaatctataaaat

SEQ ID NO: 46635 - DNA, 719 bp, Manihot esculenta
  Intron number 1 from transcript cassava4.1_014080m (locus cassava4.1_014080m.g) derived from phytozome v7.0 (chr-ID scaffold07520; pos 2700130 to 2700848 reverse strand)
ttgtttcaagcgtcaatcctgaaatttctgcgtaggtatcgctctctctctctctctctctctctcccatttcgttctctctataccctctatgtttatgttgtcaaacacaggagaagaaaaatcagctggatttcgttttcagaagacgatttcatttcaataagtttgttgatttcccttattgttttatgggttgttaatatttgattttgtaggattttattatttgattttacggtgttattgttgctgatttgggtttttcaatatttgaatttgtggatgtttgttattgactttattgggttttcaatattgattttgtggtgctctgattattgattttacgaggattaggataacgtggaggatttacttgtatgttcggaaagttttttggcgttaatattggagatttatgagtttttaatacagattttaagagtaaattatttccttgtagtagattaatgatttaagagtatattatttattgtgtgcaattgtaaactttgtgattaagagggagtccgttgaattaattttgagtttcggttttgcgcttgctcggaatttatgggcagatttgttgttgttgtcctttgtatgaaccctagctaggattttaatatcttaatttctacatttcttagaatttttcgaatctctctaatttctcaggttatcagacgagactgctgaacatttcaaagacc

SEQ ID NO: 46636 - DNA, 1039 bp, Manihot esculenta
  Intron number 2 from transcript cassava4.1_009209m (locus cassava4.1_009209m.g) derived from phytozome v7.0 (chr-ID scaffold06683; pos 342660 to 343698 reverse strand)
agatacagaatttgcagcttcaacgagtctaccaggtaacctgcgaagcctttttcatattaattagtgtaaggtacagaaaagaagttttgatggtaatggtcggctgagatttatgatttcattcccgtcatagacggatttttaagattttttttttcattcgctgatgtccttcattttctcatagatcaagtggtaaattgctcacagttggctgtgcttatttgaacttgactattaggatttggattcctgggaagtgattgaatacttccatgtcatgtaacttttatcgtgaaaattttacagatatttgtcctcattcttctgattggaattttgagtcataaactccttaatcaattcacagttatctgatcaaattgggtgtagaaacactacttatccttgaaattgagccatttttaggtatctctaataagatattgctgtctttttctggaaatttcagcaattgaatttccatctcagcctcagatagggggtgcttgtatgagttttcttcagtgggctgagatcaatggttatgaaatcatgactatgcaactagctattatacattaattaaaacatcaatctcactcttccaatagaatacaatggattgaaatctttgttatatttggatcttgagagtgctagctaccctggctttcaaaattttagctttcatattccagtcaatccttgtattaaagtgaatttattttatttattccttttgttttttgcttctctttatctatctatacattttcattgcagtgaatgctgataactgaatagaaatgttactttgttaggaattgatgcacttgcgctttcatgaatgaattctacccatgtgttgaaactactaatgcatagttccttgactgtataatttatatttttcatatgttttctatgagtggtaaactatttgatagtagatgatttggcatctcattttcttatttggcttttaccactttgctgatttcctctttgcaattggcataggaggagattcata

SEQ ID NO: 46637 - DNA, 495 bp, Manihot esculenta
  Intron number 1 from transcript cassava4.1_009209m (locus cassava4.1_009209m.g) derived from phytozome v7.0 (chr-ID scaffold06683; pos 343662 to 344156 reverse strand)
tgattagctgcttcagtttgggttgcttttagaaggtgagagcttgagcttatcattagttgatcgttacccttatgcaggtttcattgaatattattgtatattctgggtattcttgttcttttactttatttgatgcaaatctaggtaaaggtgataattgttttgtttggttgatgggaaaataaaggaaaaagagaatttacaatgaagttcagtggaaaaagggcaaaagaatattccgactaggccagtgtttggtgaaagttttgggttcttttgggtcccaggaggaaggaactatggaagtttcattttgtgctttatagtagtttctttatcttttcgttttcttttccttcagaaaccaaacgaaaattggtcctcattgagcttgattgtgtgtctagaattgttttttctttgatcttgattgttgggttttgattttgcgcaacagatacagaatttgcagcttcaacgagtctaccaggt

SEQ ID NO: 46638 - DNA, 484 bp, Manihot esculenta
  Intron number 1 from transcript cassava4.1_017484m (locus cassava4.1_017484m.g) derived from phytozome v7.0 (chr-ID scaffold02963; pos 13444 to 13927)
agatgtaagatgaaggaaacttcttcagaggaacaaattttcaagcagtgtttgttggaagtattttacattaaagaagcatttgcaaagttagtttgtagactctgtatggaagtgaacctgagtttatttgttctcaacctttgatatttaagttcattactggatttttgttcgacaaatcatttgccatcttgatctgtaatcaaatagaaaccattcaatcttagttcccacatgcaaattcaatttcaactgtactaattcttgcatttatctggaattgtttcattcttttctttgagcttgctcactttaaatctgcaaaatttatgttctgcattttttcttagcatagaagagtctagtatcatttctgttttgctatgcctataaaatgtacaattgttttaactatcatggtaatccatgtggttcttcttgcttaggttaagaagtaagctgaaacaactggctgatcagt

SEQ ID NO: 46639 - DNA, 914 bp, Manihot esculenta
  Intron number 2 from transcript cassava4.1_033925m (locus cassava4.1_033925m.g) derived from phytozome v7.0 (chr-ID scaffold09798; pos 45958 to 46871)
tttatcggactggaagagaagcgaaggaaaagctggtacatttaagcacacagctgggaaatggcctggagatcctgatgattaaaggtttttttttttttatttctttctcctttagtacatatgtatgtatgtatgtacgcatatatgaatgtatgtacatacgtttgagtggctaactagacatgtaaacttggaagtttagacaaaatgcagcagctaaatggtcatagagtttgtagcagtttggtagtttgataattacaaacaaatagttgtgtgtttgtgtgtgtgtgtgctagcttgatatgtaatcttggaagtttagacagaatacaacagctaaatggtcatagaagtttgtagtagtttgctagtttaatcattataattaaatagtttagaatcaggcattattgcaacgcttggttcactctgaagatagaacttggaatgggattacattatttccatttttttgtttatatgatatgaaattaattttctttttagatgatgtttttttgtatttggataacctgaatgtaggtgaaattgattcttccttttacatatgatttttaagatggaaccatggaagttatccattttcattccatttccaaaatttaacaaacacgcttgtgtaatagctagggtggtcgaaatattggttgagatgaatttttaagtgaatttttgttattgagaggagattggaatatagttgtagagatcctgatgacactgaataaagaatcctgtaacttaactcaattaaacccagatatggggtcagccacatgaacattgtctcactttctgcctcatttaaggtgaacttcctattcctatttcctagtagtagtggatattgatgattcctggggatgttgcaggtatccagacataca

SEQ ID NO: 46640 - DNA, 464 bp, Manihot esculenta
  Intron number 3 from transcript cassava4.1_007243m (locus cassava4.1_007243m.g) derived from phytozome v7.0 (chr-ID scaffold12211; pos 83161 to 83624)
aggttggtaaccaaaatttttctttccttttcttttcttttcttttgctttccttctctgtttttttcttttatgaagagtcacagccttaaacaattcaaccactgaaaaagaaagtggtcaaacaaaatggtgaatgagacctgctacttgtctcctttttcatgccacttttatgtagacaacaattttttaaaaatatatatatataaagaaagattaaatgagtaataatccaaagaactgcttttttgaattgtgataagatttttttttattaaactcaacttcaatgttttgtttccattttctttctcctctcttgaatttgattcccagtttgtgtcatttttctttccaagaaaattaaggaaaagttccatgtgaatgattcattcttttaattcaagcatcaactatatatttatttaattggttttattttgaaactgttgggtaacagc

SEQ ID NO: 46641 - DNA, 605 bp, Manihot esculenta
  Intron number 2 from transcript cassava4.1_008967m (locus cassava4.1_008967m.g) derived from phytozome v7.0 (chr-ID scaffold11418; pos 74183 to 74787)
atcccaaaagatctcagctcttggaggttagttttcaaaagttctggttatgaagatatttttcagaaaaaataatatcaaattgcatttaacatataggagatggaatcagcttttaatagtttcataagttgcagagtttatataaaggctaaagttctcgccttctatgttctgttattgaaatcatcaattgcttttgttgataatatcattctttatttaccaaaaagagaaggttttcttttgaagctatattgccacttgagaaacttgtttatttattattcttttgttattattattattattattttattcttatggtaaatcaatcattagtcgtttgctcatacacttgtgtattgtgtaggagtcttcaaaccattaagctgataagtaaacttttattctggttgttaacaaagttctcataaagcacaccagtatctgaatttggagttttctgttttgaactcatctgaattctctggcttgtattctgtcttgtgggtttgctgttttgaacttgccttgcttagaattatacttgtgcatggctacatgaaggttatattggacttgggccgcttgccagaggcacg

SEQ ID NO: 46642 - DNA, 467 bp, Manihot esculenta
  Intron number 1 from transcript cassava4.1_017373m (locus cassava4.1_017001m.g) derived from phytozome v7.0 (chr-ID scaffold02658; pos 321034 to 321500)
accagcctagagagaaccagtgcacttctgctcttgtcaagcacattaaagctcctgttcatcttgtaagcttcatcttcttttcgatctatacatcaacttgatgttttctgtttttgttgtttcgattttttacatcccggaggattttagtgaaactttttttgttcttttgaatctgatgaatccggatcggttttggttgattttgctccatctatgatattttagcaatcatttttcttacttccggtcatttttcttgcaatttttttacaaccaaagaacgactactccccgcgccccccctccgaaaaaaaaaaaataccggcgactgtttttccgttgcatgttggaggaggcataaggacttgcaatttagttcctagtttgattctttgtttttgggtttttgttaattgtttggatcaggtgtggtcactggtgaggcgattcgatcagccaca

SEQ ID NO: 46643 - DNA, 284 bp, Manihot esculenta
  Intron number 3 from transcript cassava4.1_028858m (locus cassava4.1_028858m.g) derived from phytozome v7.0 (chr-ID scaffold02993; pos 58684 to 58967)
ccttgagaagaatagccttgcacgaactcttcttggtaagtatgcagtgttttcttcgtcatttagtaccttaggaatttgccaaacattttctcttgttttgtagtttgtttctcattaccctcagaaccttaagatcagaaaacattttaggtataggcatttaaattgataacagttacttaatgcttgctttgattttctttaatcaagctgaatctgagtgcttgactatcttttcctgttcaggagaaaatcagagtaacagtaacatccagtttagt

SEQ ID NO: 46644 - DNA, 956 bp, Manihot esculenta
  Intron number 1 from transcript cassava4.1_032624m (locus cassava4.1_032624m.g) derived from phytozome v7.0 (chr-ID scaffold03602; pos 416418 to 417373)
agctggtgatgactatagaagaaagaaagagagattggttcaagagaacatttaaaagtgtagagagaagagaaagagcacaagaaaaaaaaaggaaaataagagtatttttaaaattatattttattttatttttaattagattattattgatttaatataatttttaaactgatgaattttaaatttagatagaattaaaatttgaaaattgatgtgttgagtttaaaattaaagagataaatctgttaattatattatattttaaaaataaaaaaataatttcttcaaaaataaattatataaatacgtcaataagaataagtgcaaacatagatgtgaacatacgtgtacataaacaaatatatacacataaagatataccatagctatagatacggacaactcaaaatacaaccaaaatatttgtagtttcaatttaataagcaaaaaagaatttgaatgcagtaataaatacataaatatattttgcaaaggaaactagcattttgaattgaattctccatccataccaacaaaattcattttattttaaatgaattatatatttaaacacattaaaattgaataataaaaataatttatttttaaaaatattttttatgaaaaatatttttataaatataaaaattattttatatatatatattatttttcaaaaataattggagattaatataaattaaattaatgtaagaatataccgagtagtgggactcagagtcgtgtaaattctagcagattcttgagatccaattaaaataaataaatatatatatatattaaaaaaaaaagaaaaaaaaagacaaaagcacaaacatgccatcccatattctctccaattgtctttctctctcctaaattctgctatttcttatattttctctctctcactctccaaagtgaagaaagacagtgtgtctgtgttcgagtac

SEQ ID NO: 46645 - DNA, 687 bp, Manihot esculenta
  Intron number 1 from transcript cassava4.1_000894m (locus cassava4.1_000894m.g) derived from phytozome v7.0 (chr-ID scaffold03750; pos 426277 to 426963 reverse strand)
ataagcttcctgtttcagaccagaagataactgaggtatgtatctaagtttcttgattctgattagcttcccttcattgaattttgtttctttttcttcttttaattagattcaactcggatttgaactcgtatttttcataatccagtactattgatgttaatcatgaagtttcatctttttgaaatgtttcttagaattatttgtttatactttaatttttcttttctaaatgtaatttttgtggttttgagtttccatgttcttgcagaaattgaagcttctgtttctgtcatattatgttgtgtattgttatcactcactctcatggtcatgagtcggaaagagttgtgtgtacaactttaattaattagtgacctacctaaccatttcaaatttcttttttttttttatttttatatttttttcatttaaactttcacatggaccaaactacccctgaaatgatacatcaattgacttctctatgtttcttcctcaccacatactcaatattccaaaatatcatccccattgtgtcccagtccagttcatatcactgccccattgttgtccaaacttatatgttttcttctgtctagctaatctgtttatgtgggtgtcttcatattccatcgttgaatttatgcgcattaaagtgaaatcggtactacggtggttgcagat

SEQ ID NO: 46646 - DNA, 1020 bp, Manihot esculenta
  Intron number 1 from transcript cassava4.1_022283m (locus cassava4.1_022283m.g) derived from phytozome v7.0 (chr-ID scaffold00325; pos 535101 to 536120 reverse strand)
ctcttcgtctgttctttcacgactgcttcgttactgtaagcattaagccgcttatatatttttatacgacataacatgttttgattgattggaaatatacacttagaattttcctttttaacacataccatctgcatgagttttttatcattaaaaaagcaagaagaacaaaaattcattggtggtttttgcagaaattgatgtgtggttttgggttggaattggaatggtcattcttggagggctcagtaggggatgatcataatttaggtatagttttgagtttgaatgtcgttgcgtgtcccagtttccaattacctaatcgtattaaaaacataattttcaattcaaagttggttagttttacaaatttagaaatgtgaaccacacgaattaaaattagttttggtaacacaaatggaaatccttctttattaattttgcataaaagactaaaaatttttaatttgttaaatatcgtagaaaagtctatgatatccgggggatggaaactgaaaaatgagctaataatttttttactgctataaaaattaaatggtaaaaactaaaattaaagaaatttataatttgaccaattaatgaatttttttatactacaaggactaatagtaaattttttattatattatatttttagaaaattcattaaacatagttttgattctattaaactttttatatatatttagctattaattcttaaaaacacaccaaaattatgctgaaatatacttagaaaatagatataataattaaactgtatgacgtaatcaaaagttgagaaatattttattgagtttttctttgttaacgaccacaattcatcataattgtaaatcacccaaaatttttattttaaatgcataattttgatgtgaagaagtgcaatttcgagatttagtacttgataagcataagccaactgaatatagaacaaatataatctgtaagaattgaagctaaccttaatttatgtttggcttctaatcaagggttgtg

SEQ ID NO: 46647 - DNA, 687 bp, Manihot esculenta
  Intron number 3 from transcript cassava4.1_031516m (locus cassava4.1_031516m.g) derived from phytozome v7.0 (chr-ID scaffold11998; pos 989352 to 990038 reverse strand)
taacaaatcagctggtgagtaatttaggaggaagagggtaatttttctctctttgattttatgtttaatcgttactttgtgttagtatcacagctacagatatcttctcacaggtcttcattgattttggcctaagcttcatatcagcccttcctgaagacaaggctgttgatttgtatgcaatggaatgagccttgctttctatgcattcttcatgtgggaatgtggtaagttaggaatttccaatcctactgattcaactttcacttctgcgctgttagattgctgatagatatatggaaaataaaatttgaaaaagaaggatggaaagaaaacaagtcttttcccattaaaagaagtttttttttattattatcttatcaattgactttgatttgaaatatcgaaaagataactagttgctctgtcccttttatcggatatatagcctatagttgaacatattcattggtttccaaataaaaactacataaatttcttcatgttagtactttaaaagagctcttcccatgaccttatggaatcaagtgttagaaactagatcccaggcatgcttttagtttctctcattgtacatcttacaatgtaagttaaggtttatgagctgaattacatagaaccttgcattgcagaactggtcttctcataacctgcattcttgtgcag

SEQ ID NO: 46648 - DNA, 1011 bp, Manihot esculenta
  Intron number 2 from transcript cassava4.1_026210m (locus cassava4.1_026210m.g) derived from phytozome v7.0 (chr-ID scaffold09018; pos 276536 to 277546)
ctcttcaagttcgtgaggtaataattcttttcttttttgctaatctcataatataaacttaattgtttgcaaatgaatttcaacattctatattaataataataataataagaataagaggagaggagaataatggaattacccaaattatttctaattatttaggattacaattttgattattaaaaataatatatattaaataaaaaatatataataaaaataaaataaagtaaaataaaatttcaatttaatgttttaatttaatttattttttatttttatttttattttaatttattttaatgttttttattttaatttaatgttttaatttaatttaatgttttaatttaatgtatatattttattttaatttaatgttttaatttaattttaattttatttttgaatttatttgatttttaaataataattaattattaatattattaaattaatcttatctgaatttttttctcaattaaaattaattgaatcaagtcataatactttctatttcaataaaattacattattttatttttaaattattaaaatttattctctatgagatttttttgaaaattattttttatgtataaacataatattttcaaaataaaatttatagaagcacttattgaaaatttctagcaaacataagaaaaatatagtataaatatattaaatttatctttgtaatgacaatttattaatacttaattaattttttttaaaaattattcataaataaatattaatattaataatataaattatgtatatttatcattaattaaatgaaaataatcacaaataattaaatttaataaaatagtcataaaattaataataaaatagcaataatattaatataattaatattcaatttatttgatatgagtataatccaattccagaaaagattggattttttttttttttttttttgagatttgaaaatggacaatgatgcacagaacacgactggagtttggaagaggtgca

SEQ ID NO: 46649 - DNA, 619 bp, Manihot esculenta
  Intron number 1 from transcript cassava4.1_015387m (locus cassava4.1_015387m.g) derived from phytozome v7.0 (chr-ID scaffold04457; pos 498979 to 499597)
ttctgctgctcaacactgtcctcatcattgtccaggtattgcactcgatacatttttgtcatttctttggctttcgaaatcttggtttttctacattaggattcctttttcttttctattattggttattgcgtattttctttttcttagattttatattagcattcttgaaacatctgattttattcattccagtgtttgattcctgttccaatcagattgttttccttgattcaaggatttaatgctggaaatttagagattgggtttataggtgaaatccaattgatatataactaattccttgtttggatgattctgtggtgaatttcaagaacttgtacagatgctctcctctcaatgatgataattctatttgttattacgaaacaaatcttgtaaagtagatcttatgatacagcaataaactctcgactgtgatcaaacaacatagattttggatgtcacagtgcttcaccaaaaaatttagtgatagaaaaccttcctacatgataaattttctgatatgatcaaacagcatcttattttgaaacataatgatttaatggtacaatttttattgttctcttttctgattgggtttcatgtgtagtgtgcg

SEQ ID NO: 46650 - DNA, 972 bp, Manihot esculenta
  Intron number 1 from transcript cassava4.1_011555m (locus cassava4.1_011555m.g) derived from phytozome v7.0 (chr-ID scaffold07520; pos 2080157 to 2081128)
gctccctcgcataggcgattggatctgcaccggttagtctcactacctttttttttcgtgtctctataactattggaattctatacttgtggtgattggactgaattattattggtattttatcttcttaatgggaacagtagggtttaatttgttattctgtttttgagataattatatatgcttatttttgttatcattgttattatggcgcaataggttttgtttgggggggtttagggtttagctggtttgattctacttttgtttccgctttaggtattaaatagttgcagcaaggggtttagtaattgtatttaggggtgagctattaatcatgcttatactgttggttgttattcccgttacttactaatatctttgtgaagatggatgggcttttgtgtttctgaaatagttattgctggagctttctggacatttttcagagttgtattatgtagttagttaagaaagtttgcacaaaatacaatcacagtagctaactggctttgttaataaccatttcccaaaacctttttatttgcaaggtttttgatgatccagttgcatgcccctttttttttcacatattaaatatattttaagaactatcatcaaaactcaatctcgtattgtgttggtaggcttaagttcttttttcttggggaagtcttcaaattttgatttttgtttatttatttattgtgtatttgttgagagcatgataattttttccccttctgattatcatcttatcttgctatttctttgtatatttttggtcaaattaaaatgaagaacttgctatcaattaggttgagtgttttgtgttttttcactttttatgtgtattttggtatcgtatgggctggttggtgtgcgtatacatggcttcctttccatcttcgtggctgcattctgggttgcatgtatatggcaatggatcaataggttgcactaacaacaatt

SEQ ID NO: 46651 - DNA, 988 bp, Manihot esculenta
  Intron number 1 from transcript cassava4.1_011285m (locus cassava4.1_011285m.g) derived from phytozome v7.0 (chr-ID scaffold12265; pos 18608 to 19595)
tcttgtgctggtacctgctttatatccatttagctccataattcaagaaaatttctcattatctgttttatcagttactcaaaatcgattttcttcaattaactttcttaattgattggttttcgttgtagagcagggataatattattagattttgctcatttctggatttcagtttggttgacatgtaatttgcatgatgcaacagttctaattttgtaaatgatctaggttaaggatacggttttttttattggtttttgtttgtagagcaggataacgttattagattctgcaaaattttggatttgagttttgttgacatgtgatttggacgagacactagctctaattttggaaatgatctagcgttaaggttgtgaattgattagcggtgctcatttagattccaaggcattactatctggcatctttttctattgggtctcgtgaagttatagtgtgagctcccaaattttatttatttttgcttccttattctgttattattttgaagaatcgtacaatttaactttcaacttgacatctatgaatataaggtcgtctttttttgtttttgccttacattccgctcgaaaatggacgtttgagtacaaaaacatatagtcgttctgaactttcgagggaaagaatgaattaggaatagagactcatttgcaatgctattgcaggagaaatatttacctgtcctaaagacatcaatcttagatgtcgatgaagtataggtcttaaaaaatgtaggtgctcctgaaattaagatgtgtctgtcaatggaatatgctatgaaatttcttctattctacctacttcctatccttctgctctttgtaatgatagtttgcactatgggttgctttttcagctcatctggtaatgacactagaattagtatgactcttttggtttttattacagcagttggtttggccacttataagttttccatctgtttgcagtgcttttggta

SEQ ID NO: 46652 - DNA, 943 bp, Manihot esculenta
  Intron number 1 from transcript cassava4.1_032754m (locus cassava4.1_032754m.g) derived from phytozome v7.0 (chr-ID scaffold03750; pos 554064 to 555006 reverse strand)
tcatcaccttgttagggccgctcaattcaattcaggtctttctgtgtggggttttactcctcccgattttatcatcgcagctcttgctgctgatttacagtaatgaatatttcattttcttcaaaaaaaaaaatcctatcaaaacaaatggaagttgaatgtgataccactaatagatattcaaagcgggtgaacaacatttccaatccttcatgaacataaaagtattaaattctatttaaagccaactcattggattttaaactaaaattaaaatttatttaataattaaatttataaaattgtaacaattaaataaaaattaataatactattaataacttcacaatagtgttaaaaaatagccattttatatttttaattatattttaaattttatcagtactattttaaattttcataaaataattataaaattttataccataattaataaaatttaaaataaaattagtaatttataaaattatttttaatttttaataaattattgaacgagttttaattttagttcacttatttaaaggcttaatcccaaataatagaccaataattaaaccactaatttctatatagagaaatttattgctcaaatatcaaacatccacaaaacaataattagctctcaatttaaaaaaaaatatattaaaaatgctattaaaattttttaagaattataataattagttattttattaattttaatctattagttgattttttaattttataaaaatattaaataattaatatttttatattaaatatattttttttttaaaataaaattataaaaataactaattaatatatttattaaaaactcaaaccgaaataccaagaaacgagatgtgaagtcggtatctgcagaggacgcgattggaaaagaggaaaatgaatgctgtttttggtggcaggtcaa

SEQ ID NO: 46653 - DNA, 682 bp, Manihot esculenta
  Intron number 1 from transcript cassava4.1_013116m (locus cassava4.1_013116m.g) derived from phytozome v7.0 (chr-ID scaffold07996; pos 367305 to 367986)
ttctctgccaacttctcgttggttcctttgatcaggtaccaggcacaaacaccaaaaatctcgcaggaattttggttttcccattgattgcttcttctccaaagaaatgatgataaaattctatatttattcattttgtcagctgaatttatgcatttctggttcgatctgcactaaattttggtttgattataattgaatcaggacgcaggtctgcctatgcaaaaacgggcgttcttgtcctattgggtttcttaattctatgtgataaagtgtttttgtttcaatctttcttttgtgaagggcttcattttgtctaatctgagcataatttctaaaaacttattgttgaaatgagtactgggagaaattttttggtttatcaaattaagctaaatacttttgcttaattgcagcttaaagaagtaccatcattttggattttgacactaaaagagtaagaaattaattttatttacttctattgtttctgttgaaattgccgtcttcttgttattttttttctgttaatttaagtgcccctgtttattgtttgttttgatagaaatatggggttgacataccatttactgtttgattatcttcaaatgggctgatttgctaaaatgtggcagaatccaactgtgcagatattttccgtgagtgcgttggacctcctttg

SEQ ID NO: 46654 - DNA, 869 bp, Manihot esculenta
  Intron number 2 from transcript cassava4.1_017417m (locus cassava4.1_017417m.g) derived from phytozome v7.0 (chr-ID scaffold07036; pos 159779 to 160647)
tcacttttgcgatcactggcaagcggctgaagcaggtcagtaacccgaagctctcttttatctttgcctatgtgtctctgtatcttcgttctagtatttgtatgattctttttactttaatagagtctgctaattgaaaatgctaagcttagaaaatctgttcatttatagttcaccgttgtttgatttattttgaatttctatttaaagtatatggttagggttagcttgtaatgaacgtctactcatgtagttctagcttggaatctaagaagaacaccttaatgtgtacacagaaagcataattcgtagaccatcagtagaatactagtggaattgtctttttctttctttttattttttaaagagaaaactttgcaattaagtttaaatcgcatgcagaataaaactagttccccagatttccaatatttaactaagatttgaattttttttccactatgttttcaatgcttatgtaacaaaaattaaacatttgttctaaatactgtgaaataaaagaataatacatttgaaaaaaatttagaaagtaaaataattaattttttgaatttctgtgttaatttgttattgtaattataaaatttacatatattttttaaaattattttcaattagaaatttggtttttttttttattattatcagtgggtgcccttgttttttgatagaaagaaaaaatgatagttttctcagaaaatgaaaaatagaaaatgttctcaataagtaaacacaccttgagtctctgatatttttatcctttccagatatatgttagtatacaaaagctatttgcatatgacaactgctcatgttcctttcccctttcctttggtgttatagaaaca

SEQ ID NO: 46655 - DNA, 840 bp, Manihot esculenta
  Intron number 1 from transcript cassava4.1_010775m (locus cassava4.1_010775m.g) derived from phytozome v7.0 (chr-ID scaffold09870; pos 371451 to 372290 reverse strand)
tgtcacagtccggcaccaatcgcgccaagcaaaaggtaagcgaattctaaatttccgatcgttaaagtgccgatgacgtgtcccctctatttacaaaatcaatgtcgttttgctggttttgattttttgaatttaaaaggtaagtgaagattgtggccacgtcagcctcatcttccgccttctttttattaaagataaatacttacctaaattccattaagtagaatctatctacatactttggataaatcgaatctagcgagaattacacttggttaaaagaaaaacatattttcaaaaatcaatgtataaattttgttgtccatgaatttcaaaggcaacgaatcagaagagaaaatgggggctatgtgtgtacacctcgttttccacttaagagtctgtttggcttattgagaggttagacgtcagaaaattatattaaaaaaaaacaataaattagatgctgttaaaaaaattgtttagaaaaaaatggttttattatttgtgttattataattaaatcacgttaaataagctctaacaatattaaataagctcctagtagtgtcgctttccatttcagaaacggaaaattataccaagtcttaaccaattaagggttttggaaaaagtatatataatctttggtttacttcgtcgtgtgagttgttttcatagttgaagatgcgtgttttctttttgtgtattcttctttcatatatatatatattatttttttttttttttcccctaatgagagagtggttttattcctgtcgttttgtgtgtgatgatgtgtgtacagtcggagacattaatagatcttctacggcaaccaag

SEQ ID NO: 46656 - DNA, 1038 bp, Manihot esculenta
  Intron number 1 from transcript cassava4.1_008521m (locus cassava4.1_008521m.g) derived from phytozome v7.0 (chr-ID scaffold07478; pos 657132 to 658169 reverse strand)
ggggacctcgtcctgtcgtttttaggttgtcctacgtacgtgctctctctctctctctctcgctgtaaaattctttaaatttctttcattttccctccctctacatttccgatcgtcacgggtattttttatttttagttttggattatgggttctgtattgtgtgtgtatttatgtgcgtttctgtgatgggtgctctgcatggctttgtttgtataaatggcaagtatggatcttgtgattcttgaagaattatttgtttttctgtttttttcttatctgcaagtgcgataattgtcctgctttttttcaggtgctttgttttggcaactaatgcgtttctttatatgggaaacttttttattttgacatttcaagcttccctgtccttctatatttagaggaatagagagctctcaatctttgccattctcattgctcttctgggtgggttgccagtgttattttcagatgggtggtttggatcttgggaattttgatttttcaaatttgggttttgttttcttcttcttcttctactgggttttatttgtttgctaaaaatctgattgcttgcatttttttttctctgggcagacatgccctgacaagtaattatattggccaaaattttagcttggatttttttgctctctgaatgcttttgtgatctctttggatcttcaaactctccttccctctccacgacttcatctctttctttatttctctctctcattattataatttgaatttcgggttctttattttcccctcaaattctgttgtaaaattttaatactttctagtatttcaactttttgcctttctgttgttttatacattgctttgatatagggcccagccagactttcttttggttttgatttaccttttcatatttgtatttttttaattaaaaaaatgttctctctcttttgttcttattttttcaaatctatttcagaattggtgattttttattgcatgattttcgttgcagaagattggagcagaaaaggcaaaattttgggggaa

SEQ ID NO: 46657 - DNA, 953 bp, Manihot esculenta
  Intron number 5 from transcript cassava4.1_019115m (locus cassava4.1_019115m.g) derived from phytozome v7.0 (chr-ID scaffold04457; pos 404731 to 405683)
gtggaattcaaagatataggaaaaagaacgattgggttagttatattctatctttgtgttttttcctttttggttgtaggtgaacagaattcaagcttattagtttgacaatcttaagtctaagttgttgaactgcctcatcttgctcacatgagcatcaaattattggtgaaccttgccctatttatgaaaatatgattcaatatacaaagaaaaagaaaagatgaaaaatggatgatcctgttaaggttcatttgaacatgtatgcatttgaaatgaaactgagtataatttgtatcataaactccaacattaatgtcaaatttactcttgcatctcaaatcctcgcgtatctaaacaaactctaagataattctatgcagtgcttagcaaatttgttgcaacaggaaatcacttggcaataaacttttacttttttttttaatctgtctctgatctaagcactataagaaccaggcacacaactttcattagttgataggattataagagcttcaaagtcatcagatgtgcataagctggaattatcacaaggtagcttgtttaaaacaaattctgtcctcctaaaaagaaaaaactaatgtcttttcacaagatgagcaactggagcatcataactatagtatagtctttcacctctttggtccatacatggttgtatgagaataatatacagttttgtggatttaattatgcgcattttgacttcaagcagagacctatgcatgtctcacttcattggatgtttagaataggagtatatattggttcttcaatttatggaatgacgtatattattagttttattaattgtatagaaaatgggaaaatgctcacttataaaatgctatagtcccttgtagttggtttgaagactattgatgactgtcatcaaagctttttcttcttacaggtgaattctgtaattgcgg

SEQ ID NO: 46658 - DNA, 1029 bp, Manihot esculenta
  Intron number 1 from transcript cassava4.1_017064m (locus cassava4.1_017064m.g) derived from phytozome v7.0 (chr-ID scaffold06916; pos 1863504 to 1864532 reverse strand)
aagctgcatcaaccgaaactccatcactatctgaggtaatttttctaccttatattctccaataattggaaaatgtcaccgtttctcttaatcgaatgatttaacagcttagatagatctgtgcagcttcgctattttctttgtttttcttctgattggattgtttcgtttcttcggtgtttagttcaatgagatcgttgtgatggttgcagaaaattattggcgaataaggattaaatcgacctaatgatatattgaacccccccccccccttcttttctttttgtggttaggtaaaagttatgagaaactgatgtcttataatagcatttcggtgtggtttattatgagttaaattcctctatgatatttgccagattaattttgtcaaaccattattgtatagaatgtaatttccattgtcctttaagataaaaaggagaaaggaattatcgagtgaggaaggtcttaacctaggcttgcaatacttgcctttcagtttactgaattctgaagcttagattggaagctcaattgctgaccgagcaaaagtggaaatttctagacccgattttgtgtaatagttaaataagaatattgagaattgaagtggtacttatgttatgtaaattatgatacagcatccgctgaactatgttagtatgttctagttgcttaatcaaactactaaaaacaaagatacaaatactgtttaaccaaataatgacttagcctttaatattctgtgaggccctttcaccttgatcttggtcgtacaaatcacaaataagttttaatacctgatagcctgctgaaattctggttaaatttgtatttcaactgtgaaaataacccttttccatttcttatttacaatggctggtccctttggacttttatgagcgtttcgaccttctgaccttctggccttattatcatatatgaattgctgataggactttttatctgatactttgaatactttgaaatgcagcaatatttactgaagaagaaagacgagaattctga

SEQ ID NO: 46659 - DNA, 562 bp, Manihot esculenta
  Intron number 1 from transcript cassava4.1_011759m (locus cassava4.1_011759m.g) derived from phytozome v7.0 (chr-ID scaffold07478; pos 971822 to 972383 reverse strand)
tctgggtcagattttcaattgttaaacaatttctggtaatattccagtccttctattgcttattttatttttccttctaattttcactctttttctccttttttttttcccttgcattttctgtttgtgcctattctttcaattctttctatcacttcaaataatgttgtgtgtatgcaaatattcaatttatgattgtttcgcaatgtatatttatattatattactaaattatattgcgaatcaattattcgattgaaactcacaccctttattgatattgatttgtattgtggattttttttctttccgtattgtttgaatgctgagaaaccgaatgagagggcagaaatttgctttcttcagtcttttaaggtttcccatttgaatcctagctaaacccaatgcaatgatttggttcttggcgagaagacacagctattgattatatgcaaaatattttttggtttttaagaatttgctctttgttttttcccttgcgttctcacttttatttggggtttctttttgtagataacttggcggagacaggccttgttgg

SEQ ID NO: 46660 - DNA, 438 bp, Manihot esculenta
  Intron number 2 from transcript cassava4.1_016581m (locus cassava4.1_016581m.g) derived from phytozome v7.0 (chr-ID scaffold03219; pos 182177 to 182614 reverse strand)
ttaaactgttccagtttggaattgaggggaagacggtaatttgttttcttttcttgaattcttctgcgttctcaaacgcatgagatatctcttgatctttcgcatgctctctattgtgtactttggataagataataaggtatcaatgcttcacagaaatttttgtgctgattaggatgctagcttcttgaaaaaaatttttgatcacgtgggtattctttatgttaactttgatgatatcttggtcatggttttttttattattatttgtttagtttatatagtgctatactaactgtgattatgtcatatggaatctgttggattatgtcatatggaatctgttgtttgtttgctgctctttgttgcttataccgttgtcaattatcatttttatctgcaggagccttctgtatctattctgaaggataccataat

SEQ ID NO: 46661 - DNA, 665 bp, Manihot esculenta
  Intron number 2 from transcript cassava4.1_028061m (locus cassava4.1_028061m.g) derived from phytozome v7.0 (chr-ID scaffold11341; pos 721398 to 722062)
attggtctaaagttgctaagaagggacaaatagaagtgagctatgattgacctttgatctgtttatattccagttatttattcgttttcttggaggttagaggtgttttagagtagtaatttaaagagctgcttttatgcaatatttcttaacagttttagcttatgtcatctgagtatttgtgcttttttgtctggcttaatagacaaaatttaattttcctataaatttcaatgacattgtgattcttatgagttatttaaacaatgggtatcagatacttctgggcttaattcatgctgcttgtctgtatctgatatgatccagagcataggaatgtaagactgttggtagattgtgaaccaataatgactagatttgaactcttgaattttaactaagccattaatcttccatcaattttttagcttcaagattttgaaggctaacaatctcattttgcccattttaaattggttttgctcttccaaatgaggctaaagttttttttttttttcttggaatgtaggatgctggttatgagtgatctttgctatttgtaatgaatgctggaagctcatgagctttcgacatcctattggccaactctatgagattttaatgttaagatgttaatgtgtgaatgtcatctcttgtgctaggtt

SEQ ID NO: 46662 - DNA, 772 bp, Manihot esculenta
  Intron number 1 from transcript cassava4.1_029862m (locus cassava4.1_029862m.g) derived from phytozome v7.0 (chr-ID scaffold08799; pos 470258 to 471029)
ttacgatttgtatttaaaattgatgaaattatttattatttattttaatgttaattaaatttctgatcgtgaaagaatatatatcctgtcccagacaaaagaaaatcactaaagtaagataattgaaaaataaacattagaccggatggaaaatctacgagaaagtgacatttgaatgtgtattattattattattattattttaaaagtttgtgtctacgttgccttctcttttcaaaattattaaaaaaataaaatcaatatatatattcaaccaatctaaaaatattatacatatctaaaatttaaaaatcaaaatataatttagcataagttaatctacttgattatctctccatgcccactggttgcctggaatgttatagctagctagccagctagctgtactttctgctttctaatatctctgaccagaaaatgaggattcggtcgcaaaaacaaagccgaagcggcctacgcgttgtggctcaagatagagacttgggcaaacccattgcgctgacctttttttttttttatctatataagcttgtcacccttttatcatttcttcatcttctatcatttctttattcttttgctcctcttcatatctttaatttcaaaagctgtttcatttgcttagtaaagaagtgtgcgtagcttgttcttgatctcgaggaaataaaaagaaatggaaacttcagttcataacgttttgacatctcccgtaaaagcagcagctgttgtatttgcggtgctgctcttgagc

SEQ ID NO: 46663 - DNA, 861 bp, Manihot esculenta
  Intron number 2 from transcript cassava4.1_003926m (locus cassava4.1_003926m.g) derived from phytozome v7.0 (chr-ID scaffold04667; pos 8902 to 9762 reverse strand)
ctgctgcccttgctgagtaagttctttgaagcttaaagctgatcaatttacatataatttttattataatttgaataactagcaaaatactaataagatgcatatttaattcttcaaaagtttctgaatggaatacatgctattgtgtttggtactgcacagttaaatttagattcctgaaccagatttttgaaacaggggctactggaactgatagggatctttttttttttttgcttttaaaaaaaagttataaggatacttgtgtttgaaaattgtgccattcatgttaaaaatacaacttatgatacagtttaagttagttttgttagataaccttttttaaatattattcaagtgataggactatgaaactattgatacattcacactttaacacttaatactttgtttgaaaacatggaaaataaaagttggaaacgttaaaaaaatgagaatattgaacaagtaaacataagtttccattttccaattttctttttagaaaatttaaaatagagaatgttttctacaactaacatgccccaatagtcctcattcctagaagatagaccgacaagactcaaataacgtatacaagatatccaatttgagctaaatgtttataaatttatgatatcctcatgatgatatgaacatgtgaacattttaatgaacaatgcaaattttcattaaaattggaaccaaattggttctgcatctgtctttcttcccccctttcctcctcaccttgtaatgctggtaaataaatttcagcaggagctgactctttatctgttttgtcagagataccaattcatgtccatgttctatattgtcgtttcagattcattgagaaat

SEQ ID NO: 46664 - DNA, 774 bp, Manihot esculenta
  Intron number 1 from transcript cassava4.1_033368m (locus cassava4.1_033368m.g) derived from phytozome v7.0 (chr-ID scaffold04584; pos 22714 to 23487)
aacagtgcaggtactccttatagtcttctttccctttaacgaactgcaatttgtcctttgtatttccttatacttgctcttgcttgcctcatgaagaaaagttattaacataatggaatttcggtctataccggcaccataatatcagatttgggcgggggggggggggtgtagaattagagatccatagaaaaacaaggatataggctggtatgagtaggaaatagaaaatatctattctagttctatcatcacctatgatattgaatctaaaagaaattttagagaatgtgtgctaccctgaaattttcttatctttcctgaatgataagaggaaaaaaaattgggtcaaatgaaaatgatcttgtcaatcgggggcctctaaattttgtgttttgctagatagttttccattgtcattccatttcagcctaattgttaccctattagtagtatccttttgagtatttttacttagagaattcttcattttgctcctgcaacacaaacatatagattttctggaaccttttgcagatgctttattctggtggttaatacaaaaagcttattgttattgatgtgatgatgctgtatttgataaagaggagatctattgccattgcattttactatgactaaaagtcaaaacagaaccatgaggcacgtaacaaagattaaaaattaactggaacatatgtgagcaataacctaggttactttttatgttgttcttcagagtttgtcagcaggagaaggaggaagttcttatag

SEQ ID NO: 46665 - DNA, 703 bp, Manihot esculenta
  Intron number 3 from transcript cassava4.1_020972m (locus cassava4.1_020972m.g) derived from phytozome v7.0 (chr-ID scaffold12265; pos 24907 to 25609)
gtgatcaagtatgtggctgtattactcctgtattgttaaaaggatttttttaccatccgtacatggaaatgaagtttttattggattctcaaatgtctgttacggagttgcagaagaaaatagctgtatgcaaaattagtgcattcatgtaactgtataggatagaattagacagatagaactgttatccctctgctttcataaaactgacaattgcattgcctttaacaggatgttgcttccagtagaatgccttggattccaatatcattttaattatctttgtgcttcatttgatttcttccaacccaatgagggtgaaaccattcttcaacagtataaaagaataaataactaaaaataatggtggtcaccattccacgatgtgtccattgggggttggcactggttttgccagagacaggcctacttgaattttgcttcactatagtatagacttagtttctggtgaatgtctgtggttcactgtaaccaatgacttcagtaatggcttttagcttctttgaagtttctcgtggacaagagatcagtttggtttttgttcatactgcaaaaattgaagaaaatggttgtagaattcatttgttcaatactttagcttcttattaatgctaatggttgctttttaattacttctatttatgcagcttcattttatacggcacatctcaaacagctatac

SEQ ID NO: 46666 - DNA, 755 bp, Manihot esculenta
  Intron number 4 from transcript cassava4.1_001411m (locus cassava4.1_001411m.g) derived from phytozome v7.0 (chr-ID scaffold00847; pos 2135432 to 2136186)
caaggtattttttctttaaaaaaaatttaaaatatactattaatctttttattgaacttttggttctttgactctccgttatatggacttcatactttgccccagtgtacctgtgccatttgtgagtgtggactatggagtcttggtccactgtaatttacttggctttgaggcttagtttgcctaacctgaataaatttttgaaaaaatgaagaaaaagaaggggcaaaatgtagattcagtgatgaaaaggatgagagttgttttttcctttgaaagacaagtagtggtgagacttgggagaatatggtttttgaaagaggcaataccttttcataattgaatggctacttgctctgttcgctgttctgacttatcaggtgtcatggtttactattgatctgttttgtcaatttttgggtattattcatgtccaatgttttcagaataatttttggaaactaaaaactatggcttgatgaacttagttcctttagccagtgccaagaaagggggaaagagagctctttttgttatgggtttgatgtgatatatatatatatatatatatatatatatatatgcttgctcattttctgggctactgaatgttaaaagccctatacttctttgcatcattatgtgatatattactatcaacaccagtatatgagggctgcttttcaaattcagtgatatattgaaacacaaatttgattgtagagaaatatttcatgtcacaggaattgttgtgt

SEQ ID NO: 46667 - DNA, 764 bp, Manihot esculenta
  Intron number 1 from transcript cassava4.1_027281m (locus cassava4.1_027281m.g) derived from phytozome v7.0 (chr-ID scaffold06908; pos 135499 to 136262)
ctattggcgtggagtttgctaccaggactcttcaggtaccctttatcatctccctgaattgggatctttgcatttttttcccctaatttttttccttcacttgctcattcccatttgctttttttaatttcttttgcgagaataaacacatatttaaatctcttataatatgtctttgagacaaaatttccattgaaaatctcgagttcgaaatttatcggaaaaaaaaaaacaaatgccgttgttcttattactcaatgtgatcatgtgacactgaaacatgatgaatatgaacattaatttttgcataggaaatatgagtttgcattgtggagttgatgataagcagagatattattatgatatgtgcatattctgatgagattagcaatttttatatagtcatttggtaattttggtaagcagtgtggtgggaaactggtaggtattagaattcccactggtgggtttgttcattgaaattatttgtgaagattgaattaatcaagcttagttatttataaagtaatcagtagttgaatataggcaccttagatcttcaaaaaatatacattatgcatcttagtatccaaaattatatgaccatatgattatgacattttcccataattgaattaggggtaggatttgtgatgttgggtagtgaaatggtggactccacacaagtgttgcagttgtctgtttctacagcttaaacttctaagtttgatacaggtagaagggaagacggtcaaagcacagat

SEQ ID NO: 46668 - DNA, 727 bp, Manihot esculenta
  Intron number 2 from transcript cassava4.1_027847m (locus cassava4.1_027847m.g) derived from phytozome v7.0 (chr-ID scaffold09260; pos 50913 to 51639)
ggagaagcatctgcaatttcagaaactgctattgggtaaataagactcacaaccttcttatcttctgcaaggaaaattttcctacaaatattagaataggcctataattttgtagaacagagcaactttgaatttttctgccatgtttttgaacttctctatcttggaagtttcagaatagtttcctattataggataacaattgcatcataattttaagatgttaattcgaaaaatggaaaacaatataatacaatttttcaacaaaatattaaaataaaaaattataaaatagtacttcttcatccatccaataatatcatattcatagtctgataaactgtactttgattttccttgtgtcctttattttttattaattcacaatattagtaaacctcatattttcagagtctacacttggccaaaagcttgttgcaatgtataagaagatttttttttaattataataaatattttctaacacatataatcttatgagaataaaagtaatacacatgaaatgaaactaatctaccacataatcagaagagttttcaataacaccaatgcctaatcaagtttcatatgtcctttagtaagtttttccccctgctttaaagataaatagatattctaatcacatgcagaatcatctaatctagagactaattgcctttttcttatgtaagtggcccaaacattcctggaatttggaaaagagaac

SEQ ID NO: 46669 - DNA, 232 bp, Manihot esculenta
  Intron number 1 from transcript cassava4.1_019112m (locus cassava4.1_019112m.g) derived from phytozome v7.0 (chr-ID scaffold11170; pos 150210 to 150441)
cttcatcgttcctttcgctggcttccagctcctcggttttcttctttcctctctctgaattttcttctcttcttcttttattttcttaaaaaatttgtatccaacggagtgtttaagcattggtgacttcttaattgggagttttgagtttttggacatgggatacaaaaatgggggttctcattattagggtttttggttttgttgttttgtacagatatctattggaaga

SEQ ID NO: 46670 - DNA, 432 bp, Manihot esculenta
  Intron number 4 from transcript cassava4.1_015576m (locus cassava4.1_015576m.g) derived from phytozome v7.0 (chr-ID scaffold01945; pos 491531 to 491962 reverse strand)
aagggcaggatacattcacacctattagttctgttgtaagaaacgaactgagattcctttttattaatctctattgttaaagcatgccaacagcaaacgaattttgaaaaaaataataactagaatagttttggaattccaaggcttatttccaacactaactgaatttgggattgcgatgggtggtgactgagtcatgcaagataaccttcaggcatattcacttctgcttttcttttctcgtcttttgtagttttgagttttgcgcttaacaatcatatctgattttgataaaggatcgtatctaagatttatcttgttctttatttgtatgtgctatcattcacggtattgtttatcatgctccaaattttgattctgcaaacatttgttgcagcttcccaagtcagctgtgcctgaccctgacaactt

SEQ ID NO: 46671 - DNA, 721 bp, Manihot esculenta
  Intron number 1 from transcript cassava4.1_033547m (locus cassava4.1_033547m.g) derived from phytozome v7.0 (chr-ID scaffold01237; pos 74751 to 75471 reverse strand)
ggcattcttctggcgggcaattggtttgcttcctgttccatctttggtgtaccataaaattgtttggtgcaattagtgacacgcagtgattgaaattgtcttgtaatcattgttgcttttctttgagaaataatttcttataaaagaaaagttttaaccggtctatgagtattaaccgatgtcatctttcatttgagtccatatttaggggggctttatatttctacaactgtctgatggcatcaaaccaaattcggtgtaggcatgtcatgaaatcctataattctgtttagtgtatgagggtgcttgcagctgttgtaactagcaagttgcaactcaaagatttacgacatcattccatagtgctgcatgcttactgtctcattagtcagaagaaaatgattttaaacagcttcactattttgtggaagaagaggagctatttaaaaaatcatgttcttctgtgtgtttttgaattcatttcaaacacaattgaatggtgcaaaggaactatatagttggtcacaactagttagaattatggcataattattatagttgtctatgtttttgggaaattaattttttttgcatctcacataattgatgcagtttgttcacatgctgtttgttgaagttaacccttgatttatttatctactacttttgaagattcgatcttggtttctacatgaattaactagcatctgaattcagggtc

SEQ ID NO: 46672 - DNA, 752 bp, Manihot esculenta
  Intron number 1 from transcript cassava4.1_013989m (locus cassava4.1_013989m.g) derived from phytozome v7.0 (chr-ID scaffold04796; pos 28191 to 28942)
cgtcttcctcttcatcgcatcattcgggacgtgaggtgaatttatctatttgctctatgtttctcccttttcttagggtttttgaattattggcatctgttgccaattatttctgattgatcttgccatttgactgtagattagagccggataatgtttaaaattggtaatttgcttgtattttgtataagatttgattgaaccgtggcttcttcagaaattgacgatatttctcgttgcctgtactgagattggctaaaaaataccattaattatctgtgttcaaagctttttgaagttgtttaatgaaatttgagaagtcctatgtaaatttaatttctttagaaaatgttttcggcagctaatgtggatgattgcttgataattccttaactccatgcttaaggaaatttttattgtcttaaaactatgaaggagaaacttccacgaagcgatgattcttaagttatgctatcagaagttgctatctcaccgtgtctcattttcctttattttcccataaattacattatccattgttttggccctgaaagtttgaaactcctttgagcatatatttttatttttattttttgtaaatgccaacttccaaattgaacagtggcaggaagcatctttcatttgtctgtgtgcttttgaatgcatattctggctttgattatctgacatttgctgtatgccattttctctctgtagaccatttacaaagttttcaggagctgggcttcaaa

SEQ ID NO: 46673 - DNA, 840 bp, Manihot esculenta
  Intron number 3 from transcript cassava4.1_008121m (locus cassava4.1_008121m.g) derived from phytozome v7.0 (chr-ID scaffold07520; pos 517624 to 518463)
ccctgaaaggcgaagagctatttgggcaatatgtgagttggatatttgattctgatccattttaattacaaaattgtagcaattgcacagggttggatggatgattctaatcctgctcaatattacatggtctgaactgaagtgggttagagactaaaacaaaaaccagtaaataatatggaattagacaacaggatttaataaataaagcttgttagtagctttttggatttgtgaaagacacttttgttttgtaacataaataattcattaaagttttaatgcctcctcgcaagaacaacttttcaaatataaactgtggccacaatttcattttcttttccctttagttaacatatagctgctccctgtggtgtggggagatgttgagggagatgataaggggatcggggattgaaactgggacctccaggatttaacttaatacatttgctgccgagacaagcccgtgagtgcaagctcattgaatttaaagaggtggatcttatcataaacaaaatgtacaaagtactggcatttagtaccttagactttaaccaaagcctaactttttatgaaatagaatccattcctcttgaatgagcattccatcaatggttttcccttttttggttggttatggaccttgtgtttagtctgcaaatcagaaaacaccgataatttcctgcataagcaaaactggcagattctgcaagaatgagattgggtaatctgaattatttttatagttggatattccaattactttgtatttattatattttttaattttgctccttatgatgtactctgcaaatgtagtgtggtgtagaaggacag

SEQ ID NO: 46674 - DNA, 293 bp, Manihot esculenta
  Intron number 1 from transcript cassava4.1_002985m (locus cassava4.1_002985m.g) derived from phytozome v7.0 (chr-ID scaffold08159; pos 458877 to 459169)
cctccattacaagtcttctcttcttccagcagctggtaaagcgtctctcctacatctctcatgttatagtcccctcataaatttgcaaccgaattagagtctgatcatcatcatattctcttcttttttttttttcttttttggtttatttgatcaaaagggtcattagttattgtagattgatcttgctttatgatattcaactatgctttaatggtgtgagtttgtgggttaaatggatcttagtgagttttgtagttgcagaatcaacatcaccttcaacaaaagctagg

SEQ ID NO: 46675 - DNA, 905 bp, Manihot esculenta
  Intron number 1 from transcript cassava4.1_003074m (locus cassava4.1_003074m.g) derived from phytozome v7.0 (chr-ID scaffold07351; pos 43486 to 44390)
aaaaggttcggtgccttatgtttcttctttttcttcttcttcttctgtttaaatgtgaattcttttatagggattttgtgattcttatttgtttaatgtgcgtagtgatgtagtcaatgagacattctgattcttccgtttgttgatatagagtagttcagaattgtgcttgttgcaaattgtctacgaccacttgaatttcagtttgtatgtcagtatacgcctgcatcattgaatcttcctatatttattatcatctatctcttatctgtaattaaatggccttaagggtgtgaaaatggtgtttgattatagcaatcattgatgcaaaaggtgtcccaattgtatattttatagattaagttgacagctgaattcttgttgacttcctgttcaatgagctcattgctggaacttttggtttaatgtgatatgaggttttcttttgtggtttatcatattattagattagcaagctggccaattttttgaacttaggattgttcataattttgatctttcgcacattttagtacataattattcatgttgacaaaatttttcgaataatgtactctgaacatgagaaataaaagaagaacattctgcattaaggaactgaagctaacctggtgtgtgagatacaattgtgaatgaataaagaatttgtggaaaaatatcctagagacacatagttgctttcctagttagttgaaatgtggcgcgtgatgcaacattaatcaaacactataaaagtattaacaacgtaggaattgttatatctgagttgatgaatttacttctactgataactgtttcaatgtgcatgtcatcattgaaagagcctgattatctgatgtgcagcattttgacaggtggccgaggcatacaaggtttttgaagac

SEQ ID NO: 46676 - DNA, 821 bp, Manihot esculenta
  Intron number 1 from transcript cassava4.1_014028m (locus cassava4.1_014028m.g) derived from phytozome v7.0 (chr-ID scaffold08860; pos 176029 to 176849 reverse strand)
cacgtggaagcccagaaggtgaaattcttctcgacttcttgtgtaatcagtaaatgggttaagcttatgtgtatgtataatcatataatgttgataattcatgtatgtatatgcatattatataataatttcgtgtttgtgttgatacccactttccattttcgtcaattttttctgcttctctctgctaaaatcgtctttcttcttcttgtcattctttgtgagcttttcgtcttttctcttctattctatactgctattcgccgcacacagaaataccttatattgcatgtgtttctttagttattgttgtaatgggcatggatttttagtcggttttctgatctgggtatgtttaattttgttggaaatcaatttgtttagtgtttattttgtggatttagtttttatttattgatttattttcaatcgtatcgatctttatcggttagtcgaattgctattatattgtcaatttgaattcatgtatactctggtttctttgatgtttattagtgaattttatgtgggagaattgaatttttctaatcttgaatgatagactttgtaaggggggaaaagatctcaattctcgatgttctttttctttcattgcccttggacttgattgggctatttcttgttctcttccattttcttttatcctctaacgaagcctcatgttgttgattcttagtattgatgttaaactgtatgggatagatttcatatttcaaccgtaaaaatctgtgtgtgcctgtgtggttttgcatttgtttaacttcttaatgatggagctgcaaaacttctccttgaaaagg

SEQ ID NO: 46677 - DNA, 751 bp, Manihot esculenta
  Intron number 1 from transcript cassava4.1_011829m (locus cassava4.1_010419m.g) derived from phytozome v7.0 (chr-ID scaffold00847; pos 732246 to 732996)
cacttcttctcgcagattcgcttctctcggtagtggtaatttccctatctctttctcttttcttctatgtaaattactatgtgaatcgttcttcatttctctttcttagctctggtagcttttgttgcttggaaatggagagtagactgacggagctttgaattgcttttttttattattttttttttcgctggattatactgttttctgatcatgaatgccatttttatttaattatgggccacttttaaattttttatgctttgcgtgttatgaatttgaacaaattcaccggtaaaaggaaaatatgcaataataataccacttgtaaataggttcacttcctagttgtgtcacattgctgttgcgttgcgtcaaactcaatcgatctgctatttaattttatgaggaagagtggttttgaagaaaaaatttgaaatccttgcatatcaaacaatttgtacaaggttgttttttcaaagaactgcaattattattattattatgattcatgtgactccttgaatcatgttgagaattgaccccccccccctccaattttattgagtttgtgttttgaattgcttgtgtgtatatatatatatatatatatggacacacagagactttgaaaagctcagtcctgttgtggcatacttcatgcccagataggttgggatgtattgcaaacttgtaattttatatatgctgtgcagccgctccacaatcacagttctttggcttgaaagct

SEQ ID NO: 46678 - DNA, 408 bp, Manihot esculenta
  Intron number 1 from transcript cassava4.1_022870m (locus cassava4.1_022870m.g) derived from phytozome v7.0 (chr-ID scaffold05131; pos 797 to 1204 reverse strand)
catactaccagaacaccttccaggagaaacatcaggtactaaaccattagaagaaacttttgatcaacaaactaaacctcaatatacaacgaaaggtatcaaaatacaagaaggcgtatttcgacaaggccaatttagtcaaccatatgaagatagtgattattctattaataccttaacccagccttttcatcttgataaaaaccaaattcaagctgactatatgtcagattcaaaccgggggaaaagggacatatttttacaaacttattctagaaaagaacaaagtataattaaaaaacaattctttgcattttgtgaacaagtcaaaacaactataccattctttacatatttacaatattttcatgacaagaaattaaatgtattagaaaagaaaatacacaa

SEQ ID NO: 46679 - DNA, 613 bp, Manihot esculenta
  Intron number 1 from transcript cassava4.1_003100m (locus cassava4.1_003100m.g) derived from phytozome v7.0 (chr-ID scaffold07318; pos 38798 to 39410)
atcgattacatttgcagcgaagttcaaaagcgcaagtatgtttgcttaatctctcttatcataataaattactatgactatttttggttgaagtatataatcaaatgctcttatttggttcagttttcagattcaaatttaatttggattaaatatgcgttgcattgcaaattttaggcggttaaattaactgcctgcaatcacaaaagagaattgcacaaccttctctcaaaattttatgcattgacatgctcatatgtgaaactataaattttaaaattagagtaggtggctgtttcgttcgaaacaaacttatgaaggtgagtttgtaattttagatgttttaggcctttttacgtgaaattgaattgttctctttgtgataattatctctattctggtcctaagatttgcttcacttgtgttcaccgtgtagttctgatgaaaaattcttgtgaagagaggaaaaacaaaagagtttgtttctttggggaatgattactgtttcctcatcatttggttatgactcaaatgtatttagcacttgtttatgattgaccctgatctgttctgtttttgtgcatcttggtacaggattattgttgtgctgaac

SEQ ID NO: 46680 - DNA, 436 bp, Manihot esculenta
  Intron number 1 from transcript cassava4.1_006106m (locus cassava4.1_006106m.g) derived from phytozome v7.0 (chr-ID scaffold00224; pos 190217 to 190652)
cctgatcctgaagctgttgcacaggattttcaaaggtcagcctctgtaaatcatcactttgattaatcttgctaaatcacttctgggtttacttcatttctggttttgcatgttggtttatgcataagggtgaagagattcaaccttttattttccccagttgcatttttgaacaaagtttgcgagtttaatgtgatactctgtttcattttcaagttattgttgcattttctcagctaccaaacagagctatgctgcacttttctatatttttatacaaaatcatttccttttttggttgaatcagtccttttcttgtgttcattgtttttgctctgtttttctttccattttcttttaaaccaaacagggtcgtccctgttcttaacttttttgcttttggttattttcattgttttaccttgcaggagagtca

SEQ ID NO: 46681 - DNA, 685 bp, Manihot esculenta
  Intron number 2 from transcript cassava4.1_023660m (locus cassava4.1_023660m.g) derived from phytozome v7.0 (chr-ID scaffold04024; pos 176182 to 176866)
gtccccaggtagctggtatagtattcctcagccaggtatcgtagtttacttggtagttggttgtgctgtttctctagtattgatatgaaaagctgtattccatggttttaaatttattgcaagtccaatttttatagaaactgaaaattcaatggaggagaagtgaacttacattgatgacttgcttccactgaagaatgctgtctttgggtaaccaaaatgatataaatggcgttctaaatgcaattattattctgctaatgccaccattgcaatttctttcattcaaagaaagaggcttgaaattatccatttttattctaacctttgagtagttgacttgggctgtaaattgacatttcagccctgcaattttatttggtgccatggttaaggaaaaaaaatggttttttttggtcattgtaacataacatggagtgctaaaccaacattctcttctatctgaatacatgttctacattcataaagtttagatcttacaatgaatttttccctttcaaatctttcatttgttgtaagctggtttgcaaagtttatttatatctatgttgtaattctattccgaagctatgaaactttatttcatcccttggaatctgtctttttcattattttctgatagtgtaaattttgattttcaggaattgattgctgcttttctagc

SEQ ID NO: 46682 - DNA, 833 bp, Manihot esculenta
  Intron number 2 from transcript cassava4.1_004127m (locus cassava4.1_004127m.g) derived from phytozome v7.0 (chr-ID scaffold09354; pos 86119 to 86951 reverse strand)
atcgatgtaagttatcgatagttttcttctgattttatgcctatttcttcttttaaactcgaagaaatgagatgagaattctgtgagattgcaatacagctgcgagaaaattttgaaagcttttgtttgattgcaatggacttgtgagcttttattgtctatctacattatctttattctaacttctagcaaagaggttgatttttttttaatcctcaaaactgagcttgtgattctgttaatggaatttgttttgtttagcttttggaattttgggagcaaaacaattatatcgtttgtctgctggcatttgcttttattattgtatctatgaccattgtattgtttgggtttctagttccgtgcatatcctgctgtgggaacttctaactaatgaatccattcttggatgcttatctagttcaacttttatgcatgacttaataatttaaccatctttaatcaaaatttatttttctcactgtgcttcttcgtgctcagttggtctgttaacatgcttatttccacttgtgctgatagttaattgatttgtgagaaggtgtcaaggtgataataactaattataaattttattaccttgtgttcatatggaaagttacagttctgaattctgagatttggttacatgttattgtgtgttaattttattcttttaatatcttgctgtatgtgattgtttatatatatatagaaaatcaaaaggtttttcttggcacgtggacttgttgaactttttaggttttgcttttgcaatttcatttaactaactcgctagtttattttccaacagatccccttgtctcacatttctg

SEQ ID NO: 46683 - DNA, 867 bp, Manihot esculenta
  Intron number 2 from transcript cassava4.1_026724m (locus cassava4.1_026724m.g) derived from phytozome v7.0 (chr-ID scaffold11069; pos 463413 to 464279 reverse strand)
gaattgaacgcttggctgaagcaattctggataaagtaagttgtttttcttatttctttttgctttgcataaatttcatttgtgattatggttattgcaagcatgaccaaaatattgttgcaaaaattgctggatcacattgtgctttttatctcatttcattcgtcattaaatttgtatgctcatcaacttcaatgggaactaatactgggttttgctttatttctcagctggttgaaattttctatttgtattttgaatccattttgatatccaatttccataacagctaacaactgcaagagtgagagaaaaggtcacagttttatttgcctttgcctgatctaattctctagtaatttgagcatgtagaatttcaagaaaattattacggtaatggtatggaagctttaatcagaccaggtttatagaacttttcatgttcacctatgatctaaagacagaaattaataatgagccattgtggcttcttttcccctttttagtggattctgatatttttacaactcttcaaacatgtgtgcttctatttctaactttggaaaaaacaaaagctcttcctattgacatattagcattccataactgcagccatcaattttctctgtcctttcaattaaatttttcataagatattttttggtactttttaggagttgctagatggatcaacttggacattggataagttcactgaaacctttatggagaacttgaggtcatatcctttcaattacttgtgattatttcctgatacccttattctctttgtaataagaagtgctgctctgttttagttaattccttacagtttattacatctgctgataaaatagttggcttgaa

SEQ ID NO: 46684 - DNA, 192 bp, Manihot esculenta
  Intron number 1 from transcript cassava4.1_011352m (locus cassava4.1_011352m.g) derived from phytozome v7.0 (chr-ID scaffold10045; pos 185389 to 185580 reverse strand)
tcactcctgcacaactgtgagttcttcgatttccttctttttttgctgatttaatggtttaaagaagttatttcaagggtttgatttgatatttatgtatttggattttgagattggaatgaatctgatatggttggtttttttatctgggttttgcttgattattcaaaaggctgactgaagaagctacag

SEQ ID NO: 46685 - DNA, 525 bp, Manihot esculenta
  Intron number 2 from transcript cassava4.1_008991m (locus cassava4.1_008994m.g) derived from phytozome v7.0 (chr-ID scaffold08473; pos 82379 to 82903)
tactacaggaactccatttcttatcccaaccacaggtattgtattcatttatacaaaggcataactgatctgaaacaagccattaagctattgaatctgttaattggtttctctgctgtataattttgaccataatttcatttacgttggcaatctaatgtggaaagtctcggctacattgaatacatcaatttattgttaaactagaacatgggatgttttataactgtgttgtttccatacaccattcaaataaccagttttatgatctgctacacagcctaaaagggctggttatatacttatatatcgtttgcagccttctggagtgtttttctgtgatcttccaatcataaaagggcaaccttactattgcaccaaggcttgtcatcaatagctttcaaatttttgtcagggcatatcatcttagggaaggaaaaaaaatgatgggcctttttttcatgtgttctgctaatcatagtttgtttttagttgatatttttgttttgcttcaggtactggtgc

SEQ ID NO: 46686 - DNA, 911 bp, Manihot esculenta
  Intron number 1 from transcript cassava4.1_030346m (locus cassava4.1_030346m.g) derived from phytozome v7.0 (chr-ID scaffold01608; pos 276624 to 277534)
gggtaagtaacacagtcatatcctgctatttaatttactaatttacccatattctcattaataattcctcaagcttgcatgtttcttaaaattcgtactttttgttaacccactgattgatgccactggccatagattgctacaaaacttggcatccttgtcatgtatcatcttttcaaatgcatttttcacattgattagcatgttatgaaatatccatctgaaaactgatgtcaaaatggctgaggacctgaaactttatgataatagagataaagctgagaattttgttgaattatcgaaggtaggtagggtgatgcctccaagatactcttcctctctagtaccttaccaatggggtaatctgaacaatataatggggcagttattgacatttgtccatcatttgatatgtttatatatatattcattggaattgtaaggatcttaatgttggagaaagttttgtgaagttaagattatcgacagttggttctgcacgtacttgctgaataccacttgtcacaaggtgagtggtgctctctgtaaatataaacgtccttcatcttcactgttctgatttttatttttcttagttctcctaccattggttcctcattcctggaatagagctacaaattaaatattgattatcttgtgcaaattatttagcctttgtattgtgtattggccttcaggcatgtactgctggtgtgctaattattgaaacacgattcgtgtaataaccttgaattcaagatcaatttacgattttcaaatagtttatgtgatttgaaacctatggtgtaaaaataaactagtctagtttttgtagtcggttttcggtttgtactaaaaaaatgtgtttttctttccattaatttttgttgacagttacaacattgatcaac

SEQ ID NO: 46687 - DNA, 681 bp, Manihot esculenta
  Intron number 2 from transcript cassava4.1_030053m (locus cassava4.1_030053m.g) derived from phytozome v7.0 (chr-ID scaffold10797; pos 101798 to 102478)
gaaaagtaagcttgatccttccctacataatcctcaaaatggataaggatgttaatgcttttgataaaggttttatcttatacatctaagtacatttggtttttgcttaaactttgaaatcctaatgaaaagcatatcttgtggaggtagatattagcgtaataggggaggatatggaggtcaggacaattatataacaaggaaatgcttgtttggaagacttttctttttcattttttttagtgaaggaaaaagtataaattctttgggtcagaatcagaatgtagtagttataatcttctttcctgccaaaaatccatatgagatatggatataacctttattcttagacagcattgtagttgtgagaaactgtcttgatttatcctttttcctgtgaaacccaaatggtgggcaaccatggttatggtggttgcatgcaagaatccagtcaatcaccatggttgaaaatgtaaattcaagttttaaaaggttatttcttttaatctgattacaatccataaactatgtgtgagggctgcggaatttatgttagttaaaagtgttttatttgttggataaattttgtagctattggatcatttgttttgctaaagtttcttgttaaaatagagggttgccagatttgctgaaattgtcattgtattctacaggaacttg

SEQ ID NO: 46688 - DNA, 443 bp, Manihot esculenta
  Intron number 1 from transcript cassava4.1_011364m (locus cassava4.1_011364m.g) derived from phytozome v7.0 (chr-ID scaffold06701; pos 185184 to 185626 reverse strand)
gtccacggtatatttggaaggttagattctatgatttattgaaatttctttttgtaagttcgatttttattgatgaccgactaatttgtttatctttgaagattattcttttcattttagttatttgatattgtagttttgcagaattgggtttgcttttatctgaaataactgttatttttaaatgtatgattctatatttctatgaaatttgcaatttatcaactctaaaaagattttgagcagttccttgtttcgttcaattcctgatacttcaatttattgaaattctactcggatttcccccttttttcctgctcaatctcagcagccaagcttctctattgttcccaattcaggactcattagttattctttgtttctctgtggttatgtaattctctgcagtgcctcagattggaaatttgcagctgagcagttcg

SEQ ID NO: 46689 - DNA, 714 bp, Manihot esculenta
  Intron number 3 from transcript cassava4.1_021848m (locus cassava4.1_021848m.g) derived from phytozome v7.0 (chr-ID scaffold02193; pos 43483 to 44196)
tttgtgaaggtagatagttcatctgaataaagaataattgaatatgtatcaaatatgccaatgagaagcttttgttgctatttatgttgttgttcttctggtgaaaaaagggtaactaaggaaaagcaaatttagctgttatcttttctctactcaattacctgagattgtcttttcattttttgaaaagccagagatttcattcttctgtttgatttcacaaaatgattcatcttgcataaatagtaaacaatacttgatgctagattatagatcatgaaattttttagtgcaagatatgatgacaatagtccctataaattgatacatcatttattgtctcttctgtatatccagttacctcactatttaaattccagttaattggctgtaatactaatatattatggaaaccactctcaattttttattttaaggcattaaaatactgattaaacaacttttactgttcattagtgtcatcagtcaaaagaagacaaaggtccccactttctagttttaggaaaatagaggcacattttggtcaattcaatataattgataatacagtctacatggttattatttatatatgttttatggaatatagatacttattctctcccattcacttcaactgtagtgataatcagtcaattggtcttctttgtgtatgtttgcttattttatccctcgccaactgtttttgttcag

SEQ ID NO: 46690 - DNA, 593 bp, Manihot esculenta
  Intron number 2 from transcript cassava4.1_015344m (locus cassava4.1_015344m.g) derived from phytozome v7.0 (chr-ID scaffold06916; pos 1990812 to 1991404 reverse strand)
gtttctcctctggtggcactggtgagtgttttgcagttttgtttctttaataaaggcacctcacatgggaaggacagactgttgcctaagccagtagacttgcttgtctccaattgtccaatgtcgacagggtttcagttacttacaaggaatcttcttttgaattaaaccattgtcaatggtattggatgtttgccggactgctttcactcaagtttaggatgtccctatgatgaaacatttttataatagctttgttattcataaactcataagtagcttgtccagttattaactaaattacagccaatttttcttattgaagttttgttcttgtttgattgtaggaaaagggtgcggttcaattggagttctctcagaaattgtatagggtcaaatttgagttaaaatatgctacaaaaagctatagcatggattattattttgaaacgaaaagtggtggtacttgcagcatcttgttctaataagttttctttctatggcagtcatatcaataatttgtatctttattgaatactggttggcacaggaaaagtagcagattgggattgcactttgcatgatttgcagtt

SEQ ID NO: 46691 - DNA, 557 bp, Manihot esculenta
  Intron number 1 from transcript cassava4.1_032311m (locus cassava4.1_032311m.g) derived from phytozome v7.0 (chr-ID scaffold07478; pos 358273 to 358829 reverse strand)
gcaaagcgttgctctcgtatgaataaatctctttttttctttatgcttagctttaacacatctcttttcttctttttgagcatggtttcttcgccattatgagtttttcatcaactttcttttcttcctgtgtatcttttgaattcttcatcaaatctgataatgttattagttaattaattaattaaccttacattataaaattttagcatgcatgataagtagggccaagtctttgttgaagaggggaccatgtcatatccatgagaactcaaaaatcttttaaaccaagaaattataagacagtcatgaaatagcattatgagttaggtgttggtcaagatttgcttccttgctagctttttgtgccatgatgggtatatgccattggtgcttttgaagaaactgagaactttttatttttgtttaattatcttttattaatatctacattaattccagtccatttaattatatattatttttcatatttttttgctccaaattttgatcaatgagcagaaggtgtacttgctggagctaaagcagctgctgtt

SEQ ID NO: 46692 - DNA, 548 bp, Manihot esculenta
  Intron number 3 from transcript cassava4.1_005843m (locus cassava4.1_005843m.g) derived from phytozome v7.0 (chr-ID scaffold07520; pos 1297686 to 1298233)
ctcggcccgtccaggaagctgaaactcctgtaagttttcatttcccagaggacagcacttctttaaagcttcttcctatctagattccacagtttctgtttgagttgatgtctttgtggtttttgaatgtttgcttgattatctgcctgatatttctttctaattttgtttgctgaagtgaaacaatttttttgtaccatatgcttgattggtatggcgtggtggtgggaacagagaaataatcaataaattagacctgtttattggcgctttataaatcctgatatgcatttctacattatgctccgttacacaaagtcagataccgaggagttgagtttcacttgtaaaatagtcctactatagagatcatagcattaagttaatgggctggtttagaatctgctatatttgactcgttggaatttggcacttctctctctctctctcacatggatgaccagttttgtgttccacaaaattttttttttactgtgttcttaatggatccaggcacaaagaagggctagaattcataagttacgatt

SEQ ID NO: 46693 - DNA, 795 bp, Manihot esculenta
  Intron number 1 from transcript cassava4.1_020064m (locus cassava4.1_020064m.g) derived from phytozome v7.0 (chr-ID scaffold09576; pos 54703 to 55497)
tggtagcggtatgcttccttgacattggtcaacgcatggatatttgtctccaattgatttggtttggttgtttaaaatataggataacttacagtacaattcttgaattttttgcaaaactcataatttactcccatcttagtatttgagttttttattttatcaacaaaatattccttggattaattttacctacagataattattaatcgaagaagtcaattaaaattaaattgactaaattattataaataataaaattataaaaattaagttattataaattattaaaattaaaatgattaaactattataaaaagttaaaatctaaaagactaaattgttatagtttaacgatggatatacaaaaggattattttattaataaaataaaattttagaaattaaattatttattattgaactaatggagattaaattatggattttactaaatttccggagctagattataaattaatttaaaatatataatttgattgtttgattttttcgattttggttcaaaattgaaccattgtaatttgagattcttttagcaataaaaatcattatcaaaagttttcctttacacaagtaatctgcttgatcatccctaatcaactactctggatggaaaatttttattattatgaacccatctttatacgtaaaggttcccaggtggtcagtgtattttgcttattttgtgaaattacttttcaatgtactctcaattttttaccattgcttctctgttttatcttctgtaacagcaaattgcttcaattattg

SEQ ID NO: 46694 - DNA, 646 bp, Manihot esculenta
  Intron number 1 from transcript cassava4.1_028475m (locus cassava4.1_028475m.g) derived from phytozome v7.0 (chr-ID scaffold08757; pos 564738 to 565383)
tggattattccaacaaccagccagcttcaggatctgtaatatgagttgttgatgtaaatgtactttattagtttcgatttggccttttgattggttttctttctgtgattctcgattgaaaatatatgtaactgaataataatcaaaccattaatctctcgtatatctatcaaaagttgttgcctttatttatttatttttttcaatgaaacgaaataaacgctccattattaatagactaataagaagtaaattacatatatattctttaaattatgattatcaaacaattttttaaaataattttaattattttgataacatatttcatttttataattatggctgcttttttctatttgtcactctcaccggttccagctccgacggcataggcgaacaaatcgatctctaccgatctatccataacatggaaatttgatttacaattctcaactgggtttttctcctctcttcttattctcatcataacattaatgcctgtggtcctctcctctgtttcagtttcagttctagttttctttcatttgtttagcagcgatttctgatacttgtttctgtgagttgatgtctgcatctcattctgatagacagatatccaaagttggcggcagagtagatcacg

SEQ ID NO: 46695 - DNA, 980 bp, Manihot esculenta
  Intron number 1 from transcript cassava4.1_015332m (locus cassava4.1_015332m.g) derived from phytozome v7.0 (chr-ID scaffold06916; pos 757824 to 758803)
tgattctaagaacttcagcttgggagatttcctcagtaagctctcaaatttttcacttttctttatgttttcttttcaattcatgggttttcttcctgaatctttgatgaattcattcttctaattaagtctctctctcatgtctgaagtttctgatctctgattgaattgttgcctgaatccgttgatttgttgaatttctgtctctctgcagtctgtggtaatcaaataaaaatttaagctaagctcagagtcagtgatgacatcttccacatgtttctgatccctttatcagatgctttaagtttttttttcttttttttgggtgaattactgactttccggttgaattcaattaatgaaatggatgagtgatggagtttcatcacagaggataggacaggatagtaagcatttaagatgttactatttcttttctttttttttttaaaaaaaagtaaaattcattttttctttaattctattggacaggtttattttttgaaacatatatatatatatatttttatagaatgaaaacctataaaataataaatttattaaaaaatagattgagtcggtgcggtcacatggcagtacaattggacaatggcagtaaagaatgaaaatgaaagtgctcactgacatctgtcagtcagaacccaaactcacatatatttcactagcttttaagacaacactttcattctctttctaatctggcactgtatcattggccgttctgctaaataatgataaattatataaaaaaaaataattccaattaactctttaaagaaaaaaattattatttagtatttttaaaaatatattaaaatatttttgcaaaaatccaacattctctgcagtttgggttaattgatcagttcaattagggttaattaattaatgttttttgtttcttaaatttgatgttaatggcagttttcaacaccaacaacaatcattcagtagttcaa

SEQ ID NO: 46696 - DNA, 1020 bp, Manihot esculenta
  Intron number 1 from transcript cassava4.1_015662m (locus cassava4.1_015662m.g) derived from phytozome v7.0 (chr-ID scaffold02658; pos 1055860 to 1056879)
ctgttctcaaagatattcgaccccatatactggaggtacacttaacaatccaattcctagttttttttatcagcatttatggttgtgttcactttttcttttgtttttttttttcactttgcatgtattcatttcaggaattcgagacacattttatctgaatttgttgtttcatttgtgtggtaatttggttcatatgggtggtcttattttccatatcagaatttgcttcgtttgtgagcatttggtctttatcggagctggtgatcctttgtgggcttgtaaatttatgatcttacgcgttgcaaatcctcaagcccatggtgtaatttatgatcttttagttgaatatgcccatgactcaggtgacttgctatcttgcatgatcagatttctgtaccaattttctttcaacttctccacacgttgaactcagcgtctgtgatgaagaaaatgttacggaagacaatggtgttttattacacagttttgatacttaacctttgtttggattcttaattgcgaaccaggagaaatgaagagaagagaaaataatagaaatgtgatttactttagatagattattagaatagggaatgcaatttctttaatgtatataatgattattatgccctcacaggttaagaaagagaggtttaaaacaatgagggcatttaagtattttaatacaattaattctatttcctgtagtttttctttatttcccaccattttggagaaaaagagttgatttcttctccttttatctccatttctcttcttttctcctccctctagttgatgtccaaacaagaaaatttagggaaatcatttttttttctcttttctccatttcccaatccaaataaagcattagtaagagtgcccctccttaatttatagtgcatcaatcttctatcatgtcttgtgtgtttatattaaggccaaaaggctaaattgctcatgtaaatctgtgtttctgaaggtgcttcaaacagcggactttcggagctgcaaggg

SEQ ID NO: 46697 - DNA, 480 bp, Manihot esculenta
  Intron number 1 from transcript cassava4.1_001349m (locus cassava4.1_001349m.g) derived from phytozome v7.0 (chr-ID scaffold08500; pos 323136 to 323615)
acagtgcagcagcgacggctcttgaggactcaagggtatgtgagattattgacttttgagtaatcttggtgggttttctgtctagagattcacttcaatgtacgtcattggaattttggtaaatcttttttctacttttttttgggtggaggtggtgttgatgaatttgcatttttgaagagtagtagttacttgagtagtttctcctgaattttgaatttttgatgcttgatttcaggctttagaagtagttattggatttgctcatcgctctatatgattttaaaaaaattaacaagaagaagagagtgctaaagttttcaggtttcatgtggtagcctgtacatgtacaatttgcaccattgttattttttatttttttggtgcatatctattatcattggcttgtagaatcaaaatttaattctggaagttaacttctgaattctcctgttttcaggttcgcaaagacaatacttg

SEQ ID NO: 46698 - DNA, 722 bp, Manihot esculenta
  Intron number 2 from transcript cassava4.1_005750m (locus cassava4.1_005750m.g) derived from phytozome v7.0 (chr-ID scaffold02421; pos 342125 to 342846)
cacctgcttctacttcaacccagattaacaaccatgtaatttgttagaattagtatgtgtatgttgtgattaattttggttcgcattggtgcttatgcttcttattctaggccgaaacttaatttcatttctcttatgattatttgatttttgagagttttgttgtagtgatagagattatttcatcataatcaggatattagttaacaagtgggtctgagataatgccgccaaatatcaataactgtgtaatttgttattccaaaggtggcaattatttattcttccttctgtggattaaaaattgtgctttttttccaaacctttgaactttgaatttggggttcgctataaatgcattacattaaacctgggggaatgctacatgttgaccataatcacaaaaagaggattgcatactggatagagttgctataggtgattttgagagtcaatattatttattttggccttctttgcagaaatgatatagttttgtagctcttctgtgtgaattttatttatcctagctccttataatgatgagtgatcctccctttgttctagtaatgtttggagtttagtgtagcttgttatcctttcacaaatgcttgctacttgttttttacactcttggtgctgttgctttcttcaacgattttcagttattttgggagaagcacattcttgcatttaattgcattccttgactttgtagaggc

SEQ ID NO: 46699 - DNA, 685 bp, Manihot esculenta
  Intron number 1 from transcript cassava4.1_030018m (locus cassava4.1_030018m.g) derived from phytozome v7.0 (chr-ID scaffold04450; pos 125576 to 126260)
cctgtcgaccactctgcagctctccgcaatcacaggtctgtacgatcgactctatcttttcttgtttctatcatttctttttccttgattatcctcagagttgcaaggctttagctgttgtatgtgtgcttcatcattaaatatgttttgtacattcttcttcttcttcttcatgaatcaacgtcatatcttgctacctctgctcacctatgcacacaatcagaaaagcacaacctcagattccatttcctattatcacaacttattccctaccatttcgaattcataattaatttcaacaatggagctgaagatacacaactagggccgcttgctggatcagggagagatgaggcaagaaataagaaccgagttgaaaccagtggcggcaacattttatttatttccttatttcaattatattggtgataaaaccacgtcttattcagttcataacgatcctattttgggacccatcattcctgtgagccgcgaaaaaaaacaaagagtttggattgagtagggtccgctatattttcagtttttttttttttaattttttctacaactagaatctaattggtgatttttcttttgaatttcaatccgattttaataaaatgtaatgtatttttttttttttataacagtacaaacgagcaaactctaaatttaactgttgcgt

SEQ ID NO: 46700 - DNA, 641 bp, Manihot esculenta
  Intron number 1 from transcript cassava4.1_018719m (locus cassava4.1_018719m.g) derived from phytozome v7.0 (chr-ID scaffold03602; pos 16738 to 17378 reverse strand)
ttggctcttcgtcgagcttccaatcctctcaagtaaagtcctaatctttgtctttctctatctacgtatcttacttcccctgtttacaaatttagtttttagcatctaattttttgtgggtttcttggattgatcttgatttgattactaaaaagtaactattaatctttatctgtaaattcagtgatgttgaattaggatttttttttttttcatattgagattttctgttagcagaaaagcttaaatattataattcttgtatcttcaatctgcaacaattagttggtgttcagtaaattactgtaatagttcttgctccgtttactttattttggttcagattttatgaaaaagaaaaagaggtggacagaattgcaacaaggtcttaattcattttgaaacacaagggaatttgcaaatgtgagcttaattgcttcttcatcacctgtagccaaattataattatgagtttctgataacatcctgtaggaagttgtgaactttgtctatgaacatttgctgtagcagaaattgatccgtttgctctatgaaacctttgcttttttggcttaacttgtggtttgcttctattgtatggttcagggtattttctaattatctagaagccaattctggaa

SEQ ID NO: 46701 - DNA, 295 bp, Manihot esculenta
  Intron number 1 from transcript cassava4.1_011387m (locus cassava4.1_011387m.g) derived from phytozome v7.0 (chr-ID scaffold09870; pos 93395 to 93689)
ctggtaacgtttgtcttccctttccttattaatttttttaatgccccagaaatcaaaagaggaagaaaatatttttttaaacaatatttaactcgaggataggtgtgaaagtcttttcccgtttcaacaaaaggctataaagttccacccgcaataggtgtgaacaactggaaactgcttgtgaaaaaacacttgaaagtgcttatgtaacttttgacttcaagcatcaatttttaatctttaattatttatctgcataggttctactgggagcaggaactgatacttcagctgc

SEQ ID NO: 46702 - DNA, 443 bp, Manihot esculenta
  Intron number 1 from transcript cassava4.1_030606m (locus cassava4.1_030606m.g) derived from phytozome v7.0 (chr-ID scaffold02973; pos 186076 to 186518)
acttctcaggtcttttctaatatctcctcaatcattttcttatttcatgattcttattacaatgccattagtttctattcaccttcaaaagatcaacaaactcaaaatcttataatttagaaaataatttcaatatcaataaattaaaactttatttgcaagtaagagtcattctctcgcgtaaaacctctagcttatgtaggtggtagtttaaggacaagttttaatgatttcaaagttcaaaaaacccattaataaaaggagatgattaaaatttgaacactagatcttttatttaatcactatttgaacaactaataactattaaaacaactaattttacccgataaataaatgaagaaagtcataaatttctttattgtacttgtaatgctaatacccacataatatttcaggcatcaaggttgtagtgaagtgtgcta

SEQ ID NO: 46703 - DNA, 457 bp, Manihot esculenta
  Intron number 1 from transcript cassava4.1_015753m (locus cassava4.1_015753m.g) derived from phytozome v7.0 (chr-ID scaffold00708; pos 420300 to 420756)
tggttcagagaatcaaggagcagattgaattggtggtattgtttgtttaaacaaacctattttttttgtcatttaaccagaagaagaatctaattcagtactatttcattcactctgttatttttcgaacaatcgaatggaaaataagttgtagatttagctattttatgaaggttgctagtattttagattttaggttccccacatgttcaggtttgagtccttctagtaacattcattaacggagatgacagtaggagtgtgaaattagctattctgttttttgaattggaagttgtgtgaaatttgtatgttttatatgcctatcttagcgataatttcaataaatttagaaatttataggcaagttggagttatttgaaagcctggaaagtattctattcgtgctaaattttgatgcgaattcggtgtatctctacaggagcaaaacgtggag

SEQ ID NO: 46704 - DNA, 547 bp, Manihot esculenta
  Intron number 2 from transcript cassava4.1_021629m (locus cassava4.1_021629m.g) derived from phytozome v7.0 (chr-ID scaffold04674; pos 42624 to 43170 reverse strand)
gacagtactcagaagctactacagcagcggtcaagctgtcaggagacccttctgatgtattgttttttttttcttattgtttatctgtggcatacccatttttattcagtattttacttattgagtgatagcaattctctatcattatctcaactatctgatgcatgtaatgaattcctattggtgtttgttaaaatttaattagtggttggtgaaattgctggtgagtgtgacctcaatgttattgactttgagttgatactcgttactcataagttggttaagtcaataagtagtgcatagaaattggtggtttgattgcgcatcaattattgcttttgtcagttctagctacgtatgttaaatcctattggcaaaattaatatgatgaatcctgcaagggtgccttctgtgttatatgtgggtttaatgttgatgcctctattttattcaggaagatatcaattgtttgagaattatattcctaaaattgttatgttctatttttgaaggtctaccaacttcttggtgatatcaagctagaatt

SEQ ID NO: 46705 - DNA, 553 bp, Manihot esculenta
  Intron number 1 from transcript cassava4.1_016071m (locus cassava4.1_016071m.g) derived from phytozome v7.0 (chr-ID scaffold00738; pos 18493 to 19045)
ttatacgcacgccgcattatactctcgatattttggttagtgatcgttgtttcgacatcttttcaattatttctttgcttttttattttttttctttgaattttttttttctgtatcttgttgctcttttttttttgtgatattgtttaatgatttgaagcagttttatgggttttctatgatttttttccttttcccctatcttctctgttttatacctgagaaaatcggaggaaaatgaaagaaccttgactaaaataaggatttttaattatttgattgcaattgaaatcattttaagaaaaagaaaggaaatcattctatctctctctcttccttttttttttttgttttctttcttcaaatctactgcgagttgttcttttttcttttttacttccctttttgttcattgggatttattgtcattactaattgtaattttcgcgttgtgatcttttcaatattgggtttttgtaaattgcaaattttcagatgattttggtgataaattgtagtttgaagtctaggcgccaagtctagtgctggtctc

SEQ ID NO: 46706 - DNA, 763 bp, Manihot esculenta
  Intron number 2 from transcript cassava4.1_016071m (locus cassava4.1_016071m.g) derived from phytozome v7.0 (chr-ID scaffold00738; pos 19116 to 19878)
tgaggaccccgtagtccttgcttcacagacaacttgtaagttgttcatccatttcaagaaaattctgcatattgatctctgtggtttaattttgttgttagatttcagttttatattttgcttgacagttaataatacatgacaaaaaaaggacctcttgttgattatgatgaagttaaagatgtaggatctgaaaaccttttttttttcttttgtgggggggggtggggtgtgtctgtgggggggttcttgagtccctttgaacttgaagtgtactcagctgccacgccacccctttgtttttgttatacagcaacctgggtctttgatatgttttaaagtagtatctctacccaaaggagggggagttgaagatgtgcagttatattgcaattttttattatttaactgtgtctttttttttttttccttttaaaaaaaaatgccaatattctaagctgccacccctttatactgtgtttaatatattatgtcatgcttctactgctgttcctgagagaagtccaatctgtattgattgccatttaattcatcctcttcatatgacattaagctggatctgaacagtatgtattaattttgtgcattctcaagttggtgtgcgtttcattctttgttcctatttctcacatatatgtgtatttttgcctctgtgcggttcaatgggcagttacactaacttgcatgtcattttctgcgttattcagttagtgtaagtgaagttgaagcactatttgaacta

SEQ ID NO: 46707 - DNA, 841 bp, Manihot esculenta
  Intron number 1 from transcript cassava4.1_008491m (locus cassava4.1_008491m.g) derived from phytozome v7.0 (chr-ID scaffold08446; pos 318741 to 319581 reverse strand)
caaattacccaaaatctgtgagttttttctttttttaaactcttaacaaaatcgacttgatttcatttatttatttttaactctgtgtcaataactttgtccgtccaattttgtttgtgccatagaatttcataatttattttcttcaaggacttgatcttgatcattattattaagttttccttataaaaatttctattggaagggagaaatactgtctcaatgcttttgtttgggtcggattttgacttactcatgggcttgtttagttgttcgtgacaaagggtgaaaagggtttttgggaaatggttttgcgtcttctgaaattggagctttatagtttacttgtcagattggggtttatatggcttgtgattctgtttctcatttcaattttctggtacaattggttgaaaatcccttttttttttttttttgcacagaaaattcgttgatttaggttctcattctcaccatagccacttgttgtaatgtctatttcattgaatcatattgagtccaacattttaatctacctggttgtgattcaagttcctctttttttcctcctgtttcaggataggaatgcttagtattccaaagatttaggcatgaaacaattactagtatttttttttgtttaatttcttggcttttcccctaattttgtgtgtaacacaacattgtgatggattcacaaatgagcaacaacataagtcaaaggattattgtcatattcccacatcttaaccaatagttttttttagttgtttgttatgtatgatattttgatatttataaataaaataatcatttaacctgtttatgtgttcataagcag

SEQ ID NO: 46708 - DNA, 576 bp, Manihot esculenta
  Intron number 2 from transcript cassava4.1_005721m (locus cassava4.1_005721m.g) derived from phytozome v7.0 (chr-ID scaffold03245; pos 131400 to 131975 reverse strand)
aggagcttagaaagcgtatttgtgggtgagatttcttgccatttcattcgttcatgtgtctttcttcccatttgcatgttgacaaaatggactagttgatacaaatactacaatgttgctaaatgggcgataaaatgcccaacacaatgtcaagatttttgtttgatactcggacgaaatggaacttaacattgtttgagtgattagtttgctttttaacaatatcatacgtaatggccaaggaaagaaaaaaaagctcttattgatgattccttgttttcagtttgtctttctccctgcacctaacaagcaggtggccgtaaaaggaagaagaaagctgtacttaatgacagctgcttgctgtttttaagttatttgttactttgtgacattatgtttgatcatctgtcattttcagtagtataatattttccttataaacgtccatgtaactcaatccttttatcagctctcttcagttgtgtttttgaaatgtcaattttcaaatatagacgactatttcaaacgataggatttaatttgcgttgataaataattgcagatatctttgcaaag

SEQ ID NO: 46709 - DNA, 380 bp, Manihot esculenta
  Intron number 2 from transcript cassava4.1_030641m (locus cassava4.1_030641m.g) derived from phytozome v7.0 (chr-ID scaffold11341; pos 729415 to 729794)
ctcctgaggtaatgttttgttcccgttgttctagtgtcttttttttttttccttctttcttttctaaatcctaatgttgtcaattcactaatcaatgcttgaatttgcggctttaatcagcatcgacccaaaaattttaaaatccggaatttgataactggggcattgaccatgttgaggctattttattttgaatgagtttttaggtctaattcatagcttaggcttagaattttgtagtttgaggtgttttgtatgtcatccaaaaaacagtacatttgttcgaatagctcaaattgtttcgattcgtggataattcttttatgttctttacccttttattagggttcacatcaagctgtggcaatcagggtgtcagc

SEQ ID NO: 46710 - DNA, 886 bp, Manihot esculenta
  Intron number 1 from transcript cassava4.1_024881m (locus cassava4.1_024881m.g) derived from phytozome v7.0 (chr-ID scaffold08677; pos 626 to 1511)
tggatagttccaacgctgctaaggtgtctactcgggtgtggatttaggtcttcatcaggtcgagccaaaatatttttggtctcccttaattcaatcctcctatatatatattccttgatatttaaagattaataattaatttgatctaaatgaagaatcattattctccctttagtttctaataaaggcaaacaattataaatttgatttctcatgaagggcaattttgacatagtttataattaacaataattaaatttgaatttaatagaagtaaattttaaggactaaattgctgcttaaacttaaaatatgaactaatttatgaaatttaatatataaatgtcaaggacttggttataaattaccctattttatattgcatatttgcatcctaaaatttaaatttcattccttaatatgttccacttttctataattttaggagaaggtcaagctccagttatagatattagaggtgcttcagctacctaggttctaccttgtcttcagtacaggtgagtagataaatatataatactggcatttttatcaatatatatgtatatactattaaggataaagactaactataacagttttatctatttgtaacttgagttatagctgtatacttatcttgtatttagttagttgtagacttgtattatataagcttctgtaatacgtttagtaaatatcacaaaaaacccttttctctatatggtattagagccgcaatctgctctcacgagttttctgatctaattttcttttaattaatggcttcgtcatctaatactgttattcaattaaatgctccaatgcattttccaattaaacttactcaggagaattttcctgtttggagaaaacagatccaatc

SEQ ID NO: 46711 - DNA, 661 bp, Manihot esculenta
  Intron number 2 from transcript cassava4.1_026945m (locus cassava4.1_026945m.g) derived from phytozome v7.0 (chr-ID scaffold11069; pos 319566 to 320226 reverse strand)
gtgcctcgtattcttctccctttactaactcttgctcttatacgtatttttttacttgttttttggatttgtaatctaggtgtcatatatgcatgcaaagtgttcgatgtatatcctgtttgataattaggaatgctaatgttgcattcttccttagaatgttttccttatgaaacctcagctcagagtggactagcaatttggttgagggcgagatgggatgtttaagggttgcacttctttccctttttgacttccctatgaagggttaatttctctaccttctcttatctacctacctaagggctaaagagggactgttggcgtttaggctattttgagttgcttccctgctataacaaagttatactactctaactctgttttaagaattctttgtaacgaatcaaatggcaatattttgatggattttttttcccgttgctttaagaacattttactttcccattaaggcctcacattgatgggtaaggaggcaaagtgcctcttctatgacttgcacaatcctggctaatttttggggttgagagactgcccgttttatcaaatagtattttcctggttgatctttgtaattgatgttattcttgttccttcattttcaggtgtggggtgtgcaggcaaatccttcctgcatttt

SEQ ID NO: 46712 - DNA, 772 bp, Manihot esculenta
  Intron number 1 from transcript cassava4.1_012108m (locus cassava4.1_011867m.g) derived from phytozome v7.0 (chr-ID scaffold11425; pos 259817 to 260588)
cttagaaggtctctctctcactctctctcactgtttctcttaatcgcatttgtatgtttggatacgaagcggaaaattggatctgtttagatctggtttcactactcttttaattacacgcaaatgagagatctgaatggtaattgaagctccacagactggtcctttttttttttttttctttttcaattgttgagaatcattgcttagctgaattcgaatgttcaatgtataattcaaacttttcttttaagatcttatttctgcgagttagaattctctgcctgagcaaaataaaagagaagaaaactggatgcccacgattatgaatgttggatcatcttttcttcgaaggcataaatttgaagaatgaagagaatgctatgtgtaaagattatctctattactttccccctgttttctaaatccttctcaatatgctttattaaggttgtctattattattattgttattttcggaaaattaagcttttctcgtcactttcttgctttctaccctcccttgcaagaattgaattgatttcttttccaacaattttttttgggaataaaagaattcaattctttttaacttgtaaaaggagtagaattcttagatgattttgcaagaattcatttgaattcttttactgggtataatccatgttgaaacgtctctccataaatttaagtctaaaatgacttcgtaaagagctctcctaactcttgaattgctaatgtcaagtttcagtttcttgtttgtataggtttc

SEQ ID NO: 46713 - DNA, 476 bp, Manihot esculenta
  Intron number 3 from transcript cassava4.1_008500m (locus cassava4.1_008169m.g) derived from phytozome v7.0 (chr-ID scaffold02817; pos 207611 to 208086)
gaggtgagatttcctcttttgaaattctgttaaagaagtgcagggaggggagaggaacagttgcttgtttttttcttcttttagtttatattcaaagtagaggataatgagaatggagggtattaatcaatttgattttcattcaatatgttacagtcccatgccttccttcacaaagggaataaaattaaattaaaggaagatgcacctttttttcccttttttgcgtgtgtgtgtgtgtatggttgggggggggggatcgttgtggtggaggaatgatctacaatttttacctcgatttccttgttaaatgtcacaaggtgttaaccatattagattttaatgtggtatgtatacaactctttaatatagaaatagtcctttctatttagcagttagatgcgaatatggcagcgatattaagttagtttaacttccgaccctcattgccaccttatgctttccaggagacaagt

SEQ ID NO: 46714 - DNA, 503 bp, Manihot esculenta
  Intron number 1 from transcript cassava4.1_034377m (locus cassava4.1_034377m.g) derived from phytozome v7.0 (chr-ID scaffold05145; pos 5101 to 5603)
aagcaggggggtgcccttcagagagaactcataaggtaacaaatattaaaaatatataaatatttataaattagttgattattttgagatcatccctataatagactagatccataatggataaaaatgatgaaaatacaagtttctttttcttttcttaaaagggtaatttaaaaaaatatttttacagaaaataaataaataaagagtacacgaaacgaaactgccttctactaagtctaaatgcaaatcatctaccccaacagtactgttaattaataatctaaattattaaatcattctttaaattgataaattttattttatattatatattaaataagggtatataaaaaatattaaatgatagattcatataaatagctgattccaacaaatctgaaattaaaaatttaattgacttgagcattgtttcttgaacaaatggttagtaatttgcatgtttttcttggaaatttttgttttattctccagattcttga

SEQ ID NO: 46715 - DNA, 1049 bp, Manihot esculenta
  Intron number 1 from transcript cassava4.1_009812m (locus cassava4.1_009812m.g) derived from phytozome v7.0 (chr-ID scaffold10469; pos 86879 to 87927 reverse strand)
accgcggctgcaaggttcattgctcaagatatccggtaagttaaaattcctcactttatgcctaatttaagtgatttatcagacctaaaattcaaaaatttaggcattataaggattataatatgatttttaaaaaaattttgaatggtgggctccaaaatatatttttttctcaattaattaaataagtttatttttgtcaaaaaggaaaacgttattaaaattaaattctatttaatcataaaaattacaaaataaatttttaaaaatagtatttaataccatttaagttttattattttattttatttttccaacaatcttaacactattttaaaaataattattaaataaatagtaaaaaaatctgaataagctattcccattataaaaattataggaatatcagtgaaattcattaattattttcattatctgtatgccttaagagggctagattgtactttaaaaaaaagtacacacaaacttattcgtaaattactttacctcaatttaaaaaaacaaagttcaaattctatgtccaattgggaagtctaacacgtaattacatgaagttattagaattatgtagttgtcctagcaccaagcttttgactgtcatctcatgggcacagattgtcaaaatccaattcctttttccattaatcggattgtaatgaatagaataatataattgaatttgagaccctttttatttaaaaattaatattcataataaatttaaattttatacgttgaatatttattaattaataatattaattaaatttaaattcaagctattattattttcgtggttatcctattcttgtcatccttatccattaattacttaaggcttaagcttaagaaaaagaaatgcaagttgtgtgatatgtatagacttttgctagtcgaggccaattagtttcatgtgatctaatttaatagacatctacaaatgtgacttgcacaacatgtgtttgatttaattactgaatattatttgcataaatatttgcagcatttctgttcaagcaggctaaaga

SEQ ID NO: 46716 - DNA, 720 bp, Manihot esculenta
  Intron number 1 from transcript cassava4.1_001656m (locus cassava4.1_001656m.g) derived from phytozome v7.0 (chr-ID scaffold02817; pos 93703 to 94422)
aactccaaatacaggtatatcttccttataactttcatcaactttttttattattacttgaaaatactcaaaaatcgaaataaaatcatatgaatatcttttttttttgaatcaatagtttcgagttaataattttttttttctacgttaatgaaatatgagtagttggtaaatggaagggatgcttgtggtagctttgttatttatgcacaaaaagaacatttatttttaataatttgtttctatataaatatataataattttttttataaataatataattttattaataaaataaaaccaggtcagcaattctgatttaatcaattgagtcaaagttttgtggttgatccatcaattttaattcttcttttaagaaaagttagagtacgtaatttgctataatttcatccatgattttgaaaaccatgcactagcaatttaatacttacaacactcaatttatgacttatacaaaatattttctaaaaatgcaattgaaatattttattttatatataaatttaaatttaatttacgattttaaaaataatttcagtattttttttttaaacggtacttatggtaaaatatgagatgtctcaaatttactcaaatacatttattatcagactaaatttatgagtatataattttggtatttttaaaattttattaatatgaagtaaatataaaaatgcaggtgttgggagacattt

SEQ ID NO: 46717 - DNA, 703 bp, Manihot esculenta
  Intron number 1 from transcript cassava4.1_018377m (locus cassava4.1_018377m.g) derived from phytozome v7.0 (chr-ID scaffold03750; pos 765571 to 766273)
tcataaccctaacccctgagaccttctctgataaggtaataccgatagagctatgtataacattagatttagctttttggatttcattcatttaattcgcctccttcaatttctgtttatgttaaaattttcctactttgcaatattcgaaagttttttttttatcagacctcgtgatcttactgcttctttgtttggaatttacgatgttcaatatttttcttcgatttgattaaattacgttgttaattgctgaagtggaaatggaagtttccttagtttccaattaagtattgcattatctggtggcttcctactagcatcaaacttcatttaggataaagtttagccgtttgatttttgaggtaatgtgattggttgattggattctaacgtcaattttcagatgactgcttgcttttctttgtcgcctattaacccatttttattatatttatttttgtatgtgtgtgtgtttgtttactgccttttttgttgcaatttcacatggggtttccaatttggaggtctctgtttcaatctctctggatttgtgactttgtgagtgagatttactaggatgaacttccatcttgtaacccaaaatctgatgatcctcttgatgagtaaaaataataatcaacagagaagttactgattttgtatgcatgtttattttttaggtgaaggaaaaagatactgc

SEQ ID NO: 46718 - DNA, 807 bp, Manihot esculenta
  Intron number 1 from transcript cassava4.1_026340m (locus cassava4.1_026340m.g) derived from phytozome v7.0 (chr-ID scaffold11998; pos 1744958 to 1745764 reverse strand)
gcttgcctcctaacaaccaccacggtgacgtttcgctttcttcttctttcttcttccacagcccacctccccttcccttctctatcctctccccttcgcttttatgatttgtggactagtttggtgtcttctacgcgaggaggaacgatcgattaccttcttatatatacatataatttttttctctctctgttttgggtccctttctctgcccccctcttttagaactatgctgtttcaaaggtgaattcagtttaatcaagaagaaaaatgttttttttttttaaaccgattaaagggatataataatccaccttattttatttattttctttacatgcttttatttttagaacttcttttttactgtagtcggaaattggcgtggattttcttttgttattggatggctttcttcattgaaccaagaaatactggtgactatgcaattagctatctatttcatgctttgaatttcttcaaaattttctccaaacactttttctgtcatacccaggtggggtttagaatttttccttctctacacatctccatttttttttcgaacttggagctttagttaaagataattcgtagttacctatgtagttccttgtctttttagattttcccttgtttcttaccccatcttttcgatgttctctatgaccaattgctgaaaaatgacatattttaatttgtttatggtattcctttttttttttgtaattttttaaatggattcttatctccttgcctcgttttttaattaattaatatttactctttaaatctcaggtgataaag

SEQ ID NO: 46719 - DNA, 753 bp, Manihot esculenta
  Intron number 3 from transcript cassava4.1_029697m (locus cassava4.1_029697m.g) derived from phytozome v7.0 (chr-ID scaffold03486; pos 34491 to 35243 reverse strand)
atccttcgaggactaaggaacaaatatctaaagatgtattgcctcctcaaaggattgctttagtgaatgagtagttcgcagagaaaaataaagttttatttattttataaaagtaatgtgtttaattatagtcgtaacattttttaatttgattgtcgttttgcttttttttttaatagaaaatgaattatatcaacgctgcaaatgctaaaaatcggaagaatgcacatacttctggtagaaaaagttttgcaagattaagaaaggaaatggtatgccttcaactattatatgcatttttttggagctttaacttatattttatttactaataaacatgaatataaatataggaaaaagcaaatgggaaagcactagatagacttgaattctttgaagcaacacataaaaaaaaggatgcacatgtagatgatagtattagggagcttatggtatttgttcttaatctctctctctttatccttaattatgaagcttatgttcaaatattactttaggtttcattaaatattttttttataggaaaaagcttggtgcccttatagttgagcgaagcaaaagttttgggactaatttggagcaactgcatgaacaagtttttcaagaaattatgagtctagagcatagtggttaaattatgagtctagagcatagtggttgagtgcgaggcatgggacttgggccaactcctttaaattattttgatgtgacatcaaataatgtaggatcaag

SEQ ID NO: 46720 - DNA, 704 bp, Manihot esculenta
  Intron number 1 from transcript cassava4.1_013211m (locus cassava4.1_013211m.g) derived from phytozome v7.0 (chr-ID scaffold11661; pos 218049 to 218752)
gaaggcgggcgaaggccatatttttatcgtctaaggtgcgtgttctgcctcttataggcctttagaaaattagaattctataagattgatttattcttcttttttttttttttaattatgcttgaaattacataactaaaatgatttagttattaaatttaaaaaatttttaattaaaagaatattgttagaagtaatatgatactttgggaattaatttaaattctttttcttttcgtaatttaatttttttttcaaaggaagtgatcgttaataatttgcattgttgcgattttgagtttttcaatcaattgaatgctgaagaaacgtgatattgagttttctcaatcaattcaattctcaaggttaagtttgatttttgcaatttttgatggtgtagattttctggtgattagtttttgtgtttctttttcatgggaatggaaatttgattagatctacacagtttgatgtggttgtgtatgcttatattgctttaatgagacgacctaatttcattataaatttcaattaactccacaattttggggggtttttattccttagaaattctcaagaagaaaatattaattttacttttaggttttttttgcctcttaaatatctcctttattgtgctgctgaagttgcttgatctgtttgatttagacttggtgaggtcagttttatcagttaatattatc

SEQ ID NO: 46721 - DNA, 723 bp, Manihot esculenta
  Intron number 1 from transcript cassava4.1_018870m (locus cassava4.1_018870m.g) derived from phytozome v7.0 (chr-ID scaffold06516; pos 1150 to 1872 reverse strand)
ttccgtgaggtcagcttcatctctttttctttttctccccatataatttggaacttgaaggaaatgcatatggtccctaatatttgtttgctaaaatcaaaatagtaaaatgatatgtaatatattgaatcttgggttctctctgattagcaaattggaagaaaaaagctttaattttctgcaaatatgataagaagatttggggtttcagatacataattgttaattttgttttatcccttgatattatcaaaaatagagctagcttcgtttcattgttctggtttctttcacccaatatctttctaaatatcttatggttttggcattttcaccaaggatcttcactaaacgtttgattcttttcctaaggaagaaggtaggaaaaggaataaaagttctgaattttgactaaactggggccttgggaatcaaaatcctccaattatttctgtgagtgaggttaagtatttgccatgtttatcaattaaagcaatttaggattggcttatatggtcggttgatctcattatcagttgagtttctctatcttttttattgtggcaaaatgctgtgtatataagttttatgagctttgcaattgtttctcttcttttcgcattgattgttgatttaggactcatctgatcatatttgcaggattctttagttgtttgagtttttatttttcaagcaacttcagagttcagacagctttagaaa

SEQ ID NO: 46722 - DNA, 766 bp, Manihot esculenta
  Intron number 1 from transcript cassava4.1_012723m (locus cassava4.1_012723m.g) derived from phytozome v7.0 (chr-ID scaffold04202; pos 35366 to 36131 reverse strand)
gacctcctctttattggtttccttctctgtaatattcctctttctctctgctgtgtttttgttattttttttgagctttgattgattttatttatttattttttccctttagctgaagcttttatggtattccaaataattatcttgttcttgaatttatccctaccgtcgctatttttgctttggttattagaatttggaagatgcctaaacaagttgtgttggaaattcctttttttttttcctccaatttgcatgcccttttactttaattcatttaatgtgatggggaactgatttaggattcaaattggaatggcaaatttaatttgatggaaagtgttctgaacatgatgaaatggaaatggaaggataggttattttttgctgaaatcacatagtttaggataaaatcttaccttttgagcttgacttgagccgttgatgttcaatactactgtgtatctctaatcttctttgcaagtaacgttgatctaattatataactgttattcatctgctaccaaatacgctttgaacttactgttggtacttgctataagtagctgcagagtttgacattacatagtggcttgagagtcttttttatagttaacggtcaaaaaattgattattatcccctgaaatttcatagtttcttgataagaaagtaaaacacttcttatcttctcccagctgattgaatatttcaaatgctttctatatgtcagctctcaatcaaaatatacaaacttaggacgtgtaa

SEQ ID NO: 46723 - DNA, 720 bp, Manihot esculenta
  Intron number 1 from transcript cassava4.1_000187m (locus cassava4.1_000187m.g) derived from phytozome v7.0 (chr-ID scaffold00847; pos 357121 to 357840)
ttgcccttgaccacccccacgtctggccctttcaggtccaaacttttccatttcccatttccttttttctgttttgggattttggaaattgctagccttttgcttttgatttggtgggaaacgcagtaattaaacgtaattaagagtttttgatgtttagataagtttaatgtgcttctgcgagctttacttcaatgcaactttgattgggctcgaattaggtacaattggttgggaaagaagggaagaaggtgagtggtttgagtgtttttttttttcttgggtgttgttttcggttttatgaatgataatatagatgtgataattcttttaaataatggtgataactaagctctgaactggagaatttactgtcttgtttgatttgtagggaactggtgaattgaatcttagacttgagggaggagagctaaattaagtgtaacagacctttgcgtttgagcttactggataagataaagaagtgcgaatttgagtatatccttagttttatagaaagataactggtggctagcacgaataagttagctctgttatatagttattcagatttcagaagccaaatagttaagaatcttgttgatgattactcaatctgaactttgttagggaattaaattaggcattatagtacgaacttctgacaaggtagtttctcttccagttttggcaagaaacagataaagcaggttatctttt

SEQ ID NO: 46724 - DNA, 807 bp, Manihot esculenta
  Intron number 1 from transcript cassava4.1_025328m (locus cassava4.1_025328m.g) derived from phytozome v7.0 (chr-ID scaffold08757; pos 520421 to 521227 reverse strand)
gcactgcctccaactcttctggtttgtcttttttttgttcttccgatcctcattttacgatatggctacgtcgcttgggcgactttcgcgttgccatacgctacaggcgtcggattttttcgggtctggtcctctgtgggccctggtgatatgacggctggggaatgacatagaaacaatttgtgtcctttagcggtactctttcaactagttaagtacttaagtgaatgaataatataacagtacgttagcaaaaaattaaccaaaactggaaaatctaaaactttactgcaatttgtttctacgctaagcaatgagcactgaacagatgagaaacttctgtcagtataagattttcgtgtatcaacttcttacagttagataataaagcgtaatttaaacttattgaatttcacgtatacattacaataaaaaattcaaaatttgtgggaatattcatatgtttactacgattacggttcttaaatgcagggttatctttattaaaatgataatggggttaggaagggctgcccactaatgataatgatggccagcgataaatgatgataggtggatgatggttagggactgccaagaattgttattatttattattttcaagtttaaagttcgcattgcatctagggtcctaactccctcgattgttttatatgtgtgcgcgtctttttttgcgtgtacttttgcagtaacatttggcaagctaatttgttcataaagtaatcatgtgtattttatttttaaatcttctccactcagggctcatagacaatagtttgttcaaac

SEQ ID NO: 46725 - DNA, 768 bp, Manihot esculenta
  Intron number 1 from transcript cassava4.1_001862m (locus cassava4.1_001862m.g) derived from phytozome v7.0 (chr-ID scaffold07444; pos 234679 to 235446 reverse strand)
tgctggactctatcagattttctcattttccgaaggtcatttcgttgctttgagttcaatttaattcaatatctctctatctctctatattttagatgaactgaactgaactgaactatgcggcttttttattccagacttttttttatctgatttatgttggtgaattcttcatctttctgctaattttgaatgggtctattatgcattggtagaatttgtagatttttagtgattattttattcaaaattcatattttatttcggattttggccttcaaattgtcttgaaaccttaatttcaaaactccgaaagaaaagatattagcataaataaactgcccaaatatttgaagttcgtttcttgattttttttttgttttcaaaaatctatttcttttagtaaacatctgtgctttgtcacgaattcatttcatttttgtgtgaattttgcctcccaacttttatagttatgtctggaattcaagctccttgtattgagcttgattgttatataattttggtaagtatcaattacaaactctccaaaatgtaatttcgtatttaaataacgagtgattaaattttttggcaattttgtaaattttatgcgttattcaattgtaatttgaaagatatttgtatatctatgtttattagtttgttcactgttaaattgtatataaacacggtgtttctcactatttgaagagaacatacttattctgctgctgatacatttcatttgcttcactccactacagggac

SEQ ID NO: 46726 - DNA, 608 bp, Manihot esculenta
  Intron number 1 from transcript cassava4.1_017051m (locus cassava4.1_017051m.g) derived from phytozome v7.0 (chr-ID scaffold09038; pos 40447 to 41054)
ttctttcaggtacatgagtttttttaacttgtatacagttgctctctcctcttatgacttacgaggatttctggttggctttattttatttccatctgtaaacgatgcctgacccatatcatattttcttttccttctcatttaatgtccttttgaaattaattgcgtcttatttcaggaatttcgttattattgttgtgaacttcttgttgatatgataattggtgtgttaaaggctccttgaatttatttgaacaccggtgtgttaagtgaattgtattgttgtcctttctaaattggaaactcgtaaatgcatttatgagatgtctcagattttcatggagcatgatagtgttgtgctccagtattaagcatattattgaggcttcaagatttcttgcatttttcctcctttgcggggtttaagggctagttttaaagaaataaactgttttggaactttatgaagttacagggaaacgagtacttgcatcattcttgtattcaaattgggtactgaaatgtcactagcattgattaagctactttttctgttttcttttttttttttttttgttttttttccttttctgaaggcagacggaaca

SEQ ID NO: 46727 - DNA, 983 bp, Manihot esculenta
  Intron number 2 from transcript cassava4.1_017051m (locus cassava4.1_017051m.g) derived from phytozome v7.0 (chr-ID scaffold09038; pos 41062 to 42044)
aagctgctattcctacagtgactaaggccttagaggtacgaaattttcaaccaccttttatttgagtctgcaaaaatgagtgttgggttggtagtggtggggggtgtctctatgatgaagacaacatcaccataacatgagatttggggaaaatcagaaaaatccttgtctcaaataatattatgatgtgcaattcatttttattacagtgagatgataattgagggttgattaggaaggccagcaatattatggcatgcaattggttttcatttcaagctgaattggaactaccccggatgtgaagtggaacctagcagatcgtaaattaaatattaaatcattaagttggtaaactagagtttaaagcttgtatattataaacaaaaatgtcgaagacgttgactacctataatttatttggaaaaggatcctggcagctgattgaatgaggatgattaaaagctttttggctggatacatatctaacaggcaaatgtcaaagaaccaaaggagggaagattagtgataggtaactatgggactaaaatacctgcctcactttttttgtaagtgttgataaataatctttttcttggcattgtccgtgggagcaatttaaagctacgcattttttgatttgttgaatttgggataggacaatgcccaagtaatggaaaatgataacatcaatgctccttttgaggcttgaattttctcaagaagtgctatgcaaacttttctagtgaataattatagaacacttattttctcaatgaagttgatgctatctaatataaattcagttgtggccatattgctcttttgttataaattggtcttcagttgctggtcttgttaccaagtagagatgtgcttgctttaaggttgaaggcacacttattctcttgcttattgattaatcgctttattttatatttcgcctttgaattgatgtttctttcttcttatgaaggagattg

SEQ ID NO: 46728 - DNA, 419 bp, Manihot esculenta
  Intron number 1 from transcript cassava4.1_028407m (locus cassava4.1_028407m.g) derived from phytozome v7.0 (chr-ID scaffold01458; pos 33043 to 33461 reverse strand)
aggctacacagtcaaagctgcagttcgagacccaagtcagtaataactcgtaacactaagtaaagctttaatctttgattccatttctgtttcttatcttgcttttaggtgacattttaatcttaaaattttcaacatatattctgatcaaattatattctaggctgtctgtgaagtagataacttgatcttttgctcttgcgtactgaattttctttttaattttccgatcatttgtgatcattaaagttgttgggtttctgcgatttctttaatttgaacttgatgtatcagtaaatagcctaatttgagatcatgacccaaacaggtggttgactaagataaaccttaaaattatttaatctgggtagcttagccatgattattgaaataaaagattatgttgatatatggctcag

SEQ ID NO: 46729 - DNA, 593 bp, Manihot esculenta
  Intron number 1 from transcript cassava4.1_007657m (locus cassava4.1_007657m.g) derived from phytozome v7.0 (chr-ID scaffold03735; pos 79959 to 80551 reverse strand)
ggctcaaggtaattcttcaatttttcttcttactttgatttacttgccatcttttgatctcttataagttaggagctgcctatatatgcaagaattctcattattcttattattggaattttgaattttttactgttgatgcttagattgggtgaattagtttataaaaatatacttcaaaatctctggaatacccttgtttttccaatctagattagaaaatgtttggtgcactcaaaaaattggtgaatggaaaaaatatattttcacgatcaaaggtaaaacatagtcatttttaaggaaaatgacaaactttatcgatcttattagcattattatatataaatttattaatattattcattttttaaattagaaaaaaagttggtttctcaaaaaatattcagttttctataagcaaattattttctgccaacaaatggagccttaaactcatagttgtttactcttttccattttacttttctcaaaattctcacaaggactagctttcatgaaaggtattcttgaatcttagccacatgctattttcagcatatagttaatatcttcatctgtatcaggtgttgcat

SEQ ID NO: 46730 - DNA, 856 bp, Manihot esculenta
  Intron number 1 from transcript cassava4.1_017718m (locus cassava4.1_017718m.g) derived from phytozome v7.0 (chr-ID scaffold06916; pos 1499388 to 1500243 reverse strand)
agtagggtttctacattccaattgtgctttcgaaggtatccacattatgctttctgcagagacgtgcctcttttgaatatcctctcatattccaattttctgcgacaatttgttttgaccgatgcagtacttgcttggtaattggagttgtatgaaaacccaggaaaagaaaagaaaaagctccagttttgataagtttgatgaaaatctttttaatttgtgttgttttctattttgtttattttcatgactttttagcttgatagatctattttttggtttagttacgtgttttctaattttttttttcccgttatttttagatagtttagttttttttagtgtgtttaaggtaatcttcctggctagattcctatttttttgagatatttttgtagtgtcctggtacattgtttttctattgttttgacagtaggcatattgaaactatgtgttggcagcttagttgcttatgtatggtaatgggttgtttggatgatggacaaatttgacgaaagacagaaaactttcttaaattgtttctccaatttttctccttttttgtttgttcgcttattatgctaaacctatgaaaaatattgcaagtatctgtcagaaaaactgtgaaagatttttgttatatgcttatgtgctttttgtgattcagccaaccgaaggaaatcctaagaaggtttaatcttcctttaattcctttgatttccagcaactatatcttgtttaacattgcgatatagccattttttattgttcttttatttatttttttttggtatttatttatgttcaatttgttcttatatcaattattgtggcaggaagaaagaactttttcact

SEQ ID NO: 46731 - DNA, 563 bp, Manihot esculenta
  Intron number 1 from transcript cassava4.1_008490m (locus cassava4.1_008490m.g) derived from phytozome v7.0 (chr-ID scaffold07806; pos 37808 to 38370 reverse strand)
agaatcatcctgataagggtggcgatcctgaaaaggtaattttctagtttttgttgtagagttcgtagtatttatttatttactagcaaatccatttaagctttttcttcttggtgaggcatttatggatttgttactgtgaaatttgtttcgggtatatcttacggtaatgattgtaagttgttggaattgcaagaattcgttctggtttgattttgccaagatggattaattagtttctttattcttgaatagctgagaaaattgactgaaagggaaattaatgagaggagttgatggaaatatggtgaaatttatggtataaatttttatttgaatttattcgaaccgcttaagatttgtgtcctgaggttctcaatgggtctcttaatgtggtattagcaagcgtgttgatgtaaagggaaaaatgaacatgacttctggttgttgcttgagggttatgatgagtgaattgtaattaagtactgtttaatattattaagtggagttgttgggatgatattgcagttcaaagagttggcccaggcttacgaagttttgag

SEQ ID NO: 46732 - DNA, 984 bp, Manihot esculenta
  Intron number 1 from transcript cassava4.1_020156m (locus cassava4.1_020156m.g) derived from phytozome v7.0 (chr-ID scaffold12254; pos 15006 to 15989 reverse strand)
tctcaggtacccatttgatatctagatgtcgatcttgattcttgtttcttgttttcgtttcatcagtgtctggtaattctgattttatcatgtatgttgttactattgttgttgttattgtggattttatttttttggtggattttaattcagattattgggttggaattcctgttttagttgaattttatgacgaggattgtcgggtttttggttaaattatttttatgatttgtgattttgtaggggatagcttatattggattagttctgatggattcattttcgtgaattgaaaaagctgaatgaggtgtaatttttccctaaaaaacatagtaaattggatcttgcgtcttaaagggaaaaatataaaaattagtcagttgatctggaacagatatggaaattgatggaactcttgaaaattgattttggatttgtaagtacttgttcatttgaattatgcttctgaagttttcaggaaaattctttacccagtccagcatgaataagacacatatctatggtgccatggcctatagatatgtgtctgccttatggtctgcaagagacagacatttttttgtgattgagaaagttatatcaaatctttgttaggttgctttgatttcctctatttttttttctttctaagtttctcctttaaattttatctattgctgattatttgatgtttttgtctctgtaacacacttagatttaggtttataatacatggccgccagtattaaaagaaaaaaaaaagcattgatttgtcagttcattgtgtatgcaattgcatatccctctctttctcaatgttctgttgtatattctgagatcagttgcattcttctgttgttaatacttaatagcaagaaatttgctgcgctattgaatttttccttcttctttgttttcctttacgttgtcaatctaacagtcaatttggttccgttgcagactgttgtgctcaaggttggt

SEQ ID NO: 46733 - DNA, 1032 bp, Manihot esculenta
  Intron number 1 from transcript cassava4.1_018638m (locus cassava4.1_018638m.g) derived from phytozome v7.0 (chr-ID scaffold11378; pos 65698 to 66729)
ctctcgtgccttagcttgcgcttctctttttcaaggtatgttttgctctctagagggtcacgtgtctctgtggccggtggcagggatatataggaaaacttgtgtatggagaatttatctgtagcgcatgaagaattggattgaataaaatcctaaattagcaaaagggttttagtgaaaagagtttttattttcaagattctcttttgttagattgagagtttgtttttagtggataaggttatctgtgatttagaaatgcatgtattcattttccagcatttcactgtgaattagtttattgtcaaagtgatgatccttttgcatatcataattgatttgttgactgggaaattatgagaatgaaaataagttaaatttatttatggttgagttaatatcgtcatttttggtaatctcaatgtctgagttttccatgttaacaaatcgaacacatatttggtttccccagttaatttggaatgggaaacagtctgattttcaattacccaacctgcatcagttttatggatttaattaatgttttgactgtataagcttctgctacgtaagctctattgctgaatcaagcatgctcctcatgtactaggttctaatggccctgatattttgaagatttatcccaaaacctggtagaatggattcatcatatccatatagctgagcccaactatttggattcagactttgttgagttttgttaaatggtaccattcctgagttgggatgagttgtagtgttaaagagtacctttatgatagttgaaacatttaggttgtgaaattttcggtcaactcaatgctgatatgttagctttaaccatgaatatatgattctattccattgctttctgctgtcaaaatctttgtgtttcatacatactgtgtttttctattacagggtatgaatgacggggttcttgttttacttctatcccttgctatagatgctggagattaattataacctctatcttttctctctcgttacagcaacagcttattattggag

SEQ ID NO: 46734 - DNA, 906 bp, Manihot esculenta
  Intron number 2 from transcript cassava4.1_008534m (locus cassava4.1_008534m.g) derived from phytozome v7.0 (chr-ID scaffold04043; pos 62344 to 63249)
tgattcactccattgtgctgcaggttactacctgatttagatacttgtgtgcctgtctcttatctttggtttttctcttagctcatgattcaattgaagctgttgattgtgatcgttttgatggtttcttgaatttactgataatcttggcttcatggtatcaacaatcaatgaggataggattttttattttatttttttgtgggggttgggggttacatggggaaagaaagcaaagaacagcactaatctgcaaatccattaatctctctaaagacgtcgggatatctgagttccccatccaaccgtaataagttctaaataacattggagaccaatctgaacatgaagggctcctccaaaaaatgactgaagaaccatcacattccgccattattatattcaagcacagttgatgggctaactctaaacccttacctatatagaccataattctgcccctaaaactgaagagacaatcgtctgtaacttgccaaagcatctaggataatcgtctaacagagtttcatatcacaagagaccaattcatagttgatcttggagattgatgttcaagcttagatatagctgaatgtctatttattttggtctcttagccaaagaaatgaagtagaatgaggattttgaatctgcgaatctatgtttcaaatttataattattttatagactcttttatccatctaggttttgttgcaagcctattttcttttactcatttgtctactaacatttctcttctgagctacatttgtgtcaaagtcatttagattctgattctttttgatgttatatatattctgattctttttgatgttatatatattcaactctgttttagtattactgagctctactttgacataatcttgttattcttatccagg

SEQ ID NO: 46735 - DNA, 856 bp, Manihot esculenta
  Intron number 2 from transcript cassava4.1_004258m (locus cassava4.1_004258m.g) derived from phytozome v7.0 (chr-ID scaffold06916; pos 1482284 to 1483139)
gtgaagcatcaattgaggctgctgcttgtgtcaaggtattacaaagaaatttggctctggcgaatcatttggtaccgtaattgaaaatctgaaaaggaaaaaaaagtttccttctgggatgaaaacatgatacatttttacttggcaaattgtgctgcagaacttgataactcctggtggaaaaccttaaaggttttttttttttcccctactgggttgtttcccaggaaacttggctgtaaagcttctcttttgcccataaaaagatagaagattttaaaatctcattcattttaattgtagaatatatgtttggcaaagttcggatttatcaagattttcctttagaagcctgtgcctgtgacacaaatgattcggacatggctaggcaaatataggcttgaacaaatagctctgttgtatgaatggactaaaccgtgttttgctcaaaattctcctaccaaaataggaacttttattggacttgtagaagttatgaaccttgtgatgcactgatataatggcctttagtcgtttcctctctctcttcagggagtattattgtaagatattgacagtgataaaagattggggttctgtcacatttttgttcctatgggaatgccaatagggcagaatgatcatgatgtaatctctgtcagcttgctggatcatatataagtggagatggcatgttagtctccatgactaaagggaggctaaatttgttttttaaactacttaaaagaattgttccatattagttcctatgatattgtagattctgtgagcttatttaatgtgaatggttgtctggttaggtgctgattgcttctggtttaccaagcgactctgt

SEQ ID NO: 46736 - DNA, 953 bp, Manihot esculenta
  Intron number 1 from transcript cassava4.1_013176m (locus cassava4.1_013176m.g) derived from phytozome v7.0 (chr-ID scaffold02978; pos 20311 to 21263)
gaggaggaggagattttttaccctttcctatcttggtatgtttcaattctgaacagcgtagactctctggaattttgggttttgttcgcttgaaatgctttgtaattttttttcttggactatgtctcttttgtagttgaatatagtgtataaaatcgtgcgacttgttgaatttttgccttaaattttgatttgggatttggagtaggatcgctgtggaaacggagaaagagcttagaactgtttcattcccttttggcttctcaattactacaatatatatatattttttttaattttagctcaaggggaagagatccacaaaatgggctgatttcttaggttttcgtgctgttaatgaattcaattctagttgttgggtagtggttgaatcacttctgttatgttgattttacgtactcttcaccgttatgcatatttatttattgttactttttatcctttgtttgacctgattgatttgcaatagataaatttttacaaaattatgcaagatttctacttcttttgaagttttttgaaagaattgaattctttcattcaagaaaataaattaattgaattcttgcaaagttaatatgggatatgagtaattgagtatgatcccatcatcagtatgacttgcagtgatggatcccacccgttggttagaccttccagacaaaatatatcaattttcatacgcatatgtgacttgcatgtgcggttataatagtgatctagttttaacccgttaaggtttttacccagcctaacctttttgcttgatttgaaaattctatcccaaatcagttcctgtatgctattattttggcctttgatttgttgttataggctaagatttgactcttgtctaagttgctgcttaattcattgcaatgaataatggtgttatagggtgaactggattatacaattgcatattgaccacc

SEQ ID NO: 46737 - DNA, 455 bp, Manihot esculenta
  Intron number 3 from transcript cassava4.1_005779m (locus cassava4.1_005779m.g) derived from phytozome v7.0 (chr-ID scaffold11425; pos 311740 to 312194 reverse strand)
gagctgacgtgaattcaaggaattactgtggccaggtacctttttaaatgaattttcatttttttttctttagtggaattgtttgagcttttttttgttcagatatgtatgatttgatagaattgaaatgtgattcggtcaattgtgattccattttagattctgagatacatataaatttgatatatttgaaaattgtatggattcgggaatttagaattggaaatggaaaccagggacttattgagaatcggaattaaaatttttagagtttgccgtatcacgcaaagaatccgaagatcgatttggattttcctaattgtcaattatttgtaaattgaaatcaaacacataatgacagatagtatttcattgagcacatgcaaaaaaacggatggatctctcttgaactaactatttaatcatattgatggttctcttttaagacggcatta

SEQ ID NO: 46738 - DNA, 945 bp, Manihot esculenta
  Intron number 1 from transcript cassava4.1_008655m (locus cassava4.1_008655m.g) derived from phytozome v7.0 (chr-ID scaffold00847; pos 1388192 to 1389136 reverse strand)
gaggtatattttcgaaaatgtttgttttctttgctttggttgctgagaaagtgaggggaaactaaatcgtaagtcgtttgcgctgttacttcaataacggaagtgtcattgtgacttagattcagataattagtactttctgtttcaccaatcactaaccaactaattgttgattcatattccaagttttgtttgcatgtttctgctatgcgcagatcagtgttcaaatgacggatttgccccttaaatgcgtttattctcattttctttttcagttgatttgttgattcttaattttgtccaatcttaatgtttttttgctgtgtttttttatgctgactggagtctcctgatttggttatattttttctgaagtcgaaatttagtttgctggaactgattgctgtccccaagagcttctttcttttttgtttaaatgtctggttgcttgctaaccggaggaaacgtagtataaaataaagattgaagtggatttcttgtatggtcagaatggcctctaggctcctattggctgggactctactaagttggacaactagctttaattttttttttttttttttttttttaatctgcctaattcaggttattcctgtaactatttgcagaatattgcattagccctctaacaagttgcctatttgttagtctcacatgtttcttacggatattatgtgccctaatttctttactctatgtggaaattctgtttctaaaacaatatacatttgagcaatgatttagtaattgaatttaatgggtgtgggcgtagaagtttgactttcaatataagttgatcattttttcactaagagtagcactatggaatttcccttctcaatgtgctttcctttgtttttcaaaaataatttgcccccgtgagttatgtgttatttgtttatttattttattgtgcagtatcca

SEQ ID NO: 46739 - DNA, 839 bp, Manihot esculenta
  Intron number 1 from transcript cassava4.1_014592m (locus cassava4.1_014592m.g) derived from phytozome v7.0 (chr-ID scaffold02242; pos 228624 to 229462)
tccaaaacgtcttgccggtgcttcagacttatcttgtatgttcttctatatttggtatttacagtctatattgactagataaattctgaaatgatctgattttcatgtcattgctacttgatcatgtgaatcaataaaacgggaaaaaaaacaacttttctgctattcttggtaattgttaggtgtttgaaccacagttctgatttcatatttgggttaatagtaccaatgaatataattgggtgataatctatcattttccttttggagctgttgttcgtctatcatttcattgtatttttttgaatttttagtatcaagccttattgcattttcttgagaacaatgggctttcatgcgctattataaaactttctatttatttaaagatagagatagagacctggcgggtagattgtaagggagggtttatatgctgttagcagcactcagtaactataacatatagttttttggctgtggcagcttttatttgggttatattctatgtgatcatgcactgtgagcatctgaataagccaagaagatattttttaatgtaatgttgcagtttttcagtagtttgttttagatatagagtgatgttaattggtttaggctgatgtatttcatttttgtcttgattaatctcattttattgatttttaataaattgaggcattgaaaggttatgtttcagagtaattattgttttgattctaattatcttctattattctcctctttgtcctccttattcacattattcctccatctttcaatgttaactgtggctgtttctgattcttgtgtgttgtttcttgtagcttatcgagaac

SEQ ID NO: 46740 - DNA, 934 bp, Manihot esculenta
  Intron number 1 from transcript cassava4.1_027370m (locus cassava4.1_027370m.g) derived from phytozome v7.0 (chr-ID scaffold11661; pos 40216 to 41149 reverse strand)
tttgctgtggtggcttgataacccttcctctacaggtgtgtctatctccgtaggaaaacatgttctgcttctatagtgttacatgcagacctggccaacgggctgagctggactagaaccggcggttccaattcaacattcagagtaattggaaccacaaggccccctggttttggtttgattccattttgatcaaattcagtggttgaattttttttttttcaaaacttatattgttttttagtttaaaaaatctagtctatgttcggttctagctcatatccagttttgaccggttcaggctggttcctattctgaacagtcccttggttgggtctaaatttacatgtatgaaatcatgtgtgttccctttatattgcttggtctttaattgcctggtttcgatctaaataaccttcaaagttcaaataataagattaccctgtcagcattttcataaaatatgtatcatatatataatgtttatcttaaaaatttatagcttgcaagattggcacatatagctagtctctgaactctctgtttattgttgatcaatcatgaacaaactctagttccaatttggtaatgtccaaataggtggacaagcactatggcatttattgatagaaaaacctaaatgtaataagaagaaagaggattcctaaaatactaattaataggactaatcacttaaaaggtctggaacaatattgtcaatttactgttatgacgaactacaaaaagccaatttgttattctcagctagttatgaatcacaactatggccagaagctataattatatgtattaagctacagatgacttcctaaataaattgtaattcttaagctaatgctgcagcactatctgcctgttttcttttttgacaagctcagctcgggattggatttctactgagggaacgccctgt

SEQ ID NO: 46741 - DNA, 726 bp, Manihot esculenta
  Intron number 3 from transcript cassava4.1_032467m (locus cassava4.1_032467m.g) derived from phytozome v7.0 (chr-ID scaffold00343; pos 41796 to 42521)
atattgcagaaggtatttttattcaagtgcgtttgttttaattgttttttaattgtacaatatcattttattttgtaacattttaaaatgggcaatgattcttctccaaaataataaggcagtattgtcaactacacaattttgtacgagaggtgatctaaatagaaaagcatttgtgatcctaaactatttcctagtgaaaaaaagaaaaacgagtgtttgtacttgttaatctctgagaagaatggataatgagggctcttatctagtatatctagattggtaatctctgacgttactttggctttgttttccccgctttgaagaacagagttggaggaattatgtttttcctgaattttgtctaaacagcgatatcaatgtattgcttccttttactaaaacaacagaatggattttgttttactatatttggatttaatcttttgtttagtaagcaacctagtcacaattcaagcaaatttgtttgtttgattatttacaatgtcctacttcagatgtcttcaacacctgctaaaaggtttttaattttttttatttttaaattggattttgaggattttaaaagccacttctacgtgcttttgttattgttttgttgtttatcttaaaatcaagggtttttctttaatctttatttctttttggtgctttcttatgagaatattgcttgaacagccattgttggagacataaccccttgtg

SEQ ID NO: 46742 - DNA, 781 bp, Manihot esculenta
  Intron number 1 from transcript cassava4.1_010755m (locus cassava4.1_010755m.g) derived from phytozome v7.0 (chr-ID scaffold02658; pos 723341 to 724121)
atttccaatctcgtggtgaaagagtaccggttgaggtacgaatctctctactcccttcttcttctcctttatatctttataatctgctgtaaaagaatcgggtcgccttttggattttggtgtttggtgtggttccaagattattttcatttccttgctagaagaagtaactggggttcttgtttttgttgtctgtttccgtaaatttgtaaaaccagttgcggcttttgcttaattttgcgtttggaaattctaattaacagatccattgcttttggtaagtttttctcgatcgatttgctttgctcgttctgaatatttaataacctaaatcaatttcttgctcttgtttctcttggttttttatggtttaatttaacaattggaggcatgaattggaactctttatgtccttgtttcgctgcttcttctagaactgaatagattctaatctggtacaattgcagttgaattttgatttgctgtttctctgataagaatttgaagtaatatttcgtaagactcagatggaaggactggagttatatttttattattcttattctcttgtgggtgatttcatgattttttttcatgatggtcatgtgttgctagtgttcgcaatcattcaatatctgcttgcttacagccaattttcctgtatatttgtgtcagttttggtagattttatagatttcttctttattcatggaattcctgtgcctttttgcaatagtttgagttatttagttttgctgtcttctagcagttaacaatcaag

SEQ ID NO: 46743 - DNA, 667 bp, Manihot esculenta
  Intron number 5 from transcript cassava4.1_010124m (locus cassava4.1_010124m.g) derived from phytozome v7.0 (chr-ID scaffold07318; pos 242864 to 243530)
aatcctcagcataagtgagtgatcacaacgcataaaatatgcctgttgttgacctttttcttaagtcattcactccctaatgttattcactccttgtctccttcattattttcttttttataaacaacgaaatcaggtcatcgctacctggctagctttgatttttttttattatatatatatatattttagttctagtttttaagaagacatgctaaatcatcatatatttttggttctgctttttaggatgacatattaaatcatcaaaagaggctggcctacaatgagcttcttccccaattaggttataccttatatcaattttgcttcagtggccgtgttatcacaggcatgtcacatgataaaattgtgaaccaaatgcccaatgcaatctctattagttgaacactacatataacatggtttcggacaatgctatagataatgcatgtttgatttcatgaacaatataatacatcatgcttgtttgctgtcagcttaactattggtgttaagttgcttaaatagttttggtatgtactgcttattattatgacggatgtgaaggggtttctttagttttcatttatctgctgatattggattcttttcttattgttatttttcagaggtccttggggtgctctttccccaatccctgaaa

SEQ ID NO: 46744 - DNA, 650 bp, Manihot esculenta
  Intron number 1 from transcript cassava4.1_033184m (locus cassava4.1_033184m.g) derived from phytozome v7.0 (chr-ID scaffold07520; pos 468178 to 468827)
cagtgcccgtcgacagaactgttgaacaggtttctctctctttttttttataccttcccctgtctgcattgtacattgattttcttcttcgaagtatggctagtgtaaactgtgtgatcttcattgatttcccactttgctctaagatttttagattcgaatttatttttgcttttttgggtctattttatatataaccttaaaagcgaggaatgatagtattatcctttccaggattatgtatttgatgctctgtatccatctctttaactcattgtgttatctaatgaatcgttccttttgtttctcattttctagatgagacacttcttgaatttcattttcctgttgtagtctaacttataacatgtctttcttacaccacaaaagttgggatttttgttgaggaatttttagagttgcctgttctttcacatttttgttgattaagatttctgcaaattttggtttcaggcttctctttggattcccattttcattccttcactgacttgtgatttttttattgtctgtattttgttccttgtgtatttaattatttgggttggttgaggtgggagacttaaagcacaagctatatttaatgtcttgtaggcaatattagctttgaagaaaggcgcacatctttt

SEQ ID NO: 46745 - DNA, 961 bp, Manihot esculenta
  Intron number 2 from transcript cassava4.1_002259m (locus cassava4.1_002259m.g) derived from phytozome v7.0 (chr-ID scaffold07520; pos 1308878 to 1309838)
ctgctaattctccgacatcggttcttgaagacgaggtttgttatcgttatcgtcatcgctctctccttttctttttgttacttaactaaaatggtttggagtttcgctttgtggtctgtttggctcttgggaaacgaggaatgggaaagtggaatgtctgtatcttttgtttggtttttgggaggaatcagagaaagaacggtgctagagaacggcttcattttctaggctttacaagcatttcttttttccaataaaaaattagggggctattgctgtttagaagtcttctgggttttcaggttgtttggcagttgatgcacgtccattaggtctcctcgtaatgctatttggttcgaattcatgctttataagagtatgtatagatgcgaatgttatcaaaagaaagtttatttttttaataatgtcaaatttatatcacgtgggaaaggtaaagaaatactggcactttttgtgtatttttaaaatatttttcgatgcttgatgagtctaaccaaacttcgccttttgttttttgattttagaatagcataatgaaaaggaaaaataaaataaaacaaaaacaaaaagacccgaccaaatggagattttcttatttcaaaagtatatattctgatactaatactttcctatgcctttgtttagataatttaatggttgtttttctgtccaaacatttgatgcaacagggaccacatttgaaacttactgagatttaattctttggtttgtcatgcaagtccattgtgtcccagcatgcataatcttcttgtgatctgtaatcaaggttaaactttataagtttaccttgttaattcattcctgagcctaaaatgttgttaatattgctgttaagttacatatttatgattttttgtggcaagtgtcttcatttgttttatttgttaatatatgttttttaatttgtaggagaattgca

SEQ ID NO: 46746 - DNA, 154 bp, Manihot esculenta
  Intron number 1 from transcript cassava4.1_003662m (locus cassava4.1_003662m.g) derived from phytozome v7.0 (chr-ID scaffold04457; pos 358460 to 358613 reverse strand)
gcggtccaagcgccgctggaaccaaccccaaaaaggtaacttggaatcttgaataatgtctctctttagtctcacagacgccagttttttttcctgttgtctatattttgatttgttgttatattcttcttgcaggaaaggttggattcagccc

SEQ ID NO: 46747 - DNA, 596 bp, Manihot esculenta
  Intron number 2 from transcript cassava4.1_019777m (locus cassava4.1_019777m.g) derived from phytozome v7.0 (chr-ID scaffold07660; pos 124901 to 125496)
agcaaaatataagaccgtggagctggatactgagagtaatttctataattttgctgtgttcttgtcttgtatctgtttggttcatgagaaaagataataacttttatgctttgtctacttgtttggtaatgttactgaattggaattgaatacaaattttcagttatgtttttgtatgctttgtgagaatttctgggtcaggctagtctatgttgtatgtgattgatttgtaatgggattctatggctgaattccgcttcatagtgtcgatttttaccaattttgcagccattatatctgccgtttccttgtgaattcaacgatttttcagaataagtgaagttttgtgtttttgcggacagttaattaaggaaaacaaaaagcagaatcagtgatggagcaattgattgcaccagtaatatatgaaaaagcaaactagactgggtttttaattctcctttctgtatttacccattaaatatcatatcaaagaattgtgtgagaaagggagtgccattttttttattggttcagcattataaggaattgaatttaacccatcaattacatattttttgatttttcatgttgtgaag

SEQ ID NO: 46748 - DNA, 988 bp, Manihot esculenta
  Intron number 3 from transcript cassava4.1_014174m (locus cassava4.1_014174m.g) derived from phytozome v7.0 (chr-ID scaffold10689; pos 216746 to 217733)
gatttgaagtgagtgctcgtctttttacggttttatggtctgcttgatacttttatggaatctattagtagcatattttatgtttttcaactggaaaattttagcggttactggttttatcagtagcatcatctatgcaagttagtaaaatctttttagttgctccagacaccttcatcctaaaatgatcataaagatctattcttttgcttgagcatgattttgaaattcgacattggatcaggaattgccatttgtagttttccaaatgtgtgcttatcttttgaaaactgttcgttcagattcttaaggttactttggactgagtctgatgactaaactcgcaaaacattacatattatttcctcaactagtaaattcctgtaatcatgaggcgaggcttcctgctatttaacaataactataccctattaggaaaattatgccctagcaaacaaattagtgttcaaaatttggacattttgttcatttgtcactatcatttttataattaaatatcaaattagagcagctaaatataagggcttctttagagacatagtgcacctgggtctgggggatgaaccgatgaagtgcatggaacagtatttggcttcttgctcatcttcaatttacttgcaaaaaagagggtgcagggtgggaggcgggttgttcctctggattttttgacaaggaagcatgtggtggatgttattaaaaatatgtgctcaattttcaatttaactttaatacatgtaagacagagtcagaaaatatcctttattttaccatctgatggtttgccttgtttattatgcttataagtttcccctctcaaggttgcttcatttcaacactttattttacttgtttgaaattgattaccgtcattcattttgattaatagtgcttgcttacctttgatttcaaacatatataccttgctaactgtttccatatcatcaggcattggtactagaggtctgtg

SEQ ID NO: 46749 - DNA, 922 bp, Manihot esculenta
  Intron number 2 from transcript cassava4.1_028867m (locus cassava4.1_028867m.g) derived from phytozome v7.0 (chr-ID scaffold07610; pos 111019 to 111940)
gctatcgggtaaattttacttatttcctaattgatataatttctttaagctttcaaatgcatccatatgaatgaataagcttagccataaggaagaaatgttgcttttaatagaaagcagatgccaaggaagtttgattttgatgctgcatgggttctgttagttgttgcagaaaaagtactcgtgcttatggcatgataagtatagctctagcacttagtttattttagaaaatatgaagtgatattcttgtgcatcatcagatatcatttcagttattcttgttgggcagtttcttcatgacatatatcaatgaatgttgagtaactaagaacctactatagcagcagttagtctgatttgcttgaagttttggactgttaatagttactttgctttggcctgggctttatattttccagagctttaggtcaaacattttcttggttatttgggcattttgttaatctcttcacatggcttttctataggccaatgaagagaaaatgttattttgcacggctgtgatagcctttgtgaatttttgctagttcttaatgtaaatagtaaaatacttgatattttggaacgattattcaagtttgttccagctgatattgatttgattggcaagtgcttatttatattatgtgcagttcttagcatttctaaggccatatgcacaattggtgcaatagaatgccttttacttctgctgtaaaacatgctttatgtgattgcccgcaatgttacttaatttcatcactctctatttttaaccttaaatacctatttttattttatgttttcttcaaagttacagatttagtcggtcatcatcttattcatatttcctaaagttgattaagttagcacttgtatattattcttctaatctttgtttgtctgctgcaggcagttc

SEQ ID NO: 46750 - DNA, 467 bp, Manihot esculenta
  Intron number 1 from transcript cassava4.1_024724m (locus cassava4.1_024724m.g) derived from phytozome v7.0 (chr-ID scaffold06701; pos 603215 to 603681)
gaaaccgatttcgaggctcgagaagctgagcgctggtttgaaaccacaggattttgttctaccctgcgtaagattctctcatgaatactacctgtatcagatcaaaaccttcttcatcttcttatctcctttatttattttttccaaaaacaggagtctagattggcttgcttttgagtatggtttctttggcatgaaatggaagattatatatgttgtatttagccaatagaagtactgatcataatttataattgaaaaatagtttaaaaagacggtttctcataagcagttaatgcttgtagcctgtagctgccttaatcaattttgaaactcttgtttgtaattgactgttctacaagtgctaactaattgtatttcggtcttaaattttagttctcaatacaaaactgaattgttaaccaagcgttccagtgaaaagtggaattcctctttcattctcagag

SEQ ID NO: 46751 - DNA, 554 bp, Manihot esculenta
  Intron number 2 from transcript cassava4.1_011656m (locus cassava4.1_011656m.g) derived from phytozome v7.0 (chr-ID scaffold06484; pos 23353 to 23906 reverse strand)
accaggcttgtagagaagctggattcttctacgtggtacttttccttcctaattttgtgtttgtcattttgtttattgcaaaattgttgttgctgatagtgggtagtttgatatttatgtcgctgtgctgcactgacttccggaggtgggaattttctggttaatttttgtgagatatatatctggatttagcgaagcaatgagtaataaaatagggttttcaatgagattctaaaaatattgaatattgctggtttgctgctagagctaatattatttctcgtgcttttgtttttctattatggcatataggagggaataaaaattacagacaacaacctattattttcatttacatgtttgtgtatatgtactcaaatggttttatactattggaataaaggcagcaatttctcttctctatatggttttgattccgtacattatcaggacggaatggcaatattttgctgcattatattttgtttagctttagcctttttatctctaaattttctgtatgctttttggttatgtggttgattagaagggac

SEQ ID NO: 46752 - DNA, 403 bp, Manihot esculenta
  Intron number 1 from transcript cassava4.1_006069m (locus cassava4.1_006069m.g) derived from phytozome v7.0 (chr-ID scaffold03750; pos 548445 to 548847)
ggaatctcatatctggtactatatattgttttgtttttcctggattttgtgttctttagttaacagaatttcctttaattttttatgggttttgacttggtggttgaacttagttttttgtttgtttacttgaggtcaaaatttttaaagaatttggaagtgtttggttgtttggactggtggatgaattgaattcttcgtgtttactgtctttattggatctaaattttatttcactcgaacttactttctactgaaaaagttatattagtgaaggaagtgtatgagaactgacagtgatccgtttcttttactgaatttccaaatttggaatcgtttggttaattatttctgttattttcccctttcgtgcagggattgcgggaaacaagtctatttgggt

SEQ ID NO: 46753 - DNA, 415 bp, Manihot esculenta
  Intron number 2 from transcript cassava4.1_010535m (locus cassava4.1_009847m.g) derived from phytozome v7.0 (chr-ID scaffold08287; pos 16729 to 17143 reverse strand)
ttcttctcagagatctgacaccagagagaagcaaggtatccaatgctgaattttcagtttctaattcatttttagatctctagcttttttacatgtaggtcccaatttctgttcatccataaacggacaattttccagggaaatttgtcatttcttgcgtttttttttctccttctctgattttgatagcattggattttggtttcattctctctcgtttctgtgagaggaaagatgtttccgattctggatttcctctctgaaactaccttattaattttattttcttgagatttgtttttttttaaatttcttggaagttggtattatttcttattgtcttggaatttgaaactatcttgtcatggaagaaagtggtggtgttggtcgtcggagactctcacttttggaccaa

SEQ ID NO: 46754 - DNA, 643 bp, Manihot esculenta
  Intron number 1 from transcript cassava4.1_013822m (locus cassava4.1_013822m.g) derived from phytozome v7.0 (chr-ID scaffold00826; pos 1705 to 2347)
ttccctgctttggatcctgaggtgcatttcaatgttaatagttttctctctcattcttgtaatttgtttaattgatggaattctgaaattagtataatagcgttagttaattctaatttttatcttgattcctgaaagctttgaaccgtttactttttattttgtatttcctgtaatcttgaggatattataaagctgaaatatgcaatttatgtattgggttttactaagtttgatccaaatatatgattatacttgggattcattaaattttttttcttcttctccccccctggttttcatgtctcatatggtttcttacatctttgatgctttatatagtgacccttaattgataatatctgttttgacttcattctagctgtttgcctgtttctgaaaccttgtagttagatgaatgacttgattggacagtttatcctaattcagtcatagattatgaatgataagcttagattttttatttttggtggaagaatgattaacttagattgtgtttcttattaattgtctttcatataaattagaatcagttgatataatattgaattgtctaataacattttcccccctttttctttatctagttggtaaaaactgtttacaggaaccacaacaataa

SEQ ID NO: 46755 - DNA, 599 bp, Manihot esculenta
  Intron number 2 from transcript cassava4.1_003150m (locus cassava4.1_003150m.g) derived from phytozome v7.0 (chr-ID scaffold07543; pos 73044 to 73642)
ctcagagagttcctattgacttcagctttttcaaggtaggccaaattgtgcttttctttcttcttatccttccttttcttttggaattaaaatgttggtttgttggtttttggttactgtcgtgcttgctttaaataatcctttggtggtttttattaaattatgggtggaaaattgcggttgcatttgagaagttttttagttgcttatatgcatgccatttgggcataattaaagatgtatgatgggttaaataataactcattaatgatgtaaaatatgaaaggaaaataaaaacatttgtttgggatattattttgtatttcaagtatatggtttcttttacattttgtggtttgcttctagttaggtgcttgtaatgttaatatctttttgtattttcatttcattatctgctccctggattgctttcttagtttgagtgtggtcacatgaatttaatactcatgctaaatgggacaccagaagcaaattttgctaagcctctggttctcatagtgtcttaattcgatttggaactaaatggctttcgttttcctctaaataggcatactgtttatacagacagaacaagttga

SEQ ID NO: 46756 - DNA, 754 bp, Manihot esculenta
  Intron number 1 from transcript cassava4.1_006274m (locus cassava4.1_006274m.g) derived from phytozome v7.0 (chr-ID scaffold02196; pos 59117 to 59870)
gctccctcaattccctatctattcctctcaaccaggtaaatttcttatctttgattcaatttcgcttacttttttctcatatttttttaatttcattcatatctgtgaatttttgtatctcatgttgtctttcgtagcttgtttccttgtttacttaaccgctcagcttgtctctttttgtttttttcttgtttaaactgaaaaaaattaaaagggcatcgttggtctctgaactgttagtttcttgaaaaaaattagggaattattagtttcttgaaacaaattagggaatcttagttatattgcttatatttaatagcatatgatgctacagtatatgagaagatatcttcatgcctaaaaagtgtttgattttggtccacaccgaatatgtggttgttgagacaagttatattatcaatgtacaaggttgcaaaaataaagtatcactgttttcttgtcccttcttttattagcagtgtgattggtaaaaggaaatagaagcagaattttggtaccccatattggatgttggtgtagctattagcatatgtatttgaatagtgagtctgttggtagtacaactggcgaatggcattttccaactatttacaatgtggaaccattcagcttcttgtgaaaatggattctgttttctttttcttggctaatattttgacagggtacatcctggatgtaaaaattacatcactgtaatgttcttcctaatgcttttagcaggcagtgaacattt

SEQ ID NO: 46757 - DNA, 743 bp, Manihot esculenta
  Intron number 1 from transcript cassava4.1_027036m (locus cassava4.1_027036m.g) derived from phytozome v7.0 (chr-ID scaffold07893; pos 63600 to 64342 reverse strand)
tcttgcttgcttgttttcttcttgccactaccagggtattccatgctttctcttcctcctccttcctctttctctcttttagttgcaacctttttttaaaaagattttgcaatattgttgtttccatctaacttggttttcttgcctctctaggttatgtccaacgttgaggtcatcatcatagaggtaattgtgattacaggtttcttttgtttgcttaataactgaagcagccttcttcaaaagtaaccttgaatagaaatttcttgccgggttcacggtggaccgagctacaaaatcaattcatatatgtttcccctgaattttgaagactaaatgtgactataaaaactaatccatcatgctcacttctaacaataaagaagaatctaaaaaatttggctaagttgatttatatagatcaaaaatataaatttgaagtagggttcacataacaattataaaaattcatattattctttattcgagtcttgagttcatatagactcgattcggacaagaatttttcaaatttgtatattcaagaaacactttttaagtccattcacagccatacagtaggttgtaatggatcaatttaggagaattttacagtctatgttttctctttattgttccaactgaagtctaccaagcattctagttaaacagaaattgttttcaactttgattttgcattctcacaaggctcctacccactctcttgctccccaacggcaggc

SEQ ID NO: 46758 - DNA, 165 bp, Manihot esculenta
  Intron number 1 from transcript cassava4.1_009412m (locus cassava4.1_009412m.g) derived from phytozome v7.0 (chr-ID scaffold06916; pos 649331 to 649495)
ccccttttctcaaagcctccaagaagcagctggaggtcgtcttctatccatccatcactcccttttttgtttgttctttgaatttaagttacagattttgttaattattctttttctaacttggcttgttggtgggttggtgtatttagatagtttacgatcctg

SEQ ID NO: 46759 - DNA, 868 bp, Manihot esculenta
  Intron number 2 from transcript cassava4.1_004740m (locus cassava4.1_004740m.g) derived from phytozome v7.0 (chr-ID scaffold04129; pos 41869 to 42736 reverse strand)
ctttcgtctgtgaaagtttggctggttcttgtgaggtaaatgtaatcgaaaccagttcgttccgattctagttctttatccgcacgttttctgaaatttttgttctgaatggaacttccaaacttatatttacatttctatcttcaccagttagacactttttaaacttttagaaatatgaaaatggaggcaaattatgctaattacacatccttaacgtttactgtggatctctgggattgacatgtctagtaatcaatgtatgaatgaaattttgaattctttttgatattctgggtatgatatatgcttaatgatggtataagcttatgtatgtgttacgcttgttcttctgcatagcaacttcaattgtttaaagttttcttgcgatataaaagattgctatcgcttctgatgggaaaaaagaactgatcactaagttcaaaagggctattggtatgaaaattgcttattttgtgatgcatcagctaaaaggacctgtttagcttgcacgtgtgtatgggtttgtggcttacatacctaagcagtatggtctttaaactaatttgcctactgtcagactgagagggatatttgaagaggcctagataaatctaagaggcattatcttttgtttcctttaaacaggatgagttctttgccgacggttgttctttactcttatacctcatcccgtggtttacaataatgtgaactccatttatttaaaagattactatagctgctagttttgtcccatagtgatagttcagaagggtttttgagatatagcagctgctgatttcatctgcaaatttctcttgaaggataaatagctctctaaatagtatttactgttaattatagg

SEQ ID NO: 46760 - DNA, 351 bp, Manihot esculenta
  Intron number 1 from transcript cassava4.1_020301m (locus cassava4.1_020301m.g) derived from phytozome v7.0 (chr-ID scaffold04457; pos 658550 to 658900 reverse strand)
gaggttgggagcttgatttgtattcatcctccgtatgcacatagatagatacacaccttctttcaaatctaattagagaaccattaattacatggagctttgcttctttgtttttccttgtgataaaagtatgaacaacatgttgttccttcaaagataagtatttaatgcaattcctcggcacggtagcggaattattgaaatggcaaccaaatcaattgaaattatatgatttttacaattttattttatttatatttttatttgttgctattcagttaaaatcatttatattacttaaccaatgaagattgatagtgggcttgtgtgaacaggaaggaggttcaagcg

SEQ ID NO: 46761 - DNA, 758 bp, Manihot esculenta
  Intron number 1 from transcript cassava4.1_018098m (locus cassava4.1_018098m.g) derived from phytozome v7.0 (chr-ID scaffold03804; pos 39232 to 39989 reverse strand)
cacaaagctttggtcgcgcttcgatccttcgactggtatgaaagattacttattcacgaagttagcgtctttaaacttgcttgataagctcaatttgaatttattcatgtcgtttgtgaaagaaggaagtaaaattcttatttacttatgttattttcttttttctgttgtgcatagaaattttatgccccctaaaatggggggcatggggtcaactgctgtttgtagtaaattatttgagcaatttcattatgaaattccttaacattgaggaattctttgtttcttcaatatctcgtttattttgttttgaataatttttgtcaataattttttttattaacttttccgattatacaaatatcttaaaagatgttaaattttattaaatattgaagagatattttggaaataaagatgaaattaaatggagttataatcgtttaagtataaagtgtagagtggataataattttgagacaacagaaacaaaaattattagatggagggagtgcatttttccatcccattctccttttgaagtatcattttctaagttatgatgttgagtaaacgaattcaacatcatgtgtcttgtggtttctaagcatgtttcattgattcattttcttaactttgttatcttataactgcaattttcttgtctaatttattaagtttctttatttcatgttgaatgattattttgctcatatgaaacaggtaaaactgtgactttagatcccaaaacaagtatt

SEQ ID NO: 46762 - DNA, 750 bp, Manihot esculenta
  Intron number 1 from transcript cassava4.1_014744m (locus cassava4.1_014744m.g) derived from phytozome v7.0 (chr-ID scaffold03252; pos 73166 to 73915 reverse strand)
gctgaagcgagctggtgctgctggaactcgagctggttttgactttactttgttaaatttttagctttttttctttttttaattgggtagtaatcgtattgctcatttctggttttgttcgttgaatatgcttagatgatctgggtttggatattattgatttaaattatatttctattgacccttttttagtaattaaggagtgttttgattgtgcgtttgaggatatttcttcctattgaattgaatccacaactgcttgaaattccatttttaattcgttaacttggttgaatgctgtcaaggatacttctaatgaatgggatatcagtaatagcatcgtataatcttgtgtggaagtactgtgttggaaaatttctgtattttgttgaagataaaaagcaaacatatatgcttctttttgggattgttatttctgtttttgatttgcttttgccttgtgaatactttatgcctttatgggacacaagtgttttgagtttctgaagcaaatatcctacgtgggtgcttgtcctttgtgggtttacatttttttgtacttaatttgtaggcttttgctgcctccttgaaagtaacaagaactccattattaattagaatgtttgtatatttgagctttcagttgacaaaaatgttactgtgattatgcatgatcctttatttataactgacctatttttcctaattaatgcaggcgtgggaggttatacctacttactggagccgcta

SEQ ID NO: 46763 - DNA, 667 bp, Manihot esculenta
  Intron number 1 from transcript cassava4.1_023575m (locus cassava4.1_023575m.g) derived from phytozome v7.0 (chr-ID scaffold06916; pos 263688 to 264354 reverse strand)
taaataaggaggtatgtggtccttaattgccgactcctatttttttttgttttctttccagttcagtaattttggtgaattaagctccaattgtatagaattgtttatgatttatctggttggattagttttgtctagtttattttggcttaattatattgattgtattgaattttgaggattttgggtatgatttatgtcatttgtcattcttctttgaattggaatggcgttctttgctagagtgtggaattgttcgaggttatttggttaagggaagatctctaatgtagttgtttatggagcattttaacgcaaaaggtcagttaacttggttgctgaataaatttaactatcgtttgagcacttcctttacgttaatatagatgtggacacaaatttggaggaaacccaaaatctgttatgtgaagaaatttcataatcctggctgtgtgatacatttatagatgcacacatgtacttcactcatgacatttttaattaagaatgcaaaatgggtatctcagtttggtttgagtttgatctattcccatgaagggatctctagggatagaggtaagtactatactaatcatttgttgcagttgtaatgcattctaatatatggttattgattctctctcaaaaatttatggaggacagaaaa

SEQ ID NO: 46764 - DNA, 741 bp, Manihot esculenta
  Intron number 1 from transcript cassava4.1_015485m (locus cassava4.1_015485m.g) derived from phytozome v7.0 (chr-ID scaffold10097; pos 194889 to 195629)
catttcctatctcttccagatctgatcttagcattgtaagtactcatttctatttaaagtttctcaattcacaattttgtttaatttttgtatttattttcttttctttcttctgggttggtggaatttgaactgggtgcctattgttgatgtttctcacttcttcttcttccttgtttttggtgttgtctacattttcaaatgaatcttgggtggcgatctacaggtttatggagattgaaattgggttttgatgattttttgtttttctaattatattctagatttctacttcagtaattatatgggtagatttagctttgatttttttattgtaaagttattttctcatattacttgattcttattccatgttttcagataattaaatatgattttgcaatcttaagaaacaatcaattccagaattggattctctttgcactttaaattcaaattattcaaatataccgatcaataatatgaatcctattctaggaattttgttccattttcattgctgttgcaaacaaagtatggtccacttttttttttttttctatccattttcgttttgtatagcatttgatttcaaatttggtttttgtgttatttactgcgctgtgagaataatttttctcacaaattaaattttctgcaaaatttgaaagaatacatatttttgcctaagagcttgactagtgttgttaacatatgttatgtagctggaacgagggttac

SEQ ID NO: 46765 - DNA, 1009 bp, Manihot esculenta
  Intron number 3 from transcript cassava4.1_031160m (locus cassava4.1_031160m.g) derived from phytozome v7.0 (chr-ID scaffold07520; pos 485609 to 486617)
gctgtgtactggcttttaatatattgtcttttgaggtactccccctctctctctgttttctcccctaacgctgtcgagcattgctattttttttttccttctccttttggtggatttagtttcacctgctagaatacaactccaatatgtttgaatgagaggcattttcttgaatccgatttctttgttgcccattacaataagacatgttctcatctctagccttctgagttttgataagaaaagggaagggaaaaacaattcggaaaattgggaagcaaaataggaattaggcaaaaaaaaaaaatgatgaagggaaagtggagatgtttgttggaaagttgagagtgaaaacagaacctttgcagctaaaagagtgatagtaccataaggggcctaccaaaattattctagttgcattgactgtgttctgttaatcaattttagctagtgttgatagtaaaaaaagctttatacaggagaaaaatggttaaagaaaataatctgaatggttcagtttaatattaagctgatgaaatttctgagatactatattactgaactagggacgataccaatttctcctcccaaaagaacaaacaaattgtggctgctaatactttgagcaatttttacctaaccttcatacctttaaaagagagaaatcaagaccttcaagcagtattctgtcttgtattttgctgtcacgttttatagggcaaccagatgagctgtgtaagtcttccccttatactctgaaatttaacttggatttgcagttggttttttgaatggttaaatttgctatttgtctaaaaacattatttgcttgctattatttcttgtctctttgattagttgtttgcttcctggacaactaatttgaacaaacatgaaattgaatgttttgatgctctctttctattactagaatagtttgattcaggtatttttgacatttgaatttaatgcagggtgtgtgccatcttttgacaaatatagggatcta

SEQ ID NO: 46766 - DNA, 516 bp, Manihot esculenta
  Intron number 1 from transcript cassava4.1_016191m (locus cassava4.1_016191m.g) derived from phytozome v7.0 (chr-ID scaffold02903; pos 57233 to 57748 reverse strand)
gcactctatcacctcccgccgactctaccgaccaggtctattgttactctcccccctgctcttctagggttttcttgctcattttcataatttcatttgaaagctactttattatgggtttcatgatgctaacttctccttgttcttatattaattattattaggggagctcttttgctcatgagtgaaatggggaaaatcagataatcgtttttacatttttgttcattcgcatatgtggtttatgtatactgggagcgagaattttgttttgtttttgttgtttgatgtttgaattttgtttctcttcatgatacagttcttttggggttgcttaggctttgagtgacaaaggggtgaataccctaaaagttggggcccggattctcatagtttttgaactttatgcttttatttcactgaagtgtacatttttttgcacgtcttgtgtcattattattgatgattctaataatttcagaggccaattgtggaagtaattggacacaaggctca

SEQ ID NO: 46767 - DNA, 869 bp, Manihot esculenta
  Intron number 1 from transcript cassava4.1_031837m (locus cassava4.1_031837m.g) derived from phytozome v7.0 (chr-ID scaffold03866; pos 108668 to 109536)
gcagaacaagcctcagcgcgaaactacgggttccggtacctacgcttctcttttgtattctattaaattgttattttcaagtacgtttccatcatgaacgacccatctcttgaaagtttttctgccagaattgccatttcttgtgtggatcataattggcaatttgccagacattgtctccattgacgtgaatcgacctcttctttaactgagaattgtagttttcacttctcgttcacatgccttttttggtccaacgataggctttcatggtactggtactgtgttccaataaatcattatgaaatgtatcctttgttaggattttttttttttatctctaatttggagcccttttaatttctttttttttttttttattcttcgtggaatagaattttaaactattattgaacgctttgcacgtgtttttttttgcttgtcttactttttcgtgtcttggctatctacattttttctttttattttctatatttatccttgcatcaaatgctaaacctaatctaatcccaataaattgctgaaatatactaacatatggacctgatagcatcagattacaagtgaaaaaggttactgcttgaaatcaatttcttttatgtgtagcaaattgatagtttcttctgaggtgtgctgaaggtgcctatatcatgttttagcttcaaaatatttcttgccttttgagtttaaacatttgaagtacaaataataaagttttaatttaaaccctggaatatcaatgattaaactaataagcggataaatacatctttttttttcctcattttattcttaagtttttgtattatgcaggatttgttattcctggaaagaagattctcacaaac

SEQ ID NO: 46768 - DNA, 484 bp, Manihot esculenta
  Intron number 1 from transcript cassava4.1_005840m (locus cassava4.1_005840m.g) derived from phytozome v7.0 (chr-ID scaffold07520; pos 304296 to 304779 reverse strand)
gctgctcctcgcagctacgtcctcggtcactgcaggtttgtatgagttttgagattgtggtttcagatgtgtgctttctcagatttgtgagatttattgatttggatttgggtagtctatttgtaaacggatttgggttgaggtcctatttttagttgctgcaaaatacttcttgctctatggttgaatgattattatataggataaatactgtggtaataaataatttacttaagtatgttatgaatttcaaaatattttgcagctgtaattctgcaattcaatttccctatatcagaacttgctatatcgtaaatactatataatttgcatattcaagaagaaagaccttaatgttttcatttatctatctgtttgctctgtgtttggtttcttgtttgggccttttcttgttaagtgattactattcctcttgttcattaaaaaatattatcattattcgtttgttttattttgaccagcc

SEQ ID NO: 46769 - DNA, 880 bp, Manihot esculenta
  Intron number 1 from transcript cassava4.1_008218m (locus cassava4.1_008218m.g) derived from phytozome v7.0 (chr-ID scaffold00847; pos 1035487 to 1036366 reverse strand)
gtcgttagagactcggtgagcatccctaacctctctctcacacctttattataagtgcgagtgccatgctaagttttttcttgatttggtaataaatctttctcatcacaaaaaacacctccttcaaattcttgtgtgccattcttaggattccttaacgtaacactctctccatctttcccctttcccttcaaagcaatgaattaatttgatgaaaaatgaataaagctttcaaattttcttttcatgaaattatttgatatattgcaccaagttgttgtaaaatatcttcattttcgaattgggaatattgggttttttttactttgccaataataataataataatataagcttagaaaatagaaaaatattatacttgttgggaatatgttctgccacaacagaaacaaagcaacgatgagactctttaatttgtgccactttcacccacttggtgaaggagttggaaattacttgttctgaaactcaactattcttgtgaactttattttgttttgtgttgttgactttagctttagtgctatgaaatgtattttcttacatattttctttgcttgtatattatgtatttttcttactttcttggaatatgtttgcatgcgtaaccacagtcagcattccaaaaactcttaaatcttacagcctgtttcttctctttaataaaaaaactttctctggaaagtgttgcagattctaaagtatggaaaataacattgcaatgaaagaagcaaattcacactgcacacgcttggggggctcatttgcaatcttatctatgactcccttttttaaaagctttttaagcaacttttcttttgggtttttgttattgcaggtgcacgtcctgcctcaagag

SEQ ID NO: 46770 - DNA, 930 bp, Manihot esculenta
  Intron number 1 from transcript cassava4.1_001468m (locus cassava4.1_001474m.g) derived from phytozome v7.0 (chr-ID scaffold03750; pos 797479 to 798408)
gatttggtaactagttgcaaggtattttacttgtttggataaatttctgttccattgattgtcctagttgctgtgcttttcgtgtttattagctgtggtagctgaagaagcagtttaatttgctcaagcactcaaaattttttcgcatacgcttgtgagagactgatataagattagttttagtgggtatacatttttatttagttgccctagtcttaagtggcatcattatttgctgattacttttttgaagttgcaattggtgttggcaattctattggaggtgtatgattacatgattatctttttgctagtgattgagcttagcaatcggtacacttaaaagccatttgttttccccttctatttttctcctttagaattattaggtttacgggcatttccatagtttaatggttcaaatgtgttgcaagtctttctgcgtgcttctagttgccttaggtaatcataagaaaggagattgttattgtcgctaaccctccagaagaaactacttcttttttaatcaattagtgattgtggacatagttcattctttatgattaatttcatctatatatttcaaagcattgtttgaaaaccacactaaggttgaaacatgcattatttccagtcgtcattttgaatttgagatgaaggactgttacttaaaagatgcctttatggggtgattgggaaaattatacttatgtgagttacacttggctcaaaaattggttgttttggaattaagatgtaccatgtggttctgaagtctttatcttgggtttagtttttctcgtcacagtttccctcaatgaggtgactttgtttttcatttccccacttcatgttctgtttctgaagagattgtgaatttcctttgccattgtaggacaaattggcatattttaggataaaagagctcaa

SEQ ID NO: 46771 - DNA, 605 bp, Manihot esculenta
  Intron number 2 from transcript cassava4.1_006911m (locus cassava4.1_006911m.g) derived from phytozome v7.0 (chr-ID scaffold09576; pos 242426 to 243030 reverse strand)
atttgatcccaaatccgcaactgcaatctctaaatgtaagattcttctatgctatctttttgatcggaaacccatttttttaaaataaaaataaaagaaaacaaaatgtggatatgcttcactgtggatgtagaaaggtggaagaaccgataagaagaaaggacaaaagaaaaagtaatgggtgtaaataaattctatggaagaaatatactgctaccttccattttggatcataattgtatgcttcaattgatttcttttacaatacttttctcctttgtaatgaaaaaatttagtaaaattttcattttaaattgaattctagcatgatataaaaatttatttaatttttttttacaaaattaataataccaaataaagaattagttttttagggaggtttagattatttaaatgtttcataaggccacaagcttcttggaggatggttgattgatcaatctgctgttgaagtattaagccgcttatcatttttcagatgaaaagtaattgtggtcgtatcagaatttaaccggattgcattaataatcaaatgaagtaatgaatagtggtcattttatttatttatttatttattttcaggt

SEQ ID NO: 46772 - DNA, 641 bp, Manihot esculenta
  Intron number 1 from transcript cassava4.1_014961m (locus cassava4.1_014961m.g) derived from phytozome v7.0 (chr-ID scaffold00889; pos 168687 to 169327)
ttcctctgctatccacaagctctgctctcttttgggtatttttcttttttgccttttttattgatttgtgtctgctaggctcaattcttgggtgtgtttcttaaattatgtggaaattcaaagtgtttgctatgttttaagcctgaaattgggaaatgaatcttttgtcaatttttgggttttatttcaattgggaaacaaatttcctttttctttttttttcctttaatgccgttttggtcaaatgagatatggtttcttctgatttattgcaaaaagaacattctaactcgatcataatacgcactccagaaatgcttgatagcagggaatcaaattatcaagccaatgacacttatccattttcagcttttaattttatcaccatctatgattttaattttaaataggagacaatgcataactatgaattatcacatatcatttatcccttgtttttcctgaattttatatactggaaccagttcctccttagcaacttttaataacaagatggaattggggattttttgctttttcagaagtatgataaagtcatattactgatttacttatgctgcctttgtggctttgatacatcattacctattgctgttctgcagacacagttcagcctgctg

SEQ ID NO: 46773 - DNA, 444 bp, Manihot esculenta
  Intron number 1 from transcript cassava4.1_011249m (locus cassava4.1_011249m.g) derived from phytozome v7.0 (chr-ID scaffold06591; pos 221946 to 222389)
aagacacaaccccaacgtggaaaatctcgaactgggtatcttttgtttttgctttattttttttaattttgttttatccttgggagacttggacgtaggttttcctttttcattttactttgttgcgtgtggttgattggattgcttggttgatttgagtcagttggggaaaatgttgaaatttagaataagataactttgagcagcgagaacttggattaaaacgggaaaaggttttttttttttttttgcactgtttcttttgtctcattttgtggttgctttgttggacattagaaatgttaaaacttattttttgacacaatccatgtttggattttgtgtaataaatggttgcttagttgaaattttcaaagggttttgttttgttttggtattcttgtctcatattttgattcttttgttggttggtacagaatacag

SEQ ID NO: 46774 - DNA, 564 bp, Manihot esculenta
  Intron number 2 from transcript cassava4.1_011249m (locus cassava4.1_011249m.g) derived from phytozome v7.0 (chr-ID scaffold06591; pos 222492 to 223055)
agaaaggtgattttctggtgttggagaggaattaacataaagctctttgtttggcccaatttttgtttgatttctgctttcaactctgtctaatgttctcagctggattattgccgtacacacttttgaattatttagttgctgcatatattattctatgtgtttcctttccttttggtcttttcattgtcaacggccaaattgcttcctgatcatttttgcaggccatttttggacctttatatgtttagatatatgttgtcattaaaatgaaactgcaagcgatcaagcaccaaaaactatttctctatcttccctatgctgctttgtatattcttcatgctgttagtctacttttccttttgttttaagtgatcaatgttactctcttttagaaaattgcatttgcattcagcttttttttttttttttcattttagaaaatatgtgtatgttgttcttaactgcttattatgtttaatttatttaattttttttttcaaacagttaaagcccgttgtatttacaggtgtataaatcatcaaatcttttgaaaatatacaa

SEQ ID NO: 46775 - DNA, 395 bp, Manihot esculenta
  Intron number 3 from transcript cassava4.1_032790m (locus cassava4.1_032790m.g) derived from phytozome v7.0 (chr-ID scaffold03355; pos 74374 to 74768 reverse strand)
tgaaaggtaattctcttcatctattttgactttggatctccatgatctgtgcagaagaatatatcagtgatttacatgaaattattgaaatttgacataaatgatttatttcaaccaatacgattaaatctgatgaaactatattgatcagtagatgcttcccccaaaaacaaaattgaccatgtgaattgagcaagatggttgtgtgtatttctgagaaatatatcatgcaccagacattctctaatccgaatagacctcgttattttcttttcaatcccctcacaatttgatagaacattgttaattcgatcattagatgttagtttaatttaagatgtttgtttaagttggccaataaatcaaacttatgttacctcttgctgggttgcaga

SEQ ID NO: 46776 - DNA, 637 bp, Manihot esculenta
  Intron number 1 from transcript cassava4.1_004978m (locus cassava4.1_004978m.g) derived from phytozome v7.0 (chr-ID scaffold05899; pos 139644 to 140280)
gcagagaatcttccgctgacaacattgacgctggcgtgagtttctttctcttattcatttgacggaagatttcaatcgtacactcaatttcgaagataaatcagttctagcataaaaagtgattaggataaacaaagatatttgatacaaatgtatagaatcttggtcatttgaaagaaaaagaatttgagttgctctgtttgaagctcgcaaatacactgtgaaattggagaaattaagaaaaagaatttgagttgctctgtttgaagctcgcaaatacactgtgaaattggagaaattttataatacaacagcagtatgtacaatggtcagctattgaccaactatcatggttggattgaagaaattttcgtgaaatagaagtatagaactctgaggggctactacgtgcttagattgtgtatggtgatgctagggagggtttataaattaatcaatctaaactttgttaattaatttctgttggcattgctttatttatttatttatcttgcttatccaccattgtgactattattttgttttttctcatcagtggtctgtttgctatattaactgctgtgcaactgtgttttgttcagcaagcaagagtctcctggatcacgtccaagaaata

SEQ ID NO: 46777 - DNA, 707 bp, Manihot esculenta
  Intron number 1 from transcript cassava4.1_003880m (locus cassava4.1_003880m.g) derived from phytozome v7.0 (chr-ID scaffold03741; pos 780067 to 780773 reverse strand)
tggtcttcttctgcttcccttcctttctttatctggtaaaaatccgccatgtttatcatttcttctattatcgtatcaattctctgtctttctttcattccgctcccttcccattatgcttatttaccattttggtcagtatatattgatctagaccatttagtgttgttttccttattttgatctactttgtggttttcttgtttctgttggatttgtttgtttggtgtgtattatctttgtgattaacgtgattctttttctttcatgatttaatgtgatttatgcgatcattgttttgttgctcaattgaattagctttgttttccatttgtttttttgttaaccgatttgatttatcaattgcatggccatggtctttttgggtttcctttggtatctagttggttcggttgtattgtcttggtgttctcattcaacgatcggtctatgttctattcgattgcttattgtggtaaattgctggtcagtaagatttgtatattcacagattaatgaatacttcaatttatttaatttattcttgttcaattatttgatcattcatcaagaacgattgccaaacaaatggatttgttgtgattggtaatataatgaagtgtttgtttgttgaaatgttatttacatggtttttatttcttggtcaatcaggtggtttcatttttcaaggttgatatttgctcaga

SEQ ID NO: 46778 - DNA, 585 bp, Manihot esculenta
  Intron number 1 from transcript cassava4.1_026314m (locus cassava4.1_026314m.g) derived from phytozome v7.0 (chr-ID scaffold08574; pos 270 to 854)
cgtacagaggcgggtgctgcaggcacagcaacaaggtattttattctgagcactgtgcatttcatctcagtaacctaattttgtttgaagaatgtcctctcaaaaatctatccctccaactctctaaatcaattggcatatatgtcaacgttacatgtttccattttgacttctcatgttaccaaaatgtttttatgtcagcctcatcatatggtggggttcctgcattcaaaaacctcagacacatggtctttgttatcttcaaacattgcagatataatatttttgggcatctgtttttagtttctatgcaagtgacaaaatccgttgaccatgattcttctttgtcaatctcttgaatttttcctgtattgggtttgggtagtcatctgagccactaaacaccttgcatatgtcctcattggtcctagtcttcgaaagaccagtccattccttggagacattggaagtcttgtacatgaaatattaatcaataccatccttcaaaagtttttgcatgaagtgatgaaataatggtattgctgggtaggggtctttatcgagttcaccagttcagcaaggtgg

SEQ ID NO: 46779 - DNA, 491 bp, Manihot esculenta
  Intron number 1 from transcript cassava4.1_011994m (locus cassava4.1_011994m.g) derived from phytozome v7.0 (chr-ID scaffold11179; pos 237664 to 238154 reverse strand)
ggtctggtctcactgccattgtcacaggtgaccggttcctctctctctctctctctctgtttttcatttagcctcctgcaaaaacaggatttaggttttcttcaatttttgtattttgcgcatttatgtgagctgtagattcatttatgcatttttttttatttaattgcataagattatgaaggacacgcttagtaatatttgttgaatgaatgtgaagcagttcatgcatgctactgttatgattatccttgcccatatatgtctctaggcttttgtcagcatctatttattgaagaaacatgacagtgtagtcagattgtggttgattgagaaagatggactggaatttaatggatatgttatagccatactttttgactttgcaatatgacgagctcaattcattatagttttggatatgcgttgatgattctcttcttattgctgctgcaggagcatcaggtggtattggctctgaaacagcacgt

SEQ ID NO: 46780 - DNA, 1015 bp, Manihot esculenta
  Intron number 1 from transcript cassava4.1_010330m (locus cassava4.1_010330m.g) derived from phytozome v7.0 (chr-ID scaffold10899; pos 23883 to 24897)
ccaggaaacgttaaggacgctctgctcttgctaaggtatgtatggttatttcttggagccaataaacgttgcacaggatttgctttcttcttctgaacttacagtataaggatttagttttttcaagtatattgagtaagttctgatgtggaatttggactgttaacagtgtttttagctggaaaattgataaattaatgtcccgtttaagctgagattcttttcagttgaaattgttgccatttaccaaaacataaggagaaaaggaaaaaaggttttataaatatctgatgccggactaactgtggttgtattttgaatttagatcttgactatcttgttaccatttatattttatgaagaaaatttagtagtacatgtgatgcatcttttgaggtcagcatttttttgaagtttatttattgctttacgacgcagatatgaaattacaggggccaatttagtttcatagaatgttctaatcctactgaaattctgtaacttcgtggatatgtctgaaattacatttgaagttgtgctataacagctgttgactatgacagtttgacaaaatatgtcaaaatgtcgaccctgtattcttcaattgtgtggattttcttgtatttaaatcctttctaatctatgttgtagaggtatgtagacccattaagttaactcagcttatcttactttcttagaacttccctaggcctatggtgtttcccatatcatctgtctgatcacattttttgcttcagatgataccattgcaggtggaaaaaaaacagtaaaaatattttcaattgcttctaataaatcagtacttcatttggcattaccatcttatgtgcactcaaattgttaattgagggacacactgtgattaagaatgtagtttgacgtggttagcttgggttctcatggtgttgcatatgcttccatttgcttctgtttgatgtactgaattgttttgtattcattggatgtggcagagcatctttggattgcggaattg

SEQ ID NO: 46781 - DNA, 881 bp, Manihot esculenta
  Intron number 2 from transcript cassava4.1_010330m (locus cassava4.1_010330m.g) derived from phytozome v7.0 (chr-ID scaffold10899; pos 25097 to 25977)
ataattacaatagtctggagcaggtgagtcattggtgccaaagaagttgccaatttgccatggggaaatgggaaattttgtttgtgttttgatcaataagcatccactatcaggattcaaggatttctgatggctacttataaatgattgagggttgtacttttgggaaactagctgaaatttgagatcaaatagagaatcaatatagacaaacctatatcctagctacggttcttacaaatgtccgacaaggagttttttgtatctcaccaaaagaaaagaatgcatcacataaacttaagtacggtttctcaccctgcatgagtccatggtttggttctttgaaggggttacatgaaggtgtgccccccaaagtgcttactatataactgaagcacttaagaatcatgtacgcataggaattaacttacgtcccattatagagtctgctgaatcagtagttcagcaattctctaagagcgaaaagccttatccaaccaaattcagtctttagttagtcaatctttcagtcacattctcctttaatgtcaagtcaacattccttttgtatagcttctacattagatttatatatttttgttttttcagtgtaaatcaaatggtatagttatggagcatattttgtttgagaagtgctttagaatttgattcaattggaagaaacattttggttttggattttgaagtttttatgatgttttaggctctgcttagtggaggggaaaatccaattaggtcatttttcttgaaaataatcaaacatttaagttaataatgaggaaagttatcaaggttcacttccttttttaccataaatgaagtgttatatcttgtaattaatttgtcgtcacaggtcacta

SEQ ID NO: 46782 - DNA, 636 bp, Manihot esculenta
  Intron number 1 from transcript cassava4.1_032514m (locus cassava4.1_032514m.g) derived from phytozome v7.0 (chr-ID scaffold01466; pos 14409 to 15044 reverse strand)
tcatgtaagctctctctctcttctttctttctttctttcttgcagtataagttatcttgtcttgtagatatgtatgagttgaagtcagaatttggtatttcctaatttcaacctaaatgggttgtttttgtttgacccaacaagatacctaaaagaaaaggagttggcgtgtgggaaatttatataactagtggacaagactgagttatgcaaagataatgctttaagctgacttttaggacacatttgctttcaagaaaatgctattttcgcctaaaacgtagcctgattttgtgtttcttttgttcaggatcgatatgttaggtcgtttaggattggtgttgagaaaaatatttttcaaattaattaattagaagttattataaaataatttaaaattaaatttgataaatttcaatcgtaaaaacactaaaacttttccaaaccctttttttaataacatttgaaattgtattttttttttaatataattgactctcgaactacaatgctgaatagacgctcagattgctatagttattttcttttaaatatttttgacttcttatcaatttatatcaattttgtaaattataaaaatttgtatgtcgtgtatttttagattcttcattgacg

SEQ ID NO: 46783 - DNA, 975 bp, Manihot esculenta
  Intron number 4 from transcript cassava4.1_014284m (locus cassava4.1_014284m.g) derived from phytozome v7.0 (chr-ID scaffold02421; pos 28842 to 29816)
attatttgtttgcagggccatacgtgtaagtcgtttattattattatctgtttcttctgttggcgaggtgaaataattattaaattttctgtaggacatttgtaattgttttcatttctgcttatttgcttttgaatttgtagctgtacatgtgggaggaattttgtgctaaactgatgaaaaataaatttagttacttgattttacgtagcaaataaataccgggtccagtgatggtgatacttaccttcgaattttttctagtgtagctgtgttttctaaatgttttaaattggagtatttatttgttctttgttgtcaccgcttctttgtcttttgataaaatgctgtttcacattgtggtttatttcaaatgattaaatgtattatttagaggaattatatttctgcatgacaataaaatccctcctttggacggagtcattagtgtttttgccattagaaatgttatttgatttggaaagttttagggactcaagtacgttgtagtcaaccctggttaaaaagtgacatattaaatttttgctcaagaatatttcatgttgttctgtttcaactctgttttctttgcttgacttgcataaagaccaatgtagctttggttggctggtggaacttcttactccattaaagcatactttgatccaatcctaaaatgctctatttgaatgtcagaacattatatgtgatcaattgatagttttgaaagatgttgatgtagtttgacatagcatttactatataactatttgaatgtcagaacattatatgtgatcaattgatagttttgaaagatgttgatgtagtttgacatagcatttactatataactatttctgacatggctttactttcattttttattcttttaattgagatcaataattgacatgaatttatatggtcattaaacatgcagaaagtggcatttggacaaaactggtcttgaaggtt

SEQ ID NO: 46784 - DNA, 435 bp, Manihot esculenta
  Intron number 1 from transcript cassava4.1_034246m (locus cassava4.1_034246m.g) derived from phytozome v7.0 (chr-ID scaffold08860; pos 167246 to 167680)
tctctctctttcacccatttcatttcgttgcccaggttctctctctctctctctctcatatctctgaactttttcatttttaactaaatttttttatcctgctggaattgctctctcaatcgaataatttcgcctttttacttcactttgattcgtcgcttaccaacttctgatttgtagggtatttatattttcgctttgcaaatgccattgttttgtgtatattcttgaatgtatgtttcatcttcagggaataggaatttcatgttttttgtgcttgattagaatcataatatgttttctctgaatggttgatattttggtacatgggaattacatattatttagtgttaaagagatgaaaactgtagttactgactttgatacttgatatgagcaggtggcgttcaacttacctaaatcaccacttgctga

SEQ ID NO: 46785 - DNA, 393 bp, Manihot esculenta
  Intron number 1 from transcript cassava4.1_004109m (locus cassava4.1_004109m.g) derived from phytozome v7.0 (chr-ID scaffold08799; pos 691823 to 692215)
tacgccaacaaggttggcccttttcaaaaccccaggtaattatttcatttgccctcttcaattcttcccttctttgatctctcgttttgattttctggatctgggttcttcattccgcattggaattcttatttgcgctgtttgggttggcaaaatgtgaattggagaatgagacgctcaatgtagatttgagttctgttttggaaattgagttgaataatggtgtaaaacttgttcttgagtgattctagattgattggtaatgtttgttattttcaatttttatgtagtattagtagtatttcccatacttttggagagttattgattttttgttattaattggctgatttttcagtgaaacatatcgctatttcgatctgcccttctgcg

SEQ ID NO: 46786 - DNA, 395 bp, Manihot esculenta
  Intron number 2 from transcript cassava4.1_007653m (locus cassava4.1_007653m.g) derived from phytozome v7.0 (chr-ID scaffold06916; pos 751374 to 751768)
acgcaaggaggctgagaactgtgactgtcttcaaggtgtatattcttgtttggtttgtgttctcagttattatttaatccatttgattgatgtagaatctacttcttgactgcatttaatttcatttataatatccaagtatagcgtttcaaaggttattcatttcctacaatatatttcctttgagtaagctctatgaagtgcttttacaaaagcactgaactcatgaattgtgatttctagttacgttcccttggaataaattgggttttctattttttactaactctttagtaattgagccttgtttgttatttaatttataatttattcagttttatttttcttctgtttgtataggttttcaagtttgccactcgctcggtggtggaact

SEQ ID NO: 46787 - DNA, 1004 bp, Manihot esculenta
  Intron number 1 from transcript cassava4.1_025579m (locus cassava4.1_025579m.g) derived from phytozome v7.0 (chr-ID scaffold11356; pos 139030 to 140033 reverse strand)
gtcttcattcaaagctgaaggaggctatcgtgcaggtaaattttactttaatattatactatatttgatatttgaagttctctctagtgatgctttgtcaagtagtataattatgctgaacctatttttggatttccagttattatagacatctcagttgttttatccttttgttcgctacttttttcacctttacttattattttaattggtgagcctgaaagctctcccgtcctctttcctggtttgatggtactcataagaaggtgtgcttgattatctgtcagaagttggagtctcactggttatcaattcagaagtgtcaatgtaggagttgcatggttattatcaaacacctaaccatcaataacatgaggacagtttagaatggttataaacaaaagaaggagaattaatttaagtgtgatcattcgttcagtaatatctttttgagagatttctccacagacatcttcagtagctctacataaagggtcacaagagcaagtataattgatcagtctttccttgagaagtcctatcagctgtaataaagtttgaactgtgatgttgcaaattgtttctcctcataacggggtggaatagcatggtcgattggtcactgatatgatagaagatggtctttttcccctctgcattattgggttttaactttattttagaaatttaaaaattgtgtgcctgcttgtctacaagaagtgaatagtggtttctctttcaattttgtatcctttaactggtgaatggtgaatactcaattaggttgagattttcattgttgagatttgttgaacatttgtctagtgccatttctatatagtctcacctataactcttaagagtatatccctgacttcaagatatcactgacttcaagaagctgaaattgttgtcttccttatcattgttcagataaagttttgagcagttttgttcttcatcttgcagactggtttggagaagaacttatttggaaatcatcc

SEQ ID NO: 46788 - DNA, 635 bp, Manihot esculenta
  Intron number 3 from transcript cassava4.1_006524m (locus cassava4.1_006524m.g) derived from phytozome v7.0 (chr-ID scaffold01945; pos 569006 to 569640 reverse strand)
ctctcgctcttccaggtaagttgtttgtttggcgttgggtgagttggttgcttttcttatacattctgatgtattatgaggttgtccatggattgaggacttaccatggttgtgcttagcttgaaataagaacgtaaacaagtagctcatataatgggacacatggctcatgaacctaaaggtcttggtgtcaattcaaagcttacttgatatgtatttctatgtgcaatcatgtatctgaggcttaataaagtcataaatattcttcatcatccataaagaagggttgatcgggtgagatgggatgagaatacagtttattatctttatgcatgccaaaaactgttctgggcaaccgtttctttcctctttaagaaagtccctgggcctgtatccactatctttgttgatgtgaccaagaagatgctatgttgaagcaagcaaagaactaaagtagattttctttttttccgagcaacattgttacagaggtaatgattttctctgccaattaatcgagaaaaggtgccaaaattttgagggaatgtctcaataatattgttgacttcgataacatattttgagcaattagccttgatatttgcataaaccttgtcattgttgttcaggtccag

SEQ ID NO: 46789 - DNA, 837 bp, Manihot esculenta
  Intron number 1 from transcript cassava4.1_006957m (locus cassava4.1_006957m.g) derived from phytozome v7.0 (chr-ID scaffold01407; pos 90778 to 91614)
cacttctcagggcaggtaaagttagacttcccatttgactctgctaatctctctttgtgcttcttccttcaatgacttactaattctattcattctaattgtaattgcactagcattcttcctaatttctagcaaaaaccaagttatcactatcatttagtttgtttactataaatgcattttaaggtgcataggttttaatgaaatgaattttggagtaatacacatctacctagtaatctcctttagcatactcaaatcttaaaatgtacacattggcatgtttcccctcctaatcaaaatgtaaggtcgttgaagtggtgaacctggaatcccagattgatggcatgatatgtggctgcagattaggcctgaattttctattcccaactaccctactgtttctagcatgctgactgtaatttcttgttttatatgtagtttggatgttgcgaaaaatgcattatgcacctctatagaagaatgtagattgtggaaagggttgtgggaatctgttctttctagctactgcttagtgtaaactggaaatgctgaaatgataataaggagcctgtagtttatgatattcttttttcgtttggaagcacaggccatagtttgcttcattgtacaacttttatcacttttgtggaatacagtttcctgtcagccttctcacatgtgttatatgcttttttaacctcactagcattattctgacctatcatctttcacctaatcattgtcttggttcaaagtgtttggaaattagaattgatattttgtaggttcattctataagccacaccagtctttcttttgtagggattgaaattg

SEQ ID NO: 46790 - DNA, 888 bp, Manihot esculenta
  Intron number 3 from transcript cassava4.1_007064m (locus cassava4.1_007064m.g) derived from phytozome v7.0 (chr-ID scaffold04457; pos 217287 to 218174)
aggtcagcacctctacttgttagtgttttttgtttttatttttttttcttgtagaatatattaaggattagttagttttcatcttcaaagaacgctaccaaaaaattaaaacccattgataactccacgttgattcacattaaaaattaatttcataataataaaaagtaactttttcccttttaaatttcaaatattaaaatattatttcataaaaattaaaaattatgtattttttttattacatctaccaagaaattctcatgtttacaatttcatatgttatatataaaactgtattaatcatatcatgtccctaaagtcaatcagttaagtcactagattttacaatattagtaaatctaattaatacacacatgtattaatcaaattaatctattatttttatttttattacatataaaattatgccaattataattacacattaacatatcaataaaaaaatcgtagttaatgactattgctaacaaaattttatagtatgacgatttttaaaatataaaatataaaattatagtattattaaataaaaataacaaataataacgtaatgcgcaaaaaaacgaatagctaaaatttaatcagaaggccttcccattaatgctgtagtatttttagaatcaagcgaagccgaattcatagacggtcgtcaaatgcttcaatacaccataatgtcctgtcagcaatgcacaatatatttttaattttttacaataagatatataatctttaaagtttttaataaaaataaaaaaaattataaatatatctataaatgtttaataatcaaaataaatattagttgataatttattaatggacttttcaggttattgccaacagagcagctgagattcttggaca

SEQ ID NO: 46791 - DNA, 892 bp, Manihot esculenta
  Intron number 1 from transcript cassava4.1_012839m (locus cassava4.1_012839m.g) derived from phytozome v7.0 (chr-ID scaffold02421; pos 397637 to 398528)
gaaatagagctcagcgtcctaatattcctgggcaggttgatttcttggttctcttcctgtttggaaactgatgcttgttgggttctctgtgaccatgcaactaaattttgggtcatggttttccatatattttactctgtattagtttgtgatttttgtttatattgtattttattttaacccatgtgcgcttatctgtttcaaacttgaattggtaaaatagttaacggtggcaactaataggtatttccaaatctgtgtttttgacattgtcaatttgtcagagaaaataagataaagtatgttgaaagttacacactcatggtgtacaagcattatatggctgtgtgtggctcattccagaaaattacaaattgcagctatatattcattgataggcactttgcagttggatgcaaacttaaaaagaagtgaatttatttattagaattcctaaatcaatctgtgcaagaatgtgtattcaagtttacaatatgattggaagtctcattgcatctcccttaagttattcctggtagaataacaagtagtttcactatggtgtcatattaatttgatcaactgaccttggttttgagatggccccagaaagtaagattatagtggcagagtagtaggttctcttgaaatttgcaattttgtttcatgatttagtaagttcccaatttttagtgtatttggttggatacatgctgaatttggttgttatcggtggacttactaattgtaataaattatctatcactaaaaaattgtctctgtactcgatctttttctgatgtcatggtctctaagatgttctgcctttttctttcttccttgtttttcttatttgtttccttgatcatcaaggaactggctataacatctg

SEQ ID NO: 46792 - DNA, 867 bp, Manihot esculenta
  Intron number 1 from transcript cassava4.1_032041m (locus cassava4.1_032041m.g) derived from phytozome v7.0 (chr-ID scaffold11038; pos 33065 to 33931 reverse strand)
gctccttctttctctcttccttcagtactcttctcaactctcttctcttcctttctgtatatactttgctttctcttctgggtttaatttctttgcatgaatttattttgttggtttcattgagtttccttcttggaaagcccacataatccaaatttgtatgaactgcatatatgtttccgtttcttttccttctgtttttttcctcaacctctttaactagagagagagagagaagagctggggttttgaattactggctgctttgctttctttcaaataattttgttagtgtgtaattccaaagtaaattttacgcttgcatgcatgtcatccatgtggcattttacaattaatgttcatttaattttagagaaacttttaattaaaattgtagtagatgaattttttaattataaattatgattttataattcatatttcagtcaatgaatttccaaaaaatgggagcacctattccaataaactagtgttattaaatttccaaagaaattttttttaaagaaaaaacagagtttgctaactagttgaattgtattgagaaataatggagaaatgaattcattatcatgaatgattaaatgaaaaaataaagagaattaaggacaacaggttctcctcttgattcaacagccaaaccaatgatacaatagtctctttacagatttcaccctatatttttagttaattatgatctgagacacaacaaaagtgtaattgttctttggacctcgaatccatttctgattaaccgatctgccatctcagcggtccaatagagactcgtacttgctcaaacaaaagtgtattaaccgaatgtaattattcatatatttcaagcagata

SEQ ID NO: 46793 - DNA, 684 bp, Manihot esculenta
  Intron number 1 from transcript cassava4.1_022855m (locus cassava4.1_022855m.g) derived from phytozome v7.0 (chr-ID scaffold04821; pos 38647 to 39330 reverse strand)
gatatctaataattgattatattggtaagtaataattttacattgatttggtagatttttaatagaaaattgattagaggattttttatttgatttgttgattagtttaattaactaaatcaaaaagctgtcttgattgttattaatatttatcttttgttttccttcaaatttttacaatcttgtggaaattgtttaccttttcaatcataatttaattgaaatttagtagccaaattgcattaaatggaaatactgaatgataaataagtttctaaatgatatattcatcctactgaagatattcaatattttggcttatatagtttctatccttttcaccatagatatttatttatgctttgttattttactttattttatttaatattccttgggttgatttagtgggtttaacataattttttcacttttaatattgatgtttatacatagaaaaaaataaaaataaaaataatattatattaatttaaaatccatacataaattttgtaccatgggtcaatattatatatttaaattaattatttttctacatgataaatttcatgtatatattgctaacttgtttctattaaaaaaaaattaaaatttcaaatttgattacttttttcaaaaataattgcagctcaatcagctgggcttccactactagagccatac

SEQ ID NO: 46794 - DNA, 159 bp, Manihot esculenta
  Intron number 1 from transcript cassava4.1_009534m (locus cassava4.1_009534m.g) derived from phytozome v7.0 (chr-ID scaffold01012; pos 26625 to 26783 reverse strand)
aatcatctcaagaaatctcttcttgagactcgaaggtttctcttcttaatccttcttttttatttgtttacattcatttttgtttttgattgtcttttccatttatttctcttatttttacttttcttcgttctcttaggaggttgattgaggcaattg

SEQ ID NO: 46795 - DNA, 340 bp, Manihot esculenta
  Intron number 1 from transcript cassava4.1_014616m (locus cassava4.1_014616m.g) derived from phytozome v7.0 (chr-ID scaffold02572; pos 266097 to 266436)
cgacttgaagtctcccaacaagaagcaaatacaaggtctgaaatctaacttctctatatatccatttcattctcttacctttgtgaaacttgtgtctacagattatatacaagttttccaacattccattaattagtctgcttctgcaaagaacagtaggatggctttaattctcggaaattagtatatatctaaaaaacaatccataaaatacacgtattatatttaagaaagtattttgctcaactgcaactgataatattttgatacttttcacagttcaaatggtagacttagtcttaaaatgagcttttcctaactagttcactgttttgcagag

SEQ ID NO: 46796 - DNA, 923 bp, Manihot esculenta
  Intron number 1 from transcript cassava4.1_018004m (locus cassava4.1_018004m.g) derived from phytozome v7.0 (chr-ID scaffold11584; pos 30903 to 31825 reverse strand)
aaaatgtaaagtgcttctttcatattcttcattcaacttttttacctaccttgctctatttagttgctgcttgtgtatcattgcttttgctgtaggttggaaatactgaggtgaggcctcttttgtttcaaaatgcttccttagtgggaagtaagcttatttcttatgagtatgatataaatatatatgttatacaaattgacttcctagcaaataagtatgctcttaagttataaaagacagtgagtacataatataatttaaaatgtaataagtttaaggacaacttagtaaattgtattgcactataattagagaagtgcagcttatcaaattcctcctaggtaaattatttccctgctcagttgctggtctctgttgtgtgtgcccataaatgcccctggcagcataggtcttctggtggctgcacggccagagccaaattaggccctctgccaatcttcagcctggtgctgtatcatggcctttgttgttaggagctggatcatgacctttagtagccattttaatagcttgttctggttctgtaatgggcctgaatcccttcttcctgcaatgaatccattatcttttgaccaaaaaaaaacaaaactacttcctgaacttgagggaagtagaatgacctacttttggagaagttggtttgataaagcaaatcaagctgagattttttgcatttcccaagatgttctagttccttagctactcactccaaccaaacaaagaccaaagccaatttgaccgttatgcttgagaaatatgttagtttttatcaaacaattcaaatggatgaaaccttttgcttaaatgtttaattagtgttctaatgcagctttcttctttttcatttttttttttctttttttgctttcttttttatttgcaggttgactttgactctg

SEQ ID NO: 46797 - DNA, 971 bp, Manihot esculenta
  Intron number 1 from transcript cassava4.1_003833m (locus cassava4.1_003833m.g) derived from phytozome v7.0 (chr-ID scaffold03245; pos 180662 to 181632)
agcagacacccaaggactggagattggtgagtttgttttcctctgtttcatttgttgctgtgttactatgaactatctaagtagttgaggtgatcattatgttttgactctcaattggggtgtttttatatgttaaatgttactttattgtgatgccaatattcaattgcttctttggttaatcaaatgtgctccttcttgtttgttcaacattctatgaattggtgtttagttgctgcatcaaggtatcaagctgtgagttctattgcttgtatgtgcttagatgtaatagaagtcggatatagggaaaaaaaaaaggaaagaaagagatttcagtgtcttcaataatgcatcccagcagatacacttgaaatcataatagattcttgaataggaccgcgttgtagaaattaactgctgcttattcctgggtttttttgcaatttatcttcgtttacgtttaagtttaatcatcttcactgcaatgtgcacattaagtgttctccttctgttcccatattctgttgccatcgcaatattggttatgaattagcttatcttgtaagggtggaagtaagatggctgtcacagcgctaatttcttcttattgattatgaagtattaagtttggccttaatttctatgcttttatttcctgttccttctttctttttcttcatcctgggtctttctcagtcggcattccaatattatcctttctaaagaaactcactttcaaaattcgtatattaacttctaagtcgctaatcaattagttcttgtcatgtctctatcaagttctttatttttttctatgtactcggcttgtgatggagatatacctcttctctaatatcttaggggaactatgaagctgttttggagtttccttatactgcagaaaggaaaatgaagtgctatatttattttttgcaggtaccctgcaatcaataaacctgctggaattgttc

SEQ ID NO: 46798 - DNA, 202 bp, Manihot esculenta
  Intron number 3 from transcript cassava4.1_029677m (locus cassava4.1_029677m.g) derived from phytozome v7.0 (chr-ID scaffold01840; pos 60487 to 60688)
cagccagataatcaacctcaggcagtgaatcataagtgagtacttgttctttactagtttgatttcttctgaatgttgctctatggaatacagatgctaatggtttctttattttttctaagtagtttactattattttgatgaattgggttgtcatatatgtgaagttgcacggatcctgactcttgcaaacgtctgattg

SEQ ID NO: 46799 - DNA, 709 bp, Manihot esculenta
  Intron number 2 from transcript cassava4.1_006969m (locus cassava4.1_006969m.g) derived from phytozome v7.0 (chr-ID scaffold00109; pos 336975 to 337683 reverse strand)
gtcttgtgtcatctgccacaacactagatgtaagttttgcagcagatcagtgaactaaaagctgatgtttgtggattgtgttaaacaacttcatcagttagcaataatttcaatatctctcaaaatgcatcacacttgctatgtgttaacatatttgttcatatgcagtgcatcatcttcttcactgatgtgtcagataagtcttgcattgctattatggattacttccctaccaccaaagaaaccactgttcttttttgtatgaagcattatttattatgtaggttctgtttatttttctttgtttttatgaagaatgatatattatgtaaaacctgtttttgccagttccctccaattatctcttattgtatggaaataggcatgcatcaaatctagcattttcttagttaaaaatattgatgtttgtttatacagcttgtcatattgcttggtgtcagcttgtcatattgcttggtgtggtctgtaccttttttgggatagttgttactgtcctggtgtatatttttgttgcagagtattgagaatggatattgttattttcattgcattcaattattgatgttttatgcttttattacttataatctagcactgcttctttttttaagaaaaaatgtgggcaaagtatttacaggttctaatgattaaatgggcatgcgtttttttatagcagggcattgacaag

SEQ ID NO: 46800 - DNA, 926 bp, Manihot esculenta
  Intron number 1 from transcript cassava4.1_006969m (locus cassava4.1_006969m.g) derived from phytozome v7.0 (chr-ID scaffold00109; pos 337835 to 338760 reverse strand)
ggcccagagagagaatctgattgcactttcaccaggtagccctagctcctttttctctggattgcttgattgggttttgattgattgcgtccttgtttaaatgggttgatagcatatttgtttttctttttttttggtcgaatttaatcctgtgagttagtttgctttgatttcgcattgattgggttgttttttgatttattgatttgcttgtattgtaatttggatctgatttttaagtttttgattgatagagttctcttcttttgacatgaggcaatgcttatcttattttttttaggagtaaagatattgtcctgcttgatcctttttgggtagtgaataatgttgttttttttgtcctttttgctgctaagttgatcaaaagattgtctttttgtccataaaaactcgttttgtgattttatttgaagctgcaatagtgcaacgtgattactattcaaaatttctgtaactaaggtttttctagttcttgtcgcacttgaaatttttattaatgagctaataatttgatatttttagtaattctatttcattttgctacatgttatgaatgattccttcccatcaagacttatcttttaccctgggtttagggtgtgatataacgttattgctgttgtttcttaatttactgacattgataagaagctggctcactaacgagtccactggaatattcaaatatttcatcgaatgtgtaaccttcacttaagatcttgactccatgcaccacgaaattgtctttgaataaccaaatgatatgtttgtctatggtttgtgtctgatttcatgtggattctcattttcagtttgtgatttctgtaaattcatgattgttttatacttttttgttttcaatcctacgttaggcactagaataatataaatatattttggcaggg

SEQ ID NO: 46801 - DNA, 926 bp, Manihot esculenta
  Intron number 3 from transcript cassava4.1_011958m (locus cassava4.1_011958m.g) derived from phytozome v7.0 (chr-ID scaffold04024; pos 237843 to 238768)
tcacaataacggtatgtactcatccttcgccctttggttgtatggctttgtgtttagtcttctctgatttcatatatgatatatcttttgggttaagcaattcttgctacttcagtgaggaactaccctgtgaaagtaccagcatgtagaatgctccattatattgaaagtttgaccattactagtaatacttggacgaagagcatttaaacaacaatcaaaagctttatgatgtttaaaaagttaagacttagtgactgtgtatgcatataagagaagtagtagtctgttggatggattatcgcttccaggtctgtaatacttctgatcatgtcttttaatgaacaacagctgattgaggcttctctttgctagctacataactatagttggatgctctttcacttaggttgtaccattgtatttttggttgattcaacttgaaattgaaatttagagcattactccttttgcattttgtatcatctttttgtgatgtctctctctgtcaagtctcaagtgtccttgtcttttagtttcatattatacataagcttttctgttgatcaagtgttcttttgttttagtttcatatgaaaagcgtaaggtcttcatgcctagttttaaggtattctgggaaatcatatcttctctaaatttgaaggaaaactttatgtgaataaatttattttccattcgtggctcagttgttggaaattgcaattatttttattgtacctgttctttgttatagtagacctactcttacaaattcaactttgaacatgcagcgttccgttgtttgtccaccaatgacaacaagatatatgaactgacttttgattgaatttcattgtttatcaattcatttcatctctgtttattgtaaagaaaggtacaaaacttcggattgctgattttgtcca

SEQ ID NO: 46802 - DNA, 562 bp, Manihot esculenta
  Intron number 1 from transcript cassava4.1_010053m (locus cassava4.1_010053m.g) derived from phytozome v7.0 (chr-ID scaffold01945; pos 393360 to 393921 reverse strand)
tcttttataaccaagttgcacaaggaccaggttttgtatactctcttctcttcctcttgttgattttgagatatgattgattgtagctagcgaaaactttgattttcttctcttgggagctctatttaattttgtttcttgtattttgacaccttgttcagtcggtggcgacttatatatatatatgcaatggatttagtttggtcgagaaaatttgagaatatgagttcaaaaggaagagataggaatcattttagcgtgttaattctgtccttgcttagttttagtgactagaaaggagaagaaattatgttttcaacgttgcatttcaaattgcataacatagaaagtgaaggggattctgaatgtttgtttgctgggaaaaattttaggaatttacagatatttttggttgttcttttatgcactgattagtgaagaataattaaagatatcagaaaggtgtaaattccataataaagtaaatatgcatcttatgtgtttgttttattgatataaaacaatttcatttgttattgttattaattaggtagtgaaagca

SEQ ID NO: 46803 - DNA, 960 bp, Manihot esculenta
  Intron number 1 from transcript cassava4.1_034349m (locus cassava4.1_034349m.g) derived from phytozome v7.0 (chr-ID scaffold03252; pos 93599 to 94558 reverse strand)
aagataatgtaagtatgcaatttttgttagttttcgttgcattgccaaattttttgcaccattaagatctacaaggttggtttgttacagttttgacatggaaaaccgttgagctgtaaactgaataaagaattgttatcatatgtttgttaaaactattattttgtggttaactataatcaaaggtttggggggatttttttttctaaattatttgtttaactcctgtatatttattttttattggtgtctttgaagttaacttccttatagttgagtgcaatatcatgatcatgtcctttgagaatggttaagagtacaatgttttaattatgtgtcttgagcattctgttcaaggttaggcaccaggtgtgggggaaattggggtgtatgactgccagtttttttaaagtagaacttgactacctttcaaaattgcagctggtattatttgacccatttcttggtttggcttagagcatccgcctgttattcttccaacaggttgtgaagaagtgacccatgactgatgttagcttactacattctttctttcagaatatatgttatcctttgatctttacattttctttcttcataagcatcagaagcactgtgtttaataatagatgaaatattggctttaagctctagctattgaatataaacatggtgcgcctgcctatcagatgtttagcctttttatcaagatcaagggcacagtttaccaattaacccttttcttttatcctttttcctttctattcttgtttattgttattactattaggggtgccaggtgtgctggatgggatgggatgggatatatcgatttgtatatttttcataatttagattaatattcatctatttctatatactttagatcatttttttgtatttcccctcttgttaaaatgattcaactctatttgtgtgaagttgccagagaaaaaggct

SEQ ID NO: 46804 - DNA, 521 bp, Manihot esculenta
  Intron number 1 from transcript cassava4.1_026453m (locus cassava4.1_026453m.g) derived from phytozome v7.0 (chr-ID scaffold01624; pos 188525 to 189045 reverse strand)
ttgttctaattctgtagaccactgcgcagtaacatgtaagtttgtcttgtgtatctgttttgatactgcttgccactgtaaagttgtgtatttgagattctcacatgacttaaaaattttttattagatgtactgagatcttagattttcacacagcaaaatgtgataagctattgaaaaattttttggaggcaatcagtgataattatttcaaaagacctgatgttttactatgttacttaaatgcaaggcaaggaaactattatgccagttttgctagtagttttacttttggtgttctcccatgacctttagtcttccattttttttttatattttattatgataattggtgtccaccacagctgaattattgggcatgcatagttcttttagagtattaattgtagcatgagttcttttacacttgggcaaggaaaacctttcttctcttccagtttttgcttaatggggattctgatgctttgttttctccctctgcagttaaggataaagtgccc

SEQ ID NO: 46805 - DNA, 474 bp, Manihot esculenta
  Intron number 2 from transcript cassava4.1_013380m (locus cassava4.1_013380m.g) derived from phytozome v7.0 (chr-ID scaffold00847; pos 273494 to 273967 reverse strand)
aaactttggtttcctcatccctgtatcatgtgggttatattctatattaaatgcttcttatgtgttggcttttttaagctaaattgttaaccagcaatttattaacttgtcctttttttaatttcatgcaatttcctttcatagaaatgaagatagagctttatattttccctcaggctttttgactcgatagaggtctgattggtttgttactacaaagttaaaaaatggctgtcttcttttactggtcgtttttgtgtcttaatcttaatttgatggcgatctgtttttcactatgtataaactatgcaaaacaatttgaaggaagttggcatgttctggttcaaagttgccttccaaaatctatcagctaatagaaagtttggcctgaattcagttagtagttgtaatttgatatggctgaagttttagttgaattactagttacgttcatatctcatgttttacaggccc

SEQ ID NO: 46806 - DNA, 487 bp, Manihot esculenta; identical to SEQ ID NO: 45808
  Intron number 2 from transcript cassava4.1_014045m (locus cassava4.1_014045m.g) derived from phytozome v7.0 (chr-ID scaffold06158; pos 265317 to 265803)

SEQ ID NO: 46807 - DNA, 591 bp, Manihot esculenta
  Intron number 2 from transcript cassava4.1_005414m (locus cassava4.1_005414m.g) derived from phytozome v7.0 (chr-ID scaffold08799; pos 267958 to 268548)
caagtgaggattccttactaggccaggcaagttttgcttgtatatttgctgttttgaattgaaatgctctattgcatatccaccaggcatatgtagggttactttgtattctgtaccaaatgcgcattctgtagggttgtggatatcagtgaatggcttctagttttcctttgatatttgtttgtgcataactgcatcttgttgaatttatctttgaagttggttgagcttttgcaattctgctttcttttcttaacatctctgttcagcttcgttgcttgattttcactagtattcacatggcagttccctctctccctctctatctttcacatgcacagacacacatagtgtttgggtgagattaacgaggtacctggaatggtgaaactctttttgagagtgcatattttttaatcattctttgatatgtcagataagttgattacttcctgtttgtcaatgaatggttattatctgcaggagtctctttctccttgaaattgcaaatgagattttctttattcatttggttataattttagttgcattttagggtttgaaggttcttgatcactctgtagagaattt

SEQ ID NO: 46808 - DNA, 666 bp, Manihot esculenta
  Intron number 2 from transcript cassava4.1_027163m (locus cassava4.1_027163m.g) derived from phytozome v7.0 (chr-ID scaffold04177; pos 86637 to 87302 reverse strand)
ctacttataacagacctgctggctttaagggggaggtatgaacaccttctgttaaatattatacctctcaactaatcagatttcttcttcttcttcttctttctcccctttgttttttaaatattcatattggaattttgggaataaagcatgtgaatctgtgatacccaattcaagttgtgattgttaatgttattatctcatttttttggccttgaacagtatattgtattttgatgacaggctaagtatgtacagatatcttagtttagtgtagcacatcaagaaagcatttcaatgaaatctgatttttttttctttaggtcgatggttaaccttttttttctgtttattcttctttagttttggttcaatttaaattgttgaagtattgagctctgaatcttcctcttcctttagctgctgcttcttttcttcttcttctgtagctgcttcttcttaatcataattattttattgccagttactcattcttttgtttgcttccacatattgaagtctgaaacaagcatgcttgaacaggctaaaatttgcccctattggttaaagtatggccttacattagcaccgtttaacaatggcggtgatcctgattgattttgattgtgttttgtttgaatgtgggtgcagcctgataaggttact

SEQ ID NO: 46809 - DNA, 724 bp, Manihot esculenta
  Intron number 2 from transcript cassava4.1_003953m (locus cassava4.1_003953m.g) derived from phytozome v7.0 (chr-ID scaffold03252; pos 38268 to 38991 reverse strand)
caaaaagagttgccctgtcgtcaaaactggtagctttttttaactgattttattcttatacttataattatttaccttttttttagtttaatgattggcttagccaatcagagtttgttccatcttctctagttcactttttaaatcagtatcccagatctttcactgtactaattgtgtgcactgctcaatgcaatactagaatacttttggctttttgatttggcaatgtcttcaattgttggttttgcattcaaaagagaatttagcataaattttctctaaagctccttgcttggaaacttggagcgcttgcacctgattctttgcttatataggtaacttttttgtttgttttgtaagtgtcccctcactactactatggagttagatggtattatcataattctaattttcacaactagccttgtactcggctcaattaaactttagctaactaggtttgcgctggtatattctgtatatgtttacatcaaatggagttttctttagtggggagactgtaggaattggaatgatttgggtagtggatctcactttacctgttctgccccttgcttggtgaatgttggagctcaaggtgtagaactcactgtcatccttttcttggtttgaattgtcttttttaatgatctttgcattagactagtaatccatatgtctttctacttaccatttcacacaatttgtccccagggaaatt

SEQ ID NO: 46810 - DNA, 717 bp, Manihot esculenta
  Intron number 1 from transcript cassava4.1_026863m (locus cassava4.1_026863m.g) derived from phytozome v7.0 (chr-ID scaffold00029; pos 24167 to 24883)
agcagagccgaggacactgagaagaaggtaactatcagtttcacttaacagtttgagatttcaacgattatcgatttttgaatcatcaatatattgcacccgagatgcacaagactgtttcttggaagtacttttattttgctctgaatgccaagactctgtttctagctttgatgcatatgggtctttgtgtaaagcgtgaacttatggctttagtttggatttggattcttagccagttctggaatcactataaaagatggtaccgtttgacttaataacttgttatttgaaagttaagaaaaactctgttcttaatgattgcttagttaccatttgtttgattgatttgcctagaacttagactgaaattctttttctgtcctcattctaattgatatttctgtataggaaaattagagctgttcccacagcttcttttccccttctttgagatttgagtgttattccaatcatgctagtaaaccatcgcttacatgaattttttttgttgcttaagatagtgctcgatttctgataacattgtagcagttatccatcaattgaatcactattaacttttgcatagatatgaggccttgttctctatgtcgcattagttttatccaactatggttctttgttttttcaaatgatattttcatgtatcacttttttgtagattaagaagctcaaagacgttgagattagcgttcc

SEQ ID NO: 46811 - DNA, 572 bp, Manihot esculenta
  Intron number 4 from transcript cassava4.1_014583m (locus cassava4.1_014423m.g) derived from phytozome v7.0 (chr-ID scaffold03750; pos 585394 to 585965)
ggcctgaggtcccattccaccctggaagagaggtagtattttaatctaatggctgcctttcaattgttgatatttcgatttttgctcctttggaccttttccccatttttaaattgtaatttatggttgagtgtcgatgttgaaaatttgtttgaatttagaacagtattgaggaagattactgaagtgattgtttttttaaaaaaattctcattactattctaaattcactccactaattgaaaatcactgcagtaattaaactaaattgggatattcaatttgttggggaaagaaagggcttgatgctcagtttctccctgaatttattggcatattcaatttagcacattttttttttttatttttgtctaaattaactccgaagttttaatttaaactgaatttagtccaaataattaagaaattgagtttcagcaagttatttctctctcactcttctctcctttctgtgagtattggcgacggattttatttttccgccggtactaaacagttattctcttattattccaggacaagcctgagccacctccagaaggtcgtctgcc

SEQ ID NO: 46812 - DNA, 497 bp, Manihot esculenta
  Intron number 1 from transcript cassava4.1_029376m (locus cassava4.1_029376m.g) derived from phytozome v7.0 (chr-ID scaffold06620; pos 2229 to 2725)
tggtggtcaagctagggaatcaggtgatttgaagctctgcaattcttttttattctaagctctgtgagtttgtatttgatctatcttacatctcttctttgattcaaagcccagttgcttgatgatcttaaaatgcagttaatttttgttgctttagaggatttctgatataagaccacattgttttcctctccattcttgtgcaaattaaataaatattgtagaaatttactatttagtcatgctccttaattgatctctctattttaaaaaaatatattaattgtccaactattaattttaactggtagctctatggatggataggcattatttggtgtaagatccagttcttgcctttaatacaaggttccttttggtattcttaataacattcagtaggatggtgttcagttcttttactctgatgaattatataagtgactagtttctcttgaacagacattaaagaccaaagttattaatagttgccttaa

SEQ ID NO: 46813 - DNA, 702 bp, Manihot esculenta
  Intron number 2 from transcript cassava4.1_029376m (locus cassava4.1_029376m.g) derived from phytozome v7.0 (chr-ID scaffold06620; pos 2752 to 3453)
tcaccctcacagaacctgttggagctctgagtttggtgagtttagaatttcttgaatcttcatgtgtttatactgctaattgattaattatgtccagttaaatggaacagggaaagaaagaaaaagaaaaaggaataaaatctgaatcaaatagatcatttcaagcctatttgggcctttgcaattgacaaaatttaaagtcggtaataaattatgaccattttggattaaaatttttttactatatggctaatttgtatgtaattgttaaattttataagtttttagattttttcaataggttatgattttagttcaagtgttcaatagttaattctacgtagcatgggagtgtaaacaaatatttagcaaaagaatttttcaaaacattattctgcctgctgtggttgtgcaatctcttctgttctttgaggccctatagtcggatggcatcactatggatgtctgagattgcagggtttcaaaacatatggctaatcgtcaagccaaacgaatgggatggatctgctgccagacattaaattttgctagtatccttccaagagctacactgtcttaatgaatttggttggtcatagtggagtagtttaaagatgccaaaattgtcccatagatttctatgccatataatcagattgctgtttccacaggaagtatttgataaagaccgtttcaaagcag

SEQ ID NO: 46814 - DNA, 468 bp, Manihot esculenta
  Intron number 2 from transcript cassava4.1_032691m (locus cassava4.1_032691m.g) derived from phytozome v7.0 (chr-ID scaffold10689; pos 413848 to 414315 reverse strand)
acttacgctatcttcgtgtttggttagagctggtaaatggctttacccacttcatgttttctttttgggattttgagattttcttcagttgggcttttgtttagtttattgaatcggttttacggcaactctggttttgtgctcgatgattttgaactggggttctttagttttttgcttaatttctgattgattgtttgatttctaattgaaaagaaagtaatttatatatccgagtagtaattggttcatgtacactaaattttcttggcaagcaactgaatagtagaaaacaggatggaagtttttttaatgttgccactcattacaaacatgtgcaaacttgaatggttttgatataactcgttggtaattctttactatggtgaaaatttcttcaacaaataaactaggcaattatgtgttgttattttattaatttgtttaattttcaattggaattggtag

SEQ ID NO: 46815 - DNA, 522 bp, Manihot esculenta
  Intron number 2 from transcript cassava4.1_014765m (locus cassava4.1_014765m.g) derived from phytozome v7.0 (chr-ID scaffold06766; pos 41498 to 42019)
ggggcatttgtgattgtggtatgtagtttttatggttttgtgtatgtattgtcttcatttcattagcaatgtacacagaatggatcaataatgccaatgtgttattatgataattcatgactcatcattcacttttattcacctttgtttttcctggtctctctgtcaattgattttgtatgtaaccaaggtaatgaacgccacttgattagaagcttattgctgcatacgtggaatttaaatggttcattctaatttagtgttagcttcaaggtttagtctcatctataattgtgaagcaatcctatttttcttttctgagaggtcatgagtttgttttagtgatctttcacctgtaagtaccaccttcatcaagctggtaggtgtaagttgatctgaaggctgcttgaagcaattgaatgtcaaaagaacagggtgttatatttaaattctaggtgctaatatgcattaattgcaattttaagtgtgtgaatttctgaaacttttgatcttgaaaggtga

SEQ ID NO: 46816 - DNA, 1016 bp, Manihot esculenta
  Intron number 1 from transcript cassava4.1_003987m (locus cassava4.1_003987m.g) derived from phytozome v7.0 (chr-ID scaffold02572; pos 11992 to 13007 reverse strand)
ttggctctactactaccatcggtccacccaagaaggtaaaaaaagaagtagagatcttttgatcttgggtaatttttgttttaatttttatgcttcattttaaatttattgtgttaggtgatctgtattttttcctttctctgttttgatagttgtacttagccaaaaagtcaattaaaatctgggttttgttcggctgcagtaagtatgccaggaaagtgccaaatctaacatggttacttctaggcaatgcaaattcaggacaaaatgaaactgactttctgcttattatctttggtcaactaaaatttcgtccaaactatgataaagtttttgattttgaagaattgaaggcaaataattttgtaactttttcttcaattaatgggtttcagtggatgttaaaagatgtaactttttattattgtgttcaaatgaatggcatgtcaacgaggattagagctatgggctgctgattcttaatgccaaaaagagacttaaagaatggtgataggtgtaattatgttttttggttctactttttaattttctcatccatttggggagatcactacatggatggcaggcaaaaagttcttctttactttcctttggtcgaaactcaatggatacttgtaatgttttctcattagtttcatgtggattatagaatcttgtgcaaaaagtcttgagaggatggatctatctggaataagaagtttcaaatgtcatctcgagtgtatctactagatcttgtttctgttactgctaccggggtcttaaaggatggggtttctatcttaacctctctttcacagattacaattggttgggtgtttaccaacaaatgatgttattgtatgaaacatccaatgatatttcctttgcatttgctcccgctccctccactctgtatctcatattctcattgtgacattttgcagtttgaagtttatattggcagagattgtgattctttttgcagggttctgctgaagcagaattcttcaccgagt

SEQ ID NO: 46817 - DNA, 447 bp, Manihot esculenta
  Intron number 2 from transcript cassava4.1_026033m (locus cassava4.1_026033m.g) derived from phytozome v7.0 (chr-ID scaffold02196; pos 85670 to 86116 reverse strand)
ggcgactggctgcttttgggagacgtcccctgggagtaagtctcttcacttctccattatgatttgtgagacattaattaattttttatttaattatttaattttaacaaatatgcaacatcaagtatttaataatagtttcacaatatttaggtaattcaatttcatatcacaaaattaatgcacaagttatgatagtaattgaattttttttttttacaaaaaagaaaaattcaattggtagtttgttttgaattatagttttaaattaagatgatctcagataatgaaaaattgtagttagattattattatttgattatgcaagtttgtttattgatttatagaaattaattaattaataatataataaagcaaaaagcggagaaataagaaaagtaatgagtaatttattgtatttattgtggacagcatatttattgaatc

SEQ ID NO: 46818 - DNA, 687 bp, Manihot esculenta
  Intron number 1 from transcript cassava4.1_011156m (locus cassava4.1_011156m.g) derived from phytozome v7.0 (chr-ID scaffold08617; pos 220266 to 220952)
gaaaccattggcctgcgatttgcagaggtacatacatatctgtcctatctgctgtccctttcctttagcttcttttttcagtttgattgtcactgttcgagctggctctaatacttcttctctttttacttgttcttctcctttgttcaatgagaaatcaaatgcttttctttgcctcgagttttccgtacataaaatattaatgtaagtttataatatttttttcgtaaatttactattcagctcttgcataaaaaaatttaattaattattaattattatatatctctattaataacgtgaagagtgttaaagcggagggttattcgagtgatgagagaaatacacgcgccacaaagcgagactgggacagcttttctgtttagacagaggttttgcctcggagacattgattctttttgcggaaagcaatagccctacccagaaaatgtttgtcaaaccccaaatgatagatttctctttttgtttgtctacttctgttcatttgctgcttccactcccttaaatgctttggccagatttttccttttttttaatactcatttataactaaatatagagtatttaaagttaatttttggtgaaatatatcaaatatgcatttatataaataattatgaaatatattttggcatggtaatgaatatttggggtgttatagattaa

SEQ ID NO: 46819 - DNA, 862 bp, Manihot esculenta
  Intron number 1 from transcript cassava4.1_013770m (locus cassava4.1_013770m.g) derived from phytozome v7.0 (chr-ID scaffold03188; pos 97798 to 98659)
aaggagaagacttgcgctggtaacaaaaatataaattttttaggtttttaaatgttaattatagaaattagagagatatttatgacttagcaccgattttggaattgctggttctgttgattgatttcggtagttttatttttgttagggtttcttcatttgggttgtcggtttttatgcatacaagttggctgttattattatttttatttttgttgtttgcatgaatggaacttgttaaacccttcaaccatctatttctgctgtaggattttattctctgaatggcgagctgtgctttttttttgggagttaaatttgaagatcaattctttggttgaatgtgtgcgtattgcagcttgttggagtgagtggtttctagtgggttcgatcatacatggaacatgcaatgcaaaattttaattgtttacttaatatggcctaaattggcatcatattgataatatgtaaacctgattgtagtgtgagtttattctgatcatctgactgatttcctctggatgcaatgtggcctcattttgtgttcaatgatgggagcaaaggtcagttttcaatggtggagcctagtctcattggattttgttttagtaaatgctccttctagttctagccaattttgtgtagcttaaaatgggtatttgcttgtttgcggtcttcttgtaaaattcaagcaaactaacaaaacaaaatacgaatttgaagcttcagttatctgctaattgataaataatggtttcctagttctttatttaatttattatattgactcatttcagctctgttttaatcatcctttgaatgctttgtaggactatcactgaagtcccaggaattgacagct

SEQ ID NO: 46820 - DNA, 1020 bp, Manihot esculenta
  Intron number 1 from transcript cassava4.1_014677m (locus cassava4.1_014677m.g) derived from phytozome v7.0 (chr-ID scaffold00963; pos 7224 to 8243 reverse strand)
gagaagaaatccaccgccaaacttcaagacgctaggtaatgtgtatgttcaacttttgaaagaattttgcatcgggttattttctggtaatttgtgtagattgaatggtgatttcacggcttttccccttttgtatttgtctttgttttgtgaataaatgaaagtgtatggttgaaaatggagaaatttgatataggttttgtggtgcttggttagcgaggcaacggtttttagtgcactgattgtttgtgttctgtgaagctcttgctaacttgattaatcgtattagcatatattgtcatttgaatattaaaaaaggtgtatgatcttggattttttgcttctgggctaaagagttagcacgtttttaaataagttgaaattggtacttattgagggaaaatcaagagacgggattttgagatggcttggaagattgagcatcttagagtaataggagattaggaagtgcagggaaatgacatagtaagaagcaagaaatgatttagcagctctataattggaataggggaatggtccaaatggatgcatttagttgacccttgctagtttggaattatatgcagttgaattggatatacactttgttgatttgaattttcactgatattatcaggaataatctcattctatcttccttgaactcataattactgtgtatcaataacctcatctaaaagcaagacaaatagcttctcctttacaattttctccttccaagacgatggtcttaacttttgcactttatatatggcatgtttttgtaactcaaaccatgaatcatttccatttatccgtgctagtcttagtaggctgtccatgcatgagctaaccataatttctgttgtaataattttgagtttctagttgtatatcacattagtttatcacgtagatgctatgtaatatttggtgtgtattgttatcggtccatgctcaccatctctatttttatttattttttttttggcagaacggtgaggaaaattgtttctttgg

SEQ ID NO: 46821 - DNA, 734 bp, Manihot esculenta
  Intron number 1 from transcript cassava4.1_004228m (locus cassava4.1_004228m.g) derived from phytozome v7.0 (chr-ID scaffold02572; pos 412587 to 413320 reverse strand)
cccctcactggcctcacctttgctgtctctgacgtgtaagtagctgttcggttaacagtatgtatacaaacaatgactagttgggattgaggttttagttttgagttaaaaggaatcacctgtctgatagtattctttcagtattgttttgttgggaagaaactcgagggaaatgtggaattggaaaagaaaaaggagaagaaagaattgaatgtcttttaagtatgcgttgcttttcaatggttttgatgactgagaaaattgaagaaaagagaaaatctgaatgcgtagaaacaccgggtagctgaatatagaaagtaggattaattttgtttcctccttttacgtatatatattttagaagaagaggaaataatttgtctctaaattctggtgtttgcactatcctcttcataaggtaattgagaaagtaaatccttaagtatttcaaccatgtctttgtatcaaatgcgattttagaaactggactcgtgtgcttcaatatttgagtataagcggtcaagtggtgttattaaattttaactgtttacgaattaggatatgtttgttgttggagcttttgggggaactttttcaatcagtgtaacatgtgcaaatttctgcttaacagggtctttgtaatcttccttgtttcattgaagctgttaatgttattttcgttttacatagcctctaaaatggcattgtgattatcagatttgacattgaaggat

SEQ ID NO: 46822 - DNA, 1058 bp, Manihot esculenta
  Intron number 3 from transcript cassava4.1_016511m (locus cassava4.1_016511m.g) derived from phytozome v7.0 (chr-ID scaffold11322; pos 16425 to 17482)
ggtctcagccggaaaactcgccctgtaagttcctctctctctctctctagcttctaagcggtggactcagaatctctctctctctctctctcttcctcttcgttttttgcttttttgttttaatgtaaacttaaattgtattaactaattaaaaatcttattatcaataaaatcttaaaatatttttatttctaattagtccatgcaatttcaaaatataattatacagtctctttaactggaaattcatatccgaactatatctattcagctcctgcaatatgaaaagcataactattcgttcttgcaatttatgagagaacttaaatagcttttagaaatacaactaggggcgagcagtattcggttcaaatcgaaaaaatcgatcgaatcaaattaatttaaaaatttaattcggttttttatatatttcggttcggttcggtttttaatttcaaaaattttagttatttcggttcggttcgattttgatcagaaaaaaatcgaaaaaatcaaaccgaaccgattagtgataataatatattttttcaataatattgagaaattaaatcatattaaaattaaaatattttaattaaattttaaaatattaaaaataaagtggaaaaaataaaaaaaattattaaaaatcgaaaccgatcaaaccgaaccgaatcgaaccgaatcagaccggttcggttcggtttctgactaaaatcggttcggttcggtttttataaacactaaaattttaattttcaatttattcggttcgattcggttttgaaccgaaccgaccgaatgctcacccctaaatacaactattaactaatatattttaaaaaacagagggattaaatagttagtttcatctaaaccacacgtattaattagtaattttccttgaaaaattaaggaatccacattccttggacgtttctttatcttaaaaaattgtcaataaagaaaagaagaattagcttaaaaggatttgttgatctaagttccatgcattaattgcagggaaagggtccttctctactcttccctattgagat

SEQ ID NO: 46823 - DNA, 1012 bp, Manihot esculenta
  Intron number 1 from transcript cassava4.1_006677m (locus cassava4.1_006677m.g) derived from phytozome v7.0 (chr-ID scaffold11341; pos 760231 to 761242)
gcagaaaaggtgtgtgacatctattcagaacaaaagtaacaataccttggaagggattttgccatttaatataaagtataaataaagttgcattggtcattaacttaattcttgatacagaagtaaagaacttcagctattctttggttcccataagcttttgagttttaactcctaaaacctttggtaaatatcttctcgaaacccagtcttgccataggaggttctaagatgttgatctacataagattctaacagcaagaagttttgggtaattgatctcaggactagcgcagaaaaccgttaatgaatttgatgcttgccctgtgtatcagtgcatgggacagtaaactggtgagctaatttgctttagaagataaagcacaaatatgtaccatgtatattgtcaaatttgggccaggctttactcaccaaaagctagagaagagctaatatgagattcaacatacctctcatcttcatgactaaacttgagtatgaaatacttatgagaggcccaacgctggatgggaaggctataatactatgttaaactttggttagattaaatttgggttaggtctaactgacttcaaaaactaactcaaggagaaaccagggtacattacctctattccaaaccaatgtgagatttaataagtatctttaattgatcaatttaaaatgacttgtacagttgtacttgtcatgggatcacgccaatgaaatgcctgtttgtggaagattttgtgtaatcgtggttcaggatggttgcatgtgaattgacatcacagtaacatgaatgttcttgtttgtgcttgctctgtccttcttatttagctgcctctggaaatccttttaatgcttttgttcaaataccatatactatcatttttttttctaatattctttgtattaacattcaagttgagagctgatgcaacctattgttcctttatgccttctaaatttcttaggaagttgcagctgcttttgtatcattcaactcacg

SEQ ID NO: 46824 - DNA, 833 bp, Manihot esculenta
  Intron number 1 from transcript cassava4.1_016933m (locus cassava4.1_016933m.g) derived from phytozome v7.0 (chr-ID scaffold08287; pos 32543 to 33375 reverse strand)
tgtatatcatcccaagcaggatcgcggaactgcaggtttgatactgaggaaacctatgaacagatagtagaaagtgttctttgtttttttttgaacaagaaagttgggctttatatgaacacacgttttattctcccttttccctgtgtgtgtgcgcgcctgtataaatttctttgaagttatttcatttagttatcattttacttttccaatcattacgttttcttttttttctattcaatttgggttttgggttatgtcgcatttgagggagttactttttctttaattttgattttgagttatgggttatgtctctgtttgaggtaaatgcactgcagggccttcttcatatgaatgactggtgtaaggatcttgtaattgctggtaaattatgtttttgtgagtttttcattatccgccaaatgtgattaattgtcttgcttttttcccttattgattggttttggcaattattatatttttttggcggaaaattttgtattttgacagttctagatccttgtatcttacgaggacccaacattttatattttcatgtttacattccgaattttttgatggggctgttagtaggtggatctctaatgtactttgagatggatggttttggatactggggattttgatttttaaaattttagatttgatttgttcctctcctaactggggtttgtttagttatttattcaaatacaatgtcgaagtatgtgttccagggtctgtattggtagccgcaagtgcactttcttctttatttactttgtttattttctgatctattatgttccatctgttctagttttgtgaag

SEQ ID NO: 46825 - DNA, 753 bp, Manihot esculenta
  Intron number 2 from transcript cassava4.1_012121m (locus cassava4.1_012121m.g) derived from phytozome v7.0 (chr-ID scaffold05230; pos 66594 to 67346 reverse strand)
tcacaggaattaccagaggaaaagggtttcaggtaagtgttttgctctatagttatcatctacaatgattgcctatctctttctcttcctttttttgttaaattttctttcaacagttctaggacgcatgactgtgcttgtttaatgttttaattcaatttagctcatggtgtatagggttcttttcccaggatagtaagactgcatcgtaatgatatatagaattttaaactataatacttgcattattttacttgcaataactaatattcatcagcaaaagaatttttttttattattaaagttgctcttttatgaaaattagctgatcggtgacatgaaagatgaagccggtctaatccatcagatggaattcattaagtattacattgtaacaggcataaatgtcattccagttgagtgctctgtgacatacaaaggagttttggacatttatggtgtctaatcaacacgaatgtagttcccataccttttgctccctttcattctaaggagacaaattgaaattccattgaaatttgaattttttgatttctgagattctgaattgatatgctattttgtgatgtttctttaattctttcttatgaagagttttggactttggtatgagaaaatggaattccttggatcaatatccttgctactcctatgagataatgaagaggtcaaggtttatttgtcattgctttttacatttcatattcttttaatttctatgtccagggtggt

SEQ ID NO: 46826 - DNA, 547 bp, Manihot esculenta
  Intron number 5 from transcript cassava4.1_013005m (locus cassava4.1_013005m.g) derived from phytozome v7.0 (chr-ID scaffold08873; pos 18751 to 19297 reverse strand)
cagaacgtatcaatcgtggtggtcaggttagttctttgcagttgcacattatgttgttgtttgagaatgtgataacatgattaccacagaagacctgtttctaagttcttattttgatttctttaatcctattgattgaagattcatgttttgccagtaacttaggaaattccaacgagaacttgtactttttgctcctgaaataaaactatacttttctgtcagcaattatgaatgtaattttaggggaacggtaaaaagaagaactattctttacatcctcatatttgatgctagataaaggaattgctaatcaaatttgtttcattagcgtatgtaggaatctagatttgtgacctgtataattcaagctgcaagtcggagtgcagtgtttcagtcagatactcgctattggttttaggacaatagcattataatatataaatgattttggcaaaacattggagttctataatgtgtggcacattattgcatattttacttctttgcaggttatttctgaaattattgaaagttgccgcgcgca

SEQ ID NO: 46827 - DNA, 817 bp, Manihot esculenta
  Intron number 1 from transcript cassava4.1_016462m (locus cassava4.1_016462m.g) derived from phytozome v7.0 (chr-ID scaffold07171; pos 157177 to 157993)
ccttttgttcgccgtctaccggaattcaagttctggtacgatcaatcactgcttaaagctggtttaatctcaatttgtttgtactttttttttaacgttttgtttttccttcgatgagtataattgttcgttatggcattgtgagtattcataatgtgtgctaaattggagcgaaacaaatgttatgaggaaaattgaatttggtttaggctttttctttggggggggtttagtaattgttgatgaagaactggatttgttgcataatctataaagggaattagaaaagaaatggtcaaacaaataaaacaatgctccaatttgaaaactaatgggacaaattgtaaatggttgagaaaaacagaagctagcagaacaatgtagaaattgtgatgggatttcacttgataaaatcaaagcaatctatttcttcttttttcccccaattttttcctggcatcagacgctttttattagtaagtattctttgcttggatttgttgctctttaggattcaagtctctgtttggatatgtgtgtatttgaaatgattgagaatttggatttatttttcaagtgaaaatttaaaacttcaacgtaatatcaaatttaaagacctagaaatttgaaattcatccctgtttgaatggggaatattggaacttgcaacgtgctggtggtttttatttattctttttgctattattttccagttttatgttgcaattatgaaatctttatttggttgaacttatttaagtttcatttttgctcttcttaaggtactctattaccaaggctttcttcattgcttttc

SEQ ID NO: 46828 - DNA, 518 bp, Manihot esculenta
  Intron number 1 from transcript cassava4.1_030505m (locus cassava4.1_030505m.g) derived from phytozome v7.0 (chr-ID scaffold07543; pos 176494 to 177011 reverse strand)
gggtctcgttctctctatatttctcaccaaattaggtacttattaacaaatttctatgttcttttctttatttcctgtttctaatttattgatactcactatgtttgccgataaaagccttgggagagagctctagaatggtagcttgttgttaacttaaagctttagcgctcacagaatagtaaaacccgtgaatttgaagttatagagcgtcatttgtgatgagttgtatacagttttagcgaacgtatttgatgttttctgagaagaaatttgcttgtttatagatttacgaattgctaaactaagtttacaaggaaaacaatgataaactggtgcctgtctagtttgcttccaaagataaatttttgttgctttgctttctattattccctcatccctttttatgatattaaacatttgtttttttgaatttttatgcatggtgcattagcacttcccgttacaattggaattattattgaaaagtttaacatacttgatgcaacaggggtcaa

SEQ ID NO: 46829 - DNA, 664 bp, Manihot esculenta
  Intron number 1 from transcript cassava4.1_007025m (locus cassava4.1_007025m.g) derived from phytozome v7.0 (chr-ID scaffold08446; pos 321416 to 322079)
cgctttccatcatccctggttctctctttttccgggtaaagtttcattcttgtggttaccaacagatatatatatccttgattttggtaatggtctggatgatttgagtggatatttctctattccttctttcgtctgtaatttctgtcccctgagattaatttttatatgggtttttgctatctgttcgttgtaggcatacaaaatcgaaattattagataaattacgatctggatatggttgaatttctttcttttatcattacatgttcttctgagatcaaatgctaaatgggttttcttaatttctttcccttctgctttaaaaaaaaaaaaattctgtcactgcttatatagggcttaggattacttttattctgtttcaattttgattggtaagtaaaagttttttagtgttttatgagatgttacagatcttggaagatttcacgaattttgaatggttttccatatgttggtcccattttaatttaaaagagggccaagctttagcttttatttattctcttttttaattcctgcctctgtctatttattttggtgaaataatggtgagtttgagggtttcatctcggttcttgcattaatctttttcctatacttggcagatattcttttgtcaagctgagagaagaaatctggt

SEQ ID NO: 46830 - DNA, 454 bp, Manihot esculenta
  Intron number 3 from transcript cassava4.1_008538m (locus cassava4.1_006292m.g) derived from phytozome v7.0 (chr-ID scaffold06383; pos 35509 to 35962 reverse strand)
gtcagtttcattgactacctgagctggttaatgttctctctgattcttaatgtctatatttgaggattttcttggaaaataatagaggcaacacacatggcatgtaaataaagtgtgttttgcacatgcaacaattttttggatttgagcttcctgcttgtttaagtgacaagtaacttatttcattaataatgcaatatgcacagtatattacctacatctgaagtggcatgaagatcctaaagaaggaaaagtgtacagggacaattttctatctaaaacattttggattcctgggttaaagtttgatgagtgataatggcattttaagtctcaatattctggtcctatataatttcgtcattttgtttgtgaatagggtgctgctttccttatttttgattttgtgctatgctagctggctgtaactgcttgttctatttgcaggtggatt

SEQ ID NO: 46831 - DNA, 918 bp, Manihot esculenta
  Intron number 2 from transcript cassava4.1_010190m (locus cassava4.1_010190m.g) derived from phytozome v7.0 (chr-ID scaffold02658; pos 707482 to 708399)
cgtatctcaggtctcgccttgataaagattgcaatgtgagccttcttttgctaatatcatttctgtgcttgccctttgagttagtctaccctaccactaaataattattattctcttggttttttttttttttttttttggggggggggggggttgtgggggtgggaggagctattgtcagcgactcggagtactttcagtagcctgatgataaatttcatacattcaaaactttaattatttattttaattaagtaaaagaaaaaaacataattttatgctaggtttaatttattgaggagataaaaagagaaggtggaaccttataccggtgcactttgtttgactttttatatagaattgttcgagatcaacaataggcacattatatcctagaaattttgctggcatacaccaactgtaattgaaaagccctatactttagagaaaaaatttgcatgtaatcctaaatatattcgtgaatatcctatttccattcgcatccctttgatctgatagacaaaatgctccatgacttgttttacctgaccatgtcccatcatttgagcatttaaccattgggtaatagctaaaactacattataatttgatatcttctgtagctcgaacgtttcacttccatgaatttaccaaatcctactacttcaccagtgtgtagcttttgagttactgtagcattcactgcttgtgttacagtgaggtggtaagttatgcactaccttgagatttaagtgctcattgtgaacttgtttgatttgactaggaagcatgtgtggacagccctgattggttgtgcagttgattcttctgtgaattattctctttgaatgccatgcctgcttgcctttcattttttctttattgaatgaataaagttttattgcattgcggccagat

SEQ ID NO: 46832 - DNA, 807 bp, Manihot esculenta
  Intron number 1 from transcript cassava4.1_012860m (locus cassava4.1_012860m.g) derived from phytozome v7.0 (chr-ID scaffold00847; pos 1352117 to 1352923 reverse strand)
gaaggtattattgaagtgatactgatttttaattaattatcccgatgctgtggttgtgatggaatttttttgtttggaatatgaagaattcaatttttggaataaaaagtattcaatttaatgttaagtgacaatataagaaatttaaattttttgatattatgtgagaattttatgttcgatagaaaataatgcacataattatatattagaagacgagaacacctatatttacccaattagttttcaattttggttaacagttcccagtttgaagaaggaaagggattttttccccttcttgtcttctatagttttgcaaagtgatttgaaatctgtgctgtagctgatattaggcttaatctgataagggtggagttaactctttagtaaatttattttctcatgtaatatgcttttacaatttgaactggatctaaatggcatatacgtcagtcaattggcaccgcagctgaataaacagaggttattccctccgcccaagacatgtctgctatatttctacattctttgttactataatgttctgtgtacatgaaactcatgccatgttaagcttttcatgctttattctgacgtattcccataattcaattcattgggttggcatttgtgtttctcttgatgggttaaattgtttcttggtggttttgttccctttcatttgctgtagtatgcaaaatggaaattggcattcatgaacatacaatcgtttataatttttctttttgtgattgtggtctgaatgcaggagctgcaagacagagttaaaaaggccaaagattc

SEQ ID NO: 46833 - DNA, 574 bp, Manihot esculenta
  Intron number 3 from transcript cassava4.1_026528m (locus cassava4.1_026528m.g) derived from phytozome v7.0 (chr-ID scaffold10269; pos 30327 to 30900 reverse strand)
aggtagttctttatttttgagcttatatattctgcagcctttaaaagcactttgattttatttctggatcattatttttcttggtttttcctcagttaactgtcaagatagttccatttcactattgtggattttgtagtttattcattattccttttcttttcccctgttattctctgaaaacctgatgattgataacaaaagtttgtggtattactcacagccgttgccttgcagtgttatgaaatcatatttttttagcaccacgaagtaacctcagttgatgagataaattggtaattataaattaacacaatacagttcaagtaaaatatttgcttaaatcttggccatctaatgacactggaatggaaatttatgaagatgataaagacacctccattttcaaggggaagtccagaaaaaagccttgcaattacttttgatgattagtttattttaaagtgcattgggtgcttgtagccacctgcatgcttttattctcattgttttttgtactaacttgctagatgctttcacagataactgaaggagaaagacttacccttaccct

SEQ ID NO: 46834 - DNA, 504 bp, Manihot esculenta
  Intron number 1 from transcript cassava4.1_022617m (locus cassava4.1_022617m.g) derived from phytozome v7.0 (chr-ID scaffold07891; pos 33484 to 33987 reverse strand)
agcagtggatacagcatcagcccaaaaacatttaggtactttcatttggaataagagggctctggctacttcaagaagatgtcgattttttctttcggcaactctatttggaatattatctttctacaccccgctctgataccatgtagaaagataatatttgttattgttattcacaataaatattacaacctatttatacacgagagacggtatctaaataggaaggaaaatcaaacttatgattatacaatccctaagattaagggactgacccatctatcaatatttacttcatatattaacatatttacttcctataacctataacaattcatatgacttgactaaattggctgtatgctcatacttgataacagtgtaatgcttgtttgcaagaggcataaattttaagctggtggccttccttcttgatgataaattcttaccaacaaagtgtttttttgtttccagagcttcctagagtcgaaattctctctctca

SEQ ID NO: 46835 - DNA, 693 bp, Manihot esculenta
  Intron number 1 from transcript cassava4.1_004186m (locus cassava4.1_004186m.g) derived from phytozome v7.0 (chr-ID scaffold04740; pos 82596 to 83288 reverse strand)
ttcacttggttcctcctaggggtcccagtaccaaggtatgcgtgtgagtttattttgtgagggattttggtttccatggatgacaattgtgtttgattgtgaggatatattagttgcttcagtggaatggctgcaattttatgtcaatttggcttggtttatttaacgcttgtctttctttcttcttttgttttcttttggtctgtggaacgaagtgtttttggggatagatacggaaggggcggaaaaggggcattatcatctttccttaatctgattttgctttttgttttgggcatttttatgatatcagcttcaaaaatttggtaatgttgcacatgtagctctttatgttggatttcttgaaactttgttgggttttagattacttctttttttctattctatcactttttactaaatgcttttagaatagtttttgttttccattctctcggttgtaattaatgcaattttgagagacacaaaatcttctatgccattactacatgttcaatattttttaaaagggaaataacttgttctcgctttctattacgtgacggatacttaatacaagtgattaaacttttaatcattcgatacttgatttttggcaagtgattacatttttctgtgcttgcttggccttttgcagataataacaaaggaatccctcttggctgcacaggt

SEQ ID NO: 46836 - DNA, 879 bp, Manihot esculenta
  Intron number 1 from transcript cassava4.1_017675m (locus cassava4.1_017675m.g) derived from phytozome v7.0 (chr-ID scaffold01624; pos 38913 to 39791 reverse strand)
ttagggatttttacattccaattgtgcctttgaaggtatccacattatagtttctgcagaggcgtgcctttttgaatctactctgatattccaagtttcagcgacaagtttttcttttcttttctctctttctctctctctctctctttttgggatctgcttgatcatgggatttggattggaattgtaataaaacccagaaatggaaataaagggtgcttttttttttgaaccaaataaagagaaagattgagctttaataagttttaatggtttctatttagtttaatttcatgatcttttagctcgaaattgctatttttggcttaattacgtgttttctatttatttaggctatttttggatatcttagttttggtggtttgaaggcaattttgccaagctagatttattgtagttggagatatttctgtgatttctcggttcattgtagcgtatttaaagtagatgtattgaagttatgtgttggcagtttagttgccgatgtatggtaaaggaaggagggtctgattggacggggagatttgaagaaagaaagagaacatggaaaattacttgaactttttttttgatattttgtcatgctgattacgaaatcaatgagagatttgtaattactgtcgcgaaaattgtgcaagattttgcttaaaatgcctatgcggtttctatatagttcagcaaaaagaaggaaatcatgagaaggtttaatcttccttgcattccttgattttccagcaaccatatcatcatcataatgttcttgttcttctttttgggttgaatgcgtgagtgggttttatgtatgttcagtttgttcttatcttcaattaatatgacaggaggaaaggactgttcaat

SEQ ID NO: 46837 - DNA, 584 bp, Manihot esculenta
  Intron number 2 from transcript cassava4.1_029362m (locus cassava4.1_029362m.g) derived from phytozome v7.0 (chr-ID scaffold10797; pos 53473 to 54056)
tggagctcaaggaagcatccattgtgttcattgaggtgcgtcaactttcgtagaattcattctgaaagaaaagaattgaattcttgcaaagttatgcaaggtttcaattacttttaaaaataaaaaatttttaaattaaaaaaaattaaattcttgtatttcaaataagaaaattattaaaaaagaaattaattgaattgaattttcactaaaactttgattccaaatagaaagtaattgttttacaacattaaaaggagcaacatgcgcactcacagatttaatctggtaatctgagtaaatttgagaggtctcagattctattcttccaatttccaattcttatttcaaaaataaaaagaaatagtaacatatcatgatctaacaattttagataatatttttaaagttaaaagacgacgttggaaattattgctgaacacaacataaattcaactcagcttgcatcatgactcgtttcaaataatatgattctcatttgtggagattatataatttcactaccaatcaattttgttagtttttgtaatatgtgattacaggaattgaaatctgttcccgca

SEQ ID NO: 46838 - DNA, 704 bp, Manihot esculenta
  Intron number 2 from transcript cassava4.1_013048m (locus cassava4.1_013048m.g) derived from phytozome v7.0 (chr-ID scaffold10501; pos 93331 to 94034 reverse strand)
ttattgcgcttcttgacactctcggcatcagtaaggttagagagatttccgccattttccattcttctgttagaactgccttgaatttgattcaaattaacatatagacgataatatttgtgaatcaattattttggtgggctgctagaattttcagagttcttagagttcaatgtttgtaaatgacatctacataacaactaatgaaaataacctcgtgtttcaaaattgggatacaattgaggaatccaaattaacttggtgcatatctgggttgccttaagtatcaaacaattacacaatttaaaaattaaacatgagaagtaatttaacacacaaatttcacagatttaatcgttattcaccgatttgattatgttcacgatggcagtttttgaatataatacactatttttagagaaaaaaaataaaaataaaatagtcctaaaagaccctcgagccctccattccagtggggcggccaacagacgactgctccgcgcggagttggatgagcgaccatagagtatacagtttataatatattattaagtcttcatattttaacaggttattctgaaaaagttaaaaatttgatttgtaattctgctcaagataataatatagatttgagagggtaatgttttttctcttttatcacatttacaggtttttctagttgggaaggattctggagctctacc

SEQ ID NO: 46839 - DNA, 512 bp, Manihot esculenta
  Intron number 1 from transcript cassava4.1_014386m (locus cassava4.1_014386m.g) derived from phytozome v7.0 (chr-ID scaffold06916; pos 33239 to 33750 reverse strand)
tagagcgccaggaagaggtctctttatctatccaggtagtttattacttgtttgttttctcttttattgctaaagtttatttcttttgctttaactgagtggttttttaggatttttctaatttagttttccttgttactgattgcattcgtagttttatagatagagtcattgaaacgtcggcaatcttaatggtggtgcgatggcgttatgtttatatcacaactgatgtagcttgttaattgtttgatgttatgcctcaaagaaatgttgactcttggttattgtgtaattaacttgatgttgtcaaataagtaacactttaatatgcattgaatagatatcttcatgagccagcccttaattaagcttcaagattgttaccgaattgctgtagttttgaccatgcagatgcaggaatgtaatatggcattgatcattttactcgggttatggtcatatcataaaaaatttcaggtgtttcaagtgattcaaaagcaagactggtataa

SEQ ID NO: 46840 - DNA, 790 bp, Manihot esculenta
  Intron number 1 from transcript cassava4.1_009257m (locus cassava4.1_009257m.g) derived from phytozome v7.0 (chr-ID scaffold03741; pos 434978 to 435767)
gttgtgggcaggcatgttctttatttccgaatttagaattcatggattctgtaattatgttgttgaatagctactcttgggtgatctgttctcttataaacgattcctggtatttgggttctgtgaacggcaaaagaaaatataactagttattttcttatctataaaatttcagctcagtaatttatatctttccttgtgtacaagggaactagttggggtaggatttgaggaacccagttagttttgtagcttctttggtcttttttttttttgaaaacaagcttctttggtcttagttcatcattgtttttatgtttgttttatctagggctgtcattgcacttatgtttttttaatatacattaaaccaaccttaagttctaaatggaggtagtgtagattgctgcttttcatctttgactatattaggctcttcttatacatgattcttaaaattattttgactatattagtggagcatggagcacattaggcatgctcatttttttattaggggattggggtaatgcgctaccaggtggctgaaatgtcttcagctgcttgaccaaaccaggctatgcaggcttttgttggtcataaaactgtaggttcttatttgcatctgtaatctacttgcttgtagtttatgcctccaatgcttgctatctcatatcagtttgtttgctaataaaaatgctctggctgttaataataccattaattttagtatattatgtgttcttgaattacagtgaggaagaagcaaggaagaagatctactcggttt

SEQ ID NO: 46841 - DNA, 730 bp, Manihot esculenta
  Intron number 1 from transcript cassava4.1_015615m (locus cassava4.1_015615m.g) derived from phytozome v7.0 (chr-ID scaffold02421; pos 717197 to 717926)
agaatatcatctccaggtcttgattctctcctcaggtgcgctttctttcaattaattttttctttgctttttaaaattttatcaaatctcaggcccactatctgtttttttctttttttttccctttgtgtgtagttttttgttatttttgatgcgtgtttgtaatcgaaaacttgcgttgcatgtaagtgggggtgtaatttttatttttacaattataattatttgatatttcttttgatttttttatgccaatgtacgagagttgatatgtgaaatatgcgtaatgggttttgattgataatgtacagatacgagttctgactgttaattacaagcctttgaaattagaaaattttctttagtagtaattcccttgcagaatttttttttccctaattttattttcttgcattttgattccctttttgagactattccttcgtttttttttccggggtaattgttcattggatgatgaggggtatgttttgattgttaaattgcatgtggagcacaattttcccctcttctttttatccataagcttttacaatgcagctgcctttgcgtgcgtgtttgagtgtaggttttgagatattagaagtttttcaattccttgtggtattagcatgggaagtgaattaattgacgtaaaatgttttattcaattcagtaaggtaatggcctgcgcttttcttggtttttaggtttgtttgtgctttgtcac

SEQ ID NO: 46842 - DNA, 898 bp, Manihot esculenta
  Intron number 3 from transcript cassava4.1_022120m (locus cassava4.1_022120m.g) derived from phytozome v7.0 (chr-ID scaffold04457; pos 1202965 to 1203862)
cccctgatcaggtattacttaatgataccaaacttacctcagatttcatttttggggtttgcatattgtgaattttaattgtggtctacgctttacttgtttttggcagatacaaaaatcatatactgtatttgaacatttatgacgtgaatttgtgtgttacttttgatttttattgttggcttattttgtgtgcacacatgagatattgaggccttaaaattcctctgataaaaaatatagtttctcattaggttttcttaatgtcttaaaaaagtgtcggcttggcctttcataagtggaaacaaaataaagcgtccataataaagacatttattatcggttgttaattcaatacatttctgctgcagtatccgagtggatattgttattttctcttgaactataataatattgaaatcatagaattatttatttttcttgaaatctcttcattatgttttttgtacacacgcttttttttagggggtctgctgctaaatagacttggtaaaattatagtgttctaataaatgccgagcagtttgacaattgagttaccttttcgtagctcagtatggttgaataaagaggatatcttggactgctgaaattaattcaatatctttgtgttgcatggtttactaatatacatttttaacaatttactttgaagaaacatttaaatttggtaagtttttggttctatctacgtatagcatcaccacaatttaaaatgtcatgaaaactgcatgtttgctaaaacaattttacatggtgttgaatgattgaatcatatgtttccttccataacaatttctcttttggagtgtccaattccttcctcaactttcattttgtagagtatagagctgactattgaagctgtggagtttct

SEQ ID NO: 46843 - DNA, 636 bp, Manihot esculenta
  Intron number 1 from transcript cassava4.1_016557m (locus cassava4.1_016557m.g) derived from phytozome v7.0 (chr-ID scaffold03219; pos 572468 to 573103 reverse strand)
ccagtgctagcgtttgccctagtgagttctctctctctctaaccccctgagcctgtttccttcattcggtgtgtagatctttttctttttttctaaaattcagattattaattactcttatattttaaactaaggttaatatttgtattgattgtgagtattaatttctattggtttcaagaagatatatttactttgttttatcataatatggcatgatattttatttattagtgtcttaatattatcatccctaatatgtattgaaaaaatgatatgaaattcatttgttactagataaatttaataataaaactagaaattagtgtagattatattataaaagattatatacaatttgttattttaattatattaaaaaaattatagaataatatatggagattaaacttgctcatatttaacttagagctacttgaattggaaaaattacatttaataataataataataaaaaaaacattttcaagttgacgattcgattccatacttttgattttaagaacaaaaagaccggaaccagacgggctcattgactcctacacatagtctcagtagttcttgcttcttttttttttttttttaatttttcaggagacaaatttatagttcatt

SEQ ID NO: 46844 - DNA, 855 bp, Manihot esculenta
  Intron number 1 from transcript cassava4.1_029923m (locus cassava4.1_029923m.g) derived from phytozome v7.0 (chr-ID scaffold04796; pos 240952 to 241806)
acaaagaaaagcctcttgagaggtaccttcctttatcctttatctcccaatggcttttgaacatgtgttatattttgtttttcctgttaaatcgaagtgaaattgagtaattttgaatcttttgtaccttattcgttttctacacttaaatgtatgctccattattatatattgcactgttcagaagattttgttgtgtcgcgattttagaccatttgtaacctacggtgactgtttggagaaagtttgctcaaggggtttttcttatacataattacgtgcctgattttgaaataatgagtagtcaagaatttataaatatagattgcatgggccaagaagttaagaatttataaatagagcattaaaatctgtcagccttcctttggattgtgagtgattctttctttctcccccctcttttaattcatttacctgtcactggttctctatctccagacctaacaaccctagaagcaagtacagtaccgattagctcattggttagtggttactatgagtgattcttaatgtagtaaaattagtttctgccattgctttccccattaaattttgtactcagagtttcatttaactcccaattttgaaggcaataattgtatgcgatgttaccttgtatttggggtgtgtgtgtaactattggtaagaatacgtgcctgtacaccactgatgtattgatatgttacttgctttttgctttctgtaatagcctgattgcttgggatttacttatagtcattggataggttgtgggatccaggctaatcatactttatttggtgttgtttggttctggtagatttattgatccagaagggctcaccaaacaaggag

SEQ ID NO: 46845 - DNA, 815 bp, Manihot esculenta
  Intron number 1 from transcript cassava4.1_015216m (locus cassava4.1_015216m.g) derived from phytozome v7.0 (chr-ID scaffold02903; pos 28669 to 29483 reverse strand)
cgtgagtgcttcttatttatgtcgctgtgtctattcatttccgtgcatctgatttttctttttaaattcaattgggaaaatgctgtttgcgagattattctctattttattatttttttaaagcgtgatgcttgttagtgtgatatgcttaatagattggcgaagatatgttgggtttttgtgcagaattgcttccatatttaacttctaacaactacgagcatttgaatttccgtttgagtttctgtatatgtttgttagtttggccaatttggtttctcagaatatgaaggcaagaaaaggaaaaaaaaagccaaattagaaagctttttcttcaaaatcgggatcggagtaggtctacttcttgaacatattcaaagaaagagttgaactttaaagggaaaaaaagaaatgtatttgtaatttaattgccccttggttgctcagagtgatgcaaaggactaattttatccatttgaaaaagaaattaattaagtgtaatttacgttttaattgaatgaatcacttttctgtttatataaaaaaaagaacagtataaatagtatgattttattttcttttattttgtcagttttcagcaggattagattgttgttatctggtagatacaacacctgaggcgagtttcaaaaaatttgtaatttccttatatgatagatattttcttcttttttttccccatcttttgccttggtcgtaatttacactacttcaactaggacatttatttaactattttggggtttccattttgctttttttttttttttttttttttttgttcaattttaggt

SEQ ID NO: 46846 - DNA, 911 bp, Manihot esculenta
  Intron number 3 from transcript cassava4.1_023165m (locus cassava4.1_023165m.g) derived from phytozome v7.0 (chr-ID scaffold07827; pos 7413 to 8323)
acccagatattgatcaagtgcccttggtatgattttttttatatatgtatatattttatttcattttttgttatacatgcaggttttccttatattgcataaggtagtgatagtctcgacttatttctttctttattttcttttaaaatcatattatggagtttagtgctgtgctctctctctctctctctctctcattcttatttggatggaagggaataatgtatataacttattcacacgaattacatttgaatagaactaaatgttattatattttcctgcataaccatcctcaactctttatgatatattaaaaatatcatctgccttcttgtcaaccatttaggatgggcagctacaacttgtaaaaactcgagacaatgtctgttggtgtctaaattaaagcagctgcagcattcgagttgtacttatattgaaaataataattcttttttgtaattttgtttagttagttttgctcatcagacctggttagcaggaaaagttagagccaaactgttattcagacttactggtaggaacaatattatctatcaagtgtctctcttaacttagttcattggtgcaaataaagcagtcttttatcaaaatttctgaagcatttgaccataccgtgagaaatttctgcatacttccatgccacgtcttatttcatggtttgttctagaaataagaattttatggtttcctcagtttttatcgacccttgctagtgtagatcacattttagctaaggagtaagaagcagtaattcattaggaaaatgaatttctgtagtaaatttaagaaattaaaagtttgatattatattgtaacaggactcacttatcttgcctgttcaataaaatccagatagcagtgaacatagatatcgagtctcctcaacc

SEQ ID NO: 46847 - DNA, 1055 bp, Manihot esculenta
  Intron number 1 from transcript cassava4.1_019576m (locus cassava4.1_019576m.g) derived from phytozome v7.0 (chr-ID scaffold00109; pos 359978 to 361032)
tccactctccagatctgatcctaaaaatcgttaaggtacgttttcaaacccttattaatctcttcttctaccttggattttgagagctgtgctaattttttttcactacttgaagtggtagctgtaagttcaaaacgcaatttcttttgttagatctgtcgcttctctgtaattttggattcataaacatgtcctctttgaggactttttcttgtttaaattttttatacaatgtattggaactgaaatgagatagatcgatgctgctattttgctgtggttatggttatatggttagtttattgaggaatagaaaatttgggatatggtacaatttgtcctttatctttgggcttcatattatgctagttttgatttttggttttaagcctatgcttttgcttttttgttttagcattcctgttttgcaatttactcatgaattgcatagcctactggcaacctcttgtctttgtaatatgatgtctataagctaccaggtcttgatataattggctgcaagtcatgcggcgcagttaaatgttgaatgcagtcctagattatgccttatatttaagatttgaagtgcttttaagaatttcacttggtggtgatattggatcggacgcgtaaatgcttttttaataacagcaaattgtgtccttcacacatgactgctatgttagttagaattttttaagtagcttgggtactcttggatgggatcaagttgcagatgcagatttaaattgtctatttgaatcctgattcttattaatttggaaattgggagtgattatgctgagtaaagaatcttttatgatgtattgggatggaatatagtgatgtagattgttatgaagcttcatgggctttacttgtttgcctttttgtgtgatacttgcagtgagtggtatacttttctttcctaggaaaatattttacctaaacttctgttcatgttttcatggttcatactttgtttagatcatttgtgatctttttgtttgtggaagacaggtttaagatttccttttctacaaagtccagagcat

SEQ ID NO: 46848 - DNA, 998 bp, Manihot esculenta
  Intron number 1 from transcript cassava4.1_014294m (locus cassava4.1_014294m.g) derived from phytozome v7.0 (chr-ID scaffold06916; pos 1630780 to 1631777)
aggtatagttttaactatttctaagatttggttttgttcaattgtagctaagataagagcaatttgggtcttaaaatctcattcatctgtgttttggctcttacgagtatgagaggactttgcttacttagtgaagctcacggtatagttcattttttcttttatgattttgttaattttttgcggtttatgtggataaatactttggctaagcttgttctcaaacatggtagaacagttgagctcaatatttgattattttactattttccctttttgtttttaacaaaggatgttagttgatttttgcagtttcttatcagaaattaggacttagaatacttgataagtaactgaactcataacaccttaaaatgaagcaatggtcttatataggtaaagaaacaagggagtattcttacagatgaatcttttattccgtttattaattttgttgtgcatgtgtaactgaacgtgtgataaattctggatatgctgtagtcagttgctttttatgattgaatctactaaaggttttagacatgagatctcggagatttgtacccgtgaggttaaacctttcccctgtgttgttgtactccattctaatttcatgcatcctaaggaagaggaatttggttagcctgtggcattttcttagttaagatactgtgtggtcagaagcatgatttcttgagctggcatgattttgttgggatactagctggttaaaggtgaacaatgcaattcttgctgtcaattgataagaagaaaatcctcaagttgggggtgattaacagacagtgaaacattacaatacatcttttttatgcctactacttcatctacagtcatggtgatgtacaacagtcaatgcaagattaatgaagaaaaacattatttcttattaagataaaagagtttccttattttaccaaaatatttttgcattcctttttcctgatgcagttgtgcgaccttctcaaatctagagttga

SEQ ID NO: 46849 - DNA, 662 bp, Manihot esculenta
  Intron number 2 from transcript cassava4.1_026430m (locus cassava4.1_026430m.g) derived from phytozome v7.0 (chr-ID scaffold12491; pos 146 to 807 reverse strand)
tcaccctcacagaacctgttggagctctgagtttggtgagtttagaatttcttgaatcttcatgtgtttatacttctaagtgattaattatgtccggttaaatggaacagggaaagaaagaaaaaggaataaaatctgaatcaaatagatcatttcaagcatatttgggcctttgcaattgacaaaatttaaagtcagtaataaattatgaccattttggattaaaattttttgactatatggctaatttgtatttaattgttaaattttataagtttttagattctttcaataggttacgattttagttcaagtgttcaatagttaattctacatagcatgagagtgcaaacacatatttagcaaaaggatttttcaaaacattattctgcctgctgtggttgtgcaatctcttctgtcctttgaggccctatagtcggatggcaaaacatatggctaagcgtcaagccaaacgaatgggatggatctgctgccagacattaaattttgctagtatccttccaagagctacagtcttaatgaatttggttggtcatagtggagtagtttaaagatgccaaaattgtgccatagatttctatgccatataatcagattgctgtttctacaggaagtatttgataaagaccgtttcaaagcag

SEQ ID NO: 46850 - DNA, 680 bp, Manihot esculenta
  Intron number 1 from transcript cassava4.1_026430m (locus cassava4.1_026430m.g) derived from phytozome v7.0 (chr-ID scaffold12491; pos 834 to 1513 reverse strand)
tggtggtcaagctagggaatcaggtgatttgaagctctgcaattctttttattctaagctctgtgagtttgtgtttgttctatcttacatctcttctttgattcaaagcccagtcgcttgatgatcttaaaatgcagttaatttttgttgctttagaggatttctgacataagaccacattgttttcctctccattcttgtgcaaattaaataaatattgtagaaatttactatttaatctggttatttgatctctctattttaaaaagtagttagacattaattttaactattaaatattataaaaaattcataatatagaatttttcctaaatattaattgcctgaaatagttttcagaattgaggatcaactaatgagttttatataatataagaactaaataataatttttcctaaatattaatcaaatggatagaggcatacatttcgtgagtgaaatcgttttccccttttctattttgtttcttctggtagctctatgtataggcattatttggtgtaagatccagttcttgccttgaatgcaaggttccttttggtattcttaataacattcagtaggatggtgttcagttcttttactctgatgaattatataagtgactagtttctcttgaacagacattaaagaccaaagttattaatagttgccttaa

SEQ ID NO: 46851 - DNA, 574 bp, Manihot esculenta
  Intron number 2 from transcript cassava4.1_023921m (locus cassava4.1_023921m.g) derived from phytozome v7.0 (chr-ID scaffold03750; pos 1111093 to 1111666 reverse strand)
ggtggactctagatctagattgcaaaagaggaaaagtgtattttactccataaccttttctttaaatataatataaatcttgcgatgataatttaggtttcattattagtcatcaatgaaattaattttaaataaataatgggttttgttgggttgtttcacaatcacacatgcctgaatgatgagtgatatgaactttgagccaggtgtttgaaaaatatccacaaccataatcaacattatcgtgctaattcgcttatcaggagcttaatcgttaattatgttactttaattttttgatatatatttttttttatcaaattttgatccgattagaaaaattctaaattgcaatctaaattgaataaaaaaattataatttttttctaattttgagagttatggaaagttatattatatttttttaaataataataaagttttagttttatcgtgtaagtaattttttttcttctcatttgataatcatgctaaaagatttgtttgagtgtaattaacttctcttgtttttttttatgttaaaattcgtttagaattacaaataacggaagca

SEQ ID NO: 46852 - DNA, 521 bp, Manihot esculenta
  Intron number 1 from transcript cassava4.1_006090m (locus cassava4.1_006090m.g) derived from phytozome v7.0 (chr-ID scaffold02436; pos 4848 to 5368)
atcctgaagattccagcatccaagctgtaagatctccctccctcttttagctgtaggtgctgttaggtttttgtagaatagaaaattttggtaatagttgtttgaatggttgtttttgggatctgtattttttcaatcacttcactgggtgcaatgagatccgataaatagtttttattctactgctttcggcgacggagatttgctggtacaaatgcagcttcagagatcaaaacttgtttgaatttatgcaaaatttaaaaatatcattatttatttttaatacactattaatatattgagaataaggaaaaatatgtggcgtaatttttattgtatagcggaatcctgagagacgagtttcaatggactatagtcttgtcttctttagtttttatccccattactgagtttggtattgaagttgaaactgggcgtctacttttgttgaggttgtttgttaatttgtggtttaatttgatgtaggttacatctggtgataccccatatacatcagcagc

SEQ ID NO: 46853 - DNA, 726 bp, Manihot esculenta
  Intron number 1 from transcript cassava4.1_011533m (locus cassava4.1_011533m.g) derived from phytozome v7.0 (chr-ID scaffold04043; pos 267221 to 267946)
tcctccgacaacgaatcatcttcttgggttctcaggtcttgctcttgcctccctactcgtatttaagttagattgatctgtttttctatttgaattcagtttttggttctcattgattattttggaggtgggttttcctttctcttggctttttaatgtgtggatatcattagttctattgatttccgttttacatattttgtataaaggtatgcttgagatgtggatttttgagttaggttcagcatacttgttttgttagagatatggggagcaagtttccagattccggttagatttgtaatatagtctttcattggatatatacatgtaaacatggtttttggagcaaattattggatcagtaaaatatttgtttaattcattatttgtttatttgcatcacacttcttttgttagagatatccttgtcaggggctctatttatttaataggttgttttggccttaaatgcagagtctgggttgtgtttcattattgctgactgctcatattacttttctttttaaagaaatgagatttggtatggacctttctttgagcaattgtcctttatctggtcttctaaatgctactgtatatgcacaaatgatagcccaaaacctgaaattttttggtgaaatttgaattatcatggtgtgtatatgtgcttcaatactaaaacaaagtttgtttgaattacttccattgatgttgggcaggtag

SEQ ID NO: 46854 - DNA, 558 bp, Manihot esculenta
  Intron number 1 from transcript cassava4.1_022274m (locus cassava4.1_022274m.g) derived from phytozome v7.0 (chr-ID scaffold03741; pos 203692 to 204249 reverse strand)
tcagtcggtctttggcaaatttaggcgcgactctggtacgtaatcagaaattatatttgtttgcccaggtgtatgcatatggatttgggcgtcatttgttcatgtcttgattttcatggtatatgaattaacttgataaaaaaaaaatgtggctgaatgtggattgaaaaataaggatgcatttgtttatgttaatgcatgagtttgatttttcataaatgaactgttttttctgataataatttgtgtgaattaggacttgcttaggttaagtatgtgttatgcggatggaataatgatgtctgagtgtgagccttatgataatttccttcgaataatgctggttgctgttgatggcaagagtgacaagtcggttgtgatttgtgaaggaggtgtgttatttggatgaaaagaaggtgcaatggtgatttgcaagggttccctttctttctttcattcaagttctatggagttgtgctgtacctgtggaatattatagttggcacatttgtgttttaattgttattcattttcagagttgtttgaaggaagaaggca

SEQ ID NO: 46855 - DNA, 1013 bp, Manihot esculenta
  Intron number 3 from transcript cassava4.1_005999m (locus cassava4.1_005999m.g) derived from phytozome v7.0 (chr-ID scaffold09335; pos 67044 to 68056 reverse strand)
gtagcttctccaatatttgcttctctggctaagaggtgagcacctgagttgtgcgttacttgcctacttggtacatgaggatacaattgaacttttcataggaaatgttttaccctaaagatgatttttttttcaccctcctaattcttgagtgcttactataagaggattctcaaatagtgaggaaaattcaattggcactgtcttgtccagactgtgttatgttggagtatattaaaaacaaatgtaaatagaagaaagttagccaacaagacagtttaagtttaaattttttgctaaataacctataattttttcaagacaaattattagctattgcatgatagctttttattcaagtcatcaaaattttggttaaagaaaatctgaaagaatgcagagagatgataaacaaaccacctaaattgtcaaatagaattatatgaaataaaattcttttatttgtgaaaggaaagtatgatactttatggttcaagattagagtcaatgagagtcttaaaaaaggaaagaagaagaagaagaaatggaattaatttgtgaattggaatggttttgcacaagcttgactagagggagagagcacatagttttgtctagttaaaatcagaattggaactcaggagagtacagaatctactgttacgtctaaagtgcctattaatgtcagaaagcattgttgttatgtttgggttttaggtaccttactctaatgcatgttagattattgaaattcaaaagtgagtggtatgtttctttacagaattcatgggagattcatgaagctattttaatcttcactggcatctgatcattatacatattgtgctaatattgaagcaatgtagaaacagatattgattttcttttctttttcttgtatttataggtattttggtgtaatttgcagtttgctgcacaatttgatttataagttctcgtttgttgttgcccttgcagccataatccttttaggctaattggagttggattat

SEQ ID NO: 46856 - DNA, 514 bp, Manihot esculenta
  Intron number 1 from transcript cassava4.1_013201m (locus cassava4.1_013201m.g) derived from phytozome v7.0 (chr-ID scaffold11341; pos 480385 to 480898)
ctggtaaggtgttggatttaccttgcttcttgtccattgtttgaattgcaatggttattttattttgttgattgtatttggtgctacgagtaagaatgtaggagcattttagttttgaagatatgcatataaattatgcaaattgaatcatctgaacattaccaatacaaattatgttggtaaaattgtcaatgcaatgatttgatagagggtaataataatagctgaaaatttagaccccaagtgatacgactgatccaaattagacgtcagtatctatgcttaatggattgcagtgcaaataaactcgaacacgtgggtttctatgttcttggaagtgtaatttttcccttctactttcagctggaacatcatttgcatgtttgtcattcgattgagtggatttcatatataagatatccttcatgtatgttttcttttatagctgctggtgggattagtggtttccaatgaatttgatttgatgatcttttctagaggctaggaggagaaa

SEQ ID NO: 46857 - DNA, 1020 bp, Manihot esculenta
  Intron number 2 from transcript cassava4.1_011404m (locus cassava4.1_010815m.g) derived from phytozome v7.0 (chr-ID scaffold08059; pos 20496 to 21515 reverse strand)
ctgtttggatactagtgctttacgggcagcttctggttctgctgattttactgcgtatttatcagtccatttattttatttatttgccctgaaagattttacaattttcttctacttcttgatgaatgctcccttttccatctgttcacactttatgtgcatgcatgttatgaatgtgtttgaaacattaaacataattgggtcagtgaatgtctgacagccagaggttttcttaattgtttcttaaaatacgttctgagtcctaaaatctggcacagcttcctttttttttttttctctcttcttgatgtagcatgaagcttacaaagataacatacactcacacatgaaatgaaaactgagagaataaacgctgcaggagtttttattgattcaaagctaatggaaaatacataatttctgttgtatttgtagagttataatgttcataaacaaagtaggaatacataactactaaatcggaaattaaaacaaaacaaataacttaaagaaacctgggtaaaataggaataaagctgtcattggaaaaggaagttaaatggctcatgaataaatacaaactattttatctttttatgcaggtagatgcttctataaatgcattttcatttcatgttttgtataagcttcttatgatcctgcaaaacctgtctcatctgagtcattcttcagttactagaggcgaagcattttgtcattttatttgttactggaggcatgattagttaatagtttaatattttcaaagtgtgtatagtagatgattccatatggtactctattggttgttcctatatatatggtggatgaaattttgttttcttatagtgtaataatcatgttttatgagatcggatgtgtagtttcagaactcttgaataggtattatcaatacacttacattgatttgttactatggagcatttgtgatcaatgtttgagaatttgacatgtccaacaatgtctcctgcaggaaagtgtgggatgcattaacaggag

SEQ ID NO: 46858 - DNA, 925 bp, Manihot esculenta
  Intron number 1 from transcript cassava4.1_006273m (locus cassava4.1_003414m.g) derived from phytozome v7.0 (chr-ID scaffold01945; pos 296556 to 297480)
ggtttgtttgccctaagactaccacagaaggtgagctttttctttttctttttcttccttgtttccttcctgttttgacttgtgatttttgggaattttctttatgggtttttgcgatgtcggagtttatgttttggcttttttttgttaaattttgtggcaagcttttcttctaatatttaggaagatcaatgggaaaattaaagctgatgccatttctacgtggatatttggttttcattattggatgattttcttttgtcgtgcatttttttttcacaggttttgtgatttatgtatttttaagataaacacatgatctgattggaaatggcaggggactattaaggtataagattggatctgtatttgtcagagaaaatagtgattgatcacaaaaggttttggagcttgcttcagtgtagcatgacctgtatgtatggctgatatgattgagctgagagtgttagctcattgtttgtgcaggaacctgttaatgtaagagttcgtgtaactgtgtatcagttggatcttaagagggcttagcttcaatatctgtaactgtttgattctatttcttattaaccttgttgcttttcccaattcttgagaataaattatttgcatcttgaatcttgttgagtcataatgtttgtggaaaggaaattgagcaatagaaaaaattgctatgttcctctagattcttgaaatttcaacgttgcgtatctgtttagatttgtcaatcgtcagagcatttccaaaataaaaactgcaaagtagttttttagcctctctgctttgctttgatccaatatcttcagaattagaagatcatatgatgttgatgttgttgtgagttgtgttctaaagttgtatgtgttcctacacgttttgatgaaatcttttttaggctttcccaggtagt

SEQ ID NO: 46859 - DNA, 631 bp, Manihot esculenta
  Intron number 1 from transcript cassava4.1_025569m (locus cassava4.1_025569m.g) derived from phytozome v7.0 (chr-ID scaffold11661; pos 132443 to 133073)
cctgatctctatcctttgacgagtttgcagattgggtaagaattctttgtggtttattatcgttattagtgttaatggtagtgaattgtaatgcctaagggagtaaaatgcatctcttctattgagaaggtcgtgaattataatcaaataattaatcctcatgtttatattggtatcttctgggagtcattattcattattatattaggctcacttgataatattgtagatgttcaagtttttgctaaccttcatttgcttgtttgtaaattggttccagaatgattcaatgcgagtactaatgccactgcagcttaattgattgttggttcagggggggaagggatggaaatttgggtaggtgataggttttcggttcaaatattatacagtgcaatgtttaaggatcgaactttatttgttaattctttcatcaaggagctgtatttcaataatttttcgggaaagtagattacaaagggctaaaaacataatatttcatatgataacttttcaagcatgaacttggaatcgaggaatattgaacctaaatgcaatatatatatatatatataatgttcaattttttcttttagggatataaagtcatatctatcacgggctttcctat

SEQ ID NO: 46860 - DNA, 699 bp, Manihot esculenta
  Intron number 2 from transcript cassava4.1_011063m (locus cassava4.1_010176m.g) derived from phytozome v7.0 (chr-ID scaffold11341; pos 282091 to 282789 reverse strand)
ctcttcatttttcgctttctcattggaaaataacggtgagttttgttttaaggctttttctcttcatttttttgtctttatcatgagaatttttctttaatattagcttcatgcatttgagttggactcataaatatgaaaaagaaaaccttccttaaatttccatgaagctaacaaatgtggtctagtctgggatcagattaaaaattctggtgtgttccgttgaaggtttaagccttcttcagactctgaagaatatttcttttttcttgtttgctgtcacaaacatatcaaaattttgacatgttcaacatagttgttggtttgatttttgtacttaactttccatctactcttgaatgccacaagaagatagaacacaatcttcaaagaaccttttatttcgttaaagttcagtgtaatgttaactgtagggaaagaagggaatttggcttaagttgccactggaacgatcagagcttgttcccattgctgtaaaggtgatcctttcgattgaatctttagcataatgaataatttattttcacaggtttcacacattaccttttagccttcttgggccggattatatacagttggacactagagctgatgattctgttaactcattcactcttttcttaacccatgtatactgacatgagtaatttaatttgcaggaaggtttccagtatcacc

SEQ ID NO: 46861 - DNA, 880 bp, Manihot esculenta
  Intron number 1 from transcript cassava4.1_013135m (locus cassava4.1_013135m.g) derived from phytozome v7.0 (chr-ID scaffold10689; pos 149628 to 150507)
caaagctgccaattgctttaagcttgccaaatcctgtaactacataaagatttttttttctcgtagcttttgtgtctgttttccgagaatatttttgatcggaagtaaatgacatgcaaccgatgatgaatttaaaaaaaaaaaaaaaaaaacttttgacgatcttgcaatggcatggtggttaatggttttttcctccttttctgctttttaatggagttattgctgccttttgttatggcttatatttgaatgatatgataactggttctattctttttgcaattggaagaatgaagtttgtttacgttttcatttccagtttctttacgggtagaaagtaatttatggtagaatgtttcaatttagggtttttttttttaaagatttttttctacctcatttgcgaatcttcattggtatacataagatattttgtatgaataactgcaagtattttatgaatgggttgttgtggaagtatattgcattctcatctttggctgaagttatagctagatccttctttggtgtttgattattggtcattgcttttttttttccctcagtttaagaagtatgattctactggcggtttctgatttagtcggtggcttaatgaaaatacagtaaatgattactatgtttaatgaatctgtcaattactaaatactttcgaccatcatgccagtgcctttgcgatctgtttgctttttccagaaagcatccttgaattctatgatattgtagccttttgagtcaccatttgggtctctcactctcacatacacagctaaatccactgacttcatgctctatattttgctcttagtctgctcactttgttgtgatatttcaggggataaagctggatcaactt

SEQ ID NO: 46862 - DNA, 532 bp, Manihot esculenta
  Intron number 1 from transcript cassava4.1_010440m (locus cassava4.1_006793m.g) derived from phytozome v7.0 (chr-ID scaffold03741; pos 91441 to 91972 reverse strand)
ttctcctaccatttctgcgttttcaattccctacggttagtttcgttcaattcagtcgctcttattcatctgctgtattactggtttgattccttatgattttaatggtttcgtcttctttttttaaagagatctgtgtatgatttttgtttttctttcaattttcttggcaaccaaacaactttggagtttcctgatggatgtatttctaaatctctatatgtgaataaattagttttagctggaattgtcgaaattatttatttttttatgtttgttacttgctgttgcaaccatttgtgatcgtttatggggaaaattggctctctagattccttttttttctttttcaattagaaatttctattttggattaggaaattattgaggatctaggtttttgtttatgtgatgcaaaggatgtgctacttgctatttcaacgatgcacggtaaagtaattatatgcttttattgatttgtttcggtgaatgggtgatgcaggttgaatttgtgtagttaggggttaataag

SEQ ID NO: 46863 - DNA, 984 bp, Manihot esculenta
  Intron number 3 from transcript cassava4.1_031960m (locus cassava4.1_031960m.g) derived from phytozome v7.0 (chr-ID scaffold12202; pos 69091 to 70074)
tggccaagctgcaagctgggtacctcttcccagaggtctgcaaataacactaactctaaagttttctcctgcccaatcattcttgtatcgtggataaaaagttttgacatttacctaatgacttcaacttttgaattgcgtttattcgatgatgtgtgccttccagtctttttctgattatcctaatatcctcattttatatatgccgaaattgaatgtttaagttttaaatagaattgtatgtttaagatgatattctagtgtttaaggttttctttttcgttacctgatattcaaaaattttccagggaaagaagtgcacaaaggaaattcatatgtagtattttttccccctgtgtgtgcttggtagttggcacttgataatagatcgtgaaaattcctagtccactaggaggcatctaagctaggaaaaaaaaggaacttgcaaaatggagaggaagcataaaaaaaagatgcaggcatgccaactttaatgcttaagtcagtagccaatagagaatgtagagatttagagaggaaagagattcatctttcttagtctatttgtctattttagggtagggcctaatatctatattccttcattgtccttatatttatagttaaaattattgaccaccgtcacaagtccctccactccttagttcaacttgagcatatttctaaggaggcaagacttagacctatggggtattgagtaattcgagtatactgcctgatataaatagtgtaagatccaattttatttgattaaatgaaaccatcaaggacaaaaaattcattacttttttagactgtttattctcatgtataactagctgttaaattgatatgtttaagattgttcttattttcgcttgtgttattatattttctggaatgtttttgtttggtcattcattcttctcttttgcctcttctttcttgcccctttttttggcaaaaagattgctcgtaggagga

SEQ ID NO: 46864 - DNA, 477 bp, Manihot esculenta
  Intron number 1 from transcript cassava4.1_004678m (locus cassava4.1_004678m.g) derived from phytozome v7.0 (chr-ID scaffold02817; pos 147840 to 148316)
gggtcaaggtaactaccgaaagaaaaaggtgtttggttgataagaaagtgctagaaatggattgtcattgtttaaagaagataagatttttagtttattatccagtcgcctgtctatctagtagcttgcttttttcaattttttgttctttaaaagcaattgtaatatatactttgttgtgctgctgtttctcatcaactgaacaagttttttttgatactaccgtgtgaaatctgaacatcttttcttaattgaaatacataattaaatacttttccttcattttcccgcgtcttctcagctgccaaacaacatgcgttttccgacttcgagttttgatttatttgagcttagaaaattatagttgagaatatatgttgttcagttacatatattgtattttttgaacagtttccttcttctcaaatttctgctgtatcagaaacctgttattccgagatcaagattctcgaaatt

SEQ ID NO: 46865 - DNA, 587 bp, Manihot esculenta
  Intron number 2 from transcript cassava4.1_023514m (locus cassava4.1_023514m.g) derived from phytozome v7.0 (chr-ID scaffold02899; pos 4965 to 5551)
aaagggcgtgtacaactggtaatatgcttttgtgtccttccattttcactctttgacttgtagcagaaccttcttatcacctttgtcatgtattttttaggatattggttggctatattgattagaatggccaactttcattctattcttttgaagttatacattctagtggcctattgcctatatttcatctttgacagttacaaaataaatatagttttcctgaaattttgtctttgatacactagtttgcctattattacttccctcctgttgcagtggcagtttgtgtcgggttgcctgtccatgacgtgtagaccactttcttataagcatcaaatgtatcaatactgtgtttaatagtggaggaccatttagtcattaacgactacatttattgttggcggaattaccagcatgttgtagatgatttactatttttttagaacttcccgtagtactaacatagtctgtagattgaagttataaaatgcaggtgactgatgtaagaattggcttttatttcacatcagattgtttctctctgtacaggtccttagcaatccagaaaagacccctctccacac

SEQ ID NO: 46866 - DNA, 987 bp, Manihot esculenta
  Intron number 1 from transcript cassava4.1_017268m (locus cassava4.1_017268m.g) derived from phytozome v7.0 (chr-ID scaffold07296; pos 47005 to 47991 reverse strand)
ttaccactgggtctccaccattatcgggcccccaggttcccacatgccattcgctaccgttaccatctttctaacaagtttaacgcttttattaccgttgatttatgttcaatttcttgttttggcttattcttcttttttccatatatatattagttttgtaattctgcgtatttttatgtgcttgcttatcgaggttctatttattgctttgttcatttaactatttcttgatgattgtgatttgtctttgcttattctgttaatcttaagatcaacatatcttatattgatctttaagtacattgcctaaaaaattttctaatttaattgatattttgaatagccaaatagctataacaaattatctgtatgaaaaaattcataatagaaactgacctagtgttgcttggttgtgagagtttcaagttgaagcaattttattttaatttctttcctctattttgatatcttgttgaagaacctgatcacaggagagagagatattggtaaaagccaaaagcaaaaaatgtggaatggggaagtggagtaggcaaagtggactttttttttcttttttaaaattataatctctccaattctatttgagggtaaaagaggatatttgggtgcatctttcttgcaattgaggttttgctaatgtgcttattggcaacatcttatggatgcaattatgcacacacacacgaacatgcatgtgcatgtgttttaaagatttctcaggcctaatattgtttactgcctctttctttctcttcatttcccccccccccccaaggtttgtgtttttccctttttgttctatatatatatatacttattttttggctagtagaacaattgcctcagaaatgatacttcagaactatccataagcgatagctgattgcagaaatctaacttggcaattttttaatatttgtgtttgtaggaacaccataccaaggtggtatattttttcttgac

SEQ ID NO: 46867 - DNA, 918 bp, Manihot esculenta
  Intron number 1 from transcript cassava4.1_001610m (locus cassava4.1_001610m.g) derived from phytozome v7.0 (chr-ID scaffold03750; pos 1123200 to 1124117)
tttggaagcttacagctctctctgcatcctctcctgtgagtgagaattcatagctattttttcaattattgattttgttttgcttcgttttttacgtgatttgcatgatttgtggagttgcgaatatgtcaattgtaattttaaatggaagctttgttcttcaagttttacttgtgtttgctgtttaattgctggtttgagcttgctgttgatggttgctggggttggattagggctcgtacacttgggctttagtggtttttgaattcctgcgatttatttgcttctctcgctgtagtttgctttttcatcaatgaatgtagttttagtagcagaagtaccatcggcaattacgggtgtttactatttcattttacaacattgatgttggcgttcaattattatcgctggaactcttttccctgtagaaatgaagtgagcattttattgacatgaatgctgttttaggatatagttaggcttccatttggtattttggttgggaggccaaaaaaactgttgtttagatgttttgaagttttgatgactaagaaatttcaaatttaattgtaatctaatttctaatatcatctaacatatttaagaagctttttttctccacagtagcttcaatagctatgtcaaacagattcgtaatatatgtgtgcttctgcaatagaggacatttgacaagtggtttttactttatcaattgtgccaattcaatggtcaattctactggactatagttttttcttataaccttgaatttttcatggtcaatgttgctttagatttaaaccaattgctgtagtgcattactatttgcttttgttcacatgttatctggttcatctattctaacatgctattgctgttgtaggtggagtctatactggacaaggaaaatttcacgtt

SEQ ID NO: 46868 - DNA, 1044 bp, Manihot esculenta
  Intron number 3 from transcript cassava4.1_011650m (locus cassava4.1_011650m.g) derived from phytozome v7.0 (chr-ID scaffold06158; pos 481043 to 482086)
ctggtgataaagttgtttctttccttagacattctgtatgtgctaatcattgattcgatttatttttctttcttctcttttcaatatttaagtttttctatctctgattcgatttattggtgttctttcctctccttttcactatttaagtttttccattaacaagcaattctatttctgaagctgacattaagcttatgagatattctataataatcggagaaaaaattgtggtaagatttgtgaggaggcgtcagcaggttcatgttttctcgaattgaaaagcatatgttaaacatttcctgagaaaggcatatttaatgaactattagcaagtgtgtacacatctttatatccatgttatctgtttcctgggtggcaaatcttggaatcctcagaaactgctgaacgagggaatctatgcaatcattgtcattgatatccattgtgaaataaattgtcatttatactccaacacaacttggtccttccaaaagttaaagttatgctgaaaaaaccaagagtgggagaattccacatattaatttacttagatgccttgcttctagatcttgaaacaatgatatatacatggaaaaaatacagatattggacatgtagacttgggggcaacattaaattgatgtagttgtacaacattggtggttctttcattcctaaactgttgacaacttcaacattgatttgatcaccaccagttggttgtggtactcaaattgaatttggttttcttggtcatttttcactatctctcttggggtgctcttgttcatcatggaaccgagaatgtggtgacttgagccctcatcagtttattttactttttatgaggggaggcggagatgggggtaggattcataatttcttgggttcaccaaagcacaattgcaggaaattgatgtttgatttgttgtatatattgagctagttataaattccatccatatcagtctttcttctgttattaattatactcatgctgttacagactggaggtggactagctgagtttgcagtggctaa

SEQ ID NO: 46869 - DNA, 407 bp, Manihot esculenta
  Intron number 2 from transcript cassava4.1_033437m (locus cassava4.1_033437m.g) derived from phytozome v7.0 (chr-ID scaffold11341; pos 734410 to 734816)
ctcctgaggtaaccttttgttccagttgttctattgcttttttttttcgtgcttcttccttttctaaatcataatgttgtcaattcactgatcaatgcttgaaatttgcgtctttaatcttgtatcagcccaaaatttggtccttttgattcgtttaccagtattttagaatccgggatttgattactggggcactgagcatgttgggccgattttctttcgaatgagtttttaggtctaattcatagcttaggcctagaattttatagttcgaggtgttctgtgtattgtccaaaaaagtgcatttgttcgaatagctcaaattgtttcagtttgtggataatgcttttttgatctttacccttttaccagggttcaggtcaagctgtggcaatcagggtgacggc

SEQ ID NO: 46870 - DNA, 767 bp, Manihot esculenta
  Intron number 2 from transcript cassava4.1_016582m (locus cassava4.1_016582m.g) derived from phytozome v7.0 (chr-ID scaffold07391; pos 64229 to 64995)
aacaagccaaagagacacagtctttagtacgtataatgcatacgtgtcagagatttcattcttttcttcccatagctttttgcttatttgtatagaaaattttagacagaatatattttaaagcttattttggcatcagatgctgcttataatgctcaacctaacacactacttgctaattaaccaccctagttttttagaaattcacatataatcgcataaattttaatttaattaaggggtatttaattttgccacttaattttaatatttaatttataaatcactttaaagaaaagcaaattaataattcggtgaagttactcaagattaactttttagtagttaaattgtttgaatagaaggtgaataaaaataatttaattggttaaaatattaaaaaaaatgtaaataagtcttgtagtagtaaaaacaggataatatggatattttaaaagaaatattaaaataatataatgttttctccgtttatttaaactgtaattataaaataatttacttactttaaatagattttttttaacttctaaaaactgagtattaatttatttataatttattatttatgcacagatttaattaataaattacccaacgaataagtaagtatttaggcctaattatttatttttctcgtcaaaatattattattattattattgttattattattattattttggtgtggtttcagtttgcttaattagtttcatgaaggatatgatgataaatattatatgagtagg

SEQ ID NO: 46871 - DNA, 667 bp, Manihot esculenta
  Intron number 3 from transcript cassava4.1_000499m (locus cassava4.1_000499m.g) derived from phytozome v7.0 (chr-ID scaffold00847; pos 73389 to 74055)
attgtagcacgtttgccaatcatcgagtcacagaagtatgtaaattgtttctgttcttgaacaaatttagtattctcttatttttcatccgaggcgtgcccgttttagaaaaattagtaattcaatgcatacgtgcacatgtatgttttatgtgtcaagcagcgagtattttcttttgtgttggagatatgtaatccactggtatgggtgtcagtgaagaattctgtgtgatcacttgatgtaacaatttgatccgttggcactgatttgcccttgtgctgactgaggcatgaaatatagtctagtatgtgactgattccatttcagtaccaaattctagcttgggatgtagatatctcataaagctgttctaagaaatgaaagttgactctcaggagtcaggaaaatatttgtgagcgaggagaaagatttgagccaatattatctgcatgatatgtccagccttgggctatcttattaagagaatatgttatgaatgccccgtaaattaagagcttgttttttttaaagaaaaaaaatctttacttgcacctgataaaaatttttcactttaaatattgttggtttatgataaatgcttctgcatactgatctgttatgtaagattccagaaattgtcccattgacttgaaggaagcaatcgcaa

SEQ ID NO: 46872 - DNA, 1040 bp, Manihot esculenta
  Intron number 1 from transcript cassava4.1_026115m (locus cassava4.1_026115m.g) derived from phytozome v7.0 (chr-ID scaffold11090; pos 91438 to 92477 reverse strand)
caaattggaggtgaactgctggggaagggaccgaggtggtcaaagagagcgagagcaagacgcgggctaacgaagagatggtgagggttaaaacggcattcaaatttgaaaacgtgatgagagacccaatgagagagtctctctctctctctcctcctccttgtctgtaagctgtaacatttcttggttatatagtaatatgaggaaggaggcgagagagagagagagagacgcagttcacgaggtaagacagaagctgttcaggtttcctaaacaaagacattaaaaaaacagcctttaacctaataccgttagctagttttaccatgagaaagaggtacatgataatgcatgcaggttctttacactgatgtttgctgggtctcaactaaaaatcatggcctttgatttttatgagataaatttgatcaatttattttgatggtttttgatcaagagagaataaacaattttgtctttgcttcaacattataagattattacacgtaaaaaatttacctgtgagatatatacgtgggtgtagcatgcattattttaattttttacattattattattattattattattattatttatttttaagaaattattatttatttttaaatattactattatttactagtttgagcaatatataaatttaaattgatatttgtaacttgaagctcttaggcatatttatgttttaatcttatatataagcatatttattttgacaattaaatattaaatacaacttattataattttttgaagaaattacaatttaatcttatatatataagcttattaatttattttacatattaatcttatacatatttatgcacttcttggctagattctccgataaagaagactgagttagctttctttgaaggccttcggtcaataacttaccattatcttttgttgaaataatgtcaaccaaactttgatcctacccatgcttcattgactttgacaatggtgtgggtcagaatttcagaattaccggttgaatattttgatactt

SEQ ID NO: 46873 - DNA, 721 bp, Manihot esculenta
  Intron number 1 from transcript cassava4.1_029202m (locus cassava4.1_029202m.g) derived from phytozome v7.0 (chr-ID scaffold11170; pos 78559 to 79279)
atacgtactccatcagacataaggtaaatttcttcctttattgggtgacaattctgtgttgctgtgaatgtttcagcttgtgttccaccatttcctgcttcttcattggcttatggtttttgttctgttttttgggttcaaatgtagttagcttgtctttaatcatgtttgagtgttaggatcatcatcataatcatctgtgtatgattcttctcttgttaaatttactttggcaaacttgttgaggcaactttcttataatatgaaacgcaaacttggaaacaagcctgattcctttgcaggaaaatttgtgtggtaattgaactgagatgggattctgacgatttgatttcttggatataagagatgcaactgctcggagattgtttatatatctgatcattctgaccatttggttaattacacgtagaagtgatggagttggtgtaatcttaatggattacttacagatgatctctctgatctgatccctgcatggaccacttcctaatagatttttaaaagagttgagcttctaagacttgcattttttgaggagaaaacatgcaatgaactgcagtcaattcccatttcctgagaacggaagattttgtatttagtacttatagattaacatttagaacttactatcagcagaattccgtctatggtctggatattgtcatctgtaattcttgtgtgataatgaacagaaggagac

SEQ ID NO: 46874 - DNA, 826 bp, Manihot esculenta
  Intron number 1 from transcript cassava4.1_003227m (locus cassava4.1_003227m.g) derived from phytozome v7.0 (chr-ID scaffold00325; pos 660725 to 661550 reverse strand)
acagctcgtcaatctctcattcctgaatctgatcggtatttagtatataaacatgttgaagtgattattatctttcttgcttcaagagattgttagggatttaacggttttagacacggtattgaggccatggaatgtgaattcgcttgggtttttcttttgaataaaagcttgacttagagttgtgcgaatttttgaattttagttgaaaatatatgaagtgctattctggtcttaaaggagtattccatagggagtaactagattttcagtgcaagtatgtgcattagttgagacttcaaatctgtagtgtcaggcataagaatagtgatatttcagtgatgccgatataagataagagtgtgcactgctttctatgattactttgtttttttcattcagtattcactttgtttgcacttagttgctttcaccattaggtgcatctttattaattcatttaatggtggttacctacggagtgaaatttactttgtttaagtaaagtaatcgtagaaccttcctagaaagaatgttgctcaattttgcaaaatatttgaggaagaatatttattttaaattagttataatatggtgacagtggttcaaatgagtaacagcatacaggatatttgtaatttttttatgcaagaaaattgacatctactctacaattaaatatgagcatctttgcaaggcatgcccatttatatccctggctttttttcccttcctcattgcattttctctgacttcatgttgttgataatgagtcttccatttatgtctagacgagcatttgaacaggctggcagagctcctggcc

SEQ ID NO: 46875 - DNA, 1049 bp, Manihot esculenta
  Intron number 2 from transcript cassava4.1_014129m (locus cassava4.1_014129m.g) derived from phytozome v7.0 (chr-ID scaffold11106; pos 423779 to 424827)
ataagtttcttcaagtggtattagtttctcctcaggtatcatccatagtttaagctttaaaaggttcaaaattttttgtttcagttttaaattcagcattggttatgtttgaattgggtaactatattggttttggtgcttgagttagatttttattgttcaagttgattgattgaagcttgcttctcgctttctaatgtgaatttaatattttatattacaaatggcttgtttacaatttgataaatgttactgaattaggaaaaaaattgggggaaaaagtataatctttatgttctgtgttggtggaactaatttgaagccatttgattattgatctaagattgaatgtcataatgatttcagaatactgttgtttcccaaaaggcacacatgttaaagcccgtgtatgtgtatcattagaatgttcaagttgtttatttgagagaaatggcatggatttgagaccattagctttaggctgtagtataatcaagattctgcatgcttggttcagttgggtctatttgggaagccaattaaaggatactgtctggttggaggttaagtaaaaaccatctcagttaatattcctgctgcattttccttgtccaaaacaaccactgcattttcttccttctctgcaacacagaaggttggttggttgaatttgaattccagcatgtagttggctgtttgtttctttagtatgaaccgctcctatctttcttgccagttagtataaactgattattgaagttacttgcaattatcgtttgaatgttgtggagtaaattttaacttttatctgtgctgaaagtttggggaaattaaactatttaaaattaggtatttatggataaatgaaatagtcatgcatcatacatgatattaacatgttgtaactacacacactcacacgctcacacactcgcatctctatgtgttctttgggcctgcagactgcccctgtatgccaaaccttattctgagaaatatttattttgtccttggcagattccaggaaacacaggttgcattgccagaac

SEQ ID NO: 46876 - DNA, 851 bp, Manihot esculenta
  Intron number 1 from transcript cassava4.1_004165m (locus cassava4.1_004165m.g) derived from phytozome v7.0 (chr-ID scaffold06701; pos 421229 to 422079)
acatcactgcttctcctcttggtgttcctcagcaggttatatcttattctccttctctctgcttgcttcatttctgtctttgtttgtttgtttgtttgcttttgtttgtatgggtttccttggagtatgtcagtgtatgaacatgaattttgctttcgtcctattgaaaatgctgctgggtgagcacattttttttacgtagtctccgtttctcataaggaattcccgagtaatagcctgttgatgtttcctgagcattgtgggtttttctgtaatcgaaggatattaaagccgaacttgttaacacatggtttctctttacgtatttgtagcgctaagttggatttgggtattgctgattagcatcaaatgatgctgttattgtcttattgacaatttcctgcacgagtcctgcgttttcttcctcatagttgatagacttgcacgttttggttcggtatttgggtgttttgaatattgcagcgacgagaagcactggggatttttgagagattacattacatttttgtagcttcatcttcgtttatacacggtttttattttccaagtttttttttttgttctgatagaggaattatggatctcttcatcgtattagttttgccagtatagtcagattgttcaaatgtgatatgattatgcattagtgggttacatgaatatatgttttctcgtctttttatttattttctccctgcaatattcaaagggtttgttttgctttagcagaaactgatggtgtgttacaggctgtagtttcaacaattttacttctttgtttacttatgattgcaggttatagcggttaacggaaagtttcccggtcctgt

SEQ ID NO: 46877 - DNA, 892 bp, Manihot esculenta
  Intron number 3 from transcript cassava4.1_012734m (locus cassava4.1_012734m.g) derived from phytozome v7.0 (chr-ID scaffold07478; pos 882516 to 883407 reverse strand)
ttaccttcatcagctcatgtgagtagtatgacttaatttggcttttcttttttggttaatgttaaggttctatgctgtttctcacatggttgcgtcctgtggtcttcactaatatcttttcttcaccatgttgccaacacttctgaatatgaatagagctttgcattataacccataatctaaataaataaggatacactcaaggagatataattggcttcttcttcttcctccacttacacaccaaaaaggaaaaaaaaaaaaaaaggaaaacctgaatacaataaaaattagagcatacagcaagatcatgtgttaatgtgttgctaagagtttattgggctcttcatgcacttgacactctgcattttgatctatttgtgtcatgatttcaggctcctttccatagaattttgatgaatgtatttatagacatgctatattaaattaaattttttgacttgcctgaattgaaaagaaaaggaagtaaacataagcatttggaatttagaatgtcttttcatcatagcatctttcatgaagagttgcaaccttctgaagaattatagttttctgggatgatcatttaagaactgcaacttaagaaccagtgacagcaatacgtggacacaaatacttgaaataaatgaaaactcctagtttaacagattagctttctctttatatataagttcatatactaacatatatttaaatttatctgagtcttatttcttgtagtctaaatgctcatatttctaaagttctgctggtttgagctttgaatataccataggtattttggaagttttttgctttaaaatttctatttttcttgattctgccttgttgtcaatatcaatgttccaatctaaatttatctaggtattgg

SEQ ID NO: 46878 - DNA, 1025 bp, Manihot esculenta
  Intron number 1 from transcript cassava4.1_012734m (locus cassava4.1_012734m.g) derived from phytozome v7.0 (chr-ID scaffold07478; pos 883802 to 884826 reverse strand)
attctctacatcaccactatcttctgagttagaggtaacccttctgtaatttgctctctatctacctttttgcttgaaattactgtttttcttttcttttggatgatttagactagaatcacacatgagcagattctctatggaattcaaattaagtctaatttattgggatctaagtactgtgttcattactaaaataattctcatgtctttaaggaacaaatcaattataaaattatctcacccacaagcttattcaaattgaatatctgcctccattgttgatcgtagtagtggcaagagaaggaacttgaatacccattagctgtctgtaaactttcatgttaaatattcaagttaatacaacttacgagtttaagaaataaagccaaacttttgattacgggttttggaattttttttcctccgattcttcacttgcgtattatgatgtgatatttaaaagctatcatatcaacgtgcaagaatgaaattgcagaactaaagtctcatgctgtcaattgtccgcttttatcttatcatttgtgataaaatcgcctctggccatttgggactatatatatttaaattccaattctatgaagtttgagatcattgcttttcaacaaatgtttttttttttgtggatttccttgggtgtgtccaaaatatgtccaagctgaatggggctaatatgtccttttgaaggccttaactttaatgagccattagcgacttgcagatattctatggttgaacgatcaaagatgataatgatcttctttttctttattgttatttattctgtaaaaggcacataactatgctcctttaatctcatttactaggttttgagaagaatgattgactactatgtctatctctgttgaaatgaaatgaattgttatataatgccttctttatatgccatggtgcattttattcttttcatgcatattcctctaattgttgcttgatatattattgatgtattacagagtgttggattcattgggctgggaaat

SEQ ID NO: 46879 - DNA, 359 bp, Manihot esculenta
  Intron number 1 from transcript cassava4.1_004385m (locus cassava4.1_004385m.g) derived from phytozome v7.0 (chr-ID scaffold03245; pos 224133 to 224491 reverse strand)
cttcgttgggcttctgcttctgggtactattaaaggttggtgtatcgatttaatccttaatttgggtttgttttgtttcttttttttccttctgctaattgttcctttctactcaataaggccgcgtttgctcataaacaagttgaatgtaattaggaccttactcaacctatcatgttcatattctaaatatgaatgttaatgctaaatgacattagttttaatgttgtgtactttcatagaagaagagtatgccttttggaatcccaatcagtaaatgcatttgattggaatatagtctaatttgaacttattgggtgccaaaatttttgtgcaggtatcattttctgtccgttggt

SEQ ID NO: 46880 - DNA, 399 bp, Manihot esculenta
  Intron number 2 from transcript cassava4.1_027680m (locus cassava4.1_027680m.g) derived from phytozome v7.0 (chr-ID scaffold02854; pos 22785 to 23183 reverse strand)
catctggaggggtaagaagactggtttaaactattatacatgaacatatacatattggtgcagtattggagtttgattaagcctaaatacttgggattgtattcattgtagagtttggaaatttagaatggtataggtctaaaatttattatttaataattctattaagtttaatattattacgtttctaagtttgtttttatgaagaatttttcattagtattgtttaggatttctagtcctaatgtaattagggtccaaaactctataatataggacctaggtttctacatatttagttttgagtgtaataatttgcttttgtttttttcccctcatcttcttttggtgggttacttatggcaatgatcccactcagcttgcagcaagcttgagaaa

SEQ ID NO: 46881 - DNA, 493 bp, Manihot esculenta
  Intron number 1 from transcript cassava4.1_030366m (locus cassava4.1_030366m.g) derived from phytozome v7.0 (chr-ID scaffold03651; pos 270655 to 271147 reverse strand)
agggagagggtaaaggtaagaaagggcaaaagagaaaaggagaataatggtagtttttgaattatattttactttcttttttttttattaaacttaaagcattgacttaaagagaattttttgatagttagattttgaatttgatagaattaaactttaaagattgaagtgttaaattagaaaatagaggaaaaaacagggatgaaaaagtaatttaatttttctaaaaatttattcgaatcctttctcgtaaaataatccttccaaacaggctatgagagtgagcaaaagttagaaatggtaaactgtgtcgtttctgcctgcgaaatcaagctgcgtatagattttcttcgaagtcgagtctccatctcgaaactcttagatccatagaaccctgtcagcttcagggtttatcatctcctaatttctcaatttgattcgcatctgattcgatcgagccactgaccaaaccaattgctttgcttttgctcaa

SEQ ID NO: 46882 - DNA, 741 bp, Manihot esculenta
  Intron number 1 from transcript cassava4.1_005480m (locus cassava4.1_005480m.g) derived from phytozome v7.0 (chr-ID scaffold07087; pos 316866 to 317606 reverse strand)
caaagcttcctccgccgagccgccctcttccccaggtctctctctctctctctctctctgtatatatctagctggagagcaccatagacttgagtaattctacttactcgcaatatttcctttgatttcctcattttcagggcatgtcattttggtccaaattgcagtttttattgagtgtatttgttcttgctgattgaagcccttttgaagattttgcatgggtttgattcggttagaaataaaccatttctggaatgtggtgattatataacatggcgaaatttatgactaaattatagaataagcggttgctgttggtaaagtaaattactgactatgtactgatcatctaaaatacaacgattgaattaccctccatttacgatgaaatgtcatagttattttcttgtagtgataagtatttagcttttggtttatattggttcaggtttgttcactggacattggctagactatctaggcatttagtgttgatacactgtatttaaactatcaacattctgaagattagactgatttgtttccaattattttattttggctgtctcttgctttggaagcgattaaacaattgattatgtatatataataataggaaatgaaacattgaggttcttcgcttgtagttgatgctcctcttgtttgcctttatgacaattggtttaaagctgttaggtgctgattttttgtttattcttgcagccaaaggtgttgaga

SEQ ID NO: 46883 - DNA, 692 bp, Manihot esculenta
  Intron number 1 from transcript cassava4.1_031089m (locus cassava4.1_031089m.g) derived from phytozome v7.0 (chr-ID scaffold06683; pos 526190 to 526881 reverse strand)
ttgcctccccttcccaccgtctttctggagtcgaggttgattttctccacatttatttctgctggatttattaaatatcctctcagttatgcttcgtaaactgtgcgattttgttaatgtagaaatcaaatggatgtgacaataagagatgtttatttgaatctgttttattattattacaccataatccaattttcataatattttttgacatttgaatttaagtgaaaataatataaattttatttttgaatgagaatattgaaatatttgttatttaattatgtgtatatttcaattaattttgtacgaatttcataaaatatttaagaagtggagcttatattaattacatcctccaatttttttaagaaaatcaaacttgttatttatgtttacgtaacacacttactccgaattcaagcagggtaatgggtttcaaccaatgtgtttggttgcgcgtgcatgaggtttaactgtgctctgttcctggatattttatattccctggtagagaatgaagaaattcgagcacagctattgctagagaaatttttatttacttgacaaattgctagtttctatggcttcttctgtatgtggtatttttaagtttactccttggtgttgataccaataaagtttccttttaaataggcaatatcaaaagtaatacgcagctggacttcaaa

SEQ ID NO: 46884 - DNA, 753 bp, Manihot esculenta
  Intron number 4 from transcript cassava4.1_032607m (locus cassava4.1_032607m.g) derived from phytozome v7.0 (chr-ID scaffold03968; pos 11039 to 11791 reverse strand)
gctagaaatcaggcagggagaagttcactattttgctaacaaatgaccttttttattattatattgacccaataaaccactttcttccctcattttctaatcaactgaggcaaatatatacatatgttatggcagggtctatatataggtggagtagaaactagtcagatggggtttgctggaccaataaactcaggtttgtttatcagaatggtggcaccagcatacacttgtttttatcttgcttccaatgttaatctgtctaattgaagtgcacgtctctcttactctgtctgtggtaggtcagtaattgacgtttaggaacacattatgggataccccatgcaataagtttttaaataaagtccataaatgttttgtgtgattatattttatcactttgtcttaactcttgatatagaagagggctactataaaaagaaaatgggagtagctgatcaggagaaaagctcaaacttgaagttactgtttttattttaaagtttgaatgcatcttttctgaaattatgtcaaaaagaatgcacttcaattggcaatacaggcaaaatgttgtccaacagctgtaagtatgagccacagataaatgcattatctgtgtatgctcattggtgctccatgtgagaattaaaattcatgtttcttgaagtttgatgtgccattgttctaagtttcttctcttaacttatcagtgctctattcttatatgtttctctattctattataagcccaca

SEQ ID NO: 46885 - DNA, 971 bp, Manihot esculenta
  Intron number 1 from transcript cassava4.1_022193m (locus cassava4.1_022193m.g) derived from phytozome v7.0 (chr-ID scaffold01697; pos 5103 to 6073)
aggttcggcggccgagcctttgaaacttgcggaagcctaacttgcccccctaaactatccaatgttcggcggccgaacctggaattgcctccttggtctttttcattcaaaactcaatttcttttcttgcttaaaacaataaaatacattaaaacatttcatgaaaatatggttttacccttctagagttttccgacatccgagattccaccggacggtaggaattccgataccggagtctagccgagtattacatcattaatcatgtaataattaatgagcaggtaaagaggcacttgatattcgctgggttcttatactcgggccgtggttgaacccatgttaaaagggtaagtcataatccatctaagtccaatatgcaggctggaccactagcacacaactcaagtttctttcagacaaaccggaccaaataaagaacaagcccacataaaggaaatccaactcattagaggtgatggatatgcgaagcaacaaactctaaacgactggaatcgtatttgcgtgacgctaaaaaatattaaataatcgtttcacgatctaatacgatttcttatattataaaaattaaattgcgcgagtaagatggattcttatattataaaaatttaagtaataatttgcattagatacattacactacaaatttaaaaatggaaaagagagaagtcataccagctagatgactcttgaacgactttcctttattcagaagtagctttgctttttgcagaatttgagggaagaaaattacactataaaatttgtgatctcaccgctcatctttcaagtattgaaaggtcaaacgccagcgagtaatgacacagcgcaagtgtaagacatacaatacattcacatggacggaaatatttccttctactctatttctctgcttttcctttttcttcccatcctcttcgttgttcactccatcagtttcaatttctgca

SEQ ID NO: 46886 - DNA, 1051 bp, Manihot esculenta; identical to SEQ ID NO: 46392
  Intron number 1 from transcript cassava4.1_014092m (locus cassava4.1_013801m.g) derived from phytozome v7.0 (chr-ID scaffold04043; pos 791614 to 792664)

SEQ ID NO: 46887 - DNA, 544 bp, Manihot esculenta
  Intron number 1 from transcript cassava4.1_007531m (locus cassava4.1_007531m.g) derived from phytozome v7.0 (chr-ID scaffold02688; pos 174417 to 174960)
attccattggcttggactgtactcttgattacgaggtattcttagtttttctttttcccttcacttaatctcaaatttttatatgttattgttcagatggagttgaatgaatggggaatttatgatttcatgttgaatccttagtttttctttttttcctcttcacttcacagtctgaataatcctgtgtgttgtagttctgatggggtttaccgtatgtccactttatgatgtcatggttaaaccatttagattttatcagacaaaagggaaccccccatagaagatttctgtttccttttatttgtgcgtttacttatgttttcttgttgcttccctatttgaaaagggttggtttgctatgcaatttgtatccatgtgagaatttagaacaaatgattggtgattttgagaagcatgaattcaaagtataatgcattttcgttcactatacaacttaataactctctggttttctcgcttcagaacttatgcttctgattctgatgatcacttatttgaatgcaggaagaggaagatcaat

SEQ ID NO: 46888 - DNA, 228 bp, Manihot esculenta
  Intron number 2 from transcript cassava4.1_025753m (locus cassava4.1_025753m.g) derived from phytozome v7.0 (chr-ID scaffold11252; pos 358551 to 358778)
ggagataagatattgcaaattgaaggaattttcaggtaaaaacctttttgcttgttcattggccagaaaaccatcatgagaaccactttacttgctaaacatattatttgagtttctaaatggttgtacattattcaattccaaaatatgcatcttttgatgctagtgttcttttcattatttgttgtcacagtggaactttgagttacattttcaacaacttcataa

SEQ ID NO: 46889 - DNA, 745 bp, Manihot esculenta
  Intron number 1 from transcript cassava4.1_028342m (locus cassava4.1_028342m.g) derived from phytozome v7.0 (chr-ID scaffold02950; pos 100431 to 101175 reverse strand)
agtatcagaagttttggtaagtccatgcacttccatgcacgtagggaaatggataaaaaagctgcttcattttgcagtcttatacttcattagagctttttcggaaaaaaggacatgaatctgatctacaataacatgaatatggtcaagctgaaccacgcatctttgattagttgcagacataaatattttttggcatcttcaaaatgaaaatgcattacccttttgatctaagggtattaatcatatatatatttagcaaaaatctatttgctaaatatatatatataatattagaaggttgacatattaaaagagtaacgcatacatagtgcttaggcatccaaaatcctaagttcaaatagttttttattttttatatatattatccgatatttaaaacccactaactcgattaatctgtattggtgagcatagtgttttctttcaaattttaaatatattttatattcagactcgaatttgaaaactcttctttaaaaaaagaaaaaactcatgccatttcatcttacctcttgatgattgcaagtagtttactttaattagcaatcttttcaataaattcagcaactctaatcaagttaattctagaacttgaatgttctcaccagctataagttttctggcacatgcataactctttaaacaaacaaaactattggtaggaagctaaagaaattaagctaacattgactttccttacgaatatgtttgcagtgacata

SEQ ID NO: 46890 - DNA, 886 bp, Manihot esculenta
  Intron number 1 from transcript cassava4.1_018198m (locus cassava4.1_018198m.g) derived from phytozome v7.0 (chr-ID scaffold09576; pos 41635 to 42520)
tattttcttggtatcggttgcctatcttgcagctggtatgtatttttttttaaaggttttctttgctcaatgatattctgttagaagttgtccatgaagctgatagaatgagaatagtagaaatttgggttttgtgattagcttttgtttaccttcttgaacttgaagataatctaaattagaaagtgataaatgttcttaagggttttgcttctgttacctccccattattgataaattaacgattaccaattacattcgttatccttgatgctggtaacttgttttgcaaattggtatattgaatacagaaatggcttattctagacaaccttttcatttgtcgtggcactcacatgttgttttaaaaaatgtattaagtgttagatagaaaattatagttcctgttgttgccttatatgatatcaaggtatttcttttaaaaaatgaagacgtgttggtgacccaagcaatagttgcaaaaggggaaccctcttgcctgttttagatctcaatcttttatatgtttttatgggctatggtttcaataatttaataacggctcagcttggagttattgccaaaaaaactgaagagcaaagtataaatgcatttctttttgttgaaggaagaaagggagggagtgtcagtatcaattgaaaaattgctgttaggtcatcccagtaatttgaacgctcatgttctgtaagtggagggtactttagtttgaatctgtctgtgaatgcccatttcgtggcatttggggttgaagtattgtgagcctaagtttgctgttagttggtttggtgttgtctactattcagtacctcatggttctatacctgatgcaggtataattgttgcatactctgctccagcaagacat

SEQ ID NO: 46891 - DNA, 576 bp, Manihot esculenta
  Intron number 1 from transcript cassava4.1_033783m (locus cassava4.1_033783m.g) derived from phytozome v7.0 (chr-ID scaffold10689; pos 658377 to 658952 reverse strand)
gacccatcattcctcaggtcagctcacccgttctctccttttgtagtttcaatttatatgcatatatggttaatttgaaggaaatgatcaaatgggtttatatcaaatttctcatttgtgcttagaattatgatataaatcaaatgagcttttgattaatttaaaggaatgatcaaatgggtttatatcaaatttcccatttgtgcttagaattctgatattttttatataaatcaaatgagcttttggttaatttacaggaatgctcaaatgggtttatatctaacttctcctttgtgcttagaattctgattttttttatataaagcaaatgagcttttggttaatttacaggaatggtcaaatgggtttgtatccgttgtaatttctgctttggattattattattattatgatataaagcaaaaccttgtgctggttttgctgatgcattgaacaagctttatcttcaacatttatgtttcgtgtagaaattgctttgaacaatcttgttatgggagactctgcaatatcatgtttttctcttgacaaactatatatcgttccaggtacacc

SEQ ID NO: 46892 - DNA, 866 bp, Manihot esculenta
  Intron number 2 from transcript cassava4.1_000266m (locus cassava4.1_000266m.g) derived from phytozome v7.0 (chr-ID scaffold12211; pos 37973 to 38838)
gatccggcatcccaggtaatttccacatgctgattattaatggtgtttaatttggaattttgatgattgttggttgtgagaatggtagagttacttctctcagaacttgtagaacaacaacaatataataacagctaagttttaatctcgaactagttagagtcggctatatgtatgaatgaaaaggaaattgttttgatttccattctttaaactttagaaaatgggattattttaatttcttgagctgcaattttcatccatcgtatacaaggtacgaaaaccagaaaatgaatcgattaggagtttgaggggaaaaaaaagaattaggatgctttaaaagttgataatgggagcagaaacactaagtgatgaattttatcatcccatattgatcagcatagacatctaaaaagattttgtggacctgactgttgttgtctcattgaactaaatagtttcatggaggaaagttttgcttcagttggaaatgttctgcgttctctatgggaagattgttgttcaagttaattttgaaatttgctttgtgaagtggacgtctagcacatcatttaggatgtgaattatgatgttgatgaatgcatcactcaattttctggtcttgtccgtttttgctcgcccctatgccataaatatcattcatgtggatgcctccactttacttgagaaacataggagtaaagtttgctcctatggaccttcttatccatgcctaagaactcttagttcataaagtggcagtgtcgtagagatcgggtgcacatttgtatactagttgtttggaatgattaagaggttctaacacaatcttctcttgctgcagctcctaggaaaattcaaccttg

SEQ ID NO: 46893 - DNA, 645 bp, Manihot esculenta
  Intron number 1 from transcript cassava4.1_022768m (locus cassava4.1_022768m.g) derived from phytozome v7.0 (chr-ID scaffold07520; pos 2862920 to 2863564 reverse strand)
tcctggttctggccgcaaaaaccaacttactcttggtatgtcagtttgattgatcaattgcttgttacagtatgattttactatcggctgtgttcctcgaaggttgaagccgaggattttgattttgttatttattttgttgggtttgctggattctactgtgttcattgctcaaatgacaaatttgccccttattacatcaatcctctccccgtcacccccccccccccccctccttttttctttatatatatatatatatattatctatgttacttttcttgactgcttttaaagaaaggatttgtttttgaaaatgggaaggaaaacaattccttgttttctgctgaattattgttttaatagaaatataatttataattggaattatatattaacaaaactgagaaggccaattaaaccagttttgaccgagtggttagaggggacttgctatttctttttccttttacattttaatgtgatgcagaagtaatagttcatattaggtcatgtacccatgattaaacaaacaagcacaaaatggaatttaatttaacgttttctcatatattcgccttctagtgatgatttgttcttccttcaaatattgatttccaggatcaggagttggatttgcaccac

SEQ ID NO: 46894 - DNA, 966 bp, Manihot esculenta
  Intron number 2 from transcript cassava4.1_012669m (locus cassava4.1_012669m.g) derived from phytozome v7.0 (chr-ID scaffold06039; pos 116243 to 117208)
cgccaccaaaagacaggtgcccagaggagctgcaagtaagttgctttttaatatatcatctatttgtctcactcaggaacatgccgcctttggtgttttgatgcatccccttagtgtaattttgtttctaaagtagttatgggtgtatttcgtatatttgttgcaatgactattctcagaaactgatgaaattcatgagaagagaaactgaattctcattgattgcaaatgaagtacacgagcttagtatttatatacaaactgagctggataaaattacagttatttagcttgacaactttcaacagaaaaactactttctaatagattttggcgtcacatgctttatagtctaacagaaactgccttgattgagcaatgcagtgtttcttgaattgtgaaatctgcttatctgatttagctgtttgccaaaccaatgagatcgactgatgttgctaggccacaatattaaactaggctttcttttatttaagatgttttatgtagttcatttgtctgatttctgcttatatatgaataatgtcatttagtcattaacaatctgtttggatggggtgggggaaggataatcaatggaagggtaaggaggggaaaggataaggggttacaattagaaaaaacgcatgtttgaggagtgaattaatggaatggtaaggaagggtaatgtatattgagatttgagaaattatctcacctctccctcttttacaccttaataaattgacatttgagaggtaagggaggatacgcttaccctccattagatcccctctttccaataagagtacataaattattcaccactccttgcttttattactcctcctccacctccaaccaaacatggtataattagcacattttacagcctttgatgtatggtctccttttcctgttatgtcacttgcagaggaaaattgacaaatttcttgctttgaggaagat

SEQ ID NO: 46895 - DNA, 688 bp, Manihot esculenta
  Intron number 4 from transcript cassava4.1_008843m (locus cassava4.1_008843m.g) derived from phytozome v7.0 (chr-ID scaffold04457; pos 109279 to 109966 reverse strand)
tttacttgcagaacaaaagctgtgatattaaacaggttaaagagttcactcaagggaattaaattcttttttcccaaagtcatagcatctcatcattaataaagtggggatttgattaagcattcatttactttcacttttgacttttgagtaaaggaggaaaagttttcttatcttcggtaggggtatttttgttattgtttgaatgaaatgcctcaatttttgtggcaatcacaaaaatgtttgaggtgcatctgaccaagttgagaataagaactaacaagagttaggtattgtataagcagtacatatatcacatttctatatatttttcaaggtagattagactaaattattaagatcagtagtaattgttacgtgtgaaattttcaccttaattaaagaacctacaaattcaatggaagatgctctaggcctctactagctcacacatgaaaatgtataatcaaccttctcttcgtccataattttatttattatccaatgttttctttttagtcaggaagaaacaactttttagcacggtacaatctttttattgatttcttagattctgtatccaaaaataaaatggaagaatatgatgcctcaaaaaaaaaatggatttattacttactgatgaagtggcacagtcctcagaatccaactgggaaagttttcactaaag

SEQ ID NO: 46896 - DNA, 685 bp, Manihot esculenta
  Intron number 1 from transcript cassava4.1_006548m (locus cassava4.1_006548m.g) derived from phytozome v7.0 (chr-ID scaffold06683; pos 238416 to 239100)
gccatttttgcaagtttgttcttgatttcttataggtgcgttgctccatagttttggttatttaccctttttctctcttaagattctaatataaaaaatgttatttttcgtgaatttgattggcatgtcgagctcgaacttattctctttctatttctgttagattgacttgagctgatggcaagttttgatagcttaccaataacttgttgaagatttttactagctatagtttctctggtttccaatgattgcttagagaaatgtagtagagttgtaagagttggttatcctacaactggaattaatatttgcatgtggcatataaaacgcccagttatgggattgcagggacacttggatgcttaggaccttgtcttactattgtttatttgtgaattgccttcaactgcattcagttttttgttttagggttgacttgaccatttctttaatatgaaattctcctcaattctatcagctaccaagtaaattgagtttttaactttcattttggattggcaactgcttgtaaatccatgctttaatttgtttattcagtttttatgaacaccctacttatcattctcacatgagataaaaacaataagtatttagcagcctttgtactttggttagaatcattgtatgaatggtttatctttcaggaaaaatttcatccacc

SEQ ID NO: 46897 - DNA, 559 bp, Manihot esculenta
  Intron number 1 from transcript cassava4.1_017605m (locus cassava4.1_017605m.g) derived from phytozome v7.0 (chr-ID scaffold06749; pos 25528 to 26086 reverse strand)
ggtgagactatggtactctcattttgggattttgtgtcccattttggctttattttctaattttcccattttgagttgcattgaagttaattttgagaaagaggttatatatctatatatatttctcttttctttggcgaaatgattgaccctgttcaaccaaacaattgcttactttcgcctatggtgaaagttggtttatttgaaaatctagcgatttcctaattatggcaacataagcttaagttatatatataccaaataaacaaaactgaagtagaatagggttgatatgtcagtactttgtttggtattcttattcatgtttagatggtctatgaaagagagaatgaaggatgaaagactcatgaagaagatcaaataagttctttttgtcatttaaaatatggtaattatatggcctttaatatggtaatcatatttgcttctcaactatacagtctattttatatcctattgcttttcctcagcggctcaggtaatttgatgtgtttgtttttgtattatgatgtttgtaggaggtgggcttggtttgttc

SEQ ID NO: 46898 - DNA, 806 bp, Manihot esculenta
  Intron number 1 from transcript cassava4.1_034375m (locus cassava4.1_034375m.g) derived from phytozome v7.0 (chr-ID scaffold02658; pos 515659 to 516464 reverse strand)
agcttgtcgaccctcctaataactcacctgatcaggtttacccatcttacgttttgtcgtatcatatttacttcgtcgaataaggggggattttgggggttgatagggtttacaatttttgaattttttgagattttttttctttttcttttttgtggatttacttgcttgatggttgtatttttgcttacctgcttgccttttgcttttgttgggttttatcgttctttcctctgtctttctttctctttctcttctttccttttgattaataattgagatttgtagttgattaactgtgaatgcagaatcaatctgttattctgagtgcttatttttctactttcttcttggttctataactttcatgcttgctttatttgtaattaccaactgtggtgcctatggtccatgatcagacttgttatatcttttcttaggttcagttaaaaagtttctacttctggggtcaagtggtgttcattttcctaaatgcatttactggatttcatgaatgagttatgttctttattagtggatttaatcaattttaattattaggggaatgttgctataagacagatctgtttggcctgtgtatatggttgaacatcaattaacatgatatgaatgatttcactgcttggtttgttttttgtggaatttagttgaatcggattttgcttatgatggtagatatctaaattgattttcatatgtatgatagctttgagcattgttttcataagttgttgatcccttgctctgatctttccagcaggcaaatacaagaccctcaaggacac

SEQ ID NO: 46899 - DNA, 575 bp, Manihot esculenta
  Intron number 4 from transcript cassava4.1_014423m (locus cassava4.1_014423m.g) derived from phytozome v7.0 (chr-ID scaffold03750; pos 585391 to 585965)
gtgggcctgaggtcccattccaccctggaagagaggtagtattttaatctaatggctgcctttcaattgttgatatttcgatttttgctcctttggaccttttccccatttttaaattgtaatttatggttgagtgtcgatgttgaaaatttgtttgaatttagaacagtattgaggaagattactgaagtgattgtttttttaaaaaaattctcattactattctaaattcactccactaattgaaaatcactgcagtaattaaactaaattgggatattcaatttgttggggaaagaaagggcttgatgctcagtttctccctgaatttattggcatattcaatttagcacattttttttttttatttttgtctaaattaactccgaagttttaatttaaactgaatttagtccaaataattaagaaattgagtttcagcaagttatttctctctcactcttctctcctttctgtgagtattggcgacggattttatttttccgccggtactaaacagttattctcttattattccaggacaagcctgagccacctccagaaggtcgtctgcc

SEQ ID NO: 46900 - DNA, 871 bp, Manihot esculenta
  Intron number 1 from transcript cassava4.1_000418m (locus cassava4.1_000420m.g) derived from phytozome v7.0 (chr-ID scaffold02658; pos 538368 to 539238 reverse strand)
tcttttgtgccatttctcgccagatttaaccgtaagttggtatatattttgttcttaatctatgacttctgtcttcattttctgtgcatttgtgtttatattttcctttactttgttgctgaaaggagctgcagtttttggattttttttttaatgtgctagactctatgtttatgaagttaatagatactgcgagtgttggagaggtcaataaaagaaaggatttagaggcataactgattagctttctgttttatgtgcttaattttttgagaatgggagttgataacaacatatttcttatataattttaaatgtacagcaaaggtttatatcttttaatcaatcaatggtaaatatgaatatgatatgttgaaatttactgaagtccagtcagtttcatcagatctattaagagatttcttaattttgctttagggccttcactgtctgattggaagttattcttggaaatctggtgatgataccttcctttttgggtttttgaaatttcagagggcgtattgggtaatgatagatataacttgggatcgacaaagataagcagatgaaatcatgtttagtatttggtgcgccatggtttgtcattctgtaaactgatatccaattgtcgaaactttcaaaaatttcaactcttaaatatgtattaaaagttggtggtgtaattattaatatgtttatgtttgacgctcgacttttagtggtttcctatttagttgtctagttttcctcatgctagttcttggcaatacttctccctcaaatgcagctgtggatgatttcgtactaacacgcacttttttttttctcctcagttttattaatctctacctttggtggttttctggcc

SEQ ID NO: 46901 - DNA, 443 bp, Manihot esculenta
  Intron number 4 from transcript cassava4.1_026002m (locus cassava4.1_026002m.g) derived from phytozome v7.0 (chr-ID scaffold11069; pos 379495 to 379937 reverse strand)
aattctggtaatttatttcatatattcttttcttttgataagaggaatatgaaaaataatggggtagacttcagcatattaccatctcattgttcctttttttttttttaaatcactttcaaaatgatatttaaatgtttgttgtcatgaaaaagagtaatatgttctgtcataatatacaactttttttcttttcttctttggaaaaaaaaaaaaagattttggataaggttcagcgttttagcttttacttttctgttggaatattatggactctccctttctttatttttctctccccaccttgaggacttgccccacgtcgtttttctttttcaagttctttgattcctttatttaaatcaatataataaagaactaattcatcatcactatgttactatgtatttcaggtcatttgtccttgtgtggcacagaacaag

SEQ ID NO: 46902 - DNA, 856 bp, Manihot esculenta
  Intron number 1 from transcript cassava4.1_000190m (locus cassava4.1_000190m.g) derived from phytozome v7.0 (chr-ID scaffold07046; pos 27710 to 28565 reverse strand)
gatccagcactggggccactaagtgagaggacaacgtatgcttttactacatttgtacatgaaaaatgtacttatgcatctgtggcttgatattcaaacttttgaagacaatgaatcatgtcgaaatttgtttgtgcaaactagaacttatgacttattccaatgttttatgcctgttaaaattggtggattgaaattgttattcagtgctagttacttattgtaaatactggttgattgttgtttcaattaaccagagtatgcgcctttcctttgatttttaaaatttttctgtggtgtacagttctgcatatgaattttcaggaccaacaatggtaaaaccttcccaggctacagccctgtgtcattccaatcggattttttttttcttgttatatgtgtgggctgaaagagtctgatggacttatattattcaactttgaattctttaagtgggttggcatttcatggaccaaactcttaaagcattgttaaaaaaatgtgtgctcttggtcattttctttaaaaaattctgatagttctattttctacatccatgaacctttctcaactcttggatctatccaagctatgcccctttcttctgtgactttttttttcccttctttttggttggttaagtctgcttttaaagtgtataacttgagtgcaattacttctgttagtatcacattaccaggtatgaatgcagcaagtaatttattgtggtgataattgatattaattggtcaagttagcagtatcaatagttattttgcatatatatatatataatttattttgaactacataaaattgatctagttggttcttcattttattgcagttgcaaggt

SEQ ID NO: 46903 - DNA, 989 bp, Manihot esculenta
  Intron number 1 from transcript cassava4.1_007743m (locus cassava4.1_007743m.g) derived from phytozome v7.0 (chr-ID scaffold04043; pos 921916 to 922904 reverse strand)
actcggctcaccttcacgcttctccgatatctcgggtatctttccttattgaatttatataagggaattatgatatgtgtgcacttcactattttcctacttcttctggattttacagttgatgtaccatttcttatttaattatgtattcgaagtgttctatgagattgactgacaaaaacaaaaggggaaaacagttatacagttcagaatacctagttgattatatctgaagtctgattgtttcatgggagaatagacgaaaatatcattaaaaagaaggtttctgctctttcttttctgcagaaatggtattcgatcaagtacttgcaaaacacaaacgttttcttttattctgcatttatcaggaaactcaaagatggaagctttgtggttttagctttgattaaacaataaacctgtgaaattcattcatataacttcttttttaacatcattcatgtaagtattcaaacctctcaattatgcagtgattgctgcagagcaataattcaagaatggtattgtcttcttcttgtttagttggtgcaatgtttagttcctgggcaagagtggaacttgattattcttctatttgctatactttaaagtaaatggttttatccaagttcaagggatatggagacctgcttattgttcttgtatctattgcctccattcggttttagtgcttgaaagtgattggatatggacagatctgattattttcttgtatctcctgtctgcatttggtctgctacttgaaacattttttttttccatcaggtgcctcagatcttctctagatcatgttttctaaggttaaacttgcaaaattttttaacaagttagtgcctgtattatttttttctttgttgtttcccttgaatgggacttcacttatgcaagtattatttgaaatatgtcatcttttaatcaattattttgattcaggttaggataccggtggatcacgagactagctgcac

SEQ ID NO: 46904 - DNA, 387 bp, Manihot esculenta
  Intron number 2 from transcript cassava4.1_032068m (locus cassava4.1_032068m.g) derived from phytozome v7.0 (chr-ID scaffold07996; pos 360956 to 361342 reverse strand)
caaaagtatgttctcgtttgttgtttagcacgtccaagcattcatccttttgcttatgttttctgtgggggatcaatgctgagatttccatgtttatgctaaaaaaggaggaaaatatatatataagtcgttagaccttttgaaaacatgaagcctttgttttttcttttcttgtcattccaccatttgagtatcttgtattttgcggcaccgagtagttcttcctttaccatctttcatgaacttccaagtagttctctttggaaattcatctgattatctataacattttttatgaagcaaggtattcagcggtcaagtattttaataagattgttaccctgaacatgtaaaacttttatctatatctgattaatatttaatcag

SEQ ID NO: 46905 - DNA, 640 bp, Manihot esculenta
  Intron number 1 from transcript cassava4.1_032068m (locus cassava4.1_032068m.g) derived from phytozome v7.0 (chr-ID scaffold07996; pos 361392 to 362031 reverse strand)
tccctgggatacccgaggagcaccttcgcaggagggtaatgctattctctcctccttatttttttcgatggatcattcttttgttgtttcttgaagttcatagtttagggatgagttggatgcatttctacttcagtttttaggtggatttattgattagggttgtagaagttttgcatttcaatctataatatctttatttaataggaggagattttggagttacatttcaatccattaagtttgaacttggaacttatagggggaagagtgagttatgatgtttctgtgtcactcaaagctcttagatcattctttaggcaaggtcttgaagagatttgtgaatcttgcaagtgtaaattagctatagttattaagtttgtcttgggccaagctagttcgttactgattctgagaataggtgacatgcgtcatctatctttcaacctaatctgtatgtgttggaatggcatatataaaaattgaggtctgctcttatcttccatcctcgcaagctgccaccataggattgcattgatgttttatcgtgctttctgcttcttttgatcatttggttattgttttaattctgctgttgatcccaggtggtaatttactcaccagctagaactgcaacaca

SEQ ID NO: 46906 - DNA, 614 bp, Manihot esculenta
  Intron number 3 from transcript cassava4.1_019134m (locus cassava4.1_019134m.g) derived from phytozome v7.0 (chr-ID scaffold07478; pos 250624 to 251237 reverse strand)
ttctactccatcttcccttgctagctgaagataaggttagtttcttccgattctattggtgttagtgatggtttttgtttaattcgccttattgaagttgttggtggatatggatatttgatttttgagaatttagtgtaatgcaatacttagatagtcttgtttgataattaagcttaattttgtaaactggatatatgtatgcaactccttttgaactggaaaatgcttttcgacacttgctgaattcacgagacaactccaactgttaagttctatgttaatagaatagtacatgctgtcaattgtgaagatggtggatctttgtaagattattgattgcagtttagaatggtcctgattgatgtcaatcccccattcttaatgttcttctagcaaaatgaaagctaaccttatatacaacttaaagatgtttatccattgacatagggagaagccttaaagtttggatttctgaagctcacactttgtttcctgtggaataaagagaattgtagccatgttgttcagcttttaaaggttatttgccattagctatatctgagatccaaatggcttacatgagttttatgtttgaatttgcctttggcaga

SEQ ID NO: 46907 - DNA, 477 bp, Manihot esculenta
  Intron number 3 from transcript cassava4.1_007173m (locus cassava4.1_007173m.g) derived from phytozome v7.0 (chr-ID scaffold04247; pos 50753 to 51229)
cacctcaggccaaatcagagtagtgtatccaattaagctgcagggattaaaatttttttttctcacttaatttatttgtgatagtatttccataaattagtaacctgtttcatgcacattttattttaaatataataccagggacattttgatcttttttccttaatagctacatttgtctagattatcaacttcagatgatgttttattcatggacatcactctgtttctcattatctttgtctctttgtttgcttgtgcatgcacatgggaatgtgcaaatttggattagatcttccatattttgtatgatctccttgtcattgaatatttttttggacgtgcgcgtgtatgtttgttggggcgggggagggttggggcactggtggtggttatgccctgaatttctgttgtgttccttgctaggtataactatagtattgaaccatggtttgctgaatcgagaatttgacaggt

SEQ ID NO: 46908 - DNA, 455 bp, Manihot esculenta
  Intron number 1 from transcript cassava4.1_020282m (locus cassava4.1_020282m.g) derived from phytozome v7.0 (chr-ID scaffold04457; pos 597261 to 597715)
aggaagtcggagattagctatcaaaccaaacagtaaaacctcttttctgctaattccacataaaaatttatcatcatactttcttatgatcctacatttgggatccatttttgagtaaattgtttgattttgcatgtgttaaatcgttagggtttcaaatttcctatatatttagatcacttctctcttgcacattaatccttactaattacttgacctggtaatgggatcctttttctgtttgatgttgggaatagagaatttgagagtctactatttgaaaatctatatatttaattcattagccgtttcttcaagttagctttccagtttaaaccctccgtcttatccttcctttctttctcccgttttctctgtagttcattacaatatcttcttttggtaggtgtactgcagcctgtttcatttatttgtttttgttttgaaggacggac

SEQ ID NO: 46909 - DNA, 531 bp, Manihot esculenta
  Intron number 4 from transcript cassava4.1_020282m (locus cassava4.1_020282m.g) derived from phytozome v7.0 (chr-ID scaffold04457; pos 598190 to 598720)
tcagactccattgttacaaagaatatccttcacattagttataatttgtctatgataaatttatgttaaaattctttgtgatcgaaatcggtggatctgtcacacataataaaggaaataccttctggtgtccttgcatgagcttttcaatattcctggcttattggaaatcttctacatgaaacctagttgcaaaactattgggatcattccatcaattgtgtcttaagacatgttttgctattcagaattcagttaccattcttaggtgaaatgcgggtaggattattttgatgggaaaatattctgattttgagctttggatgctgggtgtttagttccttaggtctatgaagacattaggtacctgtagaatgcctaccatgtaaatatttaaagactatatgtgctcgctccctccccttccccccctgcctccatgccagaaggctctgttaatgtttatttagttgtcactggttcaaaatgtgtgaggttccttgttttcttaacttcgatgcacttgacgag

SEQ ID NO: 46910 - DNA, 710 bp, Manihot esculenta
  Intron number 1 from transcript cassava4.1_030491m (locus cassava4.1_030491m.g) derived from phytozome v7.0 (chr-ID scaffold02307; pos 376527 to 377236)
ttggttcgacactgctctcagctacgccccttctcgtatgattcccttctacttcatcttttctcttgattgttgattctctctctttcttcgacttagggtttgaatttttccatatggagttcagattgaatcctatgctatgttcaattattagggttttctacgtgtactacatgatctcgtgttaaattcatctccatcatcagttgaactcgaaatgtagaaagaaggaaggagatgttaaagaatttcgcaaattcgttgccttgtaggggaaattttactgttattttgatgagtgttatgaagaacagctgtaaaatagattcaattgtagataggcaacaaggttctttattagatcagtacatttcctaggaggcatttattagaaaagcaggaggcatgtgaagcttttcatacggattcaaacacatcaaataacaataataatggcacaattattttgccctgctcttaaggtttcatttctgtttggcaaaaaaaattgtttttatcatatttctgtaaccttaacatatggaagttttacttttaattatctgatatctagatccttaagaccaattcaagagctcagtagcaacaacatgaaatattcaggggtcctttaatgcacttttcctttctgttttgctgattagaatatttaatcttttgtttttcactttgtttatgcagctttt

SEQ ID NO: 46911 - DNA, 919 bp, Manihot esculenta
  Intron number 1 from transcript cassava4.1_002940m (locus cassava4.1_002479m.g) derived from phytozome v7.0 (chr-ID scaffold01945; pos 532942 to 533860)
gtgtagcggtcatcaccatcatcaatcctcctgttaattctctctctttcgatggtacccttcttttttttttttttttttttttccgtttgacgtttatttgcccagatctttatatactcagttcatttcatgagctcttgttttcatagtgaagcttaatcgactttcctttcttaatttttattcggcgagctttcagccatgtattatttagctgtttgcgttgtctttgtgggatttatttccctgcaaagcttttgaaagcacagccgagttagcttttgttttggtgatttttgatcttcttgacattgccctgctatttgattcaaggattagatggtcattgattgggagaagagattggctctggagatcacaataagatagcttcatatgcagtgatctattctgggtgtatttgatttgacaggattatgagtgcctctgggaatgtgtttatgctcaaatgataggaaatttgatggatggataatatggtggatcgggttgttaagttccataaaatttgataaggaatattcataggctaaaaggtgcccatttagattactatcactgaacttcatgttctcagtagaagttgtactccttgcctccgataagctaaaagtccgttacttgatcagggtcttaaaattttgggtttatggctttgggtgatccaatggctatgttgttctaaaatttgacaacaatcagacaattgcttaggcttgcttcagtgtttttatttgtttattttttcccttcgtttatgctttacacctttttggaaacgatgatattttccataattgtgactagacattgggcttattactcttttcctcttatggtcttcttgcagttctaaatagcttgaaagatagttttgacgaagccttgagaagag

SEQ ID NO: 46912 - DNA, 1067 bp, Manihot esculenta
  Intron number 1 from transcript cassava4.1_011010m (locus cassava4.1_011010m.g) derived from phytozome v7.0 (chr-ID scaffold12711; pos 75962 to 77028)
cctctccactctagtctagtcctcggtcacggcaggttttaatgggttctgagattgtggtttcagatgtgtgcattctaagatttgtgagatttattgatgtgtgtttctgaaatttgtggaaatattaagatttatatgaatgtgcttggagctgtatctgtgagatctattgaaaatttgtcgaaatgaagactattgtgaatggattgagagtttttttttgtgaggttgttgaaatgggtttcagaattttattgaaatgttaatcttagatttctgaaatttgtgtaaatgctaagatttatgtaaatgtcgcgagggttataattgtgatataaaggctactgtgaatgaattgagagttgtttctgtgagattattgaaatatttttctgaatttattgaaattcgaatgtgagattttatgtgaatttctgatttttttttcccctttgattatgatttaatcgggttagggtagtaaataggtaatggtagacgggtatgggatggatagggttgtgaaatccaatttctaaacggttttggatagtgtatttgtaaatagattcgggtttggatacttaaaatttcgctgggacaatacccagtaccacccttactctttgaattgcttttcctgtggatcctggcgtctttgctttttgtgggattcgtttatgttatgcaatttcagtttttctttttagctatctcaacggtatgtataggatgtgacattagggcttgctcacctcacctttcagaaaatttgacttcagtatgagatttatttgcttggaattggtacaattatgtgttctacttctatgtttggaattggtacaagtatgtattctacttctttgtttggatgggaccccttctatgttgacttcagaatgattttgcttgtaaattatagttctaggcttgcctagtttgtagcttaataaagtattcctcatttttcatcatgtttatattttattttacctgcttaattctttggtgttggttttaattcaggatagtgacaagaacaaataataggaacccttctt

SEQ ID NO: 46913 - DNA, 728 bp, Manihot esculenta
  Intron number 2 from transcript cassava4.1_022597m (locus cassava4.1_022597m.g) derived from phytozome v7.0 (chr-ID scaffold12086; pos 87867 to 88594 reverse strand)
tgagatcgactgccacggatcaattcaagcttctggtaatctcactctgttccttcccttgtttattctctctgttttttcttttaccgtaataccataccattacaaacatgacttctgggttctggcagtctcttcaaagttcaccagacacgacgcaaaagtttagctgttgcagacttgcaataaaacgcaaggccaatgctctgtccttgtttcaaaaagattattctaaataacattaaaaaaaagttttgtaaaaaaaaataatttcaactagttagaaaaacataattttcccattaactcgattttattgttttaaatttgcacagttatatataattaaatgattatatattttaattgtatactatactgagaaaaaaaaagaaaagataaaaaattaattaattaggatcggctaatttgttaccgtagaaaaaaatactgaacttgaatgtgaagtttgcgtattcgatagtgggaaggacaaatgggccggcctgcttttggaattaggccgatcgaagaaaaaaaaattttttttttccttcatctattcaagtgaagttttttttttttttttttaaaaaaaaaaaaacaatttgtagttgaagtttcacatttaccaaataaaagacaaaatatcctgagaaatttgcagttgaagtttgatattttcccccctctttgtgaatagaataattcgttgccgttcaacaaat

SEQ ID NO: 46914 - DNA, 768 bp, Manihot esculenta
  Intron number 2 from transcript cassava4.1_019167m (locus cassava4.1_019167m.g) derived from phytozome v7.0 (chr-ID scaffold00109; pos 190680 to 191447 reverse strand)
agctcttgaaatttatcctcccgtcaaactacgaggctggttctttaagaattcaccttaaacttcaattttatttacttgttcaaagtattagtttgcttgattaattgaagtcgatatgttgaacacccaaaattttagaacaaaattctttatcaggttggtaattgtgaagaaaattcgtaagtggcaattagtgcattcgaattgtttttcagaaaattgagatgcttaacgtgtaaatttttcttctcctgtgatcattcatgcaaattcaaaatatgtcatgaaacccatattcttagagcttctatctggataattttttatttttatttttatttcccccctaggagagacatatttggaagcttgattaagtggagctggatttacttcgtttgatgtgtttttttttccttttttttgtccttcattattcatttttagcctctagaatatgtcaagcatttcagttgagttgttgaatgtggtttttgtcattaattaccagtcaatttttaggtccaaggtctgcatcatttttgcagattgatcctgaagcattaggtgacttgtctagtgcttaatctttttaatgtgtactaggaaacagacactttccagtttccacaagttcatttctatcataaagttctatatgtttatcttatcttacaactagaactgcatagtatgtctattcaaaaatttgataatcacctaatgagtacttttatgcaggcattcatcgccacttcgttcttt

SEQ ID NO: 46915 - DNA, 906 bp, Manihot esculenta
  Intron number 1 from transcript cassava4.1_011852m (locus cassava4.1_011852m.g) derived from phytozome v7.0 (chr-ID scaffold07478; pos 314452 to 315357 reverse strand)
tctcctatttgtactactactcatctccgaacttggtaatttctcactattcccatctgaattacatccaaatgtgcacttgtgcaattacattacttctcttattttattccaaacttcgtggaatcaccttattgaacttttgtatcgctggatcaggatgtttgtttacacaatgtttttgctttgttagtctttctttttgaatgaaatgtaatttacattatgctgaatagcatagcaatagcattcgtatccaggatttgggataacaatggatttcgtttaagctaagtatgtgcttcacaaaatggtttgattggaattctattgttaagtggttattctggttaattaatttacgtgttcattactggataatgaatttaagtcgccactttctgtacacatgcacatatataaaggaagttcatcaagggtggtggttcatgctcatataagtttctgctgctattttatgtatgaatgtttataacatatgctacatgagattttggaattgatattgtggttgataaagttttgaattgtttatatatggacaaaatacttgcttggtgtttttattatgtatgttaaaagtgaccgaaatattaagaaattagtgccaattcattttggagttcaatttggattttctttttttctttttagctttataattcaatttcagggtgatataaatgtcatctttagatgaaatattctgggggagtgaacggattatcagttttcttctctgatgctaatttaaggatttacctcaaagatgattataaatagagtattgggctcttcaatgtttcttttaagtctagaactcatttacttccatgctttccaataacaggcttatcttgaccaagtcaaagaagagacaggtcc

SEQ ID NO: 46916 - DNA, 867 bp, Manihot esculenta
  Intron number 2 from transcript cassava4.1_007207m (locus cassava4.1_007207m.g) derived from phytozome v7.0 (chr-ID scaffold02817; pos 174607 to 175473)
ggtatgttgcatatgcttctgatacatgttcctattgaaatgttgaagactgtattgctaacagttgtaaaatatttaggaaattggttgagaaatcacgagatctgtgaaatttaagatctgattattcggaggtacatctttgataagctaagttacggaccacaattggtggtgaagagcggatgttatcttacagtgctgttgtctgaaagaagagcagctctatcaatgtttatattgatggcaatgatgattaacgtatgatagtattaacgattaaatacttccttttttaacctaattgtaatttaatagaaaatagtgctaatggaatatgcataaacacgactgagatcatgatgtactttctgattatgcaacctccaaatttaatattattcttcaccatgtaatattatgaatgtccaaatttaaaaggccatccatagatttaagacttgtagattttatgaacatttgatgccattctaagttattacatagagttgaatcaaacatgaagctttctatatagtctgaaaatatctgcctccccatttctttaactttggatcattacaataaaataggatttttgcatatcattgattggtgcacttgtgttaatttattggctacattgcctgtaatgtttgcatcaatgggggtttacatttacatttttattatgtttgtcttcttgcaagcatttgttgcatgtatgagggattgcatgtttctccttaagttgcttgttcttttctatgcatttttcactgttgccatggtgatgtgcttactaatttcttctatggtctcatgtcttttgttgcttgatctctgatggtttggttgcatgtccag

SEQ ID NO: 46917 - DNA, 887 bp, Manihot esculenta
  Intron number 1 from transcript cassava4.1_017339m (locus cassava4.1_017339m.g) derived from phytozome v7.0 (chr-ID scaffold08500; pos 398083 to 398969 reverse strand)
ctcttgctgttgccgctgagcagaggaggaatactgtgagttttccatctttctctttttcttttacattttctttcttttctgtgtcgttttgtctctgaatctttgttgttggtttgcatgggttctttgagatgttgttgctttctgggttttacacgtaacaaaacccttaatctcctattgatttcttttcaaacaattattttgaaaagaattaaatctgatggagacatttataacttcaaaattgcaagattctaatattattgcttccagtgagagactttttttttaacaaaacagtcttcttttattaattatgtatgcagaaaaaatttaacaaagcaagctattctacacactcacaattagattgaaatcacaaaataaaacctatgcttgcaaggttaggtcaaaaacctggagaaaaatacagagtaaagtacacagctatatcactaaaacaactaaaaccaaacagaaaagaaaagccaaaaacagaatgtatgatatgatactgtgcatgtattaagttttgtaagcccattgtttgtttgtatatctttgcttttgtcagttgatggatagatttaatcaactcttccttatttctgaagtatattatctatgattccttgctctctcttggagaaaagcaggttcctttttgtgggtagatgtgaaggtttcctcatttgcttaaggttcttaatgggcttgaactaggggattgcattaagttatagttccatccacagcttctttttttcgttcattttgtcaaaggaaatgtgaaatttcaaatgataccttaattataggaggggttttatgacaacatatactctcctaactccttgtcctgtttttacaggccacagtca

SEQ ID NO: 46918 - DNA, 509 bp, Manihot esculenta
  Intron number 3 from transcript cassava4.1_018324m (locus cassava4.1_018324m.g) derived from phytozome v7.0 (chr-ID scaffold06701; pos 520026 to 520534 reverse strand)
cggaagcaagattttgcgcatcctgaaggctcgtaagattgttttggtcacttactatttatattccatttgtttaagaaagtagcttcttttcttctagaagaaaataagtagaaaagtaggtttatggtattagtcgtatgtgtatgccttgtttcaccagaatattgttacataaaatattttgctgtgtttaggctgcatagattagttgttcctctgagagtgttttcttttgcaaagggtagggagctaatccttttacaaggaacatgactaatgacttaatttttattcaaaataagctgaacttttagttcatgtgattgagtgtatatcataaattacggtgtaattattcagacttaattttaattttctttttttgtctttgcgtaataattttgagttacaatttagcttttgtcatttatagttcatttgttaattaggcacttctcatttgtttttaaggtcttgcacccgaaattcccgaggatttatatcat

SEQ ID NO: 46919 - DNA, 925 bp, Manihot esculenta; identical to SEQ ID NO: 46858
  Intron number 1 from transcript cassava4.1_003414m (locus cassava4.1_003414m.g) derived from phytozome v7.0 (chr-ID scaffold01945; pos 296556 to 297480)

SEQ ID NO: 46920 - DNA, 780 bp, Manihot esculenta
  Intron number 1 from transcript cassava4.1_000257m (locus cassava4.1_000257m.g) derived from phytozome v7.0 (chr-ID scaffold06801; pos 161870 to 162649 reverse strand)
gatcatcataacccacttcccaatttctctataaggtaaaaattcctgctttctggttattgtcttctttgaggatgaacagtgcttactttttttttttttttcttttccccctttttcaatttcctttgtttttgtcatggctctctggctatgctaactgcttccttctatttctttgctgatctcaaagttaagatcttttgttgggtcagatccagagatgcatgttccttgtggctcagatggagatggggcctgtttagtgacaccccatcttgtctctattttggtccttgatgaagctttctcttgctttgcctgatgatctcattcacggctcttaaagcacaagcaccaagcttagcatacgcttctttggtgtatattcatgtcttgaaggatttagtcaatattcacctgctctctcttttttgatgcctgtgatttcatgtcactttgtgcagtccctctcgttttctgtacttgttcttaatagactccagacttttctcctctcttcaccagatctcaaatctagttgtcttgcgtgtttcttggctctttatctactcactcactgttcgtaggattctctcggagttccatgaaccatatgttacttctcataagtttatcatatgtatgaagggtctcatgcttatcatggtttcaacttttttacatgctgagttgtagcttattattgcttatgtctttttttgttgcacatattaataccactaaataacgagtactttgatatttgctgcagagatt

SEQ ID NO: 46921 - DNA, 639 bp, Manihot esculenta
  Intron number 3 from transcript cassava4.1_001230m (locus cassava4.1_001230m.g) derived from phytozome v7.0 (chr-ID scaffold04879; pos 9262 to 9900)
ggggattcttatattgttttgcaggtataatctctctgtctgtctctgtctcgctctgtctcatgctcttttattttgtttattaatttttttgactttttttattttttgttctaatatctcttacatgagtgaaactcagaatagaaattcacagtgttgtagtttctcttcttaggtggtgttaagaatctacattagtttcgttttagtagctcacaaattactcagtgaagctgttctgtgtgctgacattttttctgatacggagggaggggtaaaaaccatttgaagccgttatgaagcatcaacctgcccttgaggctggcatcctgccctgggtattttgaaatccagaaattatgataacatatcacaatttcagtattcatcatccttttctgttagtttaaatgtaggtttgtgggatcttcgtgggattattctgcgtatagtaaaactattttactgctggggtgtgggctattggtgagagagtgttgtgctgaagggtgcacttatcagtcttttttttttctaatattacgtggtcacttttttattggtatatactttatcatgatctcatctgtcttctttctttctagacaacatctggcaaggggggtgcttatctct

SEQ ID NO: 46922 - DNA, 1012 bp, Manihot esculenta
  Intron number 1 from transcript cassava4.1_012353m (locus cassava4.1_012353m.g) derived from phytozome v7.0 (chr-ID scaffold08085; pos 172544 to 173555)
atcaaggtaaaatttcctttttagctatccaatagttgtgtcagcagattcagattcccttttgtggctttatggaactgtgtgtacgtctaagtctacctgttctacaaattgcagctaggatatgttcagcagtattaccttccttctaacttgaaatatatgtgcctacttttagagaacttaagttatgtaacaagagattacagcttccaatagttttcagtagaaattgcttatatttgtttgtaaatcatcaacctactgaaaggatatctgtttgtgcaatttaggaggaagtgtacatttaggtcgtaactttccatttctttttacaatgtagttcctagacttcaaactttcacatcaatcaagccctcaaacatgaaaagagaggtcaatttgtgtagtaagtttcggataggatcctgtgaaatatacaccgattctgtttgtctgcctatgaaaatttaatgaattcctaaaagaaaggtacaaattgccttgatttctggagtttgagggcttagcttttaaaatttaaaaatttggagattaaattgtgaaaggtaaaaaatttcaggggccaaatttatacttactcctatagtttttgtgcatttgtagaaggcaagatgttcccaatgttaaagtggacattgtttgtcaaggaatacattttgaaaccattcaggctctaaggttttccatctgtatgaataattcagcttccgtgatgatatctgcattattaactttttccccattgttctttgaaattttggggacatgcacagatgcacatcagttgtggacatcctctggttaaaaaggactgctaaaaacctaaacgtcacattcttcctaataacattcttttgactgcaagctgttgtgagattctagggtttcttccttattcctaccattataaattaaatgatgtgttgaagctatgatctgacaacttctctacattttttaggcaacagcaggtggtggaggacgtgga

SEQ ID NO: 46923 - DNA, 851 bp, Manihot esculenta
  Intron number 2 from transcript cassava4.1_006811m (locus cassava4.1_006811m.g) derived from phytozome v7.0 (chr-ID scaffold04343; pos 5501 to 6351 reverse strand)
aagaggtcgccattaagcttgtaagtttaatttccttctcccctctcttctaattctgtttggatctcatgaatttcttcaattttaccccccttcctcttggggtgttggggaagctttagttccatgagtatctggagccatctgaagtaaatggcttatctgatagcttgctattatttggctaactaggttccgctgcttgtaaggagcaaattaaagtagaaacctcctgttggactacgttagtagccaatcgtttgagtgccgaccttttagttaattgtcgtggttagcagacagtcatgtgtgttcaaccgtttacaattaaagacctagtattaactgataaacctgtattttatgcaatgccaaccattcctagtctcctctgctatcttggctcactaagccaacttgctgtcactccaaagtccaacccccctggtgggtcttggaagacatttttatttatctgttttcattcctgtacagaaacttaaatttgagaaagaaaacattgtgatttgtgccttaacaactgaacttttaggtggcagcatcagttttccctcttttatggcttgcaaggacacaattagaacccttgaagtcaaacatttgttttttacacccactttaactttatttgcagttaaccatgtagattactttgatgtgttaaacaatttatctatcttaaactttctacttccctgctttttatttatacatatgtatcttcttatttttttgggcataaaccagttcttcttactatgataaaaattctcaaaattgatttctcatttgtaggaaactgtcaagacaaagcatccccaattgctgta

SEQ ID NO: 46924 - DNA, 1018 bp, Manihot esculenta
  Intron number 1 from transcript cassava4.1_012740m (locus cassava4.1_012740m.g) derived from phytozome v7.0 (chr-ID scaffold11661; pos 300622 to 301639 reverse strand)
ctcaggtttctctctctctctccctctggatcttaattttttcattttacataactattattaccacctttttacatgcaatattaatcaactttcatattatctcttctcttattaatttgaattcaatcgtaaaaaaataaaaaggtattgttagtttccaaatgttaattacatgtgtaaggaaaacatctgaaagtgcttgaggctattcatggtcattttgctgttggtctggtctcgtctggttcactgcctcactgcataatttgcaagattttgtccaacgtcacatttccttgtcgttttgcggcttccgaccgatagattgaatcttccttaatttccgtccaaatcagaattttttatgtcgtcacagaataatccccacgggtgagcattcgttcggaaccgatcgaataaatcgaaaatttataaaaatcaaatcgaaccgattttagtcagaaatcgaattaaatcgaaccggtttgatgcgattcgattcgattcggtttgatcggttttatttttaataattttttattttttacactttatttttaatattttaaaatttaattaaaatattttaattttaatatgatttaatttctctatagtattattgaaaaaatatatttttatcactaatcgattcggttcgatttttttagtttttttctaattaaaaccgaattgaaataatcgaaatttctaaaattaaaaatcaaaccgaatcgaaatgtataaaaaatcaaattaaatttttaaatcaattcggttcgatcgattttttcgatttaaaccgaataatgctcgtcctgcgcacgaacaagttgtccactattaattatagtttgtttgtattccttagagatattgacacctgttcatgctactcaatcatctgtttgaatttctaaaatttccaattttggcgttctgaataatatttgattaataataataataattgatatcatcagctggttgaaaaggatccagaaacggcaatact

SEQ ID NO: 46925 - DNA, 428 bp, Manihot esculenta
  Intron number 2 from transcript cassava4.1_023564m (locus cassava4.1_023564m.g) derived from phytozome v7.0 (chr-ID scaffold02658; pos 988530 to 988957 reverse strand)
actgctttggaagatattttcaaatcaattttgtaaaagatagcaacctattcatttttatttattatttgtccacataattcatcatgtataatattgaactcttacgcaattttgaaatgtgaaggcctcatgttcggcttgacattacatatgaaactaccttttgaaacagcatccttttagttgttcttcagaaagaagtttcaattaacatgccaaaaaatcatcaaatcaattttctatttgtgtttataggaatggaattttagaatgccttggatttctactttgttgtgtcttcatgttcatagagaaactgagcaagtactgctactgttgttcacagggtttagtcatgcattaaaatcacggtacttgagtaaggtactaactaagccggttttgtttgtttggaacagttttcc

SEQ ID NO: 46926 - DNA, 1009 bp, Manihot esculenta
  Intron number 1 from transcript cassava4.1_010627m (locus cassava4.1_010627m.g) derived from phytozome v7.0 (chr-ID scaffold11106; pos 587961 to 588969)
gcatcacaatctggtagttatccttctaactattgttcaatatgaaaatgtttcacaaaaaagcactctgtatatgcttaaaaattctaaaaccttaaaccatcagacaaagtggctctattttattttactacaagaattgtttgaattaagcttttaattagtttaaaaatctttatgagattgaacataatgttttattattttttgcatgcttcctacttcttgtaatcagagcatgcaatagtctttcaacatctggtctgctttcccgaaatttatttttgtttgagattgtttcctacagaatttcaagcttttagaattgtcatgaggtttatttagaaaaaaataccgtagccttctttggttggttagaggaattttgttgatgctctcagtttatgtttcactcagtatcataaatgtcctccaaacttcctattttgaccatgcattgataaactcttgaataaaatatagaaggctctcttacatatatattcctataaagagatgaattaccaagaaatagatctctgagataacttttttgttctttttctcctttacagattccataaataagaacaatggaaaaaaaaagtaactgttactttaattttcatcttatgattttcatgaccccacttattttgatctcaagaattactgcgagagtcccttgtccctcccatcatcataggaaagaatatttatcaaattcccatttgatgcagacaacaaaggaaaagcgagaaaactttcaatggcacctgcctaagaatagtatctctgaaatgcattaagttaggagttattttgttagagaactgttttagaatgcctgtgcagaccttgagtggaatgagttccatttcttgccataaatatgcatggataaataacctgtaacttgagttcttctaatgaaatatcatgcttttgcttacccgcagaaagaatcatatattatgatattaaagcaaatgtttcttttctagaccag

SEQ ID NO: 46927 - DNA, 782 bp, Manihot esculenta
  Intron number 1 from transcript cassava4.1_005336m (locus cassava4.1_005336m.g) derived from phytozome v7.0 (chr-ID scaffold02242; pos 190300 to 191081 reverse strand)
ctgcggttacaaagaccattgtggaggttgttcaggtaagaaactttctttctttctttcttctctaaaattttgtgattggatcttttgtttatttcaaatttcaatgtttgattttttatgggtattggccaaacgagagagaaaattacctactgctggggatccagttggatgctatatttattttcataaaagatgatgttttgctcttcctgagtgcagggatctgggaccaatccactaattcaattgataaacgtctgatgattttaaagtgattaataaataatatctgattgagttaacttcctgtttttgaagaatatacattgcacacgcagatgatgattcagaattttgacttttcttttatggattcccttttttcagatttcccctttttcaatttcccctttctttttgtgctattctcctattacctttatttctattttcctcttctaagtgtctttttgttacaattaaagttttgttactttagattctgcctgttgacaatatcaaatatctcctccgtcactcttgcaatatctattagagatttactagaattctgaaaagttgttgagtttgctgtttactttcttgataataagttctatatagtcgtatatccattagagtggtggctagcagggggttgatttcttgtgtatgtaggttgccaaatactgaacttgtatacaagtccaacagaaacatttagctgcttctcaatgtactttgtattaagtttattgtgttttgttttctgtcag

SEQ ID NO: 46928 - DNA, 576 bp, Manihot esculenta
  Intron number 1 from transcript cassava4.1_017471m (locus cassava4.1_017465m.g) derived from phytozome v7.0 (chr-ID scaffold04043; pos 658886 to 659461)
ttcgactgaaggaaacaggaaaaaaggggaaaaaggtagggttcgaaaatttctctaatgtttgtagcttgatttggtttggattggtgtagttttgactggctttggcttgcgagaaaaagctttttcttacttttttttttcttggagagtttgaggttagatctgtggtggaatttgtcagatttagccttggttggtgggaaagtgaagaaaaatctgagaaaaaaaaagaacacaaacgaatttgaaaactcttttcatgtttatattcttgggattgcaaatctaagataattcaactcgacacatttaagccttgtggttggatatgatgatacgaattttgtttcattgcctttcgtgatgtgaagtaacattacaattatgtttggtaattgtctttggtgatctgttcagtggttattctgttggtttagtacgagttaaatagttcattaattgatctttataaatggttgccagacttaaatcctcttttatgcatgatttatctgacatttgtgtattttgatatggacaggcgttctgtagaattatcgtcaaaatttgaag

SEQ ID NO: 46929 - DNA, 321 bp, Manihot esculenta
  Intron number 1 from transcript cassava4.1_003700m (locus cassava4.1_003700m.g) derived from phytozome v7.0 (chr-ID scaffold05782; pos 68694 to 69014)
ttcgatctcttcagtttgggttcttgaaatctcaggtgggtcttttgtttcttgcaatttcttatttgtttgattttttttttctttcttgattttgatcattattcgactcgagtcaactgggtcacctgcgctagttgtatttttgcctatatcgcttgaattatttctgatgttgattcttctgttctttttttgggtatagttttgactgtctgggtatatgtgaatggaagttttcatatggctatgctaaatctttgtttggatgctgaattttgcttcttatttgatgtctaatttgtttcaggttttattgtt

SEQ ID NO: 46930 - DNA, 910 bp, Manihot esculenta
  Intron number 3 from transcript cassava4.1_023310m (locus cassava4.1_023310m.g) derived from phytozome v7.0 (chr-ID scaffold08446; pos 348068 to 348977 reverse strand)
ttgcaaatttgaggccagctaccgtcttaccccaggtaacttgattttagagcagtggccagttttctacgctatatctggcacaatgtaaaatcctaagggaaagaatagaaacttaggaagcaaataaggagaaaaataaaattaatgaactcttctttggaatttaatctagtttttcttgatttccttttctctccgccccttcggcgcaagcatattgatttctttcacatttgatttcccttcctatgttataaaaaagaataattctgtgagcacatggattttgctgaatcagattaagggcacaaaaaagtcatggaaatgggatgactgtattttcccttccaaaaaatatttccactagaagaaaaggagcaagcaatagcaactaaattgtttcagaaatttgtggaagaaatttcacaagagtatttttctgaaaggaacatgattgttcacacatgctagttggattcaagattcttattgccttttgtatggctagagattttcatattattatggtactagccgaagcctgttgcattggcatatgtctatgaaggactaagtcatgaatcgatattttttgtacctcactcccggaattagtaaaaaaatatattgatcattgaagttgtaggttcagttgtcgtacctgattatttggattttttgtagaccaattggtcttgagtgcttgaatgctactaaaatgttgcatcaaacaatgttttggttgataaaaagtctggagaaagtattaaactggctatttcatcctttttaaatagcagaacacgcgcttttttatcctatacctgtacccttcttttagtgataccattttccattctctgttaacgtttaccattattttcatgttcactctttcagttagtgg

SEQ ID NO: 46931 - DNA, 771 bp, Manihot esculenta
  Intron number 1 from transcript cassava4.1_004232m (locus cassava4.1_004232m.g) derived from phytozome v7.0 (chr-ID scaffold10797; pos 87012 to 87782 reverse strand)
ggtttgtttgccttaagtctcctttgctttgcttctctgtgcgtgtttgtttgagtttgtttgcatgcttgtgtggttgcttcattgcattggccctgtttgttgccatcggtgttttactctccagtctccacgactccagcagtagtttggtgctcgagttattgccagtgccggtgcagatcagtattaaaatcggtgcttctgtttagtttattgggtttgattttatttttatttgagcatttggcaaactccttagtataacctcttacttatcatgccttctgagcctttaaaaatgcagatacttctgagagtcaaaaaaaatttttttttcttctaatgcaaaataaatctgaagaataacaagaaatattagaagttccactccgattgttaattaatattgaaacaacacattaattaattcatgaacaaaattttgcaataaatagtcccacaaaccaccacggggggtttgtgcagctacagatttcagcccaaaagatcctctaagctggaaattgttaagaacgaaattttgatggaggcactgaatcaaaacaatgaagaagacatctaatcgctcaatccaattaaatgttttaatattttaacttttatggaacctaaattactactgaacaggccttctagtttcgtgcctggaggattctggtttttatggcagctctgtgaagaggcgtctctgacttcttcttcttcctggcagggtgaattttgcttcaagatttaatttgcaataaa

SEQ ID NO: 46932 - DNA, 845 bp, Manihot esculenta
  Intron number 1 from transcript cassava4.1_012497m (locus cassava4.1_012497m.g) derived from phytozome v7.0 (chr-ID scaffold10797; pos 215165 to 216009)
ctagccggcctttcaaagcagagattactgtcaaggtataagcccttttcttaattcagtttctcatcatatttttttcattgtactcattagattaatgtttgaagataattgaataatgattgtggataagagggggaaagtcttgggtagtttaacattttcttttatgagtggaaggtcatgaagttgagttgtgaaaatagtttcccttgtaaaatataaaaggaaagctttgtagtataataaatgaccctttcctcctatgatcttggcaaaacccatgagttttgtaaactgtctattgctataaataatggcaaacaaatgctgatttaccatttttgagctgaaatttaagcccttattaattaatgatcttgtccagctgaagtgggacagaaaacaaaggaaattgatgttttttgtggggtaaaacgcttttgaaagcaaacttgatatttactgagcaccactcaattgcctattataaaattctactttttgcttcatttgcttgtcatacaatacaagttgattttgaatgagtgattccatctttgatacgttcaatttctttctgcttttaagaagattttgaggcagtttctagagcaataagagttttctatggtgaaatagacatcaattggaagggagtcattgtgcattgagttcttggataatctcaaacacctcattatagaagatcaatctaactgttatatgtgtgtcaatcatcaacaagtccttcatccttaattagctaactaacagattctctgttgaattccattgctaatgtgaaatataacacttgcagagcttgttagtgagtaactttt

SEQ ID NO: 46933 - DNA, 998 bp, Manihot esculenta
  Intron number 2 from transcript cassava4.1_030791m (locus cassava4.1_030791m.g) derived from phytozome v7.0 (chr-ID scaffold11998; pos 707086 to 708083)
gaagaacttggtcggccggagctgaattttgataggtgcttttaactgtgcacttttacgtagtttttggttctaacttctaaccaacgacacacctagaatttatttcaaatgacgcattgttatttaaaaatgaatcccactatttggcatgatacaacttgaaatgtaggattcaattaaattccgtgtaattcatgtttggtgtaatttcataattgaaattcattttatttctcacttcctaaattaccttaacaataaaatgaaaattataatattcatctctctctctctctctctctataaaatcttgtatctaataaatttataacattagcatgtgcacacacacacataaacaagataactagtgttatcacctaagtgcatgaacacatgatatctaaaatttaactgaatttcccaaaattttgtgtagttcatttgaaccttattatggtcaattcatgaataagaatatgcaaatttagttgaagcaatgtatgttcagtgtacgttttttcttttcttttctcccacttttgtttgcagttgaatcatataaactaatctgaacttttaacatggtagcaattgatgttagttattctaccttattgcctttgccaatagtgaataaattttgctctcttccatgtcaatttggtaaagattataattgtgggaaaagaaggggaaaagagtcataaactgttggtttgtctcgtagcttctaacattaaatagggtatatgttcaacactactctttttcttgttggttataaaaaaagccatgatgtatttgaaggactgcacaaaacacacaatcttctgtcatcaggactagtatttttgacatttaggtttagtttggttctattatttcattagtgatgtgactatatcatggcttttgtgccttcttttttaatgttttaatatgcactctgcattgcttttgcaggtttaaatttccattaccagaaaactttg

SEQ ID NO: 46934 - DNA, 795 bp, Manihot esculenta
  Intron number 1 from transcript cassava4.1_012914m (locus cassava4.1_012914m.g) derived from phytozome v7.0 (chr-ID scaffold10689; pos 580913 to 581707)
aggcgatcaaaaaactcaccgtatggttttctgttttgttctggaattctaatttctttcctttcttcttttccggtttctggacttgactgcttctgatttgattgtagaatggagtttttttttttaacaaatagaaatagatacctaaatttaggtgccagttgtatgtaataaactgacaaattgtcgtaattaggagataatgactaattttgggatagattattacttctcaagttttgtgcttaatgagtagggattacagagattgctgaggcaaaagtgaagaatactagagtatatatactcttcatttgcaaatatttgtattatttttgcatctgggtttttaatttctaattagatgtaatgatttttaactctgtctcccagagtttgcctggtgtattttgttttgagttcataacagtttacattttaatctttcttccattcatttatttattcgtccgttctccttgaaaacatttttattctcaagattgtgtttttgagttatttgttgatttctgtggcgtgcgaattatggttgtggaatcaataacaaaaaaatgatgtttttgtaggattcaataatcgcatctcatttgttattgatcttcaatatgcaatatattatatgaaaccctgaaagcaacacatgggtttttatgttttaacttctccgagttaccaattatgctgatttgtgtcatcaagttctttctacttctctttctgtttgtttatgctcttgagcatgtgtgcacttgcaggtggttctggacttgg

SEQ ID NO: 46935 - DNA, 735 bp, Manihot esculenta
  Intron number 1 from transcript cassava4.1_023434m (locus cassava4.1_023434m.g) derived from phytozome v7.0 (chr-ID scaffold00183; pos 17191 to 17925)
cctcaaatctccagccaagcgtcgactccaattaggtattttcttggcattactttgattgattccttttcattatctggttaccaaggtaggtttcaatttcgacattggatttcattactggattttgtagtatttattatgattagtggataatttgtcatagtttcctcgtttggttgatgagaaagtatgaaatgaaaaattagagtctttgtgatgtacgaggtaaggaattcagtcagatgcagttcaggcgaagaaatttcgttcttcaaaatagttactcattttactaactattagaaaatatattattcagtcgtttttatcccggttccagtagtggaagtgataagattctgatttctttcgttttctgtattcctcagcatccaaacaaacatctttgtggccttgaaatttttcagttctatctttattttttctttttcaagtagttttcatttacttattgtgtgatttagttgaacattttctttccttttttttctatcaatggctttcatgtgatacctagagagctaggtttaataagacaatggctctttcattgttttcttgtatgatttgttaattgactggctcaattgtgaacgttcatgttaatattattaacagagattttggttgtggtaataaatggtgtttaattatggatttggatcttttcatatttatgacactcttaatatattgtacttcccttggcag

SEQ ID NO: 46936 - DNA, 837 bp, Manihot esculenta
  Intron number 1 from transcript cassava4.1_011416m (locus cassava4.1_011416m.g) derived from phytozome v7.0 (chr-ID scaffold07485; pos 61209 to 62045)
agacggcatcgttcaggcttcgacagggaacccaggtaccaactctttcgcgtagatactttttagggtttttgtggctctagatttatttattttttcttggttttatattttgatggaaaactttcactgaagtatctattgtggacgtctttggaccttgttcatcacattcatttgatcagttgatgttgtattgaattttgcaatgcaaaacctgtgtttttttactgattattgatggcctgaggaagtgtgagatgagagatttcagctgttattcttcaaggcattgaggactctaactttgtgtgaagaacccttgggattggtggataaaataatgtctgtatttaggtgcagagcttgtacccactaattgtagagttctgagatctgatatttatattgcatccatcatgaaatgtcgaaagtattagccatttgtaaatgaggttgttttgcatgattgcatcttttttgcatctttttttttaaatgtttttaaaaaaatctccacttttttttcccttttctgtcgccatctatggtggatggaaagattttaacagtttgattttgacactactaatccatatattggtagcccagtttcaaatggtgacctcctcgtggaattgaccttgggcgttccagtgtagccaactccccttggtggttggtttactatttcgaaattggaatcatgcactagacatggtttcagatggaatatttatgccttcagttctcttttcatgaggttttttattgtaattttgaatcataacatggcttatgtttttccctgtgttagtcctaagaggtctaggaggg

SEQ ID NO: 46937 - DNA, 558 bp, Manihot esculenta
  Intron number 1 from transcript cassava4.1_011169m (locus cassava4.1_011169m.g) derived from phytozome v7.0 (chr-ID scaffold02307; pos 168578 to 169135 reverse strand)
aggtatcgtgcctatgatttatttgctgcttttcaatatgtttctcaatcttttctttttttaaatgtgtttccataagcatcaatcttcgaagttacacccactgatcttggtatccttttgagttgcctcaatgacatgcgttttctgggttttgactgttctgttaatatgataatattaaaaaaaaaatccatttttatgtttgggatgattacgattacgtttctggaattgctttcttctgtattgaacctcactaggctgttgctaactgtcttctttcttgtttctctgtttggaaatgatggtttttgtcaaatttcttgaacacattctcagtgttgcttgtaatttataatgcttttttggcctgaggggttttatcttgtagctctcaaattttcaatcttactgtctatgtaggtaaaaactagttgtagattacccattagcaaatgtatgccaaaatttcattatttgatttaccctttttttaaattgaaacttaattttttttcttataggttcttactgatcctcagaaaagagtagtgt

SEQ ID NO: 46938 - DNA, 708 bp, Manihot esculenta
  Intron number 1 from transcript cassava4.1_007985m (locus cassava4.1_007483m.g) derived from phytozome v7.0 (chr-ID scaffold03980; pos 45326 to 46033)
ctctattgaatactcgtatggccccttccttgctcgctgaggttttgttttattttcttttggttcagtaaaattctctcttattctgttattttttttcaatttctgacttgtattttctttttttattcttcattttcgttctcatggtatgctgctcttgttttgcatttgattgtaagtcaacgattttagtagcaattttcttgttgttctttgttgttttgggtagtgatttcaatgtgatttactgattttcttctttttttttttcctaattggatttgtagtatcagtatgctttctgtgttttttttttctctgaaaaccagcattgctcttgatgctgtttactaattgttttaacattgagagagccaataaactgaagtttgtttttaaaattttttttatttcatttcctagggttttgtttaattgggttcatcaccccttccactaaatttctttatttttcagttttggtggttttatgactgaaccaacggatgcacacccctggttagtctggctcatctaccgatccatgcacacatgctattggagttaacagtcgtttaatgtttaatttgtatgcttaaagacattttcttgctgctctagttcttgaagtttaccttgcttatctaacatttgcattttaaaaatttaggtaatttcacaactgcacagacaggaattgtcaat

SEQ ID NO: 46939 - DNA, 554 bp, Manihot esculenta
  Intron number 2 from transcript cassava4.1_010473m (locus cassava4.1_010473m.g) derived from phytozome v7.0 (chr-ID scaffold08477; pos 112601 to 113154)
agatacatcgggctgataaggtatttctattgtattttgagtcctatctctagtactgattgcttcatcattgaaaaactaaagtaattggtcccggcaatcaccccttccaagttgtgaagaaaactgattattgctacagctgtgtacatgtttattgagagacttctgtttttctatatgcttagagttttgcatcttgtggctcttggttcttttcttgcaccataaccctcttgctcatacaacatgcacatcacatctcttcagcacctctcctcataaaattaatgtgccaagtccaaggttttctttttttttgaaattttcctgtggccttattgggcatgcttactattgcaatgagtcagaggtcattttttggtttcaatggtcatagtaaatggaagtcacaacatgagttctttgcttttagctttccttttcaaatagaactctatttttaccttatgctttttttatatattgacctggaggtggcttggtttgattttctaggcgtggttgcataagttggggacagatcaatctag

SEQ ID NO: 46940 - DNA, 685 bp, Manihot esculenta
  Intron number 4 from transcript cassava4.1_009039m (locus cassava4.1_009039m.g) derived from phytozome v7.0 (chr-ID scaffold06916; pos 1827673 to 1828357)
tagctgatatcacagaaaagggcgtgacatttcaggtatttcttatcatcaacatcaaagttgctttctgaattgaaggatgatgcaaatatatttaaatgattctctgagttggtacaggatcatgatcctgtatgctattctaaagatccttgttatcaataaataaggaggtttagtgttgtattgagctataatggttgcttgatgatacttgatactgacaattttgtttgagaaattaaacagccagcttctatttttactatgctttatttgagaaagtcaaaattagaaatgcagtatatcggtgcttattttgatcatgactgtatgaggttaaaaagagttgatccttcgatattaatgtttcttgtccttttggactgttattctgttattctgtaactaaatgtaaccctttcttttgatcaataaggacattgagtgatgatttctttatttaggagtgctgtttaagtgttgttgtttgtctctattgtatttatgcacttatgtacttctccacatgtgatatatgtcattttttgctttgctacttctctaaaagtccctatcatgattttgcttgatttagctctttcgtaaccaagaaatggactatgcatcagtttactgttcctatatagctaaggcttccttttcttagctcagtcaccagttg

SEQ ID NO: 46941 - DNA, 512 bp, Manihot esculenta
  Intron number 2 from transcript cassava4.1_032019m (locus cassava4.1_032019m.g) derived from phytozome v7.0 (chr-ID scaffold01624; pos 81445 to 81956 reverse strand)
gtactggttagtagccttatactgatttaggtcttgttatgatttggtgctgcctgcattttgtttgttttaatgaattctgtgattcagtttaactgcagtggcaatttgttagtttggaacttgtgctcatccttctatccatttttcttactttgatattttcagacacaatatacattaacaaatttattgcaaatatctagaaactatacaatagaatgagagtggatttggaatggtgatgttatttttttgtagctctatcacgtgcaactcaagtctcttacatctattgttaataatagtgagcttatataagaaaattgattgttctgaatgtgaatgaagcagcaggtattttccttgttctatatttttcattattttggttttatttttttaacttgtttcacacttctttgctagttcaaaattttgttttgctgatattttttgcaacctaaacttcaataggtgttgagcagctggagtttgcagttgagcccacc

SEQ ID NO: 46942 - DNA, 845 bp, Manihot esculenta
  Intron number 2 from transcript cassava4.1_010517m (locus cassava4.1_010517m.g) derived from phytozome v7.0 (chr-ID scaffold00847; pos 1239565 to 1240409 reverse strand)
agcacaattttggtcaccgtccttatcaggtttgtttctgttttcatttttacttcttttaattcattctgaaccattttctttcactctttgtggttatcattggaagtcattagcgagacaggctcagtgccagtttggcattgaggttaaaatgtgtaaatggttttgaataaaacattgaaaatggtcttgaatggtcttgaataaaacattgaaaaacattgaaaacattgaaaatcgctgttttattatattatcttaattttttttgtgattaaaatgtgtaaatgtaattttagatcaatttttaatatatttaacttaaaaattaaaccatagtgatgactctatgcaaagcatggtaaggctatgtgcaatgggatgttgaacttcttttacctttaactagtattttgcgaaggtgggtttcaacagttcaaacaacattgttaaattgaaccttatttatattattggcatttttgccagtatgcttcttggcattggaattgagttttcttcaggatttgttttgttactttaactgttttggtagttggtggcttatttgtttgtagagtgcaaagattttctaggtagtaggagctctagttgttttaattccatgaaaggtgttatttcaaagtacatctttttgaacacttgccatgttggtctgagttttatgagagttggaggttacttcgcattaagtttcttttattttcaaacttgtagtcattattttggaataggatttataaatttcatagtttgattgtatctcatttatttggagcatcatagggcaatattcagagtttgactgctgctgatctcga

SEQ ID NO: 46943 - DNA, 888 bp, Manihot esculenta
  Intron number 1 from transcript cassava4.1_033836m (locus cassava4.1_033836m.g) derived from phytozome v7.0 (chr-ID scaffold00772; pos 504546 to 505433 reverse strand)
cttaaaagtgacaaagagacaaagaaagcaaggatgaagcagttgaaagaggccatggttaagaagatgttgctgtagtacaaaaggtatgtaatttgttgtgggtttggatgagaaacaagctgcctatgagtgggcttatatagctgaagaattattcaggattatcatcaatggaggtgatatggcaaggaccatgactagctgggtagttcaccatctcatgaatgttctactgataggttgacaaggtcagttgtgggataaatagatattattgtaaccgttgaagttgtatcatgatcaagaaaagcatctaaggttgttgatacctttgtgatctaattggtgggttatctaacgagagtttagagagttgaagcaacaacttatattcagtgcacattctttcaaacagaatcctgttgcaaaattgtactaaatgagagatattgatggagttaaacaaccaaatgcacattacacataaaggaattccaagaggatgattagattgacatagaagctatctgatgatttagtttggtggcatggttgctccatttctctatctgcatactttgactttcttccatttgaaaaatgttctgatttcaacgtctggccagctaaaacaacatttgccaacttttaagtggaagtttaagctaaacaaagagactaacttgaagagtttcacagttttccacaactacatcacctaccaaaccctacagctcatgagcttgctatataatcccaaaacctgactttgctttcctcattctaaaacataacaataatcttttatttcctttaagatcaatatataaaaaaaatggcctctttcaagtgcttgatctttgctgcattgttcattgctttgtt

SEQ ID NO: 46944 - DNA, 726 bp, Manihot esculenta
  Intron number 1 from transcript cassava4.1_014364m (locus cassava4.1_014364m.g) derived from phytozome v7.0 (chr-ID scaffold07465; pos 86296 to 87021 reverse strand)
atgtaagtcttctatttctagttttatattaaaaatttattcgactgctatgattttggtttgtcgtgtttgtttgctgtgcatagcatatgttcgctacatatatttcttatggcgtttaccgtttttgttggctagctgtgtgatttataatgtaaaacttgatttattatctctttattttctacaaatttaatgaattcatcaatcttggggaatctttccatttttcagcacaacttttgcaattccttgtttgatatgatttttaatgtagtcaatttctaggttgtaatacttcatgattagtctctgtttatatctgtaaaaaaaaatttctagatataattcatcttttttctgtttactagctatcatagtcaatacatctactttcaagtgtaaagctatcagttatttcaaaactgaaattggattgggatctttaaatttgggttcttgaggtccatttccaagggtgagcaagcgtgcttgttcttcaacaattggccatcgtaattcttgttatgctctttcctacatgtagcttctctgagctttttactagtttcactagttgtgaaatcttgctcatacctgtaacatttgagtggtgctcgctgaacatgtcattgttcatttaagtgcttgagatgacattcatagaagccacaaacatcatgtcaattttttatgatgaccctaaacaggtggaggatatcccaa

SEQ ID NO: 46945 - DNA, 677 bp, Manihot esculenta
  Intron number 2 from transcript cassava4.1_003034m (locus cassava4.1_003034m.g) derived from phytozome v7.0 (chr-ID scaffold08617; pos 145197 to 145873)
tccaaaatgtaagtcaagttaatgaatcggttacataaaatttgtttgttttttaaagtttttttattgaaccttcaatacattatgagctagttctagaagtaagggagataacatataaaatgatcttggtgcttttaacatataaaatgatcttggtgcttttcattctttaacaccagagtgtaacattctagagatgaatgctttcactatcacaaatgctctcagcttatattttaactctgtctgtcattaaggcaaccactcttccctacaattttgtggaatatctagaatcaacatagcttaattttgatgaaaattttaactcgtgcatctcaccaatagtccagtagtaataagaaaagtgttacaaaagcatatattggaggccagcccgtaaacaagtagatgcaagggcaagaactcgctggccttgttcaatttaaaatgatttattccaactaggctaggagaattatatatatacatatatataaatagatagagagagagagagagagagggggagaggaagaaatattgattgatacttttagcagtatattcaaaaaatattattgtttttttgtgcctcttcgaatccatgatgactgatccactttgctctggtaccagatttccattccttaaatataaattgtggaggaaag

SEQ ID NO: 46946 - DNA, 794 bp, Manihot esculenta
  Intron number 1 from transcript cassava4.1_011215m (locus cassava4.1_011215m.g) derived from phytozome v7.0 (chr-ID scaffold10152; pos 4701 to 5494)
tcgcggcctttcctactgcttgtgctcttgaagttaacccttttctctttgaatgttatttttattgggaaatttagtttgatttcactttggggttttaagattgttcgttaattattgagaaagattacacattagaaattgttggggaaattataataaactaaaataatagttaaaatacaagaaaggactgttgatatgaatgggatggatatctctcttttttttaagagattcaagcctactatgcagaccttctctgtcgatattcagcttaaattattctaatatagtttattaattataatatttaatattaaaatgtcaaaccagaagctataaatggaatttcctgcaaatattctatgttgggggaaccaattatcatattcacactaggcttcctatttatttggtcatgaattgcaaatacaaaacaatggtagcattggaatgtttttgctttttgtggaatcttttgataatcagacggttttgggttttgacatcatgtgagtttcattctgttaggctgttagcagtttcaaatagtgaaattggaattgggtatggagacttgatgattctgattcctaataagcaaagaggcacgtttcattagcacttacaaagtgttgaattcaccttttttcttttttaaaaaaaaaagcttaaagaataagaaaattgcttcaagaagtctttttttttctcttctgcactactttaggagaatatagttgcatagctgcagtggttgaatccatcataactgtgcttttaacaggtcc

SEQ ID NO: 46947 - DNA, 942 bp, Manihot esculenta
  Intron number 1 from transcript cassava4.1_009272m (locus cassava4.1_009272m.g) derived from phytozome v7.0 (chr-ID scaffold12211; pos 311690 to 312631)
tgtgtggacaggtattttcattactctcatgggttttgattatattttcgatttgttttcaattgtttattagaactgaattggatctgtttgttcgtattttcattttatggtttcgtagttttgttttgttgtcgcaataggaagggggaacgtctctgatttttttggatcttcgaattttttgttcatatctactttctgaaacaaggaatgaaatcttgtcacataaaaaatttgtctaatataatgcatgtgtttaggaagttctatttctgcaataatggccattggaattctagatttccattggcgttttttctatataatatgtattgtgctgtttgaaatttatctattcgtgtataaaaacttctattatggagattttgccttttcttaaattgcttgtttgggtgtttgcatgttgaggttttgaggtcttttcagtttaaggacgatggttttggtggatgctttgttcatgaaaatctgcctcatttttcaagtgaaaagctactgaaattttaaattgacttgtaggaaaaggttgcagatgaatttatgatacatgggtcttttgaattttttgtgttctattcgcctgctgaaagctatgattgcgtctttacttttacagttacttggataacatttgaagcatatttgtaaaggaagccttctttaagcaatcattgtttgcattagctcatccttcctggaattacacagagcattctcttggctaaaaaagaaaaagttgctttctctttcttgtaattttttggacatggttgctttagttatatttttccatgaagttttttgaagtttagtaaatttcacagatggaaaatttgttcagcttcatcatgctttcttctgaaatagttttcaaatgaactccccttaattgtgcaggactcgggccgagttttgagc

SEQ ID NO: 46948 - DNA, 906 bp, Manihot esculenta
  Intron number 1 from transcript cassava4.1_030100m (locus cassava4.1_030100m.g) derived from phytozome v7.0 (chr-ID scaffold02421; pos 85706 to 86611 reverse strand)
ggaacgcagatggtggctgagcaataatggtgttagggaatacaaaatataatgttgcagatggtaagttatggtggtggtttcaagatatgaaattcggcaagcaattctttcaggatcagaattgctctgatactatgttgaatgatggaatctgtgaatgattcagttattgtgtattcttctccggaaaggaggttatatgtagatatatttacaacacaaaatcaggagagaaaaatgaaacaattctattctaaggaaacaagataagtctgtacagaaaacaatatatatcagatctgttaattgtgcaaatctctatgattacgtaatttactcttaattagacagttcattcaaacaaatactttgcataaattcatatcaatagcattacaataatcaattaataaatcataaatctaatttattttaattttagagttaaaaaattgcaataacaaggcaaatcataaaaatttatttaaagtgattaagccatttgtttttattatttatatacaatactttagatgaattgaaaatgaggaataaaaaatttaggtatttagtgggaaatcaaatggaatttaaaaaaataataataaaaaagctcaaaacaatcatgccaactggtctattttagaatagttggttatcaaaaacagtccacaatagagcgttcgcttcaaagctgcaggctgcaggctgcaggcctacagcgaagcgccaggaggtgacactataattaaaataaactagtcataaaattgaaaaaaactcataaaactcagctggtttgtttaaacgtttggtgttgttagtaataattttagaagaaacatgttataaaaatttaaattttggattaacagagttcttttttttttataaaaaaaatag

SEQ ID NO: 46949 - DNA, 815 bp, Manihot esculenta
  Intron number 3 from transcript cassava4.1_011756m (locus cassava4.1_011756m.g) derived from phytozome v7.0 (chr-ID scaffold07171; pos 116319 to 117133)
gaggcgctctcaagtaattttttgactttactaatcgtaattggtaattttatgtttattatcttttgctgaagtgagtacaaattacaaattaagatttattgttcagtcgaattcatcactcctggtagaaccttgttctatgtcaattccaagcaaattctctttcaaattgtgtattattttttatgatgttgatttactgattgatcaattgaaagctctattttgctgtttttgatagtacgaatttgaaatgaatgtttatcggcctgggcttcttaaagccgtgtttaatggttaatcgggaacaaaacaaaaagccaacacttaccgtcgctgttggcaatttattttctttgtcttttatctaaatatatgtattttctttccattttacttctctcgtcttctaatttttgtgattgcaaagctttttctcgccgtagaattttcaatcttacaacatcttaattttgatatgcctagaagatttttcgcttcttttgtcttgtcagtacctactagactatataagggcatgcggaattggtaagtagttgaatgatgctagaaaattttttatccctgctgctgaaagctgtagactgcggcataaacattgtaattcaccttataaattttatattaacttgaattacctgtcctatacttgcaaggtttgcttctatgttttatcctgatgaaacaagagcttgtcaaataaggtagcgctttccaggtatactaatgactgatttgatttacttgtttattttcgtggttagttacaatccactggaaagaagagaggc

SEQ ID NO: 46950 - DNA, 929 bp, Manihot esculenta
  Intron number 1 from transcript cassava4.1_008480m (locus cassava4.1_008480m.g) derived from phytozome v7.0 (chr-ID scaffold01190; pos 9819 to 10747 reverse strand)
attgctgctcttgctcagccatctactttcacttggtgggttgtacgaaattttccttttttaattttgggtcctttttgaatgcaatcgttattgattttgatttaaattgggggttaattagtttgattaacttatgattttgggttgggatggtttcactttcttccctgcttctgggttttgattgcgtttgattattggtttatcagttaaaataatggttttatttaatgccattaacttattgtcaatattaaataatgttattgtgatgggaaacttgggaacttaactctatctgtataaatatatattttaccttttaaagtggctcttttaatcttatggtttgatctggttattgttcttcattaagtttttctttatggttttgggaacttggctgtcatagctgatttcagtatgttcttcttttttcacatgtagtactttgtttattattattattcaacctttacgaatgaagttttgtcatggagtttgcataaagtataatatacattatttatttatctgtgtgctatctgatttttttggttaacatttcgagcactcttttattgttgtctttttaagaaaaggacgcaaggagggtgcttttaaaatgcggttccaatgggtaagcaactctttatctaagacttctcaaatgtgtttgatttaagtctcaagagaggggttgtatgcctgtttagtccacttggatcatcttttgccttccttttaaacacagtttgtggcaaagtttttttcgttcttgtttcttttagagtattgagttattcttttaaattgacttggatatatatgcgcatcttgtattttttaaatctaaggttaacagggaattttattttgaaacctgtgaagggtatctaaggaggtatacgccccagcccttggtg

SEQ ID NO: 46951 - DNA, 595 bp, Manihot esculenta
  Intron number 1 from transcript cassava4.1_003939m (locus cassava4.1_003939m.g) derived from phytozome v7.0 (chr-ID scaffold04116; pos 502737 to 503331 reverse strand)
aggacgagggaagcacggctccgcttcctgagaaggtgacttttttcctttgtttttgatttttgcctttttgttctgtttttaaaaattttccttcttggatgatgggaaaaaggatagtgaaggagaaatagcagattagatgtttcccttttttccgctgcttttcacaataattttaaacgtattttagtaatatgttgagctgataagaaaaatggtaatgggattagtatttttaatctgttttctttctgtttgaaaaccaaaaacttgtgtttatagatttatagtttttatttttctatttgtgtttcggaattttctgattttgtttgttttgcaccatttggatgttttaaatggaaggtttccttgattcgaaccaaatggattgaaggaaaaatgaattcttatttgattaattgtattttttattttgttgtttatcttgagcttattttttctctcttagctaacttctaaattggactgagaatgaccggtagtttcattatagcaagccaatgcatcttaactctcttgtttctttgtaataggtccaagttggaggctccccagtctacagaataga

SEQ ID NO: 46952 - DNA, 748 bp, Manihot esculenta
  Intron number 1 from transcript cassava4.1_004741m (locus cassava4.1_004741m.g) derived from phytozome v7.0 (chr-ID scaffold10648; pos 43400 to 44147)
gcattgttgagcctattcgtaacatcgtcagaaaggtaatgaaagatcaccattcaaaaatggcatctgaccaacttctgaaatggcaactttataatagtccccttgcccttatgattccaccttcccttaaactgtccccaaattttctgctgttcaaaaatgggtcaatgtgatgttactttagttttcacgaggagatgattcaaactttttagcttttcttactctcttcatgctaataaagaatgtcaagatgaaatacagaaataacattgtcatcaaaatatgatttgtatgctcaaatgtcttttgatgtaggtcaatgaccagcataatccaggcaatttttgtgtgctaatattgcgctttgttgatttcttttgtaccattgataaatttcgaatcatgaactgttagatacatgatgttattaatagcactttttggtttgaagcatgaatgtcctacggttgatatggaacaagtaatgaacgcaatgcatttgtgtaagggaatgagtaagtttagctgttgaacaactatattagctgcatgaaatccaaatattgaaatttcatgattcaacccttgagaaaaggaagagtgaaggagttgctgaaaagaaaaattaaatcaaggaaaactattcaaatttatcacttttctgaagatgctatatctgaacatcaattatcattatgattggaagcagtaatggtccttgtttctatcttggtgcagaaaa

SEQ ID NO: 46953 - DNA, 701 bp, Manihot esculenta
  Intron number 2 from transcript cassava4.1_004814m (locus cassava4.1_004814m.g) derived from phytozome v7.0 (chr-ID scaffold03750; pos 1007527 to 1008227 reverse strand)
gtaaagttgttctgggctacctcaattctttggtggtatgtttgcacttggtgccttgtaatcatttctttgttattcttgatcttctatctgtttagatttgttttcggcagtcagtgcatataacaatttcaatcgggatattgatgcgttcataaattcttaagagaattatgattgtaaaactgctagtagccgttatacttttaaaggctcaggctaaaggcctgttttgtccatttaatgtgaagattgcagcgatgaaggaaactttccttttcttagcttaaacattgaagggttgcccattgatgctccttggcatttatatgtgctgatttacattgacgttcttgtttgttctaagagacttggtggatctgttgaatattgggagatacaaactattttgtagaatgtgttggcttaacatttgcagaaaattattgatcttgctcttgccttgcccattaatttaaccaatctcttctgaggtccatatatggtattcaaatggaaaatcctggctctacatgctcattcttgcatgattagatggttagatggctatatacaacatcttatgcattaattctcttaattcattagttcactttaactatatttccttcctagagttaattgggcccatttgattaacaacagggtcctgaaagtgaagagctcgcttctgcatcaag

SEQ ID NO: 46954 - DNA, 731 bp, Manihot esculenta
  Intron number 1 from transcript cassava4.1_019396m (locus cassava4.1_019396m.g) derived from phytozome v7.0 (chr-ID scaffold06916; pos 835028 to 835758)
gaaagagtaaagactaaagacaaaatactaaagactaaagagaaatagagaaatcagtttttttccccttcaataatgcatttcaggtgacaaaggctagtgctgaactgctgggtgaataaaataggtactgccctgcaagatttataaagttgagcagcggatgtgaaataaagaaaagtaacagccgttacccataatggtcattacagcaacaaaatttttctaccattatttacaggccttaatggccacggccagcttgcatacctgtaagttacgtaacagctattatttaaaaccatgcttctacctcttatctcattttcttctctttctcatctctatcttcttgacatagtttacttaaatgaacatagttgtcctcatgtttgacacctccaacctttgatatttgaacacttacttaaatagagcttggtaaggagttcttcaatagtacatctaggatcattcaaagcttagcatctgaatgtcagttataacagtaacgtctcatctgaatgtaaaatgtttttcatctcaattctttggtgcatcttatggtcaagaagttttgccagaaaataataattttgaactacttgtaaccatggatggagattttccagatcttttcctgtgtagtactgccaactaaaggaaaataaaagctaatatcagttttcatttcagtgatatcaagaacttctcttcagaggaagcctgtg

SEQ ID NO: 46955 - DNA, 770 bp, Manihot esculenta
  Intron number 2 from transcript cassava4.1_003088m (locus cassava4.1_003088m.g) derived from phytozome v7.0 (chr-ID scaffold05005; pos 244204 to 244973 reverse strand)
tgaggtattaataatattgtttccagcatgaagtttatcctatatgactggcatttgttgttaaacagcgcttttgtgttgtgagagacacagggtgacgttaatggatattaaaattttgtttttaccatttgactagaactgataaatggataaacaaaagaaaaaagaggaaaagcaaacttgcaaaatttggaggttgcatcagtgtcatgtggcaattcttttttaatcgtggaaaccctgtctattgccatcttcatattaataatgtacaagtaatatggttctaaaaggctacttattcttccgttttaacactttattctactttttttaacacccatttatctcatttatgaaaagtgaatttttttaatgaaaaaacctcgtattattgttgttaatattcagtaactcacattttgaagcaaaagtaagtttatttattaattacagaaaaatagagaaagaaatgaaaggaagacttctaaaaatgctagatacattaattttattcaagttcatatgccaatttgcggaaatggaagcatatgcatgtgtgccatcagccatgccatgtcttctcttgtctattttctatggctgttccctttttcttgtgttcttggattctggatgtgcaaattattaatgcctatggatctttcttggctcgtttggtgaaagagtggacggatattaagttaatacttacctataaagaataaaaagattatttctgaacgtctgtctccatggcaggcaac

SEQ ID NO: 46956 - DNA, 397 bp, Manihot esculenta
  Intron number 1 from transcript cassava4.1_003088m (locus cassava4.1_003088m.g) derived from phytozome v7.0 (chr-ID scaffold05005; pos 245123 to 245519 reverse strand)
tctgctttagaggtattcctacttttcaaaaccctatcagtgagtattaaatctctataaatacgtgataataaactattatgactatgataacaaatgattaacctttcttttgcacatgtgcattttcactgctgcctgaataaaaaagctacattggaaggttaattatccccctccccttgtggtggtacaatcttccacgtggtctcaatgtaattttttgtttatttctaatatacacattgttgacttgggttttccctgtttttttactttctctatgtattggtaaaagacttaagttttgctatctgtatgttcttttttccttctaattaatggtaagttattgatctttgacttaagtcttagtgttcattgtttctgttagata

SEQ ID NO: 46957 - DNA, 644 bp, Manihot esculenta
  Intron number 1 from transcript cassava4.1_025408m (locus cassava4.1_025408m.g) derived from phytozome v7.0 (chr-ID scaffold02023; pos 26986 to 27629)
ggcaattatataatattgcatgtaacttgtgcccagtgtaaatataagatacatattattaagtcaatattttacccaattaatgtacggaaaattcattctttccttaggcatgcaagtttttatcgatgatttattaaaaaattttcaaaaaagctcttattgcaataggatgttgagtttacttttgataattctttcaatgaggtattaatcattgcagtaatacagccctctgatttgagtcaaccttttaaaattatgtgcaatgctagcaaccggactatgggcgttactcctttatataataatttatatatttttattatagtttttgatagaatacaacaaatacgattacatcatagtttttcaggtggtagttaggggaagaggctattgtcttagttagttgtgctcacgtttttatcatgcatgtgatatgtttatgcacgtatatacatcagtatatatttgtatacgtatatatgtattatgtgcgggggtggatgtaaatgtcaatgacttcattgtcctttcattttttttatttagtatttatattgcatcaaattaatgtgtttttcagttattgagttgtatttgaatgtcttgttctatattcctacaggacaaaggcattg

SEQ ID NO: 46958 - DNA, 870 bp, Manihot esculenta
  Intron number 1 from transcript cassava4.1_001706m (locus cassava4.1_001706m.g) derived from phytozome v7.0 (chr-ID scaffold07660; pos 117270 to 118139 reverse strand)
aaggcgactctgttcgagactttttacctctcactgtatgctcaattttcaacttttttttctttgtaaattttctttgcaacaattcctcatcaattttcacacttccaaatcaacagaatctcaataaatgtaatatcatctaggatcatgtaatggaatactgtatagttctggagaaagtgtggctagtttatgtctttgatagttttttctccccaaagattaaattatttaatagtacgatgatgtaggtgtgatgtatattaactgtttgcttggtctgaatttagtctagtttccgtttcataagttttattttattttttatcacagtgaatatttttgtgtttgattttaattatgctctgtgggttgtatgaatacgtgtatttagaactttttttatgttgagtagtctgttagatggatatttttcttttaataaggcgtttctatggcattgggatgctagcgtattatttagatggcacttacgaaagtattcttttttggtatgttattcctaacatcaaagtaaaattaggtccattttctacgagtcaatgtggaggggtaagagcgaggaggtggttttactgtgataacactgaacatggatgggttggaaaatgaattccattttcaagaatgaagtccattttctagttcattcatgtccaaaagtatatggatatactgtcttcaaacttatctcctgcttgatgatgcgggtagaataatttcctcagaggatgattcttagttatcttgggtgtttttgtaccgaaaacaagtggatcttcaatcttgacaattttttgcttctgaaaaggttgattaccaagagaaacaatttgcccaaggtgt

SEQ ID NO: 46959 - DNA, 883 bp, Manihot esculenta
  Intron number 1 from transcript cassava4.1_021642m (locus cassava4.1_021642m.g) derived from phytozome v7.0 (chr-ID scaffold12086; pos 18977 to 19859)
ctcgctggttagatatagcttgtggccgtgagcacactgcggctgtagcctctgatggctcgcttttcacttggggtttgatcccttttactcatctctattacttttcttgattgtgtatcctacattgttgtttggagcacataaattttactcccaccttcgataggtctatttgttttttcatatcgattaaaaagatatagttaatatagtgaaagcaatagattgtagattgtcttcataatatacaattcactcttactgcttactaaattattcttgtaataattaattttactttctttaatacatattgaatagggtattattaggaagttaataaaaagaaaatatactgtggggaaaggaaagtggtctataatttgagaatgatgaaacaagaaaccgagcctatctttgtgcacggagagagtgtttgttatgattggtttgatatgtgactgtgatatgcagacacaatgaccgtaaaatttttttgttttgttttttttttttccatgaatttaattgcttctagatataacctgagcatacttcagtcattaccatttattttgttgctctgtacctgggatttggtcatgattttatattcttttaaagttttttccatgaattttaggatttccagaattttgatcttttatcatgattccattctaatacttctgtaaacacagaattgattattgtaacagttactaatttggccctggcacatgattgtcttatgagatcactatattgtaattttgttgctcatgccaacatcaggaaacaaggattatgcatggcttttgtttctttaacattccatgaagaaatgaactaataaatctatgaatttgatcaggtgcta

SEQ ID NO: 46960 - DNA, 586 bp, Manihot esculenta
  Intron number 1 from transcript cassava4.1_015087m (locus cassava4.1_012308m.g) derived from phytozome v7.0 (chr-ID scaffold06683; pos 355995 to 356580)
gcactacttaccgtaaggtactctttatcttctttttagttcgatctactattgttgatttagatttacgatgttctagctattttctgctattgatttgggaaggaaatgggtatttgtagttggatcgagcttctttatgtgcttgacatgcttttagattagtgatttcccctgaaatttttggatttttctctaaaaaaattggcctgggtctttgttttttgctttattgcgttctatctctatttcttgtctgattttagtctctgttaggccaaatgaactggatgggcttgtagttatagttgtcttatgtctgctgttctattcatgctctattctaattcctttctcttgaagaagagattgcattggaattgtatgctaatttagaggtggtccattcgcggggattttaatttcagaacttgaaagatttaatgaatgatcgattagcttttgatcgagcaaagaagctctaattgttaatctttctttctttgaagaatttaaaaacccatggttttgaaactttaattgctctgcaggtgttgtgtggaaactcttaacttcttccaccaca

SEQ ID NO: 46961 - DNA, 911 bp, Manihot esculenta
  Intron number 2 from transcript cassava4.1_027002m (locus cassava4.1_027002m.g) derived from phytozome v7.0 (chr-ID scaffold07379; pos 859 to 1769)
actgtcgcgattatacaagtaatgtgtaattgatctcttcttttgatagacgctaatctgtggtatgcatcttttgtttattatcttgttaaaactatgcaatctaggaatcttgtcagactctctctctctctctctctctatatatatatatgtatgaattctaaggaaacatcttgctgccttggtaatgcatattagtgtatttttggattatatttaggttaataaacatctcctagtgagtataatccattatgttagatttataacttataatcatagcaagaaactatttttcaattagaacagaaaaagtgttcctcaactggtaggagtatggtagagaaattatttgggttttatcatcgcgaagagtggtttttgcccagtgaagtataatctcatgaaggaagaagggagagatttcagctcaaggcagagaagagttttgctcatgtagtttaagatattttttgtagtatataacgtagttacagtaaatatattggattatttccagaggaaaataaaatggattaactaatatatttactgtaaacagtttgccgtgaggattaattgagtataatcgggttgatgcgtagatagtttgagtttttaattaatgacactattgaaagataatgaaagatgaatgggcgtggatgtagtcttatattgatagagcgaatcaccttaaacttcttatattttgcttttttaatttgtggggattgtcccaacacattatcattatgcaatctgttctttatgaaacatcccctttctcaagggaagatcaagaacacttgaattaaattgcatctcccttgatttatttctccagcctattaatttattcttttgcaaactggaaggattggtagaactcctcaccggtgaaagaa

SEQ ID NO: 46962 - DNA, 1015 bp, Manihot esculenta
  Intron number 1 from transcript cassava4.1_026295m (locus cassava4.1_026295m.g) derived from phytozome v7.0 (chr-ID scaffold10097; pos 122344 to 123358)
caagatctgaggtaaaatccatctgggtatccctctttttgtttggtttttgtgtactcaagttgagttttgaaggtttttagtagtattatcatttgggtctatttgatttgcttttgttcctcgttttagaacttatttttgttcattttgtagtgtttaggacgggattttatcgcctacatttttttcctctgaacttatttctgtttagaactgaggactttaatatgaattgtacatggacatttactgttttgcttagaagggaatcttagatttatttgcttacgtatgatttgattgctaagagaaggaaagaagaataaaaggttgttgcctcagaattatagatagtcaattttgaggcaagtaaccccagccttattctgatacatcaacatgcttaattgtaatgaatatttgcaattttcagagtacaatgaaaataaccacatcttttcttatcttctcctcctggcaaccaaagtgaatgctctttgtacttgtgtaatccatcatcaattacttggagatcatctcccaaactatagtttgcattttattgttgtgaaatttatttgagtggagtttgttaggaattttccttgtgcttattgctggaaattgtccttgcaagctggtgaatttagtggttacagctcacttagtgaatatgtgtagtttcctcaatttttttttaataattagaatctgcattcaccaacaaggattcctgaaagcgtttcttgatcctaattactgtggagccatgaaaggatgttatgctcttagttatatgtggaagtaacatctgatgcatgaaacttatgaagggtccactgaaatatttgttctggaaattaatgaagccatgatctttgaatgttgcagattgcatagaatttaatgtgcaggtttcagttcaaactgaaggcagattgatattcacgatttcttattgatttgttgatcattttgtagaactgattctggcatcgaggattctactgca

SEQ ID NO: 46963 - DNA, 794 bp, Manihot esculenta
  Intron number 4 from transcript cassava4.1_002675m (locus cassava4.1_002675m.g) derived from phytozome v7.0 (chr-ID scaffold02658; pos 748218 to 749011)
tcatctattgggctgccacaaatcagctttccgaggtaactaactaatttctagcaattccttccatctcatttgttatctcccacatcgatggatataatatataaaggagatttatataagtttaatcttccaataatttttaagttttaattaattattttagatatagtggaatatcattaatagttctatttgattagattaaattaaaaaaatgaaatttctttatttaataaaattccagtggaagtatatgctaatactattcttagaaatgaggggaaaatacgaataatatggaccacaatacaaagaaacaaaaatagaaaaacggaggagttttgtatactcaaggaatcgaacgtagtgatgaaagctgaaatacagaacttggcagcatctgccatctattctatacaaatacagtattctatctttaataattggccttcttttttagtacattttccttgattttgtctgtggaaagtaggggttcgaaatatggagttgcatgcttttttgaccacccattttcttacctccataaaataagacaggctgcagttgcacggtgcactcaatcaattaacgattaggatcgatttggcagagaatatagtgggtgggagtaggacccactttagaacatgtgggtcagaaagtatgaaaagggtaggacctgagcctgacttgacatcaatggttgtttttggaggctaatgcgaatctgggtttcagggtttggccctgtttttcagttaatggactctttcattgcagatactgaa

SEQ ID NO: 46964 - DNA, 1047 bp, Manihot esculenta
  Intron number 3 from transcript cassava4.1_010973m (locus cassava4.1_010973m.g) derived from phytozome v7.0 (chr-ID scaffold04457; pos 426700 to 427746)
ccctcaagatcttttcaaaaatcctccattggtaaggtctttcgccttgctgtaagtttgagacacctactgttatggactcttttctagtatttaatttattttaggattagattgctttatcctttattttaggattagattgttttatcttatctcttagttttcttattcctgaggactcctatcttagtagacattaacactatccctatatatattgctgaaaaatcagaaaaattatttcatctaaattgagatatgtaactctctctcatcgagttcaaaaggttagagctccctttattgagctcacaacaacaacaacaacaattgagcgaggaaagcatcaaggaaaaccatcggtttcagccttggacactgattttactgctgattttactgtaagcctgacgtgatccataaccctggaccgtaacacctacacaaagagaattaagcattcacatcaaactttccagccaattatcttagtttgtaattgttttagtttgctgaggtatgggagagtgaaggagatttctaaagtgggctcaccttttgcttcattggtcaacttttgcctttctatgaaggcctacacaaatagagccattcacttcatatgaactatttccctcttatctatgtttggcatggttttctgaagattcacagagtaatagatataagtaaaggggtctgctatatattcctcccatttctcatacggtttcctagggttgaattttcataatcatttgtcatgagtttatgtgtttagtatctttttttttttcagtgatcaaaatctaatgaaggtttgatgcatgaaaatgtagaaaatcttttttcatacagtgctatgatggtgacctcagtacctcaatgtcaagttcttgcttttacaatctttttccattccacatctttgcctatgttctgaatgggtgactgaaatctagtttttgttatttgtttgaccctagagcaattacaatttttttggcagattgttctatctggttttgggtcaggtgagcaaca

SEQ ID NO: 46965 - DNA, 368 bp, Manihot esculenta
  Intron number 2 from transcript cassava4.1_011939m (locus cassava4.1_011939m.g) derived from phytozome v7.0 (chr-ID scaffold04457; pos 185245 to 185612 reverse strand)
tacaggtatggttctttttgttggtgtgtactgtatattctgtttcattaagatattcacaaaacgtagagctgcatttcgtgtagtcttttatggtgttttgtgccccattgcattgattatttttttgctgtgctgcaactttgtttcccagttgcaaagttgtttatagctaattattgttactacttaatgagccattataattttaagggttggttttcttcaccaatggctccagacttcgtacattttagcatggtctcgtgtttgtatgctctaatatcctttctgaagaattttatttgaatttggacgtttatttttctgcagcattctcttgcaacagaccttcagaacctctcaat

SEQ ID NO: 46966 - DNA, 440 bp, Manihot esculenta
  Intron number 1 from transcript cassava4.1_021445m (locus cassava4.1_021445m.g) derived from phytozome v7.0 (chr-ID scaffold04457; pos 73031 to 73470 reverse strand)
acaatctccattcgcacaagcgttacctaagcgaggtttgtcccttttaaaaaagaagtatcgtaattgtaaaattatgactgatatttgttcaattttatgacctttctttcctttctcaatagttttttgttgatgggtcacaatggtcttcgcgagacttgaaccgggttttcttcaaatgctcatctgtgtgtttcttcaactttactttattttgactcttgggtgaagtttgtttctctatagacgcaaaaattgttgtttttctttgtttgtttatcaatcgaatacgaaaaagaagtttctttgttcaattaatcaagttttttggggatgattatctctaggagatttaaatttaattgtcaagtttatttttaatgcttatttgcatttaggtccttaattcatcgaaattttgttgtcttgtgcagata

SEQ ID NO: 46967 - DNA, 767 bp, Manihot esculenta
  Intron number 1 from transcript cassava4.1_000743m (locus cassava4.1_000743m.g) derived from phytozome v7.0 (chr-ID scaffold11584; pos 242903 to 243669)
gctctgtattttttctgtcacttacttcttatctcgtaagttctttcggaatttaattcaatttgctttcgtggctctttgattcagtaattcatgctctgaatattagtggagtttttgctatgaatctgttttaagtcgaagtagaggtatattttgggatcaaactataaaaatttaatttgcattttggtgctacttcaatagaattaaggttttctacctttttgtatgttggttctattcatttgtctgaacttatctgccttgtcactgtttatgtttccaatgatgtaacgttatctttttgttatttgcttcaactacctggtacttttattttatttcaaatcagatggtttaggtcatgtaattttatttttagcttcagtgggcctattctaagctctgtacttaggtcgttatgctgtgcttgcttgtttcttttcagaggttaacattatttttcttaatcattgttttgactgccaataattgaaagaatgttaggttgaggattttgctgcagtatttctttaattaaaaggtaaaggtaatatcagataagcctagttttaaagtaggttaaatggtatggactttattgtttgtttgagtcctaattaatgagagacttgtgactaatggttatcagacacatatgtgcattcctacatcacgtcttttacatttttcaccaaccattattttgtttgttgttgatgtttctatgtttcttgttattcattatagatactagttcttca

SEQ ID NO: 46968 - DNA, 864 bp, Manihot esculenta
  Intron number 1 from transcript cassava4.1_012534m (locus cassava4.1_012534m.g) derived from phytozome v7.0 (chr-ID scaffold01608; pos 90189 to 91052 reverse strand)
caggtactggaaaatgttttgctcttttgaatttcatcatcctgttttattgttttctcttactctctatctgaaataaattgaaggcatctatttcatggtgtttgcagttgtaggtttatactgaaaatatatcagtctcctagttcttctcaaatatgtaccatcatgttacacattgaaagtttctttaaccatagttgattcaatcaaaaaatgttgtccatattggtttgacttgttggttcattctgaagacgtggctgatgcattgttggtctagatggttttgtggccactatgatattttttattaaaccttgctgccatattgtcaaggtattatttttcaattgaaacttcaaatgtgatatctgttcctcactaggaaaattaggcgtttagaaccaaaagtttctttgttgggattgtaatcatgtcaggcaaccacatggctaatccttttcctattccttttcttcatactcttgagtgcaggtttgaatgttctgattgctgcattcttcactaaacattcaagaaaggaaaaatgggtaacattgaactgatatatactatgcttgttacttaaagtggccatttcctgatgctgaaaagtgagatggccttttgaaagccttgggcttgcaattaagatatttaaaaggctttggggttgggatatattgcttctcatagaaatgctgaatgatgatattgtagatctttaatcgcatgtttggttggaccatatttaggtgatgctctttgcaattgttactctatctacattgtttaatggttttttaacaattgttttatgaggtagacataccttcaatctcttaccgtgagacttgagga

SEQ ID NO: 46969 - DNA, 863 bp, Manihot esculenta
  Intron number 1 from transcript cassava4.1_012647m (locus cassava4.1_012647m.g) derived from phytozome v7.0 (chr-ID scaffold09180; pos 397096 to 397958 reverse strand)
tcctgatagtatcgataagctgagggcggttttgggtatgtgattcctttatccgtttctgtttgatggtgggttagattggtgagagggttttaatcaatttgatttaagtgttaaaaatgtcatttgcttaaaaggggcagacattagaatttaataatatggctgcattttaggattggtttatgggtttaacttgtggcaattctgattaagcaagttattcataccataaaatgaaaatggttcattgttagttttagtttttatccgtatatctgttagtattcaacattgacatgattgttcttgatggagacttacattttacatgtaaagattgccatagtaaaattaagattttttaagcaattaggccttacattaccttttccattagcagccagttgtcttgttaatcatggtttattttaactatgtttttctatcggggaatgggacattgatatcttcgtattttgtctctttaatagtaaatttgtgtattttttaatcttgttgttgtactaatttattatatagaaactggtgtttatttgtaccattgttcatcttgtgtgttctccttggatcaaagttatgctatttacttggtgactttgctttcatttattctgccagttataagttttattttaatagcaagtggcgattatatatatgtgtttatggatgtgagatatatttgaaattgattgtttattctgtttgtaattgattgatattagagctcagagcacagttaaaaatgcaaatcaaatcttggattctgattctgctagattaatcttgtttctcatttactttgtagttgattattaatggctgtttcctttttaaag

SEQ ID NO: 46970 - DNA, 588 bp, Manihot esculenta
  Intron number 2 from transcript cassava4.1_003733m (locus cassava4.1_003733m.g) derived from phytozome v7.0 (chr-ID scaffold09354; pos 125998 to 126585)
acactcctcttgaaggatttcaggtttatttttaattattttgtctcattttattattttttttcttctctatattcttcagcaagaatgcatactcacacctatcccatattgcattatcttttcttccgtctcctgggaattttgggagtcggggcggagatgtgtggtggtggcgaagctattggtcgatacgttgtctttttgtattgcgttattgagttctcgcatcttattcacactaaaaaaagaacaaaaaaaaaaaaatcatatttttgttgtgggcccaacccaagaagatcaacatctgcaagacccatgatccatttttctaagtaagcttgcctttactaaaatggcctaaactatcatgtttaagctttgacattaggaatagtaatagattgggtatttcagcgtatttgtttggatcaaactctaataaatttaaaatagatttgagatatattcaaataatttaaaatacatttaatcaaatttgataggtttctgatattgaacccctgtttccgtacttatattcacttctctctttcacaagttacttaaaattgcagataatagtaa

SEQ ID NO: 46971 - DNA, 950 bp, Manihot esculenta
  Intron number 1 from transcript cassava4.1_007684m (locus cassava4.1_007684m.g) derived from phytozome v7.0 (chr-ID scaffold08151; pos 147704 to 148653)
tccaagggtacttacagaattccattccctttcatttctcaattctcattcattgaaacgtgaatttgttttcatgaggatctagattctcagtttatggaagaatcatttcgttttttatgcctgttgctaagaattaaagttgccattcgccttcattagctttaagtggttcagggttattcttaattttgaggaaacatttgcataagaagcttcagatctcttatttttgtgcttaggaatctggtctactagttcctggacgtgaaattctgaagttattttaaaatttgtgtaaatctttgtcaattgtagcattaagatctcaataattaaatgtcacggctgataaaattgatgtgggctttgttgtctgtgatgagtttgatagaattaaaatgggtgatcttgcaattatttgtattgttttcacatttgaaaaatgaaatactgtgttttaggagcaagcaagatatttaatcgtcatgcacaaaaatgctgtcattttagttttatggtttcacatgaagtggtaggtcctgaacacattgatatattgggagatgcatctgaggatagggtgctataacactggcctgatctatccttctaaaaatgaaatatctgttatcagaactccagcctctcttcttccctctctttctttatctgtgtgtatgaatgcatatgtttgttcggctacaagttcatctggtgtttatgtgcttgaaaagtgtcatcttatattagctctaaagttaagccacttgatcttgacatccatattgtttgctcgtgctttgtgatcatatttattgctgctagctgtggattttagattatgaattattttgtcttcaaacttcaaaagcacttagatttttttttctgttcaaatctttttcaatgaaggttgcttaaaggtcgtagtattcctggtaaaatat

SEQ ID NO: 46972 - DNA, 426 bp, Manihot esculenta
  Intron number 1 from transcript cassava4.1_017205m (locus cassava4.1_017205m.g) derived from phytozome v7.0 (chr-ID scaffold09260; pos 353174 to 353599 reverse strand)
cctgctttctctgtccatttcttcccttacatcaggtatccgtcttcattttttattgttcatctctcgtgttcctcctttatttatcgtttcttttggttaattttaagatgattttgatattttgacgtttatctttattttctgctgtgattttgcttatactgttgagatttttcttagggtttgtatctaattttgtccaagaatggatttaagagaaaaattgtgagaattttttaaataggagtatagagtttacgatctgtttgaaaagtttattatttgaatttaaatttattttcctcgattagtccatggacaacgtgtgtaggatctttgttgatcggttaattgagtgttgttattattgatgtgtgtgatctctgggaataatttgttttatgatttttaatcgtaggagct

SEQ ID NO: 46973 - DNA, 523 bp, Manihot esculenta
  Intron number 1 from transcript cassava4.1_002998m (locus cassava4.1_002998m.g) derived from phytozome v7.0 (chr-ID scaffold12211; pos 225424 to 225946)
gttgcagccgtgagtgttctgaagctctctgtattttccccccacttttggaacgctttatgtgattcgaattgcataacggacatcaaattttttccacagcattttgtttagacatttggtaacatgattattgtctggttggatgttggaaatttttttttgggtgtgaaggataacttgattgttgtctttgttctgtggattcggttttttgcagaatgcaacgctggcataatttcatgttcttgaaacgtaggcaacataaacatgtaaaataaagcctcctgtcacataaggttccctgataagttatatttttggctgcggatgctagtcatgcattgtggtttatactgctaaattttgaactaacttttctgtctaattttatttggagataaactgtcataatatagttttcttaatgattctttgttttgttttttttcttctttttaataactaaattattcatgggctgtcaggtttcggagatctcaataccacatttcttgacagc

SEQ ID NO: 46974 - DNA, 959 bp, Manihot esculenta
  Intron number 2 from transcript cassava4.1_013272m (locus cassava4.1_013272m.g) derived from phytozome v7.0 (chr-ID scaffold09372; pos 230542 to 231500 reverse strand)
aggcaaaagaggttggaaatctttcataatcctgtttagtttctcttgtttttgacttccatgaattcaagatggcaaacaattcaattcttccttcgaatggcatctgaaagtgctaactttcttctcacaatgagatttcaattacaggagcagcttcatgtgatctaccaagatttagtttctaactcaaattgtattcatttatttcatgtgttttgatttcatacgtgaacctacttataagattgaggcctcatgaagtaaaagttctatcatctgcaaagcgtaggaaagcatactaacaaatttcttagactttctaattggatgtaggattggagtaacaaatttcttagcaactaaaggaggcaattgtgtaagccaagttaaggctaaaagtttgatctgcaatgaattcaagagtggctgttcatagataatcttactgtcttaacctttctctctctgcaatcagggttctaaaataacaatcagtgaaccgcaggatttatggaaacctaaggaattagttgcattcagttcttgccgtgtatttagattgtcaaatgctggtgatacaagcatatatcccagtacgatgaccataaatgcaactgcacttaagattgtgttaaagcatacaaattagtggacagaatgtatgctacagcctgaagtgcattgattaagggctgataaagtattcagtaccatctagttttgtaagtcatagaactcatgcctattgatagacttggattttccttcttactagtggagcacataatcatggctgtgaattagttcttcatgaatgaggttctgggctttagttatgcttggtattttgatttactcttaagtcttaggttgaatgttgttattggctagagtcttgctgataatgatttcatgttttagaaacgagcaaaattaaatattgaaacccccagcat

SEQ ID NO: 46975 - DNA, 910 bp, Manihot esculenta
  Intron number 4 from transcript cassava4.1_023619m (locus cassava4.1_023619m.g) derived from phytozome v7.0 (chr-ID scaffold05255; pos 17492 to 18401 reverse strand)
gcatccaaggagcaacagtgccaaagtgggtagtaataaatcttgctgtttaaatagcactcaaacctttagcaaagctcagttcttcatgcagtttctaagaaaatttgatgtcctgctccgactatttttgcaataaatcaccgttctggatgttaaatttgggtcaggcctaattcacccaaaagctagcacaaggggaggagtgcctgtggcccatataagggcacattaccactttcgtttccacaaccaacatgcgattcaacacacccctcgtgtccgcccagaattttactggtgcgtccagaattttactggtgcatgacagatttatatgaggcctaacattggatgggaggctctgatactgtaacatcctcaaatccatagctagagtagtgacatcactatgtatgggttagactatttcactactagagtaagtggcattaggggaggtgctagcttaactctaagctgctaataactgaatcataggaaactgaccttgctttatctacacttgatagggtaaggggtgttacagataccatgttaaatttgggtctggcctaactcatccaaaagttagctcaaggggtgaagtgtctatggcccatataagaggtatattaccccttttcataactgatgtaggattcaacacaggagatttatgattttgtactagcactattaagatttcaacacaaagtgggaggaacaaagagtttgtaatttgacaaaggaatgacttataagctcctaaaagagagttctactgatgtatagggaccactaccattaagattgaaaatatcttttgattactagaacagctttttttcttattgtttactcgcttaattgtactgaaattagccttatgtttgaacaggaggacagc

SEQ ID NO: 46976 - DNA, 477 bp, Manihot esculenta
  Intron number 1 from transcript cassava4.1_003685m (locus cassava4.1_003685m.g) derived from phytozome v7.0 (chr-ID scaffold04457; pos 81231 to 81707)
agcttgcggccttcgggtcacctctatcaaaataggttttctttggttgtatttacctgtagttctctacttatgttctgctctggcttctggttttacgtgttctattttatgtttttttcccccgaatattaacgtggattgcttgagctactgcaatgactggaatctttaattttcgaagctttcttgtttaattttattaatttgctcgtttagcattgggaattatgctttttcgaaacttagtgatccgatgttatttctttttttttttttctttttttttttcttgtgtgtgtgtgtaaatatcaatctcctggtttgtttatacaaaaagtgaggctgcatcttcttattaattctctttgttgatgaagctaaataatttgagttttgattttacagcaattgccttttattgtttcactatcttatatttccgtatatttcttgcagatccttacctgaatactg

SEQ ID NO: 46977 - DNA, 577 bp, Manihot esculenta
  Intron number 1 from transcript cassava4.1_027995m (locus cassava4.1_027995m.g) derived from phytozome v7.0 (chr-ID scaffold03484; pos 10362 to 10938)
tttacagtgacaaagttatcaaaagtattatagtggtgagtaataattacatgccctctccactttctattttagcatcattaggcatttggattattacccatgaacccatgaacaatcttaccatatctcatcaatcaaatatgcatgtctattgattcaagaaaactagaaatgcctgtcaagggctcattatgcaatggttttggggtctgaaagcaagtttttgggaaatttccttggagatcagtggaattcattcccaatttagcagccaaatccaaatgagttgggatattggctcacacggtggggttaaattctactagtttctgaaaaagcatgatattaaataatattggagttctcgtgattaaataaaatataattgtgcatgaattagaatatcttataaatattataattttattctcccagatcttcaaacttaaggcgaaccagtgtttgttcttcttcttgtttgaatatctgaagtaaaaaatatttttgtaaaagtagtagaagtggtagacaaggtcttagctctaacgttctaaaatcaatttatacgcttcag

SEQ ID NO: 46978 - DNA, 586 bp, Manihot esculenta
  Intron number 1 from transcript cassava4.1_002927m (locus cassava4.1_002927m.g) derived from phytozome v7.0 (chr-ID scaffold10045; pos 181254 to 181839)
agcaaggtaaaatgatttgagcatctcacttgatttcgtgtagttgctcgtaggatctactatgtcacagcattaatgatgataattcactttgttttccttatgctttgttaataatcaggtgctaaggtttaactcatttatgccttcacatcatatcatatttaagggatagaagaagaaagtaaagaataaataaagggaaaacttggaatattcattgcgatttttgttttgaattgttatagtgtttcaattttatctttctttgtcttttgtcaactagttgaagcattacttaaaaatatgaattacaaggtgtttatcttgtttttctacatatgtttcatatgttgcttttctaatcagctctagcaattcttgtgcggacttatttggaattattaagtttaggagatttgcctacctagctaatgattgagcaacatttttactgattatggaaatatggtttgctggccatgtcctgtagttgactttcaaatatcttgttattctatcttcctagttagaagcctgattccttgttctctgcagctcaaaatctttgattctgcctatacaa

SEQ ID NO: 46979 - DNA, 1011 bp, Manihot esculenta
  Intron number 1 from transcript cassava4.1_008845m (locus cassava4.1_008845m.g) derived from phytozome v7.0 (chr-ID scaffold11661; pos 326840 to 327850 reverse strand)
acatcctcaggaattcaattccttttgctttgtaattcctcacctctgtttttgttttcccttttttgtgatttaaacgattacctctaattttgttttgtttgtttgattatgattcagattgatctgtctttaatcgggtgcttttgatttttattttaatctctctctctttcacaaagaaagtaagaacctttaggtgtttggcgcttggtttggtttggttagggttaggtaattggacaggggaacgggagtgatcggattcgatttggggtttatgtagttttgattgtgtggtagttaattttgcttaaaaaactatgcaatctcggatcttaggatatcaacaattagacgtattatttcttcactttgtctgtttatttggtgtacccagttgattattttgagaattaaggtgtctagtgcaattgggtaggtagcttatgcagttatttgtgttgatttatgtttcatttttgtatttgataagtgatgaggatgggtgtttgggatctttatcaactatagttactatgataaggatgatgcttgatcatcctgtcaacttctttttcatgcttaattgcttttctatagtgatcattttggaccttatttaatgacgtacaccagtttaaaatgcatttaatggccatccatcattatgtatggtgtgttctgtgtcaatgttgttcaggatgtctctagaccagttgtaaagttccatttgtcttggttgttttttcatgggttatgcaatttgatttatttttatcatgcccactactaatgcaatcccagaagtgtgttttcatcggatagcaaagctttatgacttattacttttctaacctccgcttaagtttaattttgaattgctagcatgtgttttgttcattacttgcataatatgtattctgtatttttcttctgctattacccttataatttttttactaaggtccgtgaccatggcttatattttgtggtataactgcaggtttt

SEQ ID NO: 46980 - DNA, 993 bp, Manihot esculenta
  Intron number 1 from transcript cassava4.1_013245m (locus cassava4.1_013245m.g) derived from phytozome v7.0 (chr-ID scaffold02658; pos 867997 to 868989)
tcttctctgtagatttacctttcgattgcaattctgtaagttcttattgattttttttttgtttttctttttcggaatgatctcatacgttgggtagttttcttatcctggtttgatggatgactattgtttttgtttgatgtgtgaactttttttatttttattttttatgttgtagttaagagtttgtttagatcttctaggagttttatgctgactgattgatatcgtctgcatgaatgtttcatatcgctgattgaattagggtttttttctttaaaggatgaatggttgttcttatttttgttgctattgagtttctcgtgactgctagaaatcaaagatatagatttcaattgccgttgaaataagccaatagtgggttttgattgatatatgattttttcggatggtactgaaagaagatcttcatttttaataatttgagcgtggtcatctatgaataaccaaaattacgcgttgaaagaagccaataatatatgtgtttataagaagataaccaagttttttaaacaattgccttttttgatgacctattgcattcttgttgcggaaactgaatgggaaaatattatagaaaatgataaatgaaggaacttgggtaactttgggtctctcattttatgtgtctgcttatgcgcttggtattttgcattatgtttggaagcaaacgaaagcttgatctatttcatttctaaaatttcacaagtgtttattttcatgggtgcaaattggaaacaatggtagatttatgtctttaattgaaacatcataaaacatgaacataatgttaaattcatatgcctataatttcatgtctgaacttatttccctggttgatgaaaatgttatgttatggtggaagagaatcatcttttaattttcttgatctgtacaatgatcaaagaatttcgttatttacttgatattttgtgtatggatgcaaattcagaaagatttaggacttggagg

SEQ ID NO: 46981 - DNA, 377 bp, Manihot esculenta
  Intron number 1 from transcript cassava4.1_031570m (locus cassava4.1_031570m.g) derived from phytozome v7.0 (chr-ID scaffold07351; pos 501390 to 501766 reverse strand)
cgcctctcgtttctctacttaccgtttttactcttgtaagtctgtgtcttcctggcccttgttctccttttgattttgaatttctctgcttgtgtttcgggtatttgttggttttctgtttgaattttgaagaaatgactggcttacgattgcggtattgtcatatatgtagattatcaaacgtgaaccaatgcagtcattctattctgtcttcttctcttcatttttttaaaaagttagaaactaatcatgtgtaatttttttgtgcataatggggaagcgaattttaatagttatgtgggaaatttaatcgtaatggttgtttgatttcccactgactttattctagttttgcagcacttcattctggtacattt

SEQ ID NO: 46982 - DNA, 573 bp, Manihot esculenta
  Intron number 2 from transcript cassava4.1_003028m (locus cassava4.1_003028m.g) derived from phytozome v7.0 (chr-ID scaffold01945; pos 369984 to 370556 reverse strand)
ctttggaatttatttctcaaaagaggtttggtttctgtatttcctcttcaatttttattatttctttatggttaggttctaattggactaacaaagcaaattttattgtaaaaagttaattttccatctctctaagttactggatttagattttagaggacttgttcaattagttaaagttcacatctttttgcatttaattgtagaataattggtgagagtgcatatatgtaacttttaattctgtcattgtgctcatgacttttaattttcaaaaatttattatggccttttatatctgatatgaaaagttgacaatctgttatatatatatcttagaatgcattacgtccctggacatccacaaattattcttattttgtcaacaatttcataaggtttactttgtggatatagctgccctgatcattttataagtatcttgaattcggtttacttttacatcagcttgctcatttattgctagccactatgccaactatgtagtactttctttgattttatgtattttcaataggcaggagcaatcagagggcacatcagttcagcctg

SEQ ID NO: 46983 - DNA, 643 bp, Manihot esculenta
  Intron number 1 from transcript cassava4.1_009741m (locus cassava4.1_009741m.g) derived from phytozome v7.0 (chr-ID scaffold10719; pos 177094 to 177736 reverse strand)
tcaatcctcgctcccgtggcttatatccgtgaaaagtaattcaatttgtatgggcttttgtgtttttcccctttctgggtttgtcttatttagcatttgatgtctgtgcctatttggtccatttgtatacatgtttaggagaatttttaccaatgcaatggtttttaattttttaattagaatcttttttctttttacttgtttttgtttttgtttttttttttttcttcaactctcagattttttttggttttttgccgatcaattggggtgggaggggggaggacaagatggctacctccaattggtattaaatttgatcgattttgtatataagacaagccttgcagttttattcaattccatgtgataactaagtgaattatattttgccagtatgaatactgattctcatttgcacttttgaagtgcagcttcaatgatgatgacataataggcctttggacatagcgaaatgcatattttgcagcttttcctgttggtttatttagttgtcagatgggcagtacaagttcttaatttcttatgacattgttctgctttataatttcatatattattccacatgatgcataatcctgagacattttgtatttctttttgtagaaggattcgaccacct

SEQ ID NO: 46984 - DNA, 344 bp, Manihot esculenta
  Intron number 1 from transcript cassava4.1_004151m (locus cassava4.1_004151m.g) derived from phytozome v7.0 (chr-ID scaffold06158; pos 109893 to 110236 reverse strand)
accttactggataccctctgggagttaagcagaaggttctctttctcttttcttcactgcaattctgtctgctcaatcaattacaatatttgtactcatcttttgcaataataattgatgatttatgataattacatacttgcctcttcttttcccttttgtttcttattattacttagctagtttggtgtttgaattgcaagtttgctcttaaagccattagaaattttccaatgggtgcattagtttttagtgttgtgaaacgagttatgtcatctgatgccaaaatgacgttgatttgctattggtgctatttgaatcattataacaggtgattggtatta

SEQ ID NO: 46985 - DNA, 923 bp, Manihot esculenta
  Intron number 2 from transcript cassava4.1_004364m (locus cassava4.1_004364m.g) derived from phytozome v7.0 (chr-ID scaffold07478; pos 241753 to 242675 reverse strand)
ggtccctgctgcacttgttctaggtttgttttccggtttaatccacaattttaactcctttttatcaccagacttaatttgaagatcccaactccccttttttttctccaagaaaaattttacaaaaatttgaacttggtcttgaaaataaattcagcactatctcattggttaacttctagctgttttacatgcagccagcagctttacaagtttgatttaatttgcttttaactaaaaatatcatgggagacaattacataagcacggtgtctttcatgcaaagttaaaaagggaagatactgcatgctgattctcttttagggtttaacaaatgtttcccagaggaaaagagaaaagttaatatataattaacttttctatactaccacatgtcatgcacttgtaatctagtccaaaaatttgggcatttagtgaaaccaacttcatcattattttagtttgattgaattcatcttttcactgttttcgggtggaaagtaaggtggaggtggcgactggtgagaggagtagaaagtaaggtggaggtggcgactggtactgagagaatgggagaagggacacaaactgagtggaacccactagctataactcaagtccctgtgcactttctgatgatgataatcttgcgtccctgtctgggtcagagatgcaggtgaaccgggcaatctccaagatattgccatttcattatgcctaacatcttcctctgtccaattatatcgactccacttttgtgaattatgcgaaatggaagaatcataagtggggtcggaacctagtacagagccataattatgattagtttcggattattaatacttgatgattagttgtaatcaaagaattgagaaagacaaatgctaaatgctctatttttttttttttacaggtatcgaagt

SEQ ID NO: 46986 - DNA, 987 bp, Manihot esculenta
  Intron number 3 from transcript cassava4.1_024208m (locus cassava4.1_024208m.g) derived from phytozome v7.0 (chr-ID scaffold02658; pos 584582 to 585568)
ttgcacaactgaaggtactggagtattccgtcctaaactgatacagtcaactgctaatggcctttgtttctcatccattaggtgtttaaattccaaaaatgctgtcgttaaattatgtcaacaaagaaatgtgtgataccaatcagtggtttcagcttagtggcaccattactggagacttggttttcctgataggatgtcacttttcctgatatcaaaaagcaaatgttgcacttgatgaacacaaaaaagttgcatgtttaatgctttagagagcatggcagattcccatcagtaataatgaagcaagttaagtgatgcctacaactaattttttcacaaagtttgttttaccaaaattcccagcaactttgagcaatgagtgcaagactagtattgtccatttcagaaccagtgaagaagtgctataaataacatttatggtttcacataagacagtttgtttctgttggaacattcaacttcttttagcaagaacatgggcacttcatagctccctcttcccttgaaaagaattattgcccagccccttcagtaaacagctatagttgttcttataagttaaacttgtacttgttgatacacaagtaaattctctcttgtttgtgactaagttacatccagtgcatttttttcaactttagcggataaaaatggcatatgtgacaataaataggagatttccaatggtgcatacttacaccttttcatcgcttcactcactttcctgttatctacagaactgtagttttgtggtttcttgccacttgtggcaatagaaaattggattatactagctagcgcttctgatggaaacattcatgtttacaagtgctcttatcttatgaagatcttataaatgtattcttttaaaaaattggtttttgatcatgttgattttcatatctgaagtttacatgacctgacatatgtttacttggatacatgttgttgtaggtggaaaag

SEQ ID NO: 46987 - DNA, 620 bp, Manihot esculenta
  Intron number 6 from transcript cassava4.1_015675m (locus cassava4.1_015675m.g) derived from phytozome v7.0 (chr-ID scaffold02973; pos 141608 to 142227 reverse strand)
tggtaagcaagcatgctgttggaatggtgatcctgttgtagttttggtgtttatcttgttgctcccaactttgtttttctatcctgattgttattttttttgcttgaggtcctttttgatgttttatagtccaccttattcaacacaatcctttctattgataacagtaccgtggacaggtttcctactcaaagcaaagtttggtttctggtatatttttctttgtgtagaaagtcaacttggaagattattgcagcctactgcaatttaaagattcttgctgttaacttttccttgcattacatcccttaaagtgaatagggacatctattgatcatgaaagtaaacttaaatctgtgatatatgagtacatgttaatcatgaacaatattctcttttgagtgaagaaatttcccatgggtatggtgaaatgtgtttttggtggtaattgacgtctggcttcaattgaaacttcttcttcgtgcaatattttcctgtttgatctctagttctggacttctatggaagtgggatttaatgtaggattttacaaaaccatgcttagttgacgttttacaaattcaggtacctcttgtagcttcaaaccgcattgggaagga

SEQ ID NO: 46988 - DNA, 523 bp, Manihot esculenta
  Intron number 2 from transcript cassava4.1_015675m (locus cassava4.1_015675m.g) derived from phytozome v7.0 (chr-ID scaffold02973; pos 143031 to 143553 reverse strand)
agggccatcctacaattttgaggtaaaagtagcagatcatcattagattctgctaaaggtgcaaatttttacttgacaaggatctgtctaaaaaaaaacaaggtcagaatctgaccttagcatctgaatgaattggggtcggaatggcatgaaaattttggagtaaaaaaattgccaaccaagtaacataactcagaggcctgaaataattaaattttaagttgaaaattgcaacataatccaaaaggttgctgaaaaggaaaagcaaaaaattaaaaatacaaaaagcagaaaaatgacttttgaatgaccctaaagacagatatgaaaccaattttgtggatttgacaagaatgagctgagcttgaaactacctttatcctaacctacatcacccaattgccatgtttagcttctgattttccttgcaattcttttctattattgcctggggtgaatattgtattagatgcacagtagcttaagtttcacctcttttgttattaaacaactaatgtgcagg

SEQ ID NO: 46989 - DNA, 612 bp, Manihot esculenta
  Intron number 1 from transcript cassava4.1_010008m (locus cassava4.1_010008m.g) derived from phytozome v7.0 (chr-ID scaffold03537; pos 70978 to 71589)
gagttcatcaaagaaagctctttgagatctgcctggtactttttttcttttgtttccagtttatggaccccaattacaagattagctttttatttcacttgttcttttgttgttttatgtaatttatttctgtgtttctttttttttttaaattttcttttgggtattaattgctttgttgaagatgggttctttctgactacagcaatgcttggaattggttgtttgtcggtggcttttctttttggaattctgtttgcttgctgagaaaatgtgggataattatataaatggaagcatgggaaattttcacttctcatctatgtttgtgacctgagaatagttaaatcacttgcatactgtgctaggctgactggcctaagattggagcaaatcgatcctccacaattttcctagctttccaggaaatctagtgctgcctatgtgtactgttgcttcacaattaatgcttttcctttgtctagcaattggttataaagaactatgcttctttgatttagagtatttacaaaacttacatgatgttggaagttcaaatgaagttctaaatttgatttgttgaatttattgcttaaaagactgagatagggt

SEQ ID NO: 46990 - DNA, 381 bp, Manihot esculenta
  Intron number 1 from transcript cassava4.1_011319m (locus cassava4.1_011319m.g) derived from phytozome v7.0 (chr-ID scaffold00832; pos 44295 to 44675 reverse strand)
aagtcacggattcacctcatcctctcaattcccaagtaagaatatggttgctgttgctgatcactttaattgtaaaactattcctttatattcttttcttcttttttggtgaagtgatcttcttttcttcttgtaactggataaggtaggaaaataccaagcgacatggacttttgaatcgcttaatagatttagaattaggtttttctttttgtttatgtgaaatcatattcggtttgagagcgtgtaattcgaaaattagtatgtgcttttgaaatttagtcttgatcatgttatgaatactcaggggtgttgtacttacatggatcatctacttgttgatcgtactgtatgaagttccttgaccaaaagtctttagat

SEQ ID NO: 46991 - DNA, 602 bp, Manihot esculenta
  Intron number 1 from transcript cassava4.1_026695m (locus cassava4.1_026695m.g) derived from phytozome v7.0 (chr-ID scaffold00708; pos 163296 to 163897)
agagggtcgctggaactctctcgctcgctctgcaggtaactctaattattacttacttttatatctgctatttgttcatacccacatcccatgtcttgcaaaacagacaaacatccacttgccaacatgtctcaacttgttttgctcatgtttctttctttcacttctttgcaacttgtctccactttccgactaatggggttttatttccttagcacaacatcatatcaaaatcttctcttttcatcatccccttaaacacaacttttcattgagaaaaatcttggcttttgtcacgattgatgaggtcttttcagaatatgaacctgtaaagaaacaattccagtttcaatattgcgatattctaagagccgtacagctagtgcttagatattttaattagattaagggaaagaggattaacatctaaagacaactcaaatataaagtttatgcaaaggtaaggtacatcaactggaaacaaaagcataaacctaaatgctttccttttctcctccaattattgcttatgtaactttaccaaaacatggttgctatatgaatcaggcctcaaacgaaccggaaagagttgcagactaaga

SEQ ID NO: 46992 - DNA, 1042 bp, Manihot esculenta
  Intron number 1 from transcript cassava4.1_018603m (locus cassava4.1_018603m.g) derived from phytozome v7.0 (chr-ID scaffold06974; pos 28765 to 29806 reverse strand)
ccattttggcttatcaacaggtaatctcagctcaatatagtcaactgtagttttgggttatcttggtcagtattccacgtcatacaatatattcacttcaattgcaatgggaaatatgtgggtgcttctaacatttgttttgtacagttcaaatttctttccatttttccacatattgtagacgtcatcgtttattgtttcccctttttatccttaaaacaaaattgggattttcaagaatttaattagattgtccacatattacatttgtttttttttttctttgggggggggggggggggggagaataacttacgatgtctggtaattggggctatttaaatgagatagagaggagtagattctatatagatagagagtagtggatatagcaaagatggttctgtcgtttaattaatgcggttaggtgctgactaaaagcctgtttatactttattttgataatttcagtcacgtgtacaatgtattagtttttgcaaactataatatctccacctttttggtccagtcgaaacatgatatcctaagagccatacatacttgtgcttctttactcacttttcttgtattgagtatttctttgttcattgattcagccttcttcctcttttatacttatggactactgtagttctttttgctttctccacactggttgctagacttgggaaggtgctatatttggccatcaagcattggggaatttctgaatggaaaagtcttaacccgaaataccatagccctttctgatgctgagctagcacttcttgaatagtgattttgttatttttagtagaggattaccatcttagagttgcttgccttatagctttgccttggctagtggataatcatgacaactactatttttttttatcagcattgtccaattttgcatgttgtttgcataatttctctagtaattggtatcaacttttatttttagttgttattatattccttgtttattcatctgagcatccatctctggttctccaggcacttgatttgaagcctaact

SEQ ID NO: 46993 - DNA, 755 bp, Manihot esculenta
  Intron number 2 from transcript cassava4.1_013402m (locus cassava4.1_013337m.g) derived from phytozome v7.0 (chr-ID scaffold06782; pos 62550 to 63304)
ctcttccagattccggctctattcgaaggttaactttttcctccctttttaatcagcatagtgttttgttttcaatgataagttttttgtctttatttaattctaaattaacatattagggttatgttaattatatcagatattatttgttctggctatggagtgttgaaagacaaaatcttagagaaaatgaaggaaaatgagagaaccaaaaagaaagtgaaaaagaaataaaaaagatggtttgatttaaagctacctattgatccacctgctttgattaatatttgcaagtattatcatttggtttgatttgatctggaaaagtgaattttatagcaaatgaagcctgacccaaatagagcaaaaacagaattgaattggtttgaatcaaattctgctcacacctaggtttattggaaattctcatctaagctaggtagtagatcagaccattgatatcgcaaaatttttaattttaatcaaagcttatagtgaagtacaatacctttgatgctatgatgccatgtagaataaaactgaaatacctttgatgctatgatgccatgtagaatccatgagagattttcagcgcaaaaacttctctttgattctgtgatttttttttttcacattaatttatcttcactttggatgtgccatacatgacaaagcatgctagtgcctgttgaatgttggctttcatctctttaggtacagtcgcagataacattcgattcggaccacaattgagg

SEQ ID NO: 46994 - DNA, 1015 bp, Manihot esculenta
  Intron number 1 from transcript cassava4.1_008919m (locus cassava4.1_007822m.g) derived from phytozome v7.0 (chr-ID scaffold12211; pos 329509 to 330523 reverse strand)
atcttgctttcgctattcagattctgtttattcaggtgcgttttctgaaatttcccacttcgttattattccaagtattctgatttttgctctttgaacttcaaaagagcttcttatggtagtaattacttgcctttgatttttcttgagctaccgatagatagattgaattctttttcagcaattctagctattttcttatttatatcaagctttttggtctttctcttctatatctttcaacatatgcaagtataggttttttttttcttcataatccaatgccaggatctgggcttttgtgctggttacaaattaagctttagactttagatgttagtaaaaaagggtcatgaggtttgcttgattatggaggtaataagtttgagggtttgaaatggaggctcttgggcccttaaatagcttgtttattttgtcaaataggccacatggttagtgagcacatggttgtatcatcgtggttgaggaaatgttagttaataaagttgattaattttatgaggctgtgaatgagcaaagttctttgagtgtatgaattatggagagaagattcaaaggaggtcttatcttggcaatccttatcattttggtttctcagacctttacactatatcagggtatctttactttgtaacagaatacaatttcatgctatgtgacaaacaaaatgggttcgactgggtttattatataatttgtggtctcaaaagctatacactcgcttatttcatcatgttgcttactttcaatttgaatttccaccttggttttatagtgttttcttgttatgataaattcttcatctggacttttgtctaacttactgataacgataccctatttactcttctatatctcctgtattctttgctgaagttctctacctttttcatggaatattggcaactcaggacccaataaacaacacacaagttttaattgtcacgctgctgctcatattagttgtggatatacaggtacaactgtcaataga

SEQ ID NO: 46995 - DNA, 632 bp, Manihot esculenta
  Intron number 1 from transcript cassava4.1_007130m (locus cassava4.1_007130m.g) derived from phytozome v7.0 (chr-ID scaffold07520; pos 1533515 to 1534146 reverse strand)
caggcatctttacctgctccagcccgctctctcaggtacgatttaatctttacccttgcctctatcgaactcaatcgcctcagttctccctcgctcactgtatctactcttttgccccatcgattcctatgcgctctactgatttcggtcttctgattgtattttgatttctcttactgtttttgcatatttgaattgttacccacacccagtcagcatgtgggttacattttttgtccgagtctatatttaaatttgtactgttactttttattttttacatttcttaatcctgaataattgacttcactatgctatttcttgattgatttttgagcttatttgctttttgagtaaatttcttttctgttttttggttcaatttccagaaaaaagaataaaataaaaataaattggtttggatagctgtaattgggtttttaacgtattcttatagttctaatcgagtttgggacaggttaggacagtgaaaatgtgtagcggatttgggccatggtgccctacctgctgccatcattgttgttgactcttatattctgaatagaaaaggaaattagctttccttctcataagaattctttgaagcaggttgaagttaggacagtcaaaaa

SEQ ID NO: 46996 - DNA, 954 bp, Manihot esculenta
  Intron number 2 from transcript cassava4.1_016079m (locus cassava4.1_016079m.g) derived from phytozome v7.0 (chr-ID scaffold06683; pos 480415 to 481368 reverse strand)
gcaatttcaaggtaaatgcgagattgtgagtcgcatgtttctgttataattgctgcctttctgctttctcctattcatttattttaatgcattttgttgaaatcacatctaaagttttgatattagacacaagaatattttaattttagacttcaagcatggcaagtgcatgtccagtgtagtcctggctttgtttagtgtagtgccttgtgttagttcctagatgcgtgcattaaataatcctgctggacaaagccatctgattgtgttagcttttgattgaactataataggacctggacatggtgaatataggcttatggtatttactagtgcatttgtcctcgtatcatggagatgatttcttccatgtaattatagtttattctagagcttctatttgtaatcataaatcattttctatttcattgaatgaaggggacttagatgtaattttgagaaggtcctcataaatcagtttctatttgtaatcatagtaggtttaacacagttccatttctaaaagtttgattagagagggatttgaaagggctcatgtgaagctcaaaaaataggagtagaaagcccattgctcatgatctctgaagtgatttgataatggttcattttaagttaaagaaaacattgtaatgagaggagtatcctatccttgagcatgggtcctagctcgcatattggattctgttagaaggtttgaagcagtataagtctgatcttctagtcagacttttattagatacaattgtttttctattcattttccatgtttttgtctatatttccttgagtggttaccatgcgtttacctctctgtgggtcttaaatatttccaagatttcttcttatataattgtaactcgaaatgatattggtattgtttcatactttgtcgtctcagatttctgcatctgtcaatttggacgaggaaaagaa

SEQ ID NO: 46997 - DNA, 838 bp, Manihot esculenta
  Intron number 2 from transcript cassava4.1_014438m (locus cassava4.1_014438m.g) derived from phytozome v7.0 (chr-ID scaffold08159; pos 317477 to 318314)
gtggtgagtactcttgatctactgtttatttagtttggaatacagatctggctctttttagtcttgggatcagtttgttttttagttttctgctcctgatttaattacatggattttaatttttgaaaaattaaggctttttgactttttgtgagatagtgctgactttgatatctcatttattctaatcaattgtaattctttgggagaaaacacttcctttgttacctttttgttctcaactctcacgttggaaatgaagaaaatatcgtttaaagaatttacattttcaaagcaaagaccattgcagaatgcacatttctgtttctttgacatgctatttttctggaaaaattattcagtgcaaccattgaatgtacaatggttgatgttgatcattgataacggtggaacctactagccgttatacaatttctaatttttatgacgtaggttatacttcttgtaccgtttacctgtcttcacattctgatcaattaacacaagttgaggcatgatggatggtttcttacgatttagctctgtgtggcattaattcacattaattttacttttatcttttttatgcttttttcccaattcaatcacattctttcgatcttttatctggggaaaaactaatgctttttggttttaccataagacagttgtgaattaagaaagagatcttgatttgtcaatgaaaatgtggcagtataaatttacagtcttatgcctttccatctaagctattgttttatttatgcctttttacatgttgatgtggaattgtttatcccaatgcacctaattcttttgaaatctgttatagtgcgcc

SEQ ID NO: 46998 - DNA, 924 bp, Manihot esculenta
  Intron number 4 from transcript cassava4.1_016127m (locus cassava4.1_016127m.g) derived from phytozome v7.0 (chr-ID scaffold00325; pos 201185 to 202108)
gagaattcgatatactgagatagtgtaagtgttacaatttgataggttgatcaagtcggtggcattaattttctcagtaattccatttggccggtaaagctagggtatcaataactgtttcaaattacactgccaattcaagctgaagcaaatgtttccacattgaaccaaacactttgctgttcatgcttgtccttctttggtggatgctatatctgccattgcacctaacaatcattcttcttctcctcttcaacagtcagcagcattgaacttaattgttgtatgaagtgaacgacattgaacttaattgttaagtcagctgttgattttgtatttattttgtttatgcaactcaacgatgttgaaaatgttaatgtctgtcatttttctgtttgtggtaagttggagggttatgtcaacatattaaccaagttgtgcacgctgttccttggaaagtttgttattaacatgtaatcaatcaattgtttattagttatggaattgacagggtttgaatctcaataatttattactcttattattgatttgcatccaagtttgatatttgtagattctacagtcttttcgtttttggctcttttactttgggtatgcgcatcatatgtacgcgtagagagagagagagagagagagagtatggagtgtgccagtaaagatttatacggctcattttttgcaggattccaaatctgaaaacatatgttacctttttttttttctttttctgaatactgcatttattttcctgcttttagatgtggattacgggagaaactctttactcaaatgctttcattcttaatattttagcattataggatcttcctcatctatcttgcttagatgttctgcaagttcatttcttggcctaagttgtgttctattttgtgtcacaggcat

SEQ ID NO: 46999 - DNA, 602 bp, Manihot esculenta
  Intron number 3 from transcript cassava4.1_008143m (locus cassava4.1_008143m.g) derived from phytozome v7.0 (chr-ID scaffold04796; pos 498321 to 498922 reverse strand)
cattgtggactccggatttgaacatccttctgaaggcaagccaatgactcttttctattgttgagaaattgcaatttttgtgctcactaatgtgaacatatgttgtataatttaactatttttttttaaaaattgttaaaagtttcaaacacttgtgtcatttgggtggcatgcttaacttttgagttattatgagttatttcattttatgtttgagacctataaaattatggatttcatgtcccaatcattctcaaattttagagtattttaataatatttttatatttgttttgatgaagttgttttgtttgaaaatgctgatttcatatcgtctcatgattgttcattggatttcttttaatactactgttgtgtaactgtcgttttaaacctcttctttacttctaaagcatgttgccctttactttccaggtaatataccactatcacacttttgattttggagcagtattatggtttagtaaacctttcaagtaaaggatcagggaggttttcttgtactcaccaagggttccttggatacaattctgtttggttcatcagttcagcacgagtgtatcccccaagccatcttggga

SEQ ID NO: 47000 - DNA, 742 bp, Manihot esculenta
  Intron number 2 from transcript cassava4.1_016404m (locus cassava4.1_016404m.g) derived from phytozome v7.0 (chr-ID scaffold05772; pos 16830 to 17571 reverse strand)
cccactggttcactaaggccaccctccagaggtaacccttttcgacggattcctcttttcttctgtgccattgattctttatgtgtcaatttctcagttccattgctgcaaattggttcggtgaaccaaatgggaaattctcgaattgcatcaagtgcgattgcacatcaccagatttgatagaaaataaaaaaatgaaaggctaacgagttactgattaatttacttgcacaagggccatgaatttcttctccttatttttcaaataaaaattgattttgttgtcggttgtctaattggagatcttgattttcaactgatctttgggctaaatatatatttagcctgccattactagttgacatcagcgatatggaattcgccaaattgggaaagattttgcattaattgtatacactaaattagtgctttcattaattcagtcctatggtattaaatttcactgaaatacttgtcttgaaataaaaacaaagaattagaattagtaatttgatctattcttaattcatctgcaaagttgtcagttgtctgaaatggctcctgcagtaatgtagaaaatgaaacaggaaaaataaatgggcatttagtttaggattgtaatagacatcttctagctaattaatctatgtggttttatcattttgatattgtcatctcagaaatgagcattcttcttgtaatcacagtttcgtaagatttgttagcacgccagaagttcttg

SEQ ID NO: 47001 - DNA, 932 bp, Manihot esculenta
  Intron number 6 from transcript cassava4.1_015674m (locus cassava4.1_015674m.g) derived from phytozome v7.0 (chr-ID scaffold04043; pos 1366556 to 1367487 reverse strand)
ctagagaaagggatcgaaggactctcctacgtgctgtaagcttcttgggctaatgcccatatgcaattgaacgtataggtttaactttctctgtttagggaataacaaccttttaattgtctgttgctttgtttctttgaataaatttcataaatgggaaaaggcttgttggaaaggaagtcatcagaagacagtttctttctgtaggatagaactctttgtttatctcacttatttttgtatgtaacttgaacaatttaaacttaatgagtttatctaactccatctgaaattgttttataagaacacaaataaatacaatgtaatgagttaatagaaattgaaaagaaatgtgcatctatgtggaatgcatactaaacgttttatatggcatgagatttgattgacctacttcttacagttgccatcaacttgaattcttatagaaatggtcaagtagatataaattctaatgtttgaaatagtaatggccaagttggtaggatacgtttcttattcagctactacccttgtcactttggtcctgctcctatgacagctcttctaggtttctacttgtcctgtggcctgtgggaagttctaatgttgtacgaacagtgatgtaaaataatcaatttgcttcagagcactttataattattgatatttttcctattaatccttcatcatttagtttcacactaagatatgtcttcttttgtttattcttattgtgctagatcagtttatctgcatgtatattcttatagcaaatactgaatatatatagaagcttctgtaataaactgaaattttggattccttgtgatttttgcctgaaagtgcttttgcagcatttgtactttcccttcagtattccttgggctttcatttataacattgcttagtgttgatcctgtttattgcatcag

SEQ ID NO: 47002 - DNA, 647 bp, Manihot esculenta
  Intron number 1 from transcript cassava4.1_033811m (locus cassava4.1_033811m.g) derived from phytozome v7.0 (chr-ID scaffold04457; pos 758184 to 758830)
tcttaagcaaaggctagttacagagtggacccaaggttacttatctagatcatttatgttcttttcacttgttccaaataagcatagtgattgttacactttccaattgctttttaactgctgaaggttacagtgtgaaatgtgttggcttgtattttattgtttttgttgtgtttttagccaccaacctattataatttctcaaatggaggttggtactttctgtgattttcagacttctcttatagaagtttccttttgaaaaaaattatatatttttcaattgaacacggccagtttggagctttgttcttatttttccaggaaccaggaatgcattctatattgccataaacatttggtccatcttttagcaattgacttgtgagagggaatggccaatgacttgattgcattggcggcaatttttattagtgttatgctattgactgatcttgctgtatgtttctagtcacaaatttagctgctttatgttgcaaatcaaactttggcattcaggtatatactctatagtctattccctttttgtgtctcttttttgtttttttttctggataaggtccctttctgtgtctgtaatgatgcctttgggtttacaggtaaaacagtattacccaagtcagtaa

SEQ ID NO: 47003 - DNA, 954 bp, Manihot esculenta
  Intron number 1 from transcript cassava4.1_001015m (locus cassava4.1_001015m.g) derived from phytozome v7.0 (chr-ID scaffold02903; pos 103058 to 104011)
aaggtgagttatcagtggatcattttgtgatttatttatgtctgcttagattttttgaaatgatggataaatgttgtgtaattggttatcttttgtcattgtgtttaagattttagttttttctccctatttttttgaaattgagaaagtttaatgggttgtatgggctttttctttgtttcaaaatttctatgatttcaattttccagttggtgataatttctgttctccggagggttggttagctttgaattagtgtaaaagttgtgatcgacattctgttttgccttggcttgacatgggaatgataatcatctacctctgtattcccttcccttttcctctcgggcggaggcggggaactgatataaattccattttgctgttgagatatgaatttacatttgtgtatgatggctagtctggtaaacttaatcacatctaaagtagagaagaattctattttgttgttttagtgtctgttcaacttctttcgactcatacaatgagtaatgtgttatgaatttagttttataaagctcattcttcgaattttgaatgatactattattgtttctatttcgcattcaaccatttttttggcacaatatattgctttttctttttcttttctttttctttttttttttgtgtgcaaagaacgtccatgtgctttacttgattgtctcatttttggtgctggaagaatataagtcggtttcctgactgatgttcggtgaaagttatataaattgaagtgggcccaaagtcttgtgcttttatgaggaagttctttctggatgaaaaatcgaccagttagtgatgctattggtttcacagttctaggataagagagattaggccacaggttgatatggttgtcgtatgtgtgttaatgaattaatattattttcttagattggtgtaccctttttttccccctttttgcagttg

SEQ ID NO: 47004 - DNA, 478 bp, Manihot esculenta
  Intron number 2 from transcript cassava4.1_015738m (locus cassava4.1_015738m.g) derived from phytozome v7.0 (chr-ID scaffold03268; pos 122896 to 123373)
gaggcactggtaaattcctccttttcttcacctctttttctttagttgttgttgttgttttattttattttatttttataatttggttttgctgtggaattttgttttggactttttaattgatatgtttagctagagttttaagtagcatttgtctcttgatattttgttttgatatttcagcaaggatgtaatgtggtattatttgttgtacttatgagcgattaatgtgtacagctttgctcatgtggattgttgtttttttttggttcattgaaaatgttaatggcagataggcgtggtggattattttttattatctagtgatctgggataaatgatgcatgcaagagtatcccattttgatgtattttaaaactgtatgtgcttagaagagatatgtgaacattcggattgcattaattgttttgagattgctgcaggaaagactacgtttgtgaagaggcatctgaccggg

SEQ ID NO: 47005 - DNA, 928 bp, Manihot esculenta
  Intron number 2 from transcript cassava4.1_031256m (locus cassava4.1_031256m.g) derived from phytozome v7.0 (chr-ID scaffold06484; pos 16961 to 17888)
tagacattaatctggggtaatattcttaaccaattatctctaatacttctcatattcattaaatcaggttacctttttttttcgctggaaatatagatagtgtactttgatgacattgtgctgtaaccgtattttaatacaagttttaggtttagtttttctttctctgattcttatggaaaatatttggttagagtagggatcttattcttgctttgcacaatacattgcagcagaatgaaattttactgtttcttaggatgggcaaattattcttgtttatgcatggattaagagatctattgtaaacttcaataaggttgtactagaaggaatctcattaagctccaaaattttttgaatcaaattaactcatgccccaaaatattatgagcactgaaataatgaagattttgttgttcttgtggatgactgaaagagctttaatgcagcattaaaagggcatagagtacactgtacgtatccttttgagaaactttaacaacaattagtaagccttaatcccaaactacttggagttggctattatctctattagtggcagcagttgatgatattaatgaaattatggtgtaggggtggggatcatggtagtaaaagtagcaattagcaatgattttagcgatacctctggttatggtagtgcggcgcataacaggcacggtatcttggtggtggttgatactgatggcaatgatggtgggtcaaaaatttgaacctgccattatctttctcattgaaaagaataattttatcatacttgaattgatgaaatataacataaattccaactgtcaagcatgtatccatggtctgcaactgtggactgaaaccttttgcataaattgtaattggctcgaatggcatctatacaggtgtcctcagcggatagccagacgggggaact
